United States Patent Application Publication US 2024/0327476 A1 - sequence listing, part 35

SEQ ID NO: 51301 - protein, 1326 aa, Homo sapiens
MTEESSDVPRELIESIKDVIGRKIKISVKKKVKLEVKGDKVENKVLVLTSCRAFLVTARIPTKLELTFSYLEIHGVVCSKSAQMIVETEKCSISMKMASPEDVSEVLAHIGTCLRKIFPGLSPVRIMKKVSMEPSERLASLQALWDSQTVAEQGPCGGFSQMYACVCDWLGFSYREEVQWDVDTIYLTQDTRELNLQDFSHLDHRDLIPIIAALEYNQWFTKLSSKDLKLSTDVCEQILRVVSRSNRLEELVLENAGLRTDFAQKLASALAHNPNSGLHTINLAGNPLEDRGVSSLSIQFAKLPKGLKHLNLSKTSLSPKGVNSLSQSLSANPLTASTLVHLDLSGNVLRGDDLSHMYNFLAQPNAIVHLDLSNTECSLDMVCGALLRGCLQYLAVLNLSRTVFSHRKGKEVPPSFKQFFSSSLALMHINLSGTKLSPEPLKALLLGLACNHNLKGVSLDLSNCELRSGGAQVLEGCIAEIHNITSLDISDNGLESDLSTLIVWLSKNRSIQHLALGKNFNNMKSKNLTPVLDNLVQMIQDEESPLQSLSLADSKLKTEVTIIINALGSNTSLTKVDISGNGMGDMGAKMLAKALQINTKLRTVIWDKNNITAQGFQDIAVAMEKNYTLRFMPIPMYDASQALKTNPEKTEDALQKIENYLLRNHETRKYLQEQAYRLQQGIVTSTTQQMIDRICVKVQDHLNSLRNCGGDAIQEDLKSAERLMRDAKNSKTLLPNLYHVGGASWAGASGLLSSPIQETLESMAGEVTRVVDEQLKALLESMVDAAENLCPNVMKKAHIRQDLIHASTEKISIPRTFVKNVLLEQSGIDILNKISEVKLTVASFLSDRIVDEILDALSHCHHKLADHFSRRGKTLPQQESLEIELAEEKPVKRSIITVEELTEIERLEDLDTCMMTPKSKRKSIHSRMLRPVSRAFEMEFDLDKALEEVPIHIEDPPFPSLRQEKRSSGFISELPSEEGKKLEHFTKLRPKRNKKQQPTQAAVCAANIVSQDGEQNGLMGRVDEGVDEFFTKKVTKMDSKKWSTRGSESHELNEGGDEKKKRDSRKSSGFLNLIKSRSKSERPPTILMTEEPSSPKGAVRSPPVDCPRKDTKAAEHNGNSERIEEIKTPDSFEESQGEEIGKVERSDSKSSPQAGRRYGVQVMGSGLLAEMKAKQENRFGLGTPEKNTKAEPKAEAGSRSRSSSSTPTSPKPLLQSPKPSLAARPVIPQKPRTASRPDDIPDSPSSPKVALLPPVLKKVPSDKERDGQSSPQPSPRTFSQEVSRRSWGQQAQEYQEQKQRSSSKDGHQGSKSNDSGEEAEKEFIFV

SEQ ID NO: 51302 - protein, 371 aa, Homo sapiens
MGHKVVVFDISVIRALWETRVKKHKAWQKKEVERLEKSALEKIKEEWNFVAECRRKGIPQAVYCKNGFIDTSVRLLDKIERNTLTRQSSLPKDRGKRSSAFVFELSGEHWTELPDSLKEQTHLREWYISNTLIQIIPTYIQLFQAMRILDLPKNQISHLPAEIGCLKNLKELNVGFNYLKSIPPELGDCENLERLDCSGNLELMELPFELSNLKQVTFVDISANKFSSVPICVLRMSNLQWLDISSNNLTDLPQDIDRLEELQSFLLYKNKLTYLPYSMLNLKKLTLLVVSGDHLVELPTALCDSSTPLKFVSLMDNPIDNAQCEDGNEIMESERDRQHFDKEVMKAYIEDLKERESVPSYTTKVSFSLQL

SEQ ID NO: 51303 - protein, 371 aa, Homo sapiens; identical to SEQ ID NO: 51302

SEQ ID NO: 51304 - protein, 305 aa, Homo sapiens
MGGTLAWTLLLPLLLRESDSLEPSCTVSSADVDWNAEFSATCLNFSGLSLSLPHNQSLRASNVILLDLSGNGLRELPVTFFAHLQKLEVLNVLRNPLSRVDGALAARCDLDLQADCNCALESWHDIRRDNCSGQKPLLCWDTTSSQHNLSAFLEVSCAPGLASATIGAVVVSGCLLLGLAIAGPVLAWRLWRCRVARSRELNKPWAAQDGPKPGLGLQPRYGSRSAPKPQVAVPSCPSTPDYENMFVGQPAAEHQWDEQGAHPSEDNDFYINYKDIDLASQPVYCNLQSLGQAPMDEEEYVIPGH

SEQ ID NO: 51305 - protein, 334 aa, Homo sapiens
MRGPSWSRPRPLLLLLLLLSPWPVWAQVSATASPSGSLGAPDCPEVCTCVPGGLASCSALSLPAVPPGLSLRLRALLLDHNRVRALPPGAFAGAGALQRLDLRENGLHSVHVRAFWGLGALQLLDLSANQLEALAPGTFAPLRALRNLSLAGNRLARLEPAALGALPLLRSLSLQDNELAALAPGLLGRLPALDALHLRGNPWGCGCALRPLCAWLRRHPLPASEAETVLCVWPGRLTLSPLTAFSDAAFSHCAQPLALRDLAVVYTLGPASFLVSLASCLALGSGLTACRARRRRLRTAALRPPRPPDPNPDPDPHGCASPADPGSPAAAAQA

SEQ ID NO: 51306 - protein, 640 aa, Homo sapiens
MLNKMTLHPQQIMIGPRFNRALFDPLLVVLLALQLLVVAGLVRAQTCPSVCSCSNQFSKVICVRKNLREVPDGISTNTRLLNLHENQIQIIKVNSFKHLRHLEILQLSRNHIRTIEIGAFNGLANLNTLELFDNRLTTIPNGAFVYLSKLKELWLRNNPIESIPSYAFNRIPSLRRLDLGELKRLSYISEGAFEGLSNLRYLNLAMCNLREIPNLTPLIKLDELDLSGNHLSAIRPGSFQGLMHLQKLWMIQSQIQVIERNAFDNLQSLVEINLAHNNLTLLPHDLFTPLHHLERIHLHHNPWNCNCDILWLSWWIKDMAPSNTACCARCNTPPNLKGRYIGELDQNYFTCYAPVIVEPPADLNVTEGMAAELKCRASTSLTSVSWITPNGTVMTHGAYKVRIAVLSDGTLNFTNVTVQDTGMYTCMVSNSVGNTTASATLNVTAATTTPFSYFSTVTVETMEPSQDEARTTDNNVGPTPVVDWETTNVTTSLTPQSTRSTEKTFTIPVTDINSGIPGIDEVMKTTKIIIGCFVAITLMAAVMLVIFYKMRKQHHRQNHHAPTRTVEIINVDDEITGDTPMESHLPMPAIEHEHLNHYNSYKSPFNHTTTVNTINSIHSSVHEPLLIRMNSKDNVQETQI

SEQ ID NO: 51307 - protein, 640 aa, Homo sapiens; identical to SEQ ID NO: 51306

SEQ ID NO: 51308 - protein, 640 aa, Homo sapiens; identical to SEQ ID NO: 51306

SEQ ID NO: 51309 - protein, 640 aa, Homo sapiens; identical to SEQ ID NO: 51306

SEQ ID NO: 51310 - protein, 41 aa, Homo sapiens
MLNKMTLHPQQIMIGPRFNRALFDPLLVVLLALQLLVVAGL

SEQ ID NO: 51311 - protein, 1537 aa, Homo sapiens
MTTKRKIIGRLVPCRCFRGEEEIISVLDYSHCSLQQVPKEVFNFERTLEELYLDANQIEELPKQLFNCQALRKLSIPDNDLSNLPTTIASLVNLKELDISKNGVQEFPENIKCCKCLTIIEASVNPISKLPDGFTQLLNLTQLYLNDAFLEFLPANFGRLVKLRILELRENHLKTLPKSMHKLAQLERLDLGNNEFGELPEVLDQIQNLRELWMDNNALQVLPGSIGKLKMLVYLDMSKNRIETVDMDISGCEALEDLLLSSNMLQQLPDSIGLLKKLTTLKVDDNQLTMLPNTIGNLSLLEEFDCSCNELESLPSTIGYLHSLRTLAVDENFLPELPREIGSCKNVTVMSLRSNKLEFLPEEIGQMQKLRVLNLSDNRLKNLPFSFTKLKELAALWLSDNQSKALIPLQTEAHPETKQRVLTNYMFPQQPRGDEDFQSDSDSFNPTLWEEQRQQRMTVAFEFEDKKEDDENAGKVKDLSCQAPWERGQRGITLQPARLSGDCCTPWARCDQQIQDMPVPQNDPQLAWGCISGLQQERSMCTPLPVAAQSTTLPSLSGRQVEINLKRYPTPYPEDLKNMVKSVQNLVGKPSHGVRVENSNPTANTEQTVKEKYEHKWPVAPKEITVEDSFVHPANEMRIGELHPSLAETPLYPPKLVLLGKDKKESTDESEVDKTHCLNNSVSSGTYSDYSPSQASSGSSNTRVKVGSLQTTAKDAVHNSLWGNRIAPSFPQPLDSKPLLSQREAVPPGNIPQRPDRLPMSDTFTDNWTDGSHYDNTGFVAEETTAENANSNPLLSSKSRSTSSHGRRPLIRQDRIVGVPLELEQSTHRHTPETEVPPSNPWQNWTRTPSPFEDRTAFPSKLETTPTTSPLPERKEHIKESTEIPSPFSPGVPWEYHDSNPNRSLSNVFSQIHCRPESSKGVISISKSTERLSPLMKDIKSNKFKKSQSIDEIDIGTYKVYNIPLENYASGSDHLGSHERPDKMLGPEHGMSSMSRSQSVPMLDDEMLTYGSSKGPQQQKASMTKKVYQFDQSFNPQGSVEVKAEKRIPPPFQHNPEYVQQASKNIAKDLISPRAYRGYPPMEQMFSFSQPSVNEDAVVNAQFASQGARAGFLRRADSLVSATEMAMFRRVNEPHELPPTDRYGRPPYRGGLDRQSSVTVTESQFLKRNGRYEDEHPSYQEVKAQAGSFPVKNLTQRRPLSARSYSTESYGASQTRPVSARPTMAALLEKIPSDYNLGNYGDKPSDNSDLKTRPTPVKGEESCGKMPADWRQQLLRHIEARRLDRNAAYKHNTVNLGMLPYGGISAMHAGRSMTLNLQTKSKFDHQELPLQKTPSQQSNILDNGQEDVSPSGQWNPYPLGRRDVPPDTITKKAGSHIQTLMGSQSLQHRSREQQPYEGNINKVTIQQFQSPLPIQIPSSQATRGPQPGRCLIQTKGQRSMDGYPEQFCVRIEKNPGLGFSISGGISGQGNPFKPSDKGIFVTRVQPDGPASNLLQPGDKILQANGHSFVHMEHEKAVLLLKSFQNTVDLVIQRELTV

SEQ ID NO: 51312 - protein, 1495 aa, Homo sapiens
MQCLEMTTKRKIIGRLVPCRCFRGEEEIISVLDYSHCSLQQVPKEVFNFERTLEELYLDANQIEELPKQLFNCQALRKLSIPDNDLSNLPTTIASLVNLKELDISKNGVQEFPENIKCCKCLTIIEASVNPISKLPDGFTQLLNLTQLYLNDAFLEFLPANFGRLVKLRILELRENHLKTLPKSMHKLAQLERLDLGNNEFGELPEVLDQIQNLRELWMDNNALQVLPGSIGKLKMLVYLDMSKNRIETVDMDISGCEALEDLLLSSNMLQQLPDSIGLLKKLTTLKVDDNQLTMLPNTIGNLSLLEEFDCSCNELESLPSTIGYLHSLRTLAVDENFLPELPREIGSCKNVTVMSLRSNKLEFLPEEIGQMQKLRVLNLSDNRLKNLPFSFTKLKELAALWLSDNQSKALIPLQTEAHPETKQRVLTNYMFPQQPRGDEDFQSDSDSFNPTLWEEQRQQRMTVAFEFEDKKEDDENAGKVKDLSCQAPWERGQRGITLQPARLSGDCCTPWARCDQQIQDMPVPQNDPQLAWGCISGLQQERSMCTPLPVAAQSTTLPSLSGRQVEINLKRYPTPYPEDLKNMVKSVQNLVGKPSHGVRVENSNPTANTEQTVKEKYEHKWPVAPKEITVEDSFVHPANEMRIGELHPSLAETPLYPPKLVLLGKDKKESTDESEVDKTHCLNNSVSSGTYSDYSPSQASSGSSNTRVKVGSLQTTAKDAVHNSLWGNRIAPSFPQPLDSKPLLSQREAVPPGNIPQRPDRLPMSDTFTDNWTDGSHYDNTGFVAEETTAENANSNPLLSSKSRSTSSHGRRPLIRQDRIVGVPLELEQSTHRHTPETEVPPSNPWQNWTRTPSPFEDRTAFPSKLETTPTTSPLPERKEHIKESTEIPSPFSPGVPWEYHDSNPNRSLSNVFSQIHCRPESSKGVISISKSTERLSPLMKDIKSNKFKKSQSIDEIDIGTYKVYNIPLENYASGSDHLGSHERPDKMLGPEHGMSSMSRSQSVPMLDDEMLTYGSSKGPQQQKASMTKKVYQFDQSFNPQGSVEVKAEKRIPPPFQHNPEYVQQASKNIAKDLISPRAYRGYPPMEQMFSFSQPSVNEDAVVNAQFASQGARAGFLRRADSLVSATEMAMFRRVNEPHELPPTDRYGRPPYRGGLDRQSSVTVTESQFLKRNGRYEDEHPSYQEVKAQAGSFPVKNLTQRRPLSARSYSTESYGASQTRPVSARPTMAALLEKIPSDYNLGNYGDKPSDNSDLKTRPTPVKGEESCGKMPADWRQQLLRHIEARRLDRTPSQQSNILDNGQEDVSPSGQWNPYPLGRRDVPPDTITKKAGSHIQTLMGSQSLQHRSREQQPYEGNINKVTIQQFQSPLPIQIPSSQATRGPQPGRCLIQTKGQRSMDGYPEQFCVRIEKNPGLGFSISGGISGQGNPFKPSDKGIFVTRVQPDGPASNLLQPGDKILQANGHSFVHMEHEKAVLLLKSFQNTVDLVIQRELTV

SEQ ID NO: 51313 - protein, 179 aa, Homo sapiens
MTTKRKIIGRLVPCRCFRGEEEIISVLDYSHCSLQQVPKEVFNFERTLEELYLDANQIEELPKQLFNCQALRKLSIPDNDLSNLPTTIASLVNLKELDISKNGVQEFPENIKCCKCLTIIEASVNPISKLPDGFTQLLNLTQLYLNDAFLEFLPANFGRLVKLRILELRENHLKTLPKI

SEQ ID NO: 51314 - protein, 1313 aa, Homo sapiens
RSMHKLAQLERLDLGNNEFGELPEVLDQIQNLRELWMDNNALQVLPGSIGKLKMLVYLDMSKNRIETVDMDISGCEALEDLLLSSNMLQQLPDSIGLLKKLTTLKVDDNQLTMLPNTIGNLSLLEEFDCSCNELESLPSTIGYLHSLRTLAVDENFLPELPREIGSCKNVTVMSLRSNKLEFLPEEIGQMQKLRVLNLSDNRLKNLPFSFTKLKELAALWLSDNQSKALIPLQTEAHPETKQRVLTNYMFPQQPRGDEDFQSDSDSFNPTLWEEQRQQRMTVAFEFEDKKEDDENAGKVKDLSCQAPWERGQRGITLQPARLSGDCCTPWARCDQQIQDMPVPQNDPQLAWGCISGLQQERSMCTPLPVAAQSTTLPSLSGRQVEINLKRYPTPYPEDLKNMVKSVQNLVGKPSHGVRVENSNPTANTEQTVKEKYEHKWPVAPKEITVEDSFVHPANEMRIGELHPSLAETPLYPPKLVLLGKDKKESTDESEVDKTHCLNNSVSSGTYSDYSPSQASSGSSNTRVKVGSLQTTAKDAVHNSLWGNRIAPSFPQPLDSKPLLSQREAVPPGNIPQRPDRLPMSDTFTDNWTDGSHYDNTGFVAEETTAENANSNPLLSSKSRSTSSHGRRPLIRQDRIVGVPLELEQSTHRHTPETEVPPSNPWQNWTRTPSPFEDRTAFPSKLETTPTTSPLPERKEHIKESTEIPSPFSPGVPWEYHDSNPNRSLSNVFSQIHCRPESSKGVISISKSTERLSPLMKDIKSNKFKKSQSIDEIDIGTYKVYNIPLENYASGSDHLGSHERPDKMLGPEHGMSSMSRSQSVPMLDDEMLTYGSSKGPQQQKASMTKKVYQFDQSFNPQGSVEVKAEKRIPPPFQHNPEYVQQASKNIAKDLISPRAYRGYPPMEQMFSFSQPSVNEDAVVNAQFASQGARAGFLRRADSLVSATEMAMFRRVNEPHELPPTDRYGRPPYRGGLDRQSSVTVTESQFLKRNGRYEDEHPSYQEVKAQAGSFPVKNLTQRRPLSARSYSTESYGASQTRPVSARPTMAALLEKIPSDYNLGNYGDKPSDNSDLKTRPTPVKGEESCGKMPADWRQQLLRHIEARRLDRTPSQQSNILDNGQEDVSPSGQWNPYPLGRRDVPPDTITKKAGSHIQTLMGSQSLQHRSREQQPYEGNINKVTIQQFQSPLPIQIPSSQATRGPQPGRCLIQTKGQRSMDGYPEQFCVRIEKNPGLGFSISGGISGQGNPFKPSDKGIFVTRVQPDGPASNLLQPGDKILQANGHSFVHMEHEKAVLLLKSFQNTVDLVIQRELTV

SEQ ID NO: 51315 - protein, 217 aa, Homo sapiens
MMENLIRGRNPPQYQRSPCKEVRAALRKRPEEELQCLEMTTKRKIIGRLVPCRCFRGEEEIISVLDYSHCSLQQVPKEVFNFERTLEELYLDANQIEELPKQLFNCQALRKLSIPDNDLSNLPTTIASLVNLKELDISKNGVQEFPENIKCCKCLTIIEASVNPISKLPDGFTQLLNLTQLYLNDAFLEFLPANFGRLVKLRILELRENHLKTLPNI

SEQ ID NO: 51316 - protein, 821 aa, Homo sapiens
MTKMLGKLRIAPSFPQPLDSKPLLSQREAVPPGNIPQRPDRLPMSDTFTDNWTDGSHYDNTGFVAEETTAENANSNPLLSSKSRSTSSHGRRPLIRQDRIVGVPLELEQSTHRHTPETEVPPSNPWQNWTRTPSPFEDRTAFPSKLETTPTTSPLPERKEHIKESTEIPSPFSPGVPWEYHDSNPNRSLSNVFSQIHCRPESSKGVISISKSTERLSPLMKDIKSNKFKKSQSIDEIDIGTYKVYNIPLENYASGSDHLGSHERPDKMLGPEHGMSSMSRSQSVPMLDDEMLTYGSSKGPQQQKASMTKKVYQFDQSFNPQGSVEVKAEKRIPPPFQHNPEYVQQASKNIAKDLISPRAYRGYPPMEQMFSFSQPSVNEDAVVNAQFASQGARAGFLRRADSLVSATEMAMFRRVNEPHELPPTDRYGRPPYRGGLDRQSSVTVTESQFLKRNGRYEDEHPSYQEVKAQAGSFPVKNLTQRRPLSARSYSTESYGASQTRPVSARPTMAALLEKIPSDYNLGNYGDKPSDNSDLKTRPTPVKGEESCGKMPADWRQQLLRHIEARRLDRNAAYKHNTVNLGMLPYGGISAMHAGRSMTLNLQTKSKFDHQELPLQKTPSQQSNILDNGQEDVSPSGQWNPYPLGRRDVPPDTITKKAGSHIQTLMGSQSLQHRSREQQPYEGNINKVTIQQFQSPLPIQIPSSQATRGPQPGRCLIQTKGQRSMDGYPEQFCVRIEKNPGLGFSISGGISGQGNPFKPSDKGIFVTRVQPDGPASNLLQPGDKILQANGHSFVHMEHEKAVLLLKSFQNTVDLVIQRELTV

SEQ ID NO: 51317 - protein, 810 aa, Homo sapiens
MIPVTELRYFADTQPAYRILKPWWDVFTDYISIVMLMIAVFGGTLQVTQDKMICLPCKWVTKDSCNDSFRGWAAPGPEPTYPNSTILPTPDTGPTGIKYDLDRHQYNYVDAVCYENRLHWFAKYFPYLVLLHTLIFLACSNFWFKFPRTSSKLEHFVSILLKCFDSPWTTRALSETVVEESDPKPAFSKMNGSMDKKSSTVSEDVEATVPMLQRTKSRIEQGIVDRSETGVLDKKEGEQAKALFEKVKKFRTHVEEGDIVYRLYMRQTIIKVIKFILIICYTVYYVHNIKFDVDCTVDIESLTGYRTYRCAHPLATLFKILASFYISLVIFYGLICMYTLWWMLRRSLKKYSFESIREESSYSDIPDVKNDFAFMLHLIDQYDPLYSKRFAVFLSEVSENKLRQLNLNNEWTLDKLRQRLTKNAQDKLELHLFMLSGIPDTVFDLVELEVLKLELIPDVTIPPSIAQLTGLKELWLYHTAAKIEAPALAFLRENLRALHIKFTDIKEIPLWIYSLKTLEELHLTGNLSAENNRYIVIDGLRELKRLKVLRLKSNLSKLPQVVTDVGVHLQKLSINNEGTKLIVLNSLKKMANLTELELIRCDLERIPHSIFSLHNLQEIDLKDNNLKTIEEIISFQHLHRLTCLKLWYNHIAYIPIQIGNLTNLERLYLNRNKIEKIPTQLFYCRKLRYLDLSHNNLTFLPADIGLLQNLQNLAITANRIETLPPELFQCRKLRALHLGNNVLQSLPSRVGELTNLTQIELRGNRLECLPVELGECPLLKRSGLVVEEDLFNTLPPEVKERLWRADKEQA

SEQ ID NO: 51318 - protein, 810 aa, Homo sapiens; identical to SEQ ID NO: 51317

SEQ ID NO: 51319 - protein, 810 aa, Homo sapiens; identical to SEQ ID NO: 51317

SEQ ID NO: 51320 - protein, 803 aa, Homo sapiens
MITLTELKCLADAQSSYHILKPWWDVFWYYITLIMLLVAVLAGALQLTQSRVLCCLPCKVEFDNHCAVPWDILKASMNTSSNPGTPLPLPLRIQNDLHRQQYSYIDAVCYEKQLHWFAKFFPYLVLLHTLIFAACSNFWLHYPSTSSRLEHFVAILHKCFDSPWTTRALSETVAEQSVRPLKLSKSKILLSSSGCSADIDSGKQSLPYPQPGLESAGIESPTSSVLDKKEGEQAKAIFEKVKRFRMHVEQKDIIYRVYLKQIIVKVILFVLIITYVPYFLTHITLEIDCSVDVQAFTGYKRYQCVYSLAEIFKVLASFYVILVILYGLTSSYSLWWMLRSSLKQYSFEALREKSNYSDIPDVKNDFAFILHLADQYDPLYSKRFSIFLSEVSENKLKQINLNNEWTVEKLKSKLVKNAQDKIELHLFMLNGLPDNVFELTEMEVLSLELIPEVKLPSAVSQLVNLKELRVYHSSLVVDHPALAFLEENLKILRLKFTEMGKIPRWVFHLKNLKELYLSGCVLPEQLSTMQLEGFQDLKNLRTLYLKSSLSRIPQVVTDLLPSLQKLSLDNEGSKLVVLNNLKKMVNLKSLELISCDLERIPHSIFSLNNLHELDLRENNLKTVEEIISFQHLQNLSCLKLWHNNIAYIPAQIGALSNLEQLSLDHNNIENLPLQLFLCTKLHYLDLSYNHLTFIPEEIQYLSNLQYFAVTNNNIEMLPDGLFQCKKLQCLLLGKNSLMNLSPHVGELSNLTHLELIGNYLETLPPELEGCQSLKRNCLIVEENLLNTLPLPVTERLQTCLDKC

SEQ ID NO: 51321 - protein, 803 aa, Homo sapiens; identical to SEQ ID NO: 51320

SEQ ID NO: 51322 - protein, 803 aa, Homo sapiens; identical to SEQ ID NO: 51320

SEQ ID NO: 51323 - protein, 103 aa, Homo sapiens
MITLTELKCLADAQSSYHILKPWWDVFWYYITLIMLLVAVLAGALQLTQSRVLCCLPCKVEFDNHCAVPWDILKASMNTSSNPGTPLPLPLRIQNDLHRQQYS

SEQ ID NO: 51324 - protein, 230 aa, Homo sapiens [sequence omitted]

SEQ ID NO: 51325 - protein, 803 aa, Homo sapiens
MIPVTEFRQFSEQQPAFRVLKPWWDVFTDYLSVAMLMIGVFGCTLQVMQDKIICLPKRVQPAQNHSSLSNVSQAVASTTPLPPPKPSPANPITVEMKGLKTDLDLQQYSFINQMCYERALHWYAKYFPYLVLIHTLVFMLCSNFWFKFPGSSSKIEHFISILGKCFDSPWTTRALSEVSGEDSEEKDNRKNNMNRSNTIQSGPEDSLVNSQSLKSIPEKFVVDKSTAGALDKKEGEQAKALFEKVKKFRLHVEEGDILYAMYVRQTVLKVIKFLIIIAYNSALVSKVQFTVDCNVDIQDMTGYKNFSCNHTMAHLFSKLSFCYLCFVSIYGLTCLYTLYWLFYRSLREYSFEYVRQETGIDDIPDVKNDFAFMLHMIDQYDPLYSKRFAVFLSEVSENKLKQLNLNNEWTPDKLRQKLQTNAHNRLELPLIMLSGLPDTVFEITELQSLKLEIIKNVMIPATIAQLDNLQELSLHQCSVKIHSAALSFLKENLKVLSVKFDDMRELPPWMYGLRNLEELYLVGSLSHDISRNVTLESLRDLKSLKILSIKSNVSKIPQAVVDVSSHLQKMCIHNDGTKLVMLNNLKKMTNLTELELVHCDLERIPHAVFSLLSLQELDLKENNLKSIEEIVSFQHLRKLTVLKLWHNSITYIPEHIKKLTSLERLSFSHNKIEVLPSHLFLCNKIRYLDLSYNDIRFIPPEIGVLQSLQYFSITCNKVESLPDELYFCKKLKTLKIGKNSLSVLSPKIGNLLFLSYLDVKGNHFEILPPELGDCRALKRAGLVVEDALFETLPSDVREQMKTE

SEQ ID NO: 51326 - protein, 858 aa, Homo sapiens
MFTLAEVASLNDIQPTYRILKPWWDVFMDYLAVVMLMVAIFAGTMQLTKDQVVCLPVLPSPVNSKAHTPPGNAEVTTNIPKMEAATNQDQDGRTTNDISFGTSAVTPDIPLRATYPRTDFALPNQEAKKEKKDPTGRKTNLDFQQYVFINQMCYHLALPWYSKYFPYLALIHTIILMVSSNFWFKYPKTCSKVEHFVSILGKCFESPWTTKALSETACEDSEENKQRITGAQTLPKHVSTSSDEGSPSASTPMINKTGFKFSAEKPVIEVPSMTILDKKDGEQAKALFEKVRKFRAHVEDSDLIYKLYVVQTVIKTAKFIFILCYTANFVNAISFEHVCKPKVEHLIGYEVFECTHNMAYMLKKLLISYISIICVYGFICLYTLFWLFRIPLKEYSFEKVREESSFSDIPDVKNDFAFLLHMVDQYDQLYSKRFGVFLSEVSENKLREISLNHEWTFEKLRQHISRNAQDKQELHLFMLSGVPDAVFDLTDLDVLKLELIPEAKIPAKISQMTNLQELHLCHCPAKVEQTAFSFLRDHLRCLHVKFTDVAEIPAWVYLLKNLRELYLIGNLNSENNKMIGLESLRELRHLKILHVKSNLTKVPSNITDVAPHLTKLVIHNDGTKLLVLNSLKKMMNVAELELQNCELERIPHAIFSLSNLQELDLKSNNIRTIEEIISFQHLKRLTCLKLWHNKIVTIPPSITHVKNLESLYFSNNKLESLPVAVFSLQKLRCLDVSYNNISMIPIEIGLLQNLQHLHITGNKVDILPKQLFKCIKLRTLNLGQNCITSLPEKVGQLSQLTQLELKGNCLDRLPAQLGQCRMLKKSGLVVEDHLFDTLPLEVKEALNQDINIPFANGI

SEQ ID NO: 51327 - protein, 858 aa, Homo sapiens; identical to SEQ ID NO: 51326

SEQ ID NO: 51328 - protein, 117 aa, Homo sapiens
MFTLAEVASLNDIQPTYRILKPWWDVFMDYLAVVMLMVAIFAGTMQLTKDQVVCLPVLPSPVNSKAHTPPGNAEVTTNIPKMEAATNQDQDGRTTNDISFGTSAVTPDIPLRATYPR

SEQ ID NO: 51329 - protein, 274 aa, Homo sapiens
MFTLAEVASLNDIQPTYRILKPWWDVFMDYLAVVMLMVAIFAGTMQLTKDQVVCLPVLPSPVNSKAHTPPGNAEVTTNIPKMEAATNQDQDGRTTNDISFGTSAVTPDIPLRATYPRTDFALPNQEAKKEKKDPTGRKTNLDFQQYVFINQMCYHLALPWYSKYFPYLALIHTIILMVSSNFWFKYPKTCSKVEHFVSILGKCFESPWTTKALSETACEDSEENKQRITGAQTLPKHVSTSSDEGSPSASTPMINKTGFKFSAEKPVIEVPSMT

SEQ ID NO: 51330 - protein, 31 aa, Homo sapiens
MFTLAEVASLNDIQPTYRILKPWWDVFMDYL

SEQ ID NO: 51331 - protein, 187 aa, Homo sapiens
MFTLAEVASLNDIQPTYRILKPWWDVFMDYLAVVMLMVAIFAGTMQLTKDQVVCLPVLPSPVNSKAHTPPGNAEVTTNIPKMEAATNQDQDGRTTNDISFGTSAVTPDIPLRATYPRTDFALPNQEAKKEKKDPTGRKTNLDFQQYVFINQMCYHLALPWYSKYFPYLALIHTIILMVSSNFWFKYP

SEQ ID NO: 51332 - protein, 122 aa, Homo sapiens
MFTLAEVASLNDIQPTYRILKPWWDVFMDYLAVVMLMVAIFAGTMQLTKDQVVCLPVLPSPVNSKAHTPPGNAEVTTNIPKMEAATNQDQDGRTTNDISFGTSAVTPDIPLRATYPRTDFAL

SEQ ID NO: 51333 - protein, 796 aa, Homo sapiens
MIPVAEFKQFTEQQPAFKVLKPWWDVLAEYLTVAMLMIGVFGCTLQVTQDKIICLPNHELQENLSEAPCQQLLPRGIPEQIGALQEVKGLKNNLDLQQYSFINQLCYETALHWYAKYFPYLVVIHTLIFMVCTSFWFKFPGTSSKIEHFISILGKCFDSPWTTRALSEVSGENQKGPAATERAAATIVAMAGTGPGKAGEGEKEKVLAEPEKVVTEPPVVTLLDKKEGEQAKALFEKVKKFRMHVEEGDILYTMYIRQTVLKVCKFLAILVYNLVYVEKISFLVACRVETSEVTGYASFCCNHTKAHLFSKLAFCYISFVCIYGLTCIYTLYWLFHRPLKEYSFRSVREETGMGDIPDVKNDFAFMLHLIDQYDSLYSKRFAVFLSEVSESRLKQLNLNHEWTPEKLRQKLQRNAAGRLELALCMLPGLPDTVFELSEVESLRLEAICDITFPPGLSQLVHLQELSLLHSPARLPFSLQVFLRDHLKVMRVKCEELREVPLWVFGLRGLEELHLEGLFPQELARAATLESLRELKQLKVLSLRSNAGKVPASVTDVAGHLQRLSLHNDGARLVALNSLKKLAALRELELVACGLERIPHAVFSLGALQELDLKDNHLRSIEEILSFQHCRKLVTLRLWHNQIAYVPEHVRKLRSLEQLYLSYNKLETLPSQLGLCSGLRLLDVSHNGLHSLPPEVGLLQNLQHLALSYNALEALPEELFFCRKLRTLLLGDNQLSQLSPHVGALRALSRLELKGNRLEALPEELGNCGGLKKAGLLVEDTLYQGLPAEVRDKMEEE

SEQ ID NO: 51334 - protein, 522 aa, Homo sapiens
MDFLLLGLCLYWLLRRPSGVVLCLLGACFQMLPAAPSGCPQLCRCEGRLLYCEALNLTEAPHNLSGLLGLSLRYNSLSELRAGQFTGLMQLTWLYLDHNHICSVQGDAFQKLRRVKELTLSSNQITQLPNTTFRPMPNLRSVDLSYNKLQALAPDLFHGLRKLTTLHMRANAIQFVPVRIFQDCRSLKFLDIGYNQLKSLARNSFAGLFKLTELHLEHNDLVKVNFAHFPRLISLHSLCLRRNKVAIVVSSLDWVWNLEKMDLSGNEIEYMEPHVFETVPHLQSLQLDSNRLTYIEPRILNSWKSLTSITLAGNLWDCGRNVCALASWLNNFQGRYDGNLQCASPEYAQGEDVLDAVYAFHLCEDGAEPTSGHLLSAVTNRSDLGPPASSATTLADGGEGQHDGTFEPATVALPGGEHAENAVQIHKVVTGTMALIFSFLIVVLVLYVSWKCFPASLRQLRQCFVTQRRKQKQKQTMHQMAAMSAQEYYVDYKPNHIEGALVIINEYGSCTCHQQPARECEV

SEQ ID NO: 51335 - protein, 522 aa, Homo sapiens; identical to SEQ ID NO: 51334

SEQ ID NO: 51336 - protein, 109 aa, Homo sapiens
MDFLLLGLCLYWLLRRPSGVVLCLLGACFQMLPAAPSGCPQLCRCEGRLLYCEALNLTEAPHNLSGLLGLSLRYNSLSELRAGQFTGLMQLTWLYLDHNHICSVQGDAF

SEQ ID NO: 51337 - protein, 223 aa, Homo sapiens
MDFLLLGLCLYWLLRRPSGVVLCLLGACFQMLPAAPSGCPQLCRCEGRLLYCEALNLTEAPHNLSGLLGLSLRYNSLSELRAGQFTGLMQLTWLYLDHNHICSVQGDAFQKLRRVKELTLSSNQITQLPNTTFRPMPNLRSVDLSYNKLQALAPDLFHGLRKLTTLHMRANAIQFVPVRIFQDCRSLKFLDIGYNQLKSLARNSFAGLFKLTELHLEHNDLVK

SEQ ID NO: 51338 - protein, 522 aa, Homo sapiens; identical to SEQ ID NO: 51334

SEQ ID NO: 51339 - protein, 522 aa, Homo sapiens; identical to SEQ ID NO: 51334

SEQ ID NO: 51340 - protein, 183 aa, Homo sapiens
MDFLLLGLCLYWLLRRPSGVVLCLLGACFQMLPAAPSGCPQLCRCEGRLLYCEALNLTEAPHNLSGLLGLSLRYNSLSELRAGQFTGLMQLTWLYLDHNHICSVQGDAFQKLRRVKELTLSSNQITQLPNTTFRPMPNLRSVDLSYNKLQALAPDLFHGLRKLTTLHMRANAIQFVPVRIFQD

SEQ ID NO: 51341 - protein, 516 aa, Homo sapiens
MGLHFKWPLGAPMLAAIYAMSMVLKMLPALGMACPPKCRCEKLLFYCDSQGFHSVPNATDKGSLGLSLRHNHITELERDQFASFSQLTWLHLDHNQISTVKEDAFQGLYKLKELILSSNKIFYLPNTTFTQLINLQNLDLSFNQLSSLHPELFYGLRKLQTLHLRSNSLRTIPVRLFWDCRSLEFLDLSTNRLRSLARNGFAGLIKLRELHLEHNQLTKINFAHFLRLSSLHTLFLQWNKISNLTCGMEWTWGTLEKLDLTGNEIKAIDLTVFETMPNLKILLMDNNKLNSLDSKILNSLRSLTTVGLSGNLWECSARICALASWLGSFQGRWEHSILCHSPDHTQGEDILDAVHGFQLCWNLSTTVTVMATTYRDPTTEYTKRISSSSYHVGDKEIPTTAGIAVTTEEHFPEPDNAIFTQRVITGTMALLFSFFFIIFIVFISRKCCPPTLRRIRQCSMVQNHRQLRSQTRLHMSNMSDQGPYNEYEPTHEGPFIIINGYGQCKCQQLPYKECEV

SEQ ID NO: 51342 - protein, 581 aa, Homo sapiens
MGFNVIRLLSGSAVALVIAPTVLLTMLSSAERGCPKGCRCEGKMVYCESQKLQEIPSSISAGCLGLSLRYNSLQKLKYNQFKGLNQLTWLYLDHNHISNIDENAFNGIRRLKELILSSNRISYFLNNTFRPVTNLRNLDLSYNQLHSLGSEQFRGLRKLLSLHLRSNSLRTIPVRIFQDCRNLELLDLGYNRIRSLARNVFAGMIRLKELHLEHNQFSKLNLALFPRLVSLQNLYLQWNKISVIGQTMSWTWSSLQRLDLSGNEIEAFSGPSVFQCVPNLQRLNLDSNKLTFIGQEILDSWISLNDISLAGNIWECSRNICSLVNWLKSFKGLRENTIICASPKELQGVNVIDAVKNYSICGKSTTERFDLARALPKPTFKPKLPRPKHESKPPLPPTVGATEPGPETDADAEHISFHKIIAGSVALFLSVLVILLVIYVSWKRYPASMKQLQQRSLMRRHRKKKRQSLKQMTPSTQEFYVDYKPTNTETSEMLLNGTGPCTYNKSGSRECEIPLSMNVSTFLAYDQPTISYCGVHHELLSHKSFETNAQEDTMETHLETELDLSTITTAGRISDHKQQLA

SEQ ID NO: 51343 - protein, 581 aa, Homo sapiens; identical to SEQ ID NO: 51342

SEQ ID NO: 51344 - protein, 518 aa, Homo sapiens
MGFHLITQLKGMSVVLVLLPTLLLVMLTGAQRACPKNCRCDGKIVYCESHAFADIPENISGGSQGLSLRFNSIQKLKSNQFAGLNQLIWLYLDHNYISSVDEDAFQGIRRLKELILSSNKITYLHNKTFHPVPNLRNLDLSYNKLQTLQSEQFKGLRKLIILHLRSNSLKTVPIRVFQDCRNLDFLDLGYNRLRSLSRNAFAGLLKLKELHLEHNQFSKINFAHFPRLFNLRSIYLQWNRIRSISQGLTWTWSSLHNLDLSGNDIQGIEPGTFKCLPNLQKLNLDSNKLTNISQETVNAWISLISITLSGNMWECSRSICPLFYWLKNFKGNKESTMICAGPKHIQGEKVSDAVETYNICSEVQVVNTERSHLVPQTPQKPLIIPRPTIFKPDVTQSTFETPSPSPGFQIPGAEQEYEHVSFHKIIAGSVALFLSVAMILLVIYVSWKRYPASMKQLQQHSLMKRRRKKARESERQMNSPLQEYYVDYKPTNSETMDISVNGSGPCTYTISGSRECEV

SEQ ID NO: 51345 - protein, 590 aa, Homo sapiens
MGFHLITQLKGMSVVLVLLPTLLLVMLTGAQRACPKNCRCDGKIVYCESHAFADIPENISGGSQGLSLRFNSIQKLKSNQFAGLNQLIWLYLDHNYISSVDEDAFQGIRRLKELILSSNKITYLHNKTFHPVPNLRNLDLSYNKLQTLQSEQFKGLRKLIILHLRSNSLKTVPIRVFQDCRNLDFLDLGYNRLRSLSRNAFAGLLKLKELHLEHNQFSKINFAHFPRLFNLRSIYLQWNRIRSISQGLTWTWSSLHNLDLSGNDIQGIEPGTFKCLPNLQKLNLDSNKLTNISQETVNAWISLISITLSGNMWECSRSICPLFYWLKNFKGNKESTMICAGPKHIQGEKVSDAVETYNICSEVQVVNTERSHLVPQTPQKPLIIPRPTIFKPDVTQSTFETPSPSPGFQIPGAEQEYEHVSFHKIIAGSVALFLSVAMILLVIYVSWKRYPASMKQLQQHSLMKRRRKKARESERQMNSPLQEYYVDYKPTNSETMDISVNGSGPCTYTISGSRECEMPHHMKPLPYYSYDQPVIGYCQAHQPLHVTKGYETVSPEQDESPGLELGRDHSFIATIARSAAPAIYLERIAN

SEQ ID NO: 51346 - protein, 590 aa, Homo sapiens; identical to SEQ ID NO: 51345

SEQ ID NO: 51347 - protein, 591 aa, Homo sapiens
MPGFHLITQLKGMSVVLVLLPTLLLVMLTGAQRACPKNCRCDGKIVYCESHAFADIPENISGGSQGLSLRFNSIQKLKSNQFAGLNQLIWLYLDHNYISSVDEDAFQGIRRLKELILSSNKITYLHNKTFHPVPNLRNLDLSYNKLQTLQSEQFKGLRKLIILHLRSNSLKTVPIRVFQDCRNLDFLDLGYNRLRSLSRNAFAGLLKLKELHLEHNQFSKINFAHFPRLFNLRSIYLQWNRIRSISQGLTWTWSSLHNLDLSGNDIQGIEPGTFKCLPNLQKLNLDSNKLTNISQETVNAWISLISITLSGNMWECSRSICPLFYWLKNFKGNKESTMICAGPKHIQGEKVSDAVETYNICSEVQVVNTERSHLVPQTPQKPLIIPRPTIFKPDVTQSTFETPSPSPGFQIPGAEQEYEHVSFHKIIAGSVALFLSVAMILLVIYVSWKRYPASMKQLQQHSLMKRRRKKARESERQMNSPLQEYYVDYKPTNSETMDISVNGSGPCTYTISGSRECEMPHHMKPLPYYSYDQPVIGYCQAHQPLHVTKGYETVSPEQDESPGLELGRDHSFIATIARSAAPAIYLERIAN

SEQ ID NO: 51348 - protein, 192 aa, Homo sapiens
MNKRDYMNTSVQEPPLDYSFRSIHVIQDLVNEEPRTGLRPLKRSKSGKSLTQSLWLNNNVLNDLRDFNQVASQLLEHPENLAWIDLSFNDLTSIDPVLTTFFNLSVLYLHGNSIQRLGEVNKLAVLPRLRSLTLHGNPMEEEKGYRQYVLCTLSRITTFDFSGVTKADRTTAEVWKRMNIKPKKAWTKQNTL

SEQ ID NO: 51349 - protein, 291 aa, Homo sapiens
MGTPWRKRKGIAGPGLPDLSCALVLQPRAQVGTMSPAIALAFLPLVVTLLVRYRHYFRLLVRTVLLRSLRDCLSGLRIEERAFSYVLTHALPGDPGHILTTLDHWSSRCEYLSHMGPVKGQILMRLVEEKAPACVLELGTYCGYSTLLIARALPPGGRLLTVERDPRTAAVAEKLIRLAGFDEHMVELIVGSSEDVIPCLRTQYQLSRADLVLLAHRPRCYLRDLQLLEAHALLPAGATVLADHVLFPGAPRFLQYAKSCGRYRCRLHHTGLPDFPAIKDGIAQLTYAGPG

SEQ ID NO: 51350 - protein, 146 aa, Homo sapiens
MNKRDYMNTSVQEPPLDYSFRSIHVIQDLVNEEPRTGLRPLKRSKSGKSLTQSLWLNNNVLNDLRDFNQVASQLLEHPENLAWIDLSFNDLTSIDPVLTTFFNLSVLYLHGNSIQRLGEVNKLAVLPRLRSLTLHGNPMEEEKGYR

SEQ ID NO: 51351 - protein, 251 aa, Homo sapiens
MGTPWRKRKGIAGPGLPDLSCALVLQPSLRDCLSGLRIEERAFSYVLTHALPGDPGHILTTLDHWSSRCEYLSHMGPVKGQILMRLVEEKAPACVLELGTYCGYSTLLIARALPPGGRLLTVERDPRTAAVAEKLIRLAGFDEHMVELIVGSSEDVIPCLRTQYQLSRADLVLLAHRPRCYLRDLQLLEAHALLPAGATVLADHVLFPGAPRFLQYAKSCGRYRCRLHHTGLPDFPAIKDGIAQLTYAGPG

SEQ ID NO: 51352 - protein, 291 aa, Homo sapiens; identical to SEQ ID NO: 51349

SEQ ID NO: 51353 - protein, 158 aa, Homo sapiens
MNKRDYMNTSVQEPPLDYSFRSIHVIQDLVNEEPRTGLRPLKRSKSGKSLTQSLWLNNNVLNDLRDFNQVASQLLEHPENLAWIDLSFNDLTSIDPVLTTFFNLSVLYLHGNSIQRLGEVNKLAVLPRLRSLTLHGNPMEEEKGYRVPGSVEMPHRPP

SEQ ID NO: 51354 - protein, 92 aa, Homo sapiens
MNKRDYMNTSVQEPPLDYSFRSIHVIQDLVNEEPRTGLRPLKRSKSGKSLTQSLWLNNNVLNDLRDFNQVASQLLEHPENLAWIDLSFNDLT

SEQ ID NO: 51355 - protein, 192 aa, Homo sapiens; identical to SEQ ID NO: 51348

SEQ ID NO: 51356 - protein, 158 aa, Homo sapiens; identical to SEQ ID NO: 51353

SEQ ID NO: 51357 - protein, 104 aa, Homo sapiens
MNKRDYMNTSVQEPPLDYSFRSIHVIQDLVNEEPRTGLRPLKRSKSGKSLTQSLWLNNNVLNDLRDFNQVASQLLEHPENLAWIDLSFNDLTSIDPVLTTFFNL

SEQ ID NO: 51358 - protein, 174 aa, Homo sapiens
MVEFQPSVTDLVNEEPRTGLRPLKRSKSGKSLTQSLWLNNNVLNDLRDFNQVASQLLEHPENLAWIDLSFNDLTSIDPVLTTFFNLSVLYLHGNSIQRLGEVNKLAVLPRLRSLTLHGNPMEEEKGYRQYVLCTLSRITTFDFSGVTKADRTTAEVWKRMNIKPKKAWTKQNTL

SEQ ID NO: 51359 - protein, 1076 aa, Homo sapiens
MAEFTSYKETASSRHLRFKLQSLSRRLDELEEATKNLQKAEDELLDLQDKVIQAEGSNSSMLAEIEVLRQRVLRIEGKDEEIKRAEDLCRLMKEKLEEEENLTRELKSEIERLQKRMAELEKLEEAFSRSKNDCTQLCLSLNEERNLTKKISSELEMLRVKVKELESSEDRLDKTEQSLASELEKLKSLTLSFVSERKYLNEKEKENEKLIKELTQKLEQNKKMNRDYTRNASNLERNDLRIEDGISSTLPSKESRRKGGLDYLKQVENETRNKSENEKNRNQEDNKVKDLNQEIEKLKTQIKHFESLEEELKKMKSKNNDLQDNYLSEQNKNKLLASQLEEIKLQIKKQKELENGEVEGEDAFLSSKGRHERTKFRGHGSEASVSKHTARELSPQHKRERLRNREFALNNENYSLSNRQVSSPSFTNRRAAKASHMGVSTDSGTQETKKTEDRFVPGSSQSEGKKSREQPSVLSRYPPAAQEHSKAWKGTSKPGTESGLKGKVEKTTRTFSDTTHGSVPSDPLGRADKASDTSSETVFGKRGHVLGNGSQVTQAANSGCSKAIGALASSRRSSSEGLSKGKKAANGLEADNSCPNSKAPVLSKYPYSCRSQENILQGFSTSHKEGVNQPAAVVMEDSSPHEALRCRVIKSSGREKPDSDDDLDIASLVTAKLVNTTITPEPEPKPQPNSREKAKTRGAPRTSLFENDKDAGMENESVKSVRASTNTMELPDTNGAGVKSQRPFSPREALRSRAIIKPVIVDKDVKKIMGGSGTETTLEKQKPVSKPGPNKVTSSITIYPSDSSSPRAAPGEALRERHTSTSNIQVGLAELTSVSNHVSSPFELSIHKHDITLQLAEAERMADGPLKDRPETVVSRSSIIIKPSDPVERNSHAPPAETIRWKSHSAPSEVGFSDARHVTVRNAWKSRRDLKSLEDPPTRIGKNVESTNSNAYTQRSSTDFSELEQPRSCLFEQGTRRVGPSSGDAPEPSSRRTQSSLTVSEVLTRRNRVGDTITVAAWNHSASMEEEGEDCTLSVYRQLHNSLDPSELPGKQGLPESGRVRAEERLRPTRPCAEEN

SEQ ID NO: 51360 - protein, 1026 aa, Homo sapiens
MAEFTSYKETASSRHLRFKLQSLSRRLDELEEATKNLQKAEDELLDLQDKVIQAEGSNSSMLAEIEVLRQRVLRIEGKDEEIKRAEDLCRLMKEKLEEEENLTRELKSEIERLQKRMAELEKLEEAFSRSKNDCTQLCLSLNEERNLTKKISSELEMLRVKVKELESSEDRLDKTEQSLASELEKLKSLTLSFVSERKYLNEKEKENEKLIKELTQKLEQNKKMNRDYTRNASNLERNDLRIEDGISSTLPSKESRRKGGLDYLKQVENETRNKSENEKNRNQEDNKVKDLNQEIEKLKTQIKHFESLEEELKKMKSKNNDLQDNYLSEQNKNKLLASQLEEIKLQIKKQKELENGEVEGEDAFLSSKGRHERTKFRGHGSEASVSKHTARELSPQHKRERLRNREFALNNENYSLSNRQVSSPSFTNRRAAKASHMGVSTDSGTQETKKTEDRFVPGSSQSEGKKSREQPSVLSRYPPAAQEHSKAWKGTSKPGTESGLKGKVEKTTRTFSDTTHGSVPSDPLGRADKASDTSSETVFGKRGHVLGNGSQVTQAANSGCSKAIGALASSRRSSSEGLSKGKKAANGLEADNSCPNSKAPVLSKYPYSCRSQENILQGFSTSHKEGVNQPAAVVMEDSSPHEALRCRVIKSSGREKPDSDDDLDIASLVTAKLVNTTITPEPEPKPQPNSREKAKTRGAPRTSLFENDKDAGMENESVKSVRASTNTMELPDTNGAGVKSQRPFSPREALRSRAIIKPVIVDKDVKKIMGGSGTETTLEKQKPVSKPGPNKVTSSITIYPSDSSSPRAAPGEALRERHTSTSNIQVGLAELTSVSNHVSSPFELSIHKHDITLQLAEAERMADGPLKDRPETVVSRSSIIIKPSDPVERNSHAPPAETIRWKSHSAPSEVGFSDARHVTVRNAWKSRRDLKSLEDPPTRIGKNVESTNSNAYTQRSSTDFSELEQPRSCLFEQGTRRVGPSSGDAPEPSSRRTQSSLTVSEVLTRRNRVGDTITVAAWNHSASMSS

SEQ ID NO: 51361 - protein, 1076 aa, Homo sapiens; identical to SEQ ID NO: 51359

SEQ ID NO: 51362 - protein, 1076 aa, Homo sapiens; identical to SEQ ID NO: 51359

SEQ ID NO: 51363 - protein, 273 aa, Homo sapiens
MAEFTSYKETASSRHLRFKLQSLSRRLDELEEATKNLQKAEDELLDLQDKVIQAEGSNSSMLAEIEVLRQRVLRIEGKDEEIKRAEDLCRLMKEKLEEEENLTRELKSEIERLQKRMAELEKLEEAFSRSKNDCTQLCLSLNEERNLTKKISSELEMLRVKVKELESSEDRLDKTEQSLASELEKLKSLTLSFVSERKYLNEKEKENEKLIKELTQKLEQNKKMNRDYTRNASNLERNDLRIEDGISSTLPSKESRRKGGLDYLKQVENETRN

SEQ ID NO: 51364 - protein, 35 aa, Homo sapiens
MAEFTSYKETASSRHLRFKLQSLSRRLDELEEATK

SEQ ID NO: 51365 - protein, 346 aa, Homo sapiens
MKFSPAHYLLPLLPALVLSTRQDYEELEKQLKEVFKERSTILRQLTKTSRELDGIKVNLQSLKNDEQSAKTDVQKLLELGQKQREEMKSLQEALQNQLKETSEKAEKHQATINFLKTEVERKSKMIRDLQNENKSLKNKLLSGNKLCGIHAEESKKIQAQLKELRYGKKDLLFKAQQLTDLEQKLAVAKNELEKAALDRESQMKAMKETVQLCLTSVFRDQPPPPLSLITSNPTRMLLPPRNIASKLPDAAAKSKPQQSASGNNESSQVESTKEGNPSTTACDSQDEGRPCSMKHKESPPSNATAETEPIPQKLQMPPCSECEVKKAPEKPLTSFEGMAAREEKIL

SEQ ID NO: 51366 - protein, 260 aa, Homo sapiens
MKSLQEALQNQLKETSEKAEKHQATINFLKTEVERKSKMIRDLQNENKSLKNKLLSGNKLCGIHAEESKKIQAQLKELRYGKKDLLFKAQQLTDLEQKLAVAKNELEKAALDRESQMKAMKETVQLCLTSVFRDQPPPPLSLITSNPTRMLLPPRNIASKLPDAAAKSKPQQSASGNNESSQVESTKEGNPSTTACDSQDEGRPCSMKHKESPPSNATAETEPIPQKLQMPPCSECEVKKAPEKPLTSFEGMAAREEKIL

SEQ ID NO: 51367 - protein, 299 aa, Homo sapiens
MAELGLNEHHQNEVINYMRFARSKRGLRLKTVDSCFQDLKESRLVEDTFTIDEVSEVLNGLQAVVHSEVESELINTAYTNVLLLRQLFAQAEKWYLKLQTDISELENRELLEQVAEFEKAEITSSNKKPILDVTKPKLAPLNEGGTAELLNKEILRLQEENEKLKSRLKTIEIQATNALDEKSKLEKALQDLQLDQGNQKDFIKAQDLSNLENTVAALKSEFQKTLNDKTENQKSLEENLATAKHDLLRVQEQLHMAEKELEKKFQQTAAYRNMKEILTKKNDQIKDLRKRLAQYEPED

SEQ ID NO: 51368 - protein, 282 aa, Homo sapiens
MRFARSKRGLRLKTVDSCFQDLKESRLVEDTFTIDEVSEVLNGLQAVVHSEVESELINTAYTNVLLLRQLFAQAEKWYLKLQTDISELENRELLEQVAEFEKAEITSSNKKPILDVTKPKLAPLNEGGTAELLNKEILRLQEENEKLKSRLKTIEIQATNALDEKSKLEKALQDLQLDQGNQKDFIKAQDLSNLENTVAALKSEFQKTLNDKTENQKSLEENLATAKHDLLRVQEQLHMAEKELEKKFQQTAAYRNMKEILTKKNDQIKDLRKRLAQYEPED

SEQ ID NO: 51369 - protein, 256 aa, Homo sapiens
MRNQDPGKMGRQRKSIKLYPTHPLVTFPRSWAKFQEKALLVEDTFTIDEVSEVLNGLQAVVHSEVESELINTAYTNVLLLRQLFAQAEKWYLKLQTDISELENRELLEQVAEFEKAEITSSNKKPILDVTKPKLAPLNEGGTAELLNKEILRLQEENEKLKSRLKTIEIQATNALDEKSKLEKALQDLQLDQGNQKDFIKAQDLSNLENTVAALKSEFQKTLNDKTENQKSLEENLATAKHDLLRVQEQLHMAEKI

SEQ ID NO: 51370 - protein, 146 aa, Homo sapiens
MVDELVLLLHALLMRHRALSIENSQLMEQLRLLVCERASLLRQVRPPSCPVPFPETFNGESSRLPEFIVQTASYMLVNENRFCNDAMKVAFLISLLTGEAEEWVVPYIEMDSPILGDYRAFLDEMKQCFGWDDDEDDDDEEEEDDY

SEQ ID NO: 51371 - protein, 739 aa, Homo sapiens
MASILLRSCRGRAPARLPPPPRYTVPRGSPGDPAHLSCASTLGLRNCLNVPFGCCTPIHPVYTSSRGDHLGCWALRPECLRIVSRAPWTSTSVGFVAVGPQCLPVRGWHSSRPVRDDSVVEKSLKSLKDKNKKLEEGGPVYSPPAEVVVKKSLGQRVLDELKHYYHGFRLLWIDTKIAARMLWRILNGHSLTRRERRQFLRICADLFRLVPFLVFVVVPFMEFLLPVAVKLFPNMLPSTFETQSLKEERLKKELRVKLELAKFLQDTIEEMALKNKAAKGSATKDFSVFFQKIRETGERPSNEEIMRFSKLFEDELTLDNLTRPQLVALCKLLELQSIGTNNFLRFQLTMRLRSIKADDKLIAEEGVDSLNVKELQAACRARGMRALGVTEDRLRGQLKQWLDLHLHQEIPTSLLILSRAMYLPDTLSPADQLKSTLQTLPEIVAKEAQVKVAEVEGEQVDNKAKLEATLQEEAAIQQEHREKELQKRSEVAKDFEPERVVAAPQRPGTEPQPEMPDTVLQSETLKDTAPVLEGLKEEEITKEEIDILSDACSKLQEQKKSLTKEKEELELLKEDVQDYSEDLQEIKKELSKTGEEKYVEESKASKRLTKRVQQMIGQIDGLISQLEMDQQAGKLAPANGMPTGENVISVAELINAMKQVKHIPESKLTSLAAALDENKDGKVNIDDLVKVIELVDKEDVHISTSQVAEIVATLEKEEKVEEKEKAKEKAEKEVAEVKS

SEQ ID NO: 51372 - protein, 252 aa, Homo sapiens
MRHTWPFRNVPFGCCTPIHPVYTSSRGDHLGCWALRPECLRIVSRAPWTSTSVGFVAVGPQCLPVRGWHSSRPVRDDSVVEKSLKSLKDKNKKLEEGGPVYSPPAEVVVKKSLGQRVLDELKHYYHGFRLLWIDTKIAARMLWRILNGHSLTRRERRQFLRICADLFRLVPFLVFVVVPFMEFLLPVAVKLFPNMLPSTFETQSLKEERLKKELRVKLELAKFLQDTIEEMALKNKAAKGSATKDFSVFFQK

SEQ ID NO: 51373 - protein, 1394 aa, Homo sapiens
MAALLRSARWLLRAGAAPRLPLSLRLLPGGPGRLHAASYLPAARAGPVAGGLLSPARLYAIAAKEKDIQEESTFSSRKISNQFDWALMRLDLSVRRTGRIPKKLLQKVFNDTCRSGGLGGSHALLLLRSCGSLLPELKLEERTEFAHRIWDTLQKLGAVYDVSHYNALLKVYLQNEYKFSPTDFLAKMEEANIQPNRVTYQRLIASYCNVGDIEGASKILGFMKTKDLPVTEAVFSALVTGHARAGDMENAENILTVMRDAGIEPGPDTYLALLNAYAEKGDIDHVKQTLEKVEKSELHLMDRDLLQIIFSFSKAGYPQYVSEILEKVTCERRYIPDAMNLILLLVTEKLEDVALQILLACPVSKEDGPSVFGSFFLQHCVTMNTPVEKLTDYCKKLKEVQMHSFPLQFTLHCALLANKTDLAKALMKAVKEEGFPIRPHYFWPLLVGRRKEKNVQGIIEILKGMQELGVHPDQETYTDYVIPCFDSVNSARAILQENGCLSDSDMFSQAGLRSEAANGNLDFVLSFLKSNTLPISLQSIRSSLLLGFRRSMNINLWSEITELLYKDGRYCQEPRGPTEAVGYFLYNLIDSMSDSEVQAKEEHLRQYFHQLEKMNVKIPENIYRGIRNLLESYHVPELIKDAHLLVESKNLDFQKTVQLTSSELESTLETLKAENQPIRDVLKQLILVLCSEENMQKALELKAKYESDMVTGGYAALINLCCRHDKVEDALNLKEEFDRLDSSAVLDTGKYVGLVRVLAKHGKLQDAINILKEMKEKDVLIKDTTALSFFHMLNGAALRGEIETVKQLHEAIVTLGLAEPSTNISFPLVTVHLEKGDLSTALEVAIDCYEKYKVLPRIHDVLCKLVEKGETDLIQKAMDFVSQEQGEMVMLYDLFFAFLQTGNYKEAKKIIETPGIRARSARLQWFCDRCVANNQVETLEKLVELTQKLFECDRDQMYYNLLKLYKINGDWQRADAVWNKIQEENVIPREKTLRLLAEILREGNQEVPFDVPELWYEDEKHSLNSSSASTTEPDFQKDILIACRLNQKKGAYDIFLNAKEQNIVFNAETYSNLIKLLMSEDYFTQAMEVKAFAETHIKGFTLNDAANSRLIITQVRRDYLKEAVTTLKTVLDQQQTPSRLAVTRVIQALAMKGDVENIEVVQKMLNGLEDSIGLSKMVFINNIALAQIKNNNIDAAIENIENMLTSENKVIEPQYFGLAYLFRKVIEEQLEPAVEKISIMAERLANQFAIYKPVTDFFLQLVDAGKVDDARALLQRCGAIAEQTPILLLFLLRNSRKQGKASTVKSVLELIPELNEKEEAYNSLMKSYVSEKDVTSAKALYEHLTAKNTKLDDLFLKRYASLLKYAGEPVPFIEPPESFEFYAQQLRKLRENSS

SEQ ID NO: 51374 - protein, 1087 aa, Homo sapiens
MPPPICPPLAPGPWPGGLGGSHALLLLRSCGSLLPELKLEERTEFAHRIWDTLQKLGAVYDVSHYNALLKVYLQNEYKFSPTDFLAKMEEANIQPNRVTYQRLIASYCNVGDIEGASKILGFMKTKDLPVTEAVFSALVTGHARAGDMENAENILTVMRDAGIEPGPDTYLALLNAYAEKGDIDHVKQTLEKVEKSELHLMDRDLLQIIFSFSKAGYPQYVSEILEKVTCERRYIPDAMNLILLLVTEKLEDVALQILLACPVSKEDGPSVFGSFFLQHCVTMNTPVEKLTDYCKKLKEVQMHSFPLQFTLHCALLANKTDLAKALMKAVKEEGFPIRPHYFWPLLVGRRKEKNVQGIIEILKGMQELGVHPDQETYTDYVIPCFDSVNSARAILQENGCLSDSDMFSQAGLRSEAANGNLDFVLSFLKSNTLPISLQSIRSSLLLGFRRSMNINLWSEITELLYKDGRYCQEPRGPTEAVGYFLYNLIDSMSDSEVQAKEEHLRQYFHQLEKMNVKIPENIYRGIRNLLESYHVPELIKDAHLLVESKNLDFQKTVQLTSSELESTLETLKAENQPIRDVLKQLILVLCSEENMQKALELKAKYESDMVTGGYAALINLCCRHDKVEDALNLKEEFDRLDSSAVLDTGKYVGLVRVLAKHGKLQDAINILKEMKEKDVLIKDTTALSFFHMLNGAALRGEIETVKQLHEAIVTLGLAEPSTNISFPLVTVHLEKGDLSTALEVAIDCYEKYKVLPRIHDVLCKLVEKGETDLIQKAMDFVSQEQGEMVMLYDLFFAFLQTGNYKEAKKIIETPGIRARSARLQWFCDRCVANNQVETLEKLVELTQKLFECDRDQMYYNLLKLYKINGDWQRADAVWNKIQEENVIPREKTLRLLAEILREGNQEVPFDVPELWYEDEKHSLNSSSASTTEPDFQKDILIACRLNQKKGAYDIFLNAKEQNIVFNAETYSNLIKLLMSEDYFTQAMEVKAFAETHIKGFTLNDAANSRLIITQVRRDYLKEAVTTLKTVLDQQQTPSRLAVTRVIQALAMKGDVENIEVVQKMLNGLEDSIGLSKMVFINNIALAQ

SEQ ID NO: 51375 - protein, 951 aa, Homo sapiens
MPGPLGLLCFLALGLLGSAGPSGAAPPLCAAPCSCDGDRRVDCSGKGLTAVPEGLSAFTQALDISMNNITQLPEDAFKNFPFLEELQLAGNDLSFIHPKALSGLKELKVLTLQNNQLKTVPSEAIRGLSALQSLRLDANHITSVPEDSFEGLVQLRHLWLDDNSLTEVPVHPLSNLPTLQALTLALNKISSIPDFAFTNLSSLVVLHLHNNKIRSLSQHCFDGLDNLETLDLNYNNLGEFPQAIKALPSLKELGFHSNSISVIPDGAFDGNPLLRTIHLYDNPLSFVGNSAFHNLSDLHSLVIRGASMVQQFPNLTGTVHLESLTLTGTKISSIPNNLCQEQKMLRTLDLSYNNIRDLPSFNGCHALEEISLQRNQIYQIKEGTFQGLISLRILDLSRNLIHEIHSRAFATLGPITNLDVSFNELTSFPTEGLNGLNQLKLVGNFKLKEALAAKDFVNLRSLSVPYAYQCCAFWGCDSYANLNTEDNSLQDHSVAQEKGTADAANVTSTLENEEHSQIIIHCTPSTGAFKPCEYLLGSWMIRLTVWFIFLVALFFNLLVILTTFASCTSLPSSKLFIGLISVSNLFMGIYTGILTFLDAVSWGRFAEFGIWWETGSGCKVAGFLAVFSSESAIFLLMLATVERSLSAKDIMKNGKSNHLKQFRVAALLAFLGATVAGCFPLFHRGEYSASPLCLPFPTGETPSLGFTVTLVLLNSLAFLLMAVIYTKLYCNLEKEDLSENSQSSMIKHVAWLIFTNCIFFCPVAFFSFAPLITAISISPEIMKSVTLIFFPLPACLNPVLYVFFNPKFKEDWKLLKRRVTKKSGSVSVSISSQGGCLEQDFYYDCGMYSHLQGNLTVCDCCESFLLTKPVSCKHLIKSHSCPALAVASCQRPEGYWSDCGTQSAHSDYADEEDSFVSDSSDQVQACGRACFYQSRGFPLVRYAYNLPRVKD

SEQ ID NO: 51376 - protein, 907 aa, Homo sapiens
MDTSRLGVLLSLPVLLQLATGGSSPRSGVLLRGCPTHCHCEPDGRMLLRVDCSDLGLSELPSNLSVFTSYLDLSMNNISQLLPNPLPSLRFLEELRLAGNALTYIPKGAFTGLYSLKVLMLQNNQLRHVPTEALQNLRSLQSLRLDANHISYVPPSCFSGLHSLRHLWLDDNALTEIPVQAFRSLSALQAMTLALNKIHHIPDYAFGNLSSLVVLHLHNNRIHSLGKKCFDGLHSLETLDLNYNNLDEFPTAIRTLSNLKELGFHSNNIRSIPEKAFVGNPSLITIHFYDNPIQFVGRSAFQHLPELRTLTLNGASQITEFPDLTGTANLESLTLTGAQISSLPQTVCNQLPNLQVLDLSYNLLEDLPSFSVCQKLQKIDLRHNEIYEIKVDTFQQLLSLRSLNLAWNKIAIIHPNAFSTLPSLIKLDLSSNLLSSFPITGLHGLTHLKLTGNHALQSLISSENFPELKVIEMPYAYQCCAFGVCENAYKISNQWNKGDNSSMDDLHKKDAGMFQAQDERDLEDFLLDFEEDLKALHSVQCSPSPGPFKPCEHLLDGWLIRIGVWTIAVLALTCNALVTSTVFRSPLYISPIKLLIGVIAAVNMLTGVSSAVLAGVDAFTFGSFARHGAWWENGVGCHVIGFLSIFASESSVFLLTLAALERGFSVKYSAKFETKAPFSSLKVIILLCALLALTMAAVPLLGGSKYGASPLCLPLPFGEPSTMGYMVALILLNSLCFLMMTIAYTKLYCNLDKGDLENIWDCSMVKHIALLLFTNCILNCPVAFLSFSSLINLTFISPEVIKFILLVVVPLPACLNPLLYILFNPHFKEDLVSLRKQTYVWTRSKHPSLMSINSDDVEKQSCDSTQALVTFTSSSITYDLPPSSVPSPAYPVTESCHLSSVAFVPCL

SEQ ID NO: 51377 - protein, 777 aa, Homo sapiens
MDTSRLGVLLSLPVLLQLATGGSSPRSGVLLRGCPTHCHCEPDGRMLLRVDCSDLGLSELPSNLSVFTSYLDLSMNNISQLLPNPLPSLRFLEELRLAGNALTYIPKGAFTGLYSLKVLMLQNNQLRHVPTEALQNLRSLQSLRLDANHISYVPPSCFSGLHSLRHLWLDDNALTEIPVQAFRSLSALQAMTLALNKIHHIPDYAFGNLSSLVVLHLHNNRIHSLGKKCFDGLHSLETLDLNYNNLDEFPTAIRTLSNLKELGFHSNNIRSIPEKAFVGNPSLITIHFYDNPIQFVGRSAFQHLPELRTLTLNGASQITEFPDLTGTANLESLTLTGAQISSLPQTVCNQLPNLQVLDLSYNLLEDLPSFSVCQKLQKIDLRHNEIYEIKVDTFQQLLSLRSLNLAWNKIAIIHPNAFSTLPSLIKLDLSSNLLSSFPITGLHGLTHLKLTGNHALQSLISSENFPELKVIEMPYAYQCCAFGVCENAYKISNQWNKGDNSSMDDLHKKDAGMFQAQDERDLEDFLLDFEEDLKALHSVQCSPSPGPFKPCEHLLDGWLIRIGVWTIAVLALTCNALVTSTVFRSPLYISPIKLLIGVIAAVNMLTGVSSAVLAGVDAFTFGSFARHGAWWENGVGCHVIGFLSIFASESSVFLLTLAALERGFSVKYSAKFETKAPFSSLKVIILLCALLALTMAAVPLLGGSKYGASPLCLPLLPHDDHCLHQALLQFGQGRPGEYLGLLYGKTHCPVALHQLHPKLPCGFLVLLLFNKPYIYQS

SEQ ID NO: 51378 - protein, 835 aa, Homo sapiens
MDTSRLGVLLSLPVLLQLATGGSSPRSGVLLRGCPTHCHCEPDGRMLLRVDCSDLGLSELPSNLSVFTSYLDLSMNNISQLLPNPLPSLRFLEELRLAGNALTYIPKGAFTGLYSLKVLMLQNNQLRHVPTEALQNLRSLQSLHLHNNRIHSLGKKCFDGLHSLETLDLNYNNLDEFPTAIRTLSNLKELGFHSNNIRSIPEKAFVGNPSLITIHFYDNPIQFVGRSAFQHLPELRTLTLNGASQITEFPDLTGTANLESLTLTGAQISSLPQTVCNQLPNLQVLDLSYNLLEDLPSFSVCQKLQKIDLRHNEIYEIKVDTFQQLLSLRSLNLAWNKIAIIHPNAFSTLPSLIKLDLSSNLLSSFPITGLHGLTHLKLTGNHALQSLISSENFPELKVIEMPYAYQCCAFGVCENAYKISNQWNKGDNSSMDDLHKKDAGMFQAQDERDLEDFLLDFEEDLKALHSVQCSPSPGPFKPCEHLLDGWLIRIGVWTIAVLALTCNALVTSTVFRSPLYISPIKLLIGVIAAVNMLTGVSSAVLAGVDAFTFGSFARHGAWWENGVGCHVIGFLSIFASESSVFLLTLAALERGFSVKYSAKFETKAPFSSLKVIILLCALLALTMAAVPLLGGSKYGASPLCLPLPFGEPSTMGYMVALILLNSLCFLMMTIAYTKLYCNLDKGDLENIWDCSMVKHIALLLFTNCILNCPVAFLSFSSLINLTFISPEVIKFILLVVVPLPACLNPLLYILFNPHFKEDLVSLRKQTYVWTRSKHPSLMSINSDDVEKQSCDSTQALVTFTSSSITYDLPPSSVPSPAYPVTESCHLSSVAFVPCL

SEQ ID NO: 51379 - protein, 883 aa, Homo sapiens
MDTSRLGVLLSLPVLLQLATGGSSPRSGVLLRGCPTHCHCEPDGRMLLRVDCSDLGLSELPSNLSVFTSYLDLSMNNISQLLPNPLPSLRFLEELRLAGNALTYIPKGAFTGLYSLKVLMLQNNQLRHVPTEALQNLRSLQSLRLDANHISYVPPSCFSGLHSLRHLWLDDNALTEIPVQAFRSLSALQAMTLALNKIHHIPDYAFGNLSSLVVLHLHNNRIHSLGKKCFDGLHSLETLDLNYNNLDEFPTAIRTLSNLKELHFYDNPIQFVGRSAFQHLPELRTLTLNGASQITEFPDLTGTANLESLTLTGAQISSLPQTVCNQLPNLQVLDLSYNLLEDLPSFSVCQKLQKIDLRHNEIYEIKVDTFQQLLSLRSLNLAWNKIAIIHPNAFSTLPSLIKLDLSSNLLSSFPITGLHGLTHLKLTGNHALQSLISSENFPELKVIEMPYAYQCCAFGVCENAYKISNQWNKGDNSSMDDLHKKDAGMFQAQDERDLEDFLLDFEEDLKALHSVQCSPSPGPFKPCEHLLDGWLIRIGVWTIAVLALTCNALVTSTVFRSPLYISPIKLLIGVIAAVNMLTGVSSAVLAGVDAFTFGSFARHGAWWENGVGCHVIGFLSIFASESSVFLLTLAALERGFSVKYSAKFETKAPFSSLKVIILLCALLALTMAAVPLLGGSKYGASPLCLPLPFGEPSTMGYMVALILLNSLCFLMMTIAYTKLYCNLDKGDLENIWDCSMVKHIALLLFTNCILNCPVAFLSFSSLINLTFISPEVIKFILLVVVPLPACLNPLLYILFNPHFKEDLVSLRKQTYVWTRSKHPSLMSINSDDVEKQSCDSTQALVTFTSSSITYDLPPSSVPSPAYPVTESCHLSSVAFVPCL

SEQ ID NO: 51380 - protein, 915 aa, Homo sapiens
MGRPRLTLVCQVSIIISARDLSMNNLTELQPGLFHHLRFLEELRLSGNHLSHIPGQAFSGLYSLKILMLQNNQLGGIPAEALWELPSLQSLRLDANLISLVPERSFEGLSSLRHLWLDDNALTEIPVRALNNLPALQAMTLALNRISHIPDYAFQNLTSLVVLHLHNNRIQHLGTHSFEGLHNLETLDLNYNKLQEFPVAIRTLGRLQELGFHNNNIKAIPEKAFMGNPLLQTIHFYDNPIQFVGRSAFQYLPKLHTLSLNGAMDIQEFPDLKGTTSLEILTLTRAGIRLLPSGMCQQLPRLRVLELSHNQIEELPSLHRCQKLEEIGLQHNRIWEIGADTFSQLSSLQALDLSWNAIRSIHPEAFSTLHSLVKLDLTDNQLTTLPLAGLGGLMHLKLKGNLALSQAFSKDSFPKLRILEVPYAYQCCPYGMCASFFKASGQWEAEDLHLDDEESSKRPLGLLARQAENHYDQDLDELQLEMEDSKPHPSVQCSPTPGPFKPCEYLFESWGIRLAVWAIVLLSVLCNGLVLLTVFAGGPVPLPPVKFVVGAIAGANTLTGISCGLLASVDALTFGQFSEYGARWETGLGCRATGFLAVLGSEASVLLLTLAAVQCSVSVSCVRAYGKSPSLGSVRAGVLGCLALAGLAAALPLASVGEYGASPLCLPYAPPEGQPAALGFTVALVMMNSFCFLVVAGAYIKLYCDLPRGDFEAVWDCAMVRHVAWLIFADGLLYCPVAFLSFASMLGLFPVTPEAVKSVLLVVLPLPACLNPLLYLLFNPHFRDDLRRLRPRAGDSGPLAYAAAGELEKSSCDSTQALVAFSDVDLILEASEAGRPPGLETYGFPSVTLISCQQPGAPRLEGSHCVEPEGNHFGNPQPSMDGELLLRAEGSTPAGGGLSGGGGFQPSGLAFASHV

SEQ ID NO: 51381 - protein, 232 aa, Homo sapiens
MNNLTELQPGLFHHLRFLEELRLSGNHLSHIPGQAFSGLYSLKILMLQNNQLGGIPAEALWELPSLQSLRLDANLISLVPERSFEGLSSLRHLWLDDNALTEIPVRALNNLPALQAMTLALNRISHIPDYAFQNLTSLVVLDLNYNKLQEFPVAIRTLGRLQELSLNGAMDIQEFPDLKGTTSLEILTLTRAGIRLLPSGMCQQLPRLRVLELSHNQIEELPSLHRCQKLEE

SEQ ID NO: 51382 - protein, 967 aa, Homo sapiens
MPSPPGLRALWLCAALCASRRAGGAPQPGPGPTACPAPCHCQEDGIMLSADCSELGLSAVPGDLDPLTAYLDLSMNNLTELQPGLFHHLRFLEELRLSGNHLSHIPGQAFSGLYSLKILMLQNNQLGGIPAEALWELPSLQSLRLDANLISLVPERSFEGLSSLRHLWLDDNALTEIPVRALNNLPALQAMTLALNRISHIPDYAFQNLTSLVVLHLHNNRIQHLGTHSFEGLHNLETLDLNYNKLQEFPVAIRTLGRLQELGFHNNNIKAIPEKAFMGNPLLQTIHFYDNPIQFVGRSAFQYLPKLHTLSLNGAMDIQEFPDLKGTTSLEILTLTRAGIRLLPSGMCQQLPRLRVLELSHNQIEELPSLHRCQKLEEIGLQHNRIWEIGADTFSQLSSLQALDLSWNAIRSIHPEAFSTLHSLVKLDLTDNQLTTLPLAGLGGLMHLKLKGNLALSQAFSKDSFPKLRILEVPYAYQCCPYGMCASFFKASGQWEAEDLHLDDEESSKRPLGLLARQAENHYDQDLDELQLEMEDSKPHPSVQCSPTPGPFKPCEYLFESWGIRLAVWAIVLLSVLCNGLVLLTVFAGGPVPLPPVKFVVGAIAGANTLTGISCGLLASVDALTFGQFSEYGARWETGLGCRATGFLAVLGSEASVLLLTLAAVQCSVSVSCVRAYGKSPSLGSVRAGVLGCLALAGLAAALPLASVGEYGASPLCLPYAPPEGQPAALGFTVALVMMNSFCFLVVAGAYIKLYCDLPRGDFEAVWDCAMVRHVAWLIFADGLLYCPVAFLSFASMLGLFPVTPEAVKSVLLVVLPLPACLNPLLYLLFNPHFRDDLRRLRPRAGDSGPLAYAAAGELEKSSCDSTQALVAFSDVDLILEASEAGRPPGLETYGFPSVTLISCQQPGAPRLEGSHCVEPEGNHFGNPQPSMDGELLLRAEGSTPAGGGLSGGGGFQPSGLAFASHV

SEQ ID NO: 51383 - protein, 75 aa, Homo sapiens
MLSADCSELGLSAVPGDLDPLTAYLAVPGMVAEGKADRTGGGGSSRPEKTRRSLEEAIDRTIGGAQELWAPEVSS

SEQ ID NO: 51384 - protein, 828 aa, Homo sapiens
MRLEGEGRSARAGQNLSRAGSARRGAPRDLSMNNLTELQPGLFHHLRFLEELRLSGNHLSHIPGQAFSGLYSLKILMLQNNQLGGIPAEALWELPSLQSLDLNYNKLQEFPVAIRTLGRLQELGFHNNNIKAIPEKAFMGNPLLQTIHFYDNPIQFVGRSAFQYLPKLHTLSLNGAMDIQEFPDLKGTTSLEILTLTRAGIRLLPSGMCQQLPRLRVLELSHNQIEELPSLHRCQKLEEIGLQHNRIWEIGADTFSQLSSLQALDLSWNAIRSIHPEAFSTLHSLVKLDLTDNQLTTLPLAGLGGLMHLKLKGNLALSQAFSKDSFPKLRILEVPYAYQCCPYGMCASFFKASGQWEAEDLHLDDEESSKRPLGLLARQAENHYDQDLDELQLEMEDSKPHPSVQCSPTPGPFKPCEYLFESWGIRLAVWAIVLLSVLCNGLVLLTVFAGGPVPLPPVKFVVGAIAGANTLTGISCGLLASVDALTFGQFSEYGARWETGLGCRATGFLAVLGSEASVLLLTLAAVQCSVSVSCVRAYGKSPSLGSVRAGVLGCLALAGLAAALPLASVGEYGASPLCLPYAPPEGQPAALGFTVALVMMNSFCFLVVAGAYIKLYCDLPRGDFEAVWDCAMVRHVAWLIFADGLLYCPVAFLSFASMLGLFPVTPEAVKSVLLVVLPLPACLNPLLYLLFNPHFRDDLRRLRPRAGDSGPLAYAAAGELEKSSCDSTQALVAFSDVDLILEASEAGRPPGLETYGFPSVTLISCQQPGAPRLEGSHCVEPEGNHFGNPQPSMDGELLLRAEGSTPAGGGLSGGGGFQPSGLAFASHV

SEQ ID NO: 51385 - protein, 2012 aa, Homo sapiens
METLNGAGDTGGKPSTRGGDPAARSRRTEGIRAAYRRGDRGGARDLLEEACDQCASQLEKGQLLSIPAAYGDLEMVRYLLSKRLVELPTEPTDDNPAVVAAYFGHTAVVQELLEPLTPKQTEWEQTAPFSGTFPLSCHLLPGPCSPQRLLNWMLALACQRGHLGVVKLLVLTHGADPESYAVRKNEFPVIVRLPLYAAIKSGNEDIAIFLLRHGAYFCSYILLDSPDPSKHLLRKYFIEASPLPSSYPGKTALRVKWSHLRLPWVDLDWLIDISCQITELDLSANCLATLPSVIPWGLINLRKLNLSDNHLGELPGVQSSDEIICSRLLEIDISSNKLSHLPPGFLHLSKLQKLTASKNCLEKLFEEENATNWIGLRKLQELDISDNKLTELPALFLHSFKSLNSLNVSRNNLKVFPDPWACPLKCCKASRNALECLPDKMAVFWKNHLKDVDFSENALKEVPLGLFQLDALMFLRLQGNQLAALPPQEKWTCRQLKTLDLSRNQLGKNEDGLKTKRIAFFTTRGRQRSGTEAASVLEFPAFLSESLEVLCLNDNHLDTVPPSVCLLKSLSELYLGNNPGLRELPPELGQLGNLWQLDTEDLTISNVPAEIQKEGPKAMLSYLRAQLRKAEKCKLMKMIIVGPPRQGKSTLLEILQTGRAPQVVHGEATIRTTKWELQRPAGSRAKVESVEFNVWDIGGPASMATVNQCFFTDKALYVVVWNLALGEEAVANLQFWLLNIEAKAPNAVVLVVGTHLDLIEAKFRVERIATLRAYVLALCRSPSGSRATGFPDITFKHLHEISCKSLEGQEGLRQLIFHVTCSMKDVGSTIGCQRLAGRLIPRSYLSLQEAVLAEQQRRSRDDDVQYLTDRQLEQLVEQTPDNDIKDYEDLQSAISFLIETGTLLHFPDTSHGLRNLYFLDPIWLSECLQRIFNIKGSRSVAKNGVIRAEDLRMLLVGTGFTQQTEEQYFQFLAKFEIALPVANDSYLLPHLLPSKPGLDTHGMRHPTANTIQRVFKMSFVPVGFWQRFIARMLISLAEMDLQLFENKKNTKSRNRKVTIYSFTGNQRNRCSTFRVKRNQTIYWQEGLLVTFDGGYLSVESSDVNWKKKKSGGMKIVCQSEVRDFSAMAFITDHVNSLIDQWFPALTATESDGTPLMEQYVPCPVCETAWAQHTDPSEKSEDVQYFDMEDCVLTAIERDFISCPRHPDLPVPLQELVPELFMTDFPARLFLENSKLEHSEDEGSVLGQGGSGTVIYRARYQGQPVAVKRFHIKKFKNFANVPADTMLRHLRATDAMKNFSEFRQEASMLHALQHPCIVALIGISIHPLCFALELAPLSSLNTVLSENARDSSFIPLGHMLTQKIAYQIASGLAYLHKKNIIFCDLKSDNILVWSLDVKEHINIKLSDYGISRQSFHEGALGVEGTPGYQAPEIRPRIVYDEKVDMFSYGMVLYELLSGQRPALGHHQLQIAKKLSKGIRPVLGQPEEVQFRRLQALMMECWDTKPEKRPLALSVVSQMKDPTFATFMYELCCGKQTAFFSSQGQEYTVVFWDGKEESRNYTVVNTEKGLMEVQRMCCPGMKVSCQLQVQRSLWTATEDQKIYIYTLKGMCPLNTPQQALDTPAVVTCFLAVPVIKKNSYLVLAGLADGLVAVFPVVRGTPKDSCSYLCSHTANRSKFSIADEDARQNPYPVKAMEVVNSGSEVWYSNGPGLLVIDCASLEICRRLEPYMAPSMVTSVVCSSEGRGEEVVWCLDDKANSLVMYHSTTYQLCARYFCGVPSPLRDMFPVRPLDTEPPAASHTANPKVPEGDSIADVSIMYSEELGTQILIHQESLTDYCSMSSYSSSPPRQAARSPSSLPSSPASSSSVPFSTDCEDSDMLHTPGAASDRSEHDLTPMDGETFSQHLQAVKILAVRDLIWVPRRGGDVIVIGLEKDSGAQRGRVIAVLKARELTPHGVLVDAAVVAKDTVVCTFENENTEWCLAVWRGWGAREFDIFYQSYEELGRLEACTRKRR

SEQ ID NO: 51386 - protein, 2015 aa, Homo sapiens
MAGMSQRPPSMYWCVGPEESAVCPERAMETLNGAGDTGGKPSTRGGDPAARSRRTEGIRAAYRRGDRGGARDLLEEACDQCASQLEKGQLLSIPAAYGDLEMVRYLLSKRLVELPTEPTDDNPAVVAAYFGHTAVVQELLESLPGPCSPQRLLNWMLALACQRGHLGVVKLLVLTHGADPESYAVRKNEFPVIVRLPLYAAIKSGNEDIAIFLLRHGAYFCSYILLDSPDPSKHLLRKYFIEASPLPSSYPGKTALRVKWSHLRLPWVDLDWLIDISCQITELDLSANCLATLPSVIPWGLINLRKLNLSDNHLGELPGVQSSDEIICSRLLEIDISSNKLSHLPPGFLHLSKLQKLTASKNCLEKLFEEENATNWIGLRKLQELDISDNKLTELPALFLHSFKSLNSLNVSRNNLKVFPDPWACPLKCCKASRNALECLPDKMAVFWKNHLKDVDFSENALKEVPLGLFQLDALMFLRLQGNQLAALPPQEKWTCRQLKTLDLSRNQLGKNEDGLKTKRIAFFTTRGRQRSGTEAASVLEFPAFLSESLEVLCLNDNHLDTVPPSVCLLKSLSELYLGNNPGLRELPPELGQLGNLWQLDTEDLTISNVPAEIQKEGPKAMLSYLRAQLRKAEKCKLMKMIIVGPPRQGKSTLLEILQTGRAPQVVHGEATIRTTKWELQRPAGSRAKVESVEFNVWDIGGPASMATVNQCFFTDKALYVVVWNLALGEEAVANLQFWLLNIEAKAPNAVVLVVGTHLDLIEAKFRVERIATLRAYVLALCRSPSGSRATGFPDITFKHLHEISCKSLEGQEGLRQLIFHVTCSMKDVGSTIGCQRLAGRLIPRSYLSLQEAVLAEQQRRSRDDDVQYLTDRQLEQLVEQTPDNDIKDYEDLQSAISFLIETGTLLHFPDTSHGLRNLYFLDPIWLSECLQRIFNIKGSRSVAKNGVIRAEDLRMLLVGTGFTQQTEEQYFQFLAKFEIALPVANDSYLLPHLLPSKPGLDTHGMRHPTANTIQRVFKMSFVPVGFWQRFIARMLISLAEMDLQLFENKKNTKSRNRKVTIYSFTGNQRNRCSTFRVKRNQTIYWQEGLLVTFDGGYLSVESSDVNWKKKKSGGMKIVCQSEVRDFSAMAFITDHVNSLIDQWFPALTATESDGTPLMEQYVPCPVCETAWAQHTDPSEKSEDVQYFDMEDCVLTAIERDFISCPRHPDLPVPLQELVPELFMTDFPARLFLENSKLEHSEDEGSVLGQGGSGTVIYRARYQGQPVAVKRFHIKKFKNFANVPADTMLRHLRATDAMKNFSEFRQEASMLHALQHPCIVALIGISIHPLCFALELAPLSSLNTVLSENARDSSFIPLGHMLTQKIAYQIASGLAYLHKKNIIFCDLKSDNILVWSLDVKEHINIKLSDYGISRQSFHEGALGVEGTPGYQAPEIRPRIVYDEKVDMFSYGMVLYELLSGQRPALGHHQLQIAKKLSKGIRPVLGQPEEVQFRRLQALMMECWDTKPEKRPLALSVVSQMKDPTFATFMYELCCGKQTAFFSSQGQEYTVVFWDGKEESRNYTVVNTEKGLMEVQRMCCPGMKVSCQLQVQRSLWTATEDQKIYIYTLKGMCPLNTPQQALDTPAVVTCFLAVPVIKKNSYLVLAGLADGLVAVFPVVRGTPKDSCSYLCSHTANRSKFSIADEDARQNPYPVKAMEVVNSGSEVWYSNGPGLLVIDCASLEICRRLEPYMAPSMVTSVVCSSEGRGEEVVWCLDDKANSLVMYHSTTYQLCARYFCGVPSPLRDMFPVRPLDTEPPAASHTANPKVPEGDSIADVSIMYSEELGTQILIHQESLTDYCSMSSYSSSPPRQAARSPSSLPSSPASSSSVPFSTDCEDSDMLHTPGAASDRSEHDLTPMDGETFSQHLQAVKILAVRDLIWVPRRGGDVIVIGLEKDSGAQRGRVIAVLKARELTPHGVLVDAAVVAKDTVVCTFENENTEWCLAVWRGWGAREFDIFYQSYEELGRLEACTRKRR

SEQ ID NO: 51387 - protein, 674 aa, Homo sapiens
MLHALQHPCIVALIGISIHPLCFALELAPLSSLNTVLSENARDSSFIPLGHMLTQKIAYQIASGLAYLHKKNIIFCDLKSDNILVWSLDVKEHINIKLSDYGISRQSFHEGALGVEGTPGYQAPEIRPRIVYDEKVDMFSYGMVLYELLSGQRPALGHHQLQIAKKLSKGIRPVLGQPEEVQFRRLQALMMECWDTKPEKRPLALSVVSQMKDPTFATFMYELCCGKQTAFFSSQGQEYTVVFWDGKEESRNYTVVNTEKGLMEVQRMCCPGMKVSCQLQVQRSLWTATEDQKIYIYTLKGMCPLNTPQQALDTPAVVTCFLAVPVIKKNSYLVLAGLADGLVAVFPVVRGTPKDSCSYLCSHTANRSKFSIADEDARQNPYPVKAMEVVNSGSEVWYSNGPGLLVIDCASLEICRRLEPYMAPSMVTSVVCSSEGRGEEVVWCLDDKANSLVMYHSTTYQLCARYFCGVPSPLRDMFPVRPLDTEPPAASHTANPKVPEGDSIADVSIMYSEELGTQILIHQESLTDYCSMSSYSSSPPRQAARSPSSLPSSPASSSSVPFSTDCEDSDMLHTPGAASDRSEHDLTPMDGETFSQHLQAVKILAVRDLIWVPRRGGDVIVIGLEKDSGAQRGRVIAVLKARELTPHGIMPVSSVKVCWAGWPVRDMVYMVAVM

SEQ ID NO: 51388 - protein, 32 aa, Homo sapiens
MAGMSQRPPSMYWCVGPEESAVCPERAMETLN

SEQ ID NO: 51389 - protein, 501 aa, Homo sapiens
MFSYGMVLYELLSGQRPALGHHQLQIAKKLSKGIRPVLGQPEEVQFRRLQALMMECWDTKPEKRPLALSVVSQMKDPTFATFMYELCCGKQTAFFSSQGQEYTVVFWDGKEESRNYTVVNTEKGLMEVQRMCCPGMKVSCQLQVQRSLWTATEDQKIYIYTLKGMCPLNTPQQALDTPAVVTCFLAVPVIKKNSYLVLAGLADGLVAVFPVVRGTPKDSCSYLCSHTANRSKFSIADEDARQNPYPVKAMEVVNSGSEVWYSNGPGLLVIDCASLEICRRLEPYMAPSMVTSVVCSSEGRGEEVVWCLDDKANSLVMYHSTTYQLCARYFCGVPSPLRDMFPVRPLDTEPPAASHTANPKVPEGDSIADVSIMYSEELGTQILIHQESLTDYCSMSSYSSSPPRQAARSPSSLPSSPASSSSVPFSTDCEDSDMLHTPGAASDRSEHDLTPMDGETFSQHLQAVKILAVRDLIWVPRRVEMLSSLAWRRILAPSGAESLPS

SEQ ID NO: 51390 - protein, 2527 aa, Homo sapiens
MASGSCQGCEEDEETLKKLIVRLNNVQEGKQIETLVQILEDLLVFTYSERASKLFQGKNIHVPLLIVLDSYMRVASVQQVGWSLLCKLIEVCPGTMQSLMGPQDVGNDWEVLGVHQLILKMLTVHNASVNLSVIGLKTLDLLLTSGKITLLILDEESDIFMLIFDAMHSFPANDEVQKLGCKALHVLFERVSEEQLTEFVENKDYMILLSALTNFKDEEEIVLHVLHCLHSLAIPCNNVEVLMSGNVRCYNIVVEAMKAFPMSERIQEVSCCLLHRLTLGNFFNILVLNEVHEFVVKAVQQYPENAALQISALSCLALLTETIFLNQDLEEKNENQENDDEGEEDKLFWLEACYKALTWHRKNKHVQEAACWALNNLLMYQNSLHEKIGDEDGHFPAHREVMLSMLMHSSSKEVFQASANALSTLLEQNVNFRKILLSKGIHLNVLELMQKHIHSPEVAESGCKMLNHLFEGSNTSLDIMAAVVPKILTVMKRHETSLPVQLEALRAILHFIVPGMPEESREDTEFHHKLNMVKKQCFKNDIHKLVLAALNRFIGNPGIQKCGLKVISSIVHFPDALEMLSLEGAMDSVLHTLQMYPDDQEIQCLGLSLIGYLITKKNVFIGTGHLLAKILVSSLYRFKDVAEIQTKGFQTILAILKLSASFSKLLVHHSFDLVIFHQMSSNIMEQKDQQFLNLCCKCFAKVAMDDYLKNVMLERACDQNNSIMVECLLLLGADANQAKEGSSLICQVCEKESSPKLVELLLNSGSREQDVRKALTISIGKGDSQIISLLLRRLALDVANNSICLGGFCIGKVEPSWLGPLFPDKTSNLRKQTNIASTLARMVIRYQMKSAVEEGTASGSDGNFSEDVLSKFDEWTFIPDSSMDSVFAQSDDLDSEGSEGSFLVKKKSNSISVGEFYRDAVLQRCSPNLQRHSNSLGPIFDHEDLLKRKRKILSSDDSLRSSKLQSHMRHSDSISSLASEREYITSLDLSANELRDIDALSQKCCISVHLEHLEKLELHQNALTSFPQQLCETLKSLTHLDLHSNKFTSFPSYLLKMSCIANLDVSRNDIGPSVVLDPTVKCPTLKQFNLSYNQLSFVPENLTDVVEKLEQLILEGNKISGICSPLRLKELKILNLSKNHISSLSENFLEACPKVESFSARMNFLAAMPFLPPSMTILKLSQNKFSCIPEAILNLPHLRSLDMSSNDIQYLPGPAHWKSLNLRELLFSHNQISILDLSEKAYLWSRVEKLHLSHNKLKEIPPEIGCLENLTSLDVSYNLELRSFPNEMGKLSKIWDLPLDELHLNFDFKHIGCKAKDIIRFLQQRLKKAVPYNRMKLMIVGNTGSGKTTLLQQLMKTKKSDLGMQSATVGIDVKDWPIQIRDKRKRDLVLNVWDFAGREEFYSTHPHFMTQRALYLAVYDLSKGQAEVDAMKPWLFNIKARASSSPVILVGTHLDVSDEKQRKACMSKITKELLNKRGFPAIRDYHFVNATEESDALAKLRKTIINESLNFKIRDQLVVGQLIPDCYVELEKIILSERKNVPIEFPVIDRKRLLQLVRENQLQLDENELPHAVHFLNESGVLLHFQDPALQLSDLYFVEPKWLCKIMAQILTVKVEGCPKHPKGIISRRDVEKFLSKKRKFPKNYMSQYFKLLEKFQIALPIGEEYLLVPSSLSDHRPVIELPHCENSEIIIRLYEMPYFPMGFWSRLINRLLEISPYMLSGRERALRPNRMYWRQGIYLNWSPEAYCLVGSEVLDNHPESFLKITVPSCRKGCILLGQVVDHIDSLMEEWFPGLLEIDICGEGETLLKKWALYSFNDGEEHQKILLDDLMKKAEEGDLLVNPDQPRLTIPISQIAPDLILADLPRNIMLNNDELEFEQAPEFLLGDGSFGSVYRAAYEGEEVAVKIFNKHTSLRLLRQELVVLCHLHHPSLISLLAAGIRPRMLVMELASKGSLDRLLQQDKASLTRTLQHRIALHVADGLRYLHSAMIIYRDLKPHNVLLFTLYPNAAIIAKIADYGIAQYCCRMGIKTSEGTPGFRAPEVARGNVIYNQQADVYSFGLLLYDILTTGGRIVEGLKFPNEFDELEIQGKLPDPVKEYGCAPWPMVEKLIKQCLKENPQERPTSAQVFDILNSAELVCLTRRILLPKNVIVECMVATHHNSRNASIWLGCGHTDRGQLSFLDLNTEGYTSEEVADSRILCLALVHLPVEKESWIVSGTQSGTLLVINTEDGKKRHTLEKMTDSVTCLYCNSFSKQSKQKNFLLVGTADGKLAIFEDKTVKLKGAAPLKILNIGNVSTPLMCLSESTNSTERNVMWGGCGTKIFSFSNDFTIQKLIETRTSQLFSYAAFSDSNIITVVVDTALYIAKQNSPVVEVWDKKTEKLCGLIDCVHFLREVMVKENKESKHKMSYSGRVKTLCLQKNTALWIGTGGGHILLLDLSTRRLIRVIYNFCNSVRVMMTAQLGSLKNVMLVLGYNRKNTEGTQKQKEIQSCLTVWDINLPHEVQNLEKHIEVRKELAEKMRRTSVE

SEQ ID NO: 51391 - protein, 193 aa, Homo sapiens
MTSSCFRSTTRRSLSSQTAQRLVCPQFINGTAKDSILTSRSQVPIILQWNKSSKKFVPHGDIPNMEDVLAVKSFRMQNTLYLSLTRFIGDSRVMRWNSKQFVEIQALPSRGAMTLQPFSFKDNHYLALGSDYTFSQIYQWDKEKQLFKKFKEIYVQAPRSFTAVSTDRRDFFFASSFKGKTKIFEHIIVDLSL

SEQ ID NO: 51392 - protein, 545 aa, Homo sapiens
MALRRGGCGALGLLLLLLGAACLIPRSAQVRRLARCPATCSCTKESIICVGSSWVPRIVPGDISSLSLVNGTFSEIKDRMFSHLPSLQLLLLNSNSFTIIRDDAFAGLFHLEYLFIEGNKIETISRNAFRGLRDLTHLSLANNHIKALPRDVFSDLDSLIELDLRGNKFECDCKAKWLYLWLKMTNSTVSDVLCIGPPEYQEKKLNDVTSFDYECTTTDFVVHQTLPYQSVSVDTFNSKNDVYVAIAQPSMENCMVLEWDHIEMNFRSYDNITGQSIVGCKAILIDDQVFVVVAQLFGGSHIYKYDESWTKFVKFQDIEVSRISKPNDIELFQIDDETFFVIADSSKAGLSTVYKWNSKGFYSYQSLHEWFRDTDAEFVDIDGKSHLILSSRSQVPIILQWNKSSKKFVPHGDIPNMEDVLAVKSFRMQNTLYLSLTRFIGDSRVMRWNSKQFVEIQALPSRGAMTLQPFSFKDNHYLALGSDYTFSQIYQWDKEKQLFKKFKEIYVQAPRSFTAVSTDRRDFFFASSFKGKTKIFEHIIVDLSL

SEQ ID NO: 51393 - protein, 548 aa, Homo sapiens
MAGLRARGGPGPGLLALSALGFCLMLQVSAKRPPKTPPCPPSCSCTRDTAFCVDSKAVPRNLPSEVISLTLVNAAFSEIQDGAFSHLPLLQFLLLNSNKFTLIGDNAFTGLSHLQYLFIENNDIWALSKFTFRGLKSLTHLSLANNNLQTLPRDIFRPLDILNDLDLRGNSLNCDCKVKWLVEWLAHTNTTVAPIYCASPPRFQEHKVQDLPLREFDCITTDFVLYQTLAFPAVSAEPFLYSSDLYLALAQPGVSACTILKWDYVERQLRDYDRIPAPSAVHCKPMVVDSQLYVVVAQLFGGSYIYHWDPNTTRFTRLQDIDPQRVRKPNDLEAFRIDGDWYFAVADSSKAGATSLYRWHQNGFYSHQALHPWHRDTDLEFVDGEGKPRLIVSSSSQAPVIYQWSRTQKQFVAQGEVTQVPDAQAVKHFRAGRDSYLCLSRYIGDSKILRWEGTRFSEVQALPSRGSLALQPFLVGGRRYLALGSDFSFTQIYQWDEGRQKFVRFQELAVQAPRAFCYMPAGDAQLLLAPSFKGQTLVYRHIVVDLSA

SEQ ID NO: 51394 - protein, 537 aa, Homo sapiens
MGGAGILLLLLAGAGVVVAWRPPKGKCPLRCSCSKDSALCEGSPDLPVSFSPTLLSLSLVRTGVTQLKAGSFLRIPSLHLLLFTSNSFSVIEDDAFAGLSHLQYLFIEDNEIGSISKNALRGLRSLTHLSLANNHLETLPRFLFRGLDTLTHVDLRGNPFQCDCRVLWLLQWMPTVNASVGTGACAGPASLSHMQLHHLDPKTFKCRAIELSWFQTVGESALSVEPFSYQGEPHIVLAQPFAGRCLILSWDYSLQRFRPEEELPAASVVSCKPLVLGPSLFVLAARLWGGSQLWARPSPGLRLAPTQTLAPRRLLRPNDAELLWLEGQPCFVVADASKAGSTTLLCRDGPGFYPHQSLHAWHRDTDAEALELDGRPHLLLASASQRPVLFHWTGGRFERRTDIPEAEDVYATRHFQAGGDVFLCLTRYIGDSMVMRWDGSMFRLLQQLPSRGAHVFQPLLIARDQLAILGSDFAFSQVLRLEPDKGLLEPLQELGPPALVAPRAFAHITMAGRRFLFAACFKGPTQIYQHHEIDLSA

SEQ ID NO: 51395 - protein, 494 aa, Homo sapiens
MGGAGILLLLLAGAGVVVAWRPPKGKCPLRCSCSKDSALCEGSPDLPVSFSPTLLSLSLVRTGVTQLKAGSFLRIPSLHLLLFTSNSFSVIEDDAFAGLSHLQYLFIEDNEIGSISKNALRGLRSLTHLSLANNHLETLPRFLFRGLDTLTHVDLRGNPFQCDCRVLWLLQWMPTVNASVGTGACAGPASLSHMQLHHLDPKTFKCRAIELSWFQTVGESALSVEPFSYQGEPHIVLAQPFAGRCLILSWDYSLQRFRPEEELPGEPPPRPSACPAACLAGLTCLPTSPQRPPWCPASHWCWARASSCWLPACGGAHSCGPGPVPACAWPQRRPWPRGGCCGPMTPSSCGWKGNPASWWPMPPRRAAPRCCAATGPAFTRTRACTPGTGTRTLRPWSWTAGPTCCWPRLPSGPCSSTGPVAASRDAQTSPRPRMSMPHATSRLVGTCSCASHATLGTPWSCAGTAPCFVCCSNFPRAVPTSSSHCSSPGTSWPS

SEQ ID NO: 51396 - protein, 538 aa, Homo sapiens
MGGAGILLLLLAGAGVVVAWRPPKGKCPLRCSCSKDSALCEGSPDLPVSFSPTLLSLSLVRTGVTQLKAGSFLRIPSLHLLLFTSNSFSVIEDDAFAGLSHLQYLFIEDNEIGSISKNALRGLRSLTHLSLANNHLETLPRFLFRGLDTLTHVDLRGNPFQCDCRVLWLLQWMPTVNASVGTGACAGPASLSHMQLHHLDPKTFKCRAIELSWFQTVGESALSVEPFSYQGEPHIVLAQPFAGRCLILSWDYSLQRFRPEEELPAASVVSCKPLVLGPSLFVLAARLWGGSQLWARPSPGLRLAPTQTLAPRRLLRPNDAELLWLEGQPCFVVADASKAGSTTLLCRDGPGFYPHQSLHAWHRDTDAEALELDGRPHLLLASASQRPVLFHWTGGRFERRTDIPEAEDVYATRHFQAGGDVFLCLTRYIGDSMVVMRWDGSMFRLLQQLPSRGAHVFQPLLIARDQLAILGSDFAFSQVLRLEPDKGLLEPLQELGPPALVAPRAFAHITMAGRRFLFAACFKGPTQIYQHHEIDLSA

SEQ ID NO: 51397 - protein, 696 aa, Homo sapiens
MATPGSEPQPFVPALSVATLHPLHHPHHHHHHHQHHGGTGAPGGAGGGGGGSGGFNLPLNRGLERALEEAANSGGLNLSARKLKEFPRTAAPGHDLSDTVQADLSKNRLVEVPMELCHFVSLEILNLYHNCIRVIPEAIVNLQMLTYLNLSRNQLSALPACLCGLPLKVLIASNNKLGSLPEEIGQLKQLMELDVSCNEITALPQQIGQLKSLRELNVRRNYLKVLPQELVDLSLVKFDFSCNKVLVIPICFREMKQLQVLLLENNPLQSPPAQICTKGKVHIFKYLSIQACQIKTADSLYLHTMERPHLHQHVEDGKKDSDSGVGSDNGDKRLSATEPSDEDTVSLNVPMSNIMEEEQIIKEDSCHRLSPVKGEFHQEFQPEPSLLGDSTNSGEERDQFTDRADGLHSEFMNYKARAEDCEELLRIEEDVHWQTEGIISSSKDQDMDIAMIEQLREAVDLLQDPNGLSTDITERSVLNLYPMGSAEALELQDSALNGQIQLETSPVCEVQSDLTLQSNGSQYSPNEIRENSPAVSPTTNSTAPFGLKPRSVFLRPQRNLESIDPQFTIRRKMEQMREEKELVEQLRESIEMRLKVSLHEDLGAALMDGVVLCHLVNHIRPRSVASIHVPSPAVPKLSMAKCRRNVENFLEACRKLGVPEEKLCLPHHILEEKGLVKVGITIQALLDITVTKALFT

SEQ ID NO: 51398 - protein, 728 aa, Homo sapiens
MATPGSEPQPFVPALSVATLHPLHHPHHHHHHHQHHGGTGAPGGAGGGGGGSGGFNLPLNRGLERALEEAANSGGLNLSARKLKEFPRTAAPGHDLSDTVQADLSKNRLVEVPMELCHFVSLEILNLYHNCIRVIPEAIVNLQMLTYLNLSRNQLSALPACLCGLPLKVLIASNNKLGSLPEEIGQLKQLMELDVSCNEITALPQQIGQLKSLRELNVRRNYLKVLPQELVDLSLVKFDFSCNKVLVIPICFREMKQLQVLLLENNPLQSPPAQICTKGKVHIFKYLSIQACQIKTADSLYLHTMERPHLHQHVEDGKKDSDSGVGSDNGDKRLSATEPSDEDTVSLNVPMSNIMEEEQIIKEDSCHRLSPVKGEFHQEFQPEPSLLGDSTNSGEERDQFTDRADGLHSEFMNYKARAEDCEELLRIEEDVHWQTEGIISSSKDQDMDIAMIEQLREAVDLLQDPNGLSTDITERSVLNLYPMGSAEALELQDSALNGQIQLETSPVCEVQSDLTLQSNGSQYSPNEIRENSPAVSPTTNSTAPFGLKPRSVFLRPQRNLESIDPQFTIRRKMEQMREEKELVEQLRESIEMRLKVSLHEDLGAALMDGVVLCHLVNHIRPRSVASIHVPSPAVPKLSMAKCRRNVENFLEACRKLGVPEADLCSPCDILQLDFRHIRKTVDTLLALGEKAPPPTSALRSRDLIGFCLVHILFIVLVYITYHWNALSA

SEQ ID NO: 51399 - protein, 763 aa, Homo sapiens
MATPGSEPQPFVPALSVATLHPLHHPHHHHHHHQHHGGTGAPGGAGGGGGGSGGFNLPLNRGLERALEEAANSGGLNLSARKLKEFPRTAAPGHDLSDTVQADLSKNRLVEVPMELCHFVSLEILNLYHNCIRVIPEAIVNLQMLTYLNLSRNQLSALPACLCGLPLKVLIASNNKLGSLPEEIGQLKQLMELDVSCNEITALPQQIGQLKSLRELNVRRNYLKVLPQELVDLSLVKFDFSCNKVLVIPICFREMKQLQVLLLENNPLQSPPAQICTKGKVHIFKYLSIQACQIKTADSLYLHTMERPHLHQHVEDGKKDSDSGVGSDNGDKRLSATEPSDEDTVSLNVPMSNIMEEEQIIKEDSCHRLSPVKGEFHQEFQPEPSLLGDSTNSGEERDQFTDRADGLHSEFMNYKARAEDCEELLRIEEDVHWQTEGIISSSKDQDMDIAMIEQLREAVDLLQDPNGLSTDITERSVLNLYPMGSAEALELQDSALNGQIQLETSPVCEVQSDLTLQSNGSQYSPNEIRENSPAVSPTTNSTAPFGLKPRSDPALILPPISFNTLTQAQTWDSSSYSVPSEGDSDNVFLRPQRNLESIDPQFTIRRKMEQMREEKELVEQLRESIEMRLKVSLHEDLGAALMDGVVLCHLVNHIRPRSVASIHVPSPAVPKLSMAKCRRNVENFLEACRKLGVPEADLCSPCDILQLDFRHIRKTVDTLLALGEKAPPPTSALRSRDLIGFCLVHILFIVLVYITYHWNALSA

SEQ ID NO: 51400 - protein, 1093 aa, Homo sapiens
MARPVRGGLGAPRRSPCLLLLWLLLLRLEPVTAAAGPRAPCAAACTCAGDSLDCGGRGLAALPGDLPSWTRSLNLSYNKLSEIDPAGFEDLPNLQEVYLNNNELTAVPSLGAASSHVVSLFLQHNKIRSVEGSQLKAYLSLEVLDLSLNNITEVRNTCFPHGPPIKELNLAGNRIGTLELGAFDGLSRSLLTLRLSKNRITQLPVRAFKLPRLTQLDLNRNRIRLIEGLTFQGLNSLEVLKLQRNNISKLTDGAFWGLSKMHVLHLEYNSLVEVNSGSLYGLTALHQLHLSNNSIARIHRKGWSFCQKLHELVLSFNNLTRLDEESLAELSSLSVLRLSHNSISHIAEGAFKGLRSLRVLDLDHNEISGTIEDTSGAFSGLDSLSKLTLFGNKIKSVAKRAFSGLEGLEHLNLGGNAIRSVQFDAFVKMKNLKELHISSDSFLCDCQLKWLPPWLIGRMLQAFVTATCAHPESLKGQSIFSVPPESFVCDDFLKPQIITQPETTMAMVGKDIRFTCSAASSSSSPMTFAWKKDNEVLTNADMENFVHVHAQDGEVMEYTTILHLRQVTFGHEGRYQCVITNHFGSTYSHKARLTVNVLPSFTKTPHDITIRTTTMARLECAATGHPNPQIAWQKDGGTDFPAARERRMHVMPDDDVFFITDVKIDDAGVYSCTAQNSAGSISANATLTVLETPSLVVPLEDRVVSVGETVALQCKATGNPPPRITWFKGDRPLSLTERHHLTPDNQLLVVQNVVAEDAGRYTCEMSNTLGTERAHSQLSVLPAAGCRKDGTTVGIFTIAVVSSIVLTSLVWVCIIYQTRKKSEEYSVTNTDETVVPPDVPSYLSSQGTLSDRQETVVRTEGGPQANGHIESNGVCPRDASHFPEPDTHSVACRQPKLCAGSAYHKEPWKAMEKAEGTPGPHKMEHGGRVVCSDCNTEVDCYSRGQAFHPQPVSRDSAQPSAPNGPEPGGSDQEHSPHHQCSRTAAGSCPECQGSLYPSNHDRMLTAVKKKPMASLDGKGDSSWTLARLYHPDSTELQPASSLTSGSPERAEAQYLLVSNGHLPKACDASPESTPLTGQLPGKQRVPLLLAPKS

SEQ ID NO: 51401 - protein, 996 aa, Homo sapiens
NLSYNKLSEIDPAGFEDLPNLQEVYLNNNELTAVPSLGAASSHVVSLFLQHNKIRSVEGSQLKAYLSLEVLDLSLNNITEVRNTCFPHGPPIKELNLAGNRIGTLELGAFDGLSRSLLTLRLSKNRITQLPVRAFKLPRLTQLDLNRNRIRLIEGLTFQGLNSLEVLKLQRNNISKLTDGAFWGLSKMHVLHLEYNSLVEVNSGSLYGLTALHQLHLSNNSIARIHRKGWSFCQKLHELVLSFNNLTRLDEESLAELSSLSVLRLSHNSISHIAEGAFKGLRSLRVLDLDHNEISGTIEDTSGAFSGLDSLSKLNLGGNAIRSVQFDAFVKMKNLKELHISSDSFLCDCQLKWLPPWLIGRMLQAFVTATCAHPESLKGQSIFSVPPESFVCDDFLKPQIITQPETTMAMVGKDIRFTCSAASSSSSPMTFAWKKDNEVLTNADMENFVHVHAQDGEVMEYTTILHLRQVTFGHEGRYQCVITNHFGSTYSHKARLTVNVLPSFTKTPHDITIRTTTMARLECAATGHPNPQIAWQKDGGTDFPAARERRMHVMPDDDVFFITDVKIDDAGVYSCTAQNSAGSISANATLTVLETPSLVVPLEDRVVSVGETVALQCKATGNPPPRITWFKGDRPLSLTERHHLTPDNQLLVVQNVVAEDAGRYTCEMSNTLGTERAHSQLSVLPAAGCRKDGTTVGIFTIAVVSSIVLTSLVWVCIIYQTRKKSEEYSVTNTDETVVPPDVPSYLSSQGTLSDRQETVVRTEGGPQANGHIESNGVCPRDASHFPEPDTHSVACRQPKLCAGSAYHKEPWKAMEKAEGTPGPHKMEHGGRVVCSDCNTEVDCYSRGQAFHPQPVSRDSAQPSAPNGPEPGGSDQEHSPHHQCSRTAAGSCPECQGSLYPSNHDRMLTAVKKKPMASLDGKGDSSWTLARLYHPDSTELQPASSLTSGSPERAEAQYLLVSNGHLPKACDASPESTPLTGQLPGKQRVPLLLAPKS

SEQ ID NO: 51402 - protein, 1070 aa, Homo sapiens
MARPVRGGLGAPRRSPCLLLLWLLLLRLEPVTAAAGPRAPCAAACTCAGDSLDCGGRGLAALPGDLPSWTRSLNLSYNKLSEIDPAGFEDLPNLQEVYLNNNELTAVPSLGAASSHVVSLFLQHNKIRSVEGSQLKAYLSLEVLDLSLNNITEVRNTCFPHGPPIKELNLAGNRIGTLELGAFDGLSRSLLTLRLSKNRITQLPVRAFKLPRLTQLDLNRNRIRLIEGLTFQGLNSLEVLKLQRNNISKLTDGAFWGLSKMHVLHLEYNSLVEVNSGSLYGLTALHQLHLSNNSIARIHRKGWSFCQKLHELVLSFNNLTRLDEESLAELSSLSVLRLSHNSISHIAEGAFKGLRSLRVLDLDHNEISGTIEDTSGAFSGLDSLSKLLLLEPSQSAGCSSPSQPHMSAGGRTLFGNKIKSVAKRAFSGLEGLEHLNLGGNAIRSVQFDAFVKMKNLKELHISSDSFLCDCQLKWLPPWLIGRMLQAFVTATCAHPESLKGQSIFSVPPESFVCDDFLKPQIITQPETTMAMVGKDIRFTCSAASSSSSPMTFAWKKDNEVLTNADMENFVHVHAQDGEVMEYTTILHLRQVTFGHEGRYQCVITNHFGSTYSHKARLTVNVLPSFTKTPHDITIRTTTMARLECAATGHPNPQIAWQKDGGTDFPAAQTPSLVVPLEDRVVSVGETVALQCKATGNPPPRITWFKGDRPLSLTERHHLTPDNQLLVVQNVVAEDAGRYTCEMSNTLGTERAHSQLSVLPAAGCRKDGTTVGIFTIAVVSSIVLTSLVWVCIIYQTRKKSEEYSVTNTDETVVPPDVPSYLSSQGTLSDRQETVVRTEGGPQANGHIESNGVCPRDASHFPEPDTHSVACRQPKLCAGSAYHKEPWKAMEKAEGTPGPHKMEHGGRVVCSDCNTEVDCYSRGQAFHPQPVSRDSAQPSAPNGPEPGGSDQEHSPHHQCSRTAAGSCPECQGSLYPSNHDRMLTAVKKKPMASLDGKGDSSWTLARLYHPDSTELQPASSLTSGSPERAEAQYLLVSNGHLPKACDASPESTPLTGQLPGKQRVPLLLAPKS

SEQ ID NO: 51403 - protein, 1065 aa, Homo sapiens
MAPAPLGVPEEQLLGCRSRVLSRLLFIAQTALLLLPAAGAGLCPAPCSCRIPLLDCSRRKLPAPSWRALSGLLPPDTAILDFSHNRLSNWNISLESQTLQEVKMNYNELTEIPYFGEPTSNITLLSLVHNIIPEINAQALQFYPALESLDLSSNIISEIKTSSFPRMQLKYLNLSNNRITTLEAGCFDNLSSSLLVVKLNRNRMSMIPPKIFKLPHLQFLELKRNRIKIVEGLTFQGLDSLRSLKMQRNGISKLKDGAFFGLNNMEELELEHNNLTRVNKGWLYGLRMLQQLYVSQNAIERISPDAWEFCQRLSELDLSYNQLTRLDESAFVGLSLLERLNLGDNRVTHIADGVFRFLSNLQTLDLRNNEISWAIEDASEAFAGLTSLTKLILQGNQIKSITKKAFIGLESLEHLDLNNNAIMSIQENAFSQTHLKELILNTSSLLCDCHLKWLLQWLVDNNFQHSVNVSCAHPEWLAGQSILNVDLKDFVCDDFLKPQIRTHPETIIALRGMNVTLTCTAVSSSDSPMSTVWRKDSEILYDVDTENFVRYWQQAGEALEYTSILHLFNVNFTDEGKYQCIVTNHFGSNYSQKAKLTVNEMPSFLKTPMDLTIRTGAMARLECAAEGHPAPQISWQKDGGTDFPAARERRMHVMPEDDVFFIANVKIEDMGIYSCMAQNTAGGLSANASLTVLETPSFIRPLEDKTVTRGETAVLQCIAGGSPAPRLNWTKDDGPLLVTERHFFAAANQLLIIVDAGLEDAGKYTCIMSNTLGTERGHIYLNVISSPNCDSSQSSIGHEDDGWTTVGIVIIVVVCCVVGTSLIWVIVIYHMRRKNEDYSITNTEELNLPADIPSYLSSQGTLSEPQEGYSNSEAGSHQQLMPPANGYIHKGTDGGTGTRVICSDCYDNANIYSRTREYCPYTYIAEEDVLDQTLSSLMVQMPKETYLVHPPQDTTALESLIPSANREPSAFPTNHERISEKKLPSTQMSGETLQRPVWNINRELGLPHPPFSQQPVHESPQLHQNEGLAGREPDCSASSMSCHRLQDHAFDFSRTRNIQDGSEGT

SEQ ID NO: 51404 - protein, 291 aa, Homo sapiens
MESERSKRMGNACIPLKRIAYFLCLLSALLLTEGKKPAKPKCPAVCTCTKDNALCENARSIPRTVPPDVISLSFVRSGFTEISEGSFLFTPSLQLLLFTSNSFDVISDDAFIGLPHLEYLFIENNNIKSISRHTFRGLKSLIHLSLANNNLQTLPKDIFKGLDSLTNVDLRGNSFNCDCKLKWLVEWLGHTNATVEDIYCEGPPEYKKRKINSLSSKDFDCIITEFAKSQDLPYQSLSIDTFSYLNDEYVVIAQPFTGKCIFLEWDHVEKTFRNYDNITVLREIHRFTNMS

SEQ ID NO: 51405 - protein, 557 aa, Homo sapiens
MESERSKRMGNACIPLKRIAYFLCLLSALLLTEGKKPAKPKCPAVCTCTKDNALCENARSIPRTVPPDVISLSFVRSGFTEISEGSFLFTPSLQLLLFTSNSFDVISDDAFIGLPHLEYLFIENNNIKSISRHTFRGLKSLIHLSLANNNLQTLPKDIFKGLDSLTNVDLRGNSFNCDCKLKWLVEWLGHTNATVEDIYCEGPPEYKKRKINSLSSKDFDCIITEFAKSQDLPYQSLSIDTFSYLNDEYVVIAQPFTGKCIFLEWDHVEKTFRNYDNITGTSTVVCKPIVIETQLYVIVAQLFGGSHIYKRDSFANKFIKIQDIEILKIRKPNDIETFKIENNWYFVVADSSKAGFTTIYKWNGNGFYSHQSLHAWYRDTDVEYLEIVRTPQTLRTPHLILSSSSQRPVIYQWNKATQLFTNQTDIPNMEDVYAVKHFSVKGDVYICLTRFIGDSKVMKWGGSSFQDIQRMPSRGSMVFQPLQINNYQYAILGSDYSFTQVYNWDAEKAKFVKFQELNVQAPRSFTHVSINKRNFLFASSFKGNTQIYKHVIVDLSA

SEQ ID NO: 51406 - protein, 509 aa, Homo sapiens
MESERSKRMGNACIPLKRIAYFLCLLSALLLTEGKKPAKPKCPAVCTCTKDNALCENARSIPRTVPPDVISLSFVRSGFTEISEGSFLFTPSLQLLSLANNNLQTLPKDIFKGLDSLTNVDLRGNSFNCDCKLKWLVEWLGHTNATVEDIYCEGPPEYKKRKINSLSSKDFDCIITEFAKSQDLPYQSLSIDTFSYLNDEYVVIAQPFTGKCIFLEWDHVEKTFRNYDNITGTSTVVCKPIVIETQLYVIVAQLFGGSHIYKRDSFANKFIKIQDIEILKIRKPNDIETFKIENNWYFVVADSSKAGFTTIYKWNGNGFYSHQSLHAWYRDTDVEYLEIVRTPQTLRTPHLILSSSSQRPVIYQWNKATQLFTNQTDIPNMEDVYAVKHFSVKGDVYICLTRFIGDSKVMKWGGSSFQDIQRMPSRGSMVFQPLQINNYQYAILGSDYSFTQVYNWDAEKAKFVKFQELNVQAPRSFTHVSINKRNFLFASSFKGNTQIYKHVIVDLSA

SEQ ID NO: 51407 - protein, 840 aa, Homo sapiens
MAGPGSTGGQIGAAALAGGARSKVAPSVDFDHSCSDSVEYLTLNFGPFETVHRWRRLPPCDEFVGARRSKHTVVAYKDAIYVFGGDNGKTMLNDLLRFDVKDCSWCRAFTTGTPPAPRYHHSAVVYGSSMFVFGGYTGDIYSNSNLKNKNDLFEYKFATGQWTEWKIEGRLPVARSAHGATVYSDKLWIFAGYDGNARLNDMWTIGLQDRELTCWEEVAQSGEIPPSCCNFPVAVCRDKMFVFSGQSGAKITNNLFQFEFKDKTWTRIPTEHLLRGSPPPPQRRYGHTMVAFDRHLYVFGGAADNTLPNELHCYDVDFQTWEVVQPSSDSEVGGAEVPERACASEEVPTLTYEERVGFKKSRDVFGLDFGTTSAKQPTQPASELPSGRLFHAAAVISDAMYIFGGTVDNNIRSGEMYRFQFSCYPKCTLHEDYGRLWESRQFCDVEFVLGEKEECVQGHVAIVTARSRWLRRKITQARERLAQKLEQEAAPVPREAPGVAAGGARPPLLHVAIREAEARPFEVLMQFLYTDKIKYPRKGHVEDVLLIMDVYKLALSFQLCRLEQLCRQYIEASVDLQNVLVVCESAARLQLSQLKEHCLNFVVKESHFNQVIMMKEFERLSSPLIVEIVRRKQQPPPRTPLDQPVDIGTSLIQDMKAYLEGAGAEFCDITLLLDGHPRPAHKAILAARSSYFEAMFRSFMPEDGQVNISIGEMVPSRQAFESMLRYIYYGEVNMPPEDSLYLFAAPYYYGFYNNRLQAYCKQNLEMNVTVQNVLQILEAADKTQALDMKRHCLHIIVHQFTKVSKLPTLRSLSQQLLLDIIDSLASHISDKQCAELGADI

SEQ ID NO: 51408 - protein, 821 aa, Homo sapiens
MAGPGSTGGQIGAAALAGGARSKVAPSVDFDHSCSDSVEYLTLNFGPFETVHRWRRLPPCDEFVGARRSKHTVVAYKDAIYVFGGDNGAFTTGTPPAPRYHHSAVVYGSSMFVFGGYTGDIYSNSNLKNKNDLFEYKFATGQWTEWKIEGRLPVARSAHGATVYSDKLWIFAGYDGNARLNDMWTIGLQDRELTCWEEVAQSGEIPPSCCNFPVAVCRDKMFVFSGQSGAKITNNLFQFEFKDKTWTRIPTEHLLRGSPPPPQRRYGHTMVAFDRHLYVFGGAADNTLPNELHCYDVDFQTWEVVQPSSDSEVGGAEVPERACASEEVPTLTYEERVGFKKSRDVFGLDFGTTSAKQPTQPASELPSGRLFHAAAVISDAMYIFGGTVDNNIRSGEMYRFQFSCYPKCTLHEDYGRLWESRQFCDVEFVLGEKEECVQGHVAIVTARSRWLRRKITQARERLAQKLEQEAAPVPREAPGVAAGGARPPLLHVAIREAEARPFEVLMQFLYTDKIKYPRKGHVEDVLLIMDVYKLALSFQLCRLEQLCRQYIEASVDLQNVLVVCESAARLQLSQLKEHCLNFVVKESHFNQVIMMKEFERLSSPLIVEIVRRKQQPPPRTPLDQPVDIGTSLIQDMKAYLEGAGAEFCDITLLLDGHPRPAHKAILAARSSYFEAMFRSFMPEDGQVNISIGEMVPSRQAFESMLRYIYYGEVNMPPEDSLYLFAAPYYYGFYNNRLQAYCKQNLEMNVTVQNVLQILEAADKTQALDMKRHCLHIIVHQFTKVSKLPTLRSLSQQLLLDIIDSLASHISDKQCAELGADI

SEQ ID NO: 51409 - protein, 799 aa, Homo sapiens
MNYDPIVSKVAEVLASGRAIRKREVERSKHTVVAYKDAIYVFGGDNGKTMLNDLLRFDVKDCSWCRAFTTGTPPAPRYHHSAVVYGSSMFVFGGYTGDIYSNSNLKNKNDLFEYKFATGQWTEWKIEGRLPVARSAHGATVYSDKLWIFAGYDGNARLNDMWTIGLQDRELTCWEEVAQSGEIPPSCCNFPVAVCRDKMFVFSGQSGAKITNNLFQFEFKDKTWTRIPTEHLLRGSPPPPQRRYGHTMVAFDRHLYVFGGAADNTLPNELHCYDVDFQTWEVVQPSSDSEVGGAEVPERACASEEVPTLTYEERVGFKKSRDVFGLDFGTTSAKQPTQPASELPSGRLFHAAAVISDAMYIFGGTVDNNIRSGEMYRFQFSCYPKCTLHEDYGRLWESRQFCDVEFVLGEKEECVQGHVAIVTARSRWLRRKITQARERLAQKLEQEAAPVPREAPGVAAGGARPPLLHVAIREAEARPFEVLMQFLYTDKIKYPRKGHVEDVLLIMDVYKLALSFQLCRLEQLCRQYIEASVDLQNVLVVCESAARLQLSQLKEHCLNFVVKESHFNQVIMMKEFERLSSPLIVEIVRRKQQPPPRTPLDQPVDIGTSLIQDMKAYLEGAGAEFCDITLLLDGHPRPAHKAILAARSSYFEAMFRSFMPEDGQVNISIGEMVPSRQAFESMLRYIYYGEVNMPPEDSLYLFAAPYYYGFYNNRLQAYCKQNLEMNVTVQNVLQILEAADKTQALDMKRHCLHIIVHQFTKVSKLPTLRSLSQQLLLDIIDSLASHISDKQCAELGADI

SEQ ID NO: 51410 - protein, 1025 aa, Homo sapiens
MEPFTNDRLQLPRNMIENSMFEEEPDVVDLAKEPCLHPLEPDEVEYEPRGSRLLVRGLGEHEMEEDEEDYESSAKLLGMSFMNRSSGLRNSATGYRQSPDGACSVPSARTMVVCAFVIVVAVSVIMVIYLLPRCTFTKEGCHKKNQSIGLIQPFATNGKLFPWAQIRLPTAVVPLRYELSLHPNLTSMTFRGSVTISVQALQVTWNIILHSTGHNISRVTFMSAVSSQEKQAEILEYAYHGQIAIVAPEALLAGHNYTLKIEYSANISSSYYGFYGFSYTDESNEKKYFAATQFEPLAARSAFPCFDEPAFKATFIIKIIRDEQYTALSNMPKKSSVVLDDGLVQDEFSESVKMSTYLVAFIVGEMKNLSQDVNGTLVSIYAVPEKIGQVHYALETTVKLLEFFQNYFEIQYPLKKLDLVAIPDFEAGAMENWGLLTFREETLLYDSNTSSMADRKLVTKIIAHELAHQWFGNLVTMKWWNDLWLNEGFATFMEYFSLEKIFKELSSYEDFLDARFKTMKKDSLNSSHPISSSVQSSEQIEEMFDSLSYFKGSSLLLMLKTYLSEDVFQHAVVLYLHNHSYASIQSDDLWDSFNEVTNQTLDVKRMMKTWTLQKGFPLVTVQKKGKELFIQQERFFLNMKPEIQPSDTSYLWHIPLSYVTEGRNYSKYQSVSLLDKKSGVINLTEEVLWVKVNINMNGYYIVHYADDDWEALIHQLKINPYVLSDKDRANLINNIFELAGLGKVPLKRAFDLINYLGNENHTAPITEALFQTDLIYNLLEKLGYMDLASRLVTRVFKLLQNQIQQQTWTDEGTPSMRELRSALLEFACTHNLGNCSTTAMKLFDDWMASNGTQSLPTDVMTTVFKVGAKTDKGWSFLLGKYISIGSEAEKNKILEALASSEDVRKLYWLMKSSLNGDNFRTQKLSFIIRTVGRHFPGHLLAWDFVKENWNKLVQKFPLGSYTIQNIVAGSTYLFSTKTHLSEVQAFFENQSEATFRLRCVQEALEVIQLNIQWMEKNLKSLTWWL

SEQ ID NO: 51411 - protein, 1011 aa, Homo sapiens
MIENSMFEEEPDVVDLAKEPCLHPLEPDEVEYEPRGSRLLVRGLGEHEMEEDEEDYESSAKLLGMSFMNRSSGLRNSATGYRQSPDGACSVPSARTMVVCAFVIVVAVSVIMVIYLLPRCTFTKEGCHKKNQSIGLIQPFATNGKLFPWAQIRLPTAVVPLRYELSLHPNLTSMTFRGSVTISVQALQVTWNIILHSTGHNISRVTFMSAVSSQEKQAEILEYAYHGQIAIVAPEALLAGHNYTLKIEYSANISSSYYGFYGFSYTDESNEKKYFAATQFEPLAARSAFPCFDEPAFKATFIIKIIRDEQYTALSNMPKKSSVVLDDGLVQDEFSESVKMSTYLVAFIVGEMKNLSQDVNGTLVSIYAVPEKIGQVHYALETTVKLLEFFQNYFEIQYPLKKLDLVAIPDFEAGAMENWGLLTFREETLLYDSNTSSMADRKLVTKIIAHELAHQWFGNLVTMKWWNDLWLNEGFATFMEYFSLEKIFKELSSYEDFLDARFKTMKKDSLNSSHPISSSVQSSEQIEEMFDSLSYFKGSSLLLMLKTYLSEDVFQHAVVLYLHNHSYASIQSDDLWDSFNEVTNQTLDVKRMMKTWTLQKGFPLVTVQKKGKELFIQQERFFLNMKPEIQPSDTSYLWHIPLSYVTEGRNYSKYQSVSLLDKKSGVINLTEEVLWVKVNINMNGYYIVHYADDDWEALIHQLKINPYVLSDKDRANLINNIFELAGLGKVPLKRAFDLINYLGNENHTAPITEALFQTDLIYNLLEKLGYMDLASRLVTRVFKLLQNQIQQQTWTDEGTPSMRELRSALLEFACTHNLGNCSTTAMKLFDDWMASNGTQSLPTDVMTTVFKVGAKTDKGWSFLLGKYISIGSEAEKNKILEALASSEDVRKLYWLMKSSLNGDNFRTQKLSFIIRTVGRHFPGHLLAWDFVKENWNKLVQKFPLGSYTIQNIVAGSTYLFSTKTHLSEVQAFFENQSEATFRLRCVQEALEVIQLNIQWMEKNLKSLTWWL

SEQ ID NO: 51412 - protein, 1149 aa, Homo sapiens
MAERKGTAKVDFLKKIEKEIQQKWDTERVFEVNASNLEKQTSKGKYFVTFPYPYMNGRLHLGHTFSLSKCEACADKLKREIELYGCPPDFPDEEEEEEETSVKTEDIIIKDKAKGKKSKAAAKAGSSKYQWGIMKSLGLSDEEIVKFSEAEHWLDYFPPLAIQDLKRMGLKVDWRRSFITTDVNPYYDSFVRWQFLTLRERNKIKFGKRYTIYSPKDGQPCMDHDRQTGEGVGPQEYTLLKLKVLEPYPSKLSGLKGKNIFLVAATLRPETMFGQTNCWVRPDMKYIGFETVNGDIFICTQKAARNMSYQGFTKDNGVVPVVKELMGEEILGASLSAPLTSYKVIYVLPMLTIKEDKGTGVVTSVPSDSPDDIAALRDLKKKQALRAKYGIRDDMVLPFEPVPVIEIPGFGNLSAVTICDELKIQSQNDREKLAEAKEKIYLKGFYEGIMLVDGFKGQKVQDVKKTIQKKMIDAGDALIYMEPEKQVMSRSSDECVVALCDQWYLDYGEENWKKQTSQCLKNLETFCEETRRNFEATLGWLQEHACSRTYGLGTHLPWDEQWLIESLSDSTIYMAFYTVAHLLQGGNLHGQAESPLGIRPQQMTKEVWDYVFFKEAPFPKTQIAKEKLDQLKQEFEFWYPVDLRVSGKDLVPNHLSYYLYNHVAMWPEQSDKWPTAVRANGHLLLNSEKMSKSTGNFLTLTQAIDKFSADGMRLALADAGDTVEDANFVEAMADAGILRLYTWVEWVKEMVANWDSLRSGPASTFNDRVFASELNAGIIKTDQNYEKMMFKEALKTGFFEFQAAKDKYRELAVEGMHRELVFRFIEVQTLLLAPFCPHLCEHIWTLLGKPDSIMNASWPVAGPVNEVLIHSSQYLMEVTHDLRLRLKNYMMPAKGKKTDKQPLQKPSHCTIYVAKNYPPWQHTTLSVLRKHFEANNGKLPDNKVIASELGSMPELKKYMKKVMPFVAMIKENLEKMGPRILDLQLEFDEKAVLMENIVYLTNSLELEHIEVKFASEAEDKIREDCCPGKPLNVFRIEPGVSVSLVNPQPSNGHFSTKIEIRQGDNCDSIIRRLMKMNRGIKDLSKVKLMRFDDPLLGPRRVPVLGKEYTEKTPISEHAVFNVDLMSKKIHLTENGIRVDIGDTIIYLVH

SEQ ID NO: 51413 - protein, 159 aa, Homo sapiens
MAERKGTAKVDFLKKIEKEIQQKWDTERVFEVNASNLEKQTSKGKYFVTFPYPYMNGRLHLGHTFSLSKCEFAVGYQRLKGKCCLFPFGLHCTGMPIKACADKLKREIELYGCPPDFPDEEEEEEETSVKTEDIIIKDKAKGKKSKAAKLDLLNTSGAL

SEQ ID NO: 51414 - protein, 1176 aa, Homo sapiens
MAERKGTAKVDFLKKIEKEIQQKWDTERVFEVNASNLEKQTSKGKYFVTFPYPYMNGRLHLGHTFSLSKCEFAVGYQRLKGKCCLFPFGLHCTGMPIKACADKLKREIELYGCPPDFPDEEEEEEETSVKTEDIIIKDKAKGKKSKAAAKAGSSKYQWGIMKSLGLSDEEIVKFSEAEHWLDYFPPLAIQDLKRMGLKVDWRRSFITTDVNPYYDSFVRWQFLTLRERNKIKFGKRYTIYSPKDGQPCMDHDRQTGEGVGPQEYTLLKLKVLEPYPSKLSGLKGKNIFLVAATLRPETMFGQTNCWVRPDMKYIGFETVNGDIFICTQKAARNMSYQGFTKDNGVVPVVKELMGEEILGASLSAPLTSYKVIYVLPMLTIKEDKGTGVVTSVPSDSPDDIAALRDLKKKQALRAKYGIRDDMVLPFEPVPVIEIPGFGNLSAVTICDELKIQSQNDREKLAEAKEKIYLKGFYEGIMLVDGFKGQKVQDVKKTIQKKMIDAGDALIYMEPEKQVMSRSSDECVVALCDQWYLDYGEENWKKQTSQCLKNLETFCEETRRNFEATLGWLQEHACSRTYGLGTHLPWDEQWLIESLSDSTIYMAFYTVAHLLQGGNLHGQAESPLGIRPQQMTKEVWDYVFFKEAPFPKTQIAKEKLDQLKQEFEFWYPVDLRVSGKDLVPNHLSYYLYNHVAMWPEQSDKWPTAVRANGHLLLNSEKMSKSTGNFLTLTQAIDKFSADGMRLALADAGDTVEDANFVEAMADAGILRLYTWVEWVKEMVANWDSLRSGPASTFNDRVFASELNAGIIKTDQNYEKMMFKEALKTGFFEFQAAKDKYRELAVEGMHRELVFRFIEVQTLLLAPFCPHLCEHIWTLLGKPDSIMNASWPVAGPVNEVLIHSSQYLMEVTHDLRLRLKNYMMPAKGKKTDKQPLQKPSHCTIYVAKNYPPWQHTTLSVLRKHFEANNGKLPDNKVIASELGSMPELKKYMKKVMPFVAMIKENLEKMGPRILDLQLEFDEKAVLMENIVYLTNSLELEHIEVKFASEAEDKIREDCCPGKPLNVFRIEPGVSVSLVNPQPSNGHFSTKIEIRQGDNCDSIIRRLMKMNRGIKDLSKVKLMRFDDPLLGPRRVPVLGKEYTEKTPISEHAVFNVDLMSKKIHLTENGIRVDIGDTIIYLVH

SEQ ID NO: 51415 - protein, 1122 aa, Homo sapiens
MNGRLHLGHTFSLSKCEFAVGYQRLKGKCCLFPFGLHCTGMPIKACADKLKREIELYGCPPDFPDEEEEEEETSVKTEDIIIKDKAKGKKSKAAAKAGSSKYQWGIMKSLGLSDEEIVKFSEAEHWLDYFPPLAIQDLKRMGLKVDWRRSFITTDVNPYYDSFVRWQFLTLRERNKIKFGKRYTIYSPKDGQPCMDHDRQTGEGVGPQEYTLLKLKVLEPYPSKLSGLKGKNIFLVAATLRPETMFGQTNCWVRPDMKYIGFETVNGDIFICTQKAARNMSYQGFTKDNGVVPVVKELMGEEILGASLSAPLTSYKVIYVLPMLTIKEDKGTGVVTSVPSDSPDDIAALRDLKKKQALRAKYGIRDDMVLPFEPVPVIEIPGFGNLSAVTICDELKIQSQNDREKLAEAKEKIYLKGFYEGIMLVDGFKGQKVQDVKKTIQKKMIDAGDALIYMEPEKQVMSRSSDECVVALCDQWYLDYGEENWKKQTSQCLKNLETFCEETRRNFEATLGWLQEHACSRTYGLGTHLPWDEQWLIESLSDSTIYMAFYTVAHLLQGGNLHGQAESPLGIRPQQMTKEVWDYVFFKEAPFPKTQIAKEKLDQLKQEFEFWYPVDLRVSGKDLVPNHLSYYLYNHVAMWPEQSDKWPTAVRANGHLLLNSEKMSKSTGNFLTLTQAIDKFSADGMRLALADAGDTVEDANFVEAMADAGILRLYTWVEWVKEMVANWDSLRSGPASTFNDRVFASELNAGIIKTDQNYEKMMFKEALKTGFFEFQAAKDKYRELAVEGMHRELVFRFIEVQTLLLAPFCPHLCEHIWTLLGKPDSIMNASWPVAGPVNEVLIHSSQYLMEVTHDLRLRLKNYMMPAKGKKTDKQPLQKPSHCTIYVAKNYPPWQHTTLSVLRKHFEANNGKLPDNKVIASELGSMPELKKYMKKVMPFVAMIKENLEKMGPRILDLQLEFDEKAVLMENIVYLTNSLELEHIEVKFASEAEDKIREDCCPGKPLNVFRIEPGVSVSLVNPQPSNGHFSTKIEIRQGDNCDSIIRRLMKMNRGIKDLSKVKLMRFDDPLLGPRRVPVLGKEYTEKTPISEHAVFNVDLMSKKIHLTENGIRVDIGDTIIYLVH

SEQ ID NO: 51416 - protein, 123 aa, Homo sapiens
MWPEQSDKWPTAVRANGHLLLNSEKMSKSTGNFLTLTQAIDKFSADGMRLALADAGDTVEDANFVEAMADAGILRLYTWVEWVKEMVANWDSLRSGPASTFNDRVFASELNAGIIKTDQTMKR

SEQ ID NO: 51417 - protein, 485 aa, Homo sapiens
MWPEQSDKWPTAVRANGHLLLNSEKMSKSTGNFLTLTQAIDKFSADGMRLALADAGDTVEDANFVEAMADAGILRLYTWVEWVKEMVANWDSLRSGPASTFNDRVFASELNAGIIKTDQNYEKMMFKEALKTGFFEFQAAKDKYRELAVEGMHRELVFRFIEVQTLLLAPFCPHLCEHIWTLLGKPDSIMNASWPVAGPVNEVLIHSSQYLMEVTHDLRLRLKNYMMPAKGKKTDKQPLQKPSHCTIYVAKNYPPWQHTTLSVLRKHFEANNGKLPDNKVIASELGSMPELKKYMKKVMPFVAMIKENLEKMGPRILDLQLEFDEKAVLMENIVYLTNSLELEHIEVKFASEAEDKIREDCCPGKPLNVFRIEPGVSVSLVNPQPSNGHFSTKIEIRQGDNCDSIIRRLMKMNRGIKDLSKVKLMRFDDPLLGPRRVPVLGKEYTEKTPISEHAVFNVDLMSKKIHLTENGIRVDIGDTIIYLVH

SEQ ID NO: 51418 - protein, 1130 aa, Homo sapiens
MAERKGTAKVDFLKKIEKEIQQKWDTERVFEVNASNLEKQTSKGKYFVTFPYPYMNGRLHLGHTFSLSKCEFAVGYQRLKGKCCLFPFGLHCTGMPIKSKAAAKAGSSKYQWGIMKSLGLSDEEIVKFSEAEHWLDYFPPLAIQDLKRMGLKVDWRRSFITTDVNPYYDSFVRWQFLTLRERNKIKFGKRYTIYSPKDGQPCMDHDRQTGEGVGPQEYTLLKLKVLEPYPSKLSGLKGKNIFLVAATLRPETMFGQTNCWVRPDMKYIGFETVNGDIFICTQKAARNMSYQGFTKDNGVVPVVKELMGEEILGASLSAPLTSYKVIYVLPMLTIKEDKGTGVVTSVPSDSPDDIAALRDLKKKQALRAKYGIRDDMVLPFEPVPVIEIPGFGNLSAVTICDELKIQSQNDREKLAEAKEKIYLKGFYEGIMLVDGFKGQKVQDVKKTIQKKMIDAGDALIYMEPEKQVMSRSSDECVVALCDQWYLDYGEENWKKQTSQCLKNLETFCEETRRNFEATLGWLQEHACSRTYGLGTHLPWDEQWLIESLSDSTIYMAFYTVAHLLQGGNLHGQAESPLGIRPQQMTKEVWDYVFFKEAPFPKTQIAKEKLDQLKQEFEFWYPVDLRVSGKDLVPNHLSYYLYNHVAMWPEQSDKWPTAVRANGHLLLNSEKMSKSTGNFLTLTQAIDKFSADGMRLALADAGDTVEDANFVEAMADAGILRLYTWVEWVKEMVANWDSLRSGPASTFNDRVFASELNAGIIKTDQNYEKMMFKEALKTGFFEFQAAKDKYRELAVEGMHRELVFRFIEVQTLLLAPFCPHLCEHIWTLLGKPDSIMNASWPVAGPVNEVLIHSSQYLMEVTHDLRLRLKNYMMPAKGKKTDKQPLQKPSHCTIYVAKNYPPWQHTTLSVLRKHFEANNGKLPDNKVIASELGSMPELKKYMKKVMPFVAMIKENLEKMGPRILDLQLEFDEKAVLMENIVYLTNSLELEHIEVKFASEAEDKIREDCCPGKPLNVFRIEPGVSVSLVNPQPSNGHFSTKIEIRQGDNCDSIIRRLMKMNRGIKDLSKVKLMRFDDPLLGPRRVPVLGKEYTEKTPISEHAVFNVDLMSKKIHLTENGIRVDIGDTIIYLVH

SEQ ID NO: 51419 - protein, 903 aa, Homo sapiens
MASVWQRLGFYASLLKRQLNGGPDVIKWERRVIPGCTRSIYSATGKWTKEYTLQTRKDVEKWWHQRIKEQASKISEADKSKPKFYVLSMFPYPSGKLHMGHVRVYTISDTIARFQKMRGMQVINPMGWDAFGLPAENAAVERNLHPQSWTQSNIKHMRKQLDRLGLCFSWDREITTCLPDYYKWTQYLFIKLYEAGLAYQKEALVNWDPVDQTVLANEQVDEHGCSWRSGAKVEQKYLRQWFIKTTAYAKAMQDALADLPEWYGIKGMQAHWIGDCVGCHLDFTLKVHGQATGEKLTAYTATPEAIYGTSHVAISPSHRLLHGHSSLKEALRMALVPGKDCLTPVMAVNMLTQQEVPVVILAKADLEGSLDSKIGIPSTSSEDTILAQTLGLAYSEVIETLPDGTERLSSSAEFTGMTRQDAFLALTQKARGKRVGGDVTSDKLKDWLISRQRYWGTPIPIVHCPVCGPTPVPLEDLPVTLPNIASFTGKGGPPLAMASEWVNCSCPRCKGAAKRETDTMDTFVDSAWYYFRYTDPHNPHSPFNTAVADYWMPVDLYIGGKEHAVMHLFYARFFSHFCHDQKMVKHREPFHKLLAQGLIKGQTFRLPSGQYLQREEVDLTGSVPVHAKTKEKLEVTWEKMSKSKHNGVDPEEVVEQYGIDTIRLYILFAAPPEKDILWDVKTDALPGVLRWQQRLWTLTTRFIEARASGKSPQPQLLSNKEKAEARKLWEYKNSVISQVTTHFTEDFSLNSAISQLMGLSNALSQASQSVILHSPEFEDALCALMVMAAPLAPHVTSEIWAGLALVPRKLCAHYTWDASVLLQAWPAVDPEFLQQPEVVQMAVLINNKACGKIPVPQQVARDQDKVHEFVLQSELGVRLLQGRSIKKSFLSPRTALINFLVQD

SEQ ID NO: 51420 - protein, 860 aa, Homo sapiens
MASVWQRLGFYASLLKRQLNGGPDVIKWERRVIPGCTRSIYSATGKWTKEYTLQTRKDVEKWWHQRIKEQASKISEADVINPMGWDAFGLPAENAAVERNLHPQSWTQSNIKHMRKQLDRLGLCFSWDREITTCLPDYYKWTQYLFIKLYEAGLAYQKEALVNWDPVDQTVLANEQVDEHGCSWRSGAKVEQKYLRQWFIKTTAYAKAMQDALADLPEWYGIKGMQAHWIGDCVGCHLDFTLKVHGQATGEKLTAYTATPEAIYGTSHVAISPSHRLLHGHSSLKEALRMALVPGKDCLTPVMAVNMLTQQEVPVVILAKADLEGSLDSKIGIPSTSSEDTILAQTLGLAYSEVIETLPDGTERLSSSAEFTGMTRQDAFLALTQKARGKRVGGDVTSDKLKDWLISRQRYWGTPIPIVHCPVCGPTPVPLEDLPVTLPNIASFTGKGGPPLAMASEWVNCSCPRCKGAAKRETDTMDTFVDSAWYYFRYTDPHNPHSPFNTAVADYWMPVDLYIGGKEHAVMHLFYARFFSHFCHDQKMVKHREPFHKLLAQGLIKGQTFRLPSGQYLQREEVDLTGSVPVHAKTKEKLEVTWEKMSKSKHNGVDPEEVVEQYGIDTIRLYILFAAPPEKDILWDVKTDALPGVLRWQQRLWTLTTRFIEARASGKSPQPQLLSNKEKAEARKLWEYKNSVISQVTTHFTEDFSLNSAISQLMGLSNALSQASQSVILHSPEFEDALCALMVMAAPLAPHVTSEIWAGLALVPRKLCAHYTWDASVLLQAWPAVDPEFLQQPEVVQMAVLINNKACGKIPVPQQVARDQDKVHEFVLQSELGVRLLQGRSIKKSFLSPRTALINFLVQD

SEQ ID NO: 51421 - protein, 903 aa, Homo sapiens; identical to SEQ ID NO: 51419

SEQ ID NO: 51422 - protein, 114 aa, Homo sapiens
MASVWQRLGFYASLLKRQLNGGPDVIKWERRVIPGCTRSIYSATGKWTKEYTLQTRKDVEKWWHQRIKEQASKISEADKSKPKFYVLSMFPYPSGKLHMGHVRVYTISDTIARF

SEQ ID NO: 51423 - protein, 202 aa, Homo sapiens
MKVLAAGVVPLLLVLHWKHGAGSPLPITPVNATCAIRHPCHNNLMNQIRSQLAQLNGSANALFILYYTAQGEPFPNNLDKLCGPNVTDFPPFHANGTEKAKLVELYRIVVYLGTSLGNITRDQKILNPSALSLHSKLNATADILRGLLSNVLCRLCSKYHVGHVDVTYGPDTSGKDVFQKKKLGCQLLGKYKQIIAVLAQAF

SEQ ID NO: 51424 - protein, 1097 aa, Homo sapiens
MMDIYVCLKRPSWMVDNKRMRTASNFQWLLSTFILLYLMNQVNSQKKGAPHDLKCVTNNLQVWNCSWKAPSGTGRGTDYEVCIENRSRSCYQLEKTSIKIPALSHGDYEITINSLHDFGSSTSKFTLNEQNVSLIPDTPEILNLSADFSTSTLYLKWNDRGSVFPHRSNVIWEIKVLRKESMELVKLVTHNTTLNGKDTLHHWSWASDMPLECAIHFVEIRCYIDNLHFSGLEEWSDWSPVKNISWIPDSQTKVFPQDKVILVGSDITFCCVSQEKVLSALIGHTNCPLIHLDGENVAIKIRNISVSASSGTNVVFTTEDNIFGTVIFAGYPPDTPQQLNCETHDLKEIICSWNPGRVTALVGPRATSYTLVESFSGKYVRLKRAEAPTNESYQLLFQMLPNQEIYNFTLNAHNPLGRSQSTILVNITEKVYPHTPTSFKVKDINSTAVKLSWHLPGNFAKINFLCEIEIKKSNSVQEQRNVTIKGVENSSYLVALDKLNPYTLYTFRIRCSTETFWKWSKWSNKKQHLTTEASPSKGPDTWREWSSDGKNLIIYWKPLPINEANGKILSYNVSCSSDEETQSLSEIPDPQHKAEIRLDKNDYIISVVAKNSVGSSPPSKIASMEIPNDDLKIEQVVGMGKGILLTWHYDPNMTCDYVIKWCNSSRSEPCLMDWRKVPSNSTETVIESDEFRPGIRYNFFLYGCRNQGYQLLRSMIGYIEELAPIVAPNFTVEDTSADSILVKWEDIPVEELRGFLRGYLFYFGKGERDTSKMRVLESGRSDIKVKNITDISQKTLRIADLQGKTSYHLVLRAYTDGGVGPEKSMYVVTKENSVGLIIAILIPVAVAVIVGVVTSILCYRKREWIKETFYPDIPNPENCKALQFQKSVCEGSSALKTLEMNPCTPNNVEVLETRSAFPKIEDTEIISPVAERPEDRSDAEPENHVVVSYCPPIIEEEIPNPAADEAGGTAQVIYIDVQSMYQPQAKPEEEQENDPVGGAGYKPQMHLPINSTVEDIAAEEDLDKTAGYRPQANVNTWNLVSPDSPRSIDSNSEIVSFGSPCSINSRQFLIPPKDEDSPKSNGGGWSFTNFFQNKPND

SEQ ID NO: 51425 - protein, 1097 aa, Homo sapiens; identical to SEQ ID NO: 51424

SEQ ID NO: 51426 - protein, 126 aa, Homo sapiens
MMDIYVCLKRPSWMVDNKRMRTASNFQWLLSTFILLYLMNQVNSQKKGAPHDLKCVTNNLQVWNCSWKAPSGTGRGTDYEVCIENRSRSCYQLEKTSIKIPALSHGDYEITINSLHDFGSSTSKFT

SEQ ID NO: 51427 - protein, 75 aa, Homo sapiens
MMDIYVCLKRPSWMVDNKRMRTASNFQWLLSTFILLYLMNQVNSQKKGAPHDLKCVTNNLQVWNCSWKAPSGTGR

SEQ ID NO: 51428 - protein, 151 aa, Homo sapiens
MFSTKALLLAGLISTALAGPWANICAGKSSNEIRTCDRHGCGQYSAQRSQRPHQGVDILCSAGSTVYAPFTGMIVGQEKPYQNKNAINNGVRISGRGFCVKMFYIKPIKYKGPIKKGEKLGTLLPLQKVYPGIQSHVHIENCDSSDPTAYL

SEQ ID NO: 51429 - protein, 375 aa, Homo sapiens
MTPILTVLICLGLSLDPRTHVQAGPLPKPTLWAEPGSVITQGSPVTLRCQGSLETQEYHLYREKKTALWITRIPQELVKKGQFPILSITWEHAGRYCCIYGSHTAGLSESSDPLELVVTGAYSKPTLSALPSPVVTSGGNVTIQCDSQVAFDGFILCVSKKPSLSVQPGPVVAPGEKLTFQCGSDAGYDRFVLYKEWGRDFLQRPGRQPQAGLSQANFTLGPVSRSYGGQYTCSGAYNLSSEWSAPSDPLDILITGQIRARPFLSVRPGPTVASGENVTLLCQSQGGMHTFLLTKEGAADSPLRLKSKRQSHKYQAEFPMSPVTSAHAGTYRCYGSLSSNPYLLTHPSDPLELVVSGAAETLSPPQNKSDSKAGE

SEQ ID NO: 51430 - protein, 651 aa, Homo sapiens
MTPILTVLICLGLSLGPRTHVQAGHLPKPTLWAEPGSVITQGSPVTLRCQGGQETQEYRLYREKKTALWITRIPQELVKKGQFPIPSITWEHAGRYRCYYGSDTAGRSESSDPLELVVTGAYIKPTLSAQPSPVVNSGGNVILQCDSQVAFDGFSLCKEGEDEHPQCLNSQPHARGSSRAIFSVGPVSPSRRWWYRCYAYDSNSPYEWSLPSDLLELLVLGVSKKPSLSVQPGPIVAPEETLTLQCGSDAGYNRFVLYKDGERDFLQLAGAQPQAGLSQANFTLGPVSRSYGGQYRCYGAHNLSSEWSAPSDPLDILIAGQFYDRVSLSVQPGPTVASGENVTLLCQSQGWMQTFLLTKEGAADDPWRLRSTYQSQKYQAEFPMGPVTSAHAGTYRCYGSQSSKPYLLTHPSDPLELVVSGPSGGPSSPTTGPTSTSAGPEDQPLTPTGSDPQSGLGRHLGVVIGILVAVILLLLLLLLLFLILRHRRQGKHWTSTQRKADFQHPAGAVGPEPTDRGLQWRSSPAADAQEENLYAAVKHTQPEDGVEMDTRSPHDEDPQAVTYAEVKHSRPRREMASPPSPLSGEFLDTKDRQAEEDRQMDTEAAASEAPQDVTYAQLHSLTLRREATEPPPSQEGPSPAVPSIYATLAIH

SEQ ID NO: 51431 - protein, 651 aa, Homo sapiens
MTPILTVLICLGLSLGPRTHVQAGHLPKPTLWAEPGSVITQGSPVTLRCQGGQETQEYRLYREKKTALWITRIPQELVKKGQFPIPSITWEHAGRYRCYYGSDTAGRSESSDPLELVVTGAYIKPTLSAQPSPVVNSGGNVILQCDSQVAFDGFSLCKEGEDEHPQCLNSQPHARGSSRAIFSVGPVSPSRRWWYRCYAYDSNSPYEWSLPSDLLELLVLGVSKKPSLSVQPGPIVAPEETLTLQCGSDAGYNRFVLYKDGERDFLQLAGAQPQAGLSQANFTLGPVSRSYGGQYRCYGAHNLSSEWSAPSDPLDILIAGQFYDRVSLSVQPGPTVASGENVTLLCQSQGWMQTFLLTKEGAADDPWRLRSTYQSQKYQAEFPMGPVTSAHAGTYRCYGSQSSKPYLLTHPSDPLELVVSGPSGGPSSPTTGPTSTSGPEDQPLTPTGSDPQSGLGRHLGVVIGILVAVILLLLLLLLLFLILRHRRQGKHWTSTQRKADFQHPAGAVGPEPTDRGLQWRSSPAADAQEENLYAAVKHTQPEDGVEMDTRQSPHDEDPQAVTYAEVKHSRPRREMASPPSPLSGEFLDTKDRQAEEDRQMDTEAAASEAPQDVTYAQLHSLTLRREATEPPPSQEGPSPAVPSIYATLAIH

SEQ ID NO: 51432 - protein, 597 aa, Homo sapiens
MTPIVTVLICLGLSLGPRTHVQTGTIPKPTLWAEPDSVITQGSPVTLSCQGSLEAQEYRLYREKKSASWITRIRPELVKNGQFHIPSITWEHTGRYGCQYYSRARWSELSDPLVLVMTGAYPKPTLSAQPSPVVTSGGRVTLQCESQVAFGGFILCKEGEEEHPQCLNSQPHARGSSRAIFSVGPVSPNRRWSHRCYGYDLNSPYVWSSPSDLLELLVPGVSKKPSLSVQPGPVVAPGESLTLQCVSDVGYDRFVLYKEGERDLRQLPGRQPQAGLSQANFTLGPVSRSYGGQYRCYGAHNLSSECSAPSDPLDILITGQIRGTPFISVQPGPTVASGENVTLLCQSWRQFHTFLLTKAGAADAPLRLRSIHEYPKYQAEFPMSPVTSAHAGTYRCYGSLNSDPYLLSHPSEPLELVVSGPSMGSSPPPTGPISTPGPEDQPLTPTGSDPQSGLGRHLGVVIGILVAVVLLLLLLLLLFLILRHRRQGKHWTSTQRKADFQHPAGAVGPEPTDRGLQWRSSPAADAQEENLYAAVKDTQPEDGVEMDTRAAASEAPQDVTYAQLHSLTLRRKATEPPPSQEREPPAEPSIYATLAIH

SEQ ID NO: 51433 - protein, 632 aa, Homo sapiens
MTPALTALLCLGLSLGPRTRVQAGPFPKPTLWAEPGSVISWGSPVTIWCQGSQEAQEYRLHKEGSPEPLDRNNPLEPKNKARFSIPSMTEHHAGRYRCHYYSSAGWSEPSDPLEMVMTGAYSKPTLSALPSPVVASGGNMTLRCGSQKGYHHFVLMKEGEHQLPRTLDSQQLHSRGFQALFPVGPVTPSHRWRFTCYYYYTNTPWVWSHPSDPLEILPSGVSRKPSLLTLQGPVLAPGQSLTLQCGSDVGYNRFVLYKEGERDFLQRPGQQPQAGLSQANFTLGPVSPSNGGQYRCYGAHNLSSEWSAPSDPLNILMAGQIYDTVSLSAQPGPTVASGENVTLLCQSWWQFDTFLLTKEGAAHPPLRLRSMYGAHKYQAEFPMSPVTSAHAGTYRCYGSYSSNPHLLSHPSEPLELVVSGHSGGSSLPPTGPPSTPGLGRYLEVLIGVSVAFVLLLFLLLFLLLRRQRHSKHRTSDQRKTDFQRPAGAAETEPKDRGLLRRSSPAADVQEENLYAAVKDTQSEDRVELDSQQSPHDEDPQAVTYAPVKHSSPRREMASPPSSLSGEFLDTKDRQVEEDRQMDTEAAASEASQDVTYAQLHSLTLRRKATEPPPSQEGEPPAEPSIYATLAIH

SEQ ID NO: 51434 - protein, 447 aa, Homo sapiens
MIPTFTALLCLGLSLGPRTHMQAGPLPKPTLWAEPGSVISWGNSVTIWCQGTLEAREYRLDKEESPAPWDRQNPLEPKNKARFSIPSMTEDYAGRYRCYYRSPVGWSQPSDPLELVMTGAYSKPTLSALPSPLVTSGKSVTLLCQSRSPMDTFLLIKERAAHPLLHLRSEHGAQQHQAEFPMSPVTSVHGGTYRCFSSHGFSHYLLSHPSDPLELIVSGSLEDPRPSPTRSVSTAAGPEDQPLMPTGSVPHSGLRRHWEVLIGVLVVSILLLSLLLFLLLQHWRQGKHRTLAQRQADFQRPPGAAEPEPKDGGLQRRSSPAADVQGENFCAAVKNTQPEDGVEMDTRSPHDEDPQAVTYAKVKHSRPRREMASPPSPLSGEFLDTKDRQAEEDRQMDTEAAASEAPQDVTYAQLHSFTLRQKATEPPPSQEGASPAEPSVYATLAIH

SEQ ID NO: 51435 - protein, 491 aa, Homo sapiens
MTLTLSVLICLGLSVGPRTCVQAGTLPKPTLWAEPASVIARGKPVTLWCQGPLETEEYRLDKEGLPWARKRQNPLEPGAKAKFHIPSTVYDSAGRYRCYYETPAGWSEPSDPLELVATGVSRKPSLLIPQGSVVARGGSLTLQCRSDVGYDIFVLYKEGEHDLVQGSGQQPQAGLSQANFTLGPVSRSHGGQYRCYGAHNLSPRWSAPSDPLDILIAGLIPDIPALSVQPGPKVASGENVTLLCQSWHQIDTFFLTKEGAAHPPLCLKSKYQSYRHQAEFSMSPVTSAQGGTYRCYSAIRSYPYLLSSPSYPQELVVSGPSGDPSLSPTGSTPTPAGPEDQPLTPTGLDPQSGLGRHLGVVTGVSVAFVLLLFLLLFLLLRHRHQSKHRTSAHFYRPAGAAGPEPKDQGLQKRASPVADIQEEILNAAVKDTQPKDGVEMDARAAASEAPQDVTYAQLHSLTLRREATEPPPSQEREPPAEPSIYAPLAIH

SEQ ID NO: 51436 - protein, 489 aa, Homo sapiens
MTPIVTVLICLRLSLGPRTHVQAGTLPKPTLWAEPGSVITQGSPVTLWCQGILETQEYRLYREKKTAPWITRIPQEIVKKGQFPIPSITWEHTGRYRCFYGSHTAGWSEPSDPLELVVTGAYIKPTLSALPSPVVTSGGNVTLHCVSQVAFGSFILCKEGEDEHPQCLNSQPRTHGWSRAIFSVGPVSPSRRWSYRCYAYDSNSPHVWSLPSDLLELLVLGVSKKPSLSVQPGPIVAPGESLTLQCVSDVSYDRFVLYKEGERDFLQLPGPQPQAGLSQANFTLGPVSRSYGGQYRCSGAYNLSSEWSAPSDPLDILIAGQFRGRPFISVHPGPTVASGENVTLLCQSWGPFHTFLLTKAGAADAPLRLRSIHEYPKYQAEFPMSPVTSAHSGTYRCYGSLSSNPYLLSHPSDSLELMVSGAAETLSPPQNKSDSKAGAANTLSPSQNKTASHPQDYTVENLIRMGIAGLVLVVLGILLFEAQHSQRSL

SEQ ID NO: 51437 - protein, 466 aa, Homo sapiens
MTPILTVLICLGLSLGPRTHVQAGHLPKPTLWAEPGSVIIQGSPVTLRCQGSLQAEEYHLYRENKSASWVRRIQEPGKNGQFPIPSITWEHAGRYHCQYYSHNHSSEYSDPLELVVTGAYSKPTLSALPSPVVTLGGNVTLQCVSQVAFDGFILCKEGEDEHPQRLNSHSHARGWSWAIFSVGPVSPSRRWSYRCYAYDSNSPYVWSLPSDLLELLVPGVSKKPSLSVQPGPMVAPGESLTLQCVSDVGYDRFVLYKEGERDFLQRPGWQPQAGLSQANFTLGPVSPSHGGQYRCYSAHNLSSEWSAPSDPLDILITGQFYDRPSLSVQPVPTVAPGKNVTLLCQSRGQFHTFLLTKEGAGHPPLHLRSEHQAQQNQAEFRMGPVTSAHVGTYRCYSSLSSNPYLLSLPSDPLELVVSASLGQHPQDYTVENLIRMGVAGLVLVVLGILLFEAQHSQRSLQDAAGR

SEQ ID NO: 51438 - protein, 483 aa, Homo sapiens
MTPILTVLICLGLSLGPRTHVQAGHLPKPTLWAEPGSVIIQGSPVTLRCQGSLQAEEYHLYRENKSASWVRRIQEPGKNGQFPIPSITWEHAGRYHCQYYSHNHSSEYSDPLELVVTGAYSKPTLSALPSPVVTLGGNVTLQCVSQVAFDGFILCKEGEDEHPQRLNSHSHARGWSWAIFSVGPVSPSRRWSYRCYAYDSNSPYVWSLPSDLLELLVPGVSKKPSLSVQPGPMVAPGESLTLQCVSDVGYDRFVLYKEGERDFLQRPGWQPQAGLSQANFTLGPVSPSHGGQYRCYSAHNLSSEWSAPSDPLDILITGQFYDRPSLSVQPVPTVAPGKNVTLLCQSRGQFHTFLLTKEGAGHPPLHLRSEHQAQQNQAEFRMGPVTSAHVGTYRCYSSLSSNPYLLSLPSDPLELVVSEAAETLSPSQNKTDSTTTSLGQHPQDYTVENLIRMGVAGLVLVVLGILLFEAQHSQRSLQDAAGR

SEQ ID NO: 51439 - protein, 483 aa, Homo sapiens; identical to SEQ ID NO: 51438

SEQ ID NO: 51440 - protein, 327 aa, Homo sapiens
MTPILTVLICLGLSLGPRTHVQAGHLPKPTLWAEPGSVIIQGSPVTLRCQGSLQAEEYHLYRENKSASWVRRIQEPGKNGQFPIPSITWEHAGRYHCQYYSHNHSSEYSDPLELVVTGAYSKPTLSALPSPVVTLGGNVTLQCVSQVAFDGFILCKEGEDEHPQRLNSHSHARGWSWAIFSVGPVSPSRRWSYRCYAYDSNSPYVWSLPSDLLELLVPGVSKKPSLSVQPGPMVAPGESLTLQCVSDVGYDRFVLYKEGERDFLQRPGWQPQAGLSQANFTLGPVSPSHGGQYRCYSAHNLSSEWSAPSDPLDILITGQFYDRPSLS

SEQ ID NO: 51441 - protein, 439 aa, Homo sapiens
MTPILTVLICLGLSLDPRTHVQAGPLPKPTLWAEPGSVITQGSPVTLRCQGSLETQEYHLYREKKTALWITRIPQELVKKGQFPILSITWEHAGRYCCIYGSHTAGLSESSDPLELVVTGAYSKPTLSALPSPVVTSGGNVTIQCDSQVAFDGFILCKEGEDEHPQCLNSHSHARGSSRAIFSVGPVSPSRRWSYRCYGYDSRAPYVWSLPSDLLGLLVPGVSKKPSLSVQPGPVVAPGEKLTFQCGSDAGYDRFVLYKEWGRDFLQRPGRQPQAGLSQANFTLGPVSRSYGGQYTCSGAYNLSSEWSAPSDPLDILITGQIRARPFLSVRPGPTVASGENVTLLCQSQGGMHTFLLTKEGAADSPLRLKSKRQSHKYQAEFPMSPVTSAHAGTYRCYGSLSSNPYLLTHPSDPLELVVSGAAETLSPPQNKSDSKAGE

SEQ ID NO: 51442 - protein, 456 aa, Homo sapiens
MHRGLIHPQSSAVGGDAMTPILTVLICLGLSLDPRTHVQAGPLPKPTLWAEPGSVITQGSPVTLRCQGSLETQEYHLYREKKTALWITRIPQELVKKGQFPILSITWEHAGRYCCIYGSHTAGLSESSDPLELVVTGAYSKPTLSALPSPVVTSGGNVTIQCDSQVAFDGFILCKEGEDEHPQCLNSHSHARGSSRAIFSVGPVSPSRRWSYRCYGYDSRAPYVWSLPSDLLGLLVPGVSKKPSLSVQPGPVVAPGEKLTFQCGSDAGYDRFVLYKEWGRDFLQRPGRQPQAGLSQANFTLGPVSRSYGGQYTCSGAYNLSSEWSAPSDPLDILITGQIRARPFLSVRPGPTVASGENVTLLCQSQGGMHTFLLTKEGAADSPLRLKSKRQSHKYQAEFPMSPVTSAHAGTYRCYGSLSSNPYLLTHPSDPLELVVSGAAETLSPPQNKSDSKAGE

SEQ ID NO: 51443 - protein, 652 aa, Homo sapiens
MTPILTVLICLGLSLGPRTHVQAGHLPKPTLWAEPGSVITQGSPVTLRCQGGQETQEYRLYREKKTALWITRIPQELVKKGQFPIPSITWEHAGRYRCYYGSDTAGRSESSDPLELVVTGAYIKPTLSAQPSPVVNSGGNVILQCDSQVAFDGFSLCKEGEDEHPQCLNSQPHARGSSRAIFSVGPVSPSRRWWYRCYAYDSNSPYEWSLPSDLLELLVLGVSKKPSLSVQPGPIVAPEETLTLQCGSDAGYNRFVLYKDGERDFLQLAGAQPQAGLSQANFTLGPVSRSYGGQYRCYGAHNLSSEWSAPSDPLDILIAGQFYDRVSLSVQPGPTVASGENVTLLCQSQGWMQTFLLTKEGAADDPWRLRSTYQSQKYQAEFPMGPVTSAHAGTYRCYGSQSSKPYLLTHPSDPLELVVSGPSGGPSSPTTGPTSTSAGPEDQPLTPTGSDPQSGLGRHLGVVIGILVAVILLLLLLLLLFLILRHRRQGKHWTSTQRKADFQHPAGAVGPEPTDRGLQWRSSPAADAQEENLYAAVKHTQPEDGVEMDTRQSPHDEDPQAVTYAEVKHSRPRREMASPPSPLSGEFLDTKDRQAEEDRQMDTEAAASEAPQDVTYAQLHSLTLRREATEPPPSQEGPSPAVPSIYATLAIH

SEQ ID NO: 51444 - protein, 650 aa, Homo sapiens
MTPILTVLICLGLSLGPRTHVQAGHLPKPTLWAEPGSVITQGSPVTLRCQGGQETQEYRLYREKKTALWITRIPQELVKKGQFPIPSITWEHAGRYRCYYGSDTAGRSESSDPLELVVTGAYIKPTLSAQPSPVVNSGGNVILQCDSQVAFDGFSLCKEGEDEHPQCLNSQPHARGSSRAIFSVGPVSPSRRWWYRCYAYDSNSPYEWSLPSDLLELLVLGVSKKPSLSVQPGPIVAPEETLTLQCGSDAGYNRFVLYKDGERDFLQLAGAQPQAGLSQANFTLGPVSRSYGGQYRCYGAHNLSSEWSAPSDPLDILIAGQFYDRVSLSVQPGPTVASGENVTLLCQSQGWMQTFLLTKEGAADDPWRLRSTYQSQKYQAEFPMGPVTSAHAGTYRCYGSQSSKPYLLTHPSDPLELVVSGPSGGPSSPTTGPTSTSGPEDQPLTPTGSDPQSGLGRHLGVVIGILVAVILLLLLLLLLFLILRHRRQGKHWTSTQRKADFQHPAGAVGPEPTDRGLQWRSSPAADAQEENLYAAVKHTQPEDGVEMDTRSPHDEDPQAVTYAEVKHSRPRREMASPPSPLSGEFLDTKDRQAEEDRQMDTEAAASEAPQDVTYAQLHSLTLRREATEPPPSQEGPSPAVPSIYATLAIH

SEQ ID NO: 51445 - protein, 650 aa, Homo sapiens; identical to SEQ ID NO: 51444

SEQ ID NO: 51446 - protein, 634 aa, Homo sapiens
MTPILTVLICLGLSLGPRTHVQAGHLPKPTLWAEPGSVITQGSPVTLRCQGGQETQEYRLYREKKTALWITRIPQELVKKGQFPIPSITWEHAGRYRCYYGSDTAGRSESSDPLELVVTGAYIKPTLSAQPSPVVNSGGNVILQCDSQVAFDGFSLCKEGEDEHPQCLNSQPHARGSSRAIFSVGPVSPSRRWWYRCYAYDSNSPYEWSLPSDLLELLVLGVSKKPSLSVQPGPIVAPEETLTLQCGSDAGYNRFVLYKDGERDFLQLAGAQPQAGLSQANFTLGPVSRSYGGQYRCYGAHNLSSEWSAPSDPLDILIAGQFYDRVSLSVQPGPTVASGENVTLLCQSQGWMQTFLLTKEGAADDPWRLRSTYQSQKYQAEFPMGPVTSAHAGTYRCYGSQSSKPYLLTHPSDPLELVVSAGPEDQPLTPTGSDPQSGLGRHLGVVIGILVAVILLLLLLLLLFLILRHRRQGKHWTSTQRKADFQHPAGAVGPEPTDRGLQWRSSPAADAQEENLYAAVKHTQPEDGVEMDTRSPHDEDPQAVTYAEVKHSRPRREMASPPSPLSGEFLDTKDRQAEEDRQMDTEAAASEAPQDVTYAQLHSLTLRREATEPPPSQEGPSPAVPSIYATLAIH

SEQ ID NO: 51447 - protein, 650 aa, Homo sapiens; identical to SEQ ID NO: 51444

SEQ ID NO: 51448 - protein, 510 aa, Homo sapiens
MTPILTVLICLGLSLGPRTHVQAGHLPKPTLWAEPGSVITQGSPVTLRCQGGQETQEYRLYREKKTALWITRIPQELVKKGQFPIPSITWEHAGRYRCYYGSDTAGRSESSDPLELVVTGAYIKPTLSAQPSPVVNSGGNVILQCDSQVAFDGFSLCKEGEDEHPQCLNSQPHARGSSRAIFSVGPVSPSRRWWYRCYAYDSNSPYEWSLPSDLLELLVLGVSKKPSLSVQPGPIVAPEETLTLQCGSDAGYNRFVLYKDGERDFLQLAGAQPQAGLSQANFTLGPVSRSYGGQYRCYGAHNLSSEWSAPSDPLDILIAGQFYDRVSLSVQPGPTVASGENVTLLCQSQGWMQTFLLTKEGAADDPWRLRSTYQSQKYQAEFPMGPVTSAHAGTYRCYGSQSSKPYLLTHPSDPLELVVSGPSGGPSSPTTGPTSTSGPEDQPLTPTGSDPQSGLGRHLGVVIGILVAVILLLLLLLLLFLILRHRRQGKHWTSSPAQLPMPRKKTSMLP

SEQ ID NO: 51449 - protein, 598 aa, Homo sapiens
MTPIVTVLICLGLSLGPRTHVQTGTIPKPTLWAEPDSVITQGSPVTLSCQGSLEAQEYRLYREKKSASWITRIRPELVKNGQFHIPSITWEHTGRYGCQYYSRARWSELSDPLVLVMTGAYPKPTLSAQPSPVVTSGGRVTLQCESQVAFGGFILCKEGEEEHPQCLNSQPHARGSSRAIFSVGPVSPNRRWSHRCYGYDLNSPYVWSSPSDLLELLVPGVSKKPSLSVQPGPVVAPGESLTLQCVSDVGYDRFVLYKEGERDLRQLPGRQPQAGLSQANFTLGPVSRSYGGQYRCYGAHNLSSECSAPSDPLDILITGQIRGTPFISVQPGPTVASGENVTLLCQSWRQFHTFLLTKAGAADAPLRLRSIHEYPKYQAEFPMSPVTSAHAGTYRCYGSLNSDPYLLSHPSEPLELVVSGPSMGSSPPPTGPISTPAGPEDQPLTPTGSDPQSGLGRHLGVVIGILVAVVLLLLLLLLLFLILRHRRQGKHWTSTQRKADFQHPAGAVGPEPTDRGLQWRSSPAADAQEENLYAAVKDTQPEDGVEMDTRAAASEAPQDVTYAQLHSLTLRRKATEPPPSQEREPPAEPSIYATLAIH

SEQ ID NO: 51450 - protein, 482 aa, Homo sapiens
MTGAYPKPTLSAQPSPVVTSGGRVTLQCESQVAFGGFILCKEGEEEHPQCLNSQPHARGSSRAIFSVGPVSPNRRWSHRCYGYDLNSPYVWSSPSDLLELLVPGVSKKPSLSVQPGPVVAPGESLTLQCVSDVGYDRFVLYKEGERDLRQLPGRQPQAGLSQANFTLGPVSRSYGGQYRCYGAHNLSSECSAPSDPLDILITGQIRGTPFISVQPGPTVASGENVTLLCQSWRQFHTFLLTKAGAADAPLRLRSIHEYPKYQAEFPMSPVTSAHAGTYRCYGSLNSDPYLLSHPSEPLELVVSGPSMGSSPPPTGPISTPAGPEDQPLTPTGSDPQSGLGRHLGVVIGILVAVVLLLLLLLLLFLILRHRRQGKHWTSTQRKADFQHPAGAVGPEPTDRGLQWRSSPAADAQEENLYAAVKDTQPEDGVEMDTRAAASEAPQDVTYAQLHSLTLRRKATEPPPSQEREPPAEPSIYATLAIH

SEQ ID NO: 51451 - protein, 643 aa, Homo sapiens
MTPALTALLCLGLSLGPRTRVQAGPFPKPTLWAEPGSVISWGSPVTIWCQGSQEAQEYRLHKEGSPEPLDRNNPLEPKNKARFSIPSMTEHHAGRYRCHYYSSAGWSEPSDPLEMVMTGAYSKPTLSALPSPVVASGGNMTLRCGSQKGYHHFVLMKEGEHQLPRTLDSQQLHSRGFQALFPVGPVTPSHRWRFTCYYYYTNTPWVWSHPSDPLEILPSGVSRKPSLLTLQGPVLAPGQSLTLQCGSDVGYNRFVLYKEGERDFLQRPGQQPQAGLSQANFTLGPVSPSNGGQYRCYGAHNLSSEWSAPSDPLNILMAGQIYDTVSLSAQPGPTVASGENVTLLCQSWWQFDTFLLTKEGAAHPPLRLRSMYGAHKYQAEFPMSPVTSAHAGTYRCYGSYSSNPHLLSHPSEPLELVVSGPEDQPLNPPGSGPQNPPGLGSGAGTRAAGLGRYLEVLIGVSVAFVLLLFLLLFLLLRRQRHSKHRTSDQRKTDFQRPAGAAETEPKDRGLLRRSSPAADVQEENLYAAVKDTQSEDRVELDSQSPHDEDPQAVTYAPVKHSSPRREMASPPSSLSGEFLDTKDRQVEEDRQMDTEAAASEASQDVTYAQLHSLTLRRKATEPPPSQEGEPPAEPSIYATLAIH

SEQ ID NO: 51452 - protein, 631 aa, Homo sapiens
MTPALTALLCLGLSLGPRTRVQAGPFPKPTLWAEPGSVISWGSPVTIWCQGSQEAQEYRLHKEGSPEPLDRNNPLEPKNKARFSIPSMTEHHAGRYRCHYYSSAGWSEPSDPLEMVMTGAYSKPTLSALPSPVVASGGNMTLRCGSQKGYHHFVLMKEGEHQLPRTLDSQQLHSRGFQALFPVGPVTPSHRWRFTCYYYYTNTPWVWSHPSDPLEILPSGVSRKPSLLTLQGPVLAPGQSLTLQCGSDVGYNRFVLYKEGERDFLQRPGQQPQAGLSQANFTLGPVSPSNGGQYRCYGAHNLSSEWSAPSDPLNILMAGQIYDTVSLSAQPGPTVASGENVTLLCQSWWQFDTFLLTKEGAAHPPLRLRSMYGAHKYQAEFPMSPVTSAHAGTYRCYGSYSSNPHLLSHPSEPLELVVSGHSGGSSLPPTGPPSTPGLGRYLEVLIGVSVAFVLLLFLLLFLLLRRQRHSKHRTSDQRKTDFQRPAGAAETEPKDRGLLRRSSPAADVQEENLYAAVKDTQSEDRVELDSQSPHDEDPQAVTYAPVKHSSPRREMASPPSSLSGEFLDTKDRQVEEDRQMDTEAAASEASQDVTYAQLHSLTLRRKATEPPPSQEGEPPAEPSIYATLAIH

SEQ ID NO: 51453 - protein, 648 aa, Homo sapiens
MTPALTALLCLGLSLGPRTRVQAGPFPKPTLWAEPGSVISWGSPVTIWCQGSLEAQEYQLDKEGSPEPLDRNNPLEPKNKARFSIPSMTQHHAGRYRCHYYSSAGWSEPSDPLELVMTGAYSKPTLSALPSPVVASGGNMTLRCGSQKGYHHFVLMKEGEHQLPRTLDSQQLHSRGFQALFPVGPVTPSHRWRFTCYYYYTNTPWVWSHPSDPLEILPSGVSRKPSLLTLQGPVLAPGQSLTLQCGSDVGYNRFVLYKEGERDFLQRPGQQPQAGLSQANFTLGPVSPSNGGQYRCYGAHNLSSEWSAPSDPLNILMAGQIYDTVSLSAQPGPTVASGENVTLLCQSWWQFDTFLLTKEGAAHPPLRLRSMYGAHKYQAEFPMSPVTSAHAGTYRCYGSYSSNPHLLSHPSEPLELVVSGHSGGSSLPPTGPPSTPGGPEDQPLNPPGSGPQNRLGRYLEVLIGVSVAFVLLLFLLLFLLLRRQRHSKHRTSDQRKTDFQRPAGAAETEPKDRGLLRRSSPAADVQEENLYAAVKDTQSEDRVELDSQSPHDEDPQAVTYAPVKHSSPRREMASPPSSLSGEFLDTKDRQVEEDRQMDTEAAASEASQDVTYAQLHSLTLRRKATEPPPSQEGEPPAEPSIYATLAIH

SEQ ID NO: 51454 - protein, 631 aa, Homo sapiens; identical to SEQ ID NO: 51452

SEQ ID NO: 51455 - protein, 158 aa, Homo sapiens
MTPALTALLCLGLSLGPRTRVQAGPFPKPTLWAEPGSVISWGSPVTIWCQGSQEAQEYRLHKEGSPEPLDRNNPLEPKNKARFSIPSMTEHHAGRYRCHYYSSAGWSEPSDPLEMVMTGAYSKPTLSALPSPVVASGGNMTLRCGSQKGYHHFVLMKE

SEQ ID NO: 51456 - protein, 448 aa, Homo sapiens
MIPTFTALLCLGLSLGPRTHMQAGPLPKPTLWAEPGSVISWGNSVTIWCQGTLEAREYRLDKEESPAPWDRQNPLEPKNKARFSIPSMTEDYAGRYRCYYRSPVGWSQPSDPLELVMTGAYSKPTLSALPSPLVTSGKSVTLLCQSRSPMDTFLLIKERAAHPLLHLRSEHGAQQHQAEFPMSPVTSVHGGTYRCFSSHGFSHYLLSHPSDPLELIVSGSLEDPRPSPTRSVSTAAGPEDQPLMPTGSVPHSGLRRHWEVLIGVLVVSILLLSLLLFLLLQHWRQGKHRTLAQRQADFQRPPGAAEPEPKDGGLQRRSSPAADVQGENFCAAVKNTQPEDGVEMDTRQSPHDEDPQAVTYAKVKHSRPRREMASPPSPLSGEFLDTKDRQAEEDRQMDTEAAASEAPQDVTYAQLHSFTLRQKATEPPPSQEGASPAEPSVYATLAIH

SEQ ID NO: 51457 - protein, 448 aa, Homo sapiens; identical to SEQ ID NO: 51456

SEQ ID NO: 51458 - protein, 590 aa, Homo sapiens
MTLTLSVLICLGLSVGPRTCVQAGTLPKPTLWAEPASVIARGKPVTLWCQGPLETEEYRLDKEGLPWARKRQNPLEPGAKAKFHIPSTVYDSAGRYRCYYETPAGWSEPSDPLELVATGFYAEPTLLALPSPVVASGGNVTLQCDTLDGLLTFVLVEEEQKLPRTLYSQKLPKGPSQALFPVGPVTPSCRWRFRCYYYYRKNPQVWSNPSDLLEILVPGVSRKPSLLIPQGSVVARGGSLTLQCRSDVGYDIFVLYKEGEHDLVQGSGQQPQAGLSQANFTLGPVSRSHGGQYRCYGAHNLSPRWSAPSDPLDILIAGLIPDIPALSVQPGPKVASGENVTLLCQSWHQIDTFFLTKEGAAHPPLCLKSKYQSYRHQAEFSMSPVTSAQGGTYRCYSAIRSYPYLLSSPSYPQELVVSGPSGDPSLSPTGSTPTPGPEDQPLTPTGLDPQSGLGRHLGVVTGVSVAFVLLLFLLLFLLLRHRHQSKHRTSAHFYRPAGAAGPEPKDQGLQKRASPVADIQEEILNAAVKDTQPKDGVEMDARAAASEAPQDVTYAQLHSLTLRREATEPPPSQEREPPAEPSIYAPLAIH

SEQ ID NO: 51459 - protein, 591 aa, Homo sapiens
MTLTLSVLICLGLSVGPRTCVQAGTLPKPTLWAEPASVIARGKPVTLWCQGPLETEEYRLDKEGLPWARKRQNPLEPGAKAKFHIPSTVYDSAGRYRCYYETPAGWSEPSDPLELVATGFYAEPTLLALPSPVVASGGNVTLQCDTLDGLLTFVLVEEEQKLPRTLYSQKLPKGPSQALFPVGPVTPSCRWRFRCYYYYRKNPQVWSNPSDLLEILVPGVSRKPSLLIPQGSVVARGGSLTLQCRSDVGYDIFVLYKEGEHDLVQGSGQQPQAGLSQANFTLGPVSRSHGGQYRCYGAHNLSPRWSAPSDPLDILIAGLIPDIPALSVQPGPKVASGENVTLLCQSWHQIDTFFLTKEGAAHPPLCLKSKYQSYRHQAEFSMSPVTSAQGGTYRCYSAIRSYPYLLSSPSYPQELVVSGPSGDPSLSPTGSTPTPAGPEDQPLTPTGLDPQSGLGRHLGVVTGVSVAFVLLLFLLLFLLLRHRHQSKHRTSAHFYRPAGAAGPEPKDQGLQKRASPVADIQEEILNAAVKDTQPKDGVEMDARAAASEAPQDVTYAQLHSLTLRREATEPPPSQEREPPAEPSIYAPLAIH

SEQ ID NO: 51460 - protein, 622 aa, Homo sapiens
MTLTLSVLICLGLSVGPRTCVQAGTLPKPTLWAEPASVIARGKPVTLWCQGPLETEEYRLDKEGLPWARKRQNPLEPGAKAKFHIPSTVYDSAGRYRCYYETPAGWSEPSDPLELVATALPSPVVASGGNVTLQCDTLDGLLTFVLVEEEQKLPRTLYSQKLPKGPSQALFPVGPVTPSCRWRFRCYYYYRKNPQVWSNPSDLLEILVPGVSRKPSLLIPQGSVVARGGSLTLQCRSDVGYDIFVLYKEGEHDLVQGSGQQPQAGLSQANFTLGPVSRSHGGQYRCYGAHNLSPRWSAPSDPLDILIAGLIPDIPALSVQPGPKVASGENVTLLCQSWHQIDTFFLTKEGAAHPPLCLKSKYQSYRHQAEFSMSPVTSAQGGTYRCYSAIRSYPYLLSSPSYPQELVVSGPSGDPSLSPTGSTPTPAGPEDQPLTPTGLDPQSGLGRHLGVVTGVSVAFVLLLFLLLFLLLRHRHQSKHRTSAHFYRPAGAAGPEPKDQGLQKRASPVADIQEEILNAAVKDTQPKDGVEMDARQSPHDEDPQAVTYAEVKHSRPRREMASPPSPLSGEFLDTKDRQAEEDRQMDTERVLSSPGPQASPPPPRSLPLTLPRCRLLHLKPPRM

SEQ ID NO: 51461 - protein, 864 aa, Homo sapiens
MGCWGQLLVWFGAAGAILCSSPGSQETFLRSSPLPLASPSPRDPKVSAPPSILEPASPLNSPGTEGSWLFSTCGASGRHGPTQTQCDGAYAGTSVVVTVGAAGQLRGVQLWRVPGPGQYLISAYGAAGGKGAKNHLSRAHGVFVSAIFSLGLGESLYILVGQQGEDACPGGSPESQLVCLGESRAVEEHAAMDGSEGVPGSRRWAGGGGGGGGATYVFRVRAGELEPLLVAAGGGGRAYLRPRDRGRTQASPEKLENRSEAPGSGGRGGAAGGGGGWTSRAPSPQAGRSLQEGAEGGQGCSEAWATLGWAAAGGFGGGGGACTAGGGGGGYRGGDASETDNLWADGEDGVSFIHPSSELFLQPLAVTENHGEVEIRRHLNCSHCPLRDCQWQAELQLAECLCPEGMELAVDNVTCMDLHKPPGPLVLMVAVVATSTLSLLMVCGVLILVKQKKWQGLQEMRLPSPELELSKLRTSAIRTAPNPYYCQVGLGPAQSWPLPPGVTEVSPANVTLLRALGHGAFGEVYEGLVIGLPGDSSPLQVAIKTLPELCSPQDELDFLMEALIISKFRHQNIVRCVGLSLRATPRLILLELMSGGDMKSFLRHSRPHLGQPSPLVMRDLLQLAQDIAQGCHYLEENHFIHRDIAARNCLLSCAGPSRVAKIGDFGMARDIYRASYYRRGDRALLPVKWMPPEAFLEGIFTSKTDSWSFGVLLWEIFSLGYMPYPGRTNQEVLDFVVGGGRMDPPRGCPGPVYRIMTQCWQHEPELRPSFASILERLQYCTQDPDVLNSLLPMELGPTPEEEGTSGLGNRSLECLRPPQPQELSPEKLKSWGGSPLGPWLSSGLKPLKSRGLQPQNLWNPTYRS

SEQ ID NO: 51462 - protein, 803 aa, Homo sapiens
MGCWGQLLVWFGAAGAILCSSPGSQETFLRSSPLPLASPSPRDPKVSAPPSILEPASPLNSPGTEGSWLFSTCGASGRHGPTQTQCDGAYAGTSVVVTVGAAGQLRGVQLWRVPGPGQYLISAYGAAGGKGAKNHLSRAHGVFVSAIFSLGLGESLYILVGQQGEDACPGGSPESQLVCLGESRAVEEHAAMDGSEGVPGSRRWAGGGGGGGGATYVFRVRAGELEPLLVAAGGGGRAYLRPRDRGRTQASPEKLENRSEAPGSGGRGGAAGGDASETDNLWADGEDGVSFIHPSSELFLQPLAVTENHGEVEIRRHLNCSHCPLRDCQWQAELQLAECLCPEGMELAVDNVTCMDLHKPPGPLVLMVAVVATSTLSLLMVCGVLILVKQKKWQGLQEMRLPSPELELSKLRTSAIRTAPNPYYCQVGLGPAQSWPLPPGVTEVSPANVTLLRALGHGAFGEVYEGLVIGLPGDSSPLQVAIKTLPELCSPQDELDFLMEALIISKFRHQNIVRCVGLSLRATPRLILLELMSGGDMKSFLRHSRPHLGQPSPLVMRDLLQLAQDIAQGCHYLEENHFIHRDIAARNCLLSCAGPSRVAKIGDFGMARDIYRASYYRRGDRALLPVKWMPPEAFLEGIFTSKTDSWSFGVLLWEIFSLGYMPYPGRTNQEVLDFVVGGGRMDPPRGCPGPVYRIMTQCWQHEPELRPSFASILERLQYCTQDPDVLNSLLPMELGPTPEEEGTSGLGNRSLECLRPPQPQELSPEKLKSWGGSPLGPWLSSGLKPLKSRGLQPQNLWNPTYRS

SEQ ID NO: 51463 - protein, 478 aa, Homo sapiens
MGCWGQLLVWFGAAGAILCSSPGSQETFLRSSPLPLASPSPRDPKVSAPPSILEPASPLNSPGTEGSWLFSTCGASGRHGPTQTQCDGAYAGTSVVVTVGAAGQLRGVQLWRVPGPGQYLISAYGAAGGKGAKNHLSRAHGVFVSAIFSLGLGESLYILVGQQGEDACPGGSPESQLVCLGESRAVEEHAAMDGSEGVPGSRRWAGGGGGGGGATYVFRVRAGELEPLLVAAGGGGRAYLRPRDRGRTQASPEKLENRSEAPGSGGRGGAAGGGGGWTSRAPSPQAGRSLQEGAEGGQGCSEAWATLGWAAAGGFGGGGGACTAGGGGGGYRGGDASETDNLWADGEDGVSFIHPSSELFLQPLAVTENHGEVEIRRHLNCSHCPLRDCQWQAELQLAECLCPEGMELAVDNVTCMDLHKPPGPLVLMVAVVATSTLSLLMVCGVLILGTKRLAGTVDSRLLLSSELGWVSAGGGRRR

SEQ ID NO: 51464 - protein, 734 aa, Homo sapiens
MGCWGQLLVWFGAAGAILCSSPGSQETFLRSSPLPLASPSPRDPKVSAPPSILEPASPLNSPGTEGSWLFSTCGASGRHGPTQTQCDGAYAGTSVVVTVGAAGQLRGVQLWRVPGPGQYLISAYGAAGGKGAKNHLSRAHGVFVSAIFSLGLGESLYILVGQQGEDACPGGSPESQLVCLGESRAVEEHAAMDGSEGVPGSRRWAGGGGGGGGATYVFRVRAGELEPLLVAAGGGGRAYLRPRDRGRTQASPEKLENRSEAPGSGGRGGAAGGDASETDNLWADGEDGVSFIHPSSELFLQPLAVTENHGEVEIRRHLNCSHCPLRDCQWQAELQLAECLCPEGMELAVDNVTCMDLHKPPGPLVLMVAVVATSTLSLLMVCGVLILGGAWPGPVLASATRCHRGFPSQCYSAQTLPELCSPQDELDFLMEALIISKFRHQNIVRCVGLSLRATPRLILLELMSGGDMKSFLRHSRPHLGQPSPLVMRDLLQLAQDIAQGCHYLEENHFIHRDIAARNCLLSCAGPSRVAKIGDFGMARDIYRASYYRRGDRALLPVKWMPPEAFLEGIFTSKTDSWSFGVLLWEIFSLGYMPYPGRTNQEVLDFVVGGGRMDPPRGCPGPVYRIMTQCWQHEPELRPSFASILERLQYCTQDPDVLNSLLPMELGPTPEEEGTSGLGNRSLECLRPPQPQELSPEKLKSWGGSPLGPWLSSGLKPLKSRGLQPQNLWNPTYRS

SEQ ID NO: 51465 - protein, 59 aa, Homo sapiens
MLSRNDDICIYGGLGLGGLLLLAVVLLSACLCWLHRRGPGLLRAGTPLCISAEAASAQQ

SEQ ID NO: 51466 - protein, 66 aa, Homo sapiens
MLSRNDDICIYGGLGLGGLLLLAVVLLSACLCWLHRRAPSVLVPGPGLLRAGTPLCISAEAASAQQ

SEQ ID NO: 51467 - protein, 73 aa, Homo sapiens
MLSRNDVKRLERSWHLLSWSQAQGSSEQELHYASLQRLPVPSSEGPDLRGRDKRGTKEDPRADYACIAENKPT

SEQ ID NO: 51468 - protein, 66 aa, Homo sapiens
MLSRNDVKRLERSWAQGSSEQELHYASLQRLPVPSSEGPDLRGRDKRGTKEDPRADYACIAENKPT

SEQ ID NO: 51469 - protein, 35 aa, Homo sapiens
MLSRNDAPSVLVPGPGLLRAGTPLCISAEAASAQQ

SEQ ID NO: 51470 - protein, 104 aa, Homo sapiens
MLSRNDDICIYGGLGLGGLLLLAVVLLSACLCWLHRRVKRLERSWHLLSWSQAQGSSEQELHYASLQRLPVPSSEGPDLRGRDKRGTKEDPRADYACIAENKPT

SEQ ID NO: 51471 - protein, 13 aa, Homo sapiens
MLSRNDEAASAQQ

SEQ ID NO: 51472 - protein, 35 aa, Homo sapiens; identical to SEQ ID NO: 51469

SEQ ID NO: 51473 - protein, 91 aa, Homo sapiens
MIYVSTGAWGWAGSCFWQWSFCPPACVGCIEEHLLSWSQAQGSSEQELHYASLQRLPVPSSEGPDLRGRDKRGTKEDPRADYACIAENKPT

SEQ ID NO: 51474 - protein, 51 aa, Homo sapiens
MLSRNDVKRLERSWRLPVPSSEGPDLRGRDKRGTKEDPRADYACIAENKPT

SEQ ID NO: 51475 - protein, 63 aa, Homo sapiens
MHLCRGCQCPAVRDLTSGAETREAPRRIQELTMPALLRTNPPEHPRHLPQPRRVDRVPLWSSQ

SEQ ID NO: 51476 - protein, 73 aa, Homo sapiens; identical to SEQ ID NO: 51467

SEQ ID NO: 51477 - protein, 35 aa, Homo sapiens; identical to SEQ ID NO: 51469

SEQ ID NO: 51478 - protein, 66 aa, Homo sapiens; identical to SEQ ID NO: 51466

SEQ ID NO: 51479 - protein, 104 aa, Homo sapiens; identical to SEQ ID NO: 51470

SEQ ID NO: 51480 - protein, 44 aa, Homo sapiens
MLSRNDDICIYGGLGLGGLLLLAVVLLSACLCWLHRREAASAQQ

SEQ ID NO: 51481 - protein, 66 aa, Homo sapiens
MLSRNDDICIYGGLGLGGLLLLAVVLLSACLCWLHRRVKRLERSWRLPVPSSEGPDLRGRDKRGTK

SEQ ID NO: 51482 - protein, 66 aa, Homo sapiens; identical to SEQ ID NO: 51468

SEQ ID NO: 51483 - protein, 97 aa, Homo sapiens
MLSRNDDICIYGGLGLGGLLLLAVVLLSACLCWLHRRVKRLERSWAQGSSEQELHYASLQRLPVPSSEGPDLRGRDKRGTKEDPRADYACIAENKPT

SEQ ID NO: 51484 - protein, 59 aa, Homo sapiens; identical to SEQ ID NO: 51465

SEQ ID NO: 51485 - protein, 28 aa, Homo sapiens
MLSRNDGPGLLRAGTPLCISAEAASAQQ

SEQ ID NO: 51486 - protein, 28 aa, Homo sapiens
MLSRNDGPGLLRAGTPLCISAEAASAQQ

SEQ ID NO: 51487 - protein, 28 aa, Homo sapiens
MLSRNDGPGLLRAGTPLCISAEAASAQQ

SEQ ID NO: 51488 - protein, 28 aa, Homo sapiens
MLSRNDGPGLLRAGTPLCISAEAASAQQ

SEQ ID NO: 51489 - protein, 13 aa, Homo sapiens
MLSRNDEAASAQQ

SEQ ID NO: 51490 - protein, 82 aa, Homo sapiens
MLSRNDDICIYGGLGLGGLLLLAVVLLSACLCWLHRRVKRLERSWRLPVPSSEGPDLRGRDKRGTKEDPRADYACIAENKPT

SEQ ID NO: 51491 - protein, 66 aa, Homo sapiens; identical to SEQ ID NO: 51468

SEQ ID NO: 51492 - protein, 66 aa, Homo sapiens; identical to SEQ ID NO: 51468

SEQ ID NO: 51493 - protein, 97 aa, Homo sapiens; identical to SEQ ID NO: 51483

SEQ ID NO: 51494 - protein, 51 aa, Homo sapiens; identical to SEQ ID NO: 51474

SEQ ID NO: 51495 - protein, 97 aa, Homo sapiens; identical to SEQ ID NO: 51483

SEQ ID NO: 51496 - protein, 104 aa, Homo sapiens; identical to SEQ ID NO: 51470

SEQ ID NO: 51497 - protein, 43 aa, Homo sapiens
YRGMMIYVSTGAWGWAGSCFWQWSFCPPACVGCIEERLPVPSS

SEQ ID NO: 51498 - protein, 36 aa, Homo sapiens
MLSRNDDICIYGGLGLGGLLLLAVVLLSACLCWLHR

SEQ ID NO: 51499 - protein, 104 aa, Homo sapiens; identical to SEQ ID NO: 51470

SEQ ID NO: 51500 - protein, 46 aa, Homo sapiens
MLSRNDDICIYGGLGLGGLLLLAVVLLSACLCWLHRREHCLALEPL

SEQ ID NO: 51501 - protein, 13 aa, Homo sapiens
MLSRNDEAASAQQ

SEQ ID NO: 51502 - protein, 28 aa, Homo sapiens
MLSRNDGPGLLRAGTPLCISAEAASAQQ

SEQ ID NO: 51503 - protein, 66 aa, Homo sapiens; identical to SEQ ID NO: 51468

SEQ ID NO: 51504 - protein, 28 aa, Homo sapiens
MLSRNDGPGLLRAGTPLCISAEAASAQQ

SEQ ID NO: 51505 - protein, 28 aa, Homo sapiens
MLSRNDGPGLLRAGTPLCISAEAASAQQ

SEQ ID NO: 51506 - protein, 43 aa, Homo sapiens
  VARIANT 1: note = MOD_RES - Any amino acid
XSRNDDICIYGGLGLGGLLLLAVVLLSACLCWLHRREAASAQQ

SEQ ID NO: 51507 - protein, 51 aa, Homo sapiens; identical to SEQ ID NO: 51474

SEQ ID NO: 51508 - protein, 35 aa, Homo sapiens; identical to SEQ ID NO: 51469

SEQ ID NO: 51509 - protein, 13 aa, Homo sapiens
MLSRNDEAASAQQ

SEQ ID NO: 51510 - protein, 97 aa, Homo sapiens; identical to SEQ ID NO: 51483

SEQ ID NO: 51511 - protein, 66 aa, Homo sapiens; identical to SEQ ID NO: 51468

SEQ ID NO: 51512 - protein, 46 aa, Homo sapiens; identical to SEQ ID NO: 51500

SEQ ID NO: 51513 - protein, 43 aa, Homo sapiens; identical to SEQ ID NO: 51506
  VARIANT 1: note = MOD_RES - Any amino acid

SEQ ID NO: 51514 - protein, 46 aa, Homo sapiens; identical to SEQ ID NO: 51500

SEQ ID NO: 51515 - protein, 28 aa, Homo sapiens
MLSRNDGPGLLRAGTPLCISAEAASAQQ

SEQ ID NO: 51516 - protein, 43 aa, Homo sapiens; identical to SEQ ID NO: 51506
  VARIANT 1: note = MOD_RES - Any amino acid

SEQ ID NO: 51517 - protein, 66 aa, Homo sapiens; identical to SEQ ID NO: 51468

SEQ ID NO: 51518 - protein, 59 aa, Homo sapiens; identical to SEQ ID NO: 51465

SEQ ID NO: 51519 - protein, 73 aa, Homo sapiens; identical to SEQ ID NO: 51467

SEQ ID NO: 51520 - protein, 66 aa, Homo sapiens; identical to SEQ ID NO: 51466

SEQ ID NO: 51521 - protein, 66 aa, Homo sapiens; identical to SEQ ID NO: 51468

SEQ ID NO: 51522 - protein, 28 aa, Homo sapiens
MLSRNDGPGLLRAGTPLCISAEAASAQQ

SEQ ID NO: 51523 - protein, 82 aa, Homo sapiens; identical to SEQ ID NO: 51490

SEQ ID NO: 51524 - protein, 51 aa, Homo sapiens; identical to SEQ ID NO: 51474

SEQ ID NO: 51525 - protein, 59 aa, Homo sapiens; identical to SEQ ID NO: 51465

SEQ ID NO: 51526 - protein, 66 aa, Homo sapiens; identical to SEQ ID NO: 51468

SEQ ID NO: 51527 - protein, 51 aa, Homo sapiens; identical to SEQ ID NO: 51474

SEQ ID NO: 51528 - protein, 82 aa, Homo sapiens; identical to SEQ ID NO: 51490

SEQ ID NO: 51529 - protein, 46 aa, Homo sapiens; identical to SEQ ID NO: 51500

SEQ ID NO: 51530 - protein, 35 aa, Homo sapiens; identical to SEQ ID NO: 51469

SEQ ID NO: 51531 - protein, 82 aa, Homo sapiens; identical to SEQ ID NO: 51490

SEQ ID NO: 51532 - protein, 28 aa, Homo sapiens
MLSRNDGPGLLRAGTPLCISAEAASAQQ

SEQ ID NO: 51533 - protein, 97 aa, Homo sapiens; identical to SEQ ID NO: 51483

SEQ ID NO: 51534 - protein, 28 aa, Homo sapiens
MLSRNDGPGLLRAGTPLCISAEAASAQQ

SEQ ID NO: 51535 - protein, 35 aa, Homo sapiens; identical to SEQ ID NO: 51469

SEQ ID NO: 51536 - protein, 97 aa, Homo sapiens; identical to SEQ ID NO: 51483

SEQ ID NO: 51537 - protein, 66 aa, Homo sapiens; identical to SEQ ID NO: 51468

SEQ ID NO: 51538 - protein, 66 aa, Homo sapiens; identical to SEQ ID NO: 51468

SEQ ID NO: 51539 - protein, 13 aa, Homo sapiens
MLSRNDEAASAQQ

SEQ ID NO: 51540 - protein, 28 aa, Homo sapiens
MLSRNDGPGLLRAGTPLCISAEAASAQQ

SEQ ID NO: 51541 - protein, 36 aa, Homo sapiens; identical to SEQ ID NO: 51498

SEQ ID NO: 51542 - protein, 97 aa, Homo sapiens; identical to SEQ ID NO: 51483

SEQ ID NO: 51543 - protein, 59 aa, Homo sapiens; identical to SEQ ID NO: 51465

SEQ ID NO: 51544 - protein, 97 aa, Homo sapiens; identical to SEQ ID NO: 51483

SEQ ID NO: 51545 - protein, 66 aa, Homo sapiens; identical to SEQ ID NO: 51466

SEQ ID NO: 51546 - protein, 28 aa, Homo sapiens
MLSRNDGPGLLRAGTPLCISAEAASAQQ

SEQ ID NO: 51547 - protein, 59 aa, Homo sapiens; identical to SEQ ID NO: 51465

SEQ ID NO: 51548 - protein, 66 aa, Homo sapiens; identical to SEQ ID NO: 51468

SEQ ID NO: 51549 - protein, 35 aa, Homo sapiens; identical to SEQ ID NO: 51469

SEQ ID NO: 51550 - protein, 66 aa, Homo sapiens; identical to SEQ ID NO: 51468

SEQ ID NO: 51551 - protein, 28 aa, Homo sapiens
MLSRNDGPGLLRAGTPLCISAEAASAQQ

SEQ ID NO: 51552 - protein, 35 aa, Homo sapiens; identical to SEQ ID NO: 51469

SEQ ID NO: 51553 - protein, 43 aa, Homo sapiens; identical to SEQ ID NO: 51506
  VARIANT 1: note = MOD_RES - Any amino acid

SEQ ID NO: 51554 - protein, 36 aa, Homo sapiens; identical to SEQ ID NO: 51498

SEQ ID NO: 51555 - protein, 36 aa, Homo sapiens; identical to SEQ ID NO: 51498

SEQ ID NO: 51556 - protein, 66 aa, Homo sapiens; identical to SEQ ID NO: 51468

SEQ ID NO: 51557 - protein, 97 aa, Homo sapiens; identical to SEQ ID NO: 51483

SEQ ID NO: 51558 - protein, 28 aa, Homo sapiens
MLSRNDGPGLLRAGTPLCISAEAASAQQ

SEQ ID NO: 51559 - protein, 104 aa, Homo sapiens; identical to SEQ ID NO: 51470

SEQ ID NO: 51560 - protein, 66 aa, Homo sapiens; identical to SEQ ID NO: 51468

SEQ ID NO: 51561 - protein, 36 aa, Homo sapiens; identical to SEQ ID NO: 51498

SEQ ID NO: 51562 - protein, 97 aa, Homo sapiens; identical to SEQ ID NO: 51483

SEQ ID NO: 51563 - protein, 51 aa, Homo sapiens; identical to SEQ ID NO: 51474

SEQ ID NO: 51564 - protein, 104 aa, Homo sapiens; identical to SEQ ID NO: 51470

SEQ ID NO: 51565 - protein, 97 aa, Homo sapiens; identical to SEQ ID NO: 51483

SEQ ID NO: 51566 - protein, 104 aa, Homo sapiens; identical to SEQ ID NO: 51470

SEQ ID NO: 51567 - protein, 51 aa, Homo sapiens; identical to SEQ ID NO: 51474

SEQ ID NO: 51568 - protein, 66 aa, Homo sapiens; identical to SEQ ID NO: 51466

SEQ ID NO: 51569 - protein, 36 aa, Homo sapiens; identical to SEQ ID NO: 51498

SEQ ID NO: 51570 - protein, 73 aa, Homo sapiens; identical to SEQ ID NO: 51467

SEQ ID NO: 51571 - protein, 66 aa, Homo sapiens; identical to SEQ ID NO: 51468

SEQ ID NO: 51572 - protein, 66 aa, Homo sapiens; identical to SEQ ID NO: 51468

SEQ ID NO: 51573 - protein, 35 aa, Homo sapiens; identical to SEQ ID NO: 51469

SEQ ID NO: 51574 - protein, 28 aa, Homo sapiens
MLSRNDGPGLLRAGTPLCISAEAASAQQ

SEQ ID NO: 51575 - protein, 46 aa, Homo sapiens; identical to SEQ ID NO: 51500

SEQ ID NO: 51576 - protein, 46 aa, Homo sapiens; identical to SEQ ID NO: 51500

SEQ ID NO: 51577 - protein, 66 aa, Homo sapiens; identical to SEQ ID NO: 51466

SEQ ID NO: 51578 - protein, 46 aa, Homo sapiens; identical to SEQ ID NO: 51500

SEQ ID NO: 51579 - protein, 28 aa, Homo sapiens
MLSRNDGPGLLRAGTPLCISAEAASAQQ

SEQ ID NO: 51580 - protein, 97 aa, Homo sapiens; identical to SEQ ID NO: 51483

SEQ ID NO: 51581 - protein, 59 aa, Homo sapiens; identical to SEQ ID NO: 51465

SEQ ID NO: 51582 - protein, 97 aa, Homo sapiens; identical to SEQ ID NO: 51483

SEQ ID NO: 51583 - protein, 28 aa, Homo sapiens
MLSRNDGPGLLRAGTPLCISAEAASAQQ

SEQ ID NO: 51584 - protein, 36 aa, Homo sapiens; identical to SEQ ID NO: 51498

SEQ ID NO: 51585 - protein, 51 aa, Homo sapiens; identical to SEQ ID NO: 51474

SEQ ID NO: 51586 - protein, 13 aa, Homo sapiens
MLSRNDEAASAQQ

SEQ ID NO: 51587 - protein, 66 aa, Homo sapiens; identical to SEQ ID NO: 51468

SEQ ID NO: 51588 - protein, 28 aa, Homo sapiens
MLSRNDGPGLLRAGTPLCISAEAASAQQ

SEQ ID NO: 51589 - protein, 104 aa, Homo sapiens; identical to SEQ ID NO: 51470

SEQ ID NO: 51590 - protein, 82 aa, Homo sapiens; identical to SEQ ID NO: 51490

SEQ ID NO: 51591 - protein, 66 aa, Homo sapiens; identical to SEQ ID NO: 51468

SEQ ID NO: 51592 - protein, 28 aa, Homo sapiens
MLSRNDGPGLLRAGTPLCISAEAASAQQ

SEQ ID NO: 51593 - protein, 43 aa, Homo sapiens; identical to SEQ ID NO: 51506
  VARIANT 1: note = MOD_RES - Any amino acid

SEQ ID NO: 51594 - protein, 82 aa, Homo sapiens; identical to SEQ ID NO: 51490

SEQ ID NO: 51595 - protein, 66 aa, Homo sapiens; identical to SEQ ID NO: 51468

SEQ ID NO: 51596 - protein, 59 aa, Homo sapiens; identical to SEQ ID NO: 51465

SEQ ID NO: 51597 - protein, 28 aa, Homo sapiens
MLSRNDGPGLLRAGTPLCISAEAASAQQ

SEQ ID NO: 51598 - protein, 82 aa, Homo sapiens; identical to SEQ ID NO: 51490

SEQ ID NO: 51599 - protein, 36 aa, Homo sapiens; identical to SEQ ID NO: 51498

SEQ ID NO: 51600 - protein, 73 aa, Homo sapiens; identical to SEQ ID NO: 51467

SEQ ID NO: 51601 - protein, 66 aa, Homo sapiens; identical to SEQ ID NO: 51468

SEQ ID NO: 51602 - protein, 28 aa, Homo sapiens
MLSRNDGPGLLRAGTPLCISAEAASAQQ

SEQ ID NO: 51603 - protein, 66 aa, Homo sapiens; identical to SEQ ID NO: 51466

SEQ ID NO: 51604 - protein, 73 aa, Homo sapiens; identical to SEQ ID NO: 51467

SEQ ID NO: 51605 - protein, 66 aa, Homo sapiens; identical to SEQ ID NO: 51466

SEQ ID NO: 51606 - protein, 28 aa, Homo sapiens
MLSRNDGPGLLRAGTPLCISAEAASAQQ

SEQ ID NO: 51607 - protein, 28 aa, Homo sapiens
MLSRNDGPGLLRAGTPLCISAEAASAQQ

SEQ ID NO: 51608 - protein, 28 aa, Homo sapiens
MLSRNDGPGLLRAGTPLCISAEAASAQQ

SEQ ID NO: 51609 - protein, 28 aa, Homo sapiens
MLSRNDGPGLLRAGTPLCISAEAASAQQ

SEQ ID NO: 51610 - protein, 97 aa, Homo sapiens; identical to SEQ ID NO: 51483

SEQ ID NO: 51611 - protein, 73 aa, Homo sapiens; identical to SEQ ID NO: 51467

SEQ ID NO: 51612 - protein, 28 aa, Homo sapiens
MLSRNDGPGLLRAGTPLCISAEAASAQQ

SEQ ID NO: 51613 - protein, 97 aa, Homo sapiens; identical to SEQ ID NO: 51483

SEQ ID NO: 51614 - protein, 66 aa, Homo sapiens; identical to SEQ ID NO: 51468

SEQ ID NO: 51615 - protein, 28 aa, Homo sapiens
MLSRNDGPGLLRAGTPLCISAEAASAQQ

SEQ ID NO: 51616 - protein, 66 aa, Homo sapiens; identical to SEQ ID NO: 51468

SEQ ID NO: 51617 - protein, 13 aa, Homo sapiens
MLSRNDEAASAQQ

SEQ ID NO: 51618 - protein, 43 aa, Homo sapiens; identical to SEQ ID NO: 51497

SEQ ID NO: 51619 - protein, 66 aa, Homo sapiens; identical to SEQ ID NO: 51468

SEQ ID NO: 51620 - protein, 97 aa, Homo sapiens; identical to SEQ ID NO: 51483

SEQ ID NO: 51621 - protein, 73 aa, Homo sapiens; identical to SEQ ID NO: 51467

SEQ ID NO: 51622 - protein, 13 aa, Homo sapiens
MLSRNDEAASAQQ

SEQ ID NO: 51623 - protein, 91 aa, Homo sapiens; identical to SEQ ID NO: 51473

SEQ ID NO: 51624 - protein, 91 aa, Homo sapiens; identical to SEQ ID NO: 51473

SEQ ID NO: 51625 - protein, 91 aa, Homo sapiens; identical to SEQ ID NO: 51473

SEQ ID NO: 51626 - protein, 35 aa, Homo sapiens; identical to SEQ ID NO: 51469

SEQ ID NO: 51627 - protein, 91 aa, Homo sapiens; identical to SEQ ID NO: 51473

SEQ ID NO: 51628 - protein, 35 aa, Homo sapiens; identical to SEQ ID NO: 51469

SEQ ID NO: 51629 - protein, 35 aa, Homo sapiens; identical to SEQ ID NO: 51469

SEQ ID NO: 51630 - protein, 91 aa, Homo sapiens; identical to SEQ ID NO: 51473

SEQ ID NO: 51631 - protein, 91 aa, Homo sapiens; identical to SEQ ID NO: 51473

SEQ ID NO: 51632 - protein, 35 aa, Homo sapiens; identical to SEQ ID NO: 51469

SEQ ID NO: 51633 - protein, 35 aa, Homo sapiens; identical to SEQ ID NO: 51469

SEQ ID NO: 51634 - protein, 35 aa, Homo sapiens; identical to SEQ ID NO: 51469

SEQ ID NO: 51635 - protein, 35 aa, Homo sapiens; identical to SEQ ID NO: 51469

SEQ ID NO: 51636 - protein, 91 aa, Homo sapiens; identical to SEQ ID NO: 51473

SEQ ID NO: 51637 - protein, 280 aa, Homo sapiens
MEREMVLCLAQTIHTQEDLPRPSISAEPGTVIPLGSHVTFVCRGPVGVQTFRLERESRSTYNDTEDVSQASPSESEARFRIDSVSEGNAGPYRCIYYKPPKWSEQSDYLELLVKETSGGPDSPDTEPGSSAGPTQRPSDNSHNEHAPASQGLKAEHLYILIGVSVVFLFCLLLLVLFCLHRQNQIKQGPPRSKDEEQKPQQRPDLAVDVLERTADKATVNGLPEKDRETDTSALAAGSSQEVTYAQLDHWALTQRTARAVSPQSTKPMAESITYAAVARH

SEQ ID NO: 51638 - protein, 270 aa, Homo sapiens
MSPHPTALLGLVLCLAQTIHTQEEDLPRPSISAEPGTVIPLGSHVTFVCRGPVGVQTFRLERESRSTYNDTEDVSQASPSESEARFRIDSVSEGNAGPYRCIYYKPPKWSEQSDYLELLVKGPTQRPSDNSHNEHAPASQGLKAEHLYILIGVSVVFLFCLLLLVLFCLHRQNQIKQGPPRSKDEEQKPQQRPDLAVDVLERTADKATVNGLPEKDRETDTSALAAGSSQEVTYAQLDHWALTQRTARAVSPQSTKPMAESITYAAVARH

SEQ ID NO: 51639 - protein, 287 aa, Homo sapiens
MSPHPTALLGLVLCLAQTIHTQEEDLPRPSISAEPGTVIPLGSHVTFVCRGPVGVQTFRLERESRSTYNDTEDVSQASPSESEARFRIDSVSEGNAGPYRCIYYKPPKWSEQSDYLELLVKETSGGPDSPDTEPGSSAGPTQRPSDNSHNEHAPASQGLKAEHLYILIGVSVVFLFCLLLLVLFCLHRQNQIKQGPPRSKDEEQKPQQRPDLAVDVLERTADKATVNGLPEKDRETDTSALAAGSSQEVTYAQLDHWALTQRTARAVSPQSTKPMAESITYAAVARH

SEQ ID NO: 51640 - protein, 611 aa, Homo sapiens
MPEIVDTCSLASPASVCRTKHLHLRCSVDFTRRTLTGTAALTVQSQEDNLRSLVLDTKDLTIEKVVINGQEVKYALGERQSYKGSPMEISLPIALSKNQEIVIEISFETSPKSSALQWLTPEQTSGKEHPYLFSQCQAIHCRAILPCQDTPSVKLTYTAEVSVPKELVALMSAIRDGETPDPEDPSRKIYKFIQKVPIPCYLIALVVGALESRQIGPRTLVWSEKEQVEKSAYEFSETESMLKIAEDLGGPYVWGQYDLLVLPPSFPYGGMENPCLTFVTPTLLAGDKSLSNVIAHEISHSWTGNLVTNKTWDHFWLNEGHTVYLERHICGRLFGEKFRHFNALGGWGELQNSVKTFGETHPFTKLVVDLTDIDPDVAYSSVPYEKGFALLFYLEQLLGGPEIFLGFLKAYVEKFSYKSITTDDWKDFLYSYFKDKVDVLNQVDWNAWLYSPGLPPIKPNYDMTLTNACIALSQRWITAKEDDLNSFNATDLKDLSSHQLNEFLAQTLQRAPLPLGHIKRMQEVYNFNAINNSEIRFRWLRLCIQSKWEDAIPLALKMATEQGRMKFTRPLFKDLAAFDKSHDQAVRTYQEHKASMHPVTAMLVGKDLKVD

SEQ ID NO: 51641 - protein, 508 aa, Homo sapiens
MLPQRNLSKRQVPTMHIPVKTRRLLAALKVLDTKDLTIEKVVINGQEVKYALGERQSYKGSPMEISLPIALSKNQEIVIEISFETSPKSSALQWLTPEQTSGKEHPYLFSQCQAIHCRAILPCQDTPSVKLTYTAEVSVPKELVALMSAIRDGETPDPEDPSRKIYKFIQKVPIPCYLIALVVGALESRQIGPRTLVWSEKEQVEKSAYEFSETESMLKIAEDLGGPYVWGQYDLLVLPPSFPYGGMENPCLTFVTPTLLAGDKSLSNVIAHEISHSWTGNLVTNKTWDHFWLNEGHTVYLERHICGRLFGEKFRHFNALGGWGELQNSVKTFGETHPFTKLVVDLTDIDPDVAYSSVPYEKGFALLFYLEQLLGGPEIFLGFLKAYVEKFSYKSITTDDWKDFLYSYFKDKVDVLNQVDWNAWLYSPGLPPIKPNYDMTLTNACIALSQRWITAKEDDLNSFNATDLKDLSSHQLNEFLAQTLQRMAAALHSIQVGGRNSFGAKDGN

SEQ ID NO: 51642 - protein, 587 aa, Homo sapiens
MLPQRNLSKRQVPTMHIPVKTRRLLAALKVLDTKDLTIEKVVINGQEVKYALGERQSYKGSPMEISLPIALSKNQEIVIEISFETSPKSSALQWLTPEQTSGKEHPYLFSQCQAIHCRAILPCQDTPSVKLTYTAEVSVPKELVALMSAIRDGETPDPEDPSRKIYKFIQKVPIPCYLIALVVGALESRQIGPRTLVWSEKEQVEKSAYEFSETESMLKIAEDLGGPYVWGQYDLLVLPPSFPYGGMENPCLTFVTPTLLAGDKSLSNVIAHEISHSWTGNLVTNKTWDHFWLNEGHTVYLERHICGRLFGEKFRHFNALGGWGELQNSVKTFGETHPFTKLVVDLTDIDPDVAYSSVPYEKGFALLFYLEQLLGGPEIFLGFLKAYVEKFSYKSITTDDWKDFLYSYFKDKVDVLNQVDWNAWLYSPGLPPIKPNYDMTLTNACIALSQRWITAKEDDLNSFNATDLKDLSSHQLNEFLAQTLQRAPLPLGHIKRMQEVYNFNAINNSEIRFRWLRLCIQSKWEDAIPLALKMATEQGRMKFTRPLFKDLAAFDKSHDQAVRTYQEHKASMHPVTAMLVGKDLKVD

SEQ ID NO: 51643 - protein, 352 aa, Homo sapiens
MNTTSSAAPPSLGVEFISLLAIILLSVALAVGLPGNSFVVWSILKRMQKRSVTALMVLNLALADLAVLLTAPFFLHFLAQGTWSFGLAGCRLCHYVCGVSMYASVLLITAMSLDRSLAVARPFVSQKLRTKAMARRVLAGIWVLSFLLATPVLAYRTVVPWKTNMSLCFPRYPSEGHRAFHLIFEAVTGFLLPFLAVVASYSDIGRRLQARRFRRSRRTGRLVVLIILTFAAFWLPYHVVNLAEAGRALAGQAAGLGLVGKRLSLARNVLIALAFLSSSVNPVLYACAGGGLLRSAGVGFVAKLLEGTGSEASSTRRGGSLGQTARSGPAALEPGPSESLTASSPLKLNELN

SEQ ID NO: 51644 - protein, 352 aa, Homo sapiens; identical to SEQ ID NO: 51643

SEQ ID NO: 51645 - protein, 352 aa, Homo sapiens; identical to SEQ ID NO: 51643

SEQ ID NO: 51646 - protein, 102 aa, Homo sapiens
MNTTSSAAPPSLGVEFISLLAIILLSVALAVGLPGNSFVVWSILKRMQKRSVTALMVLNLALADLAVLLTAPFFLHFLAQGTWSFGLAGCRLCHYVCGVSMY

SEQ ID NO: 51647 - protein, 160 aa, Homo sapiens
MSVCYRPPGNETLLSWKTSRATGTAFLLLAALLGLPGNGFVVWSLAGWRPARGRPLAATLVLHLALADGAVLLLTPLFVAFLTRQAWPLGQAGCKAVYYVCALSMYASVLLTGLLSLQRCLAVTRPFLAPRLRSPALARRLLLAVWLAALLLAVPAAVYR

SEQ ID NO: 51648 - protein, 389 aa, Homo sapiens
MAPSHRASQVGFCPTPERPLWRLPPTCRPRRMSVCYRPPGNETLLSWKTSRATGTAFLLLAALLGLPGNGFVVWSLAGWRPARGRPLAATLVLHLALADGAVLLLTPLFVAFLTRQAWPLGQAGCKAVYYVCALSMYASVLLTGLLSLQRCLAVTRPFLAPRLRSPALARRLLLAVWLAALLLAVPAAVYRHLWRDRVCQLCHPSPVHAAAHLSLETLTAFVLPFGLMLGCYSVTLARLRGARWGSGRHGARVGRLVSAIVLAFGLLWAPYHAVNLLQAVAALAPPEGALAKLGGAGQAARAGTTALAFFSSSVNPVLYVFTAGDLLPRAGPRFLTRLFEGSGEARGGGRSREGTMELRTTPQLKVVGQGRGNGDPGGGMEKDGPEWDL

SEQ ID NO: 51649 - protein, 319 aa, Homo sapiens
MSVCYRPPGNETLLSWKTSRATGTAFLLLAALLGLPGNGFVVWSLAGWRPARGRPLAATLVLHLALADGAVLLLTPLFVAFLTRQAWPLGQAGCKAVYYVCALSMYASVLLTGLLSLQRCLAVTRPFLAPRLRSPALARRLLLAVWLAALLLAVPAAVYRHLWRDRVCQLCHPSPVHAAAHLSLETLTAFVLPFGLMLGCYSVTLARLRGARWGSGRHGARVGRLVSAIVLAFGLLWAPYHAVNLLQAVAALAPPEGALAKLGGAGQAARAGTTALAFFSSSVNPVLYVFTAGDLLPRAGPRFLTRLFEGSGEARGGGR

SEQ ID NO: 51650 - protein, 358 aa, Homo sapiens
MSVCYRPPGNETLLSWKTSRATGTAFLLLAALLGLPGNGFVVWSLAGWRPARGRPLAATLVLHLALADGAVLLLTPLFVAFLTRQAWPLGQAGCKAVYYVCALSMYASVLLTGLLSLQRCLAVTRPFLAPRLRSPALARRLLLAVWLAALLLAVPAAVYRHLWRDRVCQLCHPSPVHAAAHLSLETLTAFVLPFGLMLGCYSVTLARLRGARWGSGRHGARVGRLVSAIVLAFGLLWAPYHAVNLLQAVAALAPPEGALAKLGGAGQAARAGTTALAFFSSSVNPVLYVFTAGDLLPRAGPRFLTRLFEGSGEARGGGRSREGTMELRTTPQLKVVGQGRGNGDPGGGMEKDGPEWDL

SEQ ID NO: 51651 - protein, 358 aa, Homo sapiens; identical to SEQ ID NO: 51650

SEQ ID NO: 51652 - protein, 150 aa, Homo sapiens
MKDEVALLAAVTLLGVLLQAYFSLQVISARRAFRVSPPLTTGPPEFERVYRAQVNCSEYFPLFLATLWVAGIFFHEGAAALCGLVYLFARLRYFQGYARSAQLRLAPLYASARALWLLVALAALGLLAHFLPAALRAALLGRLRTLLPWA

SEQ ID NO: 51653 - protein, 386 aa, Homo sapiens
MEELDALLEELERSTLQDSDEYSNPAPLPLDQHSRKETNLDETSEILSIQDNTSPLPAQLVYTTNIQELNVYSEAQEPKESPPPSKTSAAAQLDELMAHLTEMQAKVAVRADAGKKHLPDKQDHKASLDSMLGGLEQELQDLGIATVPKGHCASCQKPIAGKVIHALGQSWHPEHFVCTHCKEEIGSSPFFERSGLAYCPNDYHQLFSPRCAYCAAPILDKVLTAMNQTWHPEHFFCSHCGEVFGAEGFHEKDKKPYCRKDFLAMFSPKCGGCNRPVLENYLSAMDTVWHPECFVCGDCFTSFSTGSFFELDGRPFCELHYHHRRGTLCHGCGQPITGRCISAMGYKFHPEHFVCAFCLTQLSKGIFREQNDKTYCQPCFNKLFPL

SEQ ID NO: 51654 - protein, 391 aa, Homo sapiens
MSTLLISSSDALLEELERSTLQDSDEYSNPAPLPLDQHSRKETNLDETSEILSIQDNTSPLPAQLVYTTNIQELNVYSEAQEPKESPPPSKTSAAAQLDELMAHLTEMQAKVAVRADAGKKHLPDKQDHKASLDSMLGGLEQELQDLGIATVPKGHCASCQKPIAGKVIHALGQSWHPEHFVCTHCKEEIGSSPFFERSGLAYCPNDYHQLFSPRCAYCAAPILDKVLTAMNQTWHPEHFFCSHCGEVFGAEGFHEKDKKPYCRKDFLAMFSPKCGGCNRPVLENYLSAMDTVWHPECFVCGDCFTSFSTGSFFELDGRPFCELHYHHRRGTLCHGCGQPITGRCISAMGYKFHPEHFVCAFCLTQLSKGIFREQNDKTYCQPCFNKLFPL

SEQ ID NO: 51655 - protein, 379 aa, Homo sapiens
MLKRCGRRLLLALAGALLACLLVLTADPPPPPLPAERGRRALRSLAGPAGAAPAPGLGAAAAAPGALVRDVHSLSEYFSLLTRARRDAGPPPGAAPRPADGHPRPLAEPLAPRDVFIAVKTTKKFHRARLDLLLETWISRHKEMTFIFTDGEDEALARHTGNVVITNCSAAHSRQALSCKMAVEYDRFIESGRKWFCHVDDDNYVNLRALLRLLASYPHTRDVYVGKPSLDRPIQAMERVSENKVRPVHFWFATGGAGFCISRGLALKMSPWASGGHFMNTAERIRLPDDCTIGYIVEALLGVPLIRSGLFHSHLENLQQVPTSELHEQVTLSYGMFENKRNAVHVKGPFSVEADPSRFRSIHCHLYPDTPWCPRTAIF

SEQ ID NO: 51656 - protein, 250 aa, Homo sapiens
MTPGRCCLAADIQVETFIFTDGEDEALARHTGNVVITNCSAAHSRQALSCKMAVEYDRFIESGRKWFCHVDDDNYVNLRALLRLLASYPHTRDVYVGKPSLDRPIQAMERVSENKVRPVHFWFATGGAGFCISRGLALKMSPWASGGHFMNTAERIRLPDDCTIGYIVEALLGVPLIRSGLFHSHLENLQQVPTSELHEQVTLSYGMFENKRNAVHVKGPFSVEADPSRFRSIHCHLYPDTPWCPRTAIF

SEQ ID NO: 51657 - protein, 361 aa, Homo sapiens
MLKRCGRRLLLALAGALLACLLVLTADPPPPPLPAERGRRALRSLAGPAGAAPAPGLGAAAAAPGALVRDVHSLSEYFSLLTRARRDAGPPPGAAPRPADGHPRPLAEPLAPRDVFIAVKTTKKFHRARLDLLLETWISRHKEMTFIFTDGEDEALARHTGNVVITNCSAAHSRQALSCKMAVEYDRFIESGRKWFCHVDDDNYVNLRALLRLLASYPHTRDVYVGKPSLDRPIQAMERVSENKVRPVHFWFATGGAGFCISRGLALKMSPWASGGHFMNTAERIRLPDDCTIGYIVEALLGVPLIRSGLFHSHLENLQQVPTSELHEQVTLSYGMFENKRNAVHVKGPFSVEADPSRWGN

SEQ ID NO: 51658 - protein, 250 aa, Homo sapiens; identical to SEQ ID NO: 51656

SEQ ID NO: 51659 - protein, 308 aa, Homo sapiens
MDEQTGRLRLDTYCMSAKQIWAWSKCSGRLWDEHMKWMEGWTDRWTDGWMDGWMDEWSPTPALRSYGGGLSQQTFIFTDGEDEALARHTGNVVITNCSAAHSRQALSCKMAVEYDRFIESGRKWFCHVDDDNYVNLRALLRLLASYPHTRDVYVGKPSLDRPIQAMERVSENKVRPVHFWFATGGAGFCISRGLALKMSPWASGGHFMNTAERIRLPDDCTIGYIVEALLGVPLIRSGLFHSHLENLQQVPTSELHEQVTLSYGMFENKRNAVHVKGPFSVEADPSRFRSIHCHLYPDTPWCPRTAIF

SEQ ID NO: 51660 - protein, 433 aa, Homo sapiens
MQRMIQQFAAEYTSKNSSTQDPSQPNSTKNQSLPKASPVTTSPTAATTQNPVLSKLLMADQDSPLDLTVRKSQSEPSEQDGVLDLSTKKSPCAGSTSLSHSPGCSSTQGNGRPGRPSQYRPDGLRSGDGVPPRSLQDGTREGFGHSTSLKVPLARSLQISEELLSRNQLSTAASLGPSGLQNHGQHLILSREASWAKPHYEFNLSRMKFRGNGALSNISDLPFLAENSAFPKMALQAKQDGKKDVSHSSPVDLKIPQVRGMDLSWESRTGDQYSYSSLVMGSQTESALSKKLRAILPKQSRKSMLDAGPDSWGSDAEQSTSGQPYPTSDQEGDPGSKQPRKKRGRYRQYNSEILEEAISVVMSGKMSVSKAQSIYGIPHSTLEYKVKERLGTLKNPPKKKMKLMRSEGPDVSVKIELDPQGEAAQSANESKNE

SEQ ID NO: 51661 - protein, 433 aa, Homo sapiens; identical to SEQ ID NO: 51660

SEQ ID NO: 51662 - protein, 433 aa, Homo sapiens; identical to SEQ ID NO: 51660

SEQ ID NO: 51663 - protein, 406 aa, Homo sapiens
MQRMIQQFAAEYTSKNSSTQDPSQPNSTKNQSLPKASPVTTSPTAATTQNPVLSKLLMADQDSPLDLTVRKSQSEPSEQDGVLDLSTKKSPCAGSTSLSHSPGCSSTQGNGRPGRPSQYRPDGLRSGDGVPPRSLQDGTREGFGHSTSLKVPLARSLQISEELLSRNQLSTAASLGPSGLQNHGQHLILSREASWAKPHYEFNLSRMKFRGNGALSNISDLPFLAENSAFPKMALQAKQDGKKDVSHSSPVDLKIPQVRGMDLSWESRTGDQYSYSSLVMGSQTESALSKKLRAILPKQSRKSMLDAGPDSWGSDAEQSTSGQPYPTSDQEGDPGSKQPRKKRGRYRQYNSEILEEAISVVMSGKMSVSKAQSIYGIPHSTLEYKVKERLGTLKNPPKKKMKLMSG

SEQ ID NO: 51664 - protein, 318 aa, Homo sapiens
MDKGRERMAAAAAAAAAAAAAAQCRSPRCAAERRGFRRELDSWRHRLMHCVGFESILEGLYGPRLRRDLSLFEDCEPEELTDWSMDEKCSFCNLQREAVSDCIPSLDSSQSTPTEELSSQGQSNTDKIECQAENYLNALFRKKDLPQNCDPNIPLVAQELMKKMIRQFAIEYISKSGKTQENRNGSIGPSIVCKSIQMNQAENSLQEEQEGPLDLTVNRMQEQNTQQGDGVLDLSTKKTSIKSEESSICDPSSENSVAGMLQVKTDEKLNVSDENTASCPLSPIKMCLNRPIEWNLNLTTASLTSCTVHNQNLKSEEK

SEQ ID NO: 51665 - protein, 518 aa, Homo sapiens
MDEKCSFCNLQREAVSDCIPSLDSSQSTPTEELSSQGQSNTDKIECQAENYLNALFRKKDLPQNCDPNIPLVAQELMKKMIRQFAIEYISKSGKTQENRNGSIGPSIVCKSIQMNQAENSLQEEQEGPLDLTVNRMQEQNTQQGDGVLDLSTKKTSIKSEESSICDPSSENSVAGRLHRNREDYVERSAEFADGLLSKALKDIQSGALDINKAGILYGIPQKTLLLHLEALPAGKPASFKNKTRDFHDSYSYKDSKETCAVLQKVALWARAQAERTEKSKLNLLETSEIKFPTASTYLHQLTLQKMVTQFKEKNESLQYETSNPTVQLKIPQLRVSSVSKSQPDGSGLLDVMYQVSKTSSVLEGSALQKLKNILPKQNKIECSGPVTHSSVDSYFLHGDLSPLCLNSKNGTVDGTSENTEDGLDRKDSKQPRKKRGRYRQYDHEIMEEAIAMVMSGKMSVSKAQGIYGVPHSTLEYKVKERSGTLKTPPKKKLRLPDTGLYNMTDSGTGSCKNSSKPV

SEQ ID NO: 51666 - protein, 602 aa, Homo sapiens
MDKGRERMAAAAAAAAAAAAAAQCRSPRCAAERRGFRRELDSWRHRLMHCVGFESILEGLYGPRLRRDLSLFEDCEPEELTDWSMDEKCSFCNLQREAVSDCIPSLDSSQSTPTEELSSQGQSNTDKIECQAENYLNALFRKKDLPQNCDPNIPLVAQELMKKMIRQFAIEYISKSGKTQENRNGSIGPSIVCKSIQMNQAENSLQEEQEGPLDLTVNRMQEQNTQQGDGVLDLSTKKTSIKSEESSICDPSSENSVAGRLHRNREDYVERSAEFADGLLSKALKDIQSGALDINKAGILYGIPQKTLLLHLEALPAGKPASFKNKTRDFHDSYSYKDSKETCAVLQKVALWARAQAERTEKSKLNLLETSEIKFPTASTYLHQLTLQKMVTQFKEKNESLQYETSNPTVQLKIPQLRVSSVSKSQPDGSGLLDVMYQVSKTSSVLEGSALQKLKNILPKQNKIECSGPVTHSSVDSYFLHGDLSPLCLNSKNGTVDGTSENTEDGLDRKDSKQPRKKRGRYRQYDHEIMEEAIAMVMSGKMSVSKAQGIYGVPHSTLEYKVKERSGTLKTPPKKKLRLPDTGLYNMTDSGTGSCKNSSKPV

SEQ ID NO: 51667 - protein, 144 aa, Homo sapiens
MDHGYEETSVYLKDCIPSLDSSQSTPTEELSSQGQSNTDKIECQAENYLNALFRKKDLPQNCDPNIPLVAQELMKKMIRQFAIEYISKSGKTQENRNGSIGPSIVCKSIQMNQAENSLQEEQEGPLDLTVNRMQEQNTQQACYK

SEQ ID NO: 51668 - protein, 728 aa, Homo sapiens
MNQPESANDPEPLCAVCGQAHSLEENHFYSYPEEVDDDLICHICLQALLDPLDTPCGHTYCTLCLTNFLVEKDFCPMDRKPLVLQHCKKSSILVNKLLNKLLVTCPFREHCTQVLQRCDLEHHFQTSCKGASHYGLTKDRKRRSQDGCPDGCASLTATAPSPEVSAAATISLMTDEPGLDNPAYVSSAEDGQPAISPVDSGRSNRTRARPFERSTIRSRSFKKINRALSVLRRTKSGSAVANHADQGRENSENTTAPEVFPRLYHLIPDGEITSIKINRVDPSESLSIRLVGGSETPLVHIIIQHIYRDGVIARDGRLLPGDIILKVNGMDISNVPHNYAVRLLRQPCQVLWLTVMREQKFRSRNNGQAPDAYRPRDDSFHVILNKSSPEEQLGIKLVRKVDEPGVFIFNVLDGGVAYRHGQLEENDRVLAINGHDLRYGSPESAAHLIQASERRVHLVVSRQVRQRSPDIFQEAGWNSNGSWSPGPGERSNTPKPLHPTITCHEKVVNIQKDPGESLGMTVAGGASHREWDLPIYVISVEPGGVISRDGRIKTGDILLNVDGVELTEVSRSEAVALLKRTSSSIVLKALEVKEYEPQEDCSSPAALDSNHNMAPPSDWSPSWVMWLELPRCLYNCKDIVLRRNTAGSLGFCIVGGYEEYNGNKPFFIKSIVEGTPAYNDGRIRCGDILLAVNGRSTSGMIHACLARLLKELKGRITLTIVSWPGTFL

SEQ ID NO: 51669 - protein, 632 aa, Homo sapiens
MKALLLLVLPWLSPANYIDNVGNLHFLYSELCKGASHYGLTKDRKRRSQDGCPDGCASLTATAPSPEVSAAATISLMTDEPGLDNPAYVSSAEDGQPAISPVDSGRSNRTRARPFERSTIRSRSFKKINRALSVLRRTKSGSAVANHADQGRENSENTTAPEVFPRLYHLIPDGEITSIKINRVDPSESLSIRLVGGSETPLVHIIIQHIYRDGVIARDGRLLPGDIILKVNGMDISNVPHNYAVRLLRQPCQVLWLTVMREQKFRSRNNGQAPDAYRPRDDSFHVILNKSSPEEQLGIKLVRKVDEPGVFIFNVLDGGVAYRHGQLEENDRVLAINGHDLRYGSPESAAHLIQASERRVHLVVSRQVRQRSPDIFQEAGWNSNGSWSPGPGERSNTPKPLHPTITCHEKVVNIQKDPGESLGMTVAGGASHREWDLPIYVISVEPGGVISRDGRIKTGDILLNVDGVELTEVSRSEAVALLKRTSSSIVLKALEVKEYEPQEDCSSPAALDSNHNMAPPSDWSPSWVMWLELPRCLYNCKDIVLRRNTAGSLGFCIVGGYEEYNGNKPFFIKSIVEGTPAYNDGRIRCGDILLAVNGRSTSGMIHACLARLLKELKGRITLTIVSWPGTFL

SEQ ID NO: 51670 - protein, 6 aa, Homo sapiens
MNQPES

SEQ ID NO: 51671 - protein, 16 aa, Homo sapiens
MNQPESANDPEPLCAV

SEQ ID NO: 51672 - protein, 99 aa, Homo sapiens
MNQPESANDPEPLCAVCGQAHSLEENHFYSYPEEVDDDLICHICLQALLDPLDTPCGHTYCTLCLTNFLVEKDFCPMDRKPLVLQHCKKSSILVNKLLN

SEQ ID NO: 51673 - protein, 90 aa, Homo sapiens
MNQPESANDPEPLCAVCGQAHSLEENHFYSYPEEVDDDLICHICLQALLDPLDTPCGHTYCTLCLTNFLVEKDFCPMDRKPLVLQHCKKS

SEQ ID NO: 51674 - protein, 126 aa, Homo sapiens
MNQPESANDPEPLCAVCGQAHSLEENHFYSYPEEVDDDLICHICLQALLDPLDTPCGHTYCTLCLTNFLVEKDFCPMDRKPLVLQHCKKSSILVNKLLNKLLVTCPFREHCTQVLQRCDLEHHFQT

SEQ ID NO: 51675 - protein, 566 aa, Homo sapiens
MAVQTAVRASQPRLPPLDNPAYVSSAEDGQPAISPVDSGRSNRTRARPFERSTIRSRSFKKINRALSVLRRTKSGSAVANHADQGRENSENTTAPEVFPRLYHLIPDGEITSIKINRVDPSESLSIRLVGGSETPLVHIIIQHIYRDGVIARDGRLLPGDIILKVNGMDISNVPHNYAVRLLRQPCQVLWLTVMREQKFRSRNNGQAPDAYRPRDDSFHVILNKSSPEEQLGIKLVRKVDEPGVFIFNVLDGGVAYRHGQLEENDRVLAINGHDLRYGSPESAAHLIQASERRVHLVVSRQVRQRSPDIFQEAGWNSNGSWSPGPGERSNTPKPLHPTITCHEKVVNIQKDPGESLGMTVAGGASHREWDLPIYVISVEPGGVISRDGRIKTGDILLNVDGVELTEVSRSEAVALLKRTSSSIVLKALEVKEYEPQEDCSSPAALDSNHNMAPPSDWSPSWVMWLELPRCLYNCKDIVLRRNTAGSLGFCIVGGYEEYNGNKPFFIKSIVEGTPAYNDGRIRCGDILLAVNGRSTSGMIHACLARLLKELKGRITLTIVSWPGTFL

SEQ ID NO: 51676 - protein, 690 aa, Homo sapiens [sequence omitted]

SEQ ID NO: 51677 - protein, 704 aa, Homo sapiens
MLGICRGRRKFLAASLSLLCIPAITWIYLFSGSFEDGKPVSLSPLESQAHSPRYTASSQRERESLEVRMREVEEENRALRRQLSLAQGRAPSHRRGNHSKTYSMEEGTGDSENLRAGIVAGNSSECGQQPVVEKCETIHVAIVCAGYNASRDVVTLVKSVLFHRRNPLHFHLIADSIAEQILATLFQTWMVPAVRVDFYNADELKSEVSWIPNKHYSGIYGLMKLVLTKTLPANLERVIVLDTDITFATDIAELWAVFHKFKGQQVLGLVENQSDWYLGNLWKNHRPWPALGRGYNTGVILLLLDKLRKMKWEQMWRLTAERELMGMLSTSLADQDIFNAVIKQNPFLVYQLPCFWNVQLSDHTRSEQCYRDVSDLKLQKQLSELDEDDLCYEFRRERFTVHRTHLYFLHYEYEPAADSTDVTLVAQLSMDRLQMLEAICKHWEGPISLALYLSDAEAQQFLRYAQGSEVLMSRHNVGYHIVYKEGQFYPVNLLRNVAMKHISTPYMFLSDIDFLPMYGLYEYLRKSVIQLDLANTKKAMIVPAFETLRYRLSFPKSKAELLSMLDMGTLFTFRYHVWTKGHAPTNFAKWRTATTPYRVEWEADFEPYVVVRRDCPEYDRRFVGFGWNKVAHIMELDVQEYEFIVLPNAYMIHMPHAPSFDITKFRSNKQYRICLKTLKEEFQQDMSRRYGFAALKYLTAENNS

SEQ ID NO: 51678 - protein, 756 aa, Homo sapiens
MLGICRGRRKFLAASLSLLCIPAITWIYLFSGSFEDGKPVSLSPLESQAHSPRYTASSQRERESLEVRMREVEEENRALRRQLSLAQGRAPSHRRGNHSKTYSMEEGTGDSENLRAGIVAGNSSECGQQPVVEKCETIHVAIVCAGYNASRDVVTLVKSVLFHRRNPLHFHLIADSIAEQILATLFQTWMVPAVRVDFYNADELKSEVSWIPNKHYSGIYGLMKLVLTKTLPANLERVIVLDTDITFATDIAELWAVFHKFKGQQVLGLVENQSDWYLGNLWKNHRPWPALGRGYNTGVILLLLDKLRKMKWEQMWRLTAERELMGMLSTSLADQDIFNAVIKQNPFLVYQLPCFWNVQLSDHTRSEQCYRDVSDLKVIHWNSPKKLRVKNKHVEFFRNLYLTFLEYDGNLLRRELFGCPSEADVNSENLQKQLSELDEDDLCYEFRRERFTVHRTHLYFLHYEYEPAADSTDVTLVAQLSMDRLQMLEAICKHWEGPISLALYLSDAEAQQFLRYAQGSEVLMSRHNVGYHIVYKEGQFYPVNLLRNVAMKHISTPYMFLSDIDFLPMYGLYEYLRKSVIQLDLANTKKAMIVPAFETLRYRLSFPKSKAELLSMLDMGTLFTFRYHVWTKGHAPTNFAKWRTATTPYRVEWEADFEPYVVVRRDCPEYDRRFVGFGWNKVAHIMELDVQEYEFIVLPNAYMIHMPHAPSFDITKFRSNKQYRICLKTLKEEFQQDMSRRYGFAALKYLTAENNS

SEQ ID NO: 51679 - protein, 756 aa, Homo sapiens; identical to SEQ ID NO: 51678

SEQ ID NO: 51680 - protein, 704 aa, Homo sapiens; identical to SEQ ID NO: 51677

SEQ ID NO: 51681 - protein, 135 aa, Homo sapiens
MLGICRGRRKFLAASLSLLCIPAITWIYLFSGSFEDGKPVSLSPLESQAHSPRYTASSQRERESLEVRMREVEEENRALRRQLSLAQGRAPSHRRGNHSKTYSMEEGTGDSENLRAGIVAGNSSECGQQPVVEKC

SEQ ID NO: 51682 - protein, 47 aa, Homo sapiens
MLGICRGRRKFLAASLSLLCIPAITWIYLFSGSFEDGKPVSLSPLES

SEQ ID NO: 51683 - protein, 136 aa, Homo sapiens
MLGICRGRRKFLAASLSLLCIPAITWIYLFSGSFEDGKPVSLSPLESQAHSPRYTASSQRERESLEVRMREVEEENRALRRQLSLAQGRAPSHRRGNHSKTYSMEEGTGDSENLRAGIVAGNSSECGQQPVVEKCE

SEQ ID NO: 51684 - protein, 60 aa, Homo sapiens
MLGICRGRRKFLAASLSLLCIPAITWIYLFSGSFEDGKPVSLSPLESQAHSPRYTASSQR

SEQ ID NO: 51685 - protein, 109 aa, Homo sapiens
MLGICRGRRKFLAASLSLLCIPAITWIYLFSGSFEDGKPVSLSPLESQAHSPRYTASSQRERESLEVRMREVEEENRALRRQLSLAQGRAPSHRRGNHSKTYSMEEGTG

SEQ ID NO: 51686 - protein, 707 aa, Homo sapiens
MLGICRGRRKFLAASLSLLCIPAITWIYLFSGSFEDGKPVSLSPLESQAHSPRYTASSQRERESLEVRMREVEEENRALRRQLSLAQGRAPSHRRGNHSKTYSMEEGTGDSENLRAGIVAGNSSECGQQPVVEKCETIHVAIVCAGYNASRDVVTLVKSVLFHRRNPLHFHLIADSIAEQILATLFQTWMVPAVRVDFYNADELKSEVSWIPNKHYSGIYGLMKLVLTKTLPANLERVIVLDTDITFATDIAELWAVFHKFKGQQVLGLVENQSDWYLGNLWKNHRPWPALGRGYNTGVILLLLDKLRKMKWEQMWRLTAERELMGMLSTSLADQDIFNAVIKQNPFLVYQLPCFWNVQLSDHTRSEQCYRDVSDLKVIHWNSPKKLRVKNKHVEFFRNLYLTFLEYDGNLLRRELFGCPSEADVNSENLQKQLSELDEDDLCYEFRRERFTVHRTHLYFLHYEYEPAADSTDVTLVAQLSMDRLQMLEAICKHWEGPISLALYLSDAEAQQFLRYAQGSEVLMSRHNVGYHIVYKEGQFYPVNLLRNVAMKHISTPYMFLSDIDFLPMYGLYEYLRYHVWTKGHAPTNFAKWRTATTPYRVEWEADFEPYVVVRRDCPEYDRRFVGFGWNKVAHIMELDVQEYEFIVLPNAYMIHMPHAPSFDITKFRSNKQYRICLKTLKEEFQQDMSRRYGFAALKYLTAENNS

SEQ ID NO: 51687 - protein, 555 aa, Homo sapiens
MLIWSEVSWIPNKHYSGIYGLMKLVLTKTLPANLERVIVLDTDITFATDIAELWAVFHKFKGQQVLGLVENQSDWYLGNLWKNHRPWPALGRGYNTGVILLLLDKLRKMKWEQMWRLTAERELMGMLSTSLADQDIFNAVIKQNPFLVYQLPCFWNVQLSDHTRSEQCYRDVSDLKVIHWNSPKKLRVKNKHVEFFRNLYLTFLEYDGNLLRRELFGCPSEADVNSENLQKQLSELDEDDLCYEFRRERFTVHRTHLYFLHYEYEPAADSTDVTLVAQLSMDRLQMLEAICKHWEGPISLALYLSDAEAQQFLRYAQGSEVLMSRHNVGYHIVYKEGQFYPVNLLRNVAMKHISTPYMFLSDIDFLPMYGLYEYLRKSVIQLDLANTKKAMIVPAFETLRYRLSFPKSKAELLSMLDMGTLFTFRYHVWTKGHAPTNFAKWRTATTPYRVEWEADFEPYVVVRRDCPEYDRRFVGFGWNKVAHIMELDVQEYEFIVLPNAYMIHMPHAPSFDITKFRSNKQYRICLKTLKEEFQQDMSRRYGFAALKYLTAENNS

SEQ ID NO: 51688 - protein, 365 aa, Homo sapiens
MAKVAKDLNPGVKKMSLGQLQSARGVACLGCKGTCSGFEPHSWRKICKSCKCSQEDHCLTSDLEDDRKIGRLLMDSKYSTLTARVKGGDGIRIYKRNRMIMTNPIATGKDPTFDTITYEWAPPGVTQKLGLQYMELIPKEKQPVTGTEGAFYRRRQLMHQLPIYDQDPSRCRGLLENELKLMEEFVKQYKSEALGVGEVALPGQGGLPKEEGKQQEKPEGAETTAATTNGSLSDPSKEVEYVCELCKGAAPPDSPVVYSDRAGYNKQWHPTCFVCAKCSEPLVDLIYFWKDGAPWCGRHYCESLRPRCSGCDEIIFAEDYQRVEDLAWHRKHFVCEGCEQLLSGRAYIVTKGQLLCPTCSKSKRS

SEQ ID NO: 51689 - protein, 253 aa, Homo sapiens
MFGMQGDVFGLRATFMEGLQYMELIPKEKQPVTGTEGAFYRRRQLMHQLPIYDQDPSRCRGLLENELKLMEEFVKQYKSEALGVGEVALPGQGGLPKEEGKQQEKPEGAETTAATTNGSLSDPSKEVEYVCELCKGAAPPDSPVVYSDRAGYNKQWHPTCFVCAKCSEPLVDLIYFWKDGAPWCGRHYCESLRPRCSGCDEIIFAEDYQRVEDLAWHRKHFVCEGCEQLLSGRAYIVTKGQLLCPTCSKSKRS

SEQ ID NO: 51690 - protein, 292 aa, Homo sapiens
MDSKYSTLTARVKGGDGIRIYKRNRMIMTNPIATGKDPTFDTITYEWAPPGVTQKLGLQYMELIPKEKQPVTGTEGAFYRRRQLMHQLPIYDQDPSRCRGLLENELKLMEEFVKQYKSEALGVGEVALPGQGGLPKEEGKQQEKPEGAETTAATTNGSLSDPSKEVEYVCELCKGAAPPDSPVVYSDRAGYNKQWHPTCFVCAKCSEPLVDLIYFWKDGAPWCGRHYCESLRPRCSGCDEIIFAEDYQRVEDLAWHRKHFVCEGCEQLLSGRAYIVTKGQLLCPTCSKSKRS

SEQ ID NO: 51691 - protein, 247 aa, Homo sapiens
MAKVAKDLNPGVKKMSLGQLQSARGVACLGCKGTCSGFEPHSWRKICKSCKCSQEDHCLTSDLEDDRKIGRLLMDSKYSTLTARVKGGDGIRIYKRNRMIMTNPIATGKDPTFDTITYEWAPPGVTQKLGLQYMELIPKEKQPVTGTEGAFYRRRQLMHQLPIYDQDPSRCRGLLENELKLMEEFVKQYKSEALGVGEVALPGQGGLPKEEGKQQEKPEGAETTAATTNGSLSDPSKEVEYKPVPLV

SEQ ID NO: 51692 - protein, 261 aa, Homo sapiens
MNPNCARCGKIVYPTEKVNCLDKFWHKACFHCETCKMTLNMKNYKGYEKKPYCNAHYPKQSFTMVADTPENLRLKQQSELQSQVRYKEEFEKNKGKGFSVVADTPELQRIKKTQDQISNIKYHEEFEKSRMGPSGGEGMEPERRDSQDGSSYRRPLEQQQPHHIPTSAPVYQQPQQQPVAQSYGGYKEPAAPVSIQRSAPGGGGKRYRAVYDYSAADEDEVSFQDGDTIVNVQQIDDGWMYGTVERTGDTGMLPANYVEAI

SEQ ID NO: 51693 - protein, 166 aa, Homo sapiens
MTLNMKNYKGYEKKPYCNAHYPKQSFTMVADTPENLRLKQQSELQSQVRYKEEFEKNKGKGFSVVADTPELQRIKKTQDQISNIKYHEEFEKSRMGPSGGEGMEPERRDSQDGSSYRRPLEQQQPHHIPTSAPVYQQPQQQPVAQSYGGYKEPAAPVSIQRSAPGG

SEQ ID NO: 51694 - protein, 205 aa, Homo sapiens
MLPLRDLQDDTEHEELQGLREEALLQRVRYKEEFEKNKGKGFSVVADTPELQRIKKTQDQISNIKYHEEFEKSRMGPSGGEGMEPERRDSQDGSSYRRPLEQQQPHHIPTSAPVYQQPQQQPVAQSYGGYKEPAAPVSIQRSAPGGGGKRYRAVYDYSAADEDEVSFQDGDTIVNVQQIDDGWMYGTVERTGDTGMLPANYVEAI

SEQ ID NO: 51695 - protein, 261 aa, Homo sapiens; identical to SEQ ID NO: 51692

SEQ ID NO: 51696 - protein, 125 aa, Homo sapiens
MNPNCARCGKIVYPTEKVNCLDKFWHKACFHCETCKMTLNMKNYKGYEKKPYCNAHYPKQSFTMVADTPENLRLKQQSELQSQVRYKEEFEKNKGKGFSVVADTPELQRSSLGFLWNEIPPSPHL

SEQ ID NO: 51697 - protein, 1349 aa, Homo sapiens
MKKIRICHIFTFYSWMSYDVLFQRTELGALEIWRQLICAHVCICVGWLYLRDRVCSKKDIILRTEQNSGRTILIKAVTEKNFETKDFRASLENGVLLCDLINKLKPGVIKKINRLSTPIAGLDNINVFLKACEQIGLKEAQLFHPGDLQDLSNRVTVKQEETDRRVKNVLITLYWLGRKAQSNPYYNGPHLNLKAFENLLGQALTKALEDSSFLKRSGRDSGYGDIWCPERGEFLAPPRHHKREDSFESLDSLGSRSLTSCSSDITLRGGREGFESDTDSEFTFKMQDYNKDDMSYRRISAVEPKTALPFNRFLPNKSRQPSYVPAPLRKKKPDKHEDNRRSWASPVYTEADGTFSRLFQKIYGENGSKSMSDVSAEDVQNLRQLRYEEMQKIKSQLKEQDQKWQDDLAKWKDRRKSYTSDLQKKKEEREEIEKQALEKSKRSSKTFKEMLQDRESQNQKSTVPSRRRMYSFDDVLEEGKRPPTMTVSEASYQSERVEEKGATYPSEIPKEDSTTFAKREDRVTTEIQLPSQSPVEEQSPASLSSLRSRSTQMESTRVSASLPRSYRKTDTVRLTSVVTPRPFGSQTRGISSLPRSYTMDDAWKYNGDVEDIKRTPNNVVSTPAPSPDASQLASSLSSQKEVAATEEDVTRLPSPTSPFSSLSQDQAATSKATLSSTSGLDLMSESGEGEISPQREVSRSQDQFSDMRISINQTPGKSLDFGFTIKWDIPGIFVASVEAGSPAEFSQLQVDDEIIAINNTKFSYNDSKEWEEAMAKAQETGHLVMDVRRYGKAGSPETKWIDATSGIYNSEKSSNLSVTTDFSESLQSSNIESKEINGIHDESNAFESKASESISLKNLKRRSQFFEQGSSDSVVPDLPVPTISAPSRWVWDQEEERKRQERWQKEQDRLLQEKYQREQEKLREEWQRAKQEAERENSKYLDEELMVLSSNSMSLTTREPSLATWEATWSEGSKSSDREGTRAGEEERRQPQEEVVHEDQGKKPQDQLVIERERKWEQQLQEEQEQKRLQAEAEEQKRPAEEQKRQAEIERETSVRIYQYRRPVDSYDIPKTEEASSGFLPGDRNKSRSTTELDDYSTNKNGNNKYLDQIGNMTSSQRRSKKEQVPSGAELERQQILQEMRKRTPLHNDNSWIRQRSASVNKEPVSLPGIMRRGESLDNLDSPRSNSWRQPPWLNQPTGFYASSSVQDFSRPPPQLVSTSNRAYMRNPSSSVPPPSAGSVKTSTTGVATTQSPTPRSHSPSASQSGSQLRNRSVSGKRICSYCNNILGKGAAMIIESLGLCYHLHCFKCVACECDLGGSSSGAEVRIRNHQLYCNDCYLRFKSGRPTAM

SEQ ID NO: 51698 - protein, 1670 aa, Homo sapiens
MKKIRICHIFTFYSWMSYDVLFQRTELGALEIWRQLICAHVCICVGWLYLRDRVCSKKDIILRTEQNSGRTILIKAVTEKNFETKDFRASLENGVLLCDLINKLKPGVIKKINRLSTPIAGLDNINVFLKACEQIGLKEAQLFHPGDLQDLSNRVTVKQEETDRRVKNVLITLYWLGRKAQSNPYYNGPHLNLKAFENLLGQALTKALEDSSFLKRSGRDSGYGDIWCPERGEFLAPPRHHKREDSFESLDSLGSRSLTSCSSDITLRGGREGFESDTDSEFTFKMQDYNKDDMSYRRISAVEPKTALPFNRFLPNKSRQPSYVPAPLRKKKPDKHEDNRRSWASPVYTEADGTFSSNQRRIWGTNVENWPTVQGTSKSSCYLEEEKAKTRSIPNIVKDDLYVRKLSPVMPNPGNAFDQFLPKCWTPEDVNWKRIKRETYKPWYKEFQGFSQFLLLQALQTYSDDILSSETHTKIDPTSGPRLITRRKNLSYAPGYRRDDLEMAALDPDLENDDFFVRKTGAFHANPYVLRAFEDFRKFSEQDDSVERDIILQCREGELVLPDLEKDDMIVRRIPAQKKEVPLSGAPDRYHPVPFPEPWTLPPEIQAKFLCVLERTCPSKEKSNSCRILVPSYRQKKDDMLTRKIQSWKLGTTVPPISFTPGPCSEADLKRWEAIREASRLRHKKRLMVERLFQKIYGENGSKSMSDVSAEDVQNLRQLRYEEMQKIKSQLKEQDQKWQDDLAKWKDRRKSYTSDLQKKKEEREEIEKQALEKSKRSSKTFKEMLQDRESQNQKSTVPSRRRMYSFDDVLEEGKRPPTMTVSEASYQSERVEEKGATYPSEIPKEDSTTFAKREDRVTTEIQLPSQSPVEEQSPASLSSLRSRSTQMESTRVSASLPRSYRKTDTVRLTSVVTPRPFGSQTRGISSLPRSYTMDDAWKYNGDVEDIKRTPNNVVSTPAPSPDASQLASSLSSQKEVAATEEDVTRLPSPTSPFSSLSQDQAATSKATLSSTSGLDLMSESGEGEISPQREVSRSQDQFSDMRISINQTPGKSLDFGFTIKWDIPGIFVASVEAGSPAEFSQLQVDDEIIAINNTKFSYNDSKEWEEAMAKAQETGHLVMDVRRYGKAGSPETKWIDATSGIYNSEKSSNLSVTTDFSESLQSSNIESKEINGIHDESNAFESKASESISLKNLKRRSQFFEQGSSDSVVPDLPVPTISAPSRWVWDQEEERKRQERWQKEQDRLLQEKYQREQEKLREEWQRAKQEAERENSKYLDEELMVLSSNSMSLTTREPSLATWEATWSEGSKSSDREGTRAGEEERRQPQEEVVHEDQGKKPQDQLVIERERKWEQQLQEEQEQKRLQAEAEEQKRPAEEQKRQAEIERETSVRIYQYRRPVDSYDIPKTEEASSGFLPGDRNKSRSTTELDDYSTNKNGNNKYLDQIGNMTSSQRRSKKEQVPSGAELERQQILQEMRKRTPLHNDNSWIRQRSASVNKEPVSLPGIMRRGESLDNLDSPRSNSWRQPPWLNQPTGFYASSSVQDFSRPPPQLVSTSNRAYMRNPSSSVPPPSAGSVKTSTTGVATTQSPTPRSHSPSASQSGSQLRNSVLPVSVTSEALPQELKSGSETTNCTATTAISDSNLDGQPPCDVSLHTKALLQIEEEVVAAHVDL

SEQ ID NO: 51699 - protein, 1614 aa, Homo sapiens
MKKIRICHIFTFYSWMSYDVLFQRTELGALEIWRQLICAHVCICVGWLYLRDRVCSKKDIILRTEQNSGRTILIKAVTEKNFETKDFRASLENGVLLCDLINKLKPGVIKKINRLSTPIAGLDNINVFLKACEQIGLKEAQLFHPGDLQDLSNRVTVKQEETDRRVKNVLITLYWLGRKAQSNPYYNGPHLNLKAFENLLGQALTKALEDSSFLKRSGRDSGYGDIWCPERGEFLAPPRHHKREDSFESLDSLGSRSLTSCSSDITLRGGREGFESDTDSEFTFKMQDYNKDDMSYRRISAVEPKTALPFNRFLPNKSRQPSYVPAPLRKKKPDKHEDNRRSWASPVYTEADGTFSSNQRRIWGTNVENWPTVQGTSKSSCYLEEEKAKTRSIPNIVKDDLYVRKLSPVMPNPGNAFDQFLPKCWTPEDVNWKRIKRETYKPWYKEFQGFSQFLLLQALQTYSDDILSSETHTKIDPTSGPRLITRRKNLSYAPGYRRDDLEMAALDPDLENDDFFVRKTGAFHANPYVLRAFEDFRKFSEQDDSVERDIILQCREGELVLPDLEKDDMIVRRIPAQKKEVPLSGAPDRYHPVPFPEPWTLPPEIQAKFLCVLERTCPSKEKSNSCRILVPSYRQKKDDMLTRKIQSWKLGTTVPPISFTPGPCSEADLKRWEAIREASRLRHKKRLMVERLFQKIYGENGSKSMSDVSAEDVQNLRQLRYEEMQKIKSQLKEQDQKWQDDLAKWKDRRKSYTSDLQKKKEEREEIEKQALEKSKRSSKTFKEMLQDRESQNQKSTVPSRRRMYSFDDVLEEGKRPPTMTVSEASYQSERVEEKGATYPSEIPKEDSTTFAKREDRVTTEIQLPSQSPVEEQSPASLSSLRSRSTQMESTRVSASLPRSYRKTDTVRLTSVVTPRPFGSQTRGISSLPRSYTMDDAWKYNGDVEDIKRTPNNVVSTPAPSPDASQLASSLSSQKEVAATEEDVTRLPSPTSPFSSLSQDQAATSKATLSSTSGLDLMSESGEGEISPQREVSRSQDQFSDMRISINQTPGKSLDFGFTIKWDIPGIFVASVEAGSPAEFSQLQVDDEIIAINNTKFSYNDSKEWEEAMAKAQETGHLVMDVRRYGKAGSPETKWIDATSGIYNSEKSSNLSVTTDFSESLQSSNIESKEINGIHDESNAFESKASESISLKNLKRRSQFFEQGSSDSVVPDLPVPTISAPSRWVWDQEEERKRQERWQKEQDRLLQEKYQREQEKLREEWQRAKQEAERENSKYLDEELMVLSSNSMSLTTREPSLATWEATWSEGSKSSDREGTRAGEEERRQPQEEVVHEDQGKKPQDQLVIERERKWEQQLQEEQEQKRLQAEAEEQKRPAEEQKRQAEIERETSVRIYQYRRPVDSYDIPKTEEASSGFLPGDRNKSRSTTELDDYSTNKNGNNKYLDQIGNMTSSQRRSKKEQVPSGAELERQQILQEMRKRTPLHNDNSWIRQRSASVNKEPVSLPGIMRRGESLDNLDSPRSNSWRQPPWLNQPTGFYASSSVQDFSRPPPQLVSTSNRAYMRNPSSSVPPPSAGSVKTSTTGVATTQSPTPRSHSPSASQSGSQLRNSWTANRHVM

SEQ ID NO: 51700 - protein, 1385 aa, Homo sapiens
MQDYNKDDMSYRRISAVEPKTALPFNRFLPNKSRQPSYVPAPLRKKKPDKHEDNRRSWASPVYTEADGTFSSNQRRIWGTNVENWPTVQGTSKSSCYLEEEKAKTRSIPNIVKDDLYVRKLSPVMPNPGNAFDQFLPKCWTPEDVNWKRIKRETYKPWYKEFQGFSQFLLLQALQTYSDDILSSETHTKIDPTSGPRLITRRKNLSYAPGYRRDDLEMAALDPDLENDDFFVRKTGAFHANPYVLRAFEDFRKFSEQDDSVERDIILQCREGELVLPDLEKDDMIVRRIPAQKKEVPLSGAPDRYHPVPFPEPWTLPPEIQAKFLCVLERTCPSKEKSNSCRILVPSYRQKKDDMLTRKIQSWKLGTTVPPISFTPGPCSEADLKRWEAIREASRLRHKKRLMVERLFQKIYGENGSKSMSDVSAEDVQNLRQLRYEEMQKIKSQLKEQDQKWQDDLAKWKDRRKSYTSDLQKKKEEREEIEKQALEKSKRSSKTFKEMLQDRESQNQKSTVPSRRRMYSFDDVLEEGKRPPTMTVSEASYQSERVEEKGATYPSEIPKEDSTTFAKREDRVTTEIQLPSQSPVEEQSPASLSSLRSRSTQMESTRVSASLPRSYRKTDTVRLTSVVTPRPFGSQTRGISSLPRSYTMDDAWKYNGDVEDIKRTPNNVVSTPAPSPDASQLASSLSSQKEVAATEEDVTRLPSPTSPFSSLSQDQAATSKATLSSTSGLDLMSESGEGEISPQREVSRSQDQFSDMRISINQTPGKSLDFGFTIKWDIPGIFVASVEAGSPAEFSQLQVDDEIIAINNTKFSYNDSKEWEEAMAKAQETGHLVMDVRRYGKAGSPETKWIDATSGIYNSEKSSNLSVTTDFSESLQSSNIESKEINGIHDESNAFESKASESISLKNLKRRSQFFEQGSSDSVVPDLPVPTISAPSRWVWDQEEERKRQERWQKEQDRLLQEKYQREQEKLREEWQRAKQEAERENSKYLDEELMVLSSNSMSLTTREPSLATWEATWSEGSKSSDREGTRAGEEERRQPQEEVVHEDQGKKPQDQLVIERERKWEQQLQEEQEQKRLQAEAEEQKRPAEEQKRQAEIERETSVRIYQYRRPVDSYDIPKTEEASSGFLPGDRNKSRSTTELDDYSTNKNGNNKYLDQIGNMTSSQRRSKKEQVPSGAELERQQILQEMRKRTPLHNDNSWIRQRSASVNKEPVSLPGIMRRGESLDNLDSPRSNSWRQPPWLNQPTGFYASSSVQDFSRPPPQLVSTSNRAYMRNPSSSVPPPSAGSVKTSTTGVATTQSPTPRSHSPSASQSGSQLRNSVLPVSVTSEALPQELKSGSETTNCTATTAISDSNLDGQPPCDVSLHTKALLQIEEEVVAAHVDL

SEQ ID NO: 51701 - protein, 759 aa, Homo sapiens
MESSPFNRRQWTSLSLRVTAKELSLVNKNKSSAIVEIFSKYQKAAEETNMEKKRSNTENLSQHFRKGTLTVLKKKWENPGLGAESHTDSLRNSSTEIRHRADHPPAEVTSHAASGAKADQEEQIHPRSRLRSPPEALVQGRYPHIKDGEDLKDHSTESKKMENCLGESRHEVEKSEISENTDASGKIEKYNVPLNRLKMMFEKGEPTQTKILRAQSRSASGRKISENSYSLDDLEIGPGQLSSSTFDSEKNESRRNLELPRLSETSIKDRMAKYQAAVSKQSSSTNYTNELKASGGEIKIHKMEQKENVPPGPEVCITHQEGEKISANENSLAVRSTPAEDDSRDSQVKSEVQQPVHPKPLSPDSRASSLSESSPPKAMKKFQAPARETCVECQKTVYPMERLLANQQVFHISCFRCSYCNNKLSLGTYASLHGRIYCKPHFNQLFKSKGNYDEGFGHRPHKDLWASKNENEEILERPAQLANARETPHSPGVEDAPIAKVGVLAASMEAKASSQQEKEDKPAETKKLRIAWPPPTELGSSGSALEEGIKMSKPKWPPEDEISKPEVPEDVDLDLKKLRRSSSLKERSRPFTVAASFQSTSVKSPKTVSPPIRKGWSMSEQSEESVGGRVAERKQVENAKASKKNGNVGKTTWQNKESKGETGKRSKEGHSLEMENENLVENGADSDEDDNSFLKQQSPQEPKSLNWSSFVDNTFAEEFTTQNQKSQDVELWEGEVVKELSVEEQIKRNRYYDEDEDEE

SEQ ID NO: 51702 - protein, 760 aa, Homo sapiens
MESSPFNRRQWTSLSLRVTAKELSLVNKNKSSAIVEIFSKYQKAAEETNMEKKRSNTENLSQHFRKGTLTVLKKKWENPGLGAESHTDSLRNSSTEIRHRADHPPAEVTSHAASGAKADQEEQIHPRSRLRSPPEALVQGRYPHIKDGEDLKDHSTESKKMENCLGESRHEVEKSEISENTDASGKIEKYNVPLNRLKMMFEKGEPTQTKILRAQSRSASGRKISENSYSLDDLEIGPGQLSSSTFDSEKNESRRNLELPRLSETSIKDRMAKYQAAVSKQSSSTNYTNELKASGGEIKIHKMEQKENVPPGPEVCITHQEGEKISANENSLAVRSTPAEDDSPGDSQVKSEVQQPVHPKPLSPDSRASSLSESSPPKAMKKFQAPARETCVECQKTVYPMERLLANQQVFHISCFRCSYCNNKLSLGTYASLHGRIYCKPHFNQLFKSKGNYDEGFGHRPHKDLWASKNENEEILERPAQLANARETPHSPGVEDAPIAKVGVLAASMEAKASSQQEKEDKPAETKKLRIAWPPPTELGSSGSALEEGIKMSKPKWPPEDEISKPEVPEDVDLDLKKLRRSSSLKERSRPFTVAASFQSTSVKSPKTVSPPIRKGWSMSEQSEESVGGRVAERKQVENAKASKKNGNVGKTTWQNKESKGETGKRSKEGHSLEMENENLVENGADSDEDDNSFLKQQSPQEPKSLNWSSFVDNTFAEEFTTQNQKSQDVELWEGEVVKELSVEEQIKRNRYYDEDEDEE

SEQ ID NO: 51703 - protein, 678 aa, Homo sapiens
MWQGCNCSQLSETAVDQEQLGVLTFILQRTTCLNVSADQEEQIHPRSRLRSPPEALVQGRYPHIKDGEDLKDHSTESKKMENCLGESRHEVEKSEISENTDASGKIEKYNVPLNRLKMMFEKGEPTQTKILRAQSRSASGRKISENSYSLDDLEIGPGQLSSSTFDSEKNESRRNLELPRLSETSIKDRMAKYQAAVSKQSSSTNYTNELKASGGEIKIHKMEQKENVPPGPEVCITHQEGEKISANENSLAVRSTPAEDDSRDSQVKSEVQQPVHPKPLSPDSRASSLSESSPPKAMKKFQAPARETCVECQKTVYPMERLLANQQVFHISCFRCSYCNNKLSLGTYASLHGRIYCKPHFNQLFKSKGNYDEGFGHRPHKDLWASKNENEEILERPAQLANARETPHSPGVEDAPIAKVGVLAASMEAKASSQQEKEDKPAETKKLRIAWPPPTELGSSGSALEEGIKMSKPKWPPEDEISKPEVPEDVDLDLKKLRRSSSLKERSRPFTVAASFQSTSVKSPKTVSPPIRKGWSMSEQSEESVGGRVAERKQVENAKASKKNGNVGKTTWQNKESKGETGKRSKEGHSLEMENENLVENGADSDEDDNSFLKQQSPQEPKSLNWSSFVDNTFAEEFTTQNQKSQDVELWEGEVVKELSVEEQIKRNRYYDEDEDEE

SEQ ID NO: 51704 - protein, 457 aa, Homo sapiens
MEQKENVPPGPEVCITHQEGEKISANENSLAVRSTPAEDDSRDSQVKSEVQQPVHPKPLSPDSRASSLSESSPPKAMKKFQAPARETCVECQKTVYPMERLLANQQVFHISCFRCSYCNNKLSLGTYASLHGRIYCKPHFNQLFKSKGNYDEGFGHRPHKDLWASKNENEEILERPAQLANARETPHSPGVEDAPIAKVGVLAASMEAKASSQQEKEDKPAETKKLRIAWPPPTELGSSGSALEEGIKMSKPKWPPEDEISKPEVPEDVDLDLKKLRRSSSLKERSRPFTVAASFQSTSVKSPKTVSPPIRKGWSMSEQSEESVGGRVAERKQVENAKASKKNGNVGKTTWQNKESKGETGKRSKEGHSLEMENENLVENGADSDEDDNSFLKQQSPQEPKSLNWSSFVDNTFAEEFTTQNQKSQDVELWEGEVVKELSVEEQIKRNRYYDEDEDEE

SEQ ID NO: 51705 - protein, 111 aa, Homo sapiens
MESSPFNRRQWTSLSLRVTAKELSLVNKNKSSAIVEIFSKYQKAAEETNMEKKRSNTENLSQHFRKGTLTVLKKKWENPGLGAESHTDSLRNSSTEIRHRADHPPAEVTSH

SEQ ID NO: 51706 - protein, 130 aa, Homo sapiens
MESSPFNRRQWTSLSLRVTAKELSLVNKNKSSAIVEIFSKYQKAAEETNMEKKRSNTENLSQHFRKGTLTVLKKKWENPGLGAESHTDSLRNSSTEIRHRADHPPAEVTSHAASGAKADQEEQIHPRSRL

SEQ ID NO: 51707 - protein, 456 aa, Homo sapiens
MEQKENVPPGPEVCITHQEGEKISANENSLAVRSTPAEDDSRDSQVKSEVQQPVHPKPLSPDSRASSLSESSPPKAMKFQAPARETCVECQKTVYPMERLLANQQVFHISCFRCSYCNNKLSLGTYASLHGRIYCKPHFNQLFKSKGNYDEGFGHRPHKDLWASKNENEEILERPAQLANARETPHSPGVEDAPIAKVGVLAASMEAKASSQQEKEDKPAETKKLRIAWPPPTELGSSGSALEEGIKMSKPKWPPEDEISKPEVPEDVDLDLKKLRRSSSLKERSRPFTVAASFQSTSVKSPKTVSPPIRKGWSMSEQSEESVGGRVAERKQVENAKASKKNGNVGKTTWQNKESKGETGKRSKEGHSLEMENENLVENGADSDEDDNSFLKQQSPQEPKSLNWSSFVDNTFAEEFTTQNQKSQDVELWEGEVVKELSVEEQIKRNRYYDEDEDEE

SEQ ID NO: 51708 - protein, 600 aa, Homo sapiens
MENCLGESRHEVEKSEISENTDASGKIEKYNVPLNRLKMMFEKGEPTQTKILRAQSRSASGRKISENSYSLDDLEIGPGQLSSSTFDSEKNESRRNLELPRLSETSIKDRMAKYQAAVSKQSSSTNYTNELKASGGEIKIHKMEQKENVPPGPEVCITHQEGEKISANENSLAVRSTPAEDDSPGDSQVKSEVQQPVHPKPLSPDSRASSLSESSPPKAMKKFQAPARETCVECQKTVYPMERLLANQQVFHISCFRCSYCNNKLSLGTYASLHGRIYCKPHFNQLFKSKGNYDEGFGHRPHKDLWASKNENEEILERPAQLANARETPHSPGVEDAPIAKVGVLAASMEAKASSQQEKEDKPAETKKLRIAWPPPTELGSSGSALEEGIKMSKPKWPPEDEISKPEVPEDVDLDLKKLRRSSSLKERSRPFTVAASFQSTSVKSPKTVSPPIRKGWSMSEQSEESVGGRVAERKQVENAKASKKNGNVGKTTWQNKESKGETGKRSKEGHSLEMENENLVENGADSDEDDNSFLKQQSPQEPKSLNWSSFVDNTFAEEFTTQNQKSQDVELWEGEVVKELSVEEQIKRNRYYDEDEDEE

SEQ ID NO: 51709 - protein, 599 aa, Homo sapiens
MENCLGESRHEVEKSEISENTDASGKIEKYNVPLNRLKMMFEKGEPTQTKILRAQSRSASGRKISENSYSLDDLEIGPGQLSSSTFDSEKNESRRNLELPRLSETSIKDRMAKYQAAVSKQSSSTNYTNELKASGGEIKIHKMEQKENVPPGPEVCITHQEGEKISANENSLAVRSTPAEDDSRDSQVKSEVQQPVHPKPLSPDSRASSLSESSPPKAMKKFQAPARETCVECQKTVYPMERLLANQQVFHISCFRCSYCNNKLSLGTYASLHGRIYCKPHFNQLFKSKGNYDEGFGHRPHKDLWASKNENEEILERPAQLANARETPHSPGVEDAPIAKVGVLAASMEAKASSQQEKEDKPAETKKLRIAWPPPTELGSSGSALEEGIKMSKPKWPPEDEISKPEVPEDVDLDLKKLRRSSSLKERSRPFTVAASFQSTSVKSPKTVSPPIRKGWSMSEQSEESVGGRVAERKQVENAKASKKNGNVGKTTWQNKESKGETGKRSKEGHSLEMENENLVENGADSDEDDNSFLKQQSPQEPKSLNWSSFVDNTFAEEFTTQNQKSQDVELWEGEVVKELSVEEQIKRNRYYDEDEDEE

SEQ ID NO: 51710 - protein, 375 aa, Homo sapiens
MLDRDVGPTPMYPPTYLEPGIGRHTPYGNQTDYRIFELNKRLQNWTEECDNLWWDAFTTEFFEDDAMLTITFCLEDGPKRYTIGRTLIPRYFRSIFEGGATELYYVLKHPKEAFHSNFVSLDCDQGSMVTQHGKPMFTQVCVEGRLYLEFMFDDMMRIKTWHFSIRQHRELIPRSILAMHAQDPQMLDQLSKNITRCGLSNSTLNYLRLCVILEPMQELMSRHKTYSLSPRDCLKTCLFQKWQRMVAPPAEPTRQQPSKRRKRKMSGGSTMSSGGGNTNNSNSKKKSPASTFALSSQVPDVMVVGEPTLMGGEFGDEDERLITRLENTQFDAANGIDDEDSFNNSPALGANSPWNSKPPSSQESKSENPTSQASQ

SEQ ID NO: 51711 - protein, 411 aa, Homo sapiens
MSVGCACPGCSSKSFKLYSPKEPPNGNAFPPFHPGTMLDRDVGPTPMYPPTYLEPGIGRHTPYGNQTDYRIFELNKRLQNWTEECDNLWWDAFTTEFFEDDAMLTITFCLEDGPKRYTIGRTLIPRYFRSIFEGGATELYYVLKHPKEAFHSNFVSLDCDQGSMVTQHGKPMFTQVCVEGRLYLEFMFDDMMRIKTWHFSIRQHRELIPRSILAMHAQDPQMLDQLSKNITRCGLSNSTLNYLRLCVILEPMQELMSRHKTYSLSPRDCLKTCLFQKWQRMVAPPAEPTRQQPSKRRKRKMSGGSTMSSGGGNTNNSNSKKKSPASTFALSSQVPDVMVVGEPTLMGGEFGDEDERLITRLENTQFDAANGIDDEDSFNNSPALGANSPWNSKPPSSQESKSENPTSQASQ

SEQ ID NO: 51712 - protein, 373 aa, Homo sapiens
MSSTPHDPFYSSPFGPFYRRHTPYMVQPEYRIYEMNKRLQSRTEDSDNLWWDAFATEFFEDDATLTLSFCLEDGPKRYTIGRTLIPRYFSTVFEGGVTDLYYILKHSKESYHNSSITVDCDQCTMVTQHGKPMFTKVCTEGRLILEFTFDDLMRIKTWHFTIRQYRELVPRSILAMHAQDPQVLDQLSKNITRMGLTNFTLNYLRLCVILEPMQELMSRHKTYNLSPRDCLKTCLFQKWQRMVAPPAEPTRQPTTKRRKRKNSTSSTSNSSAGNNANSTGSKKKTTAANLSLSSQVPDVMVVGEPTLMGGEFGDEDERLITRLENTQYDAANGMDDEEDFNNSPALGNNSPWNSKPPATQETKSENPPPQASQ

SEQ ID NO: 51713 - protein, 331 aa, Homo sapiens
MSSTPHDPFYSSPFGPFYRRHTPYMVQPEYRIYEMNKRLQSRTEDSDNLWWDAFATEFFEDDATLTLSFCLEDGPKRYTIGRTLIPRYFSTVFEGGVTDLYYILKHSKESYHNSSITVDCDQCTMVTQHGKPMFTKVCTEGRLILEFTFDDLMRIKTWHFTIRQYRELVPRSILAMHAQDPQVLDQLSKNITRMGLTNFTLNYLRLCVILEPMQELMSRHKTYNLSPRDCLKTCLFQKWQRMVAPPAEPTRQPTTKRRKRKNSTSSTSNSSAGNNANSTGSKKKTTAANLSLSSQVPGLGAIPNCSLNPGRDGDLCHSTAVTPSGQFKEKH

SEQ ID NO: 51714 - protein, 313 aa, Homo sapiens
MSSTPHDPFYSSPFGPFYRRHTPYMVQPEYRIYEMNKRLQSRTEDSDNLWWDAFATEFFEDDATLTLSFCLEDGPKRYTIGRTLIPRYFSTVFEGGVTDLYYILKHSKESYHNSSITVDCDQCTMVTQHGKPMFTKVCTEGRLILEFTFDDLMRIKTWHFTIRQYRELVPRSILAMHAQDPQVLDQLSKNITRMGLTNFTLNYLRLCVILEPMQELMSRHKTYNLSPRDCLKTCLFQKWQRMVAPPAEPTRQPTTKRRKRKNSTSSTSNSSAGNNANSTGSKKKTTAANLSLSSQVPIASIARSPVSGCALRT

SEQ ID NO: 51715 - protein, 189 aa, Homo sapiens
MVTQHGKPMFTKVCTEGRLILEFTFDDLMRIKTWHFTIRQYRELVPRSILAMHAQDPQVLDQLSKNITRMGLTNFTLNYLRLCVILEPMQELMSRHKTYNLSPRDCLKTCLFQKWQRMVAPPAEPTRQPTTKRRKRKNSTSSTSNSSAGNNANSTGSKKKTTAANLSLSSQVPIASIARSPVSGCALRT

SEQ ID NO: 51716 - protein, 164 aa, Homo sapiens
MVQPEYRIYEMNKRLQSRTEDSDNLWWDAFATEFFEDDATLTLSFCLEDGPKRYTIGRTLIPRYFSTVFEGGVTDLYYILKHSKESYHNSSITVDCDQCTMVTQHGKPMFTKVCTEGRLILEFTFDDLMRIKTWHFTIRQYRELVPRSILAMHAQDPQVLDQLS

SEQ ID NO: 51717 - protein, 110 aa, Homo sapiens
MSSTPHDPFYSSPFGPFYRRHTPYMVQPEYRIYEMNKRLQSRTEDSDNLWWDAFATEFFEDDATLTLSFCLEDGPKRYIVHSAADARGNCNQLGDSEPDACDGLLQFPIM

SEQ ID NO: 51718 - protein, 106 aa, Homo sapiens
MSSTPHDPFYSSPFGPFYRRHTPYMVQPEYRIYEMNKRLQSRTEDSDNLWWDAFATEFFEDDATLTLSFCLEDGPKRYRTKNLRPIGEKMNINGKCYRQDPHPPLL

SEQ ID NO: 51719 - protein, 371 aa, Homo sapiens
MSSTPHDPFYSSPFGPFYRRHTPYMVQPEYRIYEMNKRLQSRTEDSDNLWWDAFATEFFEDDATLTLSFCLEDGPKRYTIGRTLIPRYFSTVFEGGVTDLYYILKHSKESYHNSSITVDCDQCTMVTQHGKPMFTKVCTEGRLILEFTFDDLMRIKTWHFTIRQYRELVPRSILAMHAQDPQVLDQLSKNITRMGLTNFTLNYLRLCVILEPMQELMSRHKTYNLSPRDCLKTCLFQKWQRMVAPPAEPTRQPTTKRRKRKNSTSSTSNSSAGNNANSTGSKKKTTAANLSLSSQDVMVVGEPTLMGGEFGDEDERLITRLENTQYDAANGMDDEEDFNNSPALGNNSPWNSKPPATQETKSENPPPQASQ

SEQ ID NO: 51720 - protein, 617 aa, Homo sapiens
MSYSVTLTGPGPWGFRLQGGKDFNMPLTISRITPGSKAAQSQLSQGDLVVAIDGVNTDTMTHLEAQNKIKSASYNLSLTLQKSKRPIPISTTAPPVQTPLPVIPHQKVVVNSPANADYQERFNPSALKDSALSTHKPIEVKGLGGKATIIHAQYNTPISMYSQDAIMDAIAGQAQAQGSDFSGSLPIKDLAVDSASPVYQAVIKSQNKPEDEADEWARRSSNLQSRSFRILAQMTGTEFMQDPDEEALRRSRPQASSYSPAVAASSAPATHTSYSEGPAAPAPKPRVVTTASIRPSVYQPVPASTYSPSPGANYSPTPYTPSPAPAYTPSPAPAYTPSPVPTYTPSPAPAYTPSPAPNYNPAPSVAYSGGPAEPASRPPWVTDDSFSQKFAPGKSTTSISKQTLPRGGPAYTPAGPQVPPLARGTVQRAERFPASSRTPLCGHCNNVIRGPFLVAMGRSWHPEEFTCAYCKTSLADVCFVEEQNNVYCERCYEQFFAPLCAKCNTKIMGEVMHALRQTWHTTCFVCAACKKPFGNSLFHMEDGEPYCEKDYINLFSTKCHGCDFPVEAGDKFIEALGHTWHDTCFICAVCHVNLEGQPFYSKKDRPLCKKHAHTINL

SEQ ID NO: 51721 - protein, 330 aa, Homo sapiens
MSYSVTLTGPGPWGFRLQGGKDFNMPLTISRITPGSKAAQSQLSQGDLVVAIDGVNTDTMTHLEAQNKIKSASYNLSLTLQKSKRPIPISTTAPPVQTPLPVIPHQKDPALDTNGSLVAPSPSPEARASPGTPGTPELRPTFSPAFSRPSAFSSLAEASDPGPPRASLRAKTSPEGARDLLGPKALPGSSQPRQYNNPIGLYSAETLREMAQMYQMSLRGKASGVGLPGGSLPIKDLAVDSASPVYQAVIKSQNKPEDEADEWARRSSNLQSRSFRILAQMTGTEFMQDPDEEALRRSRERFETERNSPRFAKLRNWHHGLSAQILNVKS

SEQ ID NO: 51722 - protein, 470 aa, Homo sapiens
MSYSVTLTGPGPWGFRLQGGKDFNMPLTISRITPGSKAAQSQLSQGDLVVAIDGVNTDTMTHLEAQNKIKSASYNLSLTLQKSKRPIPISTTAPPVQTPLPVIPHQKASSYSPAVAASSAPATHTSYSEGPAAPAPKPRVVTTASIRPSVYQPVPASTYSPSPGANYSPTPYTPSPAPAYTPSPAPAYTPSPVPTYTPSPAPAYTPSPAPNYNPAPSVAYSGGPAEPASRPPWVTDDSFSQKFAPGKSTTSISKQTLPRGGPAYTPAGPQVPPLARGTVQRAERFPASSRTPLCGHCNNVIRGPFLVAMGRSWHPEEFTCAYCKTSLADVCFVEEQNNVYCERCYEQFFAPLCAKCNTKIMGEVMHALRQTWHTTCFVCAACKKPFGNSLFHMEDGEPYCEKDYINLFSTKCHGCDFPVEAGDKFIEALGHTWHDTCFICAVCHVNLEGQPFYSKKDRPLCKKHAHTINL

SEQ ID NO: 51723 - protein, 727 aa, Homo sapiens
MSYSVTLTGPGPWGFRLQGGKDFNMPLTISRITPGSKAAQSQLSQGDLVVAIDGVNTDTMTHLEAQNKIKSASYNLSLTLQKSKRPIPISTTAPPVQTPLPVIPHQKDPALDTNGSLVAPSPSPEARASPGTPGTPELRPTFSPAFSRPSAFSSLAEASDPGPPRASLRAKTSPEGARDLLGPKALPGSSQPRQYNNPIGLYSAETLREMAQMYQMSLRGKASGVGLPGGSLPIKDLAVDSASPVYQAVIKSQNKPEDEADEWARRSSNLQSRSFRILAQMTGTEFMQDPDEEALRRSSTPIEHAPVCTSQATTPLLPASAQPPAAASPSAASPPLATAAAHTAIASASTTAPASSPADSPRPQASSYSPAVAASSAPATHTSYSEGPAAPAPKPRVVTTASIRPSVYQPVPASTYSPSPGANYSPTPYTPSPAPAYTPSPAPAYTPSPVPTYTPSPAPAYTPSPAPNYNPAPSVAYSGGPAEPASRPPWVTDDSFSQKFAPGKSTTSISKQTLPRGGPAYTPAGPQVPPLARGTVQRAERFPASSRTPLCGHCNNVIRGPFLVAMGRSWHPEEFTCAYCKTSLADVCFVEEQNNVYCERCYEQFFAPLCAKCNTKIMGEVMHALRQTWHTTCFVCAACKKPFGNSLFHMEDGEPYCEKDYINLFSTKCHGCDFPVEAGDKFIEALGHTWHDTCFICAVCHVNLEGQPFYSKKDRPLCKKHAHTINL

SEQ ID NO: 51724 - protein, 398 aa, Homo sapiens
MSYSVTLTGPGPWGFRLQGGKDFNMPLTISRITPGSKAAQSQLSQGDLVVAIDGVNTDTMTHLEAQNKIKSASYNLSLTLQKSKRPIPISTTAPPVQTPLPVIPHQKDPALDTNGSLVAPSPSPEARASPGTPGTPELRPTFSPAFSRPSAFSSLAEASDPGPPRASLRAKTSPEGARDLLGPKALPGSSQPRQYNNPIGLYSAETLREMAQMYQMSLRGKASGVGLPGGADYQERFNPSALKDSALSTHKPIEVKGLGGKATIIHAQYNTPISMYSQDAIMDAIAGQAQAQGSDFSGSLPIKDLAVDSASPVYQAVIKSQNKPEDEADEWARRSSNLQSRSFRILAQMTGTEFMQDPDEEALRRSRERFETERNSPRFAKLRNWHHGLSAQILNVKS

SEQ ID NO: 51725 - protein, 283 aa, Homo sapiens
MSYSVTLTGPGPWGFRLQGGKDFNMPLTISRITPGSKAAQSQLSQGDLVVAIDGVNTDTMTHLEAQNKIKSASYNLSLTLQKSKRPIPISTTAPPVQTPLPVIPHQKVVVNSPANADYQERFNPSALKDSALSTHKPIEVKGLGGKATIIHAQYNTPISMYSQDAIMDAIAGQAQAQGSDFSGSLPIKDLAVDSASPVYQAVIKSQNKPEDEADEWARRSSNLQSRSFRILAQMTGTEFMQDPDEEALRRSRERFETERNSPRFAKLRNWHHGLSAQILNVKS

SEQ ID NO: 51726 - protein, 732 aa, Homo sapiens
MSYSVTLTGPGPWGFRLQGGKDFNMPLTISRITPGSKAAQSQLSQGDLVVAIDGVNTDTMTHLEAQNKIKSASYNLSLTLQKSKRPIPISTTAPPVQTPLPVIPHQKDPALDTNGSLVAPSPSPEARASPGTPGTPELRPTFSPAFSRPSAFSSLAEASDPGPPRASLRAKTSPEGARDLLGPKALPGSSQPRQYNNPIGLYSAETLREMAQMYQMSLRGKASGVGLPGGADYQERFNPSALKDSALSTHKPIEVKGLGGKATIIHAQYNTPISMYSQDAIMDAIAGQAQAQGSDFSGSLPIKDLAVDSASPVYQAVIKSQNKPEDEADEWARRSSNLQSRSFRILAQMTGTEFMQDPDEEALRRSRPQASSYSPAVAASSAPATHTSYSEGPAAPAPKPRVVTTASIRPSVYQPVPASTYSPSPGANYSPTPYTPSPAPAYTPSPAPAYTPSPVPTYTPSPAPAYTPSPAPNYNPAPSVAYSGGPAEPASRPPWVTDDSFSQKFAPGKSTTSISKQTLPRGGPAYTPAGPQVPPLARGTVQRAERFPASSRTPLCGHCNNVIRGPFLVAMGRSWHPEEFTCAYCKTSLADVCFVEEQNNVYCERCYEQFFAPLCAKCNTKIMGEVMHALRQTWHTTCFVCAACKKPFGNSLFHMEDGEPYCEKDYINLFSTKCHGCDFPVEAGDKFIEALGHTWHDTCFICAVCHVNLEGQPFYSKKDRPLCKKHAHTINL

SEQ ID NO: 51727 - protein, 617 aa, Homo sapiens; identical to SEQ ID NO: 51720

SEQ ID NO: 51728 - protein, 648 aa, Homo sapiens
MSYSVTLTGPGPWGFRLQGGKDFNMPLTISRITPGSKAAQSQLSQGDLVVAIDGVNTDTMTHLEAQNKIKSASYNLSLTLQKSKRPIPISTTAPPVQTPLPVIPHQKDPALDTNGSLVAPSPSPEARASPGTPGTPELRPTFSPAFSRPSAFSSLAEASDPGPPRASLRAKTSPEGARDLLGPKALPGSSQPRQYNNPIGLYSAETLREMAQMYQMSLRGKASGVGLPGGSLPIKDLAVDSASPVYQAVIKSQNKPEDEADEWARRSSNLQSRSFRILAQMTGTEFMQDPDEEALRRSRPQASSYSPAVAASSAPATHTSYSEGPAAPAPKPRVVTTASIRPSVYQPVPASTYSPSPGANYSPTPYTPSPVPTYTPSPAPAYTPSPAPNYNPAPSVAYSGGPAEPASRPPWVTDDSFSQKFAPGKSTTSISKQTLPRGGPAYTPAGPQVPPLARGTVQRAERFPASSRTPLCGHCNNVIRGPFLVAMGRSWHPEEFTCAYCKTSLADVCFVEEQNNVYCERCYEQFFAPLCAKCNTKIMGEVMHALRQTWHTTCFVCAACKKPFGNSLFHMEDGEPYCEKDYINLFSTKCHGCDFPVEAGDKFIEALGHTWHDTCFICAVCHVNLEGQPFYSKKDRPLCKKHAHTINL

SEQ ID NO: 51729 - protein, 231 aa, Homo sapiens
MSYSVTLTGPGPWGFRLQGGKDFNMPLTISRITPGSKAAQSQLSQGDLVVAIDGVNTDTMTHLEAQNKIKSASYNLSLTLQKSKRPIPISTTAPPVQTPLPVIPHQKDPALDTNGSLVAPSPSPEARASPGTPGTPELRPTFSPAFSRPSAFSSLAEASDPGPPRASLRAKTSPEGARDLLGPKALPGSSQPRQYNNPIGLYSAETLREMAQMYQMSLRGKASGVGLPGGW

SEQ ID NO: 51730 - protein, 612 aa, Homo sapiens
MSHPSWLPPKSTGEPLGHVPARMETTHSFGNPSISVSTQQPPKKFAPVVAPKPKYNPYKQPGGEGDFLPPPPPPLDDSSALPSISGNFPPPPPLDEEAFKVQGNPGGKTLEERRSSLDAEIDSLTSILADLECSSPYKPRPPQSSTGSTASPPVSTPVTGHKRMVIPNQPPLTATKKSTLKPQPAPQAGPIPVAPIGTLKPQPQPVPASYTTASTSSRPTFNVQVKSAQPSPHYMAAPSSGQIYGSGPQGYNTQPVPVSGQCPPPSTRGGMDYAYIPPPGLQPEPGYGYAPNQGRYYEGYYAAGPGYGGRNDSDPTYGQQGHPNTWKREPGYTPPGAGNQNPPGMYPVTGPKKTYITDPVSAPCAPPLQPKGGHSGQLGPSSVAPSFRPEDELEHLTKKMLYDMENPPADEYFGRCARCGENVVGEGTGCTAMDQVFHVDCFTCIICNNKLRGQPFYAVEKKAYCEPCYINTLEQCNVCSKPIMERILRATGKAYHPHCFTCVMCHRSLDGIPFTVDAGGLIHCIEDFHKKFAPRCSVCKEPIMPAPGQEETVRIVALDRDFHVHCYRCEDCGGLLSEGDNQGCYPLDGHILCKTCNSARIRVLTAKASTDL

SEQ ID NO: 51731 - protein, 93 aa, Homo sapiens
MSHPSWLPPKSTGEPLGHVPARMETTHSFGNPSISVSTQQPPKKFAPVVAPKPKYNPYKQPGGEGDFLPPPPPPLDDSSALPSISGNFPPPPP

SEQ ID NO: 51732 - protein, 151 aa, Homo sapiens
MSHPSWLPPKSTGEPLGHVPARMETTHSFGNPSISVSTQQPPKKFAPVVAPKPKYNPYKQPGGEGDFLPPPPPPLDDSSALPSISGNFPPPPPLDEEAFKVQGNPGGKTLEERRSSLDAEIDSLTSILADLECSSPYKPRPPQSSTGSTAS

SEQ ID NO: 51733 - protein, 111 aa, Homo sapiens
MSHPSWLPPKSTGEPLGHVPARMETTHSFGNPSISVSTQQPPKKFAPVVAPKPKYNPYKQPGGEGDFLPPPPPPLDDSSALPSISGNFPPPPPLDEEAFKVQGNPGGKTLE

SEQ ID NO: 51734 - protein, 66 aa, Homo sapiens
MSHPSWLPPKSTGEPLGHVPARMETTHSFGNPSISVSTQQPPKKFAPVVAPKPKYNPYKQPGGEGD

SEQ ID NO: 51735 - protein, 53 aa, Homo sapiens
MSHPSWLPPKSTGEPLGHVPARMETTHSFGNPSISVSTQQPPKKFAPVVAPKP

SEQ ID NO: 51736 - protein, 47 aa, Homo sapiens
MSHPSWLPPKSTGEPLGHVPARMETTHSFGNPSISVSTQQPPKKFAP

SEQ ID NO: 51737 - protein, 428 aa, Homo sapiens
MSHPSWLPPKSTGEPLGHVPARMETTHSFGNPSISVSTQQPPKKFAPVVAPKPKYNPYKQPGGEGDFLPPPPPPLDDSSALPSISGNFPPPPPLDEEAFKVQGNPGGKTLEERRSSLDAEIDSLTSILADLECSSPYKPRPPQSSTGSTASPPVSTPVTGHKRMVIPNQPPLTATKKSTLKPQPAPQAGPIPVAPIGTLKPQPQPVPASYTTASTSSRPTFNVQVKSAQPSPHYMAAPSSGQIYGSGPQGYNTQPVPVSGQCPPPSTRGGMDYAYIPPPGLQPEPGYGYAPNQGRYYEGYYAAGPGYGGRNDSDPTYGQQGHPNTWKREPGYTPPGAGNQNPPGMYPVTGPKKTYITDPVSAPCAPPLQPKGGHSGQLGPSSVAPSFRPEDELEHLTKKMLYDMENPPADEYFGEWGLELTSEVTILL

SEQ ID NO: 51738 - protein, 65 aa, Homo sapiens
MSHPSWLPPKSTGEPLGHVPARMETTHSFGNPSISVSTQQPPKKFAPVVAPKPKYNPYKQPGGEG

SEQ ID NO: 51739 - protein, 57 aa, Homo sapiens
MSHPSWLPPKSTGEPLGHVPARMETTHSFGNPSISVSTQQPPKKFAPVVAPKPKYNP

SEQ ID NO: 51740 - protein, 612 aa, Homo sapiens; identical to SEQ ID NO: 51730

SEQ ID NO: 51741 - protein, 156 aa, Homo sapiens
MQKKEKSFGIQMLSVQPDTKPKGCAGCNRKIKDRYLLKALDKYWHEDCLKCACCDCRLGEVGSTLYTKANLILCRRDYLRLFGVTGNCAACSKLIPAFEMVMRAKDNVYHLDCFACQLCNQRFCVGDKFFLKNNMILCQTDYEEGLMKEGYAPQVR

SEQ ID NO: 51742 - protein, 145 aa, Homo sapiens
MLSVQPDTKPKGCAGCNRKIKDRYLLKALDKYWHEDCLKCACCDCRLGEVGSTLYTKANLILCRRDYLRLFGVTGNCAACSKLIPAFEMVMRAKDNVYHLDCFACQLCNQRFCVGDKFFLKNNMILCQTDYEEGLMKEGYAPQVR

SEQ ID NO: 51743 - protein, 145 aa, Homo sapiens; identical to SEQ ID NO: 51742

SEQ ID NO: 51744 - protein, 145 aa, Homo sapiens; identical to SEQ ID NO: 51742

SEQ ID NO: 51745 - protein, 145 aa, Homo sapiens; identical to SEQ ID NO: 51742

SEQ ID NO: 51746 - protein, 145 aa, Homo sapiens; identical to SEQ ID NO: 51742

SEQ ID NO: 51747 - protein, 145 aa, Homo sapiens; identical to SEQ ID NO: 51742

SEQ ID NO: 51748 - protein, 145 aa, Homo sapiens; identical to SEQ ID NO: 51742

SEQ ID NO: 51749 - protein, 118 aa, Homo sapiens
MLSVQPDTKPKGCAGCNRKIKDRYLLKALDKYWHEDCLKCACCDCRLGEVGSTLYTKANLILCRRDYLRLFGVTGNCAACSKLIPAFEMVMRAKDNVYHLDCFACQLCNQRFCVGDKF

SEQ ID NO: 51750 - protein, 58 aa, Homo sapiens
MLSVQPDTKPKGCAGCNRKIKDRYLLKALDKYWHEDCLKCACCDCRLGEVGSTLYTKA

SEQ ID NO: 51751 - protein, 97 aa, Homo sapiens
MLSVQPDTKPKGCAGCNRKIKDRYLLKALDKYWHEDCLKCACCDCRLGEVGSTLYTKANLILCRRDYLRLFGVTGNCAACSKLIPAFEMVMRAKDNV

SEQ ID NO: 51752 - protein, 118 aa, Homo sapiens; identical to SEQ ID NO: 51749

SEQ ID NO: 51753 - protein, 84 aa, Homo sapiens
MLSVQPDTKPKGCAGCNRKIKDRYLLKALDKYWHEDCLKCACCDCRLGEVGSTLYTKANLILCRRDYLRLFGVTGNCAACSKLI

SEQ ID NO: 51754 - protein, 145 aa, Homo sapiens; identical to SEQ ID NO: 51742

SEQ ID NO: 51755 - protein, 163 aa, Homo sapiens
MLMEGGRAAAARNVSSIQMLSVQPDTKPKGCAGCNRKIKDRYLLKALDKYWHEDCLKCACCDCRLGEVGSTLYTKANLILCRRDYLRLFGVTGNCAACSKLIPAFEMVMRAKDNVYHLDCFACQLCNQRFCVGDKFFLKNNMILCQTDYEEGLMKEGYAPQVR

SEQ ID NO: 51756 - protein, 145 aa, Homo sapiens; identical to SEQ ID NO: 51742

SEQ ID NO: 51757 - protein, 125 aa, Homo sapiens [sequence omitted]

SEQ ID NO: 51758 - protein, 88 aa, Homo sapiens
MLSVQPDTKPKGCAGCNRKIKDRYLLKALDKYWHEDCLKCACCDCRLGEVGSTLYTKANLILCRRDYLRLFGVTGNCAACSKLIPAFE

SEQ ID NO: 51759 - protein, 110 aa, Homo sapiens
MLSVQPDTKPKGCAGCNRKIKDRYLLKALDKYWHEDCLKCACCDCRLGEVGSTLYTKANLILCRRDYLRLFGVTGNCAACSKLIPAFEMVMRAKDNVYHLDCFACQLCNQ

SEQ ID NO: 51760 - protein, 118 aa, Homo sapiens; identical to SEQ ID NO: 51749

SEQ ID NO: 51761 - protein, 165 aa, Homo sapiens
MVNPGSSSQPPPVTAGSLSWKRCAGCGGKIADRFLLYAMDSYWHSRCLKCSCCQAQLGDIGTSCYTKSGMILCRNDYIRLFGNSGACSACGQSIPASELVMRAQGNVYHLKCFTCSTCRNRLVPGDRFHYINGSLFCEHDRPTALINGHLNSLQSNPLLPDQKVC

SEQ ID NO: 51762 - protein, 165 aa, Homo sapiens; identical to SEQ ID NO: 51761

SEQ ID NO: 51763 - protein, 676 aa, Homo sapiens
MDKYDDLGLEASKFIEDLNMYEASKDGLFRVDKGAGNNPEFEETRRVFATKMAKIHLQQQQQQLLQEETLPRGSRGPVNGGGRLGPQARWEVVGSKLTVDGAAKPPLAASTGAPGAVTTLAAGQPPYPPQEQRSRPYLHGTRHGSQDCGSRESLATSEMSAFHQPGPCEDPSCLTHGDYYDNLSLASPKWGDKPGVSPSIGLSVGSGWPSSPGSDPPLPKPCGDHPLNHRQLSLSSSRSSEGSLGGQNSGIGGRSSEKPTGLWSTASSQRVSPGLPSPNLENGAPAVGPVQPRTPSVSAPLALSCPRQGGLPRSNSGLGGEVSGVMSKPNVDPQPWFQDGPKSYLSSSAPSSSPAGLDGSQQGAVPGLGPKPGCTDLGTGPKLSPTSLVHPVMSTLPELSCKEGPLGWSSDGSLGSVLLDSPSSPRVRLPCQPLVPGPELRPSAAELKLEALTQRLEREMDAHPKADYFGACVKCSKGVFGAGQACQAMGNLYHDTCFTCAACSRKLRGKAFYFVNGKVFCEEDFLYSGFQQSADRCFLCGHLIMDMILQALGKSYHPGCFRCVICNECLDGVPFTVDSENKIYCVRDYHKVLAPKCAACGLPILPPEGSDETIRVVSMDRDYHVECYHCEDCGLELNDEDGHRCYPLEDHLFCHSCHVKRLEKRPSSTALHQHHF

SEQ ID NO: 51764 - protein, 406 aa, Homo sapiens
MVHCAGCKRPILDRFLLNVLDRAWHVKCVQCCECKCNLTEKCFSREGKLYCKNDFFRCFGTKCAGCAQGISPSDLVRRARSKVFHLNCFTCMMCNKQLSTGEELYIIDENKFVCKEDYLSNSSVAKENSLHSATTGSDPSLSPDSQDPSQDDAKDSESANVSDKEAGSNENDDQNLGAKRRGPRTTIKAKQLETLKAAFAATPKPTRHIREQLAQETGLNMRVIQVWFQNRRSKERRMKQLSALGARRHAFFRSPRRMRPLVDRLEPGELIPNGPFSFYGDYQSEYYGPGGNYDFFPQGPPSSQAQTPVDLPFVPSSGPSGTPLGGLEHPLPGHHPSSEAQRFTDILAHPPGDSPSPEPSLPGPLHSMSAEVFGPSPPFSSLSVNGGASYGNHLSHPPEMNEAAVW

SEQ ID NO: 51765 - protein, 406 aa, Homo sapiens
MLFHSLSGPEVHGVIDEMDRRAKSEAPAISSAIDRGDTETTMPSISSDRAALCAGCGGKISDRYYLLAVDKQWHMRCLKCCECKLNLESELTCFSKDGSIYCKEDYYRRFSVQRCARCHLGISASEMVMRARDLVYHLNCFTCTTCNKMLTTGDHFGMKDSLVYCRLHFEALLQGEYPAHFNHADVAAAAAAAAAAKSAGLGAAGANPLGLPYYNGVGTVQKGRPRKRKSPGPGADLAAYNAALSCNENDAEHLDRDQPYPSSQKTKRMRTSFKHHQLRTMKSYFAINHNPDAKDLKQLAQKTGLTKRVLQVWFQNARAKFRRNLLRQENTGVDKSTDAALQTGTPSGPASELSNASLSPSSTPTTLTDLTSPTLPTVTSVLTSVPGNLEGHEPHSPSQTTLTNLF

SEQ ID NO: 51766 - protein, 397 aa, Homo sapiens
MEARGELGPARESAGGDLLLALLARRADLRREIPLCAGCDQHILDRFILKATATGTASVSSAATATPLAERCFSRGESVYCKDDFFKRFGTKCAACQLGIPPTQVVRRAQDFVYHLHCFACVVCKRQLATGDEFYLMEDSRLVCKADYETAKQREAEATAKRPRTTITAKQLETLKSAYNTSPKPARHVREQLSSETGLDMRVVQVWFQNRRAKEKRLKKDAGRQRWGQYFRNMKRSRGGSKSDKDSVQEGQDSDAEVSFPVSLPWRKWARPMASTGAWGHPGLGPALGSPGQLLPGAWRPGRPRAVPRAASRQPLRCPPIPRRPAEPPWPPLLSSLVYPDTSLGLVPSGAPGGPPPMRVLAGNGPSSDLSTGSSGGYPDFPASPASWLDEVDHAQF

SEQ ID NO: 51767 - protein, 402 aa, Homo sapiens
MEARGELGPARESAGGDLLLALLARRADLRREIPLCAGCDQHILDRFILKALDRHWHSKCLKCSDCHTPLAERCFSRGESVYCKDDFFKRFGTKCAACQLGIPPTQVVRRAQDFVYHLHCFACVVCKRQLATGDEFYLMEDSRLVCKADYETAKQREAEATAKRPRTTITAKQLETLKSAYNTSPKPARHVREQLSSETGLDMRVVQVWFQNRRAKEKRLKKDAGRQRWGQYFRNMKRSRGGSKSDKDSVQEGQDSDAEVSFPDEPSLAEMGPANGLYGSLGEPTQALGRPSGALGNFSLEHGGLAGPEQYRELRPGSPYGVPPSPAAPQSLPGPQPLLSSLVYPDTSLGLVPSGAPGGPPPMRVLAGNGPSSDLSTGSSGGYPDFPASPASWLDEVDHAQF

SEQ ID NO: 51768 - protein, 397 aa, Homo sapiens
MLLETGLERDRARPGAAAVCTLGGTREIPLCAGCDQHILDRFILKALDRHWHSKCLKCSDCHTPLAERCFSRGESVYCKDDFFKRFGTKCAACQLGIPPTQVVRRAQDFVYHLHCFACVVCKRQLATGDEFYLMEDSRLVCKADYETAKQREAEATAKRPRTTITAKQLETLKSAYNTSPKPARHVREQLSSETGLDMRVVQVWFQNRRAKEKRLKKDAGRQRWGQYFRNMKRSRGGSKSDKDSVQEGQDSDAEVSFPDEPSLAEMGPANGLYGSLGEPTQALGRPSGALGNFSLEHGGLAGPEQYRELRPGSPYGVPPSPAAPQSLPGPQPLLSSLVYPDTSLGLVPSGAPGGPPPMRVLAGNGPSSDLSTGSSGGYPDFPASPASWLDEVDHAQF

SEQ ID NO: 51769 - protein, 390 aa, Homo sapiens
MMQSATVPAEGAVKGLPEMLGVPMQQIPQCAGCNQHILDKFILKVLDRHWHSSCLKCADCQMQLADRCFSRAGSVYCKEDFFKRFGTKCTACQQGIPPTQVVRKAQDFVYHLHCFACIICNRQLATGDEFYLMEDGRLVCKEDYETAKQNDDSEAGAKRPRTTITAKQLETLKNAYKNSPKPARHVREQLSSETGLDMRVVQVWFQNRRAKEKRLKKDAGRHRWGQFYKSVKRSRGSSKQEKESSAEDCGVSDSELSFREDQILSELGHTNRIYGNVGDVTGGQLMNGSFSMDGTGQSYQDLRDGSPYGIPQSPSSISSLPSHAPLLNGLDYTVDSNLGIIAHAGQGVSQTLRAMAGGPTSDISTGSSVGYPDFPTSPGSWLDEMDHPPF

SEQ ID NO: 51770 - protein, 402 aa, Homo sapiens
MMVHCAGCERPILDRFLLNVLDRAWHIKCVQCCECKTNLSEKCFSREGKLYCKNDFFRRFGTKCAGCAQGISPSDLVRKARSKVFHLNCFTCMVCNKQLSTGEELYVIDENKFVCKDDYLSSSSLKEGSLNSVSSCTDRSLSPDLQDALQDDPKETDNSTSSDKETANNENEEQNSGTKRRGPRTTIKAKQLETLKAAFAATPKPTRHIREQLAQETGLNMRVIQVWFQNRRSKERRMKQLSALGARRHAFFRSPRRMRPLGGRLDESEMLGSTPYTYYGDYQGDYYAPGSNYDFFAHGPPSQAQSPADSSFLAASGPGSTPLGALEPPLAGPHAADNPRFTDMISHPDTPSPEPGLPGTLHPMPGEVFSGGPSPPFPMSGTSGYSGPLSHPNPELNEAAVW

SEQ ID NO: 51771 - protein, 356 aa, Homo sapiens
MQILSRCQGLMSEECGRTTALAAGRTRKGAGEEGLVSPEGAGDEDSCSSSAPLSPSSSPRSMASGSGCPPGKCVCNSCGLEIVDKYLLKVNDLCWHVRCLSCSVCRTSLGRHTSCYIKDKDIFCKLDYFRRYGTRCSRCGRHIHSTDWVRRAKGNVYHLACFACFSCKRQLSTGEEFALVEEKVLCRVHYDCMLDNLKREVENGNGISVEGALLTEQDVNHPKPAKRARTSFTADQLQVMQAQFAQDNNPDAQTLQKLAERTGLSRRVIQVWFQNCRARHKKHVSPNHSSSTPVTAVPPSRLSPPMLEEMAYSAYVPQDGTMLTALHSYMDAHSPTTLGLQPLLPHSMTQLPISHT

SEQ ID NO: 51772 - protein, 346 aa, Homo sapiens
MSEECGRTTALAAGRTRKGAGEEGLVSPEGAGDEDSCSSSAPLSPSSSPRSMASGSGCPPGKCVCNSCGLEIVDKYLLKVNDLCWHVRCLSCSVCRTSLGRHTSCYIKDKDIFCKLDYFRRYGTRCSRCGRHIHSTDWVRRAKGNVYHLACFACFSCKRQLSTGEEFALVEEKVLCRVHYDCMLDNLKREVENGNGISVEGALLTEQDVNHPKPAKRARTSFTADQLQVMQAQFAQDNNPDAQTLQKLAERTGLSRRVIQVWFQNCRARHKKHVSPNHSSSTPVTAVPPSRLSPPMLEEMAYSAYVPQDGTMLTALHSYMDAHSPTTLGLQPLLPHSMTQLPISHT

SEQ ID NO: 51773 - protein, 397 aa, Homo sapiens
MEIVGCRAEDNSCPFRPPAMLFHGISGGHIQGIMEEMERRSKTEARLAKGAQLNGRDAGMPPLSPEKPALCAGCGGKISDRYYLLAVDKQWHLRCLKCCECKLALESELTCFAKDGSIYCKEDYYRRFSVQRCARCHLGISASEMVMRARDSVYHLSCFTCSTCNKTLTTGDHFGMKDSLVYCRAHFETLLQGEYPPQLSYTELAAKSGGLALPYFNGTGTVQKGRPRKRKSPALGVDIVNYNSGCNENEADHLDRDQQPYPPSQKTKRMRTSFKHHQLRTMKSYFAINHNPDAKDLKQLAQKTGLTKRVLQVWFQNARAKFRRNLLRQENGGVDKADGTSLPAPPSADSGALTPPGTATTLTDLTNPTITVVTSVTSNMDSHESGSPSQTTLTNLF

SEQ ID NO: 51774 - protein, 388 aa, Homo sapiens
MLNGTTLEAAMLFHGISGGHIQGIMEEMERRSKTEARLAKGAQLNGRDAGMPPLSPEKPALCAGCGGKISDRYYLLAVDKQWHLRCLKCCECKLALESELTCFAKDGSIYCKEDYYRRFSVQRCARCHLGISASEMVMRARDSVYHLSCFTCSTCNKTLTTGDHFGMKDSLVYCRAHFETLLQGEYPPQLSYTELAAKSGGLALPYFNGTGTVQKGRPRKRKSPALGVDIVNYNSGCNENEADHLDRDQQPYPPSQKTKRMRTSFKHHQLRTMKSYFAINHNPDAKDLKQLAQKTGLTKRVLQVWFQNARAKFRRNLLRQENGGVDKADGTSLPAPPSADSGALTPPGTATTLTDLTNPTITVVTSVTSNMDSHESGSPSQTTLTNLF

SEQ ID NO: 51775 - protein, 382 aa, Homo sapiens
MLDGLKMEENFQSAIDTSASFSSLLGRAVSPKSVCEGCQRVILDRFLLRLNDSFWHEQCVQCASCKEPLETTCFYRDKKLYCKYDYEKLFAVKCGGCFEAIAPNEFVMRAQKSVYHLSCFCCCVCERQLQKGDEFVLKEGQLLCKGDYEKERELLSLVSPAASDSGKSDDEESLCKSAHGAGKGTAEEGKDHKRPKRPRTILTTQQRRAFKASFEVSSKPCRKVRETLAAETGLSVRVVQVWFQNQRAKMKKLARRQQQQQQDQQNTQRLSSAQTNGGGSAGMEGIMNPYTALPTPQQLLAIEQSVYSSDPFRQGLTPPQMPGDHMHPYGAEPLFHDLDSDDTSLSNLGDCFLATSEAGPLQSRVGNPIDHLYSMQNSYFTS

SEQ ID NO: 51776 - protein, 382 aa, Homo sapiens; identical to SEQ ID NO: 51775

SEQ ID NO: 51777 - protein, 382 aa, Homo sapiens; identical to SEQ ID NO: 51775

SEQ ID NO: 51778 - protein, 406 aa, Homo sapiens
MDIATGPESLERCFPRGQTDCAKMLDGIKMEEHALRPGPATLGVLLGSDCPHPAVCEGCQRPISDRFLMRVNESSWHEECLQCAACQQALTTSCYFRDRKLYCKQDYQQLFAAKCSGCMEKIAPTEFVMRALECVYHLGCFCCCVCERQLRKGDEFVLKEGQLLCKGDYEKEKDLLSSVSPDESDSVKSEDEDGDMKPAKGQGSQSKGSGDDGKDPRRPKRPRTILTTQQRRAFKASFEVSSKPCRKVRETLAAETGLSVRVVQVWFQNQRAKMKKLARRHQQQQEQQNSQRLGQGEPGPGQGLGQEVLSSRMEGMMASYTPLAPPQQQIVAMEQSPYGSSDPFQQGLTPPQMPGNDSIFHDIDSDTSLTSLSDCFLGSSDVGSLQARVGNPIDRLYSMQSSYFAS

SEQ ID NO: 51779 - protein, 402 aa, Homo sapiens
MDIATGPESLERCFPRGQTDCAKMLDGIKMEEHALRPGPATLGVLLGSDCPHPAVCEGCQRPISDRFLMRVNESSWHEECLQCAACQQALTTSCYFRDRKLYCKQDYQQLFAAKCSGCMEKIAPTEFVMRALECVYHLGCFCCCVCERQLRKGDEFVLKEGQLLCKGDYEKEKDLLSSVSPDESDSVKSEDEDGDMKPAKGQGSQSKGSGDDGKDPRRPKRPRTILTTQQRRAFKASFEVSSKPCRKVRETLAAETGLSVRVVQVWFQNQRAKMKKLARRHQQQQEQQNSQRLGQEVLSSRMEGMMASYTPLAPPQQQIVAMEQSPYGSSDPFQQGLTPPQMPGDHMNPYGNDSIFHDIDSDTSLTSLSDCFLGSSDVGSLQARVGNPIDRLYSMQSSYFAS

SEQ ID NO: 51780 - protein, 372 aa, Homo sapiens
MLDGIKMEEHALRPGPATLGVLLGSDCPHPAVCEGCQRPISDRFLMRVNESSWHEECLQCAACQQALTTSCYFRDRKLYCKQDYQQLFAAKCSGCMEKIAPTEFVMRALECVYHLGCFCCCVCERQLRKGDEFVLKEGQLLCKGDYEKEKDLLSSVSPDESDSVKSEDEDGDMKPAKGQGSQSKGSGDDGKDPRRPKRPRTILTTQQRRAFKASFEVSSKPCRKVRETLAAETGLSVRVVQVWFQNQRAKMKKLARRHQQQQEQQNSQRLGQEVLSSRMEGMMASYTPLAPPQQQIVAMEQSPYGSSDPFQQGLTPPQMPGNDSIFHDIDSDTSLTSLSDCFLGSSDVGSLQARVGNPIDRLYSMQSSYFAS

SEQ ID NO: 51781 - protein, 395 aa, Homo sapiens
MDIATGPESLERCFPRGQTDCAKMLDGIKMEEHALRPGPATLGVLLGSDCPHPAVCEGCQRPISDRFLMRVNESSWHEECLQCAACQQALTTSCYFRDRKLYCKQDYQQLFAAKCSGCMEKIAPTEFVMRALECVYHLGCFCCCVCERQLRKGDEFVLKEGQLLCKGDYEKEKDLLSSVSPDESDSVKSEDEDGDMKPAKGQGSQSKGSGDDGKDPRRPKRPRTILTTQQRRAFKASFEVSSKPCRKVRETLAAETGLSVRVVQVWFQNQRAKMKKLARRHQQQQEQQNSQRLGQEVLSSRMEGMMASYTPLAPPQQQIVAMEQSPYGSSDPFQQGLTPPQMPGNDSIFHDIDSDTSLTSLSDCFLGSSDVGSLQARVGNPIDRLYSMQSSYFAS

SEQ ID NO: 51782 - protein, 105 aa, Homo sapiens
MSIYFPIHCPDYLRSAKMTEVMMNTQPMEEIGLSPRKDGLSYQIFPDPSDFDRCCKLKDRLPSIVVEPTEGEVESGELRWPPEEFLVQEDEQDNCEETAKENKEQ

SEQ ID NO: 51783 - protein, 87 aa, Homo sapiens
MVSSVVGFYSLRFFGNFTPKKDDTTMTKIIGNCVSILVLSSALPVMSRTLGLHKLHLPNTSRDSETASVMTSSARDTGFHHLQALMC

SEQ ID NO: 51784 - protein, 228 aa, Homo sapiens
MEGQDEVSAREQHFHSQVRESTICFLLFAILYVVSYFIITRYKRKSDEQEDEDAIVNRISLFLSTFTLAVSAGAVLLLPFSIISNEILLSFPQNYYIQWLNGSLIHGLWNLASLFSNLCLFVLMPFAFFFLESEGFAGLKKGIRARILETLVMLLLLALLILGIVWVASALIDNDAASMESLYDLWEFYLPYLYSCISLMGCLLLHLPNTSRDSETAKPSVNGHQKAL

SEQ ID NO: 51785 - protein, 490 aa, Homo sapiens
MEGQDEVSAREQHFHSQVRESTICFLLFAILYVVSYFIITRYKRKSDEQEDEDAIVNRISLFLSTFTLAVSAGAVLLLPFSIISNEILLSFPQNYYIQWLNGSLIHGLWNLASLFSNLCLFVLMPFAFFFLESEGFAGLKKGIRARILETLVMLLLLALLILGIVWVASALIDNDAASMESLYDLWEFYLPYLYSCISLMGCLLLLLCTPVGLSRMFTVMGQLLVKPTILEDLDEQIYIITLEEEALQRRLNGLSSSVEYNIMELEQELENVKTLKTKLERRKKASAWERNLVYPAVMVLLLIETSISVLLVACNILCLLVDETAMPKGTRGPGIGNASLSTFGFVGAALEIILIFYLMVSSVVGFYSLRFFGNFTPKKDDTTMTKIIGNCVSILVLSSALPVMSRTLGITRFDLLGDFGRFNWLGNFYIVLSYNLLFAIVTTLCLVRKFTSAVREELFKALGLHKLHLPNTSRDSETAKPSVNGHQKAL

SEQ ID NO: 51786 - protein, 531 aa, Homo sapiens
MEGQDEVSAREQHFHSQVRESTICFLLFAILYVVSYFIITRYKRKSDEQEDEDAIVNRISLFLSTFTLAVSAGAVLLLPFSIISNEILLSFPQNYYIQWLNGSLIHGLWNLASLFSNLCLFVLMPFAFFFLESEGFAGLKKGIRARILETLVMLLLLALLILGIVWVASALIDNDAASMESLYDLWEFYLPYLYSCISLMGCLLLLLCTPVGLSRMFTVMGQLLVKPTILEDLDEQIYIITLEEEALQRRLNVGMLCAGNPEVATGRQVPEEQAGQLLLGKWIQEGGDMIANPRLSSSVEYNIMELEQELENVKTLKTKLERRKKASAWERNLVYPAVMVLLLIETSISVLLVACNILCLLVDETAMPKGTRGPGIGNASLSTFGFVGAALEIILIFYLMVSSVVGFYSLRFFGNFTPKKDDTTMTKIIGNCVSILVLSSALPVMSRTLGITRFDLLGDFGRFNWLGNFYIVLSYNLLFAIVTTLCLVRKFTSAVREELFKALGLHKLHLPNTSRDSETAKPSVNGHQKAL

SEQ ID NO: 51787 - protein, 284 aa, Homo sapiens
MLLLLALLILGIVWVASALIDNDAASMESLYDLWEFYLPYLYSCISLMGCLLLLLCTPVGLSRMFTVMGQLLVKPTILEDLDEQIYIITLEEEALQRRLNGLSSSVEYNIMELEQELENVKTLKTKLERRKKASAWERNLVYPAVMVLLLIETSISVLLVACNILCLLVDETAMPKGTRGPGIGNASLSTFGFVGAALEIILIFYLMVSSVVGFYSLRFFGNFTPKKDDTTMTKIIGNCVSILVLSSALPVMSRTLGLHKLHLPNTSRDSETAKPSVNGHQKAL

SEQ ID NO: 51788 - protein, 529 aa, Homo sapiens
GQDEVSAREQHFHSQVRESTICFLLFAILYVVSYFIITRYKRKSDEQEDEDAIVNRISLFLSTFTLAVSAGAVLLLPFSIISNEILLSFPQNYYIQWLNGSLIHGLWNLASLFSNLCLFVLMPFAFFFLESEGFAGLKKGIRARILETLVMLLLLALLILGIVWVASALIDNDAASMESLYDLWEFYLPYLYSCISLMGCLLLLLCTPVGLSRMFTVMGQLLVKPTILEDLDEQIYIITLEEEALQRRLNVGMLCAGNPEVATGRQVPEEQAGQLLLGKWIQEGGDMIANPRLSSSVEYNIMELEQELENVKTLKTKLERRKKASAWERNLVYPAVMVLLLIETSISVLLVACNILCLLVDETAMPKGTRGPGIGNASLSTFGFVGAALEIILIFYLMVSSVVGFYSLRFFGNFTPKKDDTTMTKIIGNCVSILVLSSALPVMSRTLGITRFDLLGDFGRFNWLGNFYIVLSYNLLFAIVTTLCLVRKFTSAVREELFKALGLHKLHLPNTSRDSETAKPSVNGHQKAL

SEQ ID NO: 51789 - protein, 415 aa, Homo sapiens
MKEDGRAGRGVGAGAALPQPSAGVHDEQEDEDAIVNRISLFLSTFTLAVSAGAVLLLPFSIISNEILLSFPQNYYIQWLNGSLIHGLWNLASLFSNLCLFVLMPFAFFFLESEGFAGLKKGIRARILETLVMLLLLALLILGIVWVASALIDNDAASMESLYDLWEFYLPYLYSCISLMGCLLLLLCTPVGLSRMFTVMGQLLVKPTILEDLDEQIYIITLEEEALQRRLNGLSSSVEYNIMELEQELENVKTLKTKLERRKKASAWERNLVYPAVMVLLLIETSISVLLVACNILCLLVDETAMPKGTRGPGIGNASLSTFGFVGAALEIILIFYLMVSSVVGFYSLRFFGNFTPKKDDTTMTKIIGNCVSILVLSSALPVMSRTLGLHKLHLPNTSRDSETAKPSVNGHQKAL

SEQ ID NO: 51790 - protein, 489 aa, Homo sapiens
MEAPDYEVLSVREQLFHERIRECIISTLLFATLYILCHIFLTRFKKPAEFTTVDDEDATVNKIALELCTFTLAIALGAVLLLPFSIISNEVLLSLPRNYYIQWLNGSLIHGLWNLVFLFSNLSLIFLMPFAYFFTESEGFAGSRKGVLGRVYETVVMLMLLTLLVLGMVWVASAIVDKNKANRESLYDFWEYYLPYLYSCISFLGVLLLLVCTPLGLARMFSVTGKLLVKPRLLEDLEEQLYCSAFEEAALTRRICNPTSCWLPLDMELLHRQVLALQTQRVLLEKRRKASAWQRNLGYPLAMLCLLVLTGLSVLIVAIHILELLIDEAAMPRGMQGTSLGQVSFSKLGSFGAVIQVVLIFYLMVSSVVGFYSSPLFRSLRPRWHDTAMTQIIGNCVCLLVLSSALPVFSRTLGLTRFDLLGDFGRFNWLGNFYIVFLYNAAFAGLTTLCLVKTFTAAVRAELIRAFGLDRLPLPVSGFPQASRKTQHQ

SEQ ID NO: 51791 - protein, 484 aa, Homo sapiens
MVNVKALCEPEVSNCWMNVITGTGSVSSPLLVLPQPGPETSLMTGEPVDDEDATVNKIALELCTFTLAIALGAVLLLPFSIISNEVLLSLPRNYYIQWLNGSLIHGLWNLVFLFSNLSLIFLMPFAYFFTESEGFAGSRKGVLGRVYETVVMLMLLTLLVLGMVWVASAIVDKNKANRESLYDFWEYYLPYLYSCISFLGVLLLLVCTPLGLARMFSVTGKLLVKPRLLEDLEEQLYCSAFEEAALTRRICNPTSCWLPLDMELLHRQVLALQTQRVLLEKRRKASAWQRNLGYPLAMLCLLVLTGLSVLIVAIHILELLIDEAAMPRGMQGTSLGQVSFSKLGSFGAVIQVVLIFYLMVSSVVGFYSSPLFRSLRPRWHDTAMTQIIGNCVCLLVLSSALPVFSRTLGLTRFDLLGDFGRFNWLGNFYIVFLYNAAFAGLTTLCLVKTFTAAVRAELIRAFGLDRLPLPVSGFPQASRKTQHQ

SEQ ID NO: 51792 - protein, 469 aa, Homo sapiens
MEAPDYEVLSVREQLFHERIRECIISTLLFATLYILCHIFLTRFKKPAEFTTVDDEDATVNKIALELCTFTLAIALGAVLLLPFSIISNEVLLSLPRNYYIQWLNGSLIHGLWNLVFLFSNLSLIFLMPFAYFFTESEGFAGSRKGVLGRVYETVVMLMLLTLLVLGMVWVASAIVDKNKANRESLYDFWEYYLPYLYSCISFLGVLLLLVCTPLGLARMFSVTGKLLVKPRLLEDLEEQLYCSAFEEAALTRRICNPTSCWLPLDMELLHRQVLALQTQRVLLEKRRKASAWQRNLGYPLAMLCLLVLTGLSVLIVAIHILELLIDEAAMPRGMQVVLIFYLMVSSVVGFYSSPLFRSLRPRWHDTAMTQIIGNCVCLLVLSSALPVFSRTLGLTRFDLLGDFGRFNWLGNFYIVFLYNAAFAGLTTLCLVKTFTAAVRAELIRAFGLDRLPLPVSGFPQASRKTQHQ

SEQ ID NO: 51793 - protein, 127 aa, Homo sapiens
MEAPDYEVLSVREQLFHERIRECIISTLLFATLYILCHIFLTRFKKPAEFTTVDDEDATVNKIALELCTFTLAIALGAVLLLPFSIISNEVLLSLPRNYYIQWLNGSLIHGLWNLVFLFSNLSLIFL

SEQ ID NO: 51794 - protein, 338 aa, Homo sapiens
MVRRVQPDRKQLPLVLLRLLCLLPTGLPVRSVDFNRGTDNITVRQGDTAILRCVVEDKNSKVAWLNRSGIIFAGHDKWSLDPRVELEKRHSLEYSLRIQKVDVYDEGSYTCSVQTQHEPKTSQVYLIVQVPPKISNISSDVTVNEGSNVTLVCMANGRPEPVITWRHLTPTGREFEGEEEYLEILGITREQSGKYECKAANEVSSADVKQVKVTVNYPPTITESKSNEATTGRQASLKCEASAVPAPDFEWYRDDTRINSANGLEIKSTEGQSSLTVTNVTEEHYGNYTCVAANKLGVTNASLVLFRPGSVRGINGSISLAVPLWLLAASLLCLLSKC

SEQ ID NO: 51795 - protein, 358 aa, Homo sapiens [sequence omitted]

SEQ ID NO: 51796 - protein, 250 aa, Homo sapiens
MAEGGASKGGGEEPGKLPEPAEEESQVLRGTGHCKWFNVRMGFGFISMINREGSPLDIPVDVFVHQSKLFMEGFRSLKEGEPVEFTFKKSSKGLESIRVTGPGGSPCLGSERRPKGKTLQKRKPKGDRCYNCGGLDHHAKECSLPPQPKKCHYCQSIMHMVANCPHKNVAQPPASSQGRQEAESQPCTSTLPREVGGGHGCTSPPFPQEARAEISERSGRSPQEASSTKSSIAPEEQSKKGPSVQKRKKT

SEQ ID NO: 51797 - protein, 749 aa, Homo sapiens
MEVVPAEVNSLLPEEIMDTGITLVDDDSIEAVIVSSPIPMETELEEIVNINSTGDSTATPISTEPITVYSNHTNQVAVNTTITKADSNTTVKPAFPSGLQKLGAQTPVTISANQIILNKVSQTSDLKLGNQTLKPDGQKLILTTLGKSGSPIVLALPHSQLPQAQKVTTQAQSGDAKLPPQQIKVVTIGGRPEVKPVIGVSALTPGSQLINTTTQPSVLQTQQLKTVQIAKKPRTPTSGPVITKLIFAKPINSKAVTGQTTQVSPPVIAGRVLSQSTPGTPSKTITISESGVIGSTLNSTTQTPNKIAISPLKSPNKAVKSTVQTITVGGVSTSQFKTIIPLATAPNVQQIQVPGSKFHYVRLVTATSASSSTQPVSQNPSTNTQPLQQAKPVVVNTTPVRMSVPIVSAQAVKQVVPKPINPTSQIVTTSQPQQRLIMPATPLPQIQPNLTNLPPGTVLAPAPGTGNVGYAVLPAQYVTQLQQSSYVSIASNSTFTGTSGIQTQARLPFNGIIPSESASRPRKPCNCTKSLCLKLYCDCFANGEFCNNCNCTNCYNNLEHENERQKAIKACLDRNPEAFKPKIGKGKEGESDRRHSKGCNCKRSGCLKNYCECYEAKIMCSSICKCIGCKNFEESPERKTLMHLADAAEVRVQQQTAAKTKLSSQISDLLTRPTPALNSGGGKLPFTFVTKEVAEATCNCLLAQAEQADKKGKSKAAAERMILEEFGRCLMSVINSAGKAKSDPCAMNC

SEQ ID NO: 51798 - protein, 243 aa, Homo sapiens
MEVVPAEVNSLLPEEIMDTGITLVDDDSIEAVIVSSPIPMETELEEIVNINSTGDSTATPISTEPITVYSNHTNQVAVNTTITKADSNTTVKPAFPSGLQKLGAQTPVTISANQIILNKVSQTSDLKLGNQTLKPDGQKLILTTLGKSGSPIVLALPHSQLPQAQKVTTQAQSGDAKLPPQQIKVVTIGGRPEVKPVIGVSALTPGSQLINTTTQPSVLQTQQLKTVQVGFFHSLLPELHQRP

SEQ ID NO: 51799 - protein, 660 aa, Homo sapiens
MEVVPAEVNSLLPEEIMDTGITLVDDDSIEAVIVSSPIPMETELEEIVNINSTGDSTATPISTEPITVYSNHTNQVAVNTTITKADSNTTVKPAFPSGLQKLGAQTPVTISANQIILNKVSQTSDLKLGNQTLKPDGQKLILTTLGKSGSPIVLALPHSQLPQAQKVTTQAQSGDAKLPPQQIKVVTIGGRPEVKPVIGVSALTPGSQLINTTTQPSVLQTQQLKTVQAVKSTVQTITVGGVSTSQFKTIIPLATAPNVQQIQVPGSKFHYVRLVTATSASSSTQPVSQNPSTNTQPLQQAKPVVVNTTPVRMSVPIVSAQAVKQVVPKPINPTSQIVTTSQPQQRLIMPATPLPQIQPNLTNLPPGTVLAPAPGTGNVGYAVLPAQYVTQLQQSSYVSIASNSTFTGTSGIQTQARLPFNGIIPSESASRPRKPCNCTKSLCLKLYCDCFANGEFCNNCNCTNCYNNLEHENERQKAIKACLDRNPEAFKPKIGKGKEGESDRRHSKGCNCKRSGCLKNYCECYEAKIMCSSICKCIGCKNFEESPERKTLMHLADAAEVRVQQQTAAKTKLSSQISDLLTRPTPALNSGGGKLPFTFVTKEVAEATCNCLLAQAEQADKKGKSKAAAERMILEEFGRCLMSVINSAGKAKSDPCAMNC

SEQ ID NO: 51800 - protein, 528 aa, Homo sapiens
MEVVPAEIAKKPRTPTSGPVITKLIFAKPINSKAVTGQTTQVSPPVIAGRVLSQSTPGTPSKTITISESGVIGSTLNSTTQTPNKIAISPLKSPNKAVKSTVQTITVGGVSTSQFKTIIPLATAPNVQQIQVPGSKFHYVRLVTATSASSSTQPVSQNPSTNTQPLQQAKPVVVNTTPVRMSVPIVSAQAVKQVVPKPINPTSQIVTTSQPQQRLIMPATPLPQIQPNLTNLPPGTVLAPAPGTGNVGYAVLPAQYVTQLQQSSYVSIASNSTFTGTSGIQTQARLPFNGIIPSESASRPRKPCNCTKSLCLKLYCDCFANGEFCNNCNCTNCYNNLEHENERQKAIKACLDRNPEAFKPKIGKGKEGESDRRHSKGCNCKRSGCLKNYCECYEAKIMCSSICKCIGCKNFEESPERKTLMHLADAAEVRVQQQTAAKTKLSSQISDLLTRPTPALNSGGGKLPFTFVTKEVAEATCNCLLAQAEQADKKGKSKAAAERMILEEFGRCLMSVINSAGKAKSDPCAMNC

SEQ ID NO: 51801 - protein, 528 aa, Homo sapiens; identical to SEQ ID NO: 51800

SEQ ID NO: 51802 - protein, 749 aa, Homo sapiens; identical to SEQ ID NO: 51797

SEQ ID NO: 51803 - protein, 528 aa, Homo sapiens; identical to SEQ ID NO: 51800

SEQ ID NO: 51804 - protein, 207 aa, Homo sapiens
MAALVEPLGLERDVSRAVELLERLQRSGELPPQKLQALQRVLQSRFCSAIREVYEQLYDTLDITGSAEIRAHATAKATVAAFTASEGHAHPRVVELPKTDEGLGFNIMGGKEQNSPIYISRVIPGGVADRHGGLKRGDQLLSVNGVSVEGEQHEKAVELLKAAQGSVKLVVRYTPRVLEEMEARFEKMRSARRRQQHQSYSSLESRG

SEQ ID NO: 51805 - protein, 197 aa, Homo sapiens
MAALGEPVRLERDICRAIELLEKLQRSGEVPPQKLQALQRVLQSEFCNAVREVYEHVYETVDISSSPEVRANATAKATVAAFAASEGHSHPRVVELPKTEEGLGFNIMGGKEQNSPIYISRIIPGGIADRHGGLKRGDQLLSVNGVSVEGEHHEKAVELLKAAQGKVKLVVRYTPKVLEEMESRFEKMRSAKRRQQT

SEQ ID NO: 51806 - protein, 252 aa, Homo sapiens
MEEAILVPCVLGLLLLPILAMLMALCVHCHRLPGSYDSTSSDSLYPRGIQFKRPHTVAPWPPAYPPVTSYPPLSQPDLLPIPRSPQPRRDSDGANSVASYENEGASGIRGAQAGWGVWGPSWTRLTPVSLPPEPACEDADEDEDDYHNPGYLVVLPDSTPATSTAAPSAPALSTPGIRDSAFSMESIDDYVNVPESGESAEASLDGSREYVNVSQELHPGAAKTEPAALSSQEAEEVEEEGAPDYENLQELN

SEQ ID NO: 51807 - protein, 262 aa, Homo sapiens
MEEAILVPCVLGLLLLPILAMLMALCVHCHRLPGSYDSTSSDSLYPRGIQFKRPHTVAPWPPAYPPVTSYPPLSQPDLLPIPRSPQPLGGSHRTPSSRRDSDGANSVASYENEGASGIRGAQAGWGVWGPSWTRLTPVSLPPEPACEDADEDEDDYHNPGYLVVLPDSTPATSTAAPSAPALSTPGIRDSAFSMESIDDYVNVPESGESAEASLDGSREYVNVSQELHPGAAKTEPAALSSQEAEEVEEEGAPDYENLQELN

SEQ ID NO: 51808 - protein, 233 aa, Homo sapiens
MEEAILVPCVLGLLLLPILAMLMALCVHCHRLPGSYDSTSSDSLYPRGIQFKRPHTVAPWPPAYPPVTSYPPLSQPDLLPIPRSPQPLGGSHRTPSSRRDSDGANSVASYENEEPACEDADEDEDDYHNPGYLVVLPDSTPATSTAAPSAPALSTPGIRDSAFSMESIDDYVNVPESGESAEASLDGSREYVNVSQELHPGAAKTEPAALSSQEAEEVEEEGAPDYENLQELN

SEQ ID NO: 51809 - protein, 269 aa, Homo sapiens
MEATAASWQVAVPVLGGASRPLGPRGAASLLRAPLQMEEAILVPCVLGLLLLPILAMLMALCVHCHRLPGSYDSTSSDSLYPRGIQFKRPHTVAPWPPAYPPVTSYPPLSQPDLLPIPRSPQPLGGSHRTPSSRRDSDGANSVASYENEEPACEDADEDEDDYHNPGYLVVLPDSTPATSTAAPSAPALSTPGIRDSAFSMESIDDYVNVPESGESAEASLDGSREYVNVSQELHPGAAKTEPAALSSQEAEEVEEEGAPDYENLQELN

SEQ ID NO: 51810 - protein, 232 aa, Homo sapiens
MEEAILVPCVLGLLLLPILAMLMALCVHCHRLPGSYDSTSSDSLYPRGIQFKRPHTVAPWPPAYPPVTSYPPLSQPDLLPIPSPQPLGGSHRTPSSRRDSDGANSVASYENEEPACEDADEDEDDYHNPGYLVVLPDSTPATSTAAPSAPALSTPGIRDSAFSMESIDDYVNVPESGESAEASLDGSREYVNVSQELHPGAAKTEPAALSSQEAEEVEEEGAPDYENLQELN

SEQ ID NO: 51811 - protein, 243 aa, Homo sapiens
MSSGTELLWPGAALLVLLGVAASLCVRCSRPGAKRSEKIYQQRSLREDQQSFTGSRTYSLVGQAWPGPLADMAPTRKDKLLQFYPSLEDPASSRYQNFSKGSRHGSEEAYIDPIAMEYYNWGRFSKPPEDDDANSYENVLICKQKTTETGAQQEGIGGLCRGDLSLSLALKTGPTSGLCPSASPEEDEESEDYQNSASIHQWRESRKVMGQLQREASPGPVGSPDEEDGEPDYVNGEVAATEA

SEQ ID NO: 51812 - protein, 243 aa, Homo sapiens; identical to SEQ ID NO: 51811

SEQ ID NO: 51813 - protein, 64 aa, Homo sapiens
MSSGTELLWPGAALLVLLGVAASLCVRCSRPGAKRSEKIYQQRSLREDQQSFTGSRTYSLVGQA

SEQ ID NO: 51814 - protein, 243 aa, Homo sapiens; identical to SEQ ID NO: 51811

SEQ ID NO: 51815 - protein, 243 aa, Homo sapiens; identical to SEQ ID NO: 51811

SEQ ID NO: 51816 - protein, 58 aa, Homo sapiens
MSSGTELLWPGAALLVLLGVAASLCVRCSRPGAKRSEKIYQQRSLREDQQSFTGSRTY

SEQ ID NO: 51817 - protein, 100 aa, Homo sapiens
MSSGTELLWPGAALLVLLGVAASLCVRCSRPGAKRSEKIYQQRSLREDQQSFTGSRTYSLVGQAWPGPLADMAPTRKDKLLQFYPSLEDPASSRYQNFSK

SEQ ID NO: 51818 - protein, 567 aa, Homo sapiens
MRPDSPTMAAPAESLRRRKTGYSDPEPESPPAPGRGPAGSPAHLHTGTFWLTRIVLLKALAFVYFVAFLVAFHQNKQLIGDRGLLPCRVFLKNFQQYFQDRTSWEVFSYMPTILWLMDWSDMNSNLDLLALLGLGISSFVLITGCANMLLMAALWGLYMSLVNVGHVWYSFGWESQLLETGFLGIFLCPLWTLSRLPQHTPTSRIVLWGFRWLIFRIMLGAGLIKIRGDRCWRDLTCMDFHYETQPMPNPVAYYLHHSPWWFHRFETLSNHFIELLVPFFLFLGRRACIIHGVLQILFQAVLIVSGNLSFLNWLTMVPSLACFDDATLGFLFPSGPGSLKDRVLQMQRDIRGARPEPRFGSVVRRAANVSLGVLLAWLSVPVVLNLLSSRQVMNTHFNSLHIVNTYGAFGSITKERAEVILQGTASSNASAPDAMWEDYEFKCKPGDPSRRPCLISPYHYRLDWLMWFAAFQTYEHNDWIIHLAGKLLASDAEALSLLAHNPFAGRPPPRWVRGEHYRYKFSRPGGRHAAEGKWWVRKRIGAYFPPLSLEELRPYFRDRGWPLPGPL

SEQ ID NO: 51819 - protein, 567 aa, Homo sapiens
MRPDSPTMAAPAESLRRRKTGYSDPEPESPPAPGRGPAGSPAHLHTGTFWLTRIVLLKALAFVYFVAFLVAFHQNKQLIGDRGLLPCRVFLKNFQQYFQDRTSWEVFSYMPTILWLMDWSDMNSNLDLLALLGLGISSFVLITGCANMLLMAALWGLYMSLVNVGHVWYSFRWESQLLETGFLGIFLCPLWTLSRLPQHTPTSRIVLWGFRWLIFRIMLGAGLIKIRGDRCWRDLTCMDFHYETQPMPNPVAYYLHHSPWWFHRFETLSNHFIELLVPFFLFLGRRACIIHGVLQILFQAVLIVSGNLSFLNWLTMVPSLACFDDATLGFLFPSGPGSLKDRVLQMQRDIRGARPEPRFGSVVRRAANVSLGVLLAWLSVPVVLNLLSSRQVMNTHFNSLHIVNTYGAFGSITKERAEVILQGTASSNASAPDAMWEDYEFKCKPGDPSRRPCLISPYHYRLDWLMWFAAFQTYEHNDWIIHLAGKLLASDAEALSLLAHNPFAGRPPPRWVRGEHYRYKFSRPGGRHAAEGKWWVRKRIGAYFPPLSLEELRPYFRDRGWPLPGPL

SEQ ID NO: 51820 - protein, 185 aa, Homo sapiens
MRPDSPTMAAPAESLRRRKTGYSDPEPESPPAPGRGPAGSPAHLHTGTFWLTRIVLLKALAFVYFVAFLVAFHQNKQLIGDRGLLPCRVFLKNFQQYFQDRTSWEVFSYMPTILWLMDWSDMNSNLDLLALLGLGISSFVLITGCANMLLMAALWGLYMSLVNVGHVWCPSLASAISLPSMHGGQ

SEQ ID NO: 51821 - protein, 166 aa, Homo sapiens
MAAPAESLRRRKTGYSDPEPESPPAPGRGPAGSPAHLHTGTFWLTRIVLLKALAFVYFVAFLVAFHQNKQLIGDRGLLPCRVFLKNFQQYFQDRTSWEVFSYMPTILWLMDWSDMNSNLDLLALLGLGISSFVLITGCANMLLMAALWGLYMSLVNVGHVWYSFGK

SEQ ID NO: 51822 - protein, 350 aa, Homo sapiens
MRGAGLIKIRGDRCWRDLTCMDFHYETQPMPNPVAYYLHHSPWWFHRFETLSNHFIELLVPFFLFLGRRACIIHGVLQILFQAVLIVSGNLSFLNWLTMVPSLACFDDATLGFLFPSGPGSLKDRVLQMQRDIRGARPEPRFGSVVRRAANVSLGVLLAWLSVPVVLNLLSSRQVMNTHFNSLHIVNTYGAFGSITKERAEVILQGTASSNASAPDAMWEDYEFKCKPGDPSRRPCLISPYHYRLDWLMWFAAFQTYEHNDWIIHLAGKLLASDAEALSLLAHNPFAGRPPPRWVRGEHYRYKFSRPGGRHAAEGKWWVRKRIGAYFPPLSLEELRPYFRDRGWPLPGPL

SEQ ID NO: 51823 - protein, 330 aa, Homo sapiens
MDFHYETQPMPNPVAYYLHHSPWWFHRFETLSNHFIELLVPFFLFLGRRACIIHGVLQILFQAVLIVSGNLSFLNWLTMVPSLACFDDATLGFLFPSGPGSLKDRVLQMQRDIRGARPEPRFGSVVRRAANVSLGVLLAWLSVPVVLNLLSSRQVMNTHFNSLHIVNTYGAFGSITKERAEVILQGTASSNASAPDAMWEDYEFKCKPGDPSRRPCLISPYHYRLDWLMWFAAFQTYEHNDWIIHLAGKLLASDAEALSLLAHNPFAGRPPPRWVRGEHYRYKFSRPGGRHAAEGKWWVRKRIGAYFPPLSLEELRPYFRDRGWPLPGPL

SEQ ID NO: 51824 - protein, 263 aa, Homo sapiens
MPNPVAYYLHHSPWWFHRFETLSNHFIELLVPFFLFLGRRACIIHGVLQILFQAVLIVSGNLSFLNWLTMVPSLACFDDATLGFLFPSGPGSLKDRVLQMQRDIRGARPEPRFGSVVRRAANVSLGVLLAWLSVPVVLNLLSSRQVMNTHFNSLHIVNTYGAFGSITKERAEVILQGTASSNASAPDAMWEDYEFKCKPGDPSRRPCLISPYHYRLDWLMWFAAFQTYEHNDWIIHLAGKLLASDAEALSLLAHNPFAGRPPP

SEQ ID NO: 51825 - protein, 500 aa, Homo sapiens
MSNSVPLLCFWSLCYCFAAGSPVPFGPEGRLEDKLHKPKATQTEVKPSVRFNLRTSKDPEHEGCYLSVGHSQPLEDCSFNMTAKTFFIIHGWTMSGIFENWLHKLVSALHTREKDANVVVVDWLPLAHQLYTDAVNNTRVVGHSIARMLDWLQEKDDFSLGNVHLIGYSLGAHVAGYAGNFVKGTVGRITGLDPAGPMFEGADIHKRLSPDDADFVDVLHTYTRSFGLSIGIQMPVGHIDIYPNGGDFQPGCGLNDVLGSIAYGTITEVVKCEHERAVHLFVDSLVNQDKPSFAFQCTDSNRFKKGICLSCRKNRCNSIGYNAKKMRNKRNSKMYLKTRAGMPFRVYHYQMKIHVFSYKNMGEIEPTFYVTLYGTNADSQTLPLEIVERIEQNATNTFLVYTEEDLGDLLKIQLTWEGASQSWYNLWKEFRSYLSQPRNPGRELNIRRIRVKSGETQRKLTFCTEDPENTSISPGRELWFRKCRDGWRMKNETSPTVELP

SEQ ID NO: 51826 - protein, 426 aa, Homo sapiens
MSNSVPLLCFWSLCYCFAAGSPVPFGPEGRLEDKLHKPKATQTEVKPSVRFNLRTSKDPEHEGCYLSVGHSQPLEDCSFNMTAKTFFIIHGWTMSGIFENWLHKLVSALHTREKDANVVVVDWLPLAHQLYTDAVNNTRVVGHSIARMLDWLQEKDDFSLGNVHLIGYSLGAHVAGYAGNFVKGTVGRITAITEVVKCEHERAVHLFVDSLVNQDKPSFAFQCTDSNRFKKGICLSCRKNRCNSIGYNAKKMRNKRNSKMYLKTRAGMPFRVYHYQMKIHVFSYKNMGEIEPTFYVTLYGTNADSQTLPLEIVERIEQNATNTFLVYTEEDLGDLLKIQLTWEGASQSWYNLWKEFRSYLSQPRNPGRELNIRRIRVKSGETQRKLTFCTEDPENTSISPGRELWFRKCRDGWRMKNETSPTVELP

SEQ ID NO: 51827 - protein, 366 aa, Homo sapiens
MNISQIISYWGYPDEEYDIVTEDGYILGLYRIPYWRTDNNKNLAQRVVVYLQHGLLTSASSWISNLPNNSLGFILADAGYDVWMGNSRGNTWSRKHLYLETSSKEFWAFSFDEMAKYDLPASIDFTVKQTRQEEIFYVGHSQGTTIGFITFSTISKIAERIKIFFALAPVFSTKYLKSPLIRMTYKWKSIVMAFSGNKDFLPKTSFKKFIGSKLCPLQIFDKICLNILFMMFGYDPKNLNMSRLDVYFSHNPAGTSVQNMLHWSQLLNSTHLKAYDWGSPDLNLVHYNQTTSPLYNMTNMNVATAIWNGKSDLLADPEDVNILHSEITNHIYYKTISYYNHIDSLFGLDVYDQVYHEIIDIIQDNL

SEQ ID NO: 51828 - protein, 399 aa, Homo sapiens
MWQLLAAACWMLLLGSMYGYDKKGNNANPEANMNISQIISYWGYPYEEYDVTTKDGYILGIYRIPHGRGCPGRTAPKPAVYLQHGLIASASNWICNLPNNSLAFLLADSGYDVWLGNSRGNTWSRKHLKLSPKSPEYWAFSLDEMAKYDLPATINFIIEKTGQKRLYYVGHSQGTTIAFIAFSTNPELAKKIKIFFALAPVVTVKYTQSPMKKLTTLSRRVVKVLFGDKMFHPHTLFDQFIATKVCNRKLFRRICSNFLFTLSGFDPQNLNMSRLDVYLSHNPAGTSVQNMLHWAQAVNSGQLQAFDWGNSDQNMMHFHQLTPPLYNITKMEVPTAIWNGGQDIVADPKDVENLLPQIANLIYYKLIPHYNHVDFYLGEDAPQEIYQDLIILMEEYLQN

SEQ ID NO: 51829 - protein, 423 aa, Homo sapiens
MLETLSRQWIVSHRMEMWLLILVAYMFQRNVNSVHMPTKAVDPEAFMNISEIIQHQGYPCEEYEVATEDGYILSVNRIPRGLVQPKKTGSRPVVLLQHGLVGGASNWISNLPNNSLGFILADAGFDVWMGNSRGNAWSRKHKTLSIDQDEFWAFSYDEMARFDLPAVINFILQKTGQEKIYYVGYSQGTTMGFIAFSTMPELAQKIKMYFALAPIATVKHAKSPGTKFLLLPDMMIKGLFGKKEFLYQTRFLRQLVIYLCGQVILDQICSNIMLLLGGFNTNNMNMSRASVYAAHTLAGTSVQNILHWSQAVNSGELRAFDWGSETKNLEKCNQPTPVRYRVRDMTVPTAMWTGGQDWLSNPEDVKMLLSEVTNLIYHKNIPEWAHVDFIWGLDAPHRMYNEIIHLMQQEETNLSQGRCEAVL

SEQ ID NO: 51830 - protein, 383 aa, Homo sapiens
MTRPLDRKQSEIIQHQGYPCEEYEVATEDGYILSVNRIPRGLVQPKKTGSRPVVLLQHGLVGGASNWISNLPNNSLGFILADAGFDVWMGNSRGNAWSRKHKTLSIDQDEFWAFSYDEMARFDLPAVINFILQKTGQEKIYYVGYSQGTTMGFIAFSTMPELAQKIKMYFALAPIATVKHAKSPGTKFLLLPDMMIKGLFGKKEFLYQTRFLRQLVIYLCGQVILDQICSNIMLLLGGFNTNNMNMSRASVYAAHTLAGTSVQNILHWSQAVNSGELRAFDWGSETKNLEKCNQPTPVRYRVRDMTVPTAMWTGGQDWLSNPEDVKMLLSEVTNLIYHKNIPEWAHVDFIWGLDAPHRMYNEIIHLMQQEETNLSQGRCEAVL

SEQ ID NO: 51831 - protein, 398 aa, Homo sapiens
MMWLLLTTTCLICGTLNAGGFLDLENEVNPEVWMNTSEIIIYNGYPSEEYEVTTEDGYILLVNRIPYGRTHARSTGPRPVVYMQHALFADNAYWLENYANGSLGFLLADAGYDVWMGNSRGNTWSRRHKTLSETDEKFWAFSFDEMAKYDLPGVIDFIVNKTGQEKLYFIGHSLGTTIGFVAFSTMPELAQRIKMNFALGPTISFKYPTGIFTRFFLLPNSIIKAVFGTKGFFLEDKKTKIASTKICNNKILWLICSEFMSLWAGSNKKNMNQSRMDVYMSHAPTGSSVHNILHIKQLYHSDEFRAYDWGNDADNMKHYNQSHPPIYDLTAMKVPTAIWAGGHDVLVTPQDVARILPQIKSLHYFKLLPDWNHFDFVWGLDAPQRMYSEIIALMKAYS

SEQ ID NO: 51832 - protein, 499 aa, Homo sapiens
MDTSPLCFSILLVLCIFIQSSALGQSLKPEPFGRRAQAVETNKTLHEMKTRFLLFGETNQGCQIRINHPDTLQECGFNSSLPLVMIIHGWSVDGVLENWIWQMVAALKSQPAQPVNVGLVDWITLAHDHYTIAVRNTRLVGKEVAALLRWLEESVQLSRSHVHLIGYSLGAHVSGFAGSSIGGTHKIGRITGLDAAGPLFEGSAPSNRLSPDDANFVDAIHTFTREHMGLSVGIKQPIGHYDFYPNGGSFQPGCHFLELYRHIAQHGFNAITQTIKCSHERSVHLFIDSLLHAGTQSMAYPCGDMNSFSQGLCLSCKKGRCNTLGYHVRQEPRSKSKRLFLVTRAQSPFKVYHYQFKIQFINQTETPIQTTFTMSLLGTKEKMQKIPITLGKGIASNKTYSFLITLDVDIGELIMIKFKWENSAVWANVWDTVQTIIPWSTGPRHSGLVLKTIRVKAGETQQRMTFCSENTDDLLLRPTQEKIFVKCEIKSKTSKRKIR

SEQ ID NO: 51833 - protein, 499 aa, Homo sapiens; identical to SEQ ID NO: 51832

SEQ ID NO: 51834 - protein, 1076 aa, Homo sapiens
MEPGSKSVSRSDWQPEPHQRPITPLEPGPEKTPIAQPESKTLQGSNTQQKPASNQRPLTQQETPAQHDAESQKEPRAQQKSASQEEFLAPQKPAPQQSPYIQRVLLTQQEAASQQGPGLGKESITQQEPALRQRHVAQPGPGPGEPPPAQQEAESTPAAQAKPGAKREPSAPTESTSQETPEQSDKQTTPVQGAKSKQGSLTELGFLTKLQELSIQRSALEWKALSEWVTDSESESDVGSSSDTDSPATMGGMVAQGVKLGFKGKSGYKVMSGYSGTSPHEKTSARNHRHYQDTASRLIHNMDLRTMTQSLVTLAEDNIAFFSSQGPGETAQRLSGVFAGVREQALGLEPALGRLLGVAHLFDLDPETPANGYRSLVHTARCCLAHLLHKSRYVASNRRSIFFRTSHNLAELEAYLAALTQLRALVYYAQRLLVTNRPGVLFFEGDEGLTADFLREYVTLHKGCFYGRCLGFQFTPAIRPFLQTISIGLVSFGEHYKRNETGLSVAASSLFTSGRFAIDPELRGAEFERITQNLDVHFWKAFWNITEMEVLSSLANMASATVRVSRLLSLPPEAFEMPLTADPTLTVTISPPLAHTGPGPVLVRLISYDLREGQDSEELSSLIKSNGQRSLELWPRPQQAPRSRSLIVHFHGGGFVAQTSRSHEPYLKSWAQELGAPIISIDYSLAPEAPFPRALEECFFAYCWAIKHCALLGSTGERICLAGDSAGGNLCFTVALRAAAYGVRVPDGIMAAYPATMLQPAASPSRLLSLMDPLLPLSVLSKCVSAYAGAKTEDHSNSDQKALGMMGLVRRDTALLLRDFRLGASSWLNSFLELSGRKSQKMSEPIAEPMRRSVSEAALAQPQGPLGTDSLKNLTLRDLSLRGNSETSSDTPEMSLSAETLSPSTPSDVNFLLPPEDAGEEAEAKNELSPMDRGLGVRAAFPEGFHPRRSSQGATQMPLYSSPIVKNPFMSPLLAPDSMLKSLPPVHIVACALDPMLDDSVMLARRLRNLGQPVTLRVVEDLPHGFLTLAALCRETRQAAELCVERIRLVLTPPAGAGPSGETGAAGVDGGCGGRH

SEQ ID NO: 51835 - protein, 451 aa, Homo sapiens
MLRFYLFISLLCLSRSDAEETCPSFTRLSFHSAVVGTGLNVRLMLYTRKNLTCAQTINSSAFGNLNVTKKTTFIVHGFRPTGSPPVWMDDLVKGLLSVEDMNVVVVDWNRGATTLIYTHASSKTRKVAMVLKEFIDQMLAEGASLDDIYMIGVSLGAHISGFVGEMYDGWLGRITGLDPAGPLFNGKPHQDRLDPSDAQFVDVIHSDTDALGYKEPLGNIDFYPNGGLDQPGCPKTILGGFQYFKCDHQRSVYLYLSSLRESCTITAYPCDSYQDYRNGKCVSCGTSQKESCPLLGYYADNWKDHLRGKDPPMTKAFFDTAEESPFCMYHYFVDIITWNKNVRRGDITIKLRDKAGNTTESKINHEPTTFQKYHQVSLLARFNQDLDKVAAISLMFSTGSLIGPRYKLRILRMKLRSLAHPERPQLCRYDLVLMENVETVFQPILCPELQL

SEQ ID NO: 51836 - protein, 481 aa, Homo sapiens
MLLKCLHNNLCQKYSAHAFQFSPRNVLWLLVVCLRSDNKRPCLEFSQLSVKDSFRDLFIPRIETILMMYTRNNLNCAEPLFEQNNSLNVNFNTQKKTVWLIHGYRPVGSIPLWLQNFVRILLNEEDMNVIVVDWSRGATTFIYNRAVKNTRKVAVSLSVHIKNLLKHGASLDNFHFIGVSLGAHISGFVGKIFHGQLGRITGLDPAGPRFSRKPPYSRLDYTDAKFVDVIHSDSNGLGIQEPLGHIDFYPNGGNKQPGCPKSIFSGIQFIKCNHQRAVHLFMASLETNCNFISFPCRSYKDYKTSLCVDCDCFKEKSCPRLGYQAKLFKGVLKERMEGRPLRTTVFLDTSGTYPFCTYYFVLSIIVPDKTMMDGSFSFKLLNQLGMIEEPRLYEKNKPFYKLQEVKILAQFYNDFVNISSIGLTYFQSSNLQCSTCTYKIQRLMLKSLTYPERPPLCRYNIVLKDREEVFLNPNTCTPKNT

SEQ ID NO: 51837 - protein, 156 aa, Homo sapiens
MNVIVVDWSRGATTFIYNRAVKNTRKVAVSLSVHIKNLLKHGASLDNFHFIGVSLGAHISGFVGKIFHGQLGRITGLDPAGPRFSRKPPYSRLDYTDAKFVDVIHSDSNGIQFIKCNHQRAVHLFMASLETNCNFISFPCRSYKDYKTSLCVDCDC

SEQ ID NO: 51838 - protein, 141 aa, Homo sapiens
  VARIANT 1: note = MOD_RES - Any amino acid
XYNRAVKNTRKVAVSLSVHIKNLLKHGASLDNFHFIGVSLGAHISGFVGKIFHGQLGRITGLDPAGPRFSRKPPYSRLDYTDAKFVDVIHSDSNGIQFIKCNHQRAVHLFMASLETNCNFISFPCRSYKDYKTSLCVDCDC

SEQ ID NO: 51839 - protein, 460 aa, Homo sapiens
MRVYIFLCLMCWVRSDNKRPCLEFSQLSVKDSFRDLFIPRIETILMMYTRNNLNCAEPLFEQNNSLNVNFNTQKKTVWLIHGYRPVGSIPLWLQNFVRILLNEEDMNVIVVDWSRGATTFIYNRAVKNTRKVAVSLSVHIKNLLKHGASLDNFHFIGVSLGAHISGFVGKIFHGQLGRITGLDPAGPRFSRKPPYSRLDYTDAKFVDVIHSDSNGLGIQEPLGHIDFYPNGGNKQPGCPKSIFSGIQFIKCNHQRAVHLFMASLETNCNFISFPCRSYKDYKTSLCVDCDCFKEKSCPRLGYQAKLFKGVLKERMEGRPLRTTVFLDTSGTYPFCTYYFVLSIIVPDKTMMDGSFSFKLLNQLGMIEEPRLYEKNKPFYKLQEVKILAQFYNDFVNISSIGLTYFQSSNLQCSTCTYKIQRLMLKSLTYPERPPLCRYNIVLKDREEVFLNPNTCTPKNT

SEQ ID NO: 51840 - protein, 890 aa, Homo sapiens
MNYVGQLAGQVFVTVKELYKGLNPATLSGCIDIIVIRQPNGNLQCSPFHVRFGKMGVLRSREKVVDIEINGESVDLHMKLGDNGEAFFVQETDNDQEVIPMHLATSPILSEGASRMECQLKRGSVDRMRGLDPSTPAQVIAPSETPSSSSVVKKRRKRRRKSQLDSLKRDDNMNTSEDEDMFPIEMSSDEAMELLESSRTLPNDIPPFQDDIPEENLSLAVIYPQSASYPNSDREWSPTPSPSGSRPSTPKSDSELVSKSTERTGQKNPEMLWLWGELPQAAKSSSPHKMKESSPLSSRKICDKSHFQAIHSESSDTFSDQSPTLVGGALLDQNKPQTEMQFVNEEDLETLGAAAPLLPMIEELKPPSASVVQTANKTDSPSRKRDKRSRHLGADGVYLDDLTDMDPEVAALYFPKNGDPSGLAKHASDNGARSANQSPQSVGSSGVDSGVESTSDGLRDLPSIAISLCGGLSDHREITKDAFLEQAVSYQQFVDNPAIIDDPNLVVKIGSKYYNWTTAAPLLLAMQAFQKPLPKATVESIMRDKMPKKGGRWWFSWRGRNTTIKEESKPEQCLAGKAHSTGEQPPQLSLATRVKHESSSSDEERAAAKPSNAGHLPLLPNVSYKKTLRLTSEQLKSLKLKNGPNDVVFSVTTQYQGTCRCEGTIYLWNWDDKVIISDIDGTITRSDTLGHILPTLGKDWTHQGIAKLYHKVSQNGYKFLYCSARAIGMADMTRGYLHWVNERGTVLPQGPLLLSPSSLFSALHREVIEKKPEKFKVQCLTDIKNLFFPNTEPFYAAFGNRPADVYSYKQVGVSLNRIFTVNPKGELVQEHAKTNISSYVRLCEVVDHVFPLLKRSHSSDFPCSDTFSNFTFWREPLPPFENQDIHSASA

SEQ ID NO: 51841 - protein, 620 aa, Homo sapiens
MLWLWGELPQAAKSSSPHKMKESSPLSSRKICDKSHFQAIHSESSDTFSDQSPTLVGGALLDQNKPQTEMQFVNEEDLETLGAAAPLLPMIEELKPPSASVVQTANKTDSPSRKRDKRSRHLGADGVYLDDLTDMDPEVAALYFPKNGDPSGLAKHASDNGARSANQSPQSVGSSGVDSGVESTSDGLRDLPSIAISLCGGLSDHREITKDAFLEQAVSYQQFVDNPAIIDDPNLVVKIGSKYYNWTTAAPLLLAMQAFQKPLPKATVESIMRDKMPKKGGRWWFSWRGRNTTIKEESKPEQCLAGKAHSTGEQPPQLSLATRVKHESSSSDEERAAAKPSNAGHLPLLPNVSYKKTLRLTSEQLKSLKLKNGPNDVVFSVTTQYQGTCRCEGTIYLWNWDDKVIISDIDGTITRSDTLGHILPTLGKDWTHQGIAKLYHKVSQNGYKFLYCSARAIGMADMTRGYLHWVNERGTVLPQGPLLLSPSSLFSALHREVIEKKPEKFKVQCLTDIKNLFFPNTEPFYAAFGNRPADVYSYKQVGVSLNRIFTVNPKGELVQEHAKTNISSYVRLCEVVDHVFPLLKRSHSSDFPCSDTFSNFTFWREPLPPFENQDIHSASA

SEQ ID NO: 51842 - protein, 932 aa, Homo sapiens
MSRVQTMNYVGQLAGQVFVTVKELYKGLNPATLSGCIDIIVIRQPNGNLQCSPFHVRFGKMGVLRSREKVVDIEINGESVDLHMKLGDNGEAFFVQETDNDQEVIPMHLATSPILSEGASRMECQLKRGSVDRMRGLDPSTPAQVIAPSETPSSSSVVKKRRKRRRKSQLDSLKRDDNMNTSEDEDMFPIEMSSDEAMELLESSRTLPNDIPPFQDDIPEENLSLAVIYPQSASYPNSDREWSPTPSSLVDCKRTAPHLAVAAEGGLSSSCPPQSSLFHPSESPSGSRPSTPKSDSELVSKSTERTGQKNPEMLWLWGELPQAAKSSSPHKMKESSPLSSRKICDKSHFQAIHSESSDTFSDQSPTLVGGALLDQNKPQTEMQFVNEEDLETLGAAAPLLPMIEELKPPSASVVQTANKTDSPSRKRDKRSRHLGADGVYLDDLTDMDPEVAALYFPKNGDPSGLAKHASDNGARSANQSPQSVGSSGVDSGVESTSDGLRDLPSIAISLCGGLSDHREITKDAFLEQAVSYQQFVDNPAIIDDPNLVVKIGSKYYNWTTAAPLLLAMQAFQKPLPKATVESIMRDKMPKKGGRWWFSWRGRNTTIKEESKPEQCLAGKAHSTGEQPPQLSLATRVKHESSSSDEERAAAKPSNAGHLPLLPNVSYKKTLRLTSEQLKSLKLKNGPNDVVFSVTTQYQGTCRCEGTIYLWNWDDKVIISDIDGTITRSDTLGHILPTLGKDWTHQGIAKLYHKVSQNGYKFLYCSARAIGMADMTRGYLHWVNERGTVLPQGPLLLSPSSLFSALHREVIEKKPEKFKVQCLTDIKNLFFPNTEPFYAAFGNRPADVYSYKQVGVSLNRIFTVNPKGELVQEHAKTNISSYVRLCEVVDHVFPLLKRSHSSDFPCSDTFSNFTFWREPLPPFENQDIHSASA

SEQ ID NO: 51843 - protein, 391 aa, Homo sapiens
MQAFQKPLPKSSCLSYLHVILDAIRFCFSKIFNAQIATVESIMRDKMPKKGGRWWFSWRGRNTTIKEESKPEQCLAGKAHSTGEQPPQLSLATRVKHESSSSDEERAAAKPSNAGHLPLLPNVSYKKTLRLTSEQLKSLKLKNGPNDVVFSVTTQYQGTCRCEGTIYLWNWDDKVIISDIDGTITRSDTLGHILPTLGKDWTHQGIAKLYHKVSQNGYKFLYCSARAIGMADMTRGYLHWVNERGTVLPQGPLLLSPSSLFSALHREVIEKKPEKFKVQCLTDIKNLFFPNTEPFYAAFGNRPADVYSYKQVGVSLNRIFTVNPKGELVQEHAKTNISSYVRLCEVVDHVFPLLKRSHSSDFPCSDTFSNFTFWREPLPPFENQDIHSASA

SEQ ID NO: 51844 - protein, 28 aa, Homo sapiens
MNYVGQLAGQVFVTVKELYKGLNPATLS

SEQ ID NO: 51845 - protein, 896 aa, Homo sapiens
MSRVQTMNYVGQLAGQVFVTVKELYKGLNPATLSGCIDIIVIRQPNGNLQCSPFHVRFGKMGVLRSREKVVDIEINGESVDLHMKLGDNGEAFFVQETDNDQEVIPMHLATSPILSEGASRMECQLKRGSVDRMRGLDPSTPAQVIAPSETPSSSSVVKKRRKRRRKSQLDSLKRDDNMNTSEDEDMFPIEMSSDEAMELLESSRTLPNDIPPFQDDIPEENLSLAVIYPQSASYPNSDREWSPTPSPSGSRPSTPKSDSELVSKSTERTGQKNPEMLWLWGELPQAAKSSSPHKMKESSPLSSRKICDKSHFQAIHSESSDTFSDQSPTLVGGALLDQNKPQTEMQFVNEEDLETLGAAAPLLPMIEELKPPSASVVQTANKTDSPSRKRDKRSRHLGADGVYLDDLTDMDPEVAALYFPKNGDPSGLAKHASDNGARSANQSPQSVGSSGVDSGVESTSDGLRDLPSIAISLCGGLSDHREITKDAFLEQAVSYQQFVDNPAIIDDPNLVVKIGSKYYNWTTAAPLLLAMQAFQKPLPKATVESIMRDKMPKKGGRWWFSWRGRNTTIKEESKPEQCLAGKAHSTGEQPPQLSLATRVKHESSSSDEERAAAKPSNAGHLPLLPNVSYKKTLRLTSEQLKSLKLKNGPNDVVFSVTTQYQGTCRCEGTIYLWNWDDKVIISDIDGTITRSDTLGHILPTLGKDWTHQGIAKLYHKVSQNGYKFLYCSARAIGMADMTRGYLHWVNERGTVLPQGPLLLSPSSLFSALHREVIEKKPEKFKVQCLTDIKNLFFPNTEPFYAAFGNRPADVYSYKQVGVSLNRIFTVNPKGELVQEHAKTNISSYVRLCEVVDHVFPLLKRSHSSDFPCSDTFSNFTFWREPLPPFENQDIHSASA

SEQ ID NO: 51846 - protein, 96 aa, Homo sapiens
MNYVGQLAGQVFVTVKELYKGLNPATLSGCIDIIVIRQPNGNLQCSPFHVRFGKMGVLRSREKVVDIEINGESVDLHMKLGDNGEAFFVQETDNDQ

SEQ ID NO: 51847 - protein, 975 aa, Homo sapiens
MGEQDGIRSSSWETSQGKSSPDSAWSWIPIMRDPGWIRNVWSSNINVQTMNYVGQLAGQVFVTVKELYKGLNPATLSGCIDIIVIRQPNGNLQCSPFHVRFGKMGVLRSREKVVDIEINGESVDLHMKLGDNGEAFFVQETDNDQEVIPMHLATSPILSEGASRMECQLKRGSVDRMRGLDPSTPAQVIAPSETPSSSSVVKKRRKRRRKSQLDSLKRDDNMNTSEDEDMFPIEMSSDEAMELLESSRTLPNDIPPFQDDIPEENLSLAVIYPQSASYPNSDREWSPTPSSLVDCKRTAPHLAVAAEGGLSSSCPPQSSLFHPSESPSGSRPSTPKSDSELVSKSTERTGQKNPEMLWLWGELPQAAKSSSPHKMKESSPLSSRKICDKSHFQAIHSESSDTFSDQSPTLVGGALLDQNKPQTEMQFVNEEDLETLGAAAPLLPMIEELKPPSASVVQTANKTDSPSRKRDKRSRHLGADGVYLDDLTDMDPEVAALYFPKNGDPSGLAKHASDNGARSANQSPQSVGSSGVDSGVESTSDGLRDLPSIAISLCGGLSDHREITKDAFLEQAVSYQQFVDNPAIIDDPNLVVKIGSKYYNWTTAAPLLLAMQAFQKPLPKATVESIMRDKMPKKGGRWWFSWRGRNTTIKEESKPEQCLAGKAHSTGEQPPQLSLATRVKHESSSSDEERAAAKPSNAGHLPLLPNVSYKKTLRLTSEQLKSLKLKNGPNDVVFSVTTQYQGTCRCEGTIYLWNWDDKVIISDIDGTITRSDTLGHILPTLGKDWTHQGIAKLYHKVSQNGYKFLYCSARAIGMADMTRGYLHWVNERGTVLPQGPLLLSPSSLFSALHREVIEKKPEKFKVQCLTDIKNLFFPNTEPFYAAFGNRPADVYSYKQVGVSLNRIFTVNPKGELVQEHAKTNISSYVRLCEVVDHVFPLLKRSHSSDFPCSDTFSNFTFWREPLPPFENQDIHSASA

SEQ ID NO: 51848 - protein, 459 aa, Homo sapiens
MSRVQTMNYVGQLAGQVFVTVKELYKGLNPATLSGCIDIIVIRQPNGNLQCSPFHVRFGKMGVLRSREKVVDIEINGESVDLHMKLGDNGEAFFVQETDNDQEVIPMHLATSPILSEGASRMECQLKRGSVDRMRGLDPSTPAQVIAPSETPSSSSVVKKRRKRRRKSQLDSLKRDDNMNTSEDEDMFPIEMSSDEAMELLESSRTLPNDIPPFQDDIPEENLSLAVIYPQSASYPNSDREWSPTPSSLVDCKRTAPHLAVAAEGGLSSSCPPQSSLFHPSESPSGSRPSTPKSDSELVSKSTERTGQKNPEMLWLWGELPQAAKSSSPHKMKESSPLSSRKICDKSHFQAIHSESSDTFSDQSPTLVGGALLDQNKPQTEMQFVNEEDLETLGAAAPLLPMIEELKPPSASVVQTANKTDSPSRKRDKRSRHLGADGVYLDDLTDMDPEVAALYFPKK

SEQ ID NO: 51849 - protein, 896 aa, Homo sapiens
MNYVGQLAGQVIVTVKELYKGINQATLSGCIDVIVVQQQDGSYQCSPFHVRFGKLGVLRSKEKVIDIEINGSAVDLHMKLGDNGEAFFVEETEEEYEKLPAYLATSPIPTEDQFFKDIDTPLVKSGGDETPSQSSDISHVLETETIFTPSSVKKKKRRRKKYKQDSKKEEQAASAAAEDTCDVGVSSDDDKGAQAARGSSNASLKEEECKEPLLFHSGDHYPLSDGDWSPLETTYPQTACPKSDSELEVKPAESLLRSESHMEWTWGGFPESTKVSKRERSDHHPRTATITPSENTHFRVIPSEDNLISEVEKDASMEDTVCTIVKPKPRALGTQMSDPTSVAELLEPPLESTQISSMLDADHLPNAALAEAPSESKPAAKVDSPSKKKGVHKRSQHQGPDDIYLDDLKGLEPEVAALYFPKSESEPGSRQWPESDTLSGSQSPQSVGSAAADSGTECLSDSAMDLPDVTLSLCGGLSENGEISKEKFMEHIITYHEFAENPGLIDNPNLVIRIYNRYYNWALAAPMILSLQVFQKSLPKATVESWVKDKMPKKSGRWWFWRKRESMTKQLPESKEGKSEAPPASDLPSSSKEPAGARPAENDSSSDEGSQELEESITVDPIPTEPLSHGSTTSYKKSLRLSSDQIAKLKLHDGPNDVVFSITTQYQGTCRCAGTIYLWNWNDKIIISDIDGTITKSDALGQILPQLGKDWTHQGIAKLYHSINENGYKFLYCSARAIGMADMTRGYLHWVNDKGTILPRGPLMLSPSSLFSAFHREVIEKKPEKFKIECLNDIKNLFAPSKQPFYAAFGNRPNDVYAYTQVGVPDCRIFTVNPKGELIQERTKGNKSSYHRLSELVEHVFPLLSKEQNSAFPCPEFSSFCYWRDPIPEVDLDDLS

SEQ ID NO: 51850 - protein, 233 aa, Homo sapiens
MNYVGQLAGQVIVTVKELYKGINQATLSGCIDVIVVQQQDGSYQCSPFHVRFGKLGVLRSKEKVIDIEINGSAVDLHMKLGDNGEAFFVEETEEEYEKLPAYLATSPIPTEDQFFKDIDTPLVKSGGDETPSQSSDISHVLETETIFTPSSVKKKKRRRKKYKQDSKKEEQAASAAAEDTCDVGVSSDDDKGAQAARGSSNASLKEEECKEPLLFHSGDHYPLSDGDWSPLET

SEQ ID NO: 51851 - protein, 851 aa, Homo sapiens
MNYVGQLAETVFGTVKELYRGLNPATLSGGIDVLVVKQVDGSFRCSPFHVRFGKLGVLRSREKVVDIELNGEPVDLHMKLGDSGEAFFVQELESDDEHVPPGLCTSPIPWGGLSGFPSDSQLGTASEPEGLVMAGTASTGRRKRRRRRKPKQKEDAVATDSSPEELEAGAESELSLPEKLRPEPPGVQLEEKSSLQPKDIYPYSDGEWPPQASLSAGELTSPKSDSELEVRTPEPSPLRAESHMQWAWGRLPKVARAERPESSVVLEGRAGATSPPRGGPSTPSTSVAGGVDPLGLPIQQTEAGADLQPDTEDPTLVGPPLHTPETEESKTQSSGDMGLPPASKSWSWATLEVPVPTGQPERVSRGKGSPKRSQHLGPSDIYLDDLPSLDSENAALYFPQSDSGLGARRWSEPSSQKSLRDPNPEHEPEPTLDTVDTIALSLCGGLADSRDISLEKFNQHSVSYQDLTKNPGLLDDPNLVVKINGKHYNWAVAAPMILSLQAFQKNLPKSTMDKLEREKMPRKGGRWWFSWRRRDFLAEERSAQKEKTAAKEQQGEKTEVLSSDDDAPDSPVILEIPSLPPSTPPSTPTYKKSLRLSSDQIRRLNLQEGANDVVFSVTTQYQGTCRCKATIYLWKWDDKVVISDIDGTITKSDALGHILPQLGKDWTHQGITSLYHKIQLNGYKFLYCSARAIGMADLTKGYLQWVSEGGCSLPKGPILLSPSSLFSALHREVIEKKPEVFKVACLSDIQQLFLPHGQPFYAAFGNRPNDVFAYRQVGLPESRIFTVNPRGELIQELIKNHKSTYERLGEVVELLFPPVARGPSTDLANPEYSNFCYWREPLPAVDLDTLD

SEQ ID NO: 51852 - protein, 413 aa, Homo sapiens
MGLPPASKSWSWATLEVPVPTGQPERVSRGKGSPKRSQHLGPSDIYLDDLPSLDSENAALYFPQSDSGLGARRWSEPSSQKSLRDPNPEHEPEPTLDTVDTIALSLCGGLADSRDISLEKFNQHSVSYQDLTKNPGLLDDPNLVVKINGKHYNWAVAAPMILSLQAFQKNLPKRSAQKEKTAAKEQQGEKTEVLSSDDDAPDSPVILEIPSLPPSTPPSTPTYKKSLRLSSDQIRRLNLQEGANDVVFSVTTQYQGTCRCKATIYLWKWDDKVVISDIDGTITKSDALGHILPQLGKDWTHQGITSLYHKIQLNGYKFLYCSARAIGMADLTKGYLQWVSEGGCSLPKGPILLSPSSLFSALHREVIEKKPEVFKVACLSDIQQLFLPHGQPFYAAFGNRPNDVFAYRQVGLP

SEQ ID NO: 51853 - protein, 270 aa, Homo sapiens
  VARIANT 1: note = MOD_RES - Any amino acid
XVKINGKHYNWAVAAPMILSLQAFQKNLPKRSAQKEKTAAKEQQGEKTEVLSSDDDAPDSPVILEIPSLPPSTPPSTPTYKKSLRLSSDQIRRLNLQEGANDVVFSVTTQYQGTCRCKATIYLWKWDDKVVISDIDGTITKSDALGHILPQLGKDWTHQGITSLYHKIQLNGYKFLYCSARAIGMADLTKGYLQWVSEGGCSLPKGPILLSPSSLFSALHREVIEKKPEVFKVACLSDIQQLFLPHGQPFYAAFGNRPNDVFAYRQVGLP

SEQ ID NO: 51854 - protein, 176 aa, Homo sapiens
MKPLLLAVSLGLIAALQAHHLLASDEEIQDVSGTWYLKAMTVDREFPEMNLESVTPMTLTTLEGGNLEAKVTMLISGRCQEVKAVLEKTDEPGKYTADGGKHVAYIIRSHVKDHYIFYCEGELHGKPVRGVKLVGRDPKNNLEALEDFEKAAGARGLSTESILIPRQSETCSPGSD

SEQ ID NO: 51855 - protein, 176 aa, Homo sapiens; identical to SEQ ID NO: 51854

SEQ ID NO: 51856 - protein, 187 aa, Homo sapiens
MRQGLLVLALVLVLVLVLAAGSQVQEWYPRESHALNWNKFSGFWYILATATDAQGFLPARDKRKLGASVVKVNKVGQLRVLLAFRRGQGCGRAQPRHPGTSGHLWASLSVKGVKAFHVLSTDYSYGLVYLRLGRATQNYKNLLLFHRQNVSSFQSLKEFMDACDILGLSKAAVILPKDASRTHTILP

SEQ ID NO: 51857 - protein, 200 aa, Homo sapiens
MRQGLLVLALVLVLVLVLAAGSQVQEWYPRESHALNWNKFSGFWYILATATDAQGFLPARDKRKLGASVVKVNKVGQLRVLLAFRRLKGCQSQEVILRKDGKKPVFGNACAYAAGPREGQEGVKGVKAFHVLSTDYSYGLVYLRLGRATQNYKNLLLFHRQNVSSFQSLKEFMDACDILGLSKAAVILPKDASRTHTILP

SEQ ID NO: 51858 - protein, 90 aa, Homo sapiens
TFELSDDGRFEVWNAMTRGQHCDTWSYVLIPAAQPGQFTVDHGVDTRAGWPSSGSACWAGAGCCLPGRWTSSSAWAELRASRMTTSSSQM

SEQ ID NO: 51859 - protein, 192 aa, Homo sapiens
MRLLCGLWLWLSLLKVLQAQTPTPLPLPPPMQSFQGNQFQGEWFVLGLAGNSFRPEHRALLNAFTATFELSDDGRFEVWNAMTRGQHCDTWSYVLIPAAQPGQFTVDHGVEPGADREETRVVDSDYTQFALMLSRRHTSRLAVLRISLLGRSWLLPPGTLDQFICLGRAQGLSDDNIVFPDVTGWSPQASVC

SEQ ID NO: 51860 - protein, 198 aa, Homo sapiens
MPLGLLWLGLALLGALHAQAQDSTSDLIPAPPLSKVPLQQNFQDNQFQGKWYVVGLAGNAILREDKDPQKMYATIYELKEDKSYNVTSVLFRKKKCDYWIRTFVPGCQPGEFTLGNIKSYPGLTSYLVRVVSTNYNQHAMVFFKKVSQNREYFKITLYGRTKELTSELKENFIRFSKSLGLPENHIVFPVPIDQCIDG

SEQ ID NO: 51861 - protein, 200 aa, Homo sapiens
MPLGLLWLGLALLGALHAQAQDSTSDLIPAPPLSKVPLQQNFQDNQFQGKWYVVGLAGNAILREDKDPQKMYATIYELKEDKSYNVTSVLFREKAQKCDYWIRTFVPGCQPGEFTLGNIKSYPGLTSYLVRVVSTNYNQHAMVFFKKVSQNREYFKITLYGRTKELTSELKENFIRFSKSLGLPENHIVFPVPIDQCIDG

SEQ ID NO: 51862 - protein, 200 aa, Homo sapiens
MPLGLLWLGLALLGALHAQAQDSTSDLIPAPPLSKVPLQQNFQDNQFQGKWYVVGLAGNAILREDKDPQKMYATIYELKEDKSYNVTSVLFRQWKKKCDYWIRTFVPGCQPGEFTLGNIKSYPGLTSYLVRVVSTNYNQHAMVFFKKVSQNREYFKITLYGRTKELTSELKENFIRFSKSLGLPENHIVFPVPIDQCIDG

SEQ ID NO: 51863 - protein, 198 aa, Homo sapiens; identical to SEQ ID NO: 51860

SEQ ID NO: 51864 - protein, 198 aa, Homo sapiens
MPLGLLWLGLALLGALHAQAQDSTSDLIPAPPLSKVPLQQNFQDNQFQGKWYVVGLAGNAILREDKDPQKMYATIYELKEDKSYNVTSVLFRKKKCDYWIRTFVPGCQPGEFTLGNIKSYPGLTSYLVRVVSTNYNQHAMVFFKKVSQNREYFKITLYGRTKELTSELKENFIRFSKSLGLPENHIVFPVPIGNGQSG

SEQ ID NO: 51865 - protein, 163 aa, Homo sapiens
MGGLLLAAFLALVSVPRAQAVWLGRLDPEQLLGPWYVLAVASREKGFAMEKDMKNVVGVVVTLTPENNLRTLSSQHGLGGCDQSVMDLIKRNSGWVFENPSIGVLELWVLATNFRDYAIIFTQLEFGDEPFNTVELYSLTETASQEAMGLFTKWSRSLGFLSQ

SEQ ID NO: 51866 - protein, 152 aa, Homo sapiens
MEELDRQKIGGFWREVGVASDQSLVLTAPKRVEGLFLTLSGSNLTVKVAYNSSGSCEIEKIVGSEIDSTGKFAFPGHREIHVLDTDYEGYAILRVSLMWRGRNFRVLKYFTRSLEDKDRLGFWKFRELTADTGLYLAARPGRCAELLKEELI

SEQ ID NO: 51867 - protein, 176 aa, Homo sapiens
MALLLLSLGLSLIAAQEFDPHTVMQRNYNVARVSGVWYSIFMASDDLNRIKENGDLRVFVRNIEHLKNGSLIFDFEYMVQGECVAVVVVCEKTEKNGEYSINYEGQNTVAVSETDYRLFITFHLQNFRNGTETHTLALYETCEKYGLGSQNIIDLTNKDPCYSKHYRSPPRPPMRW

SEQ ID NO: 51868 - protein, 372 aa, Homo sapiens
MSLRCGDAARTLGPRVFGRYFCSPVRPLSSLPDKKKELLQNGPDLQDFVSGDLADRSTWDEYKGNLKRQKGERLRLPPWLKTEIPMGKNYNKLKNTLRNLNLHTVCEEARCPNIGECWGGGEYATATATIMLMGDTCTRGCRFCSVKTARNPPPLDASEPYNTAKAIAEWGLDYVVLTSVDRDDMPDGGAEHIAKTVSYLKERNPKILVECLTPDFRGDLKAIEKVALSGLDVYAHNVETVPELQSKVRDPRANFDQSLRVLKHAKKVQPDVISKTSIMLGLGENDEQVYATMKALREADVDCLTLGQYMQPTRRHLKVEEYITPEKFKYWEKVGNELGFHYTASGPLVRSSYKAGEFFLKNLVAKRKTKDL

SEQ ID NO: 51869 - protein, 322 aa, Homo sapiens
MSLRCGDAARTLGPRVFGRYFCSPVRPLSSLPDKKKELLQNGPDLQDFVSGDLADRSTWDEYKGNLKRQKGERLRLPPWLKTEIPMGKNYNKLKNTLRNLNLHTVCEEARCPNIGECWGGGEYATATATIMLMGDTCTRGCRFCSVKTARNPPPLDASEPYNTAKAIAEWGLDYVVLTSVDRDDMPDGGAEHIAKTVSYLKERNPKILVECLTPDFRGDLKAIEKVALSGLDVYAHNVETVPELQSKVRDPRANFDQSLRVLKHAKKVQPDVISKTSIMLGLGENDEQVYATMKALREADVDCLTLGQYMQPTRRHLKVNFS

SEQ ID NO: 51870 - protein, 200 aa, Homo sapiens
MASSLTCTGVIWALLSFLCAATSCVGFFMPYWLWGSQLGKPVSFGTFRRCSYPVHDESRQMMVMVEECGRYASFQGIPSAEWRICTIVTGLGCGLLLLVALTALMGCCVSDLISRTVGRVAGGIQFLGGLLIGAGCALYPLGWDSEEVRQTCGYTSGQFDLGKCEIGWAYYCTGAGATAAMLLCTWLACFSGKKQKHYPY

SEQ ID NO: 51871 - protein, 220 aa, Homo sapiens
MRSSLTMVGTLWAFLSLVTAVTSSTSYFLPYWLFGSQMGKPVSFSTFRRCNYPVRGEGHSLIMVEECGRYASFNAIPSLAWQMCTVVTGAGCALLLLVALAAVLGCCMEELISRMMGRCMGAAQFVGGLLISSGCALYPLGWNSPEIMQTCGNVSNQFQLGTCRLGWAYYCAGGGAAAAMLICTWLSCFAGRNPKPVILVESIMRNTNSYAMELDHCLKP

SEQ ID NO: 51872 - protein, 187 aa, Homo sapiens
MRSSLTMVGTLWAFLSLVTAVTSSTSYFLPYWLFGSQMGKPVSFSTFRRCNYPVRGEGHSLIMVEECGRYASFNAIPSLAWQMCTVVTGAGCALLLLVALAAVLGCCMEELISRMMGRCMGAAQFVGGTCRLGWAYYCAGGGAAAAMLICTWLSCFAGRNPKPVILVESIMRNTNSYAMELDHCLKP

SEQ ID NO: 51873 - protein, 228 aa, Homo sapiens
MCHVIVTCRSMLWTLLSIVVAFAELIAFMSADWLIGKARSRGGVEPAGPGGGSPEPYHPTLGIYARCIRNPGVQHFQRDTLCGPYAESFGEIASGFWQATAIFLAVGIFILCMVALVSVFTMCVQSIMKKSIFNVCGLLQGIAGLFLILGLILYPAGWGCQKAIDYCGHYASAYKPGDCSLGWAFYTAIGGTVLTFICAVFSAQAEIATSSDKVQEEIEEGKNLICLL

SEQ ID NO: 51874 - protein, 228 aa, Homo sapiens; identical to SEQ ID NO: 51873

SEQ ID NO: 51875 - protein, 222 aa, Homo sapiens
MLPAQEAAKLYHTNYVRNSRAIGVLWAIFTICFAIVNVVCFIQPYWIGDGVDTPQAGYFGLFHYCIGNGFSRELTCRGSFTDFSTLPSGAFKAASFFIGLSMMLIIACIICFTLFFFCNTATVYKICAWMQLTSAACLVLGCMIFPDGWDSDEVKRMCGEKTDKYTLGACSVRWAYILAIIGILDALILSFLAFVLGNRQDSLMAEELKAENKVLLSQYSLE

SEQ ID NO: 51876 - protein, 236 aa, Homo sapiens
MPGAAAAAAAAAAAMLPAQEAAKLYHTNYVRNSRAIGVLWAIFTICFAIVNVVCFIQPYWIGDGVDTPQAGYFGLFHYCIGNGFSRELTCRGSFTDFSTLPSGAFKAASFFIGLSMMLIIACIICFTLFFFCNTATVYKICAWMQLTSGDCLVLFDLHFPDGWDSDEVKRMCGEKTDKYTLGACSVRWAYILAIIGILDALILSFLAFVLGNRQDSLMAEELKAENKVLLSQYSLE

SEQ ID NO: 51877 - protein, 232 aa, Homo sapiens
MPGAAAAAAAAAAAMLPAQEAAKLYHTNYVRNSRAIGVLWAIFTICFAIVNVVCFIQPYWIGDGVDTPQAGYFGLFHYCIGNGFSRELTCRGSFTDFSTLPSGAFKAASFFIGLSMMLIIACIICFTLFFFCNTATVYKICAWMQLTSGDCLVLFDLHFPDGWDSDEVKRMCGEKTDKYTLGACSVRWAYILAIIGILDALILSFLAFVLGNRQDSLMAEELKAENKDDGNA

SEQ ID NO: 51878 - protein, 219 aa, Homo sapiens
MVKLLPAQEAAKIYHTNYVRNSRAVGVMWGTLTICFSVLVMALFIQPYWIGDSVNTPQAGYFGLFSYCVGNVLSSELICKGGPLDFSSIPSRAFKTAMFFVALGMFLIIGSIICFSLFFICNTATVYKICAWMQLAAATGLMIGCLVYPDGWDSSEVRRMCGEQTGKYTLGHCTIRWAFMLAILSIGDALILSFLAFVLGYRQDKLLPDDYKADGTEEV

SEQ ID NO: 51879 - protein, 219 aa, Homo sapiens; identical to SEQ ID NO: 51878

SEQ ID NO: 51880 - protein, 481 aa, Homo sapiens
MGALARALPSILLALLLTSTPEALGANPGLVARITDKGLQYAAQEGLLALQSELLRITLPDFTGDLRIPHVGRGRYEFHSLNIHSCELLHSALRPVPGQGLSLSISDSSIRVQGRWKVRKSFFKLQGSFDVSVKGISISVNLLLGSESSGRPTVTASSCSSDIADVEVDMSGDLGWLLNLFHNQIESKFQKVLESRICEMIQKSVSSDLQPYLQTLPVTTEIDSFADIDYSLVEAPRATAQMLEVMFKGEIFHRNHRSPVTLLAAVMSLPEEHNKMVYFAISDYVFNTASLVYHEEGYLNFSITDDMIPPDSNIRLTTKSFRPFVPRLARLYPNMNLELQGSVPSAPLLNFSPGNLSVDPYMEIDAFVLLPSSSKEPVFRLSVATNVSATLTFNTSKITGFLKPGKVKVELKESKVGLFNAELLEALLNYYILNTFYPKFNDKLAEGFPLPLLKRVQLYDLGLQIHKDFLFLGANVQYMRV

SEQ ID NO: 51881 - protein, 477 aa, Homo sapiens [sequence omitted]

SEQ ID NO: 51882 - protein, 161 aa, Homo sapiens
MSVPGPYQAATGPSSAPSAPPSYEETVAVNSYYPTPPAPMPGPTTGLVTGPDGKGMNPPSYYTQPAPIPNNNPITVQTVYVQHPITFLDRPIQMCCPSCNKMIVSQLSYNAGALTWLSCGSLCLLGCIAGCCFIPFCVDALQDVDHYCPNCRALLGTYKRL

SEQ ID NO: 51883 - protein, 228 aa, Homo sapiens
MSVPGPYQAATGPSSAPSAPPSYEETVAVNSYYPTPPAPMPGPTTGLVTGPDGKGMNPPSYYTQPAPIPNNNPITVQTVYVQHPITFLDRPIQMCCPSCNKMIVSQLSYNAGALTWLSCGSLCLLGVHSGLLLHPLLRGCPAGRGPLLSQLQSSPGHLQAFVGLSQTWREPGAAGSPFHLSSSFTPGGGSALVVSPLQGAHLHVFFWGEYVAKLTNLQTPEIAAWSRA

SEQ ID NO: 51884 - protein, 152 aa, Homo sapiens
MSVPGPYQAATGPSSAPSAPPSYEETVAVNSYYPTPPAPMPGPTTGLVTGPDGKGMNPPSYYTQPAPIPNNNPITVQTVYVQHPITFLDRPIQMCCPSCNKMIVSQLSYNAGALTWLSCGSLCLLGQECSGTIVALRSFDLLGSCNPPSSAS

SEQ ID NO: 51885 - protein, 161 aa, Homo sapiens; identical to SEQ ID NO: 51882

SEQ ID NO: 51886 - protein, 2040 aa, Homo sapiens
MEHKEVVLLLLLFLKSAAPEQSHVVQDCYHGDGQSYRGTYSTTVTGRTCQAWSSMTPHQHNRTTENYPNAGLIMNYCRNPDAVAAPYCYTRDPGVRWEYCNLTQCSDAEGTAVAPPTVTPVPSLEAPSEQAPTEQRPGVQECYHGNGQSYRGTYSTTVTGRTCQAWSSMTPHSHSRTPEYYPNAGLIMNYCRNPDAVAAPYCYTRDPGVRWEYCNLTQCSDAEGTAVAPPTVTPVPSLEAPSEQAPTEQRPGVQECYHGNGQSYRGTYSTTVTGRTCQAWSSMTPHSHSRTPEYYPNAGLIMNYCRNPDAVAAPYCYTRDPGVRWEYCNLTQCSDAEGTAVAPPTVTPVPSLEAPSEQAPTEQRPGVQECYHGNGQSYRGTYSTTVTGRTCQAWSSMTPHSHSRTPEYYPNAGLIMNYCRNPDAVAAPYCYTRDPGVRWEYCNLTQCSDAEGTAVAPPTVTPVPSLEAPSEQAPTEQRPGVQECYHGNGQSYRGTYSTTVTGRTCQAWSSMTPHSHSRTPEYYPNAGLIMNYCRNPDAVAAPYCYTRDPGVRWEYCNLTQCSDAEGTAVAPPTVTPVPSLEAPSEQAPTEQRPGVQECYHGNGQSYRGTYSTTVTGRTCQAWSSMTPHSHSRTPEYYPNAGLIMNYCRNPDAVAAPYCYTRDPGVRWEYCNLTQCSDAEGTAVAPPTVTPVPSLEAPSEQAPTEQRPGVQECYHGNGQSYRGTYSTTVTGRTCQAWSSMTPHSHSRTPEYYPNAGLIMNYCRNPDAVAAPYCYTRDPGVRWEYCNLTQCSDAEGTAVAPPTVTPVPSLEAPSEQAPTEQRPGVQECYHGNGQSYRGTYSTTVTGRTCQAWSSMTPHSHSRTPEYYPNAGLIMNYCRNPDPVAAPYCYTRDPSVRWEYCNLTQCSDAEGTAVAPPTITPIPSLEAPSEQAPTEQRPGVQECYHGNGQSYQGTYFITVTGRTCQAWSSMTPHSHSRTPAYYPNAGLIKNYCRNPDPVAAPWCYTTDPSVRWEYCNLTRCSDAEWTAFVPPNVILAPSLEAFFEQALTEETPGVQDCYYHYGQSYRGTYSTTVTGRTCQAWSSMTPHQHSRTPENYPNAGLTRNYCRNPDAEIRPWCYTMDPSVRWEYCNLTQCLVTESSVLATLTVVPDPSTEASSEEAPTEQSPGVQDCYHGDGQSYRGSFSTTVTGRTCQSWSSMTPHWHQRTTEYYPNGGLTRNYCRNPDAEISPWCYTMDPNVRWEYCNLTQCPVTESSVLATSTAVSEQAPTEQSPTVQDCYHGDGQSYRGSFSTTVTGRTCQSWSSMTPHWHQRTTEYYPNGGLTRNYCRNPDAEIRPWCYTMDPSVRWEYCNLTQCPVMESTLLTTPTVVPVPSTELPSEEAPTENSTGVQDCYRGDGQSYRGTLSTTITGRTCQSWSSMTPHWHRRIPLYYPNAGLTRNYCRNPDAEIRPWCYTMDPSVRWEYCNLTRCPVTESSVLTTPTVAPVPSTEAPSEQAPPEKSPVVQDCYHGDGRSYRGISSTTVTGRTCQSWSSMIPHWHQRTPENYPNAGLTENYCRNPDSGKQPWCYTTDPCVRWEYCNLTQCSETESGVLETPTVVPVPSMEAHSEAAPTEQTPVVRQCYHGNGQSYRGTFSTTVTGRTCQSWSSMTPHRHQRTPENYPNDGLTMNYCRNPDADTGPWCFTMDPSIRWEYCNLTRCSDTEGTVVAPPTVIQVPSLGPPSEQDCMFGNGKGYRGKKATTVTGTPCQEWAAQEPHRHSTFIPGTNKWAGLEKNYCRNPDGDINGPWCYTMNPRKLFDYCDIPLCASSSFDCGKPQVEPKKCPGSIVGGCVAHPHSWPWQVSLRTRFGKHFCGGTLISPEWVLTAAHCLKKSSRPSSYKVILGAHQEVNLESHVQEIEVSRLFLEPTQADIALLKLSRPAVITDKVMPACLPSPDYMVTARTECYITGWGETQGTFGTGLLKEAQLLVIENEVCNHYKYICAEHLARGTDSCQGDSGGPLVCFEKDKYILQGVTSWGLGCARPNKPGVYARVSRFVTWIEGMMRNN

SEQ ID NO: 51887 - protein, 2040 aa, Homo sapiens; identical to SEQ ID NO: 51886

SEQ ID NO: 51888 - protein, 1533 aa, Homo sapiens
MMQLTLNTLFPVVSTPAITYIVTVFTGDVRGAGTKSKIYLVMYGARGNKNSGKIFLEGGVFDRGRTDIFHIELAVLLSPLSRVSVGHGNVGVNRGWFCEKVVILCPFTGIQQTFPCSNWLDEKKADGLIERQLYEMVSLRKKRLKKFPWSLWVWTTDLKKAGTNSPIFIQIYGQKGRTDEILLNPNNKWFKPGIIEKFRIELPDLGRFYKIRVWHDKRSSGSGWHLERMTLMNTLNKDKYNFNCNRWLDANEDDNEIVREMTAEGPTVRRIMGMARYHVTVCTGELEGAGTDANVYLCLFGDVGDTGERLLYNCRNNTDLFEKGNADEFTIESVTMRNVRRVRIRHDGKGSGSGWYLDRVLVREEGQPESDNVEFPCLRWLDKDKDDGQLVRELLPSDSSATLKNFRYHISLKTGDVSGASTDSRVYIKLYGDKSDTIKQVLLVSDNNLKDYFERGRVDEFTLETLNIGNINRLVIGHDSTGMHASWFLGSVQIRVPRQGKQYTFPANRWLDKNQADGRLEVELYPSEVVEIQKLVHYEVEIWTGDVGGAGTSARVYMQIYGEKGKTEVLFLSSRSKVFERASKDTFQLEAADVGEVYKLRLGHTGEGFGPSWFVDTVWLRHLVVREVDLTPEEEARKKKEKDKLRQLLKKERLKAKLQRKKKKRKGSDEEDEGEEEESSSSEESSSEEEEMEEEEEEEEFGPGMQEVIEQHKFEAHRWLARGKEDNELVVELVPAGKPGPERNTYEVQVVTGNVPKAGTDANVYLTIYGEEYGDTGERPLKKSDKSNKFEQGQTDTFTIYAIDLGALTKIRIRHDNTGNRAGWFLDRIDITDMNNEITYYFPCQRWLAVEEDDGQLSRELLPVDESYVLPQSEEGRGGGDNNPLDNLALEQKDKSTTFSVTIKTGVKKNAGTDANVFITLFGTQDDTGMTLLKSSKTNSDKFERDSIEIFTVETLDLGDLWKVRLGHDNTGKAPGWFVDWVEVDAPSLGKCMTFPCGRWLAKNEDDGSIIRDLFHAELQTRLYTPFVPYEITLYTSDVFAAGTDANIFIIIYGCDAVCTQQKYLCTNKREQKQFFERKSASRFIVELEDVGEIIEKIRIGHNNTGMNPGWHCSHVDIRRLLPDKDGAETLTFPCDRWLATSEDDKKTIRELVPYDIFTEKYMKDGSLRQVYKEVEEPLDIVLYSVQIFTGNIPGAGTDAKVYITIYGDLGDTGERYLGKSENRTNKFERGTADTFIIEAADLGVIYKIKLRHDNSKWCADWYVEKVEIWNDTNEDEFLFLCGRWLSLKKEDGRLERLFYEKEYTGDRSSNCSSPADFWEIALSSKMADVDISTVTGPMADYVQEGPIIPYYVSVTTGKHKDAATDSRAFIFLIGEDDERSKRIWLDYPRGKRGFSRGSVEEFYVAGLDVGIIKKIEVLYEMTVWTGDVVGGGTDSNIFMTLYGINGSTEEMQLDKKKARFEREQNDTFIMEILDIAPFTKMRIRIDGLGSRPEWFLERVKCLDPHSSFQPPPTPSPGSSGLSMDLVKAQMSL

SEQ ID NO: 51889 - protein, 1947 aa, Homo sapiens
MMQLTLNTLFPVVSTPAITYIVTVFTGDVRGAGTKSKIYLVMYGARGNKNSGKIFLEGGVFDRGRTDIFHIELAVLLSPLSRVSVGHGNVGVNRGWFCEKVVILCPFTGIQQTFPCSNWLDEKKADGLIERQLYEMVSLRKKRLKKFPWSLWVWTTDLKKAGTNSPIFIQIYGQKGRTDEILLNPNNKWFKPGIIEKFRIELPDLGRFYKIRVWHDKRSSGSGWHLERMTLMNTLNKDKYNFNCNRWLDANEDDNEIVREMTAEGPTVRRIMGMARYHVTVCTGELEGAGTDANVYLCLFGDVGDTGERLLYNCRNNTDLFEKGNADEFTIESVTMRNVRRVRIRHDGKGSGSGWYLDRVLVREEGQPESDNVEFPCLRWLDKDKDDGQLVRELLPSDSSATLKNFRYHISLKTGDVSGASTDSRVYIKLYGDKSDTIKQVLLVSDNNLKDYFERGRVDEFTLETLNIGNINRLVIGHDSTGMHASWFLGSVQIRVPRQGKQYTFPANRWLDKNQADGRLEVELYPSEVVEIQKLVHYEVEIWTGDVGGAGTSARVYMQIYGEKGKTEVLFLSSRSKVFERASKDTFQLEAADVGEVYKLRLGHTGEGFGPSWFVDTVWLRHLVVREVDLTPEEEARKKKEKDKLRQLLKKERLKAKLQRKKKKRKGSDEEDEGEEEESSSSEESSSEEEEMEEEEEEEEFGPGMQEVIEQHKFEAHRWLARGKEDNELVVELVPAGKPGPERNTYEVQVVTGNVPKAGTDANVYLTIYGEEYGDTGERPLKKSDKSNKFEQGQTDTFTIYAIDLGALTKIRIRHDNTGNRAGWFLDRIDITDMNNEITYYFPCQRWLAVEEDDGQLSRELLPVDESYVLPQSEEGRGGGDNNPLDNLALEQKDKSTTFSVTIKTGVKKNAGTDANVFITLFGTQDDTGMTLLKSSKTNSDKFERDSIEIFTVETLDLGDLWKVRLGHDNTGKAPGWFVDWVEVDAPSLGKCMTFPCGRWLAKNEDDGSIIRDLFHAELQTRLYTPFVPYEITLYTSDVFAAGTDANIFIIIYGCDAVCTQQKYLCTNKREQKQFFERKSASRFIVELEDVGEIIEKIRIGHNNTGMNPGWHCSHVDIRRLLPDKDGAETLTFPCDRWLATSEDDKKTIRELVPYDIFTEKYMKDGSLRQVYKEVEEPLDIVLYSVQIFTGNIPGAGTDAKVYITIYGDLGDTGERYLGKSENRTNKFERGTADTFIIEAADLGVIYKIKLRHDNSKWCADWYVEKVEIWNDTNEDEFLFLCGRWLSLKKEDGRLERLFYEKEYTGDRSSNCSSPADFWEIALSSKMADVDISTVTGPMADYVQEGPIIPYYVSVTTGKHKDAATDSRAFIFLIGEDDERSKRIWLDYPRGKRGFSRGSVEEFYVAGLDVGIIKKIELGHDGASPESCWLVEELCLAVPTQGTKYMLNCNCWLAKDRGDGITSRVFDLLDAMVVNIGVKVLYEMTVWTGDVVGGGTDSNIFMTLYGINGSTEEMQLDKKKARFEREQNDTFIMEILDIAPFTKMRIRIDGLGSRPEWFLERILLKNMNTGDLTMFYYGDWLSQRKGKKTLVCEMCAVIDEEEMMEWTSYTVAVKTSDILGAGTDANVFIIIFGENGDSGTLALKQSANWNKFERNNTDTFNFPDMLSLGHLCKLRVWHDNKGIFPGWHLSYVDVKDNSRDETFHFQCDCWLSKSEGDGQTVRDFACANNKICDELEETTYEIVIETGNGGETRENVWLILEGRKNRSKEFLMENSSRQRAFRKGTTDTFEFDSIYLGDIASLCVGHLAREDRFIPKRELAWHVKTITITEMEYGNVYFFNCDCLIPLKRKRKYFKVFEVTKTTESFASKVQSLVPVKYEVIVTTGYEPGAGTDANVFVTIFGANGDTGKRELKQKMRNLFERGSTDRFFLETLELVVTRLGLAAECG

SEQ ID NO: 51890 - protein, 1144 aa, Homo sapiens
MLRHLTDTFTIYAIDLGALTKIRIRHDNTGNRAGWFLDRIDITDMNNEITYYFPCQRWLAVEEDDGQLSRELLPVDESYVLPQSEEGRGGGDNNPLDNLALEQKDKSTTFSVTIKTGVKKNAGTDANVFITLFGTQDDTGMTLLKSSKTNSDKFERDSIEIFTVETLDLGDLWKVRLGHDNTGKAPGWFVDWVEVDAPSLGKCMTFPCGRWLAKNEDDGSIIRDLFHAELQTRLYTPFVPYEITLYTSDVFAAGTDANIFIIIYGCDAVCTQQKYLCTNKREQKQFFERKSASRFIVELEDVGEIIEKIRIGHNNTGMNPGWHCSHVDIRRLLPDKDGAETLTFPCDRWLATSEDDKKTIRELVPYDIFTEKYMKDGSLRQVYKEVEEPLDIVLYSVQIFTGNIPGAGTDAKVYITIYGDLGDTGERYLGKSENRTNKFERGTADTFIIEAADLGVIYKIKLRHDNSKWCADWYVEKVEIWNDTNEDEFLFLCGRWLSLKKEDGRLERLFYEKEYTGDRSSNCSSPADFWEIALSSKMADVDISTVTGPMADYVQEGPIIPYYVSVTTGKHKDAATDSRAFIFLIGEDDERSKRIWLDYPRGKRGFSRGSVEEFYVAGLDVGIIKKIEVLYEMTVWTGDVVGGGTDSNIFMTLYGINGSTEEMQLDKKKARFEREQNDTFIMEILDIAPFTKMRIRIDGLGSRPEWFLERILLKNMNTGDLTMFYYGDWLSQRKGKKTLVCEMCAVIDEEEMMEWTSYTVAVKTSDILGAGTDANVFIIIFGENGDSGTLALKQSANWNKFERNNTDTFNFPDMLSLGHLCKLRVWHDNKGIFPGWHLSYVDVKDNSRDETFHFQCDCWLSKSEGDGQTVRDFACANNKICDELEETTYEIVIETGNGGETRENVWLILEGRKNRSKEFLMENSSRQRAFRKGTTDTFEFDSIYLGDIASLCVGHLAREDRFIPKRELAWHVKTITITEMEYGNVYFFNCDCLIPLKRKRKYFKVFEVTKTTESFASKVQSLVPVKYEVIVTTGYEPGAGTDANVFVTIFGANGDTGKRELKQKMRNLFERGSTDRFFLETLELGELRKVRLEHDSSGYCSGWLVEKVEVTNTSTGVATIFNCGRWLDKKRGDGLTWRDLFPSV

SEQ ID NO: 51891 - protein, 306 aa, Homo sapiens
MRLGTNCEHPQLPLAAPSGYYFPCQRWLAVEEDDGQLSRELLPVDESYVLPQSEEGRGGGDNNPLDNLALEQKDKSTTFSVTIKTGVKKNAGTDANVFITLFGTQDDTGMTLLKSSKTNSDKFERDSIEIFTVETLDLGDLWKVRLGHDNTGKAPGWFVDWVEVDAPSLGKCMTFPCGRWLAKNEDDGSIIRDLFHAELQTRLYTPFVPYEITLYTSDVFAAGTDANIFIIIYGCDAVCTQQKYLCTNKREQKQFFERKSASRFIVELEDVGEIIEKIRIGHNNTGMNPGWHCSHVDIRRLLPDKD

SEQ ID NO: 51892 - protein, 2211 aa, Homo sapiens
MMPQKKRRRKKDIDFLALYEAELLNYASEDDEGELEHEYYKARVYEVVTATGDVRGAGTDANVFITLFGENGLSPKLQLTSKSKSAFEKGNVDVFRVRTNNVGLIYKVRIEHDNTGLNASWYLDHVIVTDMKRPHLRYYFNCNNWLSKVEGDRQWCRDLLASFNPMDMPRGNKYEVKVYTGDVIGAGTDADVFINIFGEYGDTGERRLENEKDNFEKGAEDRFILDAPDLGQLMKINVGHNNKGGSAGWFLSQIVIEDIGNKRKYDFPLNRWLALDEDDGKIQRDILVGGAETTAITYIVTVFTGDVRGAGTKSKIYLVMYGARGNKNSGKIFLEGGVFDRGRTDIFHIELAVLLSPLSRVSVGHGNVGVNRGWFCEKVVILCPFTGIQQTFPCSNWLDEKKADGLIERQLYEMVSLRKKRLKKFPWSLWVWTTDLKKAGTNSPIFIQIYGQKGRTDEILLNPNNKWFKPGIIEKFRIELPDLGRFYKIRVWHDKRSSGSGWHLERMTLMNTLNKDKYNFNCNRWLDANEDDNEIVREMTAEGPTVRRIMGMARYHVTVCTGELEGAGTDANVYLCLFGDVGDTGERLLYNCRNNTDLFEKGNADEFTIESVTMRNVRRVRIRHDGKGSGSGWYLDRVLVREEGQPESDNVEFPCLRWLDKDKDDGQLVRELLPSDSSATLKNFRYHISLKTGDVSGASTDSRVYIKLYGDKSDTIKQVLLVSDNNLKDYFERGRVDEFTLETLNIGNINRLVIGHDSTGMHASWFLGSVQIRVPRQGKQYTFPANRWLDKNQADGRLEVELYPSEVVEIQKLVHYEVEIWTGDVGGAGTSARVYMQIYGEKGKTEVLFLSSRSKVFERASKDTFQLEAADVGEVYKLRLGHTGEGFGPSWFVDTVWLRHLVVREVDLTPEEEARKKKEKDKLRQLLKKERLKAKLQRKKKKRKGSDEEDEGEEEESSSSEESSSEEEEMEEEEEEEEFGPGMQEVIEQHKFEAHRWLARGKEDNELVVELVPAGKPGPERNTYEVQVVTGNVPKAGTDANVYLTIYGEEYGDTGERPLKKSDKSNKFEQGQTDTFTIYAIDLGALTKIRIRHDNTGNRAGWFLDRIDITDMNNEITYYFPCQRWLAVEEDDGQLSRELLPVDESYVLPQSEEGRGGGDNNPLDNLALEQKDKSTTFSVTIKTGVKKNAGTDANVFITLFGTQDDTGMTLLKSSKTNSDKFERDSIEIFTVETLDLGDLWKVRLGHDNTGKAPGWFVDWVEVDAPSLGKCMTFPCGRWLAKNEDDGSIIRDLFHAELQTRLYTPFVPYEITLYTSDVFAAGTDANIFIIIYGCDAVCTQQKYLCTNKREQKQFFERKSASRFIVELEDVGEIIEKIRIGHNNTGMNPGWHCSHVDIRRLLPDKDGAETLTFPCDRWLATSEDDKKTIRELVPYDIFTEKYMKDGSLRQVYKEVEEPLDIVLYSVQIFTGNIPGAGTDAKVYITIYGDLGDTGERYLGKSENRTNKFERGTADTFIIEAADLGVIYKIKLRHDNSKWCADWYVEKVEIWNDTNEDEFLFLCGRWLSLKKEDGRLERLFYEKEYTGDRSSNCSSPADFWEIALSSKMADVDISTVTGPMADYVQEGPIIPYYVSVTTGKHKDAATDSRAFIFLIGEDDERSKRIWLDYPRGKRGFSRGSVEEFYVAGLDVGIIKKIEVLYEMTVWTGDVVGGGTDSNIFMTLYGINGSTEEMQLDKKKARFEREQNDTFIMEILDIAPFTKMRIRIDGLGSRPEWFLERILLKNMNTGDLTMFYYGDWLSQRKGKKTLVCEMCAVIDEEEMMEWTSYTVAVKTSDILGAGTDANVFIIIFGENGDSGTLALKQSANWNKFERNNTDTFNFPDMLSLGHLCKLRVWHDNKGIFPGWHLSYVDVKDNSRDETFHFQCDCWLSKSEGDGQTVRDFACANNKICDELEETTYEIVIETGNGGETRENVWLILEGRKNRSKEFLMENSSRQRAFRKGTTDTFEFDSIYLGDIASLCVGHLAREDRFIPKRELAWHVKTITITEMEYGNVYFFNCDCLIPLKRKRKYFKVFEVTKTTESFASKVQSLVPVKYEVIVTTGYEPGAGTDANVFVTIFGANGDTGKRELKQKMRNLFERGSTDRFFLETLELGELRKVRLEHDSSGYCSGWLVEKVEVTNTSTGVATIFNCGRWLDKKRGDGLTWRDLFPSV

SEQ ID NO: 51893 - protein, 1114 aa, Homo sapiens
MNNEITYYFPCQRWLAVEEDDGQLSRELLPVDESYVLPQSEEGRGGGDNNPLDNLALEQKDKSTTFSVTIKTGVKKNAGTDANVFITLFGTQDDTGMTLLKSSKTNSDKFERDSIEIFTVETLDLGDLWKVRLGHDNTGKAPGWFVDWVEVDAPSLGKCMTFPCGRWLAKNEDDGSIIRDLFHAELQTRLYTPFVPYEITLYTSDVFAAGTDANIFIIIYGCDAVCTQQKYLCTNKREQKQFFERKSASRFIVELEDVGEIIEKIRIGHNNTGMNPGWHCSHVDIRRLLPDKDGAETLTFPCDRWLATSEDDKKTIRELVPYDIFTEKYMKDGSLRQVYKEVEEPLDIVLYSVQIFTGNIPGAGTDAKVYITIYGDLGDTGERYLGKSENRTNKFERGTADTFIIEAADLGVIYKIKLRHDNSKWCADWYVEKVEIWNDTNEDEFLFLCGRWLSLKKEDGRLERLFYEKEYTGDRSSNCSSPADFWEIALSSKMADVDISTVTGPMADYVQEGPIIPYYVSVTTGKHKDAATDSRAFIFLIGEDDERSKRIWLDYPRGKRGFSRGSVEEFYVAGLDVGIIKKIELGHDGASPESCWLVEELCLAVPTQGTKYMLNCNCWLAKDRGDGITSRVFDLLDAMVVNIGVKVLYEMTVWTGDVVGGGTDSNIFMTLYGINGSTEEMQLDKKKARFEREQNDTFIMEILDIAPFTKMRIRIDGLGSRPEWFLERILLKNMNTGDLTMFYYGDWLSQRKGKKTLVCEMCAVIDEEEMMEWTSYTVAVKTSDILGAGTDANVFIIIFGENGDSGTLALKQSANWNKFERNNTDTFNFPDMLSLGHLCKLRVWHDNKGIFPGWHLSYVDVKDNSRDETFHFQCDCWLSKSEGDGQTVRDFACANNKICDELEETTYEIVIETGNGGETRENVWLILEGRKNRSKEFLMENSSRQRAFRKGTTDTFEFDSIYLGDIASLCVGHLAREDRFIPKRELAWHVKTITITEMEYGNVYFFNCDCLIPLKRKRKYFKVFEVTKTTESFASKVQSLVPVKYEVIVTTGYEPGAGTDANVFVTIFGANGDTGKRELKQKMRNLFERGSTDRFFLETLELVVTRLGLAAECG

SEQ ID NO: 51894 - protein, 512 aa, Homo sapiens
MTVWTGDVVGGGTDSNIFMTLYGINGSTEEMQLDKKKARFEREQNDTFIMEILDIAPFTKMRIRIDGLGSRPEWFLERILLKNMNTGDLTMFYYGDWLSQRKGKKTLVCEMCAVIDEEEMMEWTSYTVAVKTSDILGAGTDANVFIIIFGENGDSGTLALKQSANWNKFERNNTDTFNFPDMLSLGHLCKLRVWHDNKGIFPGWHLSYVDVKDNSRDETFHFQCDCWLSKSEGDGQTVRDFACANNKICDELEETTYEIVIETGNGGETRENVWLILEGRKNRSKEFLMENSSRQRAFRKGTTDTFEFDSIYLGDIASLCVGHLAREDRFIPKRELAWHVKTITITEMEYGNVYFFNCDCLIPLKRKRKYFKVFEVTKTTESFASKVQSLVPVKYEVIVTTGYEPGAGTDANVFVTIFGANGDTGKRELKQKMRNLFERGSTDRFFLETLELGELRKVRLEHDSSGYCSGWLVEKVEVTNTSTGVATIFNCGRWLDKKRGDGLTWRDLFPSV

SEQ ID NO: 51895 - protein, 457 aa, Homo sapiens
MTVWTGDVVGGGTDSNIFMTLYGINGSTEEMQLDKKKARFEREQNDTFIMEILDIAPFTKMRIRIDGLGSRPEWFLERILLKNMNTGDLTMFYYGDWLSQRKGKKTLVCEMCAVIDEEEMMEWTSYTVAVKTSDILGAGTDANVFIIIFGENGDSGTLALKQSANWNKFERNNTDTFNFPDMLSLGHLCKLRVWHDNKGIFPGWHLSYVDVKDNSRDETFHFQCDCWLSKSEGDGQTVRDFACANNKICDELEETTYEIVIETGNGGETRENVWLILEGRKNRSKEFLMENSSRQRAFRKGTTDTFEFDSIYLGDIASLCVGHLAREDRFIPKRELAWHVKTITITEMEYGNVYFFNCDCLIPLKRKRKYFKVFEVTKTTESFASKVQSLVPVKYEVIVTTGYEPGAGTDANVFVTIFGANGDTGKRELKQKMRNLFERGSTDRFFLETLELGELRK

SEQ ID NO: 51896 - protein, 373 aa, Homo sapiens
MLIPFSMKNCFQLLCNCQVPAAGFKKTVKNGLILQSISNDVYQNLAVEDWIHDHMNLEGKPILFFWQNSPSVVIGRHQNPWQECNLNLMREEGIKLARRRSGGGTVYHDMGNINLTFFTTKKKYDRMENLKLIVRALNAVQPQLDVQATKRFDLLLDGQFKISGTASKIGRTTAYHHCTLLCSTDGTFLSSLLKSPYQGIRSNATASIPSLVKNLLEKDPTLTCEVLMNAVATEYAAYHQIDNHIHLINPTDETLFPGINSKAKELQTWEWIYGKTPKFSINTSFHVLYEQSHLEIKVFIDIKNGRIEICNIEAPDHWLPLEIRDKLNSSLIGSKFCPTETTMLTNILLRTCPQDHKLNSKWNILCEKIKGIM

SEQ ID NO: 51897 - protein, 373 aa, Homo sapiens; identical to SEQ ID NO: 51896

SEQ ID NO: 51898 - protein, 373 aa, Homo sapiens; identical to SEQ ID NO: 51896

SEQ ID NO: 51899 - protein, 373 aa, Homo sapiens; identical to SEQ ID NO: 51896

SEQ ID NO: 51900 - protein, 373 aa, Homo sapiens; identical to SEQ ID NO: 51896

SEQ ID NO: 51901 - protein, 106 aa, Homo sapiens
MLIPFSMKNCFQLLCNCQVPAAGFKKTVKNGLILQSISNDVYQNLAVEDWIHDHMNLEGKPILFFWQNSPSVVIGRHQNPWQECNLNLMREEGIKLARRRSGGGTV

SEQ ID NO: 51902 - protein, 251 aa, Homo sapiens
MLIPFSMKNCFQLLCNCQVPAAGFKKTVKNGLILQSISNDVYQNLAVEDWIHDHMNLEGKPILFFWQNSPSVVIGRHQNPWQECNLNLMREEGIKLARRRSGGGTVYHDMGNINLTFFTTKKKYDRMENLKLIVRALNAVQPQLDVQATKRFDLLLDGQFKISGTASKIGRTTAYHHCTLLCSTDGTFLSSLLKSPYQGIRSNATASIPSLVKNLLEKDPTLTCEVLMNAVATEYAAYHQIDNHIHLINPT

SEQ ID NO: 51903 - protein, 39 aa, Homo sapiens
MLIPFSMKNCFQLLCNCQVPAAGFKKTVKNGLILQSISN

SEQ ID NO: 51904 - protein, 135 aa, Homo sapiens
MLIPFSMKNCFQLLCNCQVPAAGFKKTVKNGLILQSISNDVYQNLAVEDWIHDHMNLEGKPILFFWQNSPSVVIGRHQNPWQECNLNLMREEGIKLARRRSGGGTVYHDMGNINLTFFTTKKKYDRMENLKLIVR

SEQ ID NO: 51905 - protein, 1766 aa, Homo sapiens
MGGKNKQRTKGNLRPSNSGRAAELLAKEQGTVPGFIGFGTSQSDLGYVPAIQGAEEIDSLVDSDFRMVLRKLSKKDVTTKLKAMQEFGTMCTERDTETVKGVLPYWPRIFCKISLDHDRRVREATQQAFEKLILKVKKQLAPYLKSLMGYWLMAQCDTYTPAAFAAKDAFEAAFPPSKQPEAIAFCKDEITSVLQDHLIKETPDTLSDPQTVPEEEREAKFYRVVTCSLLALKRLLCLLPDNELDSLEEKFKSLLSQNKFWKYGKHSVPQIRSAYFELVSALCQRIPQLMKEEASKVSPSVLLSIDDSDPIVCPALWEAVLYTLTTIEDCWLHVNAKKSVFPKLSTVIREGGRGLATVIYPYLLPFISKLPQSITNPKLDFFKNFLTSLVAGLSTERTKTSSLESSAVISAFFECLRFIMQQNLGEEEIEQMLVNDQLIPFIDAVLKDPGLQHGQLFNHLAETLSSWEAKADTEKDEKTAHNLENVLIHFWERLSEICVAKISEPEADVESVLGVSNLLQVLQKPKSSLKSSKKKNGKVRFADEILESNKENEKCVSSEGEKIEGWELTTEPSLTHNSSGLLSPLRKKPLEDLVCKLADISINYVNERKSEQHLRFLSTLLDSFSSSRVFKMLLGDEKQSIVQAKPLEIAKLVQKNPAVQFLYQKLIGWLNEDQRKDFGFLVDILYSALRCCDNDMERKKVLDDLTKVDLKWNSLLKIIEKACPSSDKHALVTPWLKGDILGEKLVNLADCLCNEDLESRVSSESHFSERWTLLSLVLSQHVKNDYLIGDVYVERIIVRLHETLFKTKKLSEAESSDSSVSFICDVAYNYFSSAKGCLLMPSSEDLLLTLFQLCAQSKEKTHLPDFLICKLKNTWLSGVNLLVHQTDSSYKESTFLHLSALWLKNQVQASSLDINSLQVLLSAVDDLLNTLLESEDSYLMGVYIGSVMPNDSEWEKMRQSLPMQWLHRPLLEGRLSLNYECFKTDFKEQDIKTLPSHLCTSALLSKMVLIALRKETVLENNELEKIIAELLYSLQWCEELDNPPIFLIGFCEILQKMNITYDNLRVLGNTSGLLQLLFNRSREHGTLWSLIIAKLILSRSISSDEVKPHYKRKESFFPLTEGNLHTIQSLCPFLSKEEKKEFSAQCIPALLGWTKKDLCSTNGGFGHLAIFNSCLQTKSIDDGELLHGILKIIISWKKEHEDIFLFSCNLSEASPEVLGVNIEIIRFLSLFLKYCSSPLAESEWDFIMCSMLAWLETTSENQALYSIPLVQLFACVSCDLACDLSAFFDSTTLDTIGNLPVNLISEWKEFFSQGIHSLLLPILVTVTGENKDVSETSFQNAMLKPMCETLTYISKEQLLSHKLPARLVADQKTNLPEYLQTLLNTLAPLLLFRARPVQIAVYHMLYKLMPELPQYDQDNLKSYGDEEEEPALSPPAALMSLLSIQEDLLENVLGCIPVGQIVTIKPLSEDFCYVLGYLLTWKLILTFFKAASSQLRALYSMYLRKTKSLNKLLYHLFRLMPENPTYAETAVEVPNKDPKTFFTEELQLSIRETTMLPYHIPHLACSVYHMTLKDLPAMVRLWWNSSEKRVFNIVDRFTSKYVSSVLSFQEISSVQTSTQLFNGMTVKARATTREVMATYTIEDIVIELIIQLPSNYPLGSIIVESGKRVGVAVQQWRNWMLQLSTYLTHQNGSIMEGLALWKNNVDKRFEGVEDCMICFSVIHGFNYSLPKKACRTCKKKFHSACLYKWFTSSNKSTCPLCRETFF

SEQ ID NO: 51906 - protein, 480 aa, Homo sapiens
MGGKNKQRTKGNLRPSNSGRAAELLAKEQGTVPGFIGFGTSQSDLGYVPAIQGAEEIDSLVDSDFRMVLRKLSKKDVTTKLKANAMQEFGTMCTERDTETVKGVLPYWPRIFCKISLDHDRRVREATQQAFEKLILKVKKQLAPYLKSLMGYWLMAQCDTYTPAAFAAKDAFEAAFPPSKQPEAIAFCKDEITSVLQDHLIKETPDTLSDPQTVPEEEREAKFYRVVTCSLLALKRLLCLLPDNELDSLEEKFKSLLSQNKFWKYGKHSVPQIRSAYFELVSALCQRIPQLMKEEASKVSPSVLLSIDDSDPIVCPALWEAVLYTLTTIEDCWLHVNAKKSVFPKLSTVIREGGRGLATVIYPYLLPFISKLPQSITNPKLDFFKNFLTSLVAGLSTERTKTSSLESSAVISAFFECLRFIMQQNLGEEEIEQMLVNDQLIPFIDAVLKDPGLQHGQLFNHLAETLSSWEAKADTEKDEK

SEQ ID NO: 51907 - protein, 1812 aa, Homo sapiens
MDRVGGGKGPGGSYYRVSSSAARSRKLCPGRVNRGLSAQSTAATATMGGKNKQRTKGNLRPSNSGRAAELLAKEQGTVPGFIGFGTSQSDLGYVPAIQGAEEIDSLVDSDFRMVLRKLSKKDVTTKLKAMQEFGTMCTERDTETVKGVLPYWPRIFCKISLDHDRRVREATQQAFEKLILKVKKQLAPYLKSLMGYWLMAQCDTYTPAAFAAKDAFEAAFPPSKQPEAIAFCKDEITSVLQDHLIKETPDTLSDPQTVPEEEREAKFYRVVTCSLLALKRLLCLLPDNELDSLEEKFKSLLSQNKFWKYGKHSVPQIRSAYFELVSALCQRIPQLMKEEASKVSPSVLLSIDDSDPIVCPALWEAVLYTLTTIEDCWLHVNAKKSVFPKLSTVIREGGRGLATVIYPYLLPFISKLPQSITNPKLDFFKNFLTSLVAGLSTERTKTSSLESSAVISAFFECLRFIMQQNLGEEEIEQMLVNDQLIPFIDAVLKDPGLQHGQLFNHLAETLSSWEAKADTEKDEKTAHNLENVLIHFWERLSEICVAKISEPEADVESVLGVSNLLQVLQKPKSSLKSSKKKNGKVRFADEILESNKENEKCVSSEGEKIEGWELTTEPSLTHNSSGLLSPLRKKPLEDLVCKLADISINYVNERKSEQHLRFLSTLLDSFSSSRVFKMLLGDEKQSIVQAKPLEIAKLVQKNPAVQFLYQKLIGWLNEDQRKDFGFLVDILYSALRCCDNDMERKKVLDDLTKVDLKWNSLLKIIEKACPSSDKHALVTPWLKGDILGEKLVNLADCLCNEDLESRVSSESHFSERWTLLSLVLSQHVKNDYLIGDVYVERIIVRLHETLFKTKKLSEAESSDSSVSFICDVAYNYFSSAKGCLLMPSSEDLLLTLFQLCAQSKEKTHLPDFLICKLKNTWLSGVNLLVHQTDSSYKESTFLHLSALWLKNQVQASSLDINSLQVLLSAVDDLLNTLLESEDSYLMGVYIGSVMPNDSEWEKMRQSLPMQWLHRPLLEGRLSLNYECFKTDFKEQDIKTLPSHLCTSALLSKMVLIALRKETVLENNELEKIIAELLYSLQWCEELDNPPIFLIGFCEILQKMNITYDNLRVLGNTSGLLQLLFNRSREHGTLWSLIIAKLILSRSISSDEVKPHYKRKESFFPLTEGNLHTIQSLCPFLSKEEKKEFSAQCIPALLGWTKKDLCSTNGGFGHLAIFNSCLQTKSIDDGELLHGILKIIISWKKEHEDIFLFSCNLSEASPEVLGVNIEIIRFLSLFLKYCSSPLAESEWDFIMCSMLAWLETTSENQALYSIPLVQLFACVSCDLACDLSAFFDSTTLDTIGNLPVNLISEWKEFFSQGIHSLLLPILVTVTGENKDVSETSFQNAMLKPMCETLTYISKEQLLSHKLPARLVADQKTNLPEYLQTLLNTLAPLLLFRARPVQIAVYHMLYKLMPELPQYDQDNLKSYGDEEEEPALSPPAALMSLLSIQEDLLENVLGCIPVGQIVTIKPLSEDFCYVLGYLLTWKLILTFFKAASSQLRALYSMYLRKTKSLNKLLYHLFRLMPENPTYAETAVEVPNKDPKTFFTEELQLSIRETTMLPYHIPHLACSVYHMTLKDLPAMVRLWWNSSEKRVFNIVDRFTSKYVSSVLSFQEISSVQTSTQLFNGMTVKARATTREVMATYTIEDIVIELIIQLPSNYPLGSIIVESGKRVGVAVQQWRNWMLQLSTYLTHQNGSIMEGLALWKNNVDKRFEGVEDCMICFSVIHGFNYSLPKKACRTCKKKFHSACLYKWFTSSNKSTCPLCRETFF

SEQ ID NO: 51908 - protein, 467 aa, Homo sapiens
MKNQNGTFKDWANANVSRQIEDTVLYGYYTLYSVILFCVFFWIPFVYFYYEEKDDDDTSKCTQIKTALKYTLGFVVICALLLLVGAFVPLNVPNNKNSTEWEKVKSLFEELGSSHGLAALSFSISSLTLIGMLAAITYTAYGMSALPLNLIKGTRSAAYERLENTEDIEEVEQHIQTIKSKSKDGRPLPARDKRALKQFEERLRTLKKRERHLEFIENSWWTKFCGALRPLKIVWGIFFILVALLFVISLFLSNLDKALHSAGIDSGFIIFGANLSNPLNMLLPLLQTVFPLDYILITIIIMYFIFTSMAGIRNIGIWFFWIRLYKIRRGRTRPQALLFLCMILLLIVLHTSYMIYSLAPQYVMYGSQNYLIETNITSDNHKGNSTLSVPKRCDADAPEDQCTVTRTYLFLHKFWFFSAAYYFGNWAFLGVFLIGLIVSCCKGKKSVIEGVDEDSDISDDEPSVYSA

SEQ ID NO: 51909 - protein, 540 aa, Homo sapiens
MATSGAASAELVIGWCIFGLLLLAILAFCWIYVRKYQSRRESEVVSTITAIFSLAIALITSALLPVDIFLVSYMKNQNGTFKDWANANVSRQIEDTVLYGYYTLYSVILFCVFFWIPFVYFYYEEKDDDDTSKCTQIKTALKYTLGFVVICALLLLVGAFVPLNVPNNKNSTEWEKVKSLFEELGSSHGLAALSFSISSLTLIGMLAAITYTAYGMSALPLNLIKGTRSAAYERLENTEDIEEVEQHIQTIKSKSKDGRPLPARDKRALKQFEERLRTLKKRERHLEFIENSWWTKFCGALRPLKIVWGIFFILVALLFVISLFLSNLDKALHSAGIDSGFIIFGANLSNPLNMLLPLLQTVFPLDYILITIIIMYFIFTSMAGIRNIGIWFFWIRLYKIRRGRTRPQALLFLCMILLLIVLHTSYMIYSLAPQYVMYGSQNYLIETNITSDNHKGNSTLSVPKRCDADAPEDQCTVTRTYLFLHKFWFFSAAYYFGNWAFLGVFLIGLIVSCCKGKKSVIEGVDEDSDISDDEPSVYSA

SEQ ID NO: 51910 - protein, 312 aa, Homo sapiens
MSYQKKQPTPQPPVDCVKTSGGGGGGGGSGGGGCGFFGGGGSGGGSSGSGCGYSGGGGYSGGGCGGGSSGGGGGGGIGGCGGGSGGSVKYSGGGGSSGGGSGCFSSGGGGSGCFSSGGGGSSGGGSGCFSSGGGGSSGGGSGCFSSGGGGFSGQAVQCQSYGGVSSGGSSGGGSGCFSSGGGGGSVCGYSGGGSGCGGGSSGGSGSGYVSSQQVTQTSCAPQPSYGGGSSGGGGSGGSGCFSSGGGGGSSGCGGGSSGIGSGCIISGGGSVCGGGSSGGGGGGSSVGGSGSGKGVPICHQTQQKQAPTWPSK

SEQ ID NO: 51911 - protein, 333 aa, Homo sapiens
MSYQKKQPTPQPPVDCVKTSGGGGGGGGSGGGGCGFFGGGGSGGGSSGSGCGYSGGGGYSGGGCGGGSSGGGGGGGIGGCGGGSGGSVKYSGGGGSSGGGSGCFSSGGGGSGCFSSGGGGSSGGGSGCFSSGGGGSSGGGSGCFSSGGGGFSGQAVQCQSYGGVSSGGSSGGGSGCFSSGGGGGSVCGYSGGGSGCGGGSSGGSGSGYVSSQQVTQTSCAPQPSYGGGVRRRRQRRKRLLLQRRGRRELRLRRRLLRDWQRLHHQWRGLRLRRWFLWRRRRRLLRGWLREWQGRPDLPPDPAEAGAYLAVQIDPPGYHGGEGVGGVFQGHRWA

SEQ ID NO: 51912 - protein, 308 aa, Homo sapiens
MDALKSAGRALIRSPSLAKQSWGGGGRHRKLPENWTDTRETLLEGMLFSLKYLGMTLVEQPKGEELSAAAIKRIVATAKASGKKLQKVTLKVSPRGIILTDNLTNQLIENVSIYRISYCTADKMHDKVFAYIAQSQHNQSLECHAFLCTKRKMAQAVTLTVAQAFKVAFEFWQVSKEEKEKRDKASQEGGDVLGARQDCTPSLKSLVATGNLLDLEETAKAPLSTVSANTTNMDEVPRPQALSGSSVVWELDDGLDEAFSRLAQSRTNPQVLDTGLTAQDMHYAQCLSPVDWDKPDSSGTEQDDLFSF

SEQ ID NO: 51913 - protein, 269 aa, Homo sapiens; identical to SEQ ID NO: 41436

SEQ ID NO: 51914 - protein, 4544 aa, Homo sapiens
MLTPPLLLLLPLLSALVAAAIDAPKTCSPKQFACRDQITCISKGWRCDGERDCPDGSDEAPEICPQSKAQRCQPNEHNCLGTELCVPMSRLCNGVQDCMDGSDEGPHCRELQGNCSRLGCQHHCVPTLDGPTCYCNSSFQLQADGKTCKDFDECSVYGTCSQLCTNTDGSFICGCVEGYLLQPDNRSCKAKNEPVDRPPVLLIANSQNILATYLSGAQVSTITPTSTRQTTAMDFSYANETVCWVHVGDSAAQTQLKCARMPGLKGFVDEHTINISLSLHHVEQMAIDWLTGNFYFVDDIDDRIFVCNRNGDTCVTLLDLELYNPKGIALDPAMGKVFFTDYGQIPKVERCDMDGQNRTKLVDSKIVFPHGITLDLVSRLVYWADAYLDYIEVVDYEGKGRQTIIQGILIEHLYGLTVFENYLYATNSDNANAQQKTSVIRVNRFNSTEYQVVTRVDKGGALHIYHQRRQPRVRSHACENDQYGKPGGCSDICLLANSHKARTCRCRSGFSLGSDGKSCKKPEHELFLVYGKGRPGIIRGMDMGAKVPDEHMIPIENLMNPRALDFHAETGFIYFADTTSYLIGRQKIDGTERETILKDGIHNVEGVAVDWMGDNLYWTDDGPKKTISVARLEKAAQTRKTLIEGKMTHPRAIVVDPLNGWMYWTDWEEDPKDSRRGRLERAWMDGSHRDIFVTSKTVLWPNGLSLDIPAGRLYWVDAFYDRIETILLNGTDRKIVYEGPELNHAFGLCHHGNYLFWTEYRSGSVYRLERGVGGAPPTVTLLRSERPPIFEIRMYDAQQQQVGTNKCRVNNGGCSSLCLATPGSRQCACAEDQVLDADGVTCLANPSYVPPPQCQPGEFACANSRCIQERWKCDGDNDCLDNSDEAPALCHQHTCPSDRFKCENNRCIPNRWLCDGDNDCGNSEDESNATCSARTCPPNQFSCASGRCIPISWTCDLDDDCGDRSDESASCAYPTCFPLTQFTCNNGRCININWRCDNDNDCGDNSDEAGCSHSCSSTQFKCNSGRCIPEHWTCDGDNDCGDYSDETHANCTNQATRPPGGCHTDEFQCRLDGLCIPLRWRCDGDTDCMDSSDEKSCEGVTHVCDPSVKFGCKDSARCISKAWVCDGDNDCEDNSDEENCESLACRPPSHPCANNTSVCLPPDKLCDGNDDCGDGSDEGELCDQCSLNNGGCSHNCSVAPGEGIVCSCPLGMELGPDNHTCQIQSYCAKHLKCSQKCDQNKFSVKCSCYEGWVLEPDGESCRSLDPFKPFIIFSNRHEIRRIDLHKGDYSVLVPGLRNTIALDFHLSQSALYWTDVVEDKIYRGKLLDNGALTSFEVVIQYGLATPEGLAVDWIAGNIYWVESNLDQIEVAKLDGTLRTTLLAGDIEHPRAIALDPRDGILFWTDWDASLPRIEAASMSGAGRRTVHRETGSGGWPNGLTVDYLEKRILWIDARSDAIYSARYDGSGHMEVLRGHEFLSHPFAVTLYGGEVYWTDWRTNTLAKANKWTGHNVTVVQRTNTQPFDLQVYHPSRQPMAPNPCEANGGQGPCSHLCLINYNRTVSCACPHLMKLHKDNTTCYEFKKFLLYARQMEIRGVDLDAPYYNYIISFTVPDIDNVTVLDYDAREQRVYWSDVRTQAIKRAFINGTGVETVVSADLPNAHGLAVDWVSRNLFWTSYDTNKKQINVARLDGSFKNAVVQGLEQPHGLVVHPLRGKLYWTDGDNISMANMDGSNRTLLFSGQKGPVGLAIDFPESKLYWISSGNHTINRCNLDGSGLEVIDAMRSQLGKATALAIMGDKLWWADQVSEKMGTCSKADGSGSVVLRNSTTLVMHMKVYDESIQLDHKGTNPCSVNNGDCSQLCLPTSETTRSCMCTAGYSLRSGQQACEGVGSFLLYSVHEGIRGIPLDPNDKSDALVPVSGTSLAVGIDFHAENDTIYWVDMGLSTISRAKRDQTWREDVVTNGIGRVEGIAVDWIAGNIYWTDQGFDVIEVARLNGSFRYVVISQGLDKPRAITVHPEKGYLFWTEWGQYPRIERSRLDGTERVVLVNVSISWPNGISVDYQDGKLYWCDARTDKIERIDLETGENREVVLSSNNMDMFSVSVFEDFIYWSDRTHANGSIKRGSKDNATDSVPLRTGIGVQLKDIKVFNRDRQKGTNVCAVANGGCQQLCLYRGRGQRACACAHGMLAEDGASCREYAGYLLYSERTILKSIHLSDERNLNAPVQPFEDPEHMKNVIALAFDYRAGTSPGTPNRIFFSDIHFGNIQQINDDGSRRITIVENVGSVEGLAYHRGWDTLYWTSYTTSTITRHTVDQTRPGAFERETVITMSGDDHPRAFVLDECQNLMFWTNWNEQHPSIMRAALSGANVLTLIEKDIRTPNGLAIDHRAEKLYFSDATLDKIERCEYDGSHRYVILKSEPVHPFGLAVYGEHIFWTDWVRRAVQRANKHVGSNMKLLRVDIPQQPMGIIAVANDTNSCELSPCRINNGGCQDLCLLTHQGHVNCSCRGGRILQDDLTCRAVNSSCRAQDEFECANGECINFSLTCDGVPHCKDKSDEKPSYCNSRRCKKTFRQCSNGRCVSNMLWCNGADDCGDGSDEIPCNKTACGVGEFRCRDGTCIGNSSRCNQFVDCEDASDEMNCSATDCSSYFRLGVKGVLFQPCERTSLCYAPSWVCDGANDCGDYSDERDCPGVKRPRCPLNYFACPSGRCIPMSWTCDKEDDCEHGEDETHCNKFCSEAQFECQNHRCISKQWLCDGSDDCGDGSDEAAHCEGKTCGPSSFSCPGTHVCVPERWLCDGDKDCADGADESIAAGCLYNSTCDDREFMCQNRQCIPKHFVCDHDRDCADGSDESPECEYPTCGPSEFRCANGRCLSSRQWECDGENDCHDQSDEAPKNPHCTSQEHKCNASSQFLCSSGRCVAEALLCNGQDDCGDSSDERGCHINECLSRKLSGCSQDCEDLKIGFKCRCRPGFRLKDDGRTCADVDECSTTFPCSQRCINTHGSYKCLCVEGYAPRGGDPHSCKAVTDEEPFLIFANRYYLRKLNLDGSNYTLLKQGLNNAVALDFDYREQMIYWTDVTTQGSMIRRMHLNGSNVQVLHRTGLSNPDGLAVDWVGGNLYWCDKGRDTIEVSKLNGAYRTVLVSSGLREPRALVVDVQNGYLYWTDWGDHSLIGRIGMDGSSRSVIVDTKITWPNGLTLDYVTERIYWADAREDYIEFASLDGSNRHVVLSQDIPHIFALTLFEDYVYWTDWETKSINRAHKTTGTNKTLLISTLHRPMDLHVFHALRQPDVPNHPCKVNNGGCSNLCLLSPGGGHKCACPTNFYLGSDGRTCVSNCTASQFVCKNDKCIPFWWKCDTEDDCGDHSDEPPDCPEFKCRPGQFQCSTGICTNPAFICDGDNDCQDNSDEANCDIHVCLPSQFKCTNTNRCIPGIFRCNGQDNCGDGEDERDCPEVTCAPNQFQCSITKRCIPRVWVCDRDNDCVDGSDEPANCTQMTCGVDEFRCKDSGRCIPARWKCDGEDDCGDGSDEPKEECDERTCEPYQFRCKNNRCVPGRWQCDYDNDCGDNSDEESCTPRPCSESEFSCANGRCIAGRWKCDGDHDCADGSDEKDCTPRCDMDQFQCKSGHCIPLRWRCDADADCMDGSDEEACGTGVRTCPLDEFQCNNTLCKPLAWKCDGEDDCGDNSDENPEECARFVCPPNRPFRCKNDRVCLWIGRQCDGTDNCGDGTDEEDCEPPTAHTTHCKDKKEFLCRNQRCLSSSLRCNMFDDCGDGSDEEDCSIDPKLTSCATNASICGDEARCVRTEKAAYCACRSGFHTVPGQPGCQDINECLRFGTCSQLCNNTKGGHLCSCARNFMKTHNTCKAEGSEYQVLYIADDNEIRSLFPGHPHSAYEQAFQGDESVRIDAMDVHVKAGRVYWTNWHTGTISYRSLPPAAPPTTSNRHRRQIDRGVTHLNISGLKMPRGIAIDWVAGNVYWTDSGRDVIEVAQMKGENRKTLISGMIDEPHAIVVDPLRGTMYWSDWGNHPKIETAAMDGTLRETLVQDNIQWPTGLAVDYHNERLYWADAKLSVIGSIRLNGTDPIVAADSKRGLSHPFSIDVFEDYIYGVTYINNRVFKIHKFGHSPLVNLTGGLSHASDVVLYHQHKQPEVTNPCDRKKCEWLCLLSPSGPVCTCPNGKRLDNGTCVPVPSPTPPPDAPRPGTCNLQCFNGGSCFLNARRQPKCRCQPRYTGDKCELDQCWEHCRNGGTCAASPSGMPTCRCPTGFTGPKCTQQVCAGYCANNSTCTVNQGNQPQCRCLPGFLGDRCQYRQCSGYCENFGTCQMAADGSRQCRCTAYFEGSRCEVNKCSRCLEGACVVNKQSGDVTCNCTDGRVAPSCLTCVGHCSNGGSCTMNSKMMPECQCPPHMTGPRCEEHVFSQQQPGHIASILIPLLLLLLLVLVAGVVFWYKRRVQGAKGFQHQRMTNGAMNVEIGNPTYKMYEGGEPDDVGGLLDADFALDPDKPTNFTNPVYATLYMGGHGSRHSLASTDEKRELLGRGPEDEIGDPLA

SEQ ID NO: 51915 - protein, 713 aa, Homo sapiens
MLLATLLLLLLGGALAHPDRIIFPNHACEDPPAVLLEVQGTLQRPLVRDSRTSPANCTWLILGSKEQTVTIRFQKLHLACGSERLTLRSPLQPLISLCEAPPSPLQLPGGNVTITYSYAGARAPMGQGFLLSYSQDWLMCLQEEFQCLNHRCVSAVQRCDGVDACGDGSDEAGCSSDPFPGLTPRPVPSLPCNVTLEDFYGVFSSPGYTHLASVSHPQSCHWLLDPHDGRRLAVRFTALDLGFGDAVHVYDGPGPPESSRLLRSLTHFSNGKAVTVETLSGQAVVSYHTVAWSNGRGFNATYHVRGYCLPWDRPCGLGSGLGAGEGLGERCYSEAQRCDGSWDCADGTDEEDCPGCPPGHFPCGAAGTSGATACYLPADRCNYQTFCADGADERRCRHCQPGNFRCRDEKCVYETWVCDGQPDCADGSDEWDCSYVLPRKVITAAVIGSLVCGLLLVIALGCTCKLYAIRTQEYSIFAPLSRMEAEIVQQQAPPSYGQLIAQGAIPPVEDFPTENPNDNSVLGNLRSLLQILRQDMTPGGGPGARRRQRGRLMRRLVRRLRRWGLLPRTNTPARASEARSQVTPSAAPLEALDGGTGPAREGGAVGGQDGEQAPPLPIKAPLPSASTSPAPTTVPEAPGPLPSLPLEPSLLSGVVQALRGRLLPSLGPPGPTRSPPGPHTAVLALEDEDDVLLVPLAEPGVWVAEAEDEPLLT

SEQ ID NO: 51916 - protein, 556 aa, Homo sapiens
MLLATLLLLLLGGALAHPDRIIFPNHACEDPPAVLLEVQGTLQRPLVRDSRTSPANCTWLILGSKEQTVTIRFQKLHLACGSERLTLRSPLQPLISLCEAPPSPLQLPGGNVTITYSYAGARAPMGQGFLLSYSQDWLMCLQEEFQCLNHRCVSAVQRCDGVDACGDGSDEAGCSSDPFPGLTPRPVPSLPCNVTLEDFYGVFSSPGYTHLASVSHPQSCHWLLDPHDGRRLAVRFTALDLGFGDAVHVYDGPGPPESSRLLRSLTHFSNGKAVTVETLSGQAVVSYHTVAWSNGRGFNATYHVRGYCLPWDRPCGLGSGLGAGEGLGERCYSEAQRCDGSWDCADGTDEEDCPGCPPGHFPCGAAGTSGATACYLPADRCNYQTFCADGADERRCRHCQPGNFRCRDEKCVYETWVCDGQPDCADGSDEWDCSYVLPRKVITAAVIGSLVCGLLLVIALGCTCKLYAIRTQEYSIFAPLSRMEAEIVQQQAPPSYGQLIAQGAIPPVEDFPTENPNDNSVLGNLRSLLQILRQDMTPGGGPGARRRQRGRLMRRL

SEQ ID NO: 51917 - protein, 4655 aa, Homo sapiens
MDRGPAAVACTLLLALVACLAPASGQECDSAHFRCGSGHCIPADWRCDGTKDCSDDADEIGCAVVTCQQGYFKCQSEGQCIPNSWVCDQDQDCDDGSDERQDCSQSTCSSHQITCSNGQCIPSEYRCDHVRDCPDGADENDCQYPTCEQLTCDNGACYNTSQKCDWKVDCRDSSDEINCTEICLHNEFSCGNGECIPRAYVCDHDNDCQDGSDEHACNYPTCGGYQFTCPSGRCIYQNWVCDGEDDCKDNGDEDGCESGPHDVHKCSPREWSCPESGRCISIYKVCDGILDCPGREDENNTSTGKYCSMTLCSALNCQYQCHETPYGGACFCPPGYIINHNDSRTCVEFDDCQIWGICDQKCESRPGRHLCHCEEGYILERGQYCKANDSFGEASIIFSNGRDLLIGDIHGRSFRILVESQNRGVAVGVAFHYHLQRVFWTDTVQNKVFSVDINGLNIQEVLNVSVETPENLAVDWVNNKIYLVETKVNRIDMVNLDGSYRVTLITENLGHPRGIAVDPTVGYLFFSDWESLSGEPKLERAFMDGSNRKDLVKTKLGWPAGVTLDMISKRVYWVDSRFDYIETVTYDGIQRKTVVHGGSLIPHPFGVSLFEGQVFFTDWTKMAVLKANKFTETNPQVYYQASLRPYGVTVYHSLRQPYATNPCKDNNGGCEQVCVLSHRTDNDGLGFRCKCTFGFQLDTDERHCIAVQNFLIFSSQVAIRGIPFTLSTQEDVMVPVSGNPSFFVGIDFDAQDSTIFFSDMSKHMIFKQKIDGTGREILAANRVENVESLAFDWISKNLYWTDSHYKSISVMRLADKTRRTVVQYLNNPRSVVVHPFAGYLFFTDWFRPAKIMRAWSDGSHLLPVINTTLGWPNGLAIDWAASRLYWVDAYFDKIEHSTFDGLDRRRLGHIEQMTHPFGLAIFGEHLFFTDWRLGAIIRVRKADGGEMTVIRSGIAYILHLKSYDVNIQTGSNACNQPTHPNGDCSHFCFPVPNFQRVCGCPYGMRLASNHLTCEGDPTNEPPTEQCGLFSFPCKNGRCVPNYYLCDGVDDCHDNSDEQLCGTLNNTCSSSAFTCGHGECIPAHWRCDKRNDCVDGSDEHNCPTHAPASCLDTQYTCDNHQCISKNWVCDTDNDCGDGSDEKNCNSTETCQPSQFNCPNHRCIDLSFVCDGDKDCVDGSDEVGCVLNCTASQFKCASGDKCIGVTNRCDGVFDCSDNSDEAGCPTRPPGMCHSDEFQCQEDGICIPNFWECDGHPDCLYGSDEHNACVPKTCPSSYFHCDNGNCIHRAWLCDRDNDCGDMSDEKDCPTQPFRCPSWQWQCLGHNICVNLSVVCDGIFDCPNGTDESPLCNGNSCSDFNGGCTHECVQEPFGAKCLCPLGFLLANDSKTCEDIDECDILGSCSQHCYNMRGSFRCSCDTGYMLESDGRTCKVTASESLLLLVASQNKIIADSVTSQVHNIYSLVENGSYIVAVDFDSISGRIFWSDATQGKTWSAFQNGTDRRVVFDSSIILTETIAIDWVGRNLYWTDYALETIEVSKIDGSHRTVLISKNLTNPRGLALDPRMNEHLLFWSDWGHHPRIERASMDGSMRTVIVQDKIFWPCGLTIDYPNRLLYFMDSYLDYMDFCDYNGHHRRQVIASDLIIRHPYALTLFEDSVYWTDRATRRVMRANKWHGGNQSVVMYNIQWPLGIVAVHPSKQPNSVNPCAFSRCSHLCLLSSQGPHFYSCVCPSGWSLSPDLLNCLRDDQPFLITVRQHIIFGISLNPEVKSNDAMVPIAGIQNGLDVEFDDAEQYIYWVENPGEIHRVKTDGTNRTVFASISMVGPSMNLALDWISRNLYSTNPRTQSIEVLTLHGDIRYRKTLIANDGTALGVGFPIGITVDPARGKLYWSDQGTDSGVPAKIASANMDGTSVKTLFTGNLEHLECVTLDIEEQKLYWAVTGRGVIERGNVDGTDRMILVHQLSHPWGIAVHDSFLYYTDEQYEVIERVDKATGANKIVLRDNVPNLRGLQVYHRRNAAESSNGCSNNMNACQQICLPVPGGLFSCACATGFKLNPDNRSCSPYNSFIVVSMLSAIRGFSLELSDHSETMVPVAGQGRNALHVDVDVSSGFIYWCDFSSSVASDNAIRRIKPDGSSLMNIVTHGIGENGVRGIAVDWVAGNLYFTNAFVSETLIEVLRINTTYRRVLLKVTVDMPRHIVVDPKNRYLFWADYGQRPKIERSFLDCTNRTVLVSEGIVTPRGLAVDRSDGYVYWVDDSLDIIARIRINGENSEVIRYGSRYPTPYGITVFENSIIWVDRNLKKIFQASKEPENTEPPTVIRDNINWLRDVTIFDKQVQPRSPAEVNNNPCLENNGGCSHLCFALPGLHTPKCDCAFGTLQSDGKNCAISTENFLIFALSNSLRSLHLDPENHSPPFQTINVERTVMSLDYDSVSDRIYFTQNLASGVGQISYATLSSGIHTPTVIASGIGTADGIAFDWITRRIYYSDYLNQMINSMAEDGSNRTVIARVPKPRAIVLDPCQGYLYWADWDTHAKIERATLGGNFRVPIVNSSLVMPSGLTLDYEEDLLYWVDASLQRIERSTLTGVDREVIVNAAVHAFGLTLYGQYIYWTDLYTQRIYRANKYDGSGQIAMTTNLLSQPRGINTVVKNQKQQCNNPCEQFNGGCSHICAPGPNGAECQCPHEGNWYLANNRKHCIVDNGERCGASSFTCSNGRCISEEWKCDNDNDCGDGSDEMESVCALHTCSPTAFTCANGRCVQYSYRCDYYNDCGDGSDEAGCLFRDCNATTEFMCNNRRCIPREFICNGVDNCHDNNTSDEKNCPDRTCQSGYTKCHNSNICIPRVYLCDGDNDCGDNSDENPTYCTTHTCSSSEFQCASGRCIPQHWYCDQETDCFDASDEPASCGHSERTCLADEFKCDGGRCIPSEWICDGDNDCGDMSDEDKRHQCQNQNCSDSEFLCVNDRPPDRRCIPQSWVCDGDVDCTDGYDENQNCTRRTCSENEFTCGYGLCIPKIFRCDRHNDCGDYSDERGCLYQTCQQNQFTCQNGRCISKTFVCDEDNDCGDGSDELMHLCHTPEPTCPPHEFKCDNGRCIEMMKLCNHLDDCLDNSDEKGCGINECHDPSISGCDHNCTDTLTSFYCSCRPGYKLMSDKRTCVDIDECTEMPFVCSQKCENVIGSYICKCAPGYLREPDGKTCRQNSNIEPYLIFSNRYYLRNLTIDGYFYSLILEGLDNVVALDFDRVEKRLYWIDTQRQVIERMFLNKTNKETIINHRLPAAESLAVDWVSRKLYWLDARLDGLFVSDLNGGHRRMLAQHCVDANNTFCFDNPRGLALHPQYGYLYWADWGHRAYIGRVGMDGTNKSVIISTKLEWPNGITIDYTNDLLYWADAHLGYIEYSDLEGHHRHTVYDGALPHPFAITIFEDTIYWTDWNTRTVEKGNKYDGSNRQTLVNTTHRPFDIHVYHPYRQPIVSNPCGTNNGGCSHLCLIKPGGKGFTCECPDDFRTLQLSGSTYCMPMCSSTQFLCANNEKCIPIWWKCDGQKDCSDGSDELALCPQRFCRLGQFQCSDGNCTSPQTLCNAHQNCPDGSDEDRLLCENHHCDSNEWQCANKRCIPESWQCDTFNDCEDNSDEDSSHCASRTCRPGQFRCANGRCIPQAWKCDVDNDCGDHSDEPIEECMSSAHLCDNFTEFSCKTNYRCIPKWAVCNGVDDCRDNSDEQGCEERTCHPVGDFRCKNHHCIPLRWQCDGQNDCGDNSDEENCAPRECTESEFRCVNQQCIPSRWICDHYNDCGDNSDERDCEMRTCHPEYFQCTSGHCVHSELKCDGSADCLDASDEADCPTRFPDGAYCQATMFECKNHVCIPPYWKCDGDDDCGDGSDEELHLCLDVPCNSPNRFRCDNNRCIYSHEVCNGVDDCGDGTDETEEHCRKPTPKPCTEYEYKCGNGHCIPHDNVCDDADDCGDWSDELGCNKGKERTCAENICEQNCTQLNEGGFICSCTAGFETNVFDRTSCLDINECEQFGTCPQHCRNTKGSYECVCADGFTSMSDRPGKRCAAEGSSPLLLLPDNVRIRKYNLSSERFSEYLQDEEYIQAVDYDWDPKDIGLSVVYYTVRGEGSRFGAIKRAYIPNFESGRNNLVQEVDLKLKYVMQPDGIAVDWVGRHIYWSDVKNKRIEVAKLDGRYRKWLISTDLDQPAAIAVNPKLGLMFWTDWGKEPKIESAWMNGEDRNILVFEDLGWPTGLSIDYLNNDRIYWSDFKEDVIETIKYDGTDRRVIAKEAMNPYSLDIFEDQLYWISKEKGEVWKQNKFGQGKKEKTLVVNPWLTQVRIFHQLRYNKSVPNLCKQICSHLCLLRPGGYSCACPQGSSFIEGSTTECDAAIELPINLPPPCRCMHGGNCYFDETDLPKCKCPSGYTGKYCEMAFSKGISPGTTAVAVLLTILLIVVIGALAIAGFFHYRRTGSLLPALPKLPSLSSLVKPSENGNGVTFRSGADLNMDIGVSGFGPETAIDRSMAMSEDFVMEMGKQPIIFENPMYSARDSAVKVVQPIQVTVSENVDNKNYGSPINPSEIVPETNPTSPAADGTQVTKWNLFKRKSKQTTNFENPIYAQMENEQKESVAATPPPSPSLPAKPKPPSRRDPTPTYSATEDTFKDTANLVKEDSEV

SEQ ID NO: 51918 - protein, 1225 aa, Homo sapiens
MDRGPAAVACTLLLALVACLAPASGQECDSAHFRCGSGHCIPADWRCDGTKDCSDDADEIGCAVVTCQQGYFKCQSEGQCIPNSWVCDQDQDCDDGSDERQDCSQSTCSSHQITCSNGQCIPSEYRCDHVRDCPDGADENDCQYPTCEQLTCDNGACYNTSQKCDWKVDCRDSSDEINCTEICLHNEFSCGNGECIPRAYVCDHDNDCQDGSDEHACNYPTCGGYQFTCPSGRCIYQNWVCDGEDDCKDNGDEDGCESGPHDVHKCSPREWSCPESGRCISIYKVCDGILDCPGREDENNTSTGKYCSMTLCSALNCQYQCHETPYGGACFCPPGYIINHNDSRTCVEFDDCQIWGICDQKCESRPGRHLCHCEEGYILERGQYCKANDSFGEASIIFSNGRDLLIGDIHGRSFRILVESQNRGVAVGVAFHYHLQRVFWTDTVQNKVFSVDINGLNIQEVLNVSVETPENLAVDWVNNKIYLVETKVNRIDMVNLDGSYRVTLITENLGHPRGIAVDPTVGKTVVHGGSLIPHPFGVSLFEGQVFFTDWTKMAVLKANKFTETNPQVYYQASLRPYGVTVYHSLRQPYATNPCKDNNGGCEQVCVLSHRTDNDGLGFRCKCTFGFQLDTDERHCIGREILAANRVENVESLAFDWISKNLYWTDSHYKSISVMRLADKTRRTVVQYLNNPRSVVVHPFAGYLFFTDWFRPAKIMRAWSDGSHLLPVINTTLGWPNGLAIDWAASRLYWVDAYFDKIEHSTFDGLDRRRLGHIEQMTHPFGLAIFGEHLFFTDWRLGAIIRVRKADGGEMTVIRSGIAYILHLKSYDVNIQTGSNACNQPTHPNGDCSHFCFPVPNFQRVCGCPYGMRLASNHLTCEGDPTNEPPTEQCGLFSFPCKNGRCVPNYYLCDGVDDCHDNSDEQLCGTLNNTCSSSAFTCGHGECIPAHWRCDKRNDCVDGSDEHNCPTHAPASCLDTQYTCDNHQCISKNWVCDTDNDCGDGSDEKNCNSTETCQPSQFNCPNHRCIDLSFVCDGDKDCVDGSDEVGCVLNCTASQFKCASGDKCIGVTNRCDGVFDCSDNSDEAGCPTRPPGMCHSDEFQCQEDGICIPNFWECDGHPDCLYGSDEHNACVPKTCPSSYFHCDNGNCIHRAWLCDRDNDCGDMSDEKDCPTQPFRCPSWQWQCLGHNICVNLSVVCDGIFDCPNGTDESPLCSKFPDHSLLAINSF

SEQ ID NO: 51919 - protein, 646 aa, Homo sapiens
MLAQHCVDANNTFCFDNPRGLALHPQYGYLYWADWGHRAYIGRVGMDGTNKSVIISTKLEWPNGITIDYTNDLLYWADAHLGYIEYSDLEGHHRHTVYDGALPHPFAITIFEDTIYWTDWNTRTVEKGNKYDGSNRQTLVNTTHRPFDIHVYHPYRQPIVSNPCGTNNGGCSHLCLIKPGGKGFTCECPDDFRTLQLSGSTYCMPMCSSTQFLCANNEKCIPIWWKCDGQKDCSDGSDELALCPQRFCRLGQFQCSDGNCTSPQTLCNAHQNCPDGSDEDRLLCENHHCDSNEWQCANKRCIPESWQCDTFNDCEDNSDEDSSHCASRTCRPGQFRCANGRCIPQAWKCDVDNDCGDHSDEPIEECMSSAHLCDNFTEFSCKTNYRCIPKWAVCNGVDDCRDNSDEQGCEERTCHPVGDFRCKNHHCIPLRWQCDGQNDCGDNSDEENCAPRECTESEFRCVNQQCIPSRWICDHYNDCGDNSDERDCGMRLMKLIVPHAFLMVHTARLLCSNAKTMFVSRHIGNVMAMMTVAMVQMKNFTCAWMFPVIHQTVSGVTTIAAFIVMRCAMVWMTVEMELMRQRSTVENRPLNLVQNMNISVAMGIAFHMTMCVMMPMTVVTGPMNWVAIKEKKEHVLKIYASKIVPN

SEQ ID NO: 51920 - protein, 770 aa, Homo sapiens
MEKRAAAGLEGAPGARAQLAVVCLVNIFLTGRLSSAVPALAACSGKLEQHTERRGVIYSPAWPLNYPPGTNCSWYIQGDRGDMITISFRNFDVEESHQCSLDWLLLGPAAPPRQEAFRLCGSAIPPAFISARDHVWIFFHSDASSSGQAQGFRLSYIRGKLGQASCQADEFRCDNGKCLPGPWQCNTVDECGDGSDEGNCSAPASEPPGSLCPGGTFPCSGARSTRCLPVERRCDGLQDCGDGSDEAGCPDLACGRRLGSFYGSFASPDLFGAARGPSDLHCTWLVDTQDSRRVLLQLELRLGYDDYVQVYEGLGERGDRLLQTLSYRSNHRPVSLEAAQGRLTVAYHARARSAGHGFNATYQVKGYCLPWEQPCGSSSDSDGGSLGDQGCFSEPQRCDGWWHCASGRDEQGCPACPPDQYPCEGGSGLCYTPADRCNNQKSCPDGADEKNCFSCQPGTFHCGTNLCIFETWRCDGQEDCQDGSDEHGCLAAVPRKVITAALIGSLVCGLLLVIALGCAFKLYSLRTQEYRAFETQMTRLEAEFVRREAPPSYGQLIAQGLIPPVEDFPVYSASQASVLQNLRTAMRRQMRRHASRRGPSRRRLGRLWNRLFHRPRAPRGQIPLLTAARPSQTVLGDGFLQPAPGAAPDPPAPLMDTGSTRAAGDRPPSAPGRAPEVGPSGPPLPSGLRDPECRPVDKDRKVCREPLVDGPAPADAPREPCSAQDPHPQVSTASSTLGPHSPEPLGVCRNPPPPCSPMLEASDDEALLVC

SEQ ID NO: 51921 - protein, 285 aa, Homo sapiens
MGNHLPAFGPRPPGRREALLSPDCPLLRLHPTGKLGQASCQADEFRCDNGKCLPGPWQCNTVDECGDGSDEGNCSAPASEPPGSLCPGGTFPCSGARSTRCLPVERRCDGLQDCGDGSDEAGCPDLACGRRLGSFYGSFASPDLFGAARGPSDLHCTWLVDTQDSRRVLLQLELRLGYDDYVQVYEGLGERGDRLLQTLSYRSNHRPVSLEAAQGRLTVAYHARARSAGHGFNATYQVKGYCLPWEQPCGSSSDSDGGSLGDQGCFSEPQRCDGWWHCASGRDEQ

SEQ ID NO: 51922 - protein, 1905 aa, Homo sapiens
MRRQWGALLLGALLCAHGLASSPECACGRSHFTCAVSALGECTCIPAQWQCDGDNDCGDHSDEDGCILPTCSPLDFHCDNGKCIRRSWVCDGDNDCEDDSDEQDCPPRECEEDEFPCQNGYCIRSLWHCDGDNDCGDNSDEQCDMRKCSDKEFRCSDGSCIAEHWYCDGDTDCKDGSDEENCPSAVPAPPCNLEEFQCAYGRCILDIYHCDGDDDCGDWSDESDCSSHQPCRSGEFMCDSGLCINAGWRCDGDADCDDQSDERNCTTSMCTAEQFRCHSGRCVRLSWRCDGEDDCADNSDEENCENTGSPQCALDQFLCWNGRCIGQRKLCNGVNDCGDNSDESPQQNCRPRTGEENCNVNNGGCAQKCQMVRGAVQCTCHTGYRLTEDGHTCQDVNECAEEGYCSQGCTNSEGAFQCWCETGYELRPDRRSCKALGPEPVLLFANRIDIRQVLPHRSEYTLLLNNLENAIALDFHHRRELVFWSDVTLDRILRANLNGSNVEEVVSTGLESPGGLAVDWVHDKLYWTDSGTSRIEVANLDGAHRKVLLWQNLEKPRAIALHPMEGTIYWTDWGNTPRIEASSMDGSGRRIIADTHLFWPNGLTIDYAGRRMYWVDAKHHVIERANLDGSHRKAVISQGLPHPFAITVFEDSLYWTDWHTKSINSANKFTGKNQEIIRNKLHFPMDIHTLHPQRQPAGKNRCGDNNGGCTHLCLPSGQNYTCACPTGFRKISSHACAQSLDKFLLFARRMDIRRISFDTEDLSDDVIPLADVRSAVALDWDSRDDHVYWTDVSTDTISRAKWDGTGQEVVVDTSLESPAGLAIDWVTNKLYWTDAGTDRIEVANTDGSMRTVLIWENLDRPRDIVVEPMGGYMYWTDWGASPKIERAGMDASGRQVIISSNLTWPNGLAIDYGSQRLYWADAGMKTIEFAGLDGSKRKVLIGSQLPHPFGLTLYGERIYWTDWQTKSIQSADRLTGLDRETLQENLENLMDIHVFHRRRPPVSTPCAMENGGCSHLCLRSPNPSGFSCTCPTGINLLSDGKTCSPGMNSFLIFARRIDIRMVSLDIPYFADVVVPINITMKNTIAIGVDPQEGKVYWSDSTLHRISRANLDGSQHEDIITTGLQTTDGLAVDAIGRKVYWTDTGTNRIEVGNLDGSMRKVLVWQNLDSPRAIVLYHEMGFMYWTDWGENAKLERSGMDGSDRAVLINNNLGWPNGLTVDKASSQLLWADAHTERIEAADLNGANRHTLVSPVQHPYGLTLLDSYIYWTDWQTRSIHRADKGTGSNVILVRSNLPGLMDMQAVDRAQPLGFNKCGSRNGGCSHLCLPRPSGFSCACPTGIQLKGDGKTCDPSPETYLLFSSRGSIRRISLDTSDHTDVHVPVPELNNVISLDYDSVDGKVYYTDVFLDVIRRADLNGSNMETVIGRGLKTTDGLAVDWVARNLYWTDTGRNTIEASRLDGSCRKVLINNSLDEPRAIAVFPRKGYLFWTDWGHIAKIERANLDGSERKVLINTDLGWPNGLTLDYDTRRIYWVDAHLDRIESADLNGKLRQVLVSHVSHPFALTQQDRWIYWTDWQTKSIQRVDKYSGRNKETVLANVEGLMDIIVVSPQRQTGTNACGVNNGGCTHLCFARASDFVCACPDEPDSRPCSLVPGLVPPAPRATGMSEKSPVLPNTPPTTLYSSTTRTRTSLEEVEGRCSERDARLGLCARSNDAVPAAPGEGLHISYAIGGLLSILLILVVIAALMLYRHKKSKFTDPGMGNLTYSNPSYRTSTQEVKIEAIPKPAMYNQLCYKKEGGPDHNYTKEKIKIVEGICLLSGDDAEWDDLKQLRSSRGGLLRDHVCMKTDTVSIQASSGSLDDTETEQLLQEEQSECSSVHTAATPERRGSLPDTGWKHERKLSSESQV

SEQ ID NO: 51923 - protein, 1615 aa, Homo sapiens
MEAAPPGPPWPLLLLLLLLLALCGCPAPAAASPLLLFANRRDVRLVDAGGVKLESTIVVSGLEDAAAVDFQFSKGAVYWTDVSEEAIKQTYLNQTGAAVQNVVISGLVSPDGLACDWVGKKLYWTDSETNRIEVANLNGTSRKVLFWQDLDQPRAIALDPAHGYMYWTDWGETPRIERAGMDGSTRKIIVDSDIYWPNGLTIDLEEQKLYWADAKLSFIHRANLDGSFRQKVVEGSLTHPFALTLSGDTLYWTDWQTRSIHACNKRTGGKRKEILSALYSPMDIQVLSQERQPFFHTRCEEDNGGCSHLCLLSPSEPFYTCACPTGVQLQDNGRTCKAGAEEVLLLARRTDLRRISLDTPDFTDIVLQVDDIRHAIAIDYDPLEGYVYWTDDEVRAIRRAYLDGSGAQTLVNTEINDPDGIAVDWVARNLYWTDTGTDRIEVTRLNGTSRKILVSEDLDEPRAIALHPVMGLMYWTDWGENPKIECANLDGQERRVLVNASLGWPNGLALDLQEGKLYWGDAKTDKIEVINVDGTKRRTLLEDKLPHIFGFTLLGDFIYWTDWQRRSIERVHKVKASRDVIIDQLPDLMGLKAVNVAKVVGTNPCADRNGGCSHLCFFTPHATRCGCPIGLELLSDMKTCIVPEAFLVFTSRAAIHRISLETNNNDVAIPLTGVKEASALDFDVSNNHIYWTDVSLKTISRAFMNGSSVEHVVEFGLDYPEGMAVDWMGKNLYWADTGTNRIEVARLDGQFRQVLVWRDLDNPRSLALDPTKGYIYWTEWGGKPRIVRAFMDGTNCMTLVDKVGRANDLTIDYADQRLYWTDLDTNMIESSNMLGQERVVIADDLPHPFGLTQYSDYIYWTDWNLHSIERADKTSGRNRTLIQGHLDFVMDILVFHSSRQDGLNDCMHNNGQCGQLCLAIPGGHRCGCASHYTLDPSSRNCSPPTTFLLFSQKSAISRMIPDDQHSPDLILPLHGLRNVKAIDYDPLDKFIYWVDGRQNIKRAKDDGTQPFVLTSLSQGQNPDRQPHDLSIDIYSRTLFWTCEATNTINVHRLSGEAMGVVLRGDRDKPRAIVVNAERGYLYFTNMQDRAAKIERAALDGTEREVLFTTGLIRPVALVVDNTLGKLFWVDADLKRIESCDLSGANRLTLEDANIVQPLGLTILGKHLYWIDRQQQMIERVEKTTGDKRTRIQGRVAHLTGIHAVEEVSLEEFSAHPCARDNGGCSHICIAKGDGTPRCSCPVHLVLLQNLLTCGEPPTCSPDQFACATGEIDCIPGAWRCDGFPECDDQSDEEGCPVCSAAQFPCARGQCVDLRLRCDGEADCQDRSDEADCDAICLPNQFRCASGQCVLIKQQCDSFPDCIDGSDELMCEITKPPSDDSPAHSSAIGPVIGIILSLFVMGGVYFVCQRVVCQRYAGANGPFPHEYVSGTPHVPLNFIAPGGSQHGPFTGIACGKSMMSSVSLMGGRGGVPLYDRNHVTGASSSSSSSTKATLYPPILNPPPSPATDPSLYNMDMFYSSNIPATARPYRPYIIRGMAPPTTPCSTDVCDSDYSASRWKASKYYLDLNSDSDPYPPPPTPHSQYLSAEDSCPPSPATERSYFHLFPPPPSPCTDSS

SEQ ID NO: 51924 - protein, 1613 aa, Homo sapiens
MGAVLRSLLACSFCVLLRAAPLLLYANRRDLRLVDATNGKENATIVVGGLEDAAAVDFVFSHGLIYWSDVSEEAIKRTEFNKTESVQNVVVSGLLSPDGLACDWLGEKLYWTDSETNRIEVSNLDGSLRKVLFWQELDQPRAIALDPSSGFMYWTDWGEVPKIERAGMDGSSRFIIINSEIYWPNGLTLDYEEQKLYWADAKLNFIHKSNLDGTNRQAVVKGSLPHPFALTLFEDILYWTDWSTHSILACNKYTGEGLREIHSDIFSPMDIHAFSQQRQPNATNPCGIDNGGCSHLCLMSPVKPFYQCACPTGVKLLENGKTCKDGATELLLLARRTDLRRISLDTPDFTDIVLQLEDIRHAIAIDYDPVEGYIYWTDDEVRAIRRSFIDGSGSQFVVTAQIAHPDGIAVDWVARNLYWTDTGTDRIEVTRLNGTMRKILISEDLEEPRAIVLDPMVGYMYWTDWGEIPKIERAALDGSDRVVLVNTSLGWPNGLALDYDEGKIYWGDAKTDKIEVMNTDGTGRRVLVEDKIPHIFGFTLLGDYVYWTDWQRRSIERVHKRSAEREVIIDQLPDLMGLKATNVHRVIGSNPCAEENGGCSHLCLYRPQGLRCACPIGFELISDMKTCIVPEAFLLFSRRADIRRISLETNNNNVAIPLTGVKEASALDFDVTDNRIYWTDISLKTISRAFMNGSALEHVVEFGLDYPEGMAVDWLGKNLYWADTGTNRIEVSKLDGQHRQVLVWKDLDSPRALALDPAEGFMYWTEWGGKPKIDRAAMDGSERTTLVPNVGRANGLTIDYAKRRLYWTDLDTNLIESSNMLGLNREVIADDLPHPFGLTQYQDYIYWTDWSRRSIERANKTSGQNRTIIQGHLDYVMDILVFHSSRQSGWNECASSNGHCSHLCLAVPVGGFVCGCPAHYSLNADNRTCSAPTTFLLFSQKSAINRMVIDEQQSPDIILPIHSLRNVRAIDYDPLDKQLYWIDSRQNMIRKAQEDGSQGFTVVVSSVPSQNLEIQPYDLSIDIYSRYIYWTCEATNVINVTRLDGRSVGVVLKGEQDRPRAVVVNPEKGYMYFTNLQERSPKIERAALDGTEREVLFFSGLSKPIALALDSRLGKLFWADSDLRRIESSDLSGANRIVLEDSNILQPVGLTVFENWLYWIDKQQQMIEKIDMTGREGRTKVQARIAQLSDIHAVKELNLQEYRQHPCAQDNGGCSHICLVKGDGTTRCSCPMHLVLLQDELSCGEPPTCSPQQFTCFTGEIDCIPVAWRCDGFTECEDHSDELNCPVCSESQFQCASGQCIDGALRCNGDANCQDKSDEKNCEVLCLIDQFRCANGQCIGKHKKCDHNVDCSDKSDELDCYPTEEPAPQATNTVGSVIGVIVTIFVSGTVYFICQRMLCPRMKGDGETMTNDYVVHGPASVPLGYVPHPSSLSGSLPGMSRGKSMISSLSIMGGSSGPPYDRAHVTGASSSSSSSTKGTYFPAILNPPPSPATERSHYTMEFGYSSNSPSTHRSYSYRPYSYRHFAPPTTPCSTDVCDSDYAPSRRMTSVATAKGYTSDLNYDSEPVPPPPTPRSQYLSAEENYESCPPSPYTERSYSHHLYPPPPSPCTDSS

SEQ ID NO: 51925 - protein, 1478 aa, Homo sapiens
  VARIANT 1: note = MOD_RES - Any amino acid
XLDQPRAIALDPSSGFMYWTDWGEVPKIERAGMDGSSRFIIINSEIYWPNGLTLDYEEQKLYWADAKLNFIHKSNLDGTNRQAVVKGSLPHPFALTLFEDILYWTDWSTHSILACNKYTGEGLREIHSDIFSPMDIHAFSQQRQPNATNPCGIDNGGCSHLCLMSPVKPFYQCACPTGVKLLENGKTCKDGATELLLLARRTDLRRISLDTPDFTDIVLQLEDIRHAIAIDYDPVEGYIYWTDDEVRAIRRSFIDGSGSQFVVTAQIAHPDGIAVDWVARNLYWTDTGTDRIEVTRLNGTMRKILISEDLEEPRAIVLDPMVGYMYWTDWGEIPKIERAALDGSDRVVLVNTSLGWPNGLALDYDEGKIYWGDAKTDKIEVMNTDGTGRRVLVEDKIPHIFGFTLLGDYVYWTDWQRRSIERVHKRSAEREVIIDQLPDLMGLKATNVHRVIGSNPCAEENGGCSHLCLYRPQGLRCACPIGFELISDMKTCIVPEAFLLFSRRADIRRISLETNNNNVAIPLTGVKEASALDFDVTDNRIYWTDISLKTISRAFMNGSALEHVVEFGLDYPEGMAVDWLGKNLYWADTGTNRIEVSKLDGQHRQVLVWKDLDSPRALALDPAEGFMYWTEWGGKPKIDRAAMDGSERTTLVPNVGRANGLTIDYAKRRLYWTDLDTNLIESSNMLGLNREVIADDLPHPFGLTQYQDYIYWTDWSRRSIERANKTSGQNRTIIQGHLDYVMDILVFHSSRQSGWNECASSNGHCSHLCLAVPVGGFVCGCPAHYSLNADNRTCSAPTTFLLFSQKSAINRMVIDEQQSPDIILPIHSLRNVRAIDYDPLDKQLYWIDSRQNMIRKAQEDGSQGFTVVVSSVPSQNLEIQPYDLSIDIYSRYIYWTCEATNVINVTRLDGRSVGVVLKGEQDRPRAVVVNPEKGYMYFTNLQERSPKIERAALDGTEREVLFFSGLSKPIALALDSRLGKLFWADSDLRRIESSDLSGANRIVLEDSNILQPVGLTVFENWLYWIDKQQQMIEKIDMTGREGRTKVQARIAQLSDIHAVKELNLQEYRQHPCAQDNGGCSHICLVKGDGTTRCSCPMHLVLLQDELSCGEPPTCSPQQFTCFTGEIDCIPVAWRCDGFTECEDHSDELNCPVCSESQFQCASGQCIDGALRCNGDANCQDKSDEKNCEVLCLIDQFRCANGQCIGKHKKCDHNVDCSDKSDELDCYPTEEPAPQATNTVGSVIGVIVTIFVSGTVYFICQRMLCPRMKGDGETMTNDYVVHGPASVPLGYVPHPSSLSGSLPGMSRGKSMISSLSIMGGSSGPPYDRAHVTGASSSSSSSTKGTYFPAILNPPPSPATERSHYTMEFGYSSNSPSTHRSYSYRPYSYRHFAPPTTPCSTDVCDSDYAPSRRMTSVATAKGYTSDLNYDSEPVPPPPTPRSQYLSAEENYESCPPSPYTERSYSHHLYPPPPSPCTDSS

SEQ ID NO: 51926 - protein, 793 aa, Homo sapiens
MGLPEPGPLRLLALLLLLLLLLLLQLQHLAAAAADPLLGGQGPAKDCEKDQFQCRNERCIPSVWRCDEDDDCLDHSDEDDCPKKTCADSDFTCDNGHCIHERWKCDGEEECPDGSDESEATCTKQVCPAEKLSCGPTSHKCVPASWRCDGEKDCEGGADEAGCATWLNECLHNNGGCSHICTDLKIGFECTCPAGFQLLDQKTCGDIDECKDPDACSQICVNYKGYFKCECYPGYEMDLLTKNCKAAAGKSPSLIFTNRHEVRRIDLVKRNYSRLIPMLKNVVALDVEVATNRIYWCDLSYRKIYSAYMDKASDPKEQEVLIDEQLHSPEGLAVDWVHKHIYWTDSGNKTISVATVDGGRRRTLFSRNLSEPRAIAVDPLRGFMYWSDWGDQAKIEKSGLNGVDRQTLVSDNIEWPNGITLDLLSQRLYWVDSKLHQLSSIDFSGGNRKTLISSTDFLSHPFGIAVFEDKVFWTDLENEAIFSANRLNGLEISILAENLNNPHDIVIFHELKQPRAPDACELSVQPNGGCEYLCLPAPQISSHSPKYTCACPDTMWLGPDMKRCYRAPQSTSTTTLASTMTRTVPATTRAPGTTVHRSTYQNHSTETPSLTAAVPSSVSVPRAPSISPSTLSPATSNHSQHYANEDSKMGSTVTAAVIGIIVPIVVIALLCMSGYLIWRNWKRKNTKSMNFDNPVYRKTTEEEDEDELHIGRTAQIGHVYPAAISSFDRPLWAEPCLGETREPEDPAPALKELFVLPGEPRSQLHQLPKNPLSELPVVKSKRVALSLEDDGLP

SEQ ID NO: 51927 - protein, 963 aa, Homo sapiens
MGLPEPGPLRLLALLLLLLLLLLLQLQHLAAAAADPLLGGQGPAKDCEKDQFQCRNERCIPSVWRCDEDDDCLDHSDEDDCPKKTCADSDFTCDNGHCIHERWKCDGEEECPDGSDESEATCTKQVCPAEKLSCGPTSHKCVPASWRCDGEKDCEGGADEAGCATLCAPHEFQCGNRSCLAAVFVCDGDDDCGDGSDERGCADPACGPREFRCGGDGGGACIPERWVCDRQFDCEDRSDEAAELCGRPGPGATSAPAACATASQFACRSGECVHLGWRCDGDRDCKDKSDEADCPLGTCRGDEFQCGDGTCVLAIKHCNQEQDCPDGSDEAGCLQGLNECLHNNGGCSHICTDLKIGFECTCPAGFQLLDQKTCGDIDECKDPDACSQICVNYKGYFKCECYPGYEMDLLTKNCKAAAGKSPSLIFTNRHEVRRIDLVKRNYSRLIPMLKNVVALDVEVATNRIYWCDLSYRKIYSAYMDKASDPKEQEVLIDEQLHSPEGLAVDWVHKHIYWTDSGNKTISVATVDGGRRRTLFSRNLSEPRAIAVDPLRGFMYWSDWGDQAKIEKSGLNGVDRQTLVSDNIEWPNGITLDLLSQRLYWVDSKLHQLSSIDFSGGNRKTLISSTDFLSHPFGIAVFEDKVFWTDLENEAIFSANRLNGLEISILAENLNNPHDIVIFHELKQPRAPDACELSVQPNGGCEYLCLPAPQISSHSPKYTCACPDTMWLGPDMKRCYRAPQSTSTTTLASTMTRTVPATTRAPGTTVHRSTYQNHSTETPSLTAAVPSSVSVPRAPSISPSTLSPATSNHSQHYANEDSKMGSTVTAAVIGIIVPIVVIALLCMSGYLIWRNWKRKNTKSMNFDNPVYRKTTEEEDEDELHIGRTAQIGHVYPAAISSFDRPLWAEPCLGETREPEDPAPALKELFVLPGEPRSQLHQLPKNPLSELPVVKSKRVALSLEDDGLP

SEQ ID NO: 51928 - protein, 700 aa, Homo sapiens
MGLPEPGPLRLLALLLLLLLLLLLQLQHLAAAAADPLLGGQGPAKDCEKDQFQCRNERCIPSVWRCDEDDDCLDHSDEDDCPKKTCADSDFTCDNGHCIHERWKCDGEEECPDGSDESEATCTKQVCPAEKLSCGPTSHKCVPASWRCDGEKDCEGGADEAGCATSLGTCRGDEFQCGDGTCVLAIKHCNQEQDCPDGSDEAGCLQGLNECLHNNGGCSHICTDLKIGFECTCPAGFQLLDQKTCGDIDECKDPDACSQICVNYKGYFKCECYPGYEMDLLTKNCKAAAGKSPSLIFTNRHEVRRIDLVKRNYSRLIPMLKNVVALDVEVATNRIYWCDLSYRKIYSAYMDKASDPKEQEVLIDEQLHSPEGLAVDWVHKHIYWTDSGNKTISVATVDGGRRRTLFSRNLSEPRAIAVDPLRGFMYWSDWGDQAKIEKSGLNGVDRQTLVSDNIEWPNGITLDLLSQRLYWVDSKLHQLSSIDFSGGNRKTLISSTDFLSHPFGIAVFEDKVFWTDLENEAIFSANRLNGLEISILAENLNNPHDIVIFHELKQPRAPDACELSVQPNGGCEYLCLPAPQISSHSPKYTCACPDTMWLGPDMKRCYRDANEDSKMGSTVTAAVIGIIVPIVVIALLCMSGYLIWRNWKRKNTKSMNFDNPVYRKTTEEEDEDELHIGRTAQIGHVYPARVALSLEDDGLP

SEQ ID NO: 51929 - protein, 904 aa, Homo sapiens
MGLPEPGPLRLLALLLLLLLLLLLQLQHLAAAAADPLLGGQGPAKDCEKDQFQCRNERCIPSVWRCDEDDDCLDHSDEDDCPKKTCADSDFTCDNGHCIHERWKCDGEEECPDGSDESEATCTKQVCPAEKLSCGPTSHKCVPASWRCDGEKDCEGGADEAGCATLCAPHEFQCGNRSCLAAVFVCDGDDDCGDGSDERGCADPACGPREFRCGGDGGGACIPERWVCDRQFDCEDRSDEAAELCGRPGPGATSAPAACATASQFACRSGECVHLGWRCDGDRDCKDKSDEADCPLGTCRGDEFQCGDGTCVLAIKHCNQEQDCPDGSDEAGCLQGLNECLHNNGGCSHICTDLKIGFECTCPAGFQLLDQKTCGDIDECKDPDACSQICVNYKGYFKCECYPGYEMDLLTKNCKAAAGKSPSLIFTNRHEVRRIDLVKRNYSRLIPMLKNVVALDVEVATNRIYWCDLSYRKIYSAYMDKASDPKEQEVLIDEQLHSPEGLAVDWVHKHIYWTDSGNKTISVATVDGGRRRTLFSRNLSEPRAIAVDPLRGFMYWSDWGDQAKIEKSGLNGVDRQTLVSDNIEWPNGITLDLLSQRLYWVDSKLHQLSSIDFSGGNRKTLISSTDFLSHPFGIAVFEDKVFWTDLENEAIFSANRLNGLEISILAENLNNPHDIVIFHELKQPRAPDACELSVQPNGGCEYLCLPAPQISSHSPKYTCACPDTMWLGPDMKRCYRAPQSTSTTTLASTMTRTVPATTRAPGTTVHRSTYQNHSTETPSLTAAVPSSVSVPRAPSISPSTLSPATSNHSQHYANEDSKMGSTVTAAVIGIIVPIVVIALLCMSGYLIWRNWKRKNTKSMNFDNPVYRKTTEEEDEDELHIGRTAQIGHVYPARVALSLEDDGLP

SEQ ID NO: 51930 - protein, 357 aa, Homo sapiens
MAPRRVRSFLRGLPALLLLLLFLGPWPAASHGGKYSREKNQPKPSPKRESGEEFRMEKLNQLWEKAQRLHLPPVRLAELHADLKIQERDELAWKKLKLDGLDEDGEKEARLIRNLNVILAKYGLDGKKDARQVTSNSLSGTQEDGLDDPRLEKLWHKAKTSGKFSGEELDKLWREFLHHKEKVHEYNVLLETLSRTEEIHENVISPSDLSDIKGSVLHSRHTELKEKLRSINQGLDRLRRVSHQGYSTEAEFEEPRVIDLWDLAQSANLTDKELEAFREELKHFEAKIEKHNHYQKQLEIAHEKLRHAESVGDGERVSRSREKHALLEGRTKELGYTVKKHLQDLSGRISRARHNEL

SEQ ID NO: 51931 - protein, 133 aa, Homo sapiens
MNYMPGTASLIEDIDKKHLVLLRDGRTLIGFLRSIDQFANLVLHQTVERIHVGKKYGDIPRGIFVVRGENVVLLGEIDLEKESDTPLQQVSIEEILEEQRVEQQTKLEAEKLKVQALKDRGLSIPRADTLDEY

SEQ ID NO: 51932 - protein, 195 aa, Homo sapiens
MAAPPGEYFSVGSQVSCRTCQEQRLQGEVVAFDYQSKMLALKCPSSSGKPNHADILLINLQYVSEVEIINDRTETPPPLASLNVSKLASKARTEKEEKLSQAYAISAGVSLEGQQLFQTIHKTIKDCKWQEKNIVVMEEVVITPPYQVENCKGKEGSALSHVRKIVEKHFRDVESQKILQRSQAQQPQKEAALSS

SEQ ID NO: 51933 - protein, 195 aa, Homo sapiens; identical to SEQ ID NO: 51932

SEQ ID NO: 51934 - protein, 95 aa, Homo sapiens
MLFYSFFKSLVGKDVVVELKNDLSICGTLHSVDQYLNIKLTDISVTDPEKYPHMLSVKNCFIRGSVVRYVQLPADEVDTQLLQDAARKEALQQKQ

SEQ ID NO: 51935 - protein, 95 aa, Homo sapiens; identical to SEQ ID NO: 51934

SEQ ID NO: 51936 - protein, 95 aa, Homo sapiens; identical to SEQ ID NO: 51934

SEQ ID NO: 51937 - protein, 95 aa, Homo sapiens; identical to SEQ ID NO: 51934

SEQ ID NO: 51938 - protein, 95 aa, Homo sapiens; identical to SEQ ID NO: 51934

SEQ ID NO: 51939 - protein, 95 aa, Homo sapiens; identical to SEQ ID NO: 51934

SEQ ID NO: 51940 - protein, 102 aa, Homo sapiens
MADDVDQQQTTNTVEEPLDLIRLSLDERIYVKMRNDRELRGRLHAYDQHLNMILGDVEETVTTIEIDEETYEEIYKSTKRNIPMLFVRGDGVVLVAPPLRVG

SEQ ID NO: 51941 - protein, 139 aa, Homo sapiens
MLPLSLLKTAQNHPMLVELKNGETYNGHLVSCDNWMNINLREVICTSRDGDKFWRMPECYIRGSTIKYLRIPDEIIDMVKEEVVAKGRGRGGLQQQKQQKGRGMGGAGRGVFGGRGRGGIPGTGRGQPEKKPGRQAGKQ

SEQ ID NO: 51942 - protein, 139 aa, Homo sapiens; identical to SEQ ID NO: 51941

SEQ ID NO: 51943 - protein, 91 aa, Homo sapiens
MAANATTNPSQLLPLELVDKCIGSRIHIVMKSDKEIVGTLLGFDDFVNMVLEDVTEFEITPEGRRITKLDQILLNGNNITMLVPGGEGPEV

SEQ ID NO: 51944 - protein, 80 aa, Homo sapiens
MSLRKQTPSDFLKQIIGRPVVVKLNSGVDYRGVLACLDGYMNIALEQTEEYVNGQLKNKYGDAFIRGNNVLYISTQKRRM

SEQ ID NO: 51945 - protein, 80 aa, Homo sapiens; identical to SEQ ID NO: 51944

SEQ ID NO: 51946 - protein, 80 aa, Homo sapiens; identical to SEQ ID NO: 51944

SEQ ID NO: 51947 - protein, 80 aa, Homo sapiens; identical to SEQ ID NO: 51944

SEQ ID NO: 51948 - protein, 103 aa, Homo sapiens
MADKEKKKKESILDLSKYIDKTIRVKFQGGREASGILKGFDPLLNLVLDGTIEYMRDPDDQYKLTEDTRQLGLVVCRGTSVVLICPQDGMEAIPNPFIQQQDA

SEQ ID NO: 51949 - protein, 371 aa, Homo sapiens
MSAQAQMRALLDQLMGTARDGDETRQRVKFTDDRVCKSHLLDCCPHDILAGTRMDLGECTKIHDLALRADYEIASKERDLFFELDAMDHLESFIAECDRRTELAKKRLAETQEEISAEVSAKAEKVHELNEEIGKLLAKAEQLGAEGNVDESQKILMEVEKVRAKKKEAEEEYRNSMPASSFQQQKLRVCEVCSAYLGLHDNDRRLADHFGGKLHLGFIQIREKLDQLRKTVAEKQEKRNQDRLRRREEREREERLSRRSGSRTRDRRRSRSRDRRRRRSRSTSRERRKLSRSRSRDRHRRHRSRSRSHSRGHRRASRDRSAKYKFSRERASREESWESGRSERGPPDWRLESSNGKMASRRSEEKEAGEI

SEQ ID NO: 51950 - protein, 325 aa, Homo sapiens
MSAQAQMRALLDQLMGTARDGDETRQRVKFTDDRVCKSHLLDCCPHDILAGTRMDLGECTKIHDLALRADYEIASKERDLFFELDAMDHLESFIAECDRRTELAKKRLAETQEEISAEVSAKAEKVHELNEEIGKLLAKAEQLGAEGNVDESQKILMEVEKVRAKKKEAEEEYRNSMPASSFQQQKLRVCEVCSAYLGLHDNDRRLADHFGGKLHLGFIQIREKLDQLRKTVAEKQEKRNQDRLRRREEREREERLSRRSGSRTRDRRRSRSRDRRRRRSRSTSRERRKLSRSRSRDRHRRHRSRSRSHSRGHRRASRDRSAKYK

SEQ ID NO: 51951 - protein, 272 aa, Homo sapiens
MDLGECTKIHDLALRADYEIASKERDLFFELDAMDHLESFIAECDRRTELAKKRLAETQEEISAEVSAKAEKVHELNEEIGKLLAKAEQLGAEGNVDESQKILMEVEKVRAKKKEAEEEYRNSMPASSFQQQKLRVCEVCSAYLGLHDNDRRLADHFGGKLHLGFIQIREKLDQLRKTVAEKQEKRNQDRLRRREEREREERLSRRSGSRTRDRRRSRSRDRRRRRSRSTSRERRKLSRSRSRDRHRRHRSRSRSHSRGHRRASRDRSAKYK

SEQ ID NO: 51952 - protein, 325 aa, Homo sapiens; identical to SEQ ID NO: 51950

SEQ ID NO: 51953 - protein, 32 aa, Homo sapiens
MDLGECTKIHDLALRADYEIASKERDLFFELD

SEQ ID NO: 51954 - protein, 182 aa, Homo sapiens
MDHLESFIAECDRRTELAKKRLAETQEEISAEVSAKAEKVHELNEEIGKLLAKAEQLGAEGNVDESQKILMEVEKVRAKKKEAEEEYRNSMPASSFQQQKLRVCEVCSAYLGLHDNDRRLADHFGGKLHLGFIQIREKLDQLRKTVAEKQEKRNQDRLRRREEREREERLSRRSGSRTRDRR

SEQ ID NO: 51955 - protein, 60 aa, Homo sapiens
  VARIANT 1: note = MOD_RES - Any amino acid
XRRRSRSRDRRRRRSRSTSRERRKLSRSRSRDRHRRHRSRSRSHSRGHRRASRDRSAKYK

SEQ ID NO: 51956 - protein, 84 aa, Homo sapiens
MDHLESFIAECDRRTELAKKRLAETQEEISAEVSAKAEKVHELNEEIGKLLAKAEQLGAEGNVDESQKILMEVEKVRAKKKEAE

SEQ ID NO: 51957 - protein, 391 aa, Homo sapiens
MPAYLNLQGSVRKAPHSPSRDTTRQRIKFSDDRVCKSHLLNCCPHDVLSGTRMDLGECLKVHDLALRADYEIASKEQDFFFELDAMDHLQSFIADCDRRTEVAKKRLAETQEEISAEVAAKAERVHELNEEIGKLLAKVEQLGAEGNVEESQKVMDEVEKARAKKREAEEVYRNSMPASSFQQQKLRVCEVCSAYLGLHDNDRRLADHFGGKLHLGFIEIREKLEELKRVVAEKQEKRNQERLKRREEREREEREKLRRSRSHSKNPKRSRSREHRRHRSRSMSRERKRRTRSKSREKRHRHRSRSSSRSRSRSHQRSRHSSRDRSRERSKRRSSKERFRDQDLASCDRDRSSRDRSPRDRDRKDKKRSYESANGRSEDRRSSEEREAGEI

SEQ ID NO: 51958 - protein, 392 aa, Homo sapiens
MSAQAQMRAMLDQLMGTSRDGDTTRQRIKFSDDRVCKSHLLNCCPHDVLSGTRMDLGECLKVHDLALRADYEIASKEQDFFFELDAMDHLQSFIADCDRRTEVAKKRLAETQEEISAEVAAKAERVHELNEEIGKLLAKVEQLGAEGNVEESQKVMDEVEKARAKKREAEEVYRNSMPASSFQQQKLRVCEVCSAYLGLHDNDRRLADHFGGKLHLGFIEIREKLEELKRVVAEKQEKRNQERLKRREEREREEREKLRRSRSHSKNPKRSRSREHRRHRSRSMSRERKRRTRSKSREKRHRHRSRSSSRSRSRSHQRSRHSSRDRSRERSKRRSSKERFRDQDLASCDRDRSSRDRSPRDRDRKDKKRSYESANGRSEDRRSSEEREAGEI

SEQ ID NO: 51959 - protein, 389 aa, Homo sapiens
MVIHSQLKKIQGASERMGDTTRQRIKFSDDRVCKSHLLNCCPHDVLSGTRMDLGECLKVHDLALRADYEIASKEQDFFFELDAMDHLQSFIADCDRRTEVAKKRLAETQEEISAEVAAKAERVHELNEEIGKLLAKVEQLGAEGNVEESQKVMDEVEKARAKKREAEEVYRNSMPASSFQQQKLRVCEVCSAYLGLHDNDRRLADHFGGKLHLGFIEIREKLEELKRVVAEKQEKRNQERLKRREEREREEREKLRRSRSHSKNPKRSRSREHRRHRSRSMSRERKRRTRSKSREKRHRHRSRSSSRSRSRSHQRSRHSSRDRSRERSKRRSSKERFRDQDLASCDRDRSSRDRSPRDRDRKDKKRSYESANGRSEDRRSSEEREAGEI

SEQ ID NO: 51960 - protein, 458 aa, Homo sapiens
MAALGSPSHTFRGLLRELRYLSAATGRPYRDTAAYRYLVKAFRAHRVTSEKLCRAQHELHFQAATYLCLLRSIRKHVALHQEFHGKGDTTRQRIKFSDDRVCKSHLLNCCPHDVLSGTRMDLGECLKVHDLALRADYEIASKEQDFFFELDAMDHLQSFIADCDRRTEVAKKRLAETQEEISAEVAAKAERVHELNEEIGKLLAKVEQLGAEGNVEESQKVMDEVEKARAKKREAEEVYRNSMPASSFQQQKLRVCEVCSAYLGLHDNDRRLADHFGGKLHLGFIEIREKLEELKRVVAEKQEKRNQERLKRREEREREEREKLRRSRSHSKNPKRSRSREHRRHRSRSMSRERKRRTRSKSREKRHRHRSRSSSRSRSRSHQRSRHSSRDRSRERSKRRSSKERFRDQDLASCDRDRSSRDRSPRDRDRKDKKRSYESANGRSEDRRSSEEREAGEI

SEQ ID NO: 51961 - protein, 392 aa, Homo sapiens; identical to SEQ ID NO: 51958

SEQ ID NO: 51962 - protein, 83 aa, Homo sapiens
MSAQAQMRAMLDQLMGTSRDGSMYLCLPTSICKGVSERPRIRQAEIQLVNESNSVMTEYARVTFSTVVLMMSFLELEWILENV

SEQ ID NO: 51963 - protein, 432 aa, Homo sapiens
MISAAQLLDELMGRDRNLAPDEKRSNVRWDHESVCKYYLCGFCPAELFTNTRSDLGPCEKIHDENLRKQYEKSSRFMKVGYERDFLRYLQSLLAEVERRIRRGHARLALSQNQQSSGAAGPTGKNEEKIQVLTDKIDVLLQQIEELGSEGKVEEAQGMMKLVEQLKEERELLRSTTSTIESFAAQEKQMEVCEVCGAFLIVGDAQSRVDDHLMGKQHMGYAKIKATVEELKEKLRKRTEEPDRDERLKKEKQEREEREKEREREREERERKRRREEEEREKERARDRERRKRSRSRSRHSSRTSDRRCSRSRDHKRSRSRERRRSRSRDRRRSRSHDRSERKHRSRSRDRRRSKSRDRKSYKHRSKSRDREQDRKSKEKEKRGSDDKKSSVKSGSREKQSEDTNTESKESDTKNEVNGTSEDIKSEGDTQSN

SEQ ID NO: 51964 - protein, 79 aa, Homo sapiens
MISAAQLLDELMGRDRNLAPDEKRSNVRWDHESVCKYYLCGFCPAELFTNTRSDLDVFGRGDNIRDVSKFLEDDKWMEE

SEQ ID NO: 51965 - protein, 432 aa, Homo sapiens; identical to SEQ ID NO: 51963

SEQ ID NO: 51966 - protein, 236 aa, Homo sapiens
MISAAQLLDELMGRDRNLAPDEKRSNVRWDHESVCKYYLCGFCPAELFTNTRSDLGPCEKIHDENLRKQYEKSSRFMKVGYERDFLRYLQSLLAEVERRIRRGHARLALSQNQQSSGAAGPTGKNEEKIQVLTDKIDVLLQQIEELGSEGKVEEAQGMMKLVEQLKEERELLRSTTSTIESFAAQEKQMEVCEVCGAFLIVGDAQSRVDDHLMGKQHMGYAKIKATVEEKKKKKKK

SEQ ID NO: 51967 - protein, 356 aa, Homo sapiens
MKVGYERDFLRYLQSLLAEVERRIRRGHARLALSQNQQSSGAAGPTGKNEEKIQVLTDKIDVLLQQIEELGSEGKVEEAQGMMKLVEQLKEERELLRSTTSTIESFAAQEKQMEVCEVCGAFLIVGDAQSRVDDHLMGKQHMGYAKIKATVEELKEKLRKRTEEPDRDERLKKEKQEREEREKEREREREERERKRRREEEEREKERARDRERRKRSRSRSRHSSRTSDRRCSRSRDHKRSRSRERRRSRSRDRRRSRSHDRSERKHRSRSRDRRRSKSRDRKSYKHRSKSRDREQDRKSKEKEKRGSDDKKSSVKSGSREKQSEDTNTESKESDTKNEVNGTSEDIKSEGLFVTV

SEQ ID NO: 51968 - protein, 338 aa, Homo sapiens
MSLSAFTLFLALIGGTSGQYYDYDFPLSIYGQSSPNCAPECNCPESYPSAMYCDELKLKSVPMVPPGIKYLYLRNNQIDHIDEKAFENVTDLQWLILDHNLLENSKIKGRVFSKLKQLKKLHINHNNLTESVGPLPKSLEDLQLTHNKITKLGSFEGLVNLTFIHLQHNRLKEDAVSAAFKGLKSLEYLDLSFNQIARLPSGLPVSLLTLYLDNNKISNIPDEYFKRFNALQYLRLSHNELADSGIPGNSFNVSSLVELDLSYNKLKNIPTVNENLENYYLEVNQLEKFDIKSFCKILGPLSYSKIKHLRLDGNRISETSLPPDMYECLRVANEVTLN

SEQ ID NO: 51969 - protein, 699 aa, Homo sapiens
MKQRFSALQLLKLLLLLQPPLPRALREALCPEPCNCVPDGALRCPGPTAGLTRLSLAYLPVKVIPSQAFRGLNEVIKIEISQIDSLERIEANAFDNLLNLSEILIQNTKNLRYIEPGAFINLPRLKYLSICNTGIRKFPDVTKVFSSESNFILEICDNLHITTIPGNAFQGMNNESVTLKLYGNGFEEVQSHAFNGTTLTSLELKENVHLEKMHNGAFRGATGPKTLDISSTKLQALPSYGLESIQRLIATSSYSLKKLPSRETFVNLLEATLTYPSHCCAFRNLPTKEQNFSHSISENFSKQCESTVRKVNNKTLYSSMLAESELSGWDYEYGFCLPKTPRCAPEPDAFNPCEDIMGYDFLRVLIWLINILAIMGNMTVLFVLLTSRYKLTVPRFLMCNLSFADFCMGLYLLLIASVDSQTKGQYYNHAIDWQTGSGCSTAGFFTVFASELSVYTLTVITLERWHTITYAIHLDQKLRLRHAILIMLGGWLFSSLIAMLPLVGVSNYMKVSICFPMDVETTLSQVYILTILILNVVAFFIICACYIKIYFAVRNPELMATNKDTKIAKKMAILIFTDFTCMAPISFFAISAAFKVPLITVTNSKVLLVLFYPINSCANPFLYAIFTKTFQRDFFLLLSKFGCCKRRAELYRRKDFSAYTSNCKNGFTGSNKPSQSTLKLSTLHCQGTALLDKTRYTEC

SEQ ID NO: 51970 - protein, 637 aa, Homo sapiens
MKQRFSALQLLKLLLLLQPPLPRALREALCPEPCNCVPDGALRCPGPTAGLTRLSLAYLPVKVIPSQAFRGLNEVIKIEISQIDSLERIEANAFDNLLNLSEILIQNTKNLRYIEPGAFINLPRLKYLSICNTGIRKFPDVTKVFSSESNFILEICDNLHITTIPGNAFQGMNNESVTLKLYGNGFEEVQSHAFNGTTLTSLELKENVHLEKMHNGAFRGATGPKTLQNFSHSISENFSKQCESTVRKVNNKTLYSSMLAESELSGWDYEYGFCLPKTPRCAPEPDAFNPCEDIMGYDFLRVLIWLINILAIMGNMTVLFVLLTSRYKLTVPRFLMCNLSFADFCMGLYLLLIASVDSQTKGQYYNHAIDWQTGSGCSTAGFFTVFASELSVYTLTVITLERWHTITYAIHLDQKLRLRHAILIMLGGWLFSSLIAMLPLVGVSNYMKVSICFPMDVETTLSQVYILTILILNVVAFFIICACYIKIYFAVRNPELMATNKDTKIAKKMAILIFTDFTCMAPISFFAISAAFKVPLITVTNSKVLLVLFYPINSCANPFLYAIFTKTFQRDFFLLLSKFGCCKRRAELYRRKDFSAYTSNCKNGFTGSNKPSQSTLKLSTLHCQGTALLDKTRYTEC

SEQ ID NO: 51971 - protein, 325 aa, Homo sapiens
MKQRFSALQLLKLLLLLQPPLPRALREALCPEPCNCVPDGALRCPGPTAGLTRLSLAYLPVKVIPSQAFRGLNEVIKIEISQIDSLERIEANAFDNLLNLSEILIQNTKNLRYIEPGAFINLPRLKYLSICNTGIRKFPDVTKVFSSESNFILEICDNLHITTIPGNAFQGMNNESVTLKLYGNGFEEVQSHAFNGTTLTSLELKENVHLEKMHNGAFRGATGPKTLDISSTKLQALPSYGLESIQRLIATSSYSLKKLPSRETFVNLLEATLTYPSHCCAFRNLPTKEQNFSHSISENFSKQCESTVRKVNNKTLSKPRINGYQ

SEQ ID NO: 51972 - protein, 329 aa, Homo sapiens
MKQRFSALQLLKLLLLLQPPLPRALREALCPEPCNCVPDGALRCPGPTAGLTRLSLAYLPVKVIPSQAFRGLNEVIKIEISQIDSLERIEANAFDNLLNLSEILIQNTKNLRYIEPGAFINLPRLKYLSICNTGIRKFPDVTKVFSSESNFILEICDNLHITTIPGNAFQGMNNESVTLKLYGNGFEEVQSHAFNGTTLTSLELKENVHLEKMHNGAFRGATGPKTLDISSTKLQALPSYGLESIQRLIATSSYSLKKLPSRETFVNLLEATLTYPSHCCAFRNLPTKEQNFSHSISENFSKQCESTVRKVNNKTLLLHGALSAAHSLS

SEQ ID NO: 51973 - protein, 672 aa, Homo sapiens
MKQRFSALQLLKLLLLLQPPLPRALREALCPEPCNCVPDGALRCPGPTAGLTRLSLAYLPVKVIPSQAFRGLNEVIKIEISQIDSLERIEANAFDNLLNLSEILIQNTKNLRYIEPGAFINLPRLKYLSICNTGIRKFPDVTKVFSSESNFILEICDNLHITTIPGNAFQGMNNESVTLKLYGNGFEEVQSHAFNGTTLTSLELKENVHLEKMHNGAFRGATGPKTLDISSTKLQALPSYGLESIQRLIATSSYSLKKLPSRETFVNLLEATLTYPSHCCAFRNLPTKDYSSMLAESELSGWDYEYGFCLPKTPRCAPEPDAFNPCEDIMGYDFLRVLIWLINILAIMGNMTVLFVLLTSRYKLTVPRFLMCNLSFADFCMGLYLLLIASVDSQTKGQYYNHAIDWQTGSGCSTAGFFTVFASELSVYTLTVITLERWHTITYAIHLDQKLRLRHAILIMLGGWLFSSLIAMLPLVGVSNYMKVSICFPMDVETTLSQVYILTILILNVVAFFIICACYIKIYFAVRNPELMATNKDTKIAKKMAILIFTDFTCMAPISFFAISAAFKVPLITVTNSKVLLVLFYPINSCANPFLYAIFTKTFQRDFFLLLSKFGCCKRRAELYRRKDFSAYTSNCKNGFTGSNKPSQSTLKLSTLHCQGTALLDKTRYTEC

SEQ ID NO: 51974 - protein, 131 aa, Homo sapiens
MTPLLTLILVVLMGLPLAQALDCHVCAYNGDNCFNPMRCPAMVAYCMTTRTSAAEAIWCHQCTGFGGCSHGSRCLRDSTHCVTTATRVLSNTEDLPLVTKMCHIGCPDIPSLGLGPYVSIACCQTSLCNHD

SEQ ID NO: 51975 - protein, 116 aa, Homo sapiens
MTPLLTLILVVLMGLPLAQALDCHVCAYNGDNCFNPMRCPAMVAYCMTTRTYYTPTRMKVSKSCVPRCFETVYDGYSKHASTTSCCQYDLCNGTGLATPATLALAPILLATLWGLL

SEQ ID NO: 51976 - protein, 116 aa, Homo sapiens; identical to SEQ ID NO: 51975

SEQ ID NO: 51977 - protein, 116 aa, Homo sapiens; identical to SEQ ID NO: 51975

SEQ ID NO: 51978 - protein, 82 aa, Homo sapiens
MTPLLTLILVVLMGLPLAQALDCHVCAYNGDNCFNPMRCPAMVAYCMTTRTYYTPTRMKVSKSCVPRCFETVYDGYSKHAST

SEQ ID NO: 51979 - protein, 84 aa, Homo sapiens
MTPLLTLILVVLMGLPLAQALDCHVCAYNGDNCFNPMRCPAMVAYCMTTRTYYTPTRMKVSKSCVPRCFETVYDGYSKHASTTS

SEQ ID NO: 51980 - protein, 346 aa, Homo sapiens [sequence omitted]

SEQ ID NO: 51981 - protein, 294 aa, Homo sapiens
MDPARKAGAQAMIWTAGWLLLLLLRGGAQALECYSCVQKADDGCSPNKMKTVKCAPGVDVCTEAVGAVETIHGQFSLAVRGCGSGLPGKNDRGLDLHGLLAFIQLQQCAQDRCNAKLNLTSRALDPAAAANVTVSLPVRGCVQDEFCTRDGVTGPGFTLSGSCCQGSRCNSDLRNKTYFSPRIPPLVRLPPPEPTTVASTTSVTTSTSAPVRPTSTTKPMPAPTSQTPRQGVEHEASRDEEPRLTGGAAGHQDRSNSGQYPAKGGPQQPHNKGCVAPTAGLAALLLAVAAGVLL

SEQ ID NO: 51982 - protein, 171 aa, Homo sapiens
MEPGPALAWLLLLSLLADCLKAAQSRDFTVKDIIYLHPSTTPYPGGFKCFTCEKAADNYECNRWAPDIYCPRETRYCYTQHTMEVTGNSISVTKRCVPLEECLSTGCRDSEHEGHKVCTSCCEGNICNLPLPRNETDATFATTSPINQTNGHPRCMSVIVSCLWLWLGLML

SEQ ID NO: 51983 - protein, 171 aa, Homo sapiens; identical to SEQ ID NO: 51982

SEQ ID NO: 51984 - protein, 53 aa, Homo sapiens
MEPGPALAWLLLLSLLADCLKAAQSRDFTVKDIIYLHPSTTPYPGGFKCFTCE

SEQ ID NO: 51985 - protein, 322 aa, Homo sapiens
MARCFSLVLLLTSIWTTRLLVQGSLRAEELSIQVSCRIMGITLVSKKANQQLNFTEAKEACRLLGLSLAGKDQVETALKASFETCSYGWVGDGFVVISRISPNPKCGKNGVGVLIWKVPVSRQFAAYCYNSSDTWTNSCIPEIITTKDPIFNTQTATQTTEFIVSDSTYSVASPYSTIPAPTTTPPAPASTSIPRRKKLICVTEVFMETSTMSTETEPFVENKAAFKNEAAGFGGVPTALLVLALLFFGAAAGLGFCYVKRYVKAFPFTNKNQQKEMIETKVVKEEKANDSNPNEESKKTDKNPEESKSPSKTTVRCLEAEV

SEQ ID NO: 51986 - protein, 128 aa, Homo sapiens
MRTALLLLAALAVATGPALTLRCHVCTSSSNCKHSVVCPASSRFCKTTNTVEPLRGNLVKKDCAESCTPSYTLQGQVSSGTSSTQCCQEDLCNEKLHNAAPTRTALAHSALSLGLALSLLAVILAPSL

SEQ ID NO: 51987 - protein, 131 aa, Homo sapiens
MKIFLPVLLAALLGVERASSLMCFSCLNQKSNLYCLKPTICSDQDNYCVTVSASAGIGNLVTFGHSLSKTCSPACPIPEGVNVGVASMGISCCQSFLCNFSAADGGLRASVTLLGAGLLLSLLPALLRFGP

SEQ ID NO: 51988 - protein, 131 aa, Homo sapiens; identical to SEQ ID NO: 51987

SEQ ID NO: 51989 - protein, 88 aa, Homo sapiens
MKIFLPVLLAALLGVERASSLMCFSCLNQKSNLYCLKPTICSDQDNYCVTVSASAGIGNLVTFGHSLSKTCSPACPIPEGVNVGVASM

SEQ ID NO: 51990 - protein, 131 aa, Homo sapiens; identical to SEQ ID NO: 51987

SEQ ID NO: 51991 - protein, 131 aa, Homo sapiens; identical to SEQ ID NO: 51987

SEQ ID NO: 51992 - protein, 131 aa, Homo sapiens; identical to SEQ ID NO: 51987

SEQ ID NO: 51993 - protein, 131 aa, Homo sapiens; identical to SEQ ID NO: 51987

SEQ ID NO: 51994 - protein, 131 aa, Homo sapiens; identical to SEQ ID NO: 51987

SEQ ID NO: 51995 - protein, 133 aa, Homo sapiens
MKPQFVGILLSSLLGAALGNRMRCYNCGGSPSSSCKEAVTTCGEGRPQPGLEQIKLPGNPPVTLIHQHPACVAAHHCNQVETESVGDVTYPAHRDCYLGDLCNSAVASHVAPAGILAAAATALTCLLPGLWSG

SEQ ID NO: 51996 - protein, 174 aa, Homo sapiens
MKPQFVGILLSSLLGAALGNRMRCYNCGGSPSSSCKEAVTTCGEGRPQPGLEQIKLPGNRRCFLRGLKIPLGSLKSHLLCPRRQVLKPGVQHPSFILSLSPSDLDSPTSSLRRSPSLQSSGDRVGGRRDLSSPQGLLPGRPVQQRRGKPCGPCRHFGCSSYRPDLSLARTVERI

SEQ ID NO: 51997 - protein, 133 aa, Homo sapiens; identical to SEQ ID NO: 51995

SEQ ID NO: 51998 - protein, 382 aa, Homo sapiens
MAVLFLLLFLCGTPQAADNMQAIYVALGEAVELPCPSPPTLHGDEHLSWFCSPAAGSFTTLVAQVQVGRPAPDPGKPGRESRLRLLGNYSLWLEGSKEEDAGRYWCTVLGQHHNYQNWRVYDVLVLKGSQLSARAADGSPCNVLLCSVVPSRRMDSVTWQEGKGPVRGRVQSFWGSEAALLLVCPGEGLSEPRSRRPRIIRCLMTHNKGVSFSLAASIDASPALCAPSTGWDMPWILMLLLTMGQGVVILALSIVLWRQRVRGAPGRGNRMRCYNCGGSPSSSCKEAVTTCGEGRPQPGLEQIKLPGNPPVTLIHQHPACVAAHHCNQVETESVGDVTYPAHRDCYLGDLCNSAVASHVAPAGILAAAATALTCLLPGLWSG

SEQ ID NO: 51999 - protein, 133 aa, Homo sapiens; identical to SEQ ID NO: 51995

SEQ ID NO: 52000 - protein, 133 aa, Homo sapiens; identical to SEQ ID NO: 51995

SEQ ID NO: 52001 - protein, 382 aa, Homo sapiens
MAVLFLLLFLCGTPQAADNMQAIYVALGEAVELPCPSPPTLHGDEHLSWFCSPAAGSFTTLVAQVQVGRPAPDPGKPGRESRLRLLGNYSLWLEGSKEEDAGRYWCAVLGQHHNYQNWRVYDVLVLKGSQLSARAADGSPCNVLLCSVVPSRRMDSVTWQEGKGPVRGRVQSFWGSEAALLLVCPGEGLSEPRSRRPRIIRCLMTHNKGVSFSLAASIDASPALCAPSTGWDMPWILMLLLTMGQGVVILALSIVLWRQRVRGAPGRGNRMRCYNCGGSPSSSCKEAVTTCGEGRPQPGLEQIKLPGNPPVTLIHQHPACVAAHHCNQVETESVGDVTYPAHRDCYLGDLCNSAVASHVAPAGILAAAATALTCLLPGLWSG

SEQ ID NO: 52002 - protein, 133 aa, Homo sapiens
MKPQFVGILLSSLLGAALGNRMRCYNCGGSPSSTCKEAVTTCGEGRPQPGLEQIKLPGNPPVTLIHQHPACVAAHHCNQVETESVGDVTYPAHRDCYLGDLCNSAVASHVAPAGILAAAATALTCLLPGLWSG

SEQ ID NO: 52003 - protein, 133 aa, Homo sapiens; identical to SEQ ID NO: 51995

SEQ ID NO: 52004 - protein, 133 aa, Homo sapiens; identical to SEQ ID NO: 51995

SEQ ID NO: 52005 - protein, 174 aa, Homo sapiens; identical to SEQ ID NO: 51996

SEQ ID NO: 52006 - protein, 161 aa, Homo sapiens
MLAPQRTRAPSPRAAPRPTRSMLPAAMKGLGLALLAVLLCSAPAHGLWCQDCTLTTNSSHCTPKQCQPSDTVCASVRITDPSSSRKDHSVNKMCASSCDFVKRHFFSDYLMGFINSGILKVDVDCCEKDLCNGAAGAGHSPWALAGGLLLSLGPALLWAGP

SEQ ID NO: 52007 - protein, 161 aa, Homo sapiens; identical to SEQ ID NO: 52006

SEQ ID NO: 52008 - protein, 140 aa, Homo sapiens
MLPAAMKGLGLALLAVLLCSAPAHGLWCQDCTLTTNSSHCTPKQCQPSDTVCASVRITDPSSSRKDHSVNKMCASSCDFVKRHFFSDYLMGFINSGILKVDVDCCEKDLCNGAAGAGHSPWALAGGLLLSLGPALLWAGP

SEQ ID NO: 52009 - protein, 656 aa, Homo sapiens
MVAPKSHTDDWAPGPFSSKPQRSQLQIFSSVLQTSLLFLLMGLRASGKDSAPTVVSGILGGSVTLPLNISVDTEIENVIWIGPKNALAFARPKENVTIMVKSYLGRLDITKWSYSLCISNLTLNDAGSYKAQINQRNFEVTTEEEFTLFVYEQLQEPQVTMKSVKVSENFSCNITLMCSVKGAEKSVLYSWTPREPHASESNGGSILTVSRTPCDPDLPYICTAQNPVSQRSSLPVHVGQFCTDPGASRGGTTGETVVGVLGEPVTLPLALPACRDTEKVVWLFNTSIISKEREEAATADPLIKSRDPYKNRVWVSSQDCSLKISQLKIEDAGPYHAYVCSEASSVTSMTHVTLLIYRRLRKPKITWSLRHSEDGICRISLTCSVEDGGNTVMYTWTPLQKEAVVSQGESHLNVSWRSSENHPNLTCTASNPVSRSSHQFLSENICSGPERNTKLWIGLFLMVCLLCVGIFSWCIWKRKGRCSVPAFCSSQAEAPADTPEPTAGHTLYSVLSQGYEKLDTPLRPARQQPTPTSDSSSDSNLTTEEDEDRPEVHKPISGRYEVFDQVTQEGAGHDPAPEGQADYDPVTPYVTEVESVVGENTMYAQVFNLQGKTPVSQKEESSATIYCSIRKPQVVVPPPQQNDLEIPESPTYENFT

SEQ ID NO: 52010 - protein, 521 aa, Homo sapiens
MVAPKSHTDDWAPGPFSSKPQRSQLQIFSSVLQTSLLFLLMGLRASGKDSAPTVVSGILGGSVTLPLNISVDTEIENVIWIGPKNALAFARPKENVTIMVKSYLGRLDITKWSYSLCISNLTLNDAGSYKAQINQRNFEVTTEEEFTLFVYEQLQEPQVTMKSVKVSENFSCNITLMCSVKGAEKSVLYSWTPREPHASESNGGSILTVSRTPCDPDLPYICTAQNPVSQRSSLPVHVGQFCTDPGASRGGTTGETVVGVLGEPVTLPLALPACRDTEKVVWLFNTSIISKEREEAATADPLIKSRDPYKNRVWVSSQDCSLKISQLKIEDAGPYHAYVCSEASSVTSMTHVTLLIYRPERNTKLWIGLFLMVCLLCVGIFSWCIWKRKGRCSVPAFCSSQAEAPADTPGYEKLDTPLRKPISGRYEVFDQVTQEGAGHDPAPEGQADYDPVTPYVTEVESVVGENTMYAQVFNLQGKTPVSQKEESSATIYCSIRKPQVVPPPQQNDLEIPESPTYENFT

SEQ ID NO: 52011 - protein, 270 aa, Homo sapiens
MTHVTLLIYRRLRKPKITWSLRHSEDGICRISLTCSVEDGGNTVMYTWTPLQKEAVVSQGESHLNVSWRSSENHPNLTCTASNPVSRSSHQFLSENICSGPERNTKLWIGLFLMVCLLCVGIFSWCIWKRKGRCSVPAFCSSQAEAPADTPGYEKLDTPLRPARQQPTPTSDSSSDSNLTTEEDEDRPEVHKPISGRYEVFDQVTQEGAGHDPAPEGQADYDPVTPYVTEVESVVGENTMYAQVFNLQVVPPPQQNDLEIPESPTYENFT

SEQ ID NO: 52012 - protein, 270 aa, Homo sapiens; identical to SEQ ID NO: 52011

SEQ ID NO: 52013 - protein, 655 aa, Homo sapiens
MVAPKSHTDDWAPGPFSSKPQRSQLQIFSSVLQTSLLFLLMGLRASGKDSAPTVVSGILGGSVTLPLNISVDTEIENVIWIGPKNALAFARPKENVTIMVKSYLGRLDITKWSYSLCISNLTLNDAGSYKAQINQRNFEVTTEEEFTLFVYEQLQEPQVTMKSVKVSENFSCNITLMCSVKGAEKSVLYSWTPREPHASESNGGSILTVSRTPCDPDLPYICTAQNPVSQRSSLPVHVGQFCTDPGASRGGTTGETVVGVLGEPVTLPLALPACRDTEKVVWLFNTSIISKEREEAATADPLIKSRDPYKNRVWVSSQDCSLKISQLKIEDAGPYHAYVCSEASSVTSMTHVTLLIYRRLRKPKITWSLRHSEDGICRISLTCSVEDGGNTVMYTWTPLQKEAVVSQGESHLNVSWRSSENHPNLTCTASNPVSRSSHQFLSENICSGPERNTKLWIGLFLMVCLLCVGIFSWCIWKRKGRCSVPAFCSSQAEAPADTPEPTAGHTLYSVLSQGYEKLDTPLRPARQQPTPTSDSSSDSNLTTEEDEDRPEVHKPISGRYEVFDQVTQEGAGHDPAPEGQADYDPVTPYVTEVESVVGENTMYAQVFNLQGKTPVSQKEESSATIYCSIRKPQVVPPPQQNDLEIPESPTYENFT

SEQ ID NO: 52014 - protein, 371 aa, Homo sapiens
MVAPKSHTDDWAPGPFSSKPQRSQLQIFSSVLQTSLLFLLMGLRASGKDSAPTVVSGILGGSVTLPLNISVDTEIENVIWIGPKNALAFARPKENVTIMVKSYLGRLDITKWSYSLCISNLTLNDAGSYKAQINQRNFEVTTEEEFTLFVYEQLQEPQVTMKSVKVSENFSCNITLMCSVKGAEKSVLYSWTPREPHASESNGGSILTVSRTPCDPDLPYICTAQNPVSQRSSLPVHVGQFCTDPGASRGGTTGETVVGVLGEPVTLPLALPACRDTEKVVWLFNTSIISKEREEAATADPLIKSRDPYKNRVWVSSQDCSLKISQLKIEDAGPYHAYVCSEASSVTSMTHVTLLIYRESLGRAPITRFLL

SEQ ID NO: 52015 - protein, 602 aa, Homo sapiens
MGLRASGKDSAPTVVSGILGGSVTLPLNISVDTEIENVIWIGPKNALAFARPKENVTIMVKSYLGRLDITKWSYSLCISNLTLNDAGSYKAQINQRNFEVTTEEEFTLFVYEQLQEPQVTMKSVKVSENFSCNITLMCSVKGAEKSVLYSWTPREPHASESNGGSILTVSRTPCDPDLPYICTAQNPVSQRSSLPVHVGQFCTDPGASRGGTTGETVVGVLGEPVTLPLALPACRDTEKVVWLFNTSIISKEREEAATADPLIKSRDPYKNRVWVSSQDCSLKISQLKIEDAGPYHAYVCSEASSVTSMTHVTLLIYRRLRKPKITWSLRHSEDGICRISLTCSVEDGGNTVMYTWTPLQKEAVVSQGESHLNVSWRSSENHPNLTCTASNPVSRSSHQFLSENICSGPERNTKLWIGLFLMVCLLCVGIFSWCIWKRKGRCSVPAFCSSQAEAPADTPGYEKLDTPLRPARQQPTPTSDSSSDSNLTTEEDEDRPEVHKPISGRYEVFDQVTQEGAGHDPAPEGQADYDPVTPYVTEVESVVGENTMYAQVFNLQGKTPVSQKEESSATIYCSIRKPQVVVPPPQQNDLEIPESPTYENFT

SEQ ID NO: 52016 - protein, 193 aa, Homo sapiens
MVAPKSHTDDWAPGPFSSKPQRSQLQIFSSVLQTSLLFLLMGLRASGKDSAPTVVSGILGGSVTLPLNISVDTEIENVIWIGPKNALAFARPKENVTIMVKSYLGRLDITKWSYSLCISNLTLNDAGSYKAQINQRNFEVTTEEEFTLFVYAPFIEKLSVHVIEGDHRTLLEGSGLESIISTLAEPRVSVREG

SEQ ID NO: 52017 - protein, 526 aa, Homo sapiens
MGLRASGKDSAPTVVSGILGGSVTLPLNISVDTEIENVIWIGPKNALAFARPKENVTIMVKSYLGRLDITKWSYSLCISNLTLNDAGSYKAQINQRNFEVTTEEEFTLFVYEQLQEPQVTMKSVKVSENFSCNITLMCSVKGAEKSVLYSWTPREPHASESNGGSILTVSRTPCDPDLPYICTAQNPVSQRSSLPVHVGQFCTDPGASRGGTTGETVVGVLGEPVTLPLALPACRDTEKVVWLFNTSIISKEREEAATADPLIKSRDPYKNRVWVSSQDCSLKISQLKIEDAGPYHAYVCSEASSVTSMTHVTLLIYRPERNTKLWIGLFLMVCLLCVGIFSWCIWKRKGRCSVPAFCSSQAEAPADTPEPTAGHTLYSVLSQGYEKLDTPLRPARQQPTPTSDSSSDSNLTTEEDEDRPEVHKPISGRYEVFDQVTQEGAGHDPAPEGQADYDPVTPYVTEVESVVGENTMYAQVFNLQGKTPVSQKEESSATIYCSIRKPQVVVPPPQQNDLEIPESPTYENFT

SEQ ID NO: 52018 - protein, 627 aa, Homo sapiens
MARGSVSDEEMMELREAFAKVDTDGNGYISFNELNDLFKAACLPLPGYRVREITENLMATGDLDQDGRISFDEFIKIFHGLKSTDVAKTFRKAINKKEGICAIGGTSEQSSVGTQHSYSEEEKYAFVNWINKALENDPDCRHVIPMNPNTNDLFNAVGDGIVLCKMINLSVPDTIDERTINKKKLTPFTIQENLNLALNSASAIGCHVVNIGAEDLKEGKPYLVLGLLWQVIKIGLFADIELSRNEALIALLREGESLEDLMKLSPEELLLRWANYHLENAGCNKIGNFSTDIKDSKAYYHLLEQVAPKGDEEGVPAVVIDMSGLREKDDIQRAECMLQQAERLGCRQFVTATDVVRGNPKLNLAFIANLFNRYPALHKPENQDIDWGALEGETREERTFRNWMNSLGVNPRVNHLYSDLSDALVIFQLYEKIKVPVDWNRVNKPPYPKLGGNMKKLENCNYAVELGKNQAKFSLVGIGGQDLNEGNRTLTLALIWQLMRRYTLNILEEIGGGQKVNDDIIVNWVNETLREAKKSSSISSFKDPKISTSLPVLDLIDAIQPGSINYDLLKTENLNDDEKLNNAKYAISMARKIGARVYALPEDLVEVNPKMVMTVFACLMGKGMKRV

SEQ ID NO: 52019 - protein, 627 aa, Homo sapiens; identical to SEQ ID NO: 52018

SEQ ID NO: 52020 - protein, 246 aa, Homo sapiens
MARGSVSDEEMMELREAFAKVDTDGNGYISFNELNDLFKAACLPLPGYRVREITENLMATGDLDQDGRISFDEFIKIFHGLKSTDVAKTFRKAINKKEGICAIGGTSEQSSVGTQHSYSEEEKYAFVNWINKALENDPDCRHVIPMNPNTNDLFNAVGDGIVLCKMINLSVPDTIDERTINKKKLTPFTIQENLNLALNSASAIGCHVVNIGAEDLKEGKPYLVLGLLWQVIKIGLFADIELSRNE

SEQ ID NO: 52021 - protein, 196 aa, Homo sapiens
MCAEDGDSKFSMSISMNSPFLEILHLENCNYAVELGKNQAKFSLVGIGGQDLNEGNRTLTLALIWQLMRRYTLNILEEIGGGQKVNDDIIVNWVNETLREAKKSSSISSFKDPKISTSLPVLDLIDAIQPGSINYDLLKTENLNDDEKLNNAKYAISMARKIGARVYALPEDLVEVNPKMVMTVFACLMGKGMKRV

SEQ ID NO: 52022 - protein, 66 aa, Homo sapiens
MARGSVSDEEMMELREAFAKVDTDGNGYISFNELNDLFKAACLPLPGYRVREITENLMATGDLDQD

SEQ ID NO: 52023 - protein, 533 aa, Homo sapiens
MALRNVPFRSEVLGWDPDSLADYFKKLNYKDCEKAVKKYHIDGARFLNLTENDIQKFPKLRVPILSKLSQEINKNEERRSIFTRKPQVPRFPEETESHEEDNGGWSSFEEDDYESPNDDQDGEDDGDYESPNEEEEAPVEDDADYEPPPSNDEEALQNSILPAKPFPNSNSMYIDRPPSGKTPQQPPVPPQRPMAALPPPPAGRNHSPLPPPQTNHEEPSRSRNHKTAKLPAPSIDRSTKPPLDRSLAPFDREPFTLGKKPPFSDKPSIPAGRSLGEHLPKIQKPPLPPTTERHERSSPLPGKKPPVPKHGWGPDRRENDEDDVHQRPLPQPALLPMSSNTFPSRSTKPSPMNPLPSSHMPGAFSESNSSFPQSASLPPYFSQGPSNRPPIRAEGRNFPLPLPNKPRPPSPAEEENSLNEEWYVSYITRPEAEAALRKINQDGTFLVRDSSKKTTTNPYVLMVLYKDKVYNIQIRYQKESQVYLLGTGLRGKEDFLSVSDIIDYFRKMPLLLIDGKNRGSRYQCTLTHAAGYP

SEQ ID NO: 52024 - protein, 525 aa, Homo sapiens
MWEAQFLGLLFLQPLWVAPVKPLQPGAEVPVVWAQEGAPAQLPCSPTIPLQDLSLLRRAGVTWQHQPDSGPPAAAPGHPLAPGPHPAAPSSWGPRPRRYTVLSVGPGGLRSGRLPLQPRVQLDERGRQRGDFSLWLRPARRADAGEYRAAVHLRDRALSCRLRLRLGQASMTASPPGSLRASDWVILNCSFSRPDRPASVHWFRNRGQGRVPVRESPHHHLAESFLFLPQVSPMDSGPWGCILTYRDGFNVSIMYNLTVLGLEPPTPLTVYAGAGSRVGLPCRLPAGVGTRSFLTAKWTPPGGGPDLLVTGDNGDFTLRLEDVSQAQAGTYTCHIHLQEQQLNATVTLAIITVTPKSFGSPGSLGKLLCEVTPVSGQERFVWSSLDTPSQRSFSGPWLEAQEAQLLSQPWQCQLYQGERLLGAAVYFTELSSPGAQRSGRAPGALPAGHLLLFLILGVLSLLLLVTGAFGFHLWRRQWRPRRFSALEQGIHPPQAQSKIEELEQEPEPEPEPEPEPEPEPEPEQL

SEQ ID NO: 52025 - protein, 339 aa, Homo sapiens
MAEASSDPGAEEREELLGPTAQWSVEDEEEAVHEQCQHERDRQLQAQDEEGGGHVPERPKQEMLLSLKPSEAPELDEDEGFGDWSQRPEQRQQHEGAQGALDSGEPPQCRSPEGEQEDRPGLHAYEKEDSDEVHLEELSLSKEGPGPEDTVQDNLGAAGAEEEQEEHQKCQQPRTPSPLVLEGTIEQSSPPLSPTTKLIDRTESLNRSIEKSNSVKKSQPDLPISKIDQWLEQYTQAIETAGRTPKLARQASIELPSMAVASTKSRWETGEVQAQSAAKTPSCKDIVAGDMSKKSLWEQKGGSKTSSTIKSTPSGKRYKFVATGHGKYEKVLVEGGPAP

SEQ ID NO: 52026 - protein, 277 aa, Homo sapiens
MLLSLKPSEAPELDEDEGFGDWSQRPEQRQQHEGAQGALDSGEPPQCRSPEGEQEDRPGLHAYEKEDSDEVHLEELSLSKEGPGPEDTVQDNLGAAGAEEEQEEHQKCQQPRTPSPLVLEGTIEQSSPPLSPTTKLIDRTESLNRSIEKSNSVKKSQPDLPISKIDQWLEQYTQAIETAGRTPKLARQASIELPSMAVASTKSRWETGEVQAQSAAKTPSCKDIVAGDMSKKSLWEQKGGSKTSSTIKSTPSGKRYKFVATGHGKYEKVLVEGGPAP

SEQ ID NO: 52027 - protein, 277 aa, Homo sapiens; identical to SEQ ID NO: 52026

SEQ ID NO: 52028 - protein, 222 aa, Homo sapiens
MLLSLKPSEAPELDEDEGFGDWSQRPEQRQQHEGAQGALDSGEPPQCRSPEGEQEDRPGLHAYEKEDSDEVHLEELSLSKEGPGPEDTVQDNLGAAGAEEEQEEHQKCQQPRTPSPLVLEGTIEQSSPPLSPTTKLIDRTESLNRSIEKSNSVKKSQPDLPISKIDQWLEQYTQAIETAGRTPKLARQASIELPSMAVASTKSRWETGEVQAQSAAKTPSCK

SEQ ID NO: 52029 - protein, 60 aa, Homo sapiens
MLLSLKPSEAPELDEDEGFGDWSQRPEQRQQHEGAQGALDSGEPPQCRSPEGEQEDRPGL

SEQ ID NO: 52030 - protein, 222 aa, Homo sapiens; identical to SEQ ID NO: 52028

SEQ ID NO: 52031 - protein, 126 aa, Homo sapiens
MLLSLKPSEAPELDEDEGFGDWSQRPEQRQQHEGAQGALDSGEPPQCRSPEGEQEDRPGLHAYEKEDSDEVHLEELSLSKEGPGPEDTVQDNLGAAGAEEEQEEHQKCQQPRTPSPLVLEGTIEQS

SEQ ID NO: 52032 - protein, 64 aa, Homo sapiens
MLLSLKPSEAPELDEDEGFGDWSQRPEQRQQHEGAQGALDSGEPPQCRSPEGEQEDRPGLHAYE

SEQ ID NO: 52033 - protein, 467 aa, Homo sapiens
MAPIWSPPGRVSGCHLSSGPAPGSAVGPWLGTPHPSLPLPLAPHKPPPPGLPGSAGQTSLPAQRECVFPGDAAVHQELCGLGFEECLGSIPQAHQCYLTNGPKRRKCSPRRRGRAPAWLCGGSPPCHQGLGHEHPSSGPSTNCSPRPTAQWSVEDEEEAVHEQCQHERDRQLQAQDEEGGGHVPERPKQEMLLSLKPSEAPELDEDEGFGDWSQRPEQRQQHEGAQGALDSGEPPQCRSPEGEQEDRPGLHAYEKEDSDEVHLEELSLSKEGPGPEDTVQDNLGAAGAEEEQEEHQKCQQPRTPSPLVLEGTIEQSSPPLSPTTKLIDRTESLNRSIEKSNSVKKSQPDLPISKIDQWLEQYTQAIETAGRTPKLARQASIELPSMAVASTKSRWETGEVQAQSAAKTPSCKDIVAGDMSKKSLWEQKGGSKTSSTIKSTPSGKRYKFVATGHGKYEKVLVEGGPAP

SEQ ID NO: 52034 - protein, 205 aa, Homo sapiens
MTPPERLFLPRVCGTTLHLLLLGLLLVLLPGAQGLPGVGLTPSAAQTARQHPKMHLAHSNLKPAAHLIGDPSKQNSLLWRANTDRAFLQDGFSLSNNSLLVPTSGIYFVYSQVVFSGKAYSPKATSSPLYLAHEVQLFSSQYPFHVPLLSSQKMVYPGLQEPWLHSMYHGAAFQLTQGDQLSTHTDGIPHLVLSPSTVFFGAFAL

SEQ ID NO: 52035 - protein, 205 aa, Homo sapiens; identical to SEQ ID NO: 52034

SEQ ID NO: 52036 - protein, 205 aa, Homo sapiens
MTPPERLFLPRVCGTTLHLLLLGLLLVLLPGAQGLPGVGLTPSAAQTARQHPKMHLAHSTLKPAAHLIGDPSKQNSLLWRANTDRAFLQDGFSLSNNSLLVPTSGIYFVYSQVVFSGKAYSPKATSSPLYLAHEVQLFSSQYPFHVPLLSSQKMVYPGLQEPWLHSMYHGAAFQLTQGDQLSTHTDGIPHLVLSPSTVFFGAFAL

SEQ ID NO: 52037 - protein, 205 aa, Homo sapiens; identical to SEQ ID NO: 52036

SEQ ID NO: 52038 - protein, 205 aa, Homo sapiens; identical to SEQ ID NO: 52036

SEQ ID NO: 52039 - protein, 205 aa, Homo sapiens
MTPPERLFLPRVRGTTLHLLLLGLLLVLLPGAQGLPGVGLTPSAAQTARQHPKMHLAHSTLKPAAHLIGDPSKQNSLLWRANTDRAFLQDGFSLSNNSLLVPTSGIYFVYSQVVFSGKAYSPKATSSPLYLAHEVQLFSSQYPFHVPLLSSQKMVYPGLQEPWLHSMYHGAAFQLTQGDQLSTHTDGIPHLVLSPSTVFFGAFAL

SEQ ID NO: 52040 - protein, 205 aa, Homo sapiens; identical to SEQ ID NO: 52036

SEQ ID NO: 52041 - protein, 138 aa, Homo sapiens
MTPPERLFLPRVCGTTLHLLLLGLLLVLLPGAQGLPGVGLTPSAAQTARQHPKMHLAHSTLKPAAHLIGDPSKQNSLLWRANTDRAFLQDGFSLSNNSLLVPTSGIYFVYSQGSSPPLLWPFQQLKSSLIKSPELSKK

SEQ ID NO: 52042 - protein, 205 aa, Homo sapiens; identical to SEQ ID NO: 52039

SEQ ID NO: 52043 - protein, 205 aa, Homo sapiens; identical to SEQ ID NO: 52039

SEQ ID NO: 52044 - protein, 205 aa, Homo sapiens; identical to SEQ ID NO: 52036

SEQ ID NO: 52045 - protein, 205 aa, Homo sapiens; identical to SEQ ID NO: 52036

SEQ ID NO: 52046 - protein, 205 aa, Homo sapiens; identical to SEQ ID NO: 52039

SEQ ID NO: 52047 - protein, 138 aa, Homo sapiens
MTPPERLFLPRVRGTTLHLLLLGLLLVLLPGAQGLPGVGLTPSAAQTARQHPKMHLAHSTLKPAAHLIGDPSKQNSLLWRANTDRAFLQDGFSLSNNSLLVPTSGIYFVYSQGSSPPLLWPFQQLKSSLIKSPELSKK

SEQ ID NO: 52048 - protein, 157 aa, Homo sapiens
MTPPERLFLPRVCGTTLHLLLLGLLLVLLPGAQGLPGVGLTPSAAQTARQHPKMHLAHSNLKPAAHLIGDPSKQNSLLWRANTDRAFLQDGFSLSNNSLLVPTSGIYFVYSQLPEDGVSRAAGTLAALDVPRGCVPAHPGRPAIHPHRWHPPPSPQP

SEQ ID NO: 52049 - protein, 138 aa, Homo sapiens; identical to SEQ ID NO: 52041

SEQ ID NO: 52050 - protein, 138 aa, Homo sapiens; identical to SEQ ID NO: 52041

SEQ ID NO: 52051 - protein, 138 aa, Homo sapiens; identical to SEQ ID NO: 52047

SEQ ID NO: 52052 - protein, 244 aa, Homo sapiens
MGALGLEGRGGRLQGRGSLLLAVAGATSLVTLLLAVPITVLAVLALVPQDQGGLVTETADPGAQAQQGLGFQKLPEEEPETDLSPGLPAAHLIGAPLKGQGLGWETTKEQAFLTSGTQFSDAEGLALPQDGLYYLYCLVGYRGRAPPGGGDPQGRSVTLRSSLYRAGGAYGPGTPELLLEGAETVTPVLDPARRQGYGPLWYTSVGFGGLVQLRRGERVYVNISHPDMVDFARGKTFFGAVMVG

SEQ ID NO: 52053 - protein, 244 aa, Homo sapiens; identical to SEQ ID NO: 52052

SEQ ID NO: 52054 - protein, 244 aa, Homo sapiens; identical to SEQ ID NO: 52052

SEQ ID NO: 52055 - protein, 244 aa, Homo sapiens; identical to SEQ ID NO: 52052

SEQ ID NO: 52056 - protein, 244 aa, Homo sapiens; identical to SEQ ID NO: 52052

SEQ ID NO: 52057 - protein, 244 aa, Homo sapiens; identical to SEQ ID NO: 52052

SEQ ID NO: 52058 - protein, 77 aa, Homo sapiens
MGALGLEGRGGRLQGRGSLLLAVAGATSLVTLLLAVPITVLAVLALVPQDQGGLGFRSCQRRSQKQISAPGSQLPTS

SEQ ID NO: 52059 - protein, 244 aa, Homo sapiens; identical to SEQ ID NO: 52052

SEQ ID NO: 52060 - protein, 244 aa, Homo sapiens; identical to SEQ ID NO: 52052

SEQ ID NO: 52061 - protein, 91 aa, Homo sapiens
MAASSRAQVLSLYRAMLRESKRFSAYNYRTYAVRRIRDAFRENKNVKDPVEIQTLVNKAKRDLGVIRRQVHIGQLYSTDKLIIENRDMPRT

SEQ ID NO: 52062 - protein, 130 aa, Homo sapiens
MAASSRAQVLSLYRAMLRESKRFSAYNYRTYAVRRIRDAFRENKNVKDPVEIQTLVNKAKRDLGVIRRQMDSHSVAQAGVHWNDLSSLQPLPPWFKQFSCLSLPSSWDYRRTPPRLANFCILSRDVISLY

SEQ ID NO: 52063 - protein, 96 aa, Homo sapiens
MAASSRAQVLSLYRAMLRESKRFSAYNYRTYAVRRIRDAFRENKNVKDPVEIQTLVNKAKRDLGVIRRQVAEQGTAARRKSGNSSRSLGKPCTSWP

SEQ ID NO: 52064 - protein, 852 aa, Homo sapiens
MLSGKKAAAAAAAAAAAATGTEAGPGTAGGSENGSEVAAQPAGLSGPAEVGPGAVGERTPRKKEPPRASPPGGLAEPPGSAGPQAGPTVVPGSATPMETGIAETPEGRRTSRRKRAKVEYREMDESLANLSEDEYYSEEERNAKAEKEKKLPPPPPQAPPEEENESEPEEPSGVEGAAFQSRLPHDRMTSQEAACFPDIISGPQQTQKVFLFIRNRTLQLWLDNPKIQLTFEATLQQLEAPYNSDTVLVHRVHSYLERHGLINFGIYKRIKPLPTKKTGKVIIIGSGVSGLAAARQLQSFGMDVTLLEARDRVGGRVATFRKGNYVADLGAMVVTGLGGNPMAVVSKQVNMELAKIKQKCPLYEANGQAVPKEKDEMVEQEFNRLLEATSYLSHQLDFNVLNNKPVSLGQALEVVIQLQEKHVKDEQIEHWKKIVKTQEELKELLNKMVNLKEKIKELHQQYKEASEVKPPRDITAEFLVKSKHRDLTALCKEYDELAETQGKLEEKLQELEANPPSDVYLSSRDRQILDWHFANLEFANATPLSTLSLKHWDQDDDFEFTGSHLTVRNGYSCVPVALAEGLDIKLNTAVRQVRYTASGCEVIAVNTRSTSQTFIYKCDAVLCTLPLGVLKQQPPAVQFVPPLPEWKTSAVQRMGFGNLNKVVLCFDRVFWDPSVNLFGHVGSTTASRGELFLFWNLYKAPILLALVAGEAAGIMENISDDVIVGRCLAILKGIFGSSAVPQPKETVVSRWRADPWARGSYSYVAAGSSGNDYDLMAQPITPGPSIPGAPQPIPRLFFAGEHTIRNYPATVHGALLSGLREAGRIADQFLGAMYTLPRQATPGVPAQQSPSM

SEQ ID NO: 52065 - protein, 876 aa, Homo sapiens
MLSGKKAAAAAAAAAAAATGTEAGPGTAGGSENGSEVAAQPAGLSGPAEVGPGAVGERTPRKKEPPRASPPGGLAEPPGSAGPQAGPTVVPGSATPMETGIAETPEGRRTSRRKRAKVEYREMDESLANLSEDEYYSEEERNAKAEKEKKLPPPPPQAPPEEENESEPEEPSGQAGGLQDDSSGGYGDGQASGVEGAAFQSRLPHDRMTSQEAACFPDIISGPQQTQKVFLFIRNRTLQLWLDNPKIQLTFEATLQQLEAPYNSDTVLVHRVHSYLERHGLINFGIYKRIKPLPTKKTGKVIIIGSGVSGLAAARQLQSFGMDVTLLEARDRVGGRVATFRKGNYVADLGAMVVTGLGGNPMAVVSKQVNMELAKIKQKCPLYEANGQAERIIVPKEKDEMVEQEFNRLLEATSYLSHQLDFNVLNNKPVSLGQALEVVIQLQEKHVKDEQIEHWKKIVKTQEELKELLNKMVNLKEKIKELHQQYKEASEVKPPRDITAEFLVKSKHRDLTALCKEYDELAETQGKLEEKLQELEANPPSDVYLSSRDRQILDWHFANLEFANATPLSTLSLKHWDQDDDFEFTGSHLTVRNGYSCVPVALAEGLDIKLNTAVRQVRYTASGCEVIAVNTRSTSQTFIYKCDAVLCTLPLGVLKQQPPAVQFVPPLPEWKTSAVQRMGFGNLNKVVLCFDRVFWDPSVNLFGHVGSTTASRGELFLFWNLYKAPILLALVAGEAAGIMENISDDVIVGRCLAILKGIFGSSAVPQPKETVVSRWRADPWARGSYSYVAAGSSGNDYDLMAQPITPGPSIPGAPQPIPRLFFAGEHTIRNYPATVHGALLSGLREAGRIADQFLGAMYTLPRQATPGVPAQQSPSM

SEQ ID NO: 52066 - protein, 876 aa, Homo sapiens
MLSGKKAAAAAAAAAAAATGTEAGPGTAGGSENGSEVAAQPAGLSGPAEVGPGAVGERTPRKKEPPRASPPGGLAEPPGSAGPQAGPTVVPGSATPMETGIAETPEGRRTSRRKRAKVEYREMDESLANLSEDEYYSEEERNAKAEKEKKLPPPPPQAPPEEENESEPEEPSGQAGGLQDDSSGGYGDGQASGVEGAAFQSRLPHDRMTSQEAACFPDIISGPQQTQKVFLFIRNRTLQLWLDNPKIQLTFEATLQQLEAPYNSDTVLVHRVHSYLERHGLINFGIYKRIKPLPTKKTGKVIIIGSGVSGLAAARQLQSFGMDVTLLEARDRVGGRVATFRKGNYVADLGAMVVTGLGGNPMAVVSKQVNMELAKIKQKCPLYEANGQADTVKVPKEKDEMVEQEFNRLLEATSYLSHQLDFNVLNNKPVSLGQALEVVIQLQEKHVKDEQIEHWKKIVKTQEELKELLNKMVNLKEKIKELHQQYKEASEVKPPRDITAEFLVKSKHRDLTALCKEYDELAETQGKLEEKLQELEANPPSDVYLSSRDRQILDWHFANLEFANATPLSTLSLKHWDQDDDFEFTGSHLTVRNGYSCVPVALAEGLDIKLNTAVRQVRYTASGCEVIAVNTRSTSQTFIYKCDAVLCTLPLGVLKQQPPAVQFVPPLPEWKTSAVQRMGFGNLNKVVLCFDRVFWDPSVNLFGHVGSTTASRGELFLFWNLYKAPILLALVAGEAAGIMENISDDVIVGRCLAILKGIFGSSAVPQPKETVVSRWRADPWARGSYSYVAAGSSGNDYDLMAQPITPGPSIPGAPQPIPRLFFAGEHTIRNYPATVHGALLSGLREAGRIADQFLGAMYTLPRQATPGVPAQQSPSM

SEQ ID NO: 52067 - protein, 590 aa, Homo sapiens
MATPRGRTKKKASFDHSPDSLPLRSSGRQAKKKATETTDEDEDGGSEKKYRKCEKAGCTATCPVCFASASERCAKNGYTSRWYHLSCGEHFCNECFDHYYRSHKDGYDKYTTWKKIWTSNGKTEPSPKAFMADQQLPYWVQCTKPECRKWRQLTKEIQLTPQIAKTYRCGMKPNTAIKPETSDHCSLPEDLEALTPQKCIPHIIVRGLVRIRCVQEVERILYFMTRKGLINTGVLSVGADQYLLPKDYHNKSVIIIGAGPAGLAAARQLHNFGIKVTVLEAKDRIGGRVWDDKSFKGVTVGRGAQIVNGCINNPVALMCEQVSARSWDHNEFFAQFAGDHTLLTPGYSVIIEKLAEGLDIQLKSPVQCIDYSGDEVQVTTTDGTGYSAQKVLVTVPLALLQKGAIQFNPPLSEKKMKAINSLGAGIIEKIALQFPYRFWDSKVQGADFFGHVPPSASKRGLFAVFYDMDPQKKHSVLMSVIAGEAVASVRTLDDKQVLQQCMATLRELFKEQEVPDPTKYFVTRWSTDPWIQMAYSFVKTGGSGEAYDIIAEDIQGTVFFAGEATNRHFPQTVTGAYLSGVREASKIAAF

SEQ ID NO: 52068 - protein, 820 aa, Homo sapiens
MATPRGRTKKKASFDHSPDSLPLRSSGRQAKKKATETTDEDEDGGSEKKYRKCEKAGCTATCPVCFASASERCAKNGYTSRWYHLSCGEHFCNECFDHYYRSHKDGYDKYTTWKKIWTSNGKTEPSPKAFMADQQLPYWVQCTKPECRKWRQLTKEIQLTPQIAKTYRCGMKPNTAIKPETSDHCSLPEDLRVLEVSNHWWYSMLILPPLLKDSVAAPLLSAYYPDCVGMSPSCTSTNRAAATGNASPGKLEHSKAALSVHVPGMNRYFQPFYQPNECGKALCVRPDVMELDELYEFPEYSRDPTMYLALRNLILALWYTNCKEALTPQKCIPHIIVRGLVRIRCVQEVERILYFMTRKGLINTGVLSVGADQYLLPKDYHNKSVIIIGAGPAGLAAARQLHNFGIKVTVLEAKDRIGGRVWDDKSFKGVTVGRGAQIVNGCINNPVALMCEQLGISMHKFGERCDLIQEGGRITDPTIDKRMDFHFNALLDVVSEWRKDKTQLQDVPLGEKIEEIYKAFIKESGIQFSELEGQVLQFHLSNLEYACGSNLHQVSARSWDHNEFFAQFAGDHTLLTPGYSVIIEKLAEGLDIQLKSPVQCIDYSGDEVQVTTTDGTGYSAQKVLVTVPLALLQKGAIQFNPPLSEKKMKAINSLGAGIIEKIALQFPYRFWDSKVQGADFFGHVPPSASKRGLFAVFYDMDPQHSVLMSVIAGEAVASVRTLDDKQVLQQCMATLRELFKEQEVPDPTKYFVTRWSTDPWIQMAYSFVKTGGSGEAYDIIAEDIQGTVFFAGEATNRHFPQTVTGAYLSGVREASKIAAF

SEQ ID NO: 52069 - protein, 823 aa, Homo sapiens
MATPRGRTKKKASFDHSPDSLPLRSSGRQAKKKATETTDEDEDGGSEKKYRKCEKAGCTATCPVCFASASERCAKNGYTSRWYHLSCGEHFCNECFDHYYRSHKDGYDKYTTWKKIWTSNGKTEPSPKAFMADQQLPYWVQCTKPECRKWRQLTKEIQLTPQIAKTYRCGMKPNTAIKPETSDHCSLPEDLRVLEVSNHWWYSMLILPPLLKDSVAAPLLSAYYPDCVGMSPSCTSTNRAAATGNASPGKLEHSKAALSVHVPGMNRYFQPFYQPNECGKALCVRPDVMELDELYEFPEYSRDPTMYLALRNLILALWYTNCKEALTPQKCIPHIIVRGLVRIRCVQEVERILYFMTRKGLINTGVLSVGADQYLLPKDYHNKSVIIIGAGPAGLAAARQLHNFGIKVTVLEAKDRIGGRVWDDKSFKGVTVGRGAQIVNGCINNPVALMCEQLGISMHKFGERCDLIQEGGRITDPTIDKRMDFHFNALLDVVSEWRKDKTQLQDVPLGEKIEEIYKAFIKESGIQFSELEGQVLQFHLSNLEYACGSNLHQVSARSWDHNEFFAQFAGDHTLLTPGYSVIIEKLAEGLDIQLKSPQVQCIDYSGDEVQVTTTDGTGYSAQKVLVTVPLALLQKGAIQFNPPLSEKKMKAINSLGAGIIEKIALQFPYRFWDSKVQGADFFGHVPPSASKRGLFAVFYDMDPQKKHSVLMSVIAGEAVASVRTLDDKQVLQQCMATLRELFKEQEVPDPTKYFVTRWSTDPWIQMAYSFVKTGGSGEAYDIIAEDIQGTVFFAGEATNRHFPQTVTGAYLSGVREASKIAAF

SEQ ID NO: 52070 - protein, 591 aa, Homo sapiens
MATPRGRTKKKASFDHSPDSLPLRSSGRQAKKKATETTDEDEDGGSEKKYRKCEKAGCTATCPVCFASASERCAKNGYTSRWYHLSCGEHFCNECFDHYYRSHKDGYDKYTTWKKIWTSNGKTEPSPKAFMADQQLPYWVQCTKPECRKWRQLTKEIQLTPQIAKTYRCGMKPNTAIKPETSDHCSLPEDLEALTPQKCIPHIIVRGLVRIRCVQEVERILYFMTRKGLINTGVLSVGADQYLLPKDYHNKSVIIIGAGPAGLAAARQLHNFGIKVTVLEAKDRIGGRVWDDKSFKGVTVGRGAQIVNGCINNPVALMCEQVSARSWDHNEFFAQFAGDHTLLTPGYSVIIEKLAEGLDIQLKSPQVQCIDYSGDEVQVTTTDGTGYSAQKVLVTVPLALLQKGAIQFNPPLSEKKMKAINSLGAGIIEKIALQFPYRFWDSKVQGADFFGHVPPSASKRGLFAVFYDMDPQKKHSVLMSVIAGEAVASVRTLDDKQVLQQCMATLRELFKEQEVPDPTKYFVTRWSTDPWIQMAYSFVKTGGSGEAYDIIAEDIQGTVFFAGEATNRHFPQTVTGAYLSGVREASKIAAF

SEQ ID NO: 52071 - protein, 640 aa, Homo sapiens
  VARIANT 1: note = MOD_RES - Any amino acid
XCSLPEDLRVLEVSNHWWYSMLILPPLLKDSVAAPLLSAYYPDCVGMSPSCTSTNRAAATGNASPGKLEHSKAALSVHVPGMNRYFQPFYQPNECGKALCVRPDVMELDELYEFPEYSRDPTMYLALRNLILALWYTNCKEALTPQKCIPHIIVRGLVRIRCVQEVERILYFMTRKGLINTGVLSVGADQYLLPKDYHNKSVIIIGAGPAGLAAARQLHNFGIKVTVLEAKDRIGGRVWDDKSFKGVTVGRGAQIVNGCINNPVALMCEQLGISMHKFGERCDLIQEGGRITDPTIDKRMDFHFNALLDVVSEWRKDKTQLQDVPLGEKIEEIYKAFIKESGIQFSELEGQVLQFHLSNLEYACGSNLHQVSARSWDHNEFFAQFAGDHTLLTPGYSVIIEKLAEGLDIQLKSPQVQCIDYSGDEVQVTTTDGTGYSAQKVLVTVPLALLQKGAIQFNPPLSEKKMKAINSLGAGIIEKIALQFPYRFWDSKVQGADFFGHVPPSASKRGLFAVFYDMDPQKKHSVLMSVIAGEAVASVRTLDDKQVLQQCMATLRELFKEQEVPDPTKYFVTRWSTDPWIQMAYSFVKTGGSGEAYDIIAEDIQGTVFFAGEATNRHFPQTVTGAYLSGVREASKIAAF

SEQ ID NO: 52072 - protein, 113 aa, Homo sapiens
MSVIAGEAVASVRTLDDKQVLQQCMATLRELFKEQEVPDPTKYFVTRWSTDPWIQMAYSFVKTGGSGEAYDIIAEDIQGTVFFAGEATNRHFPQTVTGAYLSGVREASKIAAF

SEQ ID NO: 52073 - protein, 1321 aa, Homo sapiens
MVLTLGESWPVLVGRRFLSLSAADGSDGSHDSWDVERVAEWPWLSGTIRAVSHTDVTKKDLKVCVEFDGESWRKRRWIEVYSLLRRAFLVEHNLVLAERKSPEISERIVQWPAITYKPLLDKAGLGSITSVRFLGDQQRVFLSKDLLKPIQDVNSLRLSLTDNQIVSKEFQALIVKHLDESHLLKGDKNLVGSEVKIYSLDPSTQWFSATVINGNPASKTLQVNCEEIPALKIVDPSLIHVEVVHDNLVTCGNSARIGAVKRKSSENNGTLVSKQAKSCSEASPSMCPVQSVPTTVFKEILLGCTAATPPSKDPRQQSTPQAANSPPNLGAKIPQGCHKQSLPEEISSCLNTKSEALRTKPDVCKAGLLSKSSQIGTGDLKILTEPKGSCTQPKTNTDQENRLESVPQALTGLPKECLPTKASSKAELEIANPPELQKHLEHAPSPSDVSNAPEVKAGVNSDSPNNCSGKKVEPSALACRSQNLKESSVKVDNESCCSRSNNKIQNAPSRKSVLTDPAKLKKLQQSGEAFVQDDSCVNIVAQLPKCRECRLDSLRKDKEQQKDSPVFCRFFHFRRLQFNKHGVLRVEGFLTPNKYDNEAIGLWLPLTKNVVGIDLDTAKYILANIGDHFCQMVISEKEAMSTIEPHRQVAWKRAVKGVREMCDVCDTTIFNLHWVCPRCGFGVCVDCYRMKRKNCQQGAAYKTFSWLKCVKSQIHEPENLMPTQIIPGKALYDVGDIVHSVRAKWGIKANCPCSNRQFKLFSKPASKEDLKQTSLAGEKPTLGAVLQQNPSVLEPAAVGGEAASKPAGSMKPACPASTSPLNWLADLTSGNVNKENKEKQPTMPILKNEIKCLPPLPPLSKSSTVLHTFNSTILTPVSNNNSGFLRNLLNSSTGKTENGLKNTPKILDDIFASLVQNKTTSDLSKRPQGLTIKPSILGFDTPHYWLCDNRLLCLQDPNNKSNWNVFRECWKQGQPVMVSGVHHKLNSELWKPESFRKEFGEQEVDLVNCRTNEIITGATVGDFWDGFEDVPNRLKNEKEPMVLKLKDWPPGEDFRDMMPSRFDDLMANIPLPEYTRRDGKLNLASRLPNYFVRPDLGPKMYNAYGLITPEDRKYGTTNLHLDVSDAANVMVYVGIPKGQCEQEEEVLKTIQDGDSDELTIKRFIEGKEKPGALWHIYAAKDTEKIREFLKKVSEEQGQENPADHDPIHDQSWYLDRSLRKRLHQEYGVQGWAIVQFLGDVVFIPAGAPHQVHNLYSCIKVAEDFVSPEHVKHCFWLTQEFRYLSQTHTNHEDKLQVKNVIYHAVKDAVAMLKASESSFGKP

SEQ ID NO: 52074 - protein, 1321 aa, Homo sapiens; identical to SEQ ID NO: 52073

SEQ ID NO: 52075 - protein, 1321 aa, Homo sapiens; identical to SEQ ID NO: 52073

SEQ ID NO: 52076 - protein, 170 aa, Homo sapiens
MVLTLGESWPVLVGRRFLSLSAADGSDGSHDSWDVERVAEWPWLSGTIRAVSHTDVTKKDLKVCVEFDGESWRKRRWIEVYSLLRRAFLVEHNLVLAERKSPEISERIVQWPAITYKPLLDKAGLGSITSVRFLGDQQRVFLSKDLLKPIQDVNSLRLSLTDNQIVSKEF

SEQ ID NO: 52077 - protein, 711 aa, Homo sapiens
MVLTLGESWPVLVGRRFLSLSAADGSDGSHDSWDVERVAEWPWLSGTIRAVSHTDVTKKDLKVCVEFDGESWRKRRWIEVYSLLRRAFLVEHNLVLAERKSPEISERIVQWPAITYKPLLDKAGLGSITSVRFLGDQQRVFLSKDLLKPIQDVNSLRLSLTDNQIVSKEFQALIVKHLDESHLLKGDKNLVGSEVKIYSLDPSTQWFSATVINGNPASKTLQVNCEEIPALKIVDPSLIHVEVVHDNLVTCGNSARIGAVKRKSSENNGTLVSKQAKSCSEASPSMCPVQSVPTTVFKEILLGCTAATPPSKDPRQQSTPQAANSPPNLGAKIPQGCHKQSLPEEISSCLNTKSEALRTKPDVCKAGLLSKSSQIGTGDLKILTEPKGSCTQPKTNTDQENRLESVPQALTGLPKECLPTKASSKAELEIANPPELQKHLEHAPSPSDVSNAPEVKAGVNSDSPNNCSGKKVEPSALACRSQNLKESSVKVDNESCCSRSNNKIQNAPSRKSVLTDPAKLKKLQQSGEAFVQDDSCVNIVAQLPKCRECRLDSLRKDKEQQKDSPVFCRFFHFRRLQFNKHGVLRVEGFLTPNKYDNEAIGLWLPLTKNVVGIDLDTAKYILANIGDHFCQMVISEKEAMSTIEPHRQVAWKRAVKGVREMCDVCDTTIFNLHWVCPRCGFGVCVDCYRMKRKNCQQGENRFDSPPAPLHS

SEQ ID NO: 52078 - protein, 121 aa, Homo sapiens
MVLTLGESWPVLVGRRFLSLSAADGSDGSHDSWDVERVAEWPWLSGTIRAVSHTDVTKKDLKVCVEFDGESWRKRRWIEVYSLLRRAFLVEHNLVLAERKSPEISERIVQWPAITYKPLLD

SEQ ID NO: 52079 - protein, 1327 aa, Homo sapiens
MVLTLGESWPVLVGRRFLSLSAADGSDGSHDSWDVERVAEWPWLSGTIRAVSHTDVTKKDLKVCVEFDGESWRKRRWIEVYSLLRRAFLVEHNLVLAERKSPEISERIVQWPAITYKPLLDKAGLGSITSVRFLGDQQRVFLSKDLLKPIQDVNSLRLSLTDNQIVSKEFQALIVKHLDESHLLKGDKNLVGSEVKIYSLDPSTQWFSATVINGNPASKTLQVNCEEIPALKIVDPSLIHVEVVHDNLVTCGNSARIGAVKRKSSENNGTLVSKQAKSCSEASPSMCPVQSVPTTVFKEILLGCTAATPPSKDPRQQSTPQAANSPPNLGAKIPQGCHKQSLPEEISSCLNTKSEALRTKPDVCKAGLLSKSSQIGTGDLKILTEPKGSCTQPKTNTDQENRLESVPQALTGLPKECLPTKASSKAELEIANPPELQKHLEHAPSPSDVSNAPEVKAGVNSDSPNNCSGKKVEPSALACRSQNLKESSVKVDNESCCSRSNNKIQNAPSRKSVLTDPAKLKKLQQSGEAFVQDDSCVNIVAQLPKCRECRLDSLRKDKEQQKDSPVFCRFFHFRRLQFNKHGVLRVEGFLTPNKYDNEAIGLWLPLTKNVVGIDLDTAKYILANIGDHFCQMVISEKEAMSTIEPHRQVAWKRAVKGVREMCDVCDTTIFNLHWVCPRCGFGVCVDCYRMKRKNCQQGAAYKTFSWLKCVKSQIHEPENLMPTQIIPGKALYDVGDIVHSVRAKWGIKANCPCSNRQFKLFSKPASKEDLKQTSLAGEKPTLGAVLQQNPSVLEPAAVGGEAASKPAGSMKPACPASTSPLNWLADLTSGNVNKENKEKQPTMPILKNEIKCLPPLPPLSKSSTVLHTFNSTILTPVSNNNSGFLRNLLNSSTGKTENGLKNTPKILDDIFASLVQNKTTSDLSKRPQGLTIKPSILGFDTPHYWLCDNRLLCLQDPNNKSNWNVFRECWKQGQPVMVSGVHHKLNSELWKPESFRKEFGEQEVDLVNCRTNEIITGATVGDFWDGFEDVPNRLKNEKEPMVLKLKDWPPGEDFRDMMPSRFDDLMANIPLPEYTRRDGKLNLASRLPNYFVRPDLGPKMYNAYGLITPEDRKYGTTNLHLDVSDAANVMVYVGIPKGQCEQEEEVLKTIQDGDSDELTIKRFIEGKEKPGALWHIYAAKDTEKIREFLKKVSEEQGQENPADHDPIHDQSWYLDRSLRKRLHQEYGVQGWAIVQFLGDVVFIPAGAPHQVHNLYSCIKVAEDFVSPEHVKHCFWLTQEFRYLSQTHTNHEDKLQVKNVIYHAVKDAVAMLKVNPVLANLNLPAHWK

SEQ ID NO: 52080 - protein, 1269 aa, Homo sapiens
MVLTLGESWPVLVGRRFLSLSAADGSDGSHDSWDVERVAEWPWLSGTIRAVSHTDVTKKDLKTYKPLLDKAGLGSITSVRFLGDQQRVFLSKDLLKPIQDVNSLRLSLTDNQIVSKEFQALIVKHLDESHLLKGDKNLVGSEVKIYSLDPSTQWFSATVINGNPASKTLQVNCEEIPALKIVDPSLIHVEVVHDNLVTCGNSARIGAVKRKSSENNGTLVSKQAKSCSEASPSMCPVQSVPTTVFKEILLGCTAATPPSKDPRQQSTPQAANSPPNLGAKIPQGCHKQSLPEEISSCLNTKSEALRTKPDVCKAGLLSKSSQIGTGDLKILTEPKGSCTQPKTNTDQENRLESVPQALTGLPKECLPTKASSKAELEIANPPELQKHLEHAPSPSDVSNAPEVKAGVNSDSPNNCSGKKVEPSALACRSQNLKESSVKVDNESCCSRSNNKIQNAPSRKSVLTDPAKLKKLQQSGEAFVQDDSCVNIVAQLPKCRECRLDSLRKDKEQQKDSPVFCRFFHFRRLQFNKHGVLRVEGFLTPNKYDNEAIGLWLPLTKNVVGIDLDTAKYILANIGDHFCQMVISEKEAMSTIEPHRQVAWKRAVKGVREMCDVCDTTIFNLHWVCPRCGFGVCVDCYRMKRKNCQQGAAYKTFSWLKCVKSQIHEPENLMPTQIIPGKALYDVGDIVHSVRAKWGIKANCPCSNRQFKLFSKPASKEDLKQTSLAGEKPTLGAVLQQNPSVLEPAAVGGEAASKPAGSMKPACPASTSPLNWLADLTSGNVNKENKEKQPTMPILKNEIKCLPPLPPLSKSSTVLHTFNSTILTPVSNNNSGFLRNLLNSSTGKTENGLKNTPKILDDIFASLVQNKTTSDLSKRPQGLTIKPSILGFDTPHYWLCDNRLLCLQDPNNKSNWNVFRECWKQGQPVMVSGVHHKLNSELWKPESFRKEFGEQEVDLVNCRTNEIITGATVGDFWDGFEDVPNRLKNEKEPMVLKLKDWPPGEDFRDMMPSRFDDLMANIPLPEYTRRDGKLNLASRLPNYFVRPDLGPKMYNAYGLITPEDRKYGTTNLHLDVSDAANVMVYVGIPKGQCEQEEEVLKTIQDGDSDELTIKRFIEGKEKPGALWHIYAAKDTEKIREFLKKVSEEQGQENPADHDPIHDQSWYLDRSLRKRLHQEYGVQGWAIVQFLGDVVFIPAGAPHQVHNLYSCIKVAEDFVSPEHVKHCFWLTQEFRYLSQTHTNHEDKLQVKNVIYHAVKDAVAMLKASESSFGKP

SEQ ID NO: 52081 - protein, 1761 aa, Homo sapiens
MADAAASPVGKRLLLLFADTAASASASAPAAAAASGDPGPALRTRAWRAGTVRAMSGAVPQDLAIFVEFDGCNWKQHSWVKVHAEEVIVLLLEGSLVWAPREDPVLLQGIRVSIAQWPALTFTPLVDKLGLGSVVPVEYLLDRELRFLSDANGLHLFQMGTDSQNQILLEHAALRETVNALISDQKLQEIFSRGPYSVQGHRVKIYQPEGEEGWLYGVVSHQDSITRLMEVSVTESGEIKSVDPRLIHVMLMDNSAPQSEGGTLKAVKSSKGKKKRESIEGKDGRRRKSASDSGCDPASKKLKGDRGEVDSNGSDGGEASRGPWKGGNASGEPGLDQRAKQPPSTFVPQINRNIRFATYTKENGRTLVVQDEPVGGDTPASFTPYSTATGQTPLAPEVGGAENKEAGKTLEQVGQGIVASAAVVTTASSTPNTVRISDTGLAAGTVPEKQKGSRSQASGENSRNSILASSGFGAPLPSSSQPLTFGSGRSQSNGVLATENKPLGFSFGCSSAQEAQKDTDLSKNLFFQCMSQTLPTSNYFTTVSESLADDSSSRDSFKQSLESLSSGLCKGRSVLGTDTKPGSKAGSSVDRKVPAESMPTLTPAFPRSLLNARTPENHENLFLQPPKLSREEPSNPFLAFVEKVEHSPFSSFASQASGSSSSATTVTSKVAPSWPESHSSADSASLAKKKPLFITTDSSKLVSGVLGSALTSGGPSLSAMGNGRSSSPTSSLTQPIEMPTLSSSPTEERPTVGPGQQDNPLLKTFSNVFGRHSGGFLSSPADFSQENKAPFEAVKRFSLDERSLACRQDSDSSTNSDLSDLSDSEEQLQAKTGLKGIPEHLMGKLGPNGERSAELLLGKSKGKQAPKGRPRTAPLKVGQSVLKDVSKVKKLKQSGEPFLQDGSCINVAPHLHKCRECRLERYRKFKEQEQDDSTVACRFFHFRRLIFTRKGVLRVEGFLSPQQSDPDAMNLWIPSSSLAEGIDLETSKYILANVGDQFCQLVMSEKEAMMMVEPHQKVAWKRAVRGVREMCDVCETTLFNIHWVCRKCGFGVCLDCYRLRKSRPRSETEEMGDEEVFSWLKCAKGQSHEPENLMPTQIIPGTALYNIGDMVHAARGKWGIKANCPCISRQNKSVLRPAVTNGMSQLPSINPSASSGNETTFSGGGGPAPVTTPEPDHVPKADSTDIRSEEPLKTDSSASNSNSELKAIRPPCPDTAPPSSALHWLADLATQKAKEETKEAGSLRSVLNKESHSPFGLDSFNSTAKVSPLTPKLFNSLLLGPTASNNKTEGSSLRDLLHSGPGKLPQTPLDTGIPFPPVFSTSSAGVKSKASLPNFLDHIIASVVENKKTSDASKRACNLTDTQKEVKEMVMGLNVLDPHTSHSWLCDGRLLCLHDPSNKNNWKIFRECWKQGQPVLVSGVHKKLKSELWKPEAFSQEFGDQDVDLVNCRNCAIISDVKVRDFWDGFEIICKRLRSEDGQPMVLKLKDWPPGEDFRDMMPTRFEDLMENLPLPEYTKRDGRLNLASRLPSYFVRPDLGPKMYNAYGLITAEDRRVGTTNLHLDVSDAVNVMVYVGIPIGEGAHDEEVLKTIDEGDADEVTKQRIHDGKEKPGALWHIYAAKDAEKIRELLRKVGEEQGQENPPDHDPIHDQSWYLDQTLRKRLYEEYGVQGWAIVQFLGDAVFIPAGAPHQVHNLYSCIKVAEDFVSPEHVKHCFRLTQEFRHLSNTHTNHEDKLQVKNIIYHAVKDAVGTLKAHESKLARS

SEQ ID NO: 52082 - protein, 1417 aa, Homo sapiens
MGAMEINRNIRFATYTKENGRTLVVQDEPVGGDTPASFTPYSTATGQTPLAPEVGGAENKEAGKTLEQVGQGIVASAAVVTTASSTPNTVRISDTGLAAGTVPEKQKGSRSQASGENSRNSILASSGFGAPLPSSSQPLTFGSGRSQSNGVLATENKPLGFSFGCSSAQEAQKDTDLSKNLFFQCMSQTLPTSNYFTTVSESLADDSSSRDSFKQSLESLSSGLCKGRSVLGTDTKPGSKAGSSVDRKVPAESMPTLTPAFPRSLLNARTPENHENLFLQPPKLSREEPSNPFLAFVEKVEHSPFSSFASQASGSSSSATTVTSKVAPSWPESHSSADSASLAKKKPLFITTDSSKLVSGVLGSALTSGGPSLSAMGNGRSSSPTSSLTQPIEMPTLSSSPTEERPTVGPGQQDNPLLKTFSNVFGRHSGGFLSSPADFSQENKAPFEAVKRFSLDERSLACRQDSDSSTNSDLSDLSDSEEQLQAKTGLKGIPEHLMGKLGPNGERSAELLLGKSKGKQAPKGRPRTAPLKVGQSVLKDVSKVKKLKQSGEPFLQDGSCINVAPHLHKCRECRLERYRKFKEQEQDDSTVACRFFHFRRLIFTRKGVLRVEGFLSPQQSDPDAMNLWIPSSSLAEGIDLETSKYILANVGDQFCQLVMSEKEAMMMVEPHQKVAWKRAVRGVREMCDVCETTLFNIHWVCRKCGFGVCLDCYRLRKSRPRSETEEMGDEEVFSWLKCAKGQSHEPENLMPTQIIPGTALYNIGDMVHAARGKWGIKANCPCISRQNKSVLRPAVTNGMSQLPSINPSASSGNETTFSGGGGPAPVTTPEPDHVPKADSTDIRSEEPLKTDSSASNSNSELKAIRPPCPDTAPPSSALHWLADLATQKAKEETKEAGSLRSVLNKESHSPFGLDSFNSTAKVSPLTPKLFNSLLLGPTASNNKTEGSSLRDLLHSGPGKLPQTPLDTGIPFPPVFSTSSAGVKSKASLPNFLDHIIASVVENKKTSDASKRACNLTDTQKEVKEMVMGLNVLDPHTSHSWLCDGRLLCLHDPSNKNNWKIFRECWKQGQPVLVSGVHKKLKSELWKPEAFSQEFGDQDVDLVNCRNCAIISDVKVRDFWDGFEIICKRLRSEDGQPMVLKLKDWPPGEDFRDMMPTRFEDLMENLPLPEYTKRDGRLNLASRLPSYFVRPDLGPKMYNAYGLITAEDRRVGTTNLHLDVSDAVNVMVYVGIPIGEGAHDEEVLKTIDEGDADEVTKQRIHDGKEKPGALWHIYAAKDAEKIRELLRKVGEEQGQENPPDHDPIHDQSWYLDQTLRKRLYEEYGVQGWAIVQFLGDAVFIPAGAPHQVHNLYSCIKVAEDFVSPEHVKHCFRLTQEFRHLSNTHTNHEDKLQVKNIIYHAVKDAVGTLKAHESKLARS

SEQ ID NO: 52083 - protein, 793 aa, Homo sapiens
MNLWIPSSSLAEGIDLETSKYILANVGDQFCQLVMSEKEAMMMVEPHQKVAWKRAVRGVREMCDVCETTLFNIHWVCRKCGFGVCLDCYRLRKSRPRSETEEMGDEEVFSWLKCAKGQSHEPENLMPTQIIPGTALYNIGDMVHAARGKWGIKANCPCISRQNKSVLRPAVTNGMSQLPSINPSASSGNETTFSGGGGPAPVTTPEPDHVPKADSTDIRSEEPLKTDSSASNSNSELKAIRPPCPDTAPPSSALHWLADLATQKAKEETKEAGSLRSVLNKESHSPFGLDSFNSTAKVSPLTPKLFNSLLLGPTASNNKTEGSSLRDLLHSGPGKLPQTPLDTGIPFPPVFSTSSAGVKSKASLPNFLDHIIASVVENKKTSDASKRACNLTDTQKEVKEMVMGLNVLDPHTSHSWLCDGRLLCLHDPSNKNNWKIFRECWKQGQPVLVSGVHKKLKSELWKPEAFSQEFGDQDVDLVNCRNCAIISDVKVRDFWDGFEIICKRLRSEDGQPMVLKLKDWPPGEDFRDMMPTRFEDLMENLPLPEYTKRDGRLNLASRLPSYFVRPDLGPKMYNAYGLITAEDRRVGTTNLHLDVSDAVNVMVYVGIPIGEGAHDEEVLKTIDEGDADEVTKQRIHDGKEKPGALWHIYAAKDAEKIRELLRKVGEEQGQENPPDHDPIHDQSWYLDQTLRKRLYEEYGVQGWAIVQFLGDAVFIPAGAPHQVHNLYSCIKVAEDFVSPEHVKHCFRLTQEFRHLSNTHTNHEDKLQVKNIIYHAVKDAVGTLKAHESKLARS

SEQ ID NO: 52084 - protein, 1551 aa, Homo sapiens
GWRWLYGVVSHQDSITRLMEVSVTESGEIKSVDPRLIHVMLMDNSAPQSEGGTLKAVKSSKGKKKRESIEGKDGRRRKSASDSGCDPASKKLKGDRGEVDSNGSDGGEASRGPWKGGNASGEPGLDQRAKQPPSTFVPQINRNIRFATYTKENGRTLVVQDEPVGGDTPASFTPYSTATGQTPLAPEVGGAENKEAGKTLEQVGQGIVASAAVVTTASSTPNTVRISDTGLAAGTVPEKQKGSRSQASGENSRNSILASSGFGAPLPSSSQPLTFGSGRSQSNGVLATENKPLGFSFGCSSAQEAQKDTDLSKNLFFQCMSQTLPTSNYFTTVSESLADDSSSRDSFKQSLESLSSGLCKGRSVLGTDTKPGSKAGSSVDRKVPAESMPTLTPAFPRSLLNARTPENHENLFLQPPKLSREEPSNPFLAFVEKVEHSPFSSFASQASGSSSSATTVTSKVAPSWPESHSSADSASLAKKKPLFITTDSSKLVSGVLGSALTSGGPSLSAMGNGRSSSPTSSLTQPIEMPTLSSSPTEERPTVGPGQQDNPLLKTFSNVFGRHSGGFLSSPADFSQENKAPFEAVKRFSLDERSLACRQDSDSSTNSDLSDLSDSEEQLQAKTGLKGIPEHLMGKLGPNGERSAELLLGKSKGKQAPKGRPRTAPLKVGQSVLKDVSKVKKLKQSGEPFLQDGSCINVAPHLHKCRECRLERYRKFKEQEQDDSTVACRFFHFRRLIFTRKGVLRVEGFLSPQQSDPDAMNLWIPSSSLAEGIDLETSKYILANVGDQFCQLVMSEKEAMMMVEPHQKVAWKRAVRGVREMCDVCETTLFNIHWVCRKCGFGVCLDCYRLRKSRPRSETEEMGDEEVFSWLKCAKGQSHEPENLMPTQIIPGTALYNIGDMVHAARGKWGIKANCPCISRQNKSVLRPAVTNGMSQLPSINPSASSGNETTFSGGGGPAPVTTPEPDHVPKADSTDIRSEEPLKTDSSASNSNSELKAIRPPCPDTAPPSSALHWLADLATQKAKEETKEAGSLRSVLNKESHSPFGLDSFNSTAKVSPLTPKLFNSLLLGPTASNNKTEGSSLRDLLHSGPGKLPQTPLDTGIPFPPVFSTSSAGVKSKASLPNFLDHIIASVVENKKTSDASKRACNLTDTQKEVKEMVMGLNVLDPHTSHSWLCDGRLLCLHDPSNKNNWKIFRECWKQGQPVLVSGVHKKLKSELWKPEAFSQEFGDQDVDLVNCRNCAIISDVKVRDFWDGFEIICKRLRSEDGQPMVLKLKDWPPGEDFRDMMPTRFEDLMENLPLPEYTKRDGRLNLASRLPSYFVRPDLGPKMYNAYGLITAEDRRVGTTNLHLDVSDAVNVMVYVGIPIGEGAHDEEVLKTIDEGDADEVTKQRIHDGKEKPGALWHIYAAKDAEKIRELLRKVGEEQGQENPPDHDPIHDQSWYLDQTLRKRLYEEYGVQGWAIVQFLGDAVFIPAGAPHQVHNLYSCIKVAEDFVSPEHVKHCFRLTQEFRHLSNTHTNHEDKLQVKNIIYHAVKDAVGTLKAHESKLARS

SEQ ID NO: 52085 - protein, 715 aa, Homo sapiens
MAGVGPGGYAAEFVPPPECPVFEPSWEEFTDPLSFIGRIRPLAEKTGICKIRPPKEYALSGWNLNNMPVLEQSVLAHINVDISGMKVPWLYVGMCFSSFCWHIEDHWSYSINYLHWGEPKTWYGVPSHAAEQLEEVMRELAPELFESQPDLLHQLVTIMNPNVLMEHGVPVYRTNQCAGEFVVTFPRAYHSGFNQGYNFAEAVNFCTADWLPIGRQCVNHYRRLRRHCVFSHEELIFKMAADPECLDVGLAAMVCKELTLMTEEETRLRESVVQMGVLMSEEEVFELVPDDERQCSACRTTCFLSALTCSCNPERLVCLYHPTDLCPCPMQKKCLRYRYPLEDLPSLLYGVKVRAQSYDTWVSRVTEALSANFNHKKDLIELRVMLEDAEDRKYPENDLFRKLRDAVKEAETCASVAQLLLSKKQKHRQSPDSGRTRTKLTVEELKAFVQQLFSLPCVISQARQVKNLLDDVEEFHERAQEAMMDETPDSSKLQMLIDMGSSLYVELPELPRLKQELQQARWLDEVRLTLSDPQQVTLDVMKKLIDSGVGLAPHHAVEKAMAELQELLTVSERWEEKAKVCLQARPRHSVASLESIVNEAKNIPAFLPNVLSLKEALQKAREWTAKVEAIQSGSNYAYLEQLESLSAKGRPIPVRLEALPQVESQVAAARAWRERTGRTFLKKNSSHTLLQVLSPRTDIGVYGSGKNRRKKVKEL

SEQ ID NO: 52086 - protein, 1636 aa, Homo sapiens
MAGVGPGGYAAEFVPPPECPVFEPSWEEFTDPLSFIGRIRPLAEKTGICKIRPPKDWQPPFACEVKSFRFTPRVQRLNELEAMTRVRLDFLDQLAKFWELQGSTLKIPVVERKILDLYALSKIVASKGGFEMVTKEKKWSKVGSRLGYLPGKGTGSLLKSHYERILYPYELFQSGVSLMGVQMPNLDLKEKVEPEVLSTDTQTSPEPGTRMNILPKRTRRVKTQSESGDVSRNTELKKLQIFGAGPKVVGLAMGTKDKEDEVTRRRKVTNRSDAFNMQMRQRKGTLSVNFVDLYVCMFCGRGNNEDKLLLCDGCDDSYHTFCLIPPLPDVPKGDWRCPKCVAEECSKPREAFGFEQAVREYTLQSFGEMADNFKSDYFNMPVHMVPTELVEKEFWRLVSSIEEDVIVEYGADISSKDFGSGFPVKDGRRKILPEEEEYALSGWNLNNMPVLEQSVLAHINVDISGMKVPWLYVGMCFSSFCWHIEDHWSYSINYLHWGEPKTWYGVPSHAAEQLEEVMRELAPELFESQPDLLHQLVTIMNPNVLMEHGVPVYRTNQCAGEFVVTFPRAYHSGFNQGYNFAEAVNFCTADWLPIGRQCVNHYRRLRRHCVFSHEELIFKMAADPECLDVGLAAMVCKELTLMTEEETRLRESVVQMGVLMSEEEVFELVPDDERQCSACRTTCFLSALTCSCNPERLVCLYHPTDLCPCPMQKKCLRYRYPLEDLPSLLYGVKVRAQSYDTWVSRVTEALSANFNHKKDLIELRVMLEDAEDRKYPENDLFRKLRDAVKEAETCASVAQLLLSKKQKHRQSPDSGRTRTKLTVEELKAFVQQLFSLPCVISQARQVKNLLDDVEEFHERAQEAMMDETPDSSKLQMLIDMGSSLYVELPELPRLKQELQQARWLDEVRLTLSDPQQVTLDVMKKLIDSGVGLAPHHAVEKAMAELQELLTVSERWEEKAKVCLQARPRHSVASLESIVNEAKNIPAFLPNVLSLKEALQKAREWTAKVEAIQSGSNYAYLEQLESLSAKGRPIPVRLEALPQVESQVAAARAWRERTGRTFLKKNSSHTLLQVLSPRTDIGVYGSGKNRRKKVKELIEKEKEKDLDLEPLSDLEEGLEETRDTAMVVAVFKEREQKEIEAMHSLRAANLAKMTMVDRIEEVKFCICRKTASGFMLQCELCKDWFHNSCVPLPKSSSQKKGSSWQAKEVKFLCPLCMRSRRPRLETILSLLVSLQKLPVRLPEGEALQCLTERAMSWQDRARQALATDELSSALAKLSVLSQRMVEQAAREKTEKIISAELQKAAANPDLQGHLPSFQQSAFNRVVSSVSSSPRQTMDYDDEETDSDEDIRETYGYDMKDTASVKSSSSLEPNLFCDEEIPIKSEEVVTHMWTAPSFCAEHAYSSASKSCSQGSSTPRKQPRKSPLVPRSLEPPVLELSPGAKAQLEELMMVGDLLEVSLDETQHIWRILQATHPPSEDRFLHIMEDDSMEEKPLKVKGKDSSEKKRKRKLEKVEQLFGEGKQKSKELKKMDKPRKKKLKLGADKSKELNKLAKKLAKEEERKKKKEKAAAAKVELVKESTEKKREKKVLDIPSKYDWSGAEESDDENAVCAAQNCQRPCKDKGVVFVTEEEKNKKY

SEQ ID NO: 52087 - protein, 1049 aa, Homo sapiens
MAGVGPGGYAAEFVPPPECPVFEPSWEEFTDPLSFIGRIRPLAEKTGICKIRPPKDWQPPFACEVKSFRFTPRVQRLNELEIVASKGGFEMVTKEKKWSKVGSRLGYLPGKGTGSLLKSHYERILYPYELFQSGVSLMGVQMPNLDLKEKVEPEVLSTDTQTSPEPGTRMNILPKRTRRVKTQSESGDVSRNTELKKLQIFGAGPKVVGLAMGTKDKEDEVTRRRKVTNRSDAFNMQMRQRKGTLSVNFVDLYVCMFCGRGNNEDKLLLCDGCDDSYHTFCLIPPLPDVPKGDWRCPKCVAEECSKPREAFGFEQAVREYTLQSFGEMADNFKSDYFNMPVHMVPTELVEKEFWRLVSSIEEDVIVEYGADISSKDFGSGFPVKDGRRKILPEEEEYALSGWNLNNMPVLEQSVLAHINVDISGMKVPWLYVGMCFSSFCWHIEDHWSYSINYLHWGEPKTWYGVPSHAAEQLEEVMRELAPELFESQPDLLHQLVTIMNPNVLMEHGVPVYRTNQCAGEFVVTFPRAYHSGFNQGYNFAEAVNFCTADWLPIGRQCVNHYRRLRRHCVFSHEELIFKMAADPECLDVGLAAMVCKELTLMTEEETRLRESVVQMGVLMSEEEVFELVPDDERQCSACRTTCFLSALTCSCNPERLVCLYHPTDLCPCPMQKKCLRYRYPLEDLPSLLYGVKVRAQSYDTWVSRVTEALSANFNHKKDLIELRVMLEDAEDRKYPENDLFRKLRDAVKEAETCASVAQLLLSKKQKHRQSPDSGRTRTKLTVEELKAFVQQLFSLPCVISQARQVKNLLDDVEEFHERAQEAMMDETPDSSKLQMLIDMGSSLYVELPELPRLKQELQQARWLDEVRLTLSDPQQVTLDVMKKLIDSGVGLAPHHAVEKAMAELQELLTVSERWEEKAKVCLQARPRHSVASLESIVNEAKNIPAFLPNVLSLKEALQKAREWTAKVEAIQSGSNYAYLEQLESLSAKGRPIPVRLEALPQVESQVAAARAWRERTGRTFLKKNSSHTLLQVLSPRTDIGVYGSGKNRR

SEQ ID NO: 52088 - protein, 1690 aa, Homo sapiens
MAGVGPGGYAAEFVPPPECPVFEPSWEEFTDPLSFIGRIRPLAEKTGICKIRPPKDWQPPFACEVKSFRFTPRVQRLNELEAMTRVRLDFLDQLAKFWELQGSTLKIPVVERKILDLYALSKIVASKGGFEMVTKEKKWSKVGSRLGYLPGKGTGSLLKSHYERILYPYELFQSGVSLMGVQMPNLDLKEKVEPEVLSTDTQTSPEPGTRMNILPKRTRRVKTQSESGDVSRNTELKKLQIFGAGPKVVGLAMGTKDKEDEVTRRRKVTNRSDAFNMQMRQRKGTLSVNFVDLYVCMFCGRGNNEDKLLLCDGCDDSYHTFCLIPPLPDVPKGDWRCPKCVAEECSKPREAFGFEQAVREYTLQSFGEMADNFKSDYFNMPVHMVPTELVEKEFWRLVSSIEEDVIVEYGADISSKDFGSGFPVKDGRRKILPEEEEYALSGWNLNNMPVLEQSVLAHINVDISGMKVPWLYVGMCFSSFCWHIEDHWSYSINYLHWGEPKTWYGVPSHAAEQLEEVMRELAPELFESQPDLLHQLVTIMNPNVLMEHGVPVYRTNQCAGEFVVTFPRAYHSGFNQGYNFAEAVNFCTADWLPIGRQCVNHYRRLRRHCVFSHEELIFKMAADPECLDVGLAAMVCKELTLMTEEETRLRESVVQMGVLMSEEEVFELVPDDERQCSACRTTCFLSALTCSCNPERLVCLYHPTDLCPCPMQKKCLRYRYPLEDLPSLLYGVKVRAQSYDTWVSRVTEALSANFNHKKDLIELRVMLEDAEDRKYPENDLFRKLRDAVKEAETCASVAQLLLSKKQKHRQSPDSGRTRTKLTVEELKAFVQQLFSLPCVISQARQVKNLLDDVEEFHERAQEAMMDETPDSSKLQMLIDMGSSLYVELPELPRLKQELQQARWLDEVRLTLSDPQQVTLDVMKKLIDSGVGLAPHHAVEKAMAELQELLTVSERWEEKAKVCLQARPRHSVASLESIVNEAKNIPAFLPNVLSLKEALQKAREWTAKVEAIQSGSNYAYLEQLESLSAKGRPIPVRLEALPQVESQVAAARAWRERTGRTFLKKNSSHTLLQVLSPRTDIGVYGSGKNRRKKVKELIEKEKEKDLDLEPLSDLEEGLEETRDTAMVVAVFKEREQKEIEAMHSLRAANLAKMTMVDRIEEVKFCICRKTASGFMLQCELCKDWFHNSCVPLPKSSSQKKGSSWQAKEVKFLCPLCMRSRRPRLETILSLLVSLQKLPVRLPEGEALQCLTERAMSWQDRARQALATDELSSALAKLSVLSQRMVEQAAREKTEKIISAELQKAAANPDLQGHLPSFQQSAFNRVVSSVSSSPRQTMDYDDEETDSDEDIRETYGYDMKDTASVKSSSSLEPNLFCDEEIPIKSEEVVTHMWTAPSFCAEHAYSSASKSCSQGSSTPRKQPRKSPLVPRSLEPPVLELSPGAKAQLEELMMVGDLLEVSLDETQHIWRILQATHPPSEDRFLHIMEDDSMEEKPLKVKGKDSSEKKRKRKLEKVEQLFGEGKQKSKELKKMDKPRKKKLKLGADKSKELNKLAKKLAKEEERKKKKEKAAAAKVELVKESTEKKREKKVLDIPSKYDWSGAEESDDENAVCAAQNCQRPCKDKVDWVQCDGGCDEWFHQVCVGVSPEMAENEDYICINCAKKQGPVSPGPAPPPSFIMSYKLPMEDLKETS

SEQ ID NO: 52089 - protein, 1275 aa, Homo sapiens
MGFAPGKAVGSHIRGHYERILNPYNLFLSGDSLRCLQKPNLTTDTKDKEYKPHDIPQRQSVQPSETCPPARRAKRMRAEAMNIKIEPEETTEARTHNLRRRMGCPTPKCENEKEMKSSIKQEPIERKDYIVENEKEKPKSRSKKATNAVDLYVCLLCGSGNDEDRLLLCDGCDDSYHTFCLIPPLHDVPKGDWRCPKCLAQECSKPQEAFGFEQAARDYTLRTFGEMADAFKSDYFNMPVHMVPTELVEKEFWRLVSTIEEDVTVEYGADIASKEFGSGFPVRDGKIKLSPEEEEYLDSGWNLNNMPVMEQSVLAHITADICGMKLPWLYVGMCFSSFCWHIEDHWSYSINYLHWGEPKTWYGVPGYAAEQLENVMKKLAPELFVSQPDLLHQLVTIMNPNTLMTHEVPVYRTNQCAGEFVITFPRAYHSGFNQGFNFAEAVNFCTVDWLPLGRQCVEHYRLLHRYCVFSHDEMICKMASKADVLDVVVASTVQKDMAIMIEDEKALRETVRKLGVIDSERMDFELLPDDERQCVKCKTTCFMSAISCSCKPGLLVCLHHVKELCSCPPYKYKLRYRYTLDDLYPMMNALKLRAESYNEWALNVNEALEAKINKKKSLVSFKALIEESEMKKFPDNDLLRHLRLVTQDAEKCASVAQQLLNGKRQTRYRSGGGKSQNQLTVNELRQFVTQLYALPCVLSQTPLLKDLLNRVEDFQQHSQKLLSEETPSAAELQDLLDVSFEFDVELPQLAEMRIRLEQARWLEEVQQACLDPSSLTLDDMRRLIDLGVGLAPYSAVEKAMARLQELLTVSEHWDDKAKSLLKARPRHSLNSLATAVKEIEEIPAYLPNGAALKDSVQRARDWLQDVEGLQAGGRVPVLDTLIELVTRGRSIPVHLNSLPRLETLVAEVQAWKECAVNTFLTENSPYSLLEVLCPRCDIGLLGLKRKQRKLKEPLPNGKKKSTKLESLSDLERALTESKETASAMATLGEARLREMEALQSLRLANEGKLLSPLQDVDIKICLCQKAPAAPMIQCELCRDAFHTSCVAVPSISQGLRIWLCPHCRRSEKPPLEKILPLLASLQRIRVRLPEGDALRYMIERTVNWQHRAQQLLSSGNLKFVQDRVGSGLLYSRWQASAGQVSDTNKVSQPPGTTSFSLPDDWDNRTSYLHSPFSTGRSCIPLHGVSPEVNELLMEAQLLQVSLPEIQELYQTLLAKPSPAQQTDRSSPVRPSSEKNDCCRGKRDGINSLERKLKRRLEREGLSSERWERVKKMRTP

SEQ ID NO: 52090 - protein, 1580 aa, Homo sapiens
MEAATTLHPGPRPALPLGGPGPLGEFLPPPECPVFEPSWEEFADPFAFIHKIRPIAEQTGICKVRPPPDWQPPFACDVDKLHFTPRIQRLNELEAQTRVKLNFLDQIAKYWELQGSTLKIPHVERKILDLFQLNKLVAEEGGFAVVCKDRKWTKIATKMGFAPGKAVGSHIRGHYERILNPYNLFLSGDSLRCLQKPNLTTDTKDKEYKPHDIPQRQSVQPSETCPPARRAKRMRAERQSLAVLPRLECSGAILAHCNLRLLDSSNSSASASQAMNIKIEPEETTEARTHNLRRRMGCPTPKCENEKEMKSSIKQEPIERKDYIVENEKEKPKSRSKKATNAVDLYVCLLCGSGNDEDRLLLCDGCDDSYHTFCLIPPLHDVPKGDWRCPKCLAQECSKPQEAFGFEQAARDYTLRTFGEMADAFKSDYFNMPVHMVPTELVEKEFWRLVSTIEEDVTVEYGADIASKEFGSGFPVRDGKIKLSPEEEEYLDSGWNLNNMPVMEQSVLAHITADICGMKLPWLYVGMCFSSFCWHIEDHWSYSINYLHWGEPKTWYGVPGYAAEQLENVMKKLAPELFVSQPDLLHQLVTIMNPNTLMTHEVPVYRTNQCAGEFVITFPRAYHSGFNQGFNFAEAVNFCTVDWLPLGRQCVEHYRLLHRYCVFSHDEMICKMASKADVLDVVVASTVQKDMAIMIEDEKALRETVRKLGVIDSERMDFELLPDDERQCVKCKTTCFMSAISCSCKPGLLVCLHHVKELCSCPPYKYKLRYRYTLDDLYPMMNALKLRAESYNEWALNVNEALEAKINKKKSLVSFKALIEESEMKKFPDNDLLRHLRLVTQDAEKCASVAQQLLNGKRQTRYRSGGGKSQNQLTVNELRQFVTQLYALPCVLSQTPLLKDLLNRVEDFQQHSQKLLSEETPSAAELQDLLDVSFEFDVELPQLAEMRIRLEQARWLEEVQQACLDPSSLTLDDMRRLIDLGVGLAPYSAVEKAMARLQELLTVSEHWDDKAKSLLKARPRHSLNSLATAVKEIEEIPAYLPNGAALKDSVQRARDWLQDVEGLQAGGRVPVLDTLIELVTRGRSIPVHLNSLPRLETLVAEVQAWKECAVNTFLTENSPYSLLEVLCPRCDIGLLGLKRKQRKLKEPLPNGKKKSTKLESLSDLERALTESKETASAMATLGEARLREMEALQSLRLANEGKLLSPLQDVDIKICLCQKAPAAPMIQCELCRDAFHTSCVAVPSISQGLRIWLCPHCRRSEKPPLEKILPLLASLQRIRVRLPEGDALRYMIERTVNWQHRAQQLLSSGNLKFVQDRVGSGLLYSRWQASAGQVSDTNKVSQPPGTTSFSLPDDWDNRTSYLHSPFSTGRSCIPLHGVSPEVNELLMEAQLLQVSLPEIQELYQTLLAKPSPAQQTDRSSPVRPSSEKNDCCRGKRDGINSLERKLKRRLEREGLSSERWERVKKMRTPKKKKIKLSHPKDMNNFKLERERSYELVRSAETHSLPSDTSYSEQEDSEDEDAICPAVSCLQPEGDEVDWVQCDGSCNQWFHQVCVGVSPEMAEKEDYICVRCTVKDAPSRK

SEQ ID NO: 52091 - protein, 1544 aa, Homo sapiens
MEAATTLHPGPRPALPLGGPGPLGEFLPPPECPVFEPSWEEFADPFAFIHKIRPIAEQTGICKVRPPPDWQPPFACDVDKLHFTPRIQRLNELEAQTRVKLNFLDQIAKYWELQGSTLKIPHVERKILDLFQLNKLVAEEGGFAVVCKDRKWTKIATKMGFAPGKAVGSHIRGHYERILNPYNLFLSGDSLRCLQKPNLTTDTKDKEYKPHDIPQRQSVQPSETCPPARRAKRMRAEAMNIKIEPEETTEARTHNLRRRMGCPTPKCENEKEMKSSIKQEPIERKDYIVENEKEKPKSRSKKATNAVDLYVCLLCGSGNDEDRLLLCDGCDDSYHTFCLIPPLHDVPKGDWRCPKCLAQECSKPQEAFGFEQAARDYTLRTFGEMADAFKSDYFNMPVHMVPTELVEKEFWRLVSTIEEDVTVEYGADIASKEFGSGFPVRDGKIKLSPEEEEYLDSGWNLNNMPVMEQSVLAHITADICGMKLPWLYVGMCFSSFCWHIEDHWSYSINYLHWGEPKTWYGVPGYAAEQLENVMKKLAPELFVSQPDLLHQLVTIMNPNTLMTHEVPVYRTNQCAGEFVITFPRAYHSGFNQGFNFAEAVNFCTVDWLPLGRQCVEHYRLLHRYCVFSHDEMICKMASKADVLDVVVASTVQKDMAIMIEDEKALRETVRKLGVIDSERMDFELLPDDERQCVKCKTTCFMSAISCSCKPGLLVCLHHVKELCSCPPYKYKLRYRYTLDDLYPMMNALKLRAESYNEWALNVNEALEAKINKKKSLVSFKALIEESEMKKFPDNDLLRHLRLVTQDAEKCASVAQQLLNGKRQTRYRSGGGKSQNQLTVNELRQFVTQLYALPCVLSQTPLLKDLLNRVEDFQQHSQKLLSEETPSAAELQDLLDVSFEFDVELPQLAEMRIRLEQARWLEEVQQACLDPSSLTLDDMRRLIDLGVGLAPYSAVEKAMARLQELLTVSEHWDDKAKSLLKARPRHSLNSLATAVKEIEEIPAYLPNGAALKDSVQRARDWLQDVEGLQAGGRVPVLDTLIELVTRGRSIPVHLNSLPRLETLVAEVQAWKECAVNTFLTENSPYSLLEVLCPRCDIGLLGLKRKQRKLKEPLPNGKKKSTKLESLSDLERALTESKETASAMATLGEARLREMEALQSLRLANEGKLLSPLQDVDIKICLCQKAPAAPMIQCELCRDAFHTSCVAVPSISQGLRIWLCPHCRRSEKPPLEKILPLLASLQRIRVRLPEGDALRYMIERTVNWQHRAQQLLSSGNLKFVQDRVGSGLLYSRWQASAGQVSDTNKVSQPPGTTSFSLPDDWDNRTSYLHSPFSTGRSCIPLHGVSPEVNELLMEAQLLQVSLPEIQELYQTLLAKPSPAQQTDRSSPVRPSSEKNDCCRGKRDGINSLERKLKRRLEREGLSSERWERVKKMRTPKKKKIKLSHPKDMNNFKLERERSYELVRSAETHSLPSDTSYSEQEDSEDEDAICPAVSCLQPEGDEVDWVQCDGSCNQWFHQVCVGVSPEMAEKEDYICVRCTVKDAPSRK

SEQ ID NO: 52092 - protein, 1386 aa, Homo sapiens
MGFAPGKAVGSHIRGHYERILNPYNLFLSGDSLRCLQKPNLTTDTKDKEYKPHDIPQRQSVQPSETCPPARRAKRMRAEAMNIKIEPEETTEARTHNLRRRMGCPTPKCENEKEMKSSIKQEPIERKDYIVENEKEKPKSRSKKATNAVDLYVCLLCGSGNDEDRLLLCDGCDDSYHTFCLIPPLHDVPKGDWRCPKCLAQECSKPQEAFGFEQAARDYTLRTFGEMADAFKSDYFNMPVHMVPTELVEKEFWRLVSTIEEDVTVEYGADIASKEFGSGFPVRDGKIKLSPEEEEYLDSGWNLNNMPVMEQSVLAHITADICGMKLPWLYVGMCFSSFCWHIEDHWSYSINYLHWGEPKTWYGVPGYAAEQLENVMKKLAPELFVSQPDLLHQLVTIMNPNTLMTHEVPVYRTNQCAGEFVITFPRAYHSGFNQGFNFAEAVNFCTVDWLPLGRQCVEHYRLLHRYCVFSHDEMICKMASKADVLDVVVASTVQKDMAIMIEDEKALRETVRKLGVIDSERMDFELLPDDERQCVKCKTTCFMSAISCSCKPGLLVCLHHVKELCSCPPYKYKLRYRYTLDDLYPMMNALKLRAESYNEWALNVNEALEAKINKKKSLVSFKALIEESEMKKFPDNDLLRHLRLVTQDAEKCASVAQQLLNGKRQTRYRSGGGKSQNQLTVNELRQFVTQLYALPCVLSQTPLLKDLLNRVEDFQQHSQKLLSEETPSAAELQDLLDVSFEFDVELPQLAEMRIRLEQARWLEEVQQACLDPSSLTLDDMRRLIDLGVGLAPYSAVEKAMARLQELLTVSEHWDDKAKSLLKARPRHSLNSLATAVKEIEEIPAYLPNGAALKDSVQRARDWLQDVEGLQAGGRVPVLDTLIELVTRGRSIPVHLNSLPRLETLVAEVQAWKECAVNTFLTENSPYSLLEVLCPRCDIGLLGLKRKQRKLKEPLPNGKKKSTKLESLSDLERALTESKETASAMATLGEARLREMEALQSLRLANEGKLLSPLQDVDIKICLCQKAPAAPMIQCELCRDAFHTSCVAVPSISQGLRIWLCPHCRRSEKPPLEKILPLLASLQRIRVRLPEGDALRYMIERTVNWQHRAQQLLSSGNLKFVQDRVGSGLLYSRWQASAGQVSDTNKVSQPPGTTSFSLPDDWDNRTSYLHSPFSTGRSCIPLHGVSPEVNELLMEAQLLQVSLPEIQELYQTLLAKPSPAQQTDRSSPVRPSSEKNDCCRGKRDGINSLERKLKRRLEREGLSSERWERVKKMRTPKKKKIKLSHPKDMNNFKLERERSYELVRSAETHSLPSDTSYSEQEDSEDEDAICPAVSCLQPEGDEVDWVQCDGSCNQWFHQVCVGVSPEMAEKEDYICVRCTVKDAPSRK

SEQ ID NO: 52093 - protein, 310 aa, Homo sapiens
MICKMASKADVLDVVVASTVQKDMAIMIEDEKALRETVRKLGVIDSERMDFELLPDDERQCVKCKTTCFMSAISCSCKPGLLVCLHHVKELCSCPPYKYKLRYRYTLDDLYPMMNALKLRAESYNEWALNVNEALEAKINKKKSLVSFKALIEESEMKKFPDNDLLRHLRLVTQDAEKCASVAQQLLNGKRQTRYRSGGGKSQNQLTVNELRQFVTQLYALPCVLSQTPLLKDLLNRVEDFQQHSQKLLSEETPSAAELQDLLDVSFEFDVELPQLAEMRIRLEQARWLEEVQQACLDPSSLTLDDMRVS

SEQ ID NO: 52094 - protein, 1557 aa, Homo sapiens
MEPGSDDFLPPPECPVFEPSWAEFRDPLGYIAKIRPIAEKSGICKIRPPADWQPPFAVEVDNFRFTPRIQRLNELEAQTRVKLNYLDQIAKFWEIQGSSLKIPNVERRILDLYSLSKIVVEEGGYEAICKDRRWARVAQRLNYPPGKNIGSLLRSHYERIVYPYEMYQSGANLVQCNTRPFDNEEKDKEYKPHSIPLRQSVQPSKFNSYGRRAKRLQPDPEPTEEDIEKNPELKKLQIYGAGPKMMGLGLMAKDKTLRKKDKEGPECPPTVVVKEELGGDVKVESTSPKTFLESKEELSHSPEPCTKMTMRLRRNHSNAQFIESYVCRMCSRGDEDDKLLLCDGCDDNYHIFCLLPPLPEIPKGVWRCPKCVMAECKRPPEAFGFEQATREYTLQSFGEMADSFKADYFNMPVHMVPTELVEKEFWRLVNSIEEDVTVEYGADIHSKEFGSGFPVSDSKRHLTPEEEEYATSGWNLNVMPVLEQSVLCHINADISGMKVPWLYVGMVFSAFCWHIEDHWSYSINYLHWGEPKTWYGVPSLAAEHLEEVMKKLTPELFDSQPDLLHQLVTLMNPNTLMSHGVPVVRTNQCAGEFVITFPRAYHSGFNQGYNFAEAVNFCTADWLPAGRQCIEHYRRLRRYCVFSHEELICKMAACPEKLDLNLAAAVHKEMFIMVQEERRLRKALLEKGITEAEREAFELLPDDERQCIKCKTTCFLSALACYDCPDGLVCLSHINDLCKCSSSRQYLRYRYTLDELPAMLHKLKVRAESFDTWANKVRVALEVEDGRKRSLEELRALESEARERRFPNSELLQQLKNCLSEAEACVSRALGLVSGQEAGPHRVAGLQMTLTELRAFLDQMNNLPCAMHQIGDVKGVLEQVEAYQAEAREALASLPSSPGLLQSLLERGRQLGVEVPEAQQLQRQVEQARWLDEVKRTLAPSARRGTLAVMRGLLVAGASVAPSPAVDKAQAELQELLTIAERWEEKAHLCLEARQKHPPATLEAIIREAENIPVHLPNIQALKEALAKARAWIADVDEIQNGDHYPCLDDLEGLVAVGRDLPVGLEELRQLELQVLTAHSWREKASKTFLKKNSCYTLLEVLCPCADAGSDSTKRSRWMEKELGLYKSDTELLGLSAQDLRDPGSVIVAFKEGEQKEKEGILQLRRTNSAKPSPLASSSTASSTTSICVCGQVLAGAGALQCDLCQDWFHGRCVSVPRLLSSPRPNPTSSPLLAWWEWDTKFLCPLCMRSRRPRLETILALLVALQRLPVRLPEGEALQCLTERAISWQGRARQALASEDVTALLGRLAELRQRLQAEPRPEEPPNYPAAPASDPLREGSGKDMPKVQGLLENGDSVTSPEKVAPEEGSDLELLSSLLPQLTGPVLELPEATRAPLEELMMEGDLLEVTLDENHSIWQLLQAGQPPDLERIRTLLELEKAERHGSRARGRALERRRRRKVDRGGEGDDPAREELEPKRVRSSGPEAEEVQEEEELEEETGGEGPPAPIPTTGSPSTQENQNGLEPAEGTTSGPSAPFSTLTPRLHLPCPQQPPQQQL

SEQ ID NO: 52095 - protein, 1516 aa, Homo sapiens
MEPGSDDFLPPPECPVFEPSWAEFRDPLGYIAKIRPIAEKSGICKIRPPADWQPPFAVEVDNFRFTPRIQRLNELEIVVEEGGYEAICKDRRWARVAQRLNYPPGKNIGSLLRSHYERIVYPYEMYQSGANLVQCNTRPFDNEEKDKEYKPHSIPLRQSVQPSKFNSYGRRAKRLQPDPEPTEEDIEKNPELKKLQIYGAGPKMMGLGLMAKDKTLRKKDKEGPECPPTVVVKEELGGDVKVESTSPKTFLESKEELSHSPEPCTKMTMRLRRNHSNAQFIESYVCRMCSRGDEDDKLLLCDGCDDNYHIFCLLPPLPEIPKGVWRCPKCVMAECKRPPEAFGFEQATREYTLQSFGEMADSFKADYFNMPVHMVPTELVEKEFWRLVNSIEEDVTVEYGADIHSKEFGSGFPVSDSKRHLTPEEEEYATSGWNLNVMPVLEQSVLCHINADISGMKVPWLYVGMVFSAFCWHIEDHWSYSINYLHWGEPKTWYGVPSLAAEHLEEVMKKLTPELFDSQPDLLHQLVTLMNPNTLMSHGVPVVRTNQCAGEFVITFPRAYHSGFNQGYNFAEAVNFCTADWLPAGRQCIEHYRRLRRYCVFSHEELICKMAACPEKLDLNLAAAVHKEMFIMVQEERRLRKALLEKGITEAEREAFELLPDDERQCIKCKTTCFLSALACYDCPDGLVCLSHINDLCKCSSSRQYLRYRYTLDELPAMLHKLKVRAESFDTWANKVRVALEVEDGRKRSLEELRALESEARERRFPNSELLQQLKNCLSEAEACVSRALGLVSGQEAGPHRVAGLQMTLTELRAFLDQMNNLPCAMHQIGDVKGVLEQVEAYQAEAREALASLPSSPGLLQSLLERGRQLGVEVPEAQQLQRQVEQARWLDEVKRTLAPSARRGTLAVMRGLLVAGASVAPSPAVDKAQAELQELLTIAERWEEKAHLCLEARQKHPPATLEAIIREAENIPVHLPNIQALKEALAKARAWIADVDEIQNGDHYPCLDDLEGLVAVGRDLPVGLEELRQLELQVLTAHSWREKASKTFLKKNSCYTLLEVLCPCADAGSDSTKRSRWMEKELGLYKSDTELLGLSAQDLRDPGSVIVAFKEGEQKEKEGILQLRRTNSAKPSPLASSSTASSTTSICVCGQVLAGAGALQCDLCQDWFHGRCVSVPRLLSSPRPNPTSSPLLAWWEWDTKFLCPLCMRSRRPRLETILALLVALQRLPVRLPEGEALQCLTERAISWQGRARQALASEDVTALLGRLAELRQRLQAEPRPEEPPNYPAAPASDPLREGSGKDMPKVQGLLENGDSVTSPEKVAPEEGSDLELLSSLLPQLTGPVLELPEATRAPLEELMMEGDLLEVTLDENHSIWQLLQAGQPPDLERIRTLLELEKAERHGSRARGRALERRRRRKVDRGGEGDDPAREELEPKRVRSSGPEAEEVQEEEELEEETGGEGPPAPIPTTGSPSTQENQNGLEPAEGTTSGPSAPFSTLTPRLHLPCPQQPPQQQL

SEQ ID NO: 52096 - protein, 1560 aa, Homo sapiens
MEPGSDDFLPPPECPVFEPSWAEFRDPLGYIAKIRPIAEKSGICKIRPPADWQPPFAVEVDNFRFTPRIQRLNELEAQTRVKLNYLDQIAKFWEIQGSSLKIPNVERRILDLYSLSKIVVEEGGYEAICKDRRWARVAQRLNYPPGKNIGSLLRSHYERIVYPYEMYQSGANLVQCNTRPFDNEEKDKEYKPHSIPLRQSVQPSKFNSYGRRAKRLQPDPEPTEEDIEKNPELKKLQIYGAGPKMMGLGLMAKDKTLRKKDKEGPECPPTVVVKEELGGDVKVESTSPKTFLESKEELSHSPEPCTKMTMRLRRNHSNAQFIESYVCRMCSRGDEDDKLLLCDGCDDNYHIFCLLPPLPEIPKGVWRCPKCVMAECKRPPEAFGFEQATREYTLQSFGEMADSFKADYFNMPVHMVPTELVEKEFWRLVNSIEEDVTVEYGADIHSKEFGSGFPVSDSKRHLTPEEEEYATSGWNLNVMPVLEQSVLCHINADISGMKVPWLYVGMVFSAFCWHIEDHWSYSINYLHWGEPKTWYGVPSLAAEHLEEVMKKLTPELFDSQPDLLHQLVTLMNPNTLMSHGVPVVRTNQCAGEFVITFPRAYHSGFNQGYNFAEAVNFCTADWLPAGRQCIEHYRRLRRYCVFSHEELICKMAACPEKLDLNLAAAVHKEMFIMVQEERRLRKALLEKGITEAEREAFELLPDDERQCIKCKTTCFLSALACYDCPDGLVCLSHINDLCKCSSSRQYLRYRYTLDELPAMLHKLKVRAESFDTWANKVRVALEVEDGRKRSLEELRALESEARERRFPNSELLQQLKNCLSEAEACVSRALGLVSGQEAGPHRVAGLQMTLTELRAFLDQMNNLPCAMHQIGDVKGVLEQVEAYQAEAREALASLPSSPGLLQSLLERGRQLGVEVPEAQQLQRQVEQARWLDEVKRTLAPSARRGTLAVMRGLLVAGASVAPSPAVDKAQAELQELLTIAERWEEKAHLCLEARQKHPPATLEAIIREAENIPVHLPNIQALKEALAKARAWIADVDEIQNGDHYPCLDDLEGLVAVGRDLPVGLEELRQLELQVLTAHSWREKASKTFLKKNSCYTLLEVLCPCADAGSDSTKRSRWMEKELGLYKSDTELLGLSAQDLRDPGSVIVAFKEGEQKEKEGILQLRRTNSAKPSPLASSSTASSTTSICVCGQVLAGAGALQCDLCQDWFHGRCVSVPRLLSSPRPNPTSSPLLAWWEWDTKFLCPLCMRSRRPRLETILALLVALQRLPVRLPEGEALQCLTERAISWQGRARQALASEDVTALLGRLAELRQRLQAEPRPEEPPNYPAAPASDPLREGSGKDMPKVQGLLENGDSVTSPEKVAPEEGSGKRDLELLSSLLPQLTGPVLELPEATRAPLEELMMEGDLLEVTLDENHSIWQLLQAGQPPDLERIRTLLELEKAERHGSRARGRALERRRRRKVDRGGEGDDPAREELEPKRVRSSGPEAEEVQEEEELEEETGGEGPPAPIPTTGSPSTQENQNGLEPAEGTTSGPSAPFSTLTPRLHLPCPQQPPQQQL

SEQ ID NO: 52097 - protein, 1559 aa, Homo sapiens
MEPGSDDFLPPPECPVFEPSWAEFRDPLGYIAKIRPIAEKSGICKIRPPADWQPPFAVEVDNFRFTPRIQRLNELEAQTRVKLNYLDQIAKFWEIQGSSLKIPNVERRILDLYSLSKIVVEEGGYEAICKDRRWARVAQRLNYPPGKNIGSLLRSHYERIVYPYEMYQSGANLVCNTRPFDNEEKDKEYKPHSIPLRQSVQPSKFNSYGRRAKRLQPDPEPTEEDIEKNPELKKLQIYGAGPKMMGLGLMAKDKTLRKKDKEGPECPPTVVVKEELGGDVKVESTSPKTFLESKEELSHSPEPCTKMTMRLRRNHSNAQFIESYVCRMCSRGDEDDKLLLCDGCDDNYHIFCLLPPLPEIPKGVWRCPKCVMAECKRPPEAFGFEQATREYTLQSFGEMADSFKADYFNMPVHMVPTELVEKEFWRLVNSIEEDVTVEYGADIHSKEFGSGFPVSDSKRHLTPEEEEYATSGWNLNVMPVLEQSVLCHINADISGMKVPWLYVGMVFSAFCWHIEDHWSYSINYLHWGEPKTWYGVPSLAAEHLEEVMKKLTPELFDSQPDLLHQLVTLMNPNTLMSHGVPVVRTNQCAGEFVITFPRAYHSGFNQGYNFAEAVNFCTADWLPAGRQCIEHYRRLRRYCVFSHEELICKMAACPEKLDLNLAAAVHKEMFIMVQEERRLRKALLEKGITEAEREAFELLPDDERQCIKCKTTCFLSALACYDCPDGLVCLSHINDLCKCSSSRQYLRYRYTLDELPAMLHKLKVRAESFDTWANKVRVALEVEDGRKRSLEELRALESEARERRFPNSELLQQLKNCLSEAEACVSRALGLVSGQEAGPHRVAGLQMTLTELRAFLDQMNNLPCAMHQIGDVKGVLEQVEAYQAEAREALASLPSSPGLLQSLLERGRQLGVEVPEAQQLQRQVEQARWLDEVKRTLAPSARRGTLAVMRGLLVAGASVAPSPAVDKAQAELQELLTIAERWEEKAHLCLEARQKHPPATLEAIIREAENIPVHLPNIQALKEALAKARAWIADVDEIQNGDHYPCLDDLEGLVAVGRDLPVGLEELRQLELQVLTAHSWREKASKTFLKKNSCYTLLEVLCPCADAGSDSTKRSRWMEKELGLYKSDTELLGLSAQDLRDPGSVIVAFKEGEQKEKEGILQLRRTNSAKPSPLASSSTASSTTSICVCGQVLAGAGALQCDLCQDWFHGRCVSVPRLLSSPRPNPTSSPLLAWWEWDTKFLCPLCMRSRRPRLETILALLVALQRLPVRLPEGEALQCLTERAISWQGRARQALASEDVTALLGRLAELRQRLQAEPRPEEPPNYPAAPASDPLREGSGKDMPKVQGLLENGDSVTSPEKVAPEEGSGKRDLELLSSLLPQLTGPVLELPEATRAPLEELMMEGDLLEVTLDENHSIWQLLQAGQPPDLERIRTLLELEKAERHGSRARGRALERRRRRKVDRGGEGDDPAREELEPKRVRSSGPEAEEVQEEEELEEETGGEGPPAPIPTTGSPSTQENQNGLEPAEGTTSGPSAPFSTLTPRLHLPCPQQPPQQQL

SEQ ID NO: 52098 - protein, 1379 aa, Homo sapiens
MEPGSDDFLPPPECPVFEPSWAEFRDPLGYIAKIRPIAEKSGICKIRPPAIVVEEGGYEAICKDRRWARVAQRLNYPPGKNIGSLLRSHYERIVYPYEMYQSGANLVQCNTRPFDNEEKDKEYKPHSIPLRQSVQPSKFNSYGRRAKRLQPDPEPTEEDIEKNPELKKLQIYGAGPKMMGLGLMAKDKTLRKKDKEGPECPPTVVVKEELGGDVKVESTSPKTFLESKEELSHSPEPCTKMTMRLRRNHSNAQFIESYVCRMCSRGDEDDKLLLCDGCDDNYHIFCLLPPLPEIPKGVWRCPKCVMAECKRPPEAFGFEQATREYTLQSFGEMADSFKADYFNMPVHMVPTELVEKEFWRLVNSIEEDVTVEYGADIHSKEFGSGFPVSDSKRHLTPEEEEYATSGWNLNVMPVLEQSVLCHINADISGMKVPWLYVGMVFSAFCWHIEDHWSYSINYLHWGEPKTWYGVPSLAAEHLEEVMKKLTPELFDSQPDLLHQLVTLMNPNTLMSHGVPVVRTNQCAGEFVITFPRAYHSGFNQGYNFAEAVNFCTADWLPAGRQCIEHYRRLRRYCVFSHEELICKMAACPEKLDLNLAAAVHKEMFIMVQEERRLRKALLEKGITEAEREAFELLPDDERQCIKCKTTCFLSALACYDCPDGLVCLSHINDLCKCSSSRQYLRYRYTLDELPAMLHKLKVRAESFDTWANKVRVALEVEDGRKRSLEELRALESEARERRFPNSELLQQLKNCLSEAEACVSRALGLVSGQEAGPHRVAGLQMTLTELRAFLDQMNNLPCAMHQIGDVKGVLEQVEAYQAEAREALASLPSSPGLLQSLLERGRQLGVEVPEAQQLQRQVEQARWLDEVKRTLAPSARRGTLAVMRGLLVAGASVAPSPAVDKAQAELQELLTIAERWEEKAHLCLEARQKHPPATLEAIIREAENIPVHLPNIQALKEALAKARAWIADVDEIQNGDHYPCLDDLEGLVAVGRDLPVGLEELRQLELQVLTAHSWREKASKTFLKKNSCYTLLEVLCPCADAGSDSTKRSRWMEKELGLYKSDTELLGLSAQDLRDPGSVIVAFKEGEQKEKEGILQLRRTNSAKPSPLASSSTASSTTSICVCGQVLAGAGALQCDLCQDWFHGRCVSVPRLLSSPRPNPTSSPLLAWWEWDTKFLCPLCMRSRRPRLETILALLVALQRLPVRLPEGEALQCLTERAISWQGRARQALASEDVTALLGRLAELRQRLQAEPRPEEPPNYPAAPASDPLREGSGKDMPKVQGLLENGDSVTSPEKVAPEEGSDLELLSSLLPQLTGPVLELPEATRAPLEELMMEGDLLEVTLDENHSIPESLDFCILTPRYCSDLSSWGPAPGVFPPW

SEQ ID NO: 52099 - protein, 1539 aa, Homo sapiens
MEPGCDEFLPPPECPVFEPSWAEFQDPLGYIAKIRPIAEKSGICKIRPPADWQPPFAVEVDNFRFTPRVQRLNELEAQTRVKLNYLDQIAKFWEIQGSSLKIPNVERKILDLYSLSKIVIEEGGYEAICKDRRWARVAQRLHYPPGKNIGSLLRSHYERIIYPYEMFQSGANHVQCNTHPFDNEVKDKEYKPHSIPLRQSVQPSKFSSYSRRAKRLQPDPEPTEEDIEKHPELKKLQIYGPGPKMMGLGLMAKDKDKTVHKKVTCPPTVTVKDEQSGGGNVSSTLLKQHLSLEPCTKTTMQLRKNHSSAQFIDSYICQVCSRGDEDDKLLFCDGCDDNYHIFCLLPPLPEIPRGIWRCPKCILAECKQPPEAFGFEQATQEYSLQSFGEMADSFKSDYFNMPVHMVPTELVEKEFWRLVSSIEEDVTVEYGADIHSKEFGSGFPVSNSKQNLSPEEKEYATSGWNLNVMPVLDQSVLCHINADISGMKVPWLYVGMVFSAFCWHIEDHWSYSINYLHWGEPKTWYGVPSLAAEHLEEVMKMLTPELFDSQPDLLHQLVTLMNPNTLMSHGVPVVRTNQCAGEFVITFPRAYHSGFNQGYNFAEAVNFCTADWLPAGRQCIEHYRRLRRYCVFSHEELICKMAAFPETLDLNLAVAVHKEMFIMVQEERRLRKALLEKGVTEAEREAFELLPDDERQCIKCKTTCFLSALACYDCPDGLVCLSHINDLCKCSSSRQYLRYRYTLDELPTMLHKLKIRAESFDTWANKVRVALEVEDGRKRSFEELRALESEARERRFPNSELLQRLKNCLSEVEACIAQVLGLVSGQVARMDTPQLTLTELRVLLEQMGSLPCAMHQIGDVKDVLEQVEAYQAEAREALATLPSSPGLLRSLLERGQQLGVEVPEAHQLQQQVEQAQWLDEVKQALAPSAHRGSLVIMQGLLVMGAKIASSPSVDKARAELQELLTIAERWEEKAHFCLEARQKHPPATLEAIIRETENIPVHLPNIQALKEALTKAQAWIADVDEIQNGDHYPCLDDLEGLVAVGRDLPVGLEELRQLELQVLTAHSWREKASKTFLKKNSCYTLLEVLCPCADAGSDSTKRSRWMEKALGLYQCDTELLGLSAQDLRDPGSVIVAFKEGEQKEKEGILQLRRTNSAKPSPLAPSLMASSPTSICVCGQVPAGVGVLQCDLCQDWFHGQCVSVPHLLTSPKPSLTSSPLLAWWEWDTKFLCPLCMRSRRPRLETILALLVALQRLPVRLPEGEALQCLTERAIGWQDRARKALASEDVTALLRQLAELRQQLQAKPRPEEASVYTSATACDPIREGSGNNISKVQGLLENGDSVTSPENMAPGKGSDLELLSSLLPQLTGPVLELPEAIRAPLEELMMEGDLLEVTLDENHSIWQLLQAGQPPDLDRIRTLLELEKFEHQGSRTRSRALERRRRRQKVDQGRNVENLVQQELQSKRARSSGIMSQVGREEEHYQEKADRENMFLTPSTDHSPFLKGNQNSLQHKDSGSSAACPSLMPLLQLSYSDEQQL

SEQ ID NO: 52100 - protein, 1482 aa, Homo sapiens
MEPGCDEFLPPPECPVFEPSWAEFQDPLGYIAKIRPIAEKSGICKIRPPADWQPPFAVEVDNFRFTPRVQRLNELEAQTRVKLNYLDQIAKFWEIQGSSLKIPNVERKILDLYSLSKQCNTHPFDNEVKDKEYKPHSIPLRQSVQPSKFSSYSRRAKRLQPDPEPTEEDIEKHPELKKLQIYGPGPKMMGLGLMAKDKDKTVHKKVTCPPTVTVKDEQSGGGNVSSTLLKQHLSLEPCTKTTMQLRKNHSSAQFIDSYICQVCSRGDEDDKLLFCDGCDDNYHIFCLLPPLPEIPRGIWRCPKCILAECKQPPEAFGFEQATQEYSLQSFGEMADSFKSDYFNMPVHMVPTELVEKEFWRLVSSIEEDVTVEYGADIHSKEFGSGFPVSNSKQNLSPEEKEYATSGWNLNVMPVLDQSVLCHINADISGMKVPWLYVGMVFSAFCWHIEDHWSYSINYLHWGEPKTWYGVPSLAAEHLEEVMKMLTPELFDSQPDLLHQLVTLMNPNTLMSHGVPVVRTNQCAGEFVITFPRAYHSGFNQGYNFAEAVNFCTADWLPAGRQCIEHYRRLRRYCVFSHEELICKMAAFPETLDLNLAVAVHKEMFIMVQEERRLRKALLEKGVTEAEREAFELLPDDERQCIKCKTTCFLSALACYDCPDGLVCLSHINDLCKCSSSRQYLRYRYTLDELPTMLHKLKIRAESFDTWANKVRVALEVEDGRKRSFEELRALESEARERRFPNSELLQRLKNCLSEVEACIAQVLGLVSGQVARMDTPQLTLTELRVLLEQMGSLPCAMHQIGDVKDVLEQVEAYQAEAREALATLPSSPGLLRSLLERGQQLGVEVPEAHQLQQQVEQAQWLDEVKQALAPSAHRGSLVIMQGLLVMGAKIASSPSVDKARAELQELLTIAERWEEKAHFCLEARQKHPPATLEAIIRETENIPVHLPNIQALKEALTKAQAWIADVDEIQNGDHYPCLDDLEGLVAVGRDLPVGLEELRQLELQVLTAHSWREKASKTFLKKNSCYTLLEVLCPCADAGSDSTKRSRWMEKALGLYQCDTELLGLSAQDLRDPGSVIVAFKEGEQKEKEGILQLRRTNSAKPSPLAPSLMASSPTSICVCGQVPAGVGVLQCDLCQDWFHGQCVSVPHLLTSPKPSLTSSPLLAWWEWDTKFLCPLCMRSRRPRLETILALLVALQRLPVRLPEGEALQCLTERAIGWQDRARKALASEDVTALLRQLAELRQQLQAKPRPEEASVYTSATACDPIREGSGNNISKVQGLLENGDSVTSPENMAPGKGSDLELLSSLLPQLTGPVLELPEAIRAPLEELMMEGDLLEVTLDENHSIWQLLQAGQPPDLDRIRTLLELEKFEHQGSRTRSRALERRRRRQKVDQGRNVENLVQQELQSKRARSSGIMSQVGREEEHYQEKADRENMFLTPSTDHSPFLKGNQNSLQHKDSGSSAACPSLMPLLQLSYSDEQQL

SEQ ID NO: 52101 - protein, 293 aa, Homo sapiens
LPNIQALKEALTKAQAWIADVDEIQNGDHYPCLDDLEGLVAVGRDLPVGLEELRQLELQVLCPCADAGSDSTKRSRWMEKALGLYQCDTELLGLSAQDLRDPGSVIVAFKEGEQKEKEGILQLRRTNSAKPSPLAPSLMASSPTSICVCGQVPAGVGVLQCDLCQDWFHGQCVSVPHLLTSPKPSLTSSPLLAWWEWDTKFLCPLCMRSRRPRLETILALLVALQRLPVRLPEGEALQCLTERAIGWQDRARKALASEDVTALLRQLAELRQQLQAKPRPEEASVYTSATACD

SEQ ID NO: 52102 - protein, 1476 aa, Homo sapiens
MEPGCDEFLPPPECPVFEPSWAEFQDPLGYIAKIRPIAEKSGICKIRPPADWQPPFAVEVDNFRFTPRVQRLNELEIVIEEGGYEAICKDRRWARVAQRLHYPPGKNIGSLLRSHYERIIYPYEMFQSGANHVQCNTHPFDNEVKDKEYKPHSIPLRQSVQPSKFSSYSRRAKRLQPDPEPTEEDIEKHPELKKLQIYGPGPKMMGLGLMAKDKDKTVHKKVTCPPTVTVKDEQSGGGNVSSTLLKQHLSLEPCTKTTMQLRKNHSSAQFIDSYICQVCSRGDEDDKLLFCDGCDDNYHIFCLLPPLPEIPRGIWRCPKCILAECKQPPEAFGFEQATQEYSLQSFGEMADSFKSDYFNMPVHMVPTELVEKEFWRLVSSIEEDVTVEYGADIHSKEFGSGFPVSNSKQNLSPEEKEYATSGWNLNVMPVLDQSVLCHINADISGMKVPWLYVGMVFSAFCWHIEDHWSYSINYLHWGEPKTWYGVPSLAAEHLEEVMKMLTPELFDSQPDLLHQLVTLMNPNTLMSHGVPVVRTNQCAGEFVITFPRAYHSGFNQGYNFAEAVNFCTADWLPAGRQCIEHYRRLRRYCVFSHEELICKMAAFPETLDLNLAVAVHKEMFIMVQEERRLRKALLEKGVTEAEREAFELLPDDERQCIKCKTTCFLSALACYDCPDGLVCLSHINDLCKCSSSRQYLRYRYTLDELPTMLHKLKIRAESFDTWANKVRVALEVEDGRKRSFEELRALESEARERRFPNSELLQRLKNCLSEVEACIAQVLGLVSGQVARMDTPQLTLTELRVLLEQMGSLPCAMHQIGDVKDVLEQVEAYQAEAREALATLPSSPGLLRSLLERGQQLGVEVPEAHQLQQQVEQAQWLDEVKQALAPSAHRGSLVIMQGLLVMGAKIASSPSVDKARAELQELLTIAERWEEKAHFCLEARQKHPPATLEAIIRETENIPVHLPNIQALKEALTKAQAWIADVDEIQNGDHYPCLDDLEGLVAVGRDLPVGLEELRQLELQVLTAHSWREKASKTFLKKNSCYTLLEVLCPCADAGSDSTKRSRWMEKALGLYQCDTELLGLSAQDLRDPGSVIVAFKEGEQKEKEGILQLRRTNSAKPSPLAPSLMASSPTSICVCGQVPAGVGVLQCDLCQDWFHGQCVSVPHLLTSPKPSLTSSPLLAWWEWDTKFLCPLCMRSRRPRLETILALLVALQRLPVRLPEGEALQCLTERAIGWQDRARKALASEDVTALLRQLAELRQQLQAKPRPEEASVYTSATACDPIREGSGNNISKVQGLLENGDSVTSPENMAPGKGSDLELLSSLLPQLTGPVLELPEAIRAPLEELMMEGDLLEVTLDENHSIWQLLQAGQPPDLDRIRTLLELEKFEHQGSRTRSRALERRRRRQKVDQGRNVENLVQQELQSKRARSSGIMSQVGREEEHYQEKADRENMFLTPSTDHSPFLKGNQNSLQHKDSG

SEQ ID NO: 52103 - protein, 425 aa, Homo sapiens
MEPGCDEFLPPPECPVFEPSWAEFQDPLGYIAKIRPIAEKSGICKIRPPADWQPPFAVEVDNFRFTPRVQRLNELEAQTRVKLNYLDQIAKFWEIQGSSLKIPNVERKILDLYSLSKIVIEEGGYEAICKDRRWARVAQRLHYPPGKNIGSLLRSHYERIIYPYEMFQSGANHVPEPTEEDIEKHPELKKLQIYGPGPKMMGLGLMAKDKDKTVHKKVTCPPTVTVKDEQSGGGNVSSTLLKQHLSLEPCTKTTMQLRKNHSSAQFIDSYICQVCSRGDEDDKLLFCDGCDDNYHIFCLLPPLPEIPRGIWRCPKCILAECKQPPEAFGFEQATQEYSLQSFGEMADSFKSDYFNMPVHMVPTELVEKEFWRLVSSIEEDVTVEYGADIHSKEFGSGFPVSNSKQNLSPEEKEYATSGWNLNVMP

SEQ ID NO: 52104 - protein, 888 aa, Homo sapiens
MEPGCDEFLPPPECPVFEPSWAEFQDPLGYIAKIRPIAEKSGICKIRPPADWQPPFAVEVDNFRFTPRVQRLNELEAQTRVKLNYLDQIAKFWEIQGSSLKIPNVERKILDLYSLSKIVIEEGGYEAICKDRRWARVAQRLHYPPGKNIGSLLRSHYERIIYPYEMFQSGANHVQCNTHPFDNEVKDKEYKPHSIPLRQSVQPSKFSSYSRRAKRLQPDPEPTEEDIEKHPELKKLQIYGPGPKMMGLGLMAKDKDKTVHKKVTCPPTVTVKDEQSGGGNVSSTLLKQHLSLEPCTKTTMQLRKNHSSAQFIDSYICQVCSRGDEDDKLLFCDGCDDNYHIFCLLPPLPEIPRGIWRCPKCILAECKQPPEAFGFEQATQEYSLQSFGEMADSFKSDYFNMPVHMVPTELVEKEFWRLVSSIEEDVTVEYGADIHSKEFGSGFPVSNSKQNLSPEEKEYATSGWNLNVMPVLDQSVLCHINADISGMKVPWLYVGMVFSAFCWHIEDHWSYSINYLHWGEPKTWYGVPSLAAEHLEEVMKMLTPELFDSQPDLLHQLVTLMNPNTLMSHGVPVVRTNQCAGEFVITFPRAYHSGFNQGYNFAEAVNFCTADWLPAGRQCIEHYRRLRRYCVFSHEELICKMAAFPETLDLNLAVAVHKEMFIMVQEERRLRKALLEKGVTEAEREAFELLPDDERQCIKCKTTCFLSALACYDCPDGLVCLSHINDLCKCSSSRQYLRYRYTLDELPTMLHKLKIRAESFDTWANKVRVALEVEDGRKRSFEELRALESEARERRFPNSELLQRLKNCLSEVEACIAQVLGLVSGQVARMDTPQLTLTELRVLLEQMGSLPCAMHQIGDVKVLSWKWRRYVFPYHLCVYSMQGNILPD

SEQ ID NO: 52105 - protein, 1570 aa, Homo sapiens
MEPGCDEFLPPPECPVFEPSWAEFQDPLGYIAKIRPIAEKSGICKIRPPADWQPPFAVEVDNFRFTPRVQRLNELEAQTRVKLNYLDQIAKFWEIQGSSLKIPNVERKILDLYSLSKIVIEEGGYEAICKDRRWARVAQRLHYPPGKNIGSLLRSHYERIIYPYEMFQSGANHVQCNTHPFDNEVKDKEYKPHSIPLRQSVQPSKFSSYSRRAKRLQPDPEPTEEDIEKHPELKKLQIYGPGPKMMGLGLMAKDKDKTVHKKVTCPPTVTVKDEQSGGGNVSSTLLKQHLSLEPCTKTTMQLRKNHSSAQFIDSYICQVCSRGDEDDKLLFCDGCDDNYHIFCLLPPLPEIPRGIWRCPKCILAECKQPPEAFGFEQATQEYSLQSFGEMADSFKSDYFNMPVHMVPTELVEKEFWRLVSSIEEDVTVEYGADIHSKEFGSGFPVSNSKQNLSPEEKRQSLTVLTRLISSFWAQAVLPPWPPKVLGLQEYATSGWNLNVMPVLDQSVLCHINADISGMKVPWLYVGMVFSAFCWHIEDHWSYSINYLHWGEPKTWYGVPSLAAEHLEEVMKMLTPELFDSQPDLLHQLVTLMNPNTLMSHGVPVVRTNQCAGEFVITFPRAYHSGFNQGYNFAEAVNFCTADWLPAGRQCIEHYRRLRRYCVFSHEELICKMAAFPETLDLNLAVAVHKEMFIMVQEERRLRKALLEKGVTEAEREAFELLPDDERQCIKCKTTCFLSALACYDCPDGLVCLSHINDLCKCSSSRQYLRYRYTLDELPTMLHKLKIRAESFDTWANKVRVALEVEDGRKRSFEELRALESEARERRFPNSELLQRLKNCLSEVEACIAQVLGLVSGQVARMDTPQLTLTELRVLLEQMGSLPCAMHQIGDVKDVLEQVEAYQAEAREALATLPSSPGLLRSLLERGQQLGVEVPEAHQLQQQVEQAQWLDEVKQALAPSAHRGSLVIMQGLLVMGAKIASSPSVDKARAELQELLTIAERWEEKAHFCLEARQKHPPATLEAIIRETENIPVHLPNIQALKEALTKAQAWIADVDEIQNGDHYPCLDDLEGLVAVGRDLPVGLEELRQLELQVLTAHSWREKASKTFLKKNSCYTLLEVLCPCADAGSDSTKRSRWMEKALGLYQCDTELLGLSAQDLRDPGSVIVAFKEGEQKEKEGILQLRRTNSAKPSPLAPSLMASSPTSICVCGQVPAGVGVLQCDLCQDWFHGQCVSVPHLLTSPKPSLTSSPLLAWWEWDTKFLCPLCMRSRRPRLETILALLVALQRLPVRLPEGEALQCLTERAIGWQDRARKALASEDVTALLRQLAELRQQLQAKPRPEEASVYTSATACDPIREGSGNNISKVQGLLENGDSVTSPENMAPGKGSDLELLSSLLPQLTGPVLELPEAIRAPLEELMMEGDLLEVTLDENHSIWQLLQAGQPPDLDRIRTLLELEKFEHQGSRTRSRALERRRRRQKVDQGRNVENLVQQELQSKRARSSGIMSQVGREEEHYQEKADRENMFLTPSTDHSPFLKGNQNSLQHKDSGSSAACPSLMPLLQLSYSDEQQL

SEQ ID NO: 52106 - protein, 1098 aa, Homo sapiens
MDLGTLYESCNQPQDAIKCYLNATRSKSCSNTSALAARIKYLQAQLCNLPQGSLQNKTKLLPSIEEAWSLPIPAELTSRQGAMNTAQQACKPHHPNTEPVLGLSQTPISQQSLPLHMIPSSQVDDLSSPAKRKRTSSPTKNTSDNWSGGHAVSHPPVQQQAHSWCLTPQKLQHLEQLRANRNNLNPAQKLMLEQLESQFVLMQQHQMRPTGVAQVRSTGIPNGPTADSSLPTNSVSGQQPQLALTRVPSVSQPGVRPACPGQPLANGPFSAGHVPCSTSRTLGSTDTILIGNNHITGSGSNGNVPYLQRNALTLPHNRTNLTSSAEEPWKNQLSNSTQGLHKGQSSHSAGPNGERPLSSTGPSQHLQAAGSGIQNQNGHPTLPSNSVTQGAALNHLSSHTATSGGQQGITLTKESKPSGNILTVPETSRHTGETPNSTASVEGLPNHVHQMTADAVCSPSHGDSKSPGLLSSDNPQLSALLMGKANNNVGTGTCDKVNNIHPAVHTKTDNSVASSPSSAISTATPSPKSTEQTTTNSVTSLNSPHSGLHTINGEGMEESQSPMKTDLLLVNHKPSPQIIPSMSVSIYPSSAEVLKACRNLGKNGLSNSSILLDKCPPPRPPSSPYPPLPKDKLNPPTPSIYLENKRDAFFPPLHQFCTNPNNPVTVIRGLAGALKLDLGLFSTKTLVEANNEHMVEVRTQLLQPADENWDPTGTKKIWHCESNRSHTTIAKYAQYQASSFQESLREENEKRSHHKDHSDSESTSSDNSGRRRKGPFKTIKFGTNIDLSDDKKWKLQLHELTKLPAFVRVVSAGNLLSHVGHTILGMNTVQLYMKVPGSRTPGHQENNNFCSVNINIGPGDCEWFVVPEGYWGVLNDFCEKNNLNFLMGSWWPNLEDLYEANVPVYRFIQRPGDLVWINAGTVHWVQAIGWCNNIAWNVGPLTACQYKLAVERYEWNKLQSVKSIVPMVHLSWNMARNIKVSDPKLFEMIKYCLLRTLKQCQTLREALIAAGKEIIWHGRTKEEPAHYCSICEVEVFDLLFVTNESNSRKTYIVHCQDCARKTSGNLENFVVLEQYKMEDLMQVYDQFTLAPPLPSASS

SEQ ID NO: 52107 - protein, 1401 aa, Homo sapiens
MKSCGVSLATAAAAAAAFGDEEKKMAAGKASGESEEASPSLTAEEREALGGLDSRLFGFVRFHEDGARTKALLGKAVRCYESLILKAEGKVESDFFCQLGHFNLLLEDYPKALSAYQRYYSLQSDYWKNAAFLYGLGLVYFHYNAFQWAIKAFQEVLYVDPSFCRAKEIHLRLGLMFKVNTDYESSLKHFQLALVDCNPCTLSNAEIQFHIAHLYETQRKYHSAKEAYEQLLQTENLSAQVKATVLQQLGWMHHTVDLLGDKATKESYAIQYLQKSLEADPNSGQSWYFLGRCYSSIGKVQDAFISYRQSIDKSEASADTWCSIGVLYQQQNQPMDALQAYICAVQLDHGHAAAWMDLGTLYESCNQPQDAIKCYLNATRSKSCSNTSALAARIKYLQAQLCNLPQGSLQNKTKLLPSIEEAWSLPIPAELTSRQGAMNTAQQNTSDNWSGGHAVSHPPVQQQAHSWCLTPQKLQHLEQLRANRNNLNPAQKLMLEQLESQFVLMQQHQMRPTGVAQVRSTGIPNGPTADSSLPTNSVSGQQPQLALTRVPSVSQPGVRPACPGQPLANGPFSAGHVPCSTSRTLGSTDTILIGNNHITGSGSNGNVPYLQRNALTLPHNRTNLTSSAEEPWKNQLSNSTQGLHKGQSSHSAGPNGERPLSSTGPSQHLQAAGSGIQNQNGHPTLPSNSVTQGAALNHLSSHTATSGGQQGITLTKESKPSGNILTVPETSRHTGETPNSTASVEGLPNHVHQMTADAVCSPSHGDSKSPGLLSSDNPQLSALLMGKANNNVGTGTCDKVNNIHPAVHTKTDNSVASSPSSAISTATPSPKSTEQTTTNSVTSLNSPHSGLHTINGEGMEESQSPMKTDLLLVNHKPSPQIIPSMSVSIYPSSAEVLKACRNLGKNGLSNSSILLDKCPPPRPPSSPYPPLPKDKLNPPTPSIYLENKRDAFFPPLHQFCTNPNNPVTVIRGLAGALKLDLGLFSTKTLVEANNEHMVEVRTQLLQPADENWDPTGTKKIWHCESNRSHTTIAKYAQYQASSFQESLREENEKRSHHKDHSDSESTSSDNSGRRRKGPFKTIKFGTNIDLSDDKKWKLQLHELTKLPAFVRVVSAGNLLSHVGHTILGMNTVQLYMKVPGSRTPGHQENNNFCSVNINIGPGDCEWFVVPEGYWGVLNDFCEKNNLNFLMGSWWPNLEDLYEANVPVYRFIQRPGDLVWINAGTVHWVQAIGWCNNIAWNVGPLTACQYKLAVERYEWNKLQSVKSIVPMVHLSWNMARNIKVSDPKLFEMIKYCLLRTLKQCQTLREALIAAGKEIIWHGRTKEEPAHYCSICEVEVFDLLFVTNESNSRKTYIVHCQDCARKTSGNLENFVVLEQYKMEDLMQVYDQFTLAPPLPSASS

SEQ ID NO: 52108 - protein, 1408 aa, Homo sapiens
MKSCGVSLATAAAAAAAFGDEEKKMAAGKASGESEEASPSLTAEEREALGGLDSRLFGFVRFHEDGARTKALLGKAVRCYESLILKAEGKVESDFFCQLGHFNLLLEDYPKALSAYQRYYSLQSDYWKNAAFLYGLGLVYFHYNAFQWAIKAFQEVLYVDPSFCRAKEIHLRLGLMFKVNTDYESSLKHFQLALVDCNPCTLSNAEIQFHIAHLYETQRKYHSAKEAYEQLLQTENLSAQVKATVLQQLGWMHHTVDLLGDKATKESYAIQYLQKSLEADPNSGQSWYFLGRCYSSIGKVQDAFISYRQSIDKSEASADTWCSIGVLYQQQNQPMDALQAYICAVQLDHGHAAAWMDLGTLYESCNQPQDAIKCYLNATRSKSCSNTSALAARIKYLQACKPHHPNTEPVLGLSQTPISQQSLPLHMIPSSQVDDLSSPAKRKRTSSPTKNTSDNWSGGHAVSHPPVQQQAHSWCLTPQKLQHLEQLRANRNNLNPAQKLMLEQLESQFVLMQQHQMRPTGVAQVRSTGIPNGPTADSSLPTNSVSGQQPQLALTRVPSVSQPGVRPACPGQPLANGPFSAGHVPCSTSRTLGSTDTILIGNNHITGSGSNGNVPYLQRNALTLPHNRTNLTSSAEEPWKNQLSNSTQGLHKGQSSHSAGPNGERPLSSTGPSQHLQAAGSGIQNQNGHPTLPSNSVTQGAALNHLSSHTATSGGQQGITLTKESKPSGNILTVPETSRHTGETPNSTASVEGLPNHVHQMTADAVCSPSHGDSKSPGLLSSDNPQLSALLMGKANNNVGTGTCDKVNNIHPAVHTKTDNSVASSPSSAISTATPSPKSTEQTTTNSVTSLNSPHSGLHTINGEGMEESQSPMKTDLLLVNHKPSPQIIPSMSVSIYPSSAEVLKACRNLGKNGLSNSSILLDKCPPPRPPSSPYPPLPKDKLNPPTPSIYLENKRDAFFPPLHQFCTNPNNPVTVIRGLAGALKLDLGLFSTKTLVEANNEHMVEVRTQLLQPADENWDPTGTKKIWHCESNRSHTTIAKYAQYQASSFQESLREENEKRSHHKDHSDSESTSSDNSGRRRKGPFKTIKFGTNIDLSDDKKWKLQLHELTKLPAFVRVVSAGNLLSHVGHTILGMNTVQLYMKVPGSRTPGHQENNNFCSVNINIGPGDCEWFVVPEGYWGVLNDFCEKNNLNFLMGSWWPNLEDLYEANVPVYRFIQRPGDLVWINAGTVHWVQAIGWCNNIAWNVGPLTACQYKLAVERYEWNKLQSVKSIVPMVHLSWNMARNIKVSDPKLFEMIKYCLLRTLKQCQTLREALIAAGKEIIWHGRTKEEPAHYCSICEVEVFDLLFVTNESNSRKTYIVHCQDCARKTSGNLENFVVLEQYKMEDLMQVYDQFTLAPPLPSASS

SEQ ID NO: 52109 - protein, 999 aa, Homo sapiens
  VARIANT 1: note = MOD_RES - Any amino acid
XGTLYESCNQPQDAIKCYLNATRSKSCSNTSALAARIKYLQNTSDNWSGGHAVSHPPVQQQAHSWCLTPQKLQHLEQLRANRNNLNPAQKLMLEQLESQFVLMQQHQMRPTGVAQVRSTGIPNGPTADSSLPTNSVSGQQPQLALTRVPSVSQPGVRPACPGQPLANGPFSAGHVPCSTSRTLGSTDTILIGNNHITGSGSNGNVPYLQRNALTLPHNRTNLTSSAEEPWKNQLSNSTQGLHKGQSSHSAGPNGERPLSSTGPSQHLQAAGSGIQNQNGHPTLPSNSVTQGAALNHLSSHTATSGGQQGITLTKESKPSGNILTVPETSRHTGETPNSTASVEGLPNHVHQMTADAVCSPSHGDSKSPGLLSSDNPQLSALLMGKANNNVGTGTCDKVNNIHPAVHTKTDNSVASSPSSAISTATPSPKSTEQTTTNSVTSLNSPHSGLHTINGEGMEESQSPMKTDLLLVNHKPSPQIIPSMSVSIYPSSAEVLKACRNLGKNGLSNSSILLDKCPPPRPPSSPYPPLPKDKLNPPTPSIYLENKRDAFFPPLHQFCTNPNNPVTVIRGLAGALKLDLGLFSTKTLVEANNEHMVEVRTQLLQPADENWDPTGTKKIWHCESNRSHTTIAKYAQYQASSFQESLREENEKRSHHKDHSDSESTSSDNSGRRRKGPFKTIKFGTNIDLSDDKKWKLQLHELTKLPAFVRVVSAGNLLSHVGHTILGMNTVQLYMKVPGSRTPGHQENNNFCSVNINIGPGDCEWFVVPEGYWGVLNDFCEKNNLNFLMGSWWPNLEDLYEANVPVYRFIQRPGDLVWINAGTVHWVQAIGWCNNIAWNVGPLTACQYKLAVERYEWNKLQSVKSIVPMVHLSWNMARNIKVSDPKLFEMIKYCLLRTLKQCQTLREALIAAGKEIIWHGRTKEEPAHYCSICEVEVFDLLFVTNESNSRKTYIVHCQDCARKTSGNLENFVVLEQYKMEDLMQVYDQFTLAPPLPSASS

SEQ ID NO: 52110 - protein, 161 aa, Homo sapiens
  VARIANT 1: note = MOD_RES - Any amino acid
XARNIKVSDPKLFEMIKIFSLSPNFRAEKCLRDHLVQPLRSNGEPEPLRFTGEYCLLRTLKQCQTLREALIAAGKEIIWHGRTKEEPAHYCSICEVEVFDLLFVTNESNSRKTYIVHCQDCARKTSGNLENFVVLEQYKMEDLMQVYDQFTLAPPLPSASS

SEQ ID NO: 52111 - protein, 1044 aa, Homo sapiens
  VARIANT 1: note = MOD_RES - Any amino acid
XNKTKLLPSIEEAWSLPIPAELTSRQGAMNTAQQACKPHHPNTEPVLGLSQTPISQQSLPLHMIPSSQVDDLSSPAKRKRTSSPTKNTSDNWSGGHAVSHPPVQQQAHSWCLTPQKLQHLEQLRANRNNLNPAQKLMLEQLESQFVLMQQHQMRPTGVAQVRSTGIPNGPTADSSLPTNSVSGQQPQLALTRVPSVSQPGVRPACPGQPLANGPFSAGHVPCSTSRTLGSTDTILIGNNHITGSGSNGNVPYLQRNALTLPHNRTNLTSSAEEPWKNQLSNSTQGLHKGQSSHSAGPNGERPLSSTGPSQHLQAAGSGIQNQNGHPTLPSNSVTQGAALNHLSSHTATSGGQQGITLTKESKPSGNILTVPETSRHTGETPNSTASVEGLPNHVHQMTADAVCSPSHGDSKSPGLLSSDNPQLSALLMGKANNNVGTGTCDKVNNIHPAVHTKTDNSVASSPSSAISTATPSPKSTEQTTTNSVTSLNSPHSGLHTINGEGMEESQSPMKTDLLLVNHKPSPQIIPSMSVSIYPSSAEVLKACRNLGKNGLSNSSILLDKCPPPRPPSSPYPPLPKDKLNPPTPSIYLENKRDAFFPPLHQFCTNPNNPVTVIRGLAGALKLDLGLFSTKTLVEANNEHMVEVRTQLLQPADENWDPTGTKKIWHCESNRSHTTIAKYAQYQASSFQESLREENEKRSHHKDHSDSESTSSDNSGRRRKGPFKTIKFGTNIDLSDDKKWKLQLHELTKLPAFVRVVSAGNLLSHVGHTILGMNTVQLYMKVPGSRTPGHQENNNFCSVNINIGPGDCEWFVVPEGYWGVLNDFCEKNNLNFLMGSWWPNLEDLYEANVPVYRFIQRPGDLVWINAGTVHWVQAIGWCNNIAWNVGPLTACQYKLAVERYEWNKLQSVKSIVPMVHLSWNMARNIKVSDPKLFEMIKYCLLRTLKQCQTLREALIAAGKEIIWHGRTKEEPAHYCSICEVEVFDLLFVTNESNSRKTYIVHCQDCARKTSGNLENFVVLEQYKMEDLMQVYDQFTLAPPLPSASS

SEQ ID NO: 52112 - protein, 224 aa, Homo sapiens
  VARIANT 1: note = MOD_RES - Any amino acid
XLQAYICAVQLDHGHAAAWMDLGTLYESCNQPQDAIKCYLNATRSKSCSNTSALAARIKYLQAQLCNLPQGSLQNKTKLLPSIEEAWSLPIPAELTSRQGAMNTAQQNTSDNWSGGHAVSHPPVQQQAHSWCLTPQKLQMRPTGVAQVRSTGIPNGPTADSSLPTNSVSGQQPQLALTRVPSVSQPGVRPACPGQPLANGPFSAGHVPCSTSRTLGSTDTILIG

SEQ ID NO: 52113 - protein, 171 aa, Homo sapiens
SLQNKTKLLPSIEEAWSLPIPAELTSRQGAMNTAQQNTSDNWSGGHAVSHPPVQQQAHSWCLTPQKLQHLEQLRANRNNLNPAQKLMLEQLESQFVLMQQHQMRPTGVAQVRSTGIPNGPTADSSLPTNSVSGQQPQLALTRVPSVSQPGVRPACPGQPLANGPFCRPCSL

SEQ ID NO: 52114 - protein, 1356 aa, Homo sapiens
MKSCGVSLATAAAAAAAFGDEEKKMAAGKASGESEEASPSLTAEEREALGGLDSRLFGFVRFHEDGARTKALLGKAVRCYESLILKAEGKVESDFFCQLGHFNLLLEDYPKALSAYQRYYSLQSDYWKNAAFLYGLGLVYFHYNAFQWAIKAFQEVLYVDPSFCRAKEIHLRLGLMFKVNTDYESSLKHFQLALVDCNPCTLSNAEIQFHIAHLYETQRKYHSAKEAYEQLLQTENLSAQVKATVLQQLGWMHHTVDLLGDKATKESYAIQYLQKSLEADPNSGQSWYFLGRCYSSIGKVQDAFISYRQSIDKSEASADTWCSIGVLYQQQNQPMDALQAYICAVQLDHGHAAAWMDLGTLYESCNQPQDAIKCYLNATRSKSCSNTSALAARIKYLQNTSDNWSGGHAVSHPPVQQQAHSWCLTPQKLQHLEQLRANRNNLNPAQKLMLEQLESQFVLMQQHQMRPTGVAQVRSTGIPNGPTADSSLPTNSVSGQQPQLALTRVPSVSQPGVRPACPGQPLANGPFSAGHVPCSTSRTLGSTDTILIGNNHITGSGSNGNVPYLQRNALTLPHNRTNLTSSAEEPWKNQLSNSTQGLHKGQSSHSAGPNGERPLSSTGPSQHLQAAGSGIQNQNGHPTLPSNSVTQGAALNHLSSHTATSGGQQGITLTKESKPSGNILTVPETSRHTGETPNSTASVEGLPNHVHQMTADAVCSPSHGDSKSPGLLSSDNPQLSALLMGKANNNVGTGTCDKVNNIHPAVHTKTDNSVASSPSSAISTATPSPKSTEQTTTNSVTSLNSPHSGLHTINGEGMEESQSPMKTDLLLVNHKPSPQIIPSMSVSIYPSSAEVLKACRNLGKNGLSNSSILLDKCPPPRPPSSPYPPLPKDKLNPPTPSIYLENKRDAFFPPLHQFCTNPNNPVTVIRGLAGALKLDLGLFSTKTLVEANNEHMVEVRTQLLQPADENWDPTGTKKIWHCESNRSHTTIAKYAQYQASSFQESLREENEKRSHHKDHSDSESTSSDNSGRRRKGPFKTIKFGTNIDLSDDKKWKLQLHELTKLPAFVRVVSAGNLLSHVGHTILGMNTVQLYMKVPGSRTPGHQENNNFCSVNINIGPGDCEWFVVPEGYWGVLNDFCEKNNLNFLMGSWWPNLEDLYEANVPVYRFIQRPGDLVWINAGTVHWVQAIGWCNNIAWNVGPLTACQYKLAVERYEWNKLQSVKSIVPMVHLSWNMARNIKVSDPKLFEMIKYCLLRTLKQCQTLREALIAAGKEIIWHGRTKEEPAHYCSICEVEVFDLLFVTNESNSRKTYIVHCQDCARKTSGNLENFVVLEQYKMEDLMQVYDQFTLAPPLPSASS

SEQ ID NO: 52115 - protein, 224 aa, Homo sapiens
MKSCGVSLATAAAAAAAFGDEEKKMAAGKASGESEEASPSLTAEEREALGGLDSRLFGFVRFHEDGARTKALLGKAVRCYESLILKAEGKVESDFFCQLGHFNLLLEDYPKALSAYQRYYSLQSDYWKNAAFLYGLGLVYFHYNAFQWAIKAFQEVLYVDPSFCRAKEIHLRLGLMFKVNTDYESSLKHFQLALVDCNPCTLSNAEIQFHIAHLYETQVGCITL

SEQ ID NO: 52116 - protein, 1322 aa, Homo sapiens
MKSCGVSLATAAAAAAAFGDEEKKMAAGKASGESEEASPSLTAEEREALGGLDSRLFGFVRFHEDGARTKALLGKAVRCYESLILKAEGKVESDFFCQLGHFNLLLEDYPKALSAYQRYYSLQSDYWKNAAFLYGLGLVYFHYNAFQWAIKAFQEVLYVDPSFCRAKEIHLRLGLMFKVNTDYESSLKHFQLALVDCNPCTLSNAEIQFHIAHLYETQRKYHSAKEAYEQLLQTENLSAQVKATVLQQLGWMHHTVDLLGDKATKESYAIQYLQKSLEADPNSGQSWYFLGRCYSSIGKVQDAFISYRQSIDKSEASADTWCSIGVLYQQQNQPMDALQAYICAVQLDHGHAAAWMDLGTLYESCNQPQDAIKCYLNATRSKSCSNTSALAARIKYLQNTSDNWSGGHAVSHPPVQQQAHSWCLTPQKLQMRPTGVAQVRSTGIPNGPTADSSLPTNSVSGQQPQLALTRVPSVSQPGVRPACPGQPLANGPFSAGHVPCSTSRTLGSTDTILIGNNHITGSGSNGNVPYLQRNALTLPHNRTNLTSSAEEPWKNQLSNSTQGLHKGQSSHSAGPNGERPLSSTGPSQHLQAAGSGIQNQNGHPTLPSNSVTQGAALNHLSSHTATSGGQQGITLTKESKPSGNILTVPETSRHTGETPNSTASVEGLPNHVHQMTADAVCSPSHGDSKSPGLLSSDNPQLSALLMGKANNNVGTGTCDKVNNIHPAVHTKTDNSVASSPSSAISTATPSPKSTEQTTTNSVTSLNSPHSGLHTINGEGMEESQSPMKTDLLLVNHKPSPQIIPSMSVSIYPSSAEVLKACRNLGKNGLSNSSILLDKCPPPRPPSSPYPPLPKDKLNPPTPSIYLENKRDAFFPPLHQFCTNPNNPVTVIRGLAGALKLDLGLFSTKTLVEANNEHMVEVRTQLLQPADENWDPTGTKKIWHCESNRSHTTIAKYAQYQASSFQESLREENEKRSHHKDHSDSESTSSDNSGRRRKGPFKTIKFGTNIDLSDDKKWKLQLHELTKLPAFVRVVSAGNLLSHVGHTILGMNTVQLYMKVPGSRTPGHQENNNFCSVNINIGPGDCEWFVVPEGYWGVLNDFCEKNNLNFLMGSWWPNLEDLYEANVPVYRFIQRPGDLVWINAGTVHWVQAIGWCNNIAWNVGPLTACQYKLAVERYEWNKLQSVKSIVPMVHLSWNMARNIKVSDPKLFEMIKYCLLRTLKQCQTLREALIAAGKEIIWHGRTKEEPAHYCSICEVEVFDLLFVTNESNSRKTYIVHCQDCARKTSGNLENFVVLEQYKMEDLMQVYDQFTLAPPLPSASS

SEQ ID NO: 52117 - protein, 1682 aa, Homo sapiens
MHRAVDPPGARAAREAFALGGLSCAGAWSSCPPHPPPRSAWLPGGRCSASIGQPPLPAPLPPSHGSSSGHPSKPYYAPGAPTPRPLHGKLESLHGCVQALLREPAQPGLWEQLGQLYESEHDSEEATRCYHSALRYGGSFAELGPRIGRLQQAQLWNFHTGSCQHRAKVLPPLEQVWNLLHLEHKRNYGAKRGGPPVKRAAEPPVVQPVPPAALSGPSGEEGLSPGGKRRRGCNSEQTGLPPGLPLPPPPLPPPPPPPPPPPPPLPGLATSPPFQLTKPGLWSTLHGDAWGPERKGSAPPERQEQRHSLPHPYPYPAPAYTAHPPGHRLVPAAPPGPGPRPPGAESHGCLPATRPPGSDLRESRVQRSRMDSSVSPAATTACVPYAPSRPPGLPGTTTSSSSSSSSNTGLRGVEPNPGIPGADHYQTPALEVSHHGRLGPSAHSSRKPFLGAPAATPHLSLPPGPSSPPPPPCPRLLRPPPPPAWLKGPACRAAREDGEILEELFFGTEGPPRPAPPPLPHREGFLGPPASRFSVGTQDSHTPPTPPTPTTSSSNSNSGSHSSSPAGPVSFPPPPYLARSIDPLPRPPSPAQNPQDPPLVPLTLALPPAPPSSCHQNTSGSFRRPESPRPRVSFPKTPEVGPGPPPGPLSKAPQPVPPGVGELPARGPRLFDFPPTPLEDQFEEPAEFKILPDGLANIMKMLDESIRKEEEQQQHEAGVAPQPPLKEPFASLQSPFPTDTAPTTTAPAVAVTTTTTTTTTTTATQEEEKKPPPALPPPPPLAKFPPPSQPQPPPPPPPSPASLLKSLASVLEGQKYCYRGTGAAVSTRPGPLPTTQYSPGPPSGATALPPTSAAPSAQGSPQPSASSSSQFSTSGGPWARERRAGEEPVPGPMTPTQPPPPLSLPPARSESEVLEEISRACETLVERVGRSATDPADPVDTAEPADSGTERLLPPAQAKEEAGGVAAVSGSCKRRQKEHQKEHRRHRRACKDSVGRRPREGRAKAKAKVPKEKSRRVLGNLDLQSEEIQGREKSRPDLGGASKAKPPTAPAPPSAPAPSAQPTPPSASVPGKKAREEAPGPPGVSRADMLKLRSLSEGPPKELKIRLIKVESGDKETFIASEVEERRLRMADLTISHCAADVVRASRNAKVKGKFRESYLSPAQSVKPKINTEEKLPREKLNPPTPSIYLESKRDAFSPVLLQFCTDPRNPITVIRGLAGSLRLNLGLFSTKTLVEASGEHTVEVRTQVQQPSDENWDLTGTRQIWPCESSRSHTTIAKYAQYQASSFQESLQEEKESEDEESEEPDSTTGTPPSSAPDPKNHHIIKFGTNIDLSDAKRWKPQLQELLKLPAFMRVTSTGNMLSHVGHTILGMNTVQLYMKVPGSRTPGHQENNNFCSVNINIGPGDCEWFAVHEHYWETISAFCDRHGVDYLTGSWWPILDDLYASNIPVYRFVQRPGDLVWINAGTVHWVQATGWCNNIAWNVGPLTAYQYQLALERYEWNEVKNVKSIVPMIHVSWNVARTVKISDPDLFKMIKFCLLQSMKHCQVQRESLVRAGKKIAYQGRVKDEPAYYCNECDVEVFNILFVTSENGSRNTYLVHCEGCARRRSAGLQGVVVLEQYRTEELAQAYDAFTLVRARRARGQRRRALGQAAGTGFGSPAAPFPEPPPAFSPQAPASTSR

SEQ ID NO: 52118 - protein, 1643 aa, Homo sapiens
MHRAVDPPGARAAREAFALGGLSCAGAWSSCPPHPPPRSAWLPGGRCSASIGQPPLPAPLPPSHGSSSGHPSKPYYAPGAPTPRPLHGKLESLHGCVQALLREPAQPGLWEQLGQLYESEHDSEEATRCYHSALRYGGSFAELGPRIGRLQQAQLWNFHTGSCQHRAKVLPPLEQVWNLLHLEHKRNYGAKRGGPPVKRAAEPPVVQPVPPAALSGPSGEEGLSPGGKRRRGCNSEQTGLPPGLPLPPPPLPPPPPPPPPPPPPLPGLATSPPFQLTKPGLWSTLHGDAWGPERKGSAPPERQEQRHSLPHPYPYPAPAYTAHPPGHRLVPAAPPGPGPRPPGAESHGCLPATRPPGSDLRESRVQRSRMDSSVSPAATTACVPYAPSRPPGLPGTTTSSSSSSSSNTGLRGVEPNPGIPGADHYQTPALEVSHHGRLGPSAHSSRKPFLGAPAATPHLSLPPGPSSPPPPPCPRLLRPPPPPAWLKGPACRAAREDGEILEELFFGTEGPPRPAPPPLPHREGFLGPPASRFSVGTQDSHTPPTPPTPTTSSSNSNSGSHSSSPAGPVSFPPPPYLARSIDPLPRPPSPAQNPQDPPLVPLTLALPPAPPSSCHQNTSGSFRRPESPRPRVSFPKTPEVGPGPPPGPLSKAPQPVPPGVGELPARGPRLFDFPPTPLEDQFEEPAEFKILPDGLANIMKMLDESIRKEEEQQQHEAGVAPQPPLKEPFASLQSPFPTDTAPTTTAPAVAVTTTTTTTTTTTATQEEEKKPPPALPPPPPLAKFPPPSQPQPPPPPPPSPASLLKSLASVLEGQKYCYRGTGAAVSTRPGPLPTTQYSPGPPSGATALPPTSAAPSAQGSPQPSASSSSQFSTSGGPWARERRAGEEPVPGPMTPTQPPPPLSLPPARSESEVLEEISRACETLVERVGRSATDPADPVDTAEPADSGTERLLPPAQAKEEAGGVAAVSGSCKRRQKEHQKEHRRHRRACKDSVGRRPREGRAKAKAKVPKEKSRRVLGNLDLQSEEIQGREKSRPDLGGASKAKPPTAPAPPSAPAPSAQPTPPSASVPGKKAREEAPGPPGVSRADMLKLRSLSEGPPKELKIRLIKVESGDKETFIASEVEERRLRMADLTISHCAADVVRASRNAKVKGKFRESYLSPAQSVKPKINTEEKLPREKLNPPTPSIYLESKRDAFSPVLLQFCTDPRNPITVIRGLAGSLRLNLGLFSTKTLVEASGEHTVEVRTQVQQPSDENWDLTGTRQIWPCESSRSHTTIAKYAQYQASSFQESLQEEKESEDEESEEPDSTTGTPPSSAPDPKNHHIIKFGTNIDLSDAKRWKPQLQELLKLPAFMRVTSTGNMLSHVGHTILGMNTVQLYMKVPGSRTPGHQENNNFCSVNINIGPGDCEWFAVHEHYWETISAFCDRHGVDYLTGSWWPILDDLYASNIPVYRFVQRPGDLVWINAGTVHWVQATGWCNNIAWNVGPLTAYQYQLALERYEWNEVKNVKSIVPMIHVSWNVARTVKISDPDLFKMIKFCLLQSMKHCQVQRESLVRAGKKIAYQGRVKDEPAYYCNECDVEVFNILFVTSENGSRNTYLVHCEGCARRRSAGLQGVVVLEQYRTEELAQAYDAFTLAPASTSR

SEQ ID NO: 52119 - protein, 414 aa, Homo sapiens [sequence omitted]

SEQ ID NO: 52120 - protein, 308 aa, Homo sapiens
MHSRGREIVVLLNPWSINEAVSSYCTYFIKQDSKSFGIMVSWKGIYFILTLFWGSFFGSIFMLSPFLPLMFVNPSWYRWINNRLVATWLTLPVALLETMFGVKVIITGDAFVPGERSVIIMNHRTRMDWMFLWNCLMRYSYLRLEKICLKASLKGVPGFGWAMQAAAYIFIHRKWKDDKSHFEDMIDYFCDIHEPLQLLIFPEGTDLTENSKSRSNAFAEKNGLQKYEYVLHPRTTGFTFVVDRLREGRRQSEGSKGPLQGELQITAQGNQRGHKQMEKHSMLMDWKNQYREIGHTAQSNLQIQCYSH

SEQ ID NO: 52121 - protein, 308 aa, Homo sapiens; identical to SEQ ID NO: 52120

SEQ ID NO: 52122 - protein, 376 aa, Homo sapiens
MVSWKGIYFILTLFWGSFFGSIFMLSPFLPLMFVNPSWYRWINNRLVATWLTLPVALLETMFGVKVIITGDAFVPGERSVIIMNHRTRMDWMFLWNCLMRYSYLRLEKICLKASLKGVPGFGWAMQAAAYIFIHRKWKDDKSHFEDMIDYFCDIHEPLQLLIFPEGTDLTENSKSRSNAFAEKNGLQKYEYVLHPRTTGFTFVVDRLREGKNLDAVHDITVAYPHNIPQSEKHLLQGDFPREIHFHVHRYPIDTLPTSKEDLQLWCHKRWEEKEERLRSFYQGEKNFYFTGQSVIPPCKSELRVLVVKLLSILYWTLFSPAMCLLIYLYSLVKWYFIITIVIFVLQERIFGGLEIIELACYRLLHKQPHLNSKKNE

SEQ ID NO: 52123 - protein, 330 aa, Homo sapiens
MVSWKGIYFILTLFWGSFFGSIFMLSPFLPLMFVNPSWYRWINNRLVATWLTLPVALLETMFGVKVIITGDAFVPGERSVIIMNHRTRMDWMFLWNCLMRYSYLRLEKICLKASLKGVPGFGWAMQAAAYIFIHRKWKDDKSHFEDMIDYFCDIHEPLQLLIFPEGTDLTENSKSRSNAFAEKNGLQKYEYVLHPRTTGFTFVVDRLREGKNLDAVHDITVAYPHNIPQSEKHLLQGDFPREIHFHVHRYPIDTLPTSKEDLQLWCHKRWEEKEERLRSFYQGEKNFYFTGQSVIPPCKSELRVLVVKLYTVLDPVQPCNVPTHIFVQSC

SEQ ID NO: 52124 - protein, 153 aa, Homo sapiens
MHSRGREIVVLLNPWSINEAVSSYCTYFIKQDSKSFGIMVSWKGIYFILTLFWGSFFGSIFMLSPFLPLMFVNPSWYRWINNRLVATWLTLPVALLETMFGVKVIITGDAFVPGERSVIIMNHRTRMDWMFLWNCLMRYSYLRLEKICLKASL

SEQ ID NO: 52125 - protein, 376 aa, Homo sapiens; identical to SEQ ID NO: 52122

SEQ ID NO: 52126 - protein, 364 aa, Homo sapiens
MAAISTSIPVISQPQFTAMNEPQCFYNESIAFFYNRSGKHLATEWNTVSKLVMGLGITVCIFIMLANLLVMVAIYVNRRFHFPIYYLMANLAAADFFAGLAYFYLMFNTGPNTRRLTVSTWLLRQGLIDTSLTASVANLLAIAIERHITVFRMQLHTRMSNRRVVVVIVVIWTMAIVMGAIPSVGWNCICDIENCSNMAPLYSDSYLVFWAIFNLVTFVVMVVLYAHIFGYVRQRTMRMSRHSSGPRRNRDTMMSLLKTVVIVLGAFIICWTPGLVLLLLDVCCPQCDVLAYEKFFLLLAEFNSAMNPIIYSYRDKEMSATFRQILCCQRSENPTGPTEGSDRSASSLNHTILAGVHSNDHSVV

SEQ ID NO: 52127 - protein, 364 aa, Homo sapiens; identical to SEQ ID NO: 52126

SEQ ID NO: 52128 - protein, 364 aa, Homo sapiens; identical to SEQ ID NO: 52126

SEQ ID NO: 52129 - protein, 182 aa, Homo sapiens
MAAISTSIPVISQPQFTAMNEPQCFYNESIAFFYNRSGKHLATEWNTVSKLVMGLGITVCIFIMLANLLVMVAIYVNRRFHFPIYYLMANLAAADFFAGLAYFYLMFNTGPNTRRLTVSTWLLRQGLIDTSLTASVANLLAIAIERHITVFRMQLHTRMSNRRVVVVIVVIWTMAIVMGAIP

SEQ ID NO: 52130 - protein, 346 aa, Homo sapiens
MNEPQCFYNESIAFFYNRSGKHLATEWNTVSKLVMGLGITVCIFIMLANLLVMVAIYVNRRFHFPIYYLMANLAAADFFAGLAYFYLMFNTGPNTRRLTVSTWLLRQGLIDTSLTASVANLLAIAIERHITVFRMQLHTRMSNRRVVVVIVVIWTMAIVMGAIPSVGWNCICDIENCSNMAPLYSDSYLVFWAIFNLVTFVVMVVLYAHIFGYVRQRTMRMSRHSSGPRRNRDTMMSLLKTVVIVLGAFIICWTPGLVLLLLDVCCPQCDVLAYEKFFLLLAEFNSAMNPIIYSYRDKEMSATFRQILCCQRSENPTGPTEGSDRSASSLNHTILAGVHSNDHSVV

SEQ ID NO: 52131 - protein, 365 aa, Homo sapiens
MEEGAQRSGALGAPHQFTAMNEPQCFYNESIAFFYNRSGKHLATEWNTVSKLVMGLGITVCIFIMLANLLVMVAIYVNRRFHFPIYYLMANLAAADFFAGLAYFYLMFNTGPNTRRLTVSTWLLRQGLIDTSLTASVANLLAIAIERHITVFRMQLHTRMSNRRVVVVIVVIWTMAIVMGAIPSVGWNCICDIENCSNMAPLYSDSYLVFWAIFNLVTFVVMVVLYAHIFGYVRQRTMRMSRHSSGPRRNRDTMMSLLKTVVIVLGAFIICWTPGLVLLLLDVCCPQCDVLAYEKFFLLLAEFNSAMNPIIYSYRDKEMSATFRQILCCQRSENPTGPTEGSDRSASSLNHTILAGVHSNDHSVV

SEQ ID NO: 52132 - protein, 365 aa, Homo sapiens
MLLLLIPAHSSVLENEFTAMNEPQCFYNESIAFFYNRSGKHLATEWNTVSKLVMGLGITVCIFIMLANLLVMVAIYVNRRFHFPIYYLMANLAAADFFAGLAYFYLMFNTGPNTRRLTVSTWLLRQGLIDTSLTASVANLLAIAIERHITVFRMQLHTRMSNRRVVVVIVVIWTMAIVMGAIPSVGWNCICDIENCSNMAPLYSDSYLVFWAIFNLVTFVVMVVLYAHIFGYVRQRTMRMSRHSSGPRRNRDTMMSLLKTVVIVLGAFIICWTPGLVLLLLDVCCPQCDVLAYEKFFLLLAEFNSAMNPIIYSYRDKEMSATFRQILCCQRSENPTGPTEGSDRSASSLNHTILAGVHSNDHSVV

SEQ ID NO: 52133 - protein, 351 aa, Homo sapiens
MVIMGQCYYNETIGFFYNNSGKELSSHWRPKDVVVVALGLTVSVLVLLTNLLVIAAIASNRRFHQPIYYLLGNLAAADLFAGVAYLFLMFHTGPRTARLSLEGWFLRQGLLDTSLTASVATLLAIAVERHRSVMAVQLHSRLPRGRVVMLIVGVWVAALGLGLLPAHSWHCLCALDRCSRMAPLLSRSYLAVWALSSLLVFLLMVAVYTRIFFYVRRRVQRMAEHVSCHPRYRETTLSLVKTVVIILGAFVVCWTPGQVVLLLDGLGCESCNVLAVEKYFLLLAEANSLVNAAVYSCRDAEMRRTFRRLLCCACLRQSTRESVHYTSSAQGGASTRIMLPENGHPLMDSTL

SEQ ID NO: 52134 - protein, 351 aa, Homo sapiens; identical to SEQ ID NO: 52133

SEQ ID NO: 52135 - protein, 353 aa, Homo sapiens
MNECHYDKHMDFFYNRSNTDTVDDWTGTKLVIVLCVGTFFCLFIFFSNSLVIAAVIKNRKFHFPFYYLLANLAAADFFAGIAYVFLMFNTGPVSKTLTVNRWFLRQGLLDSSLTASLTNLLVIAVERHMSIMRMRVHSNLTKKRVTLLILLVWAIAIFMGAVPTLGWNCLCNISACSSLAPIYSRSYLVFWTVSNLMAFLIMVVVYLRIYVYVKRKTNVLSPHTSGSISRRRTPMKLMKTVMTVLGAFVVCWTPGLVVLLLDGLNCRQCGVQHVKRWFLLLALLNSVVNPIIYSYKDEDMYGTMKKMICCFSQENPERRPSRIPSTVLSRSDTGSQYIEDSISQGAVCNKSTS

SEQ ID NO: 52136 - protein, 353 aa, Homo sapiens; identical to SEQ ID NO: 52135

SEQ ID NO: 52137 - protein, 370 aa, Homo sapiens
MGDRRFIDFQFQDSNSSLRPRLGNATANNTCIVDDSFKYNLNGAVYSVVFILGLITNSVSLFVFCFRMKMRSETAIFITNLAVSDLLFVCTLPFKIFYNFNRHWPFGDTLCKISGTAFLTNIYGSMLFLTCISVDRFLAIVYPFRSRTIRTRRNSAIVCAGVWILVLSGGISASLFSTTNVNNATTTCFEGFSKRVWKTYLSKITIFIEVVGFIIPLILNVSCSSVVLRTLRKPATLSQIGTNKKKVLKMITVHMAVFVVCFVPYNSVLFLYALVRSQAITNCFLERFAKIMYPITLCLATLNCCFDPFIYYFTLESFQKSFYINAHIRMESLFKTETPLTTKPSLPAIQEEVSDQTTNNGGELMLESTF

SEQ ID NO: 52138 - protein, 370 aa, Homo sapiens; identical to SEQ ID NO: 52137

SEQ ID NO: 52139 - protein, 372 aa, Homo sapiens [sequence omitted]

SEQ ID NO: 52140 - protein, 372 aa, Homo sapiens [sequence omitted]

SEQ ID NO: 52141 - protein, 429 aa, Homo sapiens
MLANSSSTNSSVLPCPDYRPTHRLHLVVYSLVLAAGLPLNALALWVFLRALRVHSVVSVYMCNLAASDLLFTLSLPVRLSYYALHHWPFPDLLCQTTGAIFQMNMYGSCIFLMLINVDRYAAIVHPLRLRHLRRPRVARLLCLGVWALILVFAVPAARVHRPSRCRYRDLEVRLCFESFSDELWKGRLLPLVLLAEALGFLLPLAAVVYSSGRVFWTLARPDATQSQRRRKTVRLLLANLVIFLLCFVPYNSTLAVYGLLRSKLVAASVPARDRVRGVLMVMVLLAGANCVLDPLVYYFSAEGFRNTLRGLGTPHRARTSATNGTRAALAQSERSAVTTDATRPDAASQGLLRPSDSHSLSSFTHAIALSVPDSQRLSFWEAYRVYTQEGGLGTWTFGWQFQLSNAEEYKVWKPGPREGSAAGNGFFKL

SEQ ID NO: 52142 - protein, 534 aa, Homo sapiens
MRLRGCGPRAAPASSAGASDARLLAPPGRNPFVHELRLSALQKAQVALMTLTLFPVRLLVAAAMMLLAWPLALVASLGSAEKEPEQPPALWRKVVDFLLKAIMRTMWFAGGFHRVAVKGRQALPTEAAILTLAPHSSYFDAIPVTMTMSSIVMKAESRDIPIWGTLIQYIRPVFVSRSDQDSRRKTVEEIKRRAQSNGKWPQIMIFPEGTCTNRTCLITFKPGAFIPGAPVQPVVLRYPNKLDTITWTWQGPGALEILWLTLCQFHNQVEIEFLPVYSPSEEEKRNPALYASNVRRVMAEALGVSVTDYTFEDCQLALAEGQLRLPADTCLLEFARLVRGLGLKPEKLEKDLDRYSERARMKGGEKIGIAEFAASLEVPVSDLLEDMFSLFDESGSGEVDLRECVVALSVVCRPARTLDTIQLAFKMYGAQEDGSVGEGDLSCILKTALGVAELTVTDLFRAIDQEEKGKITFADFHRFAEMYPAFAEEYLYPDQTHFESCAETSPAPIPNGFCADFSPENSDAGRKPVRKKLD

SEQ ID NO: 52143 - protein, 534 aa, Homo sapiens; identical to SEQ ID NO: 52142

SEQ ID NO: 52144 - protein, 487 aa, Homo sapiens
MASSAEGDEGTVVALAGVLQSGFQELSLNKLATSLGASEQALRLIISIFLGYPFALFYRHYLFYKETYLIHLFHTFTGLSIAYFNFGNQLYHSLLCIVLQFLILRLMGRTITAVLTTFCFQMAYLLAGYYYTATGNYDIKWTMPHCVLTLKLIGLAVDYFDGGKDQNSLSSEQQKYAIRGVPSLLEVAGFSYFYGAFLVGPQFSMNHYMKLVQGELIDIPGKIPNSIIPALKRLSLGLFYLVGYTLLSPHITEDYLLTEDYDNHPFWFRCMYMLIWGKFVLYKYVTCWLVTEGVCILTGLGFNGFEEKGKAKWDACANMKVWLFETNPRFTGTIASFNINTNAWVARYIFKRLKFLGNKELSQGLSLLFLALWHGLHSGYLVCFQMEFLIVIVERQAARLIQESPTLSKLAAITVLQPFYYLVQQTIHWLFMGYSMTAFCLFTWDKWLKVYKSIYFLGHIFFLSLLFILPYIHKAMVPRKEKLKKME

SEQ ID NO: 52145 - protein, 524 aa, Homo sapiens
MSQGSPGDWAPLDPTPGPPASPNPFVHELHLSRLQRVKFCLLGALLAPIRVLLAFIVLFLLWPFAWLQVAGLSEEQLQEPITGWRKTVCHNGVLGLSRLLFFLLGFLRIRVRGQRASRLQAPVLVAAPHSTFFDPIVLLPCDLPKVVSRAENLSVPVIGALLRFNQAILVSRHDPASRRRVVEEVRRRATSGGKWPQVLFFPEGTCSNKKALLKFKPGAFIAGVPVQPVLIRYPNSLDTTSWAWRGPGVLKVLWLTASQPCSIVDVEFLPVYHPSPEESRDPTLYANNVQRVMAQALGIPATECEFVGSLPVIVVGRLKVALEPQLWELGKVLRKAGLSAGYVDAGAEPGRSRMISQEEFARQLQLSDPQTVAGAFGYFQQDTKGLVDFRDVALALAALDGGRSLEELTRLAFELFAEEQAEGPNRLLYKDGFSTILHLLLGSPHPAATALHAELCQAGSSQGLSLCQFQNFSLHDPLYGKLFSTYLRPPHTSRGTSQTPNASSPGNPTALANGTVQAPKQKGD

SEQ ID NO: 52146 - protein, 230 aa, Homo sapiens
MCGNNMSTPLPAIVPAARKATAAVIFLHGLGDTGHGWAEAFAGIRSSHIKYICPHAPVRPVTLNMNVAMPSWFDIIGLSPDSQEDESGIKQAAENIKALIDQEVKNGIPSNRIILGGFSQGGALSLYTALTTQQKLAGVTALSCWLPLRASFPQGPIGGANRDISILQCHGDCDPLVPLMFGSLTVEKLKTLVNPANVTFKTYEGMMHSSCQQEMMDVKQFIDKLLPPID

SEQ ID NO: 52147 - protein, 214 aa, Homo sapiens
MCGNNMSTPLPAIVPAARKATAAVIFLHGLGDTGHGWAEAFAGIRSSHIKYICPHAFDIIGLSPDSQEDESGIKQAAENIKALIDQEVKNGIPSNRIILGGFSQGGALSLYTALTTQQKLAGVTALSCWLPLRASFPQGPIGGANRDISILQCHGDCDPLVPLMFGSLTVEKLKTLVNPANVTFKTYEGMMHSSCQQEMMDVKQFIDKLLPPID

SEQ ID NO: 52148 - protein, 363 aa, Homo sapiens
MELHERPDERRKARTSTQGRLGDWRRVHADGFTHRVWSSSSWLEPAMTSRTRVTWPSPPRPLPVPAAAAVAFGAKGTDPAEARSSRGIEEAGPRAHGRAGREPERRRSRQQRRGGLQARRSTLLKTCARARATAPGAMKMVAPWTRFYSNSCCLCCHVRTGTILLGVWYLIINAVVLLILLSALADPDQYNFSSSELGGDFEFMDDANMCIAIAISLLMILICAMATYGAYKQRAAWIIPFFCYQIFDFALNMLVAITVLIYPNSIQEYIRQLPPNFPYRDDVMSVNPTCLVLIILLFISIILTFKGYLISCVWNCYRYINGRNSSDVLVYVTSNDTTVLLPPYDDATVNGAAKEPPPPYVSA

SEQ ID NO: 52149 - protein, 317 aa, Homo sapiens
MTSRTRVTWPSPPRPLPVPAAAAVAFGAKGTDPAEARSSRGIEEAGPRAHGRAGREPERRRSRQQRRGGLQARRSTLLKTCARARATAPGAMKMVAPWTRFYSNSCCLCCHVRTGTILLGVWYLIINAVVLLILLSALADPDQYNFSSSELGGDFEFMDDANMCIAIAISLLMILICAMATYGAYKQRAAWIIPFFCYQIFDFALNMLVAITVLIYPNSIQEYIRQLPPNFPYRDDVMSVNPTCLVLIILLFISIILTFKGYLISCVWNCYRYINGRNSSDVLVYVTSNDTTVLLPPYDDATVNGAAKEPPPPYVSA

SEQ ID NO: 52150 - protein, 226 aa, Homo sapiens
MKMVAPWTRFYSNSCCLCCHVRTGTILLGVWYLIINAVVLLILLSALADPDQYNFSSSELGGDFEFMDDANMCIAIAISLLMILICAMATYGAYKQRAAWIIPFFCYQIFDFALNMLVAITVLIYPNSIQEYIRQLPPNFPYRDDVMSVNPTCLVLIILLFISIILTFKGYLISCVWNCYRYINGRNSSDVLVYVTSNDTTVLLPPYDDATVNGAAKEPPPPYVSA

SEQ ID NO: 52151 - protein, 262 aa, Homo sapiens
MDPRLSTVRQTCCCFNVRIATTALAIYHVIMSVLLFIEHSVEVAHGKASCKLSQMGYLRIADLISSFLLITMLFIISLSLLIGVVKNREKYLLPFLSLQIMDYLLCLLTLLGSYIELPAYLKLASRSRASSSKFPLMTLQLLDFCLSILTLCSSYMEVPTYLNFKSMNHMNYLPSQEDMPHNQFIKMMIIFSIAFITVLIFKVYMFKCVWRCYRLIKCMNSVEEKRNSKMLQKVVLPSYEEALSLPSKTPEGGPAPPPYSEV

SEQ ID NO: 52152 - protein, 290 aa, Homo sapiens
MDPRLSTVRQTCCCFNVRIATTALAIYHVIMSVLLFIEHSVEVAHGKASCKLSQMGYLRIADLISSFLLITMLFIISLSLLIGVVKNREKYLLPFLSLQIMDYLLCLLTLLGSYIELPAYLKLASRSRASSSKFPLMTLQLLDFCLSILTLCSSYMEVPTYLNFKSMNHMNYLPSQEDMPHNQFIKMMIIFSIAFITVLIFKVYMFKCVWRCYRLIKCMNSVEEKRNSKMLQKVVLPSYEEALSPAGPVSCSQLGQRFRLSHSSGLSIIQPNNAWFISISSDTCLDDWPF

SEQ ID NO: 52153 - protein, 3801 aa, Homo sapiens
MSTDSNSLAREFLTDVNRLCNAVVQRVEAREEEEEETHMATLGQYLVHGRGFLLLTKLNSIIDQALTCREELLTLLLSLLPLVWKIPVQEEKATDFNLPLSADIILTKEKNSSSQRSTQEKLHLEGSALSSQVSAKVNVFRKSRRQRKITHRYSVRDARKTQLSTSDSEANSDEKGIAMNKHRRPHLLHHFLTSFPKQDHPKAKLDRLATKEQTPPDAMALENSREIIPRQGSNTDILSEPAALSVISNMNNSPFDLCHVLLSLLEKVCKFDVTLNHNSPLAASVVPTLTEFLAGFGDCCSLSDNLESRVVSAGWTEEPVALIQRMLFRTVLHLLSVDVSTAEMMPENLRKNLTELLRAALKIRICLEKQPDPFAPRQKKTLQEVQEDFVFSKYRHRALLLPELLEGVLQILICCLQSAASNPFYFSQAMDLVQEFIQHHGFNLFETAVLQMEWLVLRDGVPPEASEHLKALINSVMKIMSTVKKVKSEQLHHSMCTRKRHRRCEYSHFMHHHRDLSGLLVSAFKNQVSKNPFEETADGDVYYPERCCCIAVCAHQCLRLLQQASLSSTCVQILSGVHNIGICCCMDPKSVIIPLLHAFKLPALKNFQQHILNILNKLILDQLGGAEISPKIKKAACNICTVDSDQLAQLEETLQGNLCDAELSSSLSSPSYRFQGILPSSGSEDLLWKWDALKAYQNFVFEEDRLHSIQIANHICNLIQKGNIVVQWKLYNYIFNPVLQRGVELAHHCQHLSVTSAQSHVCSHHNQCLPQDVLQIYVKTLPILLKSRVIRDLFLSCNGVSQIIELNCLNGIRSHSLKAFETLIISLGEQQKDASVPDIDGIDIEQKELSSVHVGTSFHHQQAYSDSPQSLSKFYAGLKEAYPKRRKTVNQDVHINTINLFLCVAFLCVSKEAESDRESANDSEDTSGYDSTASEPLSHMLPCISLESLVLPSPEHMHQAADIWSMCRWIYMLSSVFQKQFYRLGGFRVCHKLIFMIIQKLFRSHKEEQGKKEGDTSVNENQDLNRISQPKRTMKEDLLSLAIKSDPIPSELGSLKKSADSLGKLELQHISSINVEEVSATEAAPEEAKLFTSQESETSLQSIRLLEALLAICLHGARTSQQKMELELPNQNLSVESILFEMRDHLSQSKVIETQLAKPLFDALLRVALGNYSADFEHNDAMTEKSHQSAEELSSQPGDFSEEAEDSQCCSFKLLVEEEGYEADSESNPEDGETQDDGVDLKSETEGFSASSSPNDLLENLTQGEIIYPEICMLELNLLSASKAKLDVLAHVFESFLKIIRQKEKNVFLLMQQGTVKNLLGGFLSILTQDDSDFQACQRVLVDLLVSLMSSRTCSEELTLLLRIFLEKSPCTKILLLGILKIIESDTTMSPSQYLTFPLLHAPNLSNGVSSQKYPGILNSKAMGLLRRARVSRSKKEADRESFPHRLLSSWHIAPVHLPLLGQNCWPHLSEGFSVSLWFNVECIHEAESTTEKGKKIKKRNKSLILPDSSFDGTESDRPEGAEYINPGERLIEEGCIHIISLGSKALMIQVWADPHNATLIFRVCMDSNDDMKAVLLAQVESQENIFLPSKWQHLVLTYLQQPQGKRRIHGKISIWVSGQRKPDVTLDFMLPRKTSLSSDSNKTFCMIGHCLSSQEEFLQLAGKWDLGNLLLFNGAKVGSQEAFYLYACGPNHTSVMPCKYGKPVNDYSKYINKEILRCEQIRELFMTKKDVDIGLLIESLSVVYTTYCPAQYTIYEPVIRLKGQMKTQLSQRPFSSKEVQSILLEPHHLKNLQPTEYKTIQGILHEIGGTGIFVFLFARVVELSSCEETQALALRVILSLIKYNQQRVHELENCNGLSMIHQVLIKQKCIVGFYILKTLLEGCCGEDIIYMNENGEFKLDVDSNAIIQDVKLLEELLLDWKIWSKAEQGVWETLLAALEVLIRADHHQQMFNIKQLLKAQVVHHFLLTCQVLQEYKEGQLTPMPREVCRSFVKIIAEVLGSPPDLELLTIIFNFLLAVHPPTNTYVCHNPTNFYFSLHIDGKIFQEKVRSIMYLRHSSSGGRSLMSPGFMVISPSGFTASPYEGENSSNIIPQQMAAHMLRSRSLPAFPTSSLLTQSQKLTGSLGCSIDRLQNIADTYVATQSKKQNSLGSSDTLKKGKEDAFISSCESAKTVCEMEAVLSAQVSVSDVPKGVLGFPVVKADHKQLGAEPRSEDDSPGDESCPRRPDYLKGLASFQRSHSTIASLGLAFPSQNGSAAVGRWPSLVDRNTDDWENFAYSLGYEPNYNRTASAHSVTEDCLVPICCGLYELLSGVLLILPDVLLEDVMDKLIQADTLLVLVNHPSPAIQQGVIKLLDAYFARASKEQKDKFLKNRGFSLLANQLYLHRGTQELLECFIEMFFGRHIGLDEEFDLEDVRNMGLFQKWSVIPILGLIETSLYDNILLHNALLLLLQILNSCSKVADMLLDNGLLYVLCNTVAALNGLEKNIPMSEYKLLACDIQQLFIAVTIHACSSSGSQYFRVIEDLIVMLGYLQNSKNKRTQNMAVALQLRVLQAAMEFIRTTANHDSENLTDSLQSPSAPHHAVVQKRKSIAGPRKFPLAQTESLLMKMRSVANDELHVMMQRRMSQENPSQATETELAQRLQRLTVLAVNRIIYQEFNSDIIDILRTPENVTQSKTSVFQTEISEENIHHEQSSVFNPFQKEIFTYLVEGFKVSIGSSKASGSKQQWTKILWSCKETFRMQLGRLLVHILSPAHAAQERKQIFEIVHEPNHQEILRDCLSPSLQHGAKLVLYLSELIHNHQGELTEEELGTAELLMNALKLCGHKCIPPSASTKADLIKMIKEEQKKYETEEGVNKAAWQKTVNNNQQSLFQRLDSKSKDISKIAADITQAVSLSQGNERKKVIQHIRGMYKVDLSASRHWQELIQQLTHDRAVWYDPIYYPTSWQLDPTEGPNRERRRLQRCYLTIPNKYLLRDRQKSEDVVKPPLSYLFEDKTHSSFSSTVKDKAASESIRVNRRCISVAPSRETAGELLLGKCGMYFVEDNASDTVESSSLQGELEPASFSWTYEEIKEVHKRWWQLRDNAVEIFLTNGRTLLLAFDNTKVRDDVYHNILTNNLPNLLEYGNITALTNLWYTGQITNFEYLTHLNKHAGRSFNDLMQYPVFPFILADYVSETLDLNDLLIYRNLSKPIAVQYKEKEDRYVDTYKYLEEEYRKGAREDDPMPPVQPYHYGSHYSNSGTVLHFLVRMPPFTKMFLAYQDQSFDIPDRTFHSTNTTWRLSSFESMTDVKELIPEFFYLPEFLVNREGFDFGVRQNGERVNHVNLPPWARNDPRLFILIHRQALESDYVSQNICQWIDLVFGYKQKGKASVQAINVFHPATYFGMDVSAVEDPVQRRALETMIKTYGQTPRQLFHMAHVSRPGAKLNIEGELPAAVGLLVQFAFRETREQVKEITYPSPLSWIKGLKWGEYVGSPSAPVPVVCFSQPHGERFGSLQALPTRAICGLSRNFCLLMTYSKEQGVRSMNSTDIQWSAILSWGYADNILRLKSKQSEPPVNFIQSSQQYQVTSCAWVPDSCQLFTGSKCGVITAYTNRFTSSTPSEIEMETQIHLYGHTEEITSLFVCKPYSILISVSRDGTCIIWDLNRLCYVQSLAGHKSPVTAVSASETSGDIATVCDSAGGGSDLRLWTVNGDLVGHVHCREIICSVAFSNQPEGVSINVIAGGLENGIVRLWSTWDLKPVREITFPKSNKPIISLTFSCDGHHLYTANSDGTVIAWCRKDQQRLKQPMFYSFLSSYAAG

SEQ ID NO: 52154 - protein, 3801 aa, Homo sapiens; identical to SEQ ID NO: 52153

SEQ ID NO: 52155 - protein, 1382 aa, Homo sapiens
MSTDSNSLAREFLTDVNRLCNAVVQRVEAREEEEEETHMATLGQYLVHGRGFLLLTKLNSIIDQALTCREELLTLLLSLLPLVWKIPVQEEKATDFNLPLSADIILTKEKNSSSQRSTQEKLHLEGSALSSQVSAKVNVFRKSRRQRKITHRYSVRDARKTQLSTSDSEANSDEKGIAMNKHRRPHLLHHFLTSFPKQDHPKAKLDRLATKEQTPPDAMALENSREIIPRQGSNTDILSEPAALSVISNMNNSPFDLCHVLLSLLEKVCKFDVTLNHNSPLAASVVPTLTEFLAGFGDCCSLSDNLESRVVSAGWTEEPVALIQRMLFRTVLHLLSVDVSTAEMMPENLRKNLTELLRAALKIRICLEKQPDPFAPRQKKTLQEVQEDFVFSKYRHRALLLPELLEGVLQILICCLQSAASNPFYFSQAMDLVQEFIQHHGFNLFETAVLQMEWLVLRDGVPPEASEHLKALINSVMKIMSTVKKVKSEQLHHSMCTRKRHRRCEYSHFMHHHRDLSGLLVSAFKNQVSKNPFEETADGDVYYPERCCCIAVCAHQCLRLLQQASLSSTCVQILSGVHNIGICCCMDPKSVIIPLLHAFKLPALKNFQQHILNILNKLILDQLGGAEISPKIKKAACNICTVDSDQLAQLEETLQGNLCDAELSSSLSSPSYRFQGILPSSGSEDLLWKWDALKAYQNFVFEEDRLHSIQIANHICNLIQKGNIVVQWKLYNYIFNPVLQRGVELAHHCQHLSVTSAQSHVCSHHNQCLPQDVLQIYVKTLPILLKSRVIRDLFLSCNGVSQIIELNCLNGIRSHSLKAFETLIISLGEQQKDASVPDIDGIDIEQKELSSVHVGTSFHHQQAYSDSPQSLSKFYAGLKEAYPKRRKTVNQDVHINTINLFLCVAFLCVSKEAESDRESANDSEDTSGYDSTASEPLSHMLPCISLESLVLPSPEHMHQAADIWSMCRWIYMLSSVFQKQFYRLGGFRVCHKLIFMIIQKLFRSHKEEQGKKEGDTSVNENQDLNRISQPKRTMKEDLLSLAIKSDPIPSELGSLKKSADSLGKLELQHISSINVEEVSATEAAPEEAKLFTSQESETSLQSIRLLEALLAICLHGARTSQQKMELELPNQNLSVESILFEMRDHLSQSKVIETQLAKPLFDALLRVALGNYSADFEHNDAMTEKSHQSAEELSSQPGDFSEEAEDSQCCSFKLLVEEEGYEADSESNPEDGETQDDGVDLKSETEGFSASSSPNDLLENLTQGEIIYPEICMLELNLLSASKAKLDVLAHVFESFLKIIRQKEKNVFLLMQQGTVKNLLGGFLSILTQDDSDFQACQRVLVDLLVSLMSSRTCSEELTLLLRIFLEKSPCTRATDQKVQST

SEQ ID NO: 52156 - protein, 417 aa, Homo sapiens
MAAPGSARRPLLLLLLLLLLGLMHCASAAMFMVKNGNGTACIMANFSAAFSVNYDTKSGPKNMTFDLPSDATVVLNRSSCGKENTSDPSLVIAFGRGHTLTLNFTRNATRYSVQLMSFVYNLSDTHLFPNASSKEIKTVESITDIRADIDKKYRCVSGTQVHMNNVTVTLHDATIQAYLSNSSFSRGETRCEQDRPSPTTAPPAPPSPSPSPVPKSPSVDKYNVSGTNGTCLLASMGLQLNLTYERKDNTTVTRLLNINPNKTSASGSCGAHLVTLELHSEGTTVLLFQFGMNASSSRFFLQGIQLNTILPDARDPAFKAANGSLRALQATVGNSYKCNAEEHVRVTKAFSVNIFKVWVQAFKVEGGQFGSVEECLLDENSMLIPIAVGGALAGLVLIVLIAYLVGRKRSHAGYQTI

SEQ ID NO: 52157 - protein, 364 aa, Homo sapiens
MAAPGSARRPLLLLLLLLLLGLMHCASAAMFMVKNGNGTACIMANFSAAFSVNYDTKSGPKNMTFDLPSDATVVLNRSSCGKENTSDPSLVIAFGRGHTLTLNFTRNATRYSVQLMSFVYNLSDTHLFPNASSKETRCEQDRPSPTTAPPAPPSPSPSPVPKSPSVDKYNVSGTNGTCLLASMGLQLNLTYERKDNTTVTRLLNINPNKTSASGSCGAHLVTLELHSEGTTVLLFQFGMNASSSRFFLQGIQLNTILPDARDPAFKAANGSLRALQATVGNSYKCNAEEHVRVTKAFSVNIFKVWVQAFKVEGGQFGSVEECLLDENSMLIPIAVGGALAGLVLIVLIAYLVGRKRSHAGYQTI

SEQ ID NO: 52158 - protein, 410 aa, Homo sapiens
MVCFRLFPVPGSGLVLVCLVLGAVRSYALELNLTDSENATCLYAKWQMNFTVRYETTNKTYKTVTISDHGTVTYNGSICGDDQNGPKIAVQFGPGFSWIANFTKAASTYSIDSVSFSYNTGDNTTFPDAEDKGILTVDELLAIRIPLNDLFRCNSLSTLEKNDVVQHYWDVLVQAFVQNGTVSTNEFLCDKDKTSTVAPTIHTTVPSPTTTPTPKEKPEAGTYSVNNGNDTCLLATMGLQLNITQDKVASVININPNTTHSTGSCRSHTALLRLNSSTIKYLDFVFAVKNENRFYLKEVNISMYLVNGSVFSIANNNLSYWDAPLGSSYMCNKEQTVSVSGAFQINTFDLRVQPFNVTQGKYSTAQDCSADDDNFLVPIAVGAALAGVLILVLLAYFIGLKHHHAGYEQF

SEQ ID NO: 52159 - protein, 410 aa, Homo sapiens
MVCFRLFPVPGSGLVLVCLVLGAVRSYALELNLTDSENATCLYAKWQMNFTVRYETTNKTYKTVTISDHGTVTYNGSICGDDQNGPKIAVQFGPGFSWIANFTKAASTYSIDSVSFSYNTGDNTTFPDAEDKGILTVDELLAIRIPLNDLFRCNSLSTLEKNDVVQHYWDVLVQAFVQNGTVSTNEFLCDKDKTSTVAPTIHTTVPSPTTTPTPKEKPEAGTYSVNNGNDTCLLATMGLQLNITQDKVASVININPNTTHSTGSCRSHTALLRLNSSTIKYLDFVFAVKNENRFYLKEVNISMYLVNGSVFSIANNNLSYWDAPLGSSYMCNKEQTVSVSGAFQINTFDLRVQPFNVTQGKYSTAQECSLDDDTILIPIIVGAGLSGLIIVIVIAYVIGRRKSYAGYQTL

SEQ ID NO: 52160 - protein, 411 aa, Homo sapiens
MVCFRLFPVPGSGLVLVCLVLGAVRSYALELNLTDSENATCLYAKWQMNFTVRYETTNKTYKTVTISDHGTVTYNGSICGDDQNGPKIAVQFGPGFSWIANFTKAASTYSIDSVSFSYNTGDNTTFPDAEDKGILTVDELLAIRIPLNDLFRCNSLSTLEKNDVVQHYWDVLVQAFVQNGTVSTNEFLCDKDKTSTVAPTIHTTVPSPTTTPTPKEKPEAGTYSVNNGNDTCLLATMGLQLNITQDKVASVININPNTTHSTGSCRSHTALLRLNSSTIKYLDFVFAVKNENRFYLKEVNISMYLVNGSVFSIANNNLSYWDAPLGSSYMCNKEQTVSVSGAFQINTFDLRVQPFNVTQGKYSTAEECSADSDLNFLIPVAVGVALGFLIIVVFISYMIGRRKSRTGYQSV

SEQ ID NO: 52161 - protein, 300 aa, Homo sapiens
MVCFRLFPVPGSGLVLVCLVLGILTVDELLAIRIPLNDLFRCNSLSTLEKNDVVQHYWDVLVQAFVQNGTVSTNEFLCDKDKTSTVAPTIHTTVPSPTTTPTPKEKPEAGTYSVNNGNDTCLLATMGLQLNITQDKVASVININPNTTHSTGSCRSHTALLRLNSSTIKYLDFVFAVKNENRFYLKEVNISMYLVNGSVFSIANNNLSYWDAPLGSSYMCNKEQTVSVSGAFQINTFDLRVQPFNVTQGKYSTAEECSADSDLNFLIPVAVGVALGFLIIVVFISYMIGRRKSRTGYQSV

SEQ ID NO: 52162 - protein, 363 aa, Homo sapiens
MNFTVRYETTNKTYKTVTISDHGTVTYNGSICGDDQNGPKIAVQFGPGFSWIANFTKAASTYSIDSVSFSYNTGDNTTFPDAEDKGILTVDELLAIRIPLNDLFRCNSLSTLEKNDVVQHYWDVLVQAFVQNGTVSTNEFLCDKDKTSTVAPTIHTTVPSPTTTPTPKEKPEAGTYSVNNGNDTCLLATMGLQLNITQDKVASVININPNTTHSTGSCRSHTALLRLNSSTIKYLDFVFAVKNENRFYLKEVNISMYLVNGSVFSIANNNLSYWDAPLGSSYMCNKEQTVSVSGAFQINTFDLRVQPFNVTQGKYSTAQECSLDDDTILIPIIVGAGLSGLIIVIVIAYVIGRRKSYAGYQTL

SEQ ID NO: 52163 - protein, 148 aa, Homo sapiens
MKALIVLGLVLLSVTVQGKVFERCELARTLKRLGMDGYRGISLANWMCLAKWESGYNTRATNYNAGDRSTDYGIFQINSRYWCNDGKTPGAVNACHLSCSALLQDNIADAVACAKRVVRDPQGIRAWVAWRNRCQNRDVRQYVQGCGV

SEQ ID NO: 52164 - protein, 194 aa, Homo sapiens
MQDAPLSCLSPTKWSSVSSADSTEKSASAAGTRNLPFQFCLRQALRMKAAGILTLIGCLVTGAESKIYTRCKLAKIFSRAGLDNYWGFSLGNWICMAYYESGYNTTAQTVLDDGSIDYGIFQINSFAWCRRGKLKENNHCHVACSALVTDDLTDAIICAKKIVKETQGMNYWQGWKKHCEGRDLSDWKKDCEVS

SEQ ID NO: 52165 - protein, 146 aa, Homo sapiens
MKASVVLSLLGYLVVPSGAYILGRCTVAKKLHDGGLDYFEGYSLENWVCLAYFESKFNPMAIYENTREGYTGFGLFQMRGSDWCGDHGRNRCHMSCSALLNPNLEKTIKCAKTIVKGKEGMGAWPTWSRYCQYSDTLARWLDGCKL

SEQ ID NO: 52166 - protein, 146 aa, Homo sapiens; identical to SEQ ID NO: 52165

SEQ ID NO: 52167 - protein, 148 aa, Homo sapiens
MTKALLIYLVSSFLALNQASLISRCDLAQVLQLEDLDGFEGYSLSDWLCLAFVESKFNISKINENADGSFDYGLFQINSHYWCNDYKSYSENLCHVDCQDLLNPNLLAGIHCAKRIVSGARGMNNWVEWRLHCSGRPLFYWLTGCRLR

SEQ ID NO: 52168 - protein, 148 aa, Homo sapiens; identical to SEQ ID NO: 52167

SEQ ID NO: 52169 - protein, 148 aa, Homo sapiens; identical to SEQ ID NO: 52167

SEQ ID NO: 52170 - protein, 417 aa, Homo sapiens
MRFAWTVLLLGPLQLCALVHCAPPAAGQQQPPREPPAAPGAWRQQIQWENNGQVFSLLSLGSQYQPQRRRDPGAAVPGAANASAQQPRTPILLIRDNRTAAARTRTAGSSGVTAGRPRPTARHWFQAGYSTSRAREAGASRAENQTAPGEVPALSNLRPPSRVDGMVGDDPYNPYKYSDDNPYYNYYDTYERPRPGGRYRPGYGTGYFQYGLPDLVADPYYIQASTYVQKMSMYNLRCAAEENCLASTAYRADVRDYDHRVLLRFPQRVKNQGTSDFLPSRPRYSWEWHSCHQHYHSMDEFSHYDLLDANTQRRVAEGHKASFCLEDTSCDYGYHRRFACTAHTQGLSPGCYDTYGADIDCQWIDITDVKPGNYILKVSVNPSYLVPESDYTNNVVRCDIRYTGHHAYASGCTISPY

SEQ ID NO: 52171 - protein, 40 aa, Homo sapiens
MRFAWTVLLLGPLQLCALVHCAPPAAGQQQPPREPPAAPG

SEQ ID NO: 52172 - protein, 377 aa, Homo sapiens
MRFAWTVLLLGPLQLCALVHCAPPAAGQQQPPREPPAAPGAASAQQPRTPILLIRDNRTAAARTRTAGSSGVTAGRPRPTARHWFQAGYSTSRAREAGASRAENQTAPGEVPALSNLRPPSRVDGMVGDDPYNPYKYSDDNPYYNYYDTYERPRPGGRYRPGYGTGYFQYGLPDLVADPYYIQASTYVQKMSMYNLRCAAEENCLASTAYRADVRDYDHRVLLRFPQRVKNQGTSDFLPSRPRYSWEWHSCHQHYHSMDEFSHYDLLDANTQRRVAEGHKASFCLEDTSCDYGYHRRFACTAHTQGLSPGCYDTYGADIDCQWIDITDVKPGNYILKVSVNPSYLVPESDYTNNVVRCDIRYTGHHAYASGCTISPY

SEQ ID NO: 52173 - protein, 774 aa, Homo sapiens
MERPLCSHLCSCLAMLALLSPLSLAQYDSWPHYPEYFQQPAPEYHQPQAPANVAKIQLRLAGQKRKHSEGRVEVYYDGQWGTVCDDDFSIHAAHVVCRELGYVEAKSWTASSSYGKGEGPIWLDNLHCTGNEATLAACTSNGWGVTDCKHTEDVGVVCSDKRIPGFKFDNSLINQIENLNIQVEDIRIRAILSTYRKRTPVMEGYVEVKEGKTWKQICDKHWTAKNSRVVCGMFGFPGERTYNTKVYKMFASRRKQRYWPFSMDCTGTEAHISSCKLGPQVSLDPMKNVTCENGLPAVVSCVPGQVFSPDGPSRFRKAYKPEQPLVRLRGGAYIGEGRVEVLKNGEWGTVCDDKWDLVSASVVCRELGFGSAKEAVTGSRLGQGIGPIHLNEIQCTGNEKSIIDCKFNAESQGCNHEEDAGVRCNTPAMGLQKKLRLNGGRNPYEGRVEVLVERNGSLVWGMVCGQNWGIVEAMVVCRQLGLGFASNAFQETWYWHGDVNSNKVVMSGVKCSGTELSLAHCRHDGEDVACPQGGVQYGAGVACSETAPDLVLNAEMVQQTTYLEDRPMFMLQCAMEENCLSASAAQTDPTTGYRRLLRFSSQIHNNGQSDFRPKNGRHAWIWHDCHRHYHSMEVFTHYDLLNLNGTKVAEGHKASFCLEDTECEGDIQKNYECANFGDQGITMGCWDMYRHDIDCQWVDITDVPPGDYLFQVVINPNFEVAESDYSNNIMKCRSRYDGHRIWMYNCHIGGSFSEETEKKFEHFSGLLNNQLSPQ

SEQ ID NO: 52174 - protein, 151 aa, Homo sapiens
MERPLCSHLCSCLAMLALLSPLSLAQYDSWPHYPEYFQQPAPEYHQPQAPANVAKIQLRLAGQKRKHSEGRVEVYYDGQWGTVCDDDFSIHAAHVVCRELGYVEAKSWTASSSYGKGEGPIWLDNLHCTGNEATLAACTSNGWGVTDCKHT

SEQ ID NO: 52175 - protein, 96 aa, Homo sapiens
MERPLCSHLCSCLAMLALLSPLSLAQYDSWPHYPEYFQQPAPEYHQPQAPANVAKIQLRLAGQKRKHSEGRVEVYYDGQWGTVCDDDFSIHAAHVV

SEQ ID NO: 52176 - protein, 139 aa, Homo sapiens
MERPLCSHLCSCLAMLALLSPLSLAQYDSWPHYPEYFQQPAPEYHQPQAPANVAKIQLRLAGQKRKHSEGRVEVYYDGQWGTVCDDDFSIHAAHVVCRELGYVEAKSWTASSSYGKGEGPIWLDNLHCTGNEATLAACT

SEQ ID NO: 52177 - protein, 753 aa, Homo sapiens
MRPVSVWQWSPWGLLLCLLCSSCLGSPSPSTGPEKKAGSQGLRFRLAGFPRKPYEGRVEIQRAGEWGTICDDDFTLQAAHILCRELGFTEATGWTHSAKYGPGTGRIWLDNLSCSGTEQSVTECASRGWGNSDCTHDEDAGVICKDQRLPGFSDSNVIEVEHHLQVEEVRIRPAVGWGRRPLPVTEGLVEVRLPDGWSQVCDKGWSAHNSHVVCGMLGFPSEKRVNAAFYRLLAQRQQHSFGLHGVACVGTEAHLSLCSLEFYRANDTARCPGGGPAVVSCVPGPVYAASSGQKKQQQSKPQGEARVRLKGGAHPGEGRVEVLKASTWGTVCDRKWDLHAASVVCRELGFGSAREALSGARMGQGMGAIHLSEVRCSGQELSLWKCPHKNITAEDCSHSQDAGVRCNLPYTGAETRIRLSGGRSQHEGRVEVQIGGPGPLRWGLICGDDWGTLEAMVACRQLGLGYANHGLQETWYWDSGNITEVVMSGVRCTGTELSLDQCAHHGTHITCKRTGTRFTAGVICSETASDLLLHSALVQETAYIEDRPLHMLYCAAEENCLASSARSANWPYGHRRLLRFSSQIHNLGRADFRPKAGRHSWVWHECHGHYHSMDIFTHYDILTPNGTKVAEGHKASFCLEDTECQEDVSKRYECANFGEQGITVGCWDLYRHDIDCQWIDITDVKPGNYILQVVINPNFEVAESDFTNNAMKCNCKYDGHRIWVHNCHIGDAFSEEANRRFERYPGQTSNQII

SEQ ID NO: 52178 - protein, 608 aa, Homo sapiens
MRPVSVWQWSPWGLLLCLLCSSCLGSPSPSTGPEKKAGSQGLRFRLAGFPRKPYEGRVEIQRAGEWGTICDDDFTLQAAHILCRELGFTEATGWTHSAKYGPGTGRIWLDNLSCSGTEQSVTECASRGWGNSDCTHDEDAGVICKDQRLPGFSDSNVIEARVRLKGGAHPGEGRVEVLKASTWGTVCDRKWDLHAASVVCRELGFGSAREALSGARMGQGMGAIHLSEVRCSGQELSLWKCPHKNITAEDCSHSQDAGVRCNLPYTGAETRIRLSGGRSQHEGRVEVQIGGPGPLRWGLICGDDWGTLEAMVACRQLGLGYANHGLQETWYWDSGNITEVVMSGVRCTGTELSLDQCAHHGTHITCKRTGTRFTAGVICSETASDLLLHSALVQETAYIEDRPLHMLYCAAEENCLASSARSANWPYGHRRLLRFSSQIHNLGRADFRPKAGRHSWVWHECHGHYHSMDIFTHYDILTPNGTKVAEGHKASFCLEDTECQEDVSKRYECANFGEQGITVGCWDLYRHDIDCQWIDITDVKPGNYILQVVINPNFEVAESDFTNNAMKCNCKYDGHRIWVHNCHIGDAFSEEANRRFERYPGQTSNQII

SEQ ID NO: 52179 - protein, 697 aa, Homo sapiens
MRPVSVWQWSPWGLLLCLLCSSCLGSPSPSTGPEKKAGSQGLRFRLAGFPRKPYEGRVEIQRAGEWGTICDDDFTLQAAHILCRELGFTEATGWTHSAKYGPGTGRIWLDNLSCSGTEQSVTECASRGWGNSDCTHDEDAGVICKDQRLPGFSDSNVIEVEHHLQVEEVRIRPAVGWGRRPLPVTEGLVEVRLPDGWSQVCDKGWSAHNSHVVCGMLGFPSEKRVNAAFYRLLAQRQQHSFGLHGVACVGTEAHLSLCSLEFYRANDTARCPGGGPAVVSCVPGPVYAASSGQKKQQQSKPQGEARVRLKGGAHPGEGRVEVLKASTWGTVCDRKWDLHAASVVCRELGFGSAREALSGARMGQGMGAIHLSEVRCSGQELSLWKCPHKNITAEDCSHSQDAGVRCNLPYTGAETRETWYWDSGNITEVVMSGVRCTGTELSLDQCAHHGTHITCKRTGTRFTAGVICSETASDLLLHSALVQETAYIEDRPLHMLYCAAEENCLASSARSANWPYGHRRLLRFSSQIHNLGRADFRPKAGRHSWVWHECHGHYHSMDIFTHYDILTPNGTKVAEGHKASFCLEDTECQEDVSKRYECANFGEQGITVGCWDLYRHDIDCQWIDITDVKPGNYILQVVINPNFEVAESDFTNNAMKCNCKYDGHRIWVHNCHIGDAFSEEANRRFERYPGQTSNQII

SEQ ID NO: 52180 - protein, 303 aa, Homo sapiens
MRPVSVWQWSPWGLLLCLLCSSCLGSPSPSTGPEKKAGSQGLRFRLAGFPRKPYEGRVEIQRAGEWGTICDDDFTLQAAHILCRELGFTEATGWTHSAKYGPGTGRIWLDNLSCSGTEQSVTECASRGWGNSDCTHDEDAGVICKDQRLPGFSDSNVIEVEHHLQVEEVRIRPAVGWGRRPLPVTEGLVEVRLPDGWSQVCDKGWSAHNSHVVCGMLGFPSEKRVNAAFYRLLAQRQQHSFGLHGVACVGTEAHLSLCSLEFYRANDTARCPGGGPAVVSCVPGPVYAASSGQKKQQQSKPQG

SEQ ID NO: 52181 - protein, 756 aa, Homo sapiens
MAWSPPATLFLFLLLLGQPPPSRPQSLGTTKLRLVGPESKPEEGRLEVLHQGQWGTVCDDNFAIQEATVACRQLGFEAALTWAHSAKYGQGEGPIWLDNVRCVGTESSLDQCGSNGWGVSDCSHSEDVGVICHPRRHRGYLSETVSNALGPQGRRLEEVRLKPILASAKQHSPVTEGAVEVKYEGHWRQVCDQGWTMNNSRVVCGMLGFPSEVPVDSHYYRKVWDLKMRDPKSRLKSLTNKNSFWIHQVTCLGTEPHMANCQVQVAPARGKLRPACPGGMHAVVSCVAGPHFRPPKTKPQRKGSWAEEPRVRLRSGAQVGEGRVEVLMNRQWGTVCDHRWNLISASVVCRQLGFGSAREALFGARLGQGLGPIHLSEVRCRGYERTLSDCPALEGSQNGCQHENDAAVRCNVPNMGFQNQVRLAGGRIPEEGLLEVQVEVNGVPRWGSVCSENWGLTEAMVACRQLGLGFAIHAYKETWFWSGTPRAQEVVMSGVRCSGTELALQQCQRHGPVHCSHGGGRFLAGVSCMDSAPDLVMNAQLVQETAYLEDRPLSQLYCAHEENCLSKSADHMDWPYGYRRLLRFSTQIYNLGRTDFRPKTGRDSWVWHQCHRHYHSIEVFTHYDLLTLNGSKVAEGHKASFCLEDTNCPTGLQRRYACANFGEQGVTVGCWDTYRHDIDCQWVDITDVGPGNYIFQVIVNPHYEVAESDFSNNMLQCRCKYDGHRVWLHNCHTGNSYPANAELSLEQEQRLRNNLI

SEQ ID NO: 52182 - protein, 597 aa, Homo sapiens
MAAVQAAEVKVDGSEPKLSKNELKRRLKAEKKVAEKEAKQKELSEKQLSQATAAATNHTTDNGVGPEEESVDPNQYYKIRSQAIHQLKVNGEDPYPHKFHVDISLTDFIQKYSHLQPGDHLTDITLKVAGRIHAKRASGGKLIFYDLRGEGVKLQVMANSRNYKSEEEFIHINNKLRRGDIIGVQGNPGKTKKGELSIIPYEITLLSPCLHMLPHLHFGLKDKETRYRQRYLDLILNDFVRQKFIIRSKIITYIRSFLDELGFLEIETPMMNIIPGGAVAKPFITYHNELDMNLYMRIAPELYHKMLVVGGIDRVYEIGRQFRNEGIDLTHNPEFTTCEFYMAYADYHDLMEITEKMVSGMVKHITGSYKVTYHPDGPEGQAYDVDFTPPFRRINMVEELEKALGMKLPETNLFETEETRKILDDICVAKAVECPPPRTTARLLDKLVGEFLEVTCINPTFICDHPQIMSPLAKWHRSKEGLTERFELFVMKKEICNAYTELNDPMRQRQLFEEQAKAKAAGDDEAMFIDENFCTALEYGLPPTAGWGMGIDRVAMFLTDSNNIKEVLLFPAMKPEDKKENVATTDTLESTTVGTSV

SEQ ID NO: 52183 - protein, 625 aa, Homo sapiens
MLTQAAVRLVRGSLRKTSWAEWGHRELRLGQLAPFTAPHKDKSFSDQRSELKRRLKAEKKVAEKEAKQKELSEKQLSQATAAATNHTTDNGVGPEEESVDPNQYYKIRSQAIHQLKVNGEDPYPHKFHVDISLTDFIQKYSHLQPGDHLTDITLKVAGRIHAKRASGGKLIFYDLRGEGVKLQVMANSRNYKSEEEFIHINNKLRRGDIIGVQGNPGKTKKGELSIIPYEITLLSPCLHMLPHLHFGLKDKETRYRQRYLDLILNDFVRQKFIIRSKIITYIRSFLDELGFLEIETPMMNIIPGGAVAKPFITYHNELDMNLYMRIAPELYHKMLVVGGIDRVYEIGRQFRNEGIDLTHNPEFTTCEFYMAYADYHDLMEITEKMVSGMVKHITGSYKVTYHPDGPEGQAYDVDFTPPFRRINMVEELEKALGMKLPETNLFETEETRKILDDICVAKAVECPPPRTTARLLDKLVGEFLEVTCINPTFICDHPQIMSPLAKWHRSKEGLTERFELFVMKKEICNAYTELNDPMRQRQLFEEQAKAKAAGDDEAMFIDENFCTALEYGLPPTAGWGMGIDRVAMFLTDSNNIKEVLLFPAMKPEDKKENVATTDTLESTTVGTSV

SEQ ID NO: 52184 - protein, 522 aa, Homo sapiens
MQPWHGKAMQRASEAGATAPKASARNARGAPMDPTESPAAPEAALPKAGKFGPARKSGSRQKKSAPDTQERPPVRATGARAKKAPQRAQDTQPSDATSAPGAEGLEPPAAREPALSRAGSCRQRGARCSTKPRPPPGPWDVPSPGLPVSAPILVRRDAAPGASKLRAVLEKLKLSRDDISTAAGMVKGVVDHLLLRLKCDSAFRGVGLLNTGSYYEHVKISAPNEFDVMFKLEVPRIQLEEYSNTRAYYFVKFKRNPKENPLSQFLEGEILSASKMLSKFRKIIKEEINDIKDTDVIMKRKRGGSPAVTLLISEKISVDITLALESKSSWPASTQEGLRIQNWLSAKVRKQLRLKPFYLVPKHAKEGNGFQEETWRLSFSHIEKEILNNHGKSKTCCENKEEKCCRKDCLKLMKYLLEQLKERFKDKKHLDKFSSYHVKTAFFHVCTQNPQDSQWDRKDLGLCFDNCVTYFLQCLRTEKLENYFIPEFNLFSSNLIDKRSKEFLTKQIEYERNNEFPVFDEF

SEQ ID NO: 52185 - protein, 447 aa, Homo sapiens
MQPWHGKAMQRASEAGATAPKASARNARGAPMDPTESPAAPEAALPKAGKFGPARKSGSRQKKSAPDTQERPPVRATGARAKKAPQRAQDTQPSDATSAPGAEGLEPPAAREPALSRAGSCRQRGARCSTKPRPPPGPWDVPSPGLPVSAPILVRRDAAPGASKLRAVLEKLKLSRDDISTAAGMVKGVVDHLLLRLKCDSAFRGVGLLNTGSYYEHVKISAPNEFDVMFKLEVPRIQLEEYSNTRAYYFVKFKRNPKENPLSQFLEGEILSASKMLSKFRKIIKEEINDIKDTDVIMKRKRGGSPAVTLLISEKISVDITLALESKSSWPASTQEGLRIQNWLSAKVRKQLRLKPFYLVPKHAKEGNGFQEETWRLSFSHIEKEILNNHGKSKTCCENKEEKCCRKDCLKLMKYLLEQLKERFKDKKHLDKFSSYHVKTAFFHRLY

SEQ ID NO: 52186 - protein, 359 aa, Homo sapiens
MIAAQAKLVYHLNKYYNEKCQARKAAIAKTIREVCKVVSDVLKEVEVQEPRFISSLNEMDNRYEGLEVISPTEFEVVLYLNQMGVFNFVDDGSLPGCAVLKLSDGRKRSMSLWVEFITASGYLSARKIRSRFQTLVAQAVDKCSYRDVVKMVADTSEVKLRIRDRYVVQITPAFKCTGIWPRSAAHWPLPHIPWPGPNRVAEVKAEGFNLLSKECHSLAGKQSSAESDAWVLQFAEAENRLQMGGCRKKCLSILKTLRDRHLELPGQPLNNYHMKTLVSYECEKHPRESDWDESCLGDRLNGILLQLISCLQCRRCPHYFLPNLDLFQGKPHSALENAAKQTWRLAREILTNPKSLEKL

SEQ ID NO: 52187 - protein, 425 aa, Homo sapiens
MYPSNKKKKVWREEKERLLKMTLEERRKEYLRDYIPLNSILSWKEEMKGKGQNDEENTQETSQVKKSLTEKVSLYRGDITLLEVDAIVNAANASLLGGGGVDGCIHRAAGPCLLAECRNLNGCDTGHAKITCGYDLPAKYVIHTVGPIARGHINGSHKEDLANCYKSSLKLVKENNIRSVAFPCISTGIYGFPNEPAAVIALNTIKEWLAKNHHEVDRIIFCVFLEVDFKIYKKKMNEFFSVDDNNEEEEDVEMKEDSDENGPEEKQSVEEMEEQSQDADGVNTVTVPGPASEEAVEDCKDEDFAKDENITKGGEVTDHSVRDQDHPDGQENDSTKNEIKIETESQSSYMETEELSSNQEDAVIVEQPEVIPLTEDQEEKEGEKAPGEDTPRMPGKSEGSSDLENTPGPDAGAQDEAKEQRNGTK

SEQ ID NO: 52188 - protein, 448 aa, Homo sapiens
MYPSNKKKKVWREEKERLLKMTLEERRKEYLRDYIPLNSILSWKEEMKGKGQNDEENTQETSQVKKSLTEKVSLYRGDITLLEVDAIVNAANASLLGGGGVDGCIHRAAGPCLLAECRNLNGCDTGHAKITCGYDLPAKYVIHTVGPIARGHINGSHKEDLANCYKSSLKLVKENNIRSVAFPCISTGIYGFPNEPAAVIALNTIKEWLAKNHHEVDRIIFCVFLEVDFKIYKKKMNEFFSVDDNNEEEEDVEMKEDSDENGPEEKQSVEEMEEQSQDADGVNTVTVPGPASEEAVEDCKDEDFAKDENITKGGEVTDHSVRDQDHPDGQENDSTKNEIKIETESQSSYMETEELSSNQEDAVIVEQPEVIPLTEDQEEKEGEKAPGEDTPRMPGKSEGSSDLENTPGPDVEMNSQVDKVNDPTESQQEDQLIAGAQDEAKEQRNGTK

SEQ ID NO: 52189 - protein, 213 aa, Homo sapiens
MNEFFSVDDNNEEEEDVEMKEDSDENGPEEKQSVEEMEEQSQDADGVNTVTVPGPASEEAVEDCKDEDFAKDENITKGGEVTDHSVRDQDHPDGQENDSTKNEIKIETESQSSYMETEELSSNQEDAVIVEQPEVIPLTEDQEEKEGEKAPGEDTPRMPGKSEGSSDLENTPGPDVEMNSQVDKVNDPTESQQEDQLIAGAQDEAKEQRNGTK

SEQ ID NO: 52190 - protein, 213 aa, Homo sapiens; identical to SEQ ID NO: 52189

SEQ ID NO: 52191 - protein, 355 aa, Homo sapiens
MAVQESAAQLSMTLKVQEYPTLKVPYETLNKRFRAAQKNIDRETSHVTMVVAELEKTLSGCPAVDSVVSLLDGVVEKLSVLKRKAVESIQAEDESAKLCKRRIEHLKEHSSDQPAAASVWKRKRMDRMMVEHLLRCGYYNTAVKLARQSGIESCLEFSLRIQEFIELIRQNKRLDAVRHARKHFSQAEGSQLDEVRQAMGMLAFPPDTHISPYKDLLDPARWRMLIQQFRYDNYRLHQLGNNSVFTLTLQAGLSAIKTPQCYKEDGSSKSPDCPVCSRSLNKLAQPLPMAHCANSRLVCKISGDVMNENNPPMMLPNGYVYGYNSLLSIRQDDKVVCPRTKEVFHFSQAEKVYIM

SEQ ID NO: 52192 - protein, 396 aa, Homo sapiens
MAVQESAAQLSMTLKVQEYPTLKVPYETLNKRFRAAQKNIDRETSHVTMVVAELEKTLSGCPAVDSVVSLLDGVVEKLSVLKRKAVESIQAEDESAKLCKRRIEHLKEHSSDQPAAASVWKRKRMDRMMVEHLLRCGYYNTAVKLARQSGIEDLVNIEMFLTAKEVEESLERRETATCLAWCHDNKSRLRKMKSCLEFSLRIQEFIELIRQNKRLDAVRHARKHFSQAEGSQLDEVRQAMGMLAFPPDTHISPYKDLLDPARWRMLIQQFRYDNYRLHQLGNNSVFTLTLQAGLSAIKTPQCYKEDGSSKSPDCPVCSRSLNKLAQPLPMAHCANSRLVCKISGDVMNENNPPMMLPNGYVYGYNSLLSIRQDDKVVCPRTKEVFHFSQAEKVYIM

SEQ ID NO: 52193 - protein, 328 aa, Homo sapiens
MAVQESAAQLSMTLKVQEYPTLKVPYETLNKRFRAAQKNIDRETSHVTMVVAELEKTLSGCPAVDSVVSLLDGVVEKLSVLKRKAVESIQAEDESAKLCKRRIEHLKEHSSDQPAAASVWKRKRMDRMMVEHLLRCGYYNTAVKLARQSGIETCKKALQPSRREPAGRGAPGHGHAGLPARHAHLPVQGPSGPCTVADADPAVPVRQLPTTPAGKQFCVHPHPAGWPLSHQEQCYKEDGSSKSPDCPVCSRSLNKLAQPLPMAHCANSRLVCKISGDVMNENNPPMMLPNGYVYGYNSLLSIRQDDKVVCPRTKEVFHFSQAEKVYIM

SEQ ID NO: 52194 - protein, 317 aa, Homo sapiens
MTLKVQEYPTLKVPYETLNKRFRAAQKNIDRETSHVTMVVAELEKTLSGCPAVDSVVSLLDGVVEKLSVLKRKDLVNIEMFLTAKEVEESLERRETATCLAWCHDNKSRLRKMKSCLEFSLRIQEFIELIRQNKRLDAVRHARKHFSQAEGSQLDEVRQAMGMLAFPPDTHISPYKDLLDPARWRMLIQQFRYDNYRLHQLGNNSVFTLTLQAGLSAIKTPQCYKEDGSSKSPDCPVCSRSLNKLAQPLPMAHCANSRLVCKISGDVMNENNPPMMLPNGYVYGYNSLLSIRQDDKVVCPRTKEVFHFSQAEKVYIM

SEQ ID NO: 52195 - protein, 434 aa, Homo sapiens
MAVQESAAQLSMTLKVQEYPTLKVPYETLNKRFRAAQKNIDRETSHVTMVVAELEKTLSGCPAVDSVVSLLDGVVEKLSVLKRKAVESIQAEDESAKLCKRRIEHLKEHSSDQPAAASVWKRKRMDRMMVEHLLRCGYYNTAVKLARQSGIEDLVNIEMFLTAKEVEESLERRETATCLAWCHDNKSRLRKMKGRQNKHEAKTGRKSRAASSSPKESLDLGMETLKGKPELSCLEFSLRIQEFIELIRQNKRLDAVRHARKHFSQAEGSQLDEVRQAMGMLAFPPDTHISPYKDLLDPARWRMLIQQFRYDNYRLHQLGNNSVFTLTLQAGLSAIKTPQCYKEDGSSKSPDCPVCSRSLNKLAQPLPMAHCANSRLVCKISGDVMNENNPPMMLPNGYVYGYNSLLSIRQDDKVVCPRTKEVFHFSQAEKVYIM

SEQ ID NO: 52196 - protein, 348 aa, Homo sapiens
MVVAELEKTLSGCPAVDSVVSLLDGVVEKLSVLKRKAVESIQAEDESAKLCKRRIEHLKEHSSDQPAAASVWKRKRMDRMMVEHLLRCGYYNTAVKLARQSGIEDLVNIEMFLTAKEVEESLERRETATCLAWCHDNKSRLRKMKSCLEFSLRIQEFIELIRQNKRLDAVRHARKHFSQAEGSQLDEVRQAMGMLAFPPDTHISPYKDLLDPARWRMLIQQFRYDNYRLHQLGNNSVFTLTLQAGLSAIKTPQCYKEDGSSKSPDCPVCSRSLNKLAQPLPMAHCANSRLVCKISGDVMNENNPPMMLPNGYVYGYNSLLSIRQDDKVVCPRTKEVFHFSQAEKVYIM

SEQ ID NO: 52197 - protein, 395 aa, Homo sapiens
MWTLRATGREVGSSSCEDTVAPVPYETLNKRFRAAQKNIDRETSHVTMVVAELEKTLSGCPAVDSVVSLLDGVVEKLSVLKRKAVESIQAEDESAKLCKRRIEHLKEHSSDQPAAASVWKRKRMDRMMVEHLLRCGYYNTAVKLARQSGIEDLVNIEMFLTAKEVEESLERRETATCLAWCHDNKSRLRKMKSCLEFSLRIQEFIELIRQNKRLDAVRHARKHFSQAEGSQLDEVRQAMGMLAFPPDTHISPYKDLLDPARWRMLIQQFRYDNYRLHQLGNNSVFTLTLQAGLSAIKTPQCYKEDGSSKSPDCPVCSRSLNKLAQPLPMAHCANSRLVCKISGDVMNENNPPMMLPNGYVYGYNSLLSIRQDDKVVCPRTKEVFHFSQAEKVYIM

SEQ ID NO: 52198 - protein, 328 aa, Homo sapiens
MAVQESAAQLSMTLKVQEYPTLKVPYETLNKRFRAAQKNIDRETSHVTMVVAELEKTLSGCPAVDSVVSLLDGVVEKLSVLKRKAVESIQAEDESAKLCKRRIEHLKEHSSDQPAAASVWKRKRMDRMMVEHLLRCGYYNTAVKLARQSGIETCKKALQPSRREPAGRGAPGHGHAGLPARHAHLPVQGPSGPCTVADADPAVPVRQLPTTPAGKQFCVHPHPAGWPLSHQDTCYKEDGSSKSPDCPVCSRSLNKLAQPLPMAHCANSRLVCKISGDVMNENNPPMMLPNGYVYGYNSLLSIRQDDKVVCPRTKEVFHFSQAEKVYIM

SEQ ID NO: 52199 - protein, 375 aa, Homo sapiens
MAVQESAAQLSMTLKVQEYPTLKVPYETLNKRFRAAQKNIDRETSHVTMVVAELEKLSVLKRKAVESIQAEDESAKLCKRRIEHLKEHSSDQPAAASVWKRKRMDRMMVEHLLRCGYYNTAVKLARQSGIEDLVNIEMFLTAKEVEESLERRETATCLAWCHDNKSRLRKMKSCLEFSLRIQEFIELIRQNKRLDAVRHARKHFSQAEGSQLDEVRQAMGMLAFPPDTHISPYKDLLDPARWRMLIQQFRYDNYRLHQLGNNSVFTLTLQAGLSAIKTPQCYKEDGSSKSPDCPVCSRSLNKLAQPLPMAHCANSRLVCKISGDVMNENNPPMMLPNGYVYGYNSLLSIRQDDKVVCPRTKEVFHFSQAEKVYIM

SEQ ID NO: 52200 - protein, 115 aa, Homo sapiens
MPMFIVNTNVPRASVPDGFLSELTQQLAQATGKPPQYIAVHVVPDQLMAFGGSSEPCALCSLHSIGKIGGAQNRSYSKLLCGLLAERLRISPDRVYINYYDMNAANVGWNNSTFA

SEQ ID NO: 52201 - protein, 520 aa, Homo sapiens
MRNKKILKEDELLSETQQAAFHQIAMEPFEINVPKPKRRNGVNFSLAVVVIYLILLTAGAGLLVVQVLNLQARLRVLEMYFLNDTLAAEDSPSFSLLQSAHPGEHLAQGASRLQVLQAQLTWVRVSHEHLLQRVDNFTQNPGMFRIKGEQGAPGLQGHKGAMGMPGAPGPPGPPAEKGAKGAMGRDGATGPSGPQGPPGVKGEAGLQGPQGAPGKQGATGTPGPQGEKGSKGDGGLIGPKGETGTKGEKGDLGLPGSKGDRGMKGDAGVMGPPGAQGSKGDFGRPGPPGLAGFPGAKGDQGQPGLQGVPGPPGAVGHPGAKGEPGSAGSPGRAGLPGSPGSPGATGLKGSKGDTGLQGQQGRKGESGVPGPAGVKGEQGSPGLAGPKGAPGQAGQKGDQGVKGSSGEQGVKGEKGERGENSVSVRIVGSSNRGRAEVYYSGTWGTICDDEWQNSDAIVFCRMLGYSKGRALYKVGAGTGQIWLDNVQCRGTESTLWSCTKNSWGHHDCSHEEDAGVECSV

SEQ ID NO: 52202 - protein, 442 aa, Homo sapiens
MYFLNDTLAAEDSPSFSLLQSAHPGEHLAQGASRLQVLQAQLTWVRVSHEHLLQRVDNFTQNPGMFRIKGEQGAPGLQGHKGAMGMPGAPGPPGPPAEKGAKGAMGRDGATGPSGPQGPPGVKGEAGLQGPQGAPGKQGATGTPGPQGEKGSKGDGGLIGPKGETGTKGEKGDLGLPGSKGDRGMKGDAGVMGPPGAQGSKGDFGRPGPPGLAGFPGAKGDQGQPGLQGVPGPPGAVGHPGAKGEPGSAGSPGRAGLPGSPGSPGATGLKGSKGDTGLQGQQGRKGESGVPGPAGVKGEQGSPGLAGPKGAPGQAGQKGDQGVKGSSGEQGVKGEKGERGENSVSVRIVGSSNRGRAEVYYSGTWGTICDDEWQNSDAIVFCRMLGYSKGRALYKVGAGTGQIWLDNVQCRGTESTLWSCTKNSWGHHDCSHEEDAGVECSV

SEQ ID NO: 52203 - protein, 451 aa, Homo sapiens
MEQWDHFHNQQEDTDSCSESVKFDARSMTALLPPNPKNSPSLQEKLKSFKAALIALYLLVFAVLIPLIGIVAAQLLKWETKNCSVSSTNANDITQSLTGKGNDSEEEMRFQEVFMEHMSNMEKRIQHILDMEANLMDTEHFQNFSMTTDQRFNDILLQLSTLFSSVQGHGNAIDEISKSLISLNTTLLDLQLNIENLNGKIQENTFKQQEEISKLEERVYNVSAEIMAMKEEQVHLEQEIKGEVKVLNNITNDLRLKDWEHSQTLRNITLIQGPPGPPGEKGDRGPTGESGPRGFPGPIGPPGLKGDRGAIGFPGSRGLPGYAGRPGNSGPKGQKGEKGSGNTLTPFTKVRLVGGSGPHEGRVEILHSGQWGTICDDRWEVRVGQVVCRSLGYPGVQAVHKAAHFGQGTGPIWLNEVFCFGRESSIEECKIRQWGTRACSHSEDAGVTCTL

SEQ ID NO: 52204 - protein, 388 aa, Homo sapiens
MEQWDHFHNQQEDTDSCSESVKFDARSMTALLPPNPKNSPSLQEKLKSFKAALIALYLLVFAVLIPLIGIVAAQLLKWETKNCSVSSTNANDITQSLTGKGNDSEEEMRFQEVFMEHMSNMEKRIQHILDMEANLMDTEHFQNFSMTTDQRFNDILLQLSTLFSSVQGHGNAIDEISKSLISLNTTLLDLQLNIENLNGKIQENTFKQQEEISKLEERVYNVSAEIMAMKEEQVHLEQEIKGEVKVLNNITNDLRLKDWEHSQTLRNITLIQGPPGPPGEKGDRGPTGESGPRGFPGPIGPPGLKGDRGAIGFPGSRGLPGYAGRPGNSGPKGQKGEKGSGNTLSTGPIWLNEVFCFGRESSIEECKIRQWGTRACSHSEDAGVTCTL

SEQ ID NO: 52205 - protein, 388 aa, Homo sapiens; identical to SEQ ID NO: 52204

SEQ ID NO: 52206 - protein, 358 aa, Homo sapiens
MEQWDHFHNQQEDTDSCSESVKFDARSMTALLPPNPKNSPSLQEKLKSFKAALIALYLLVFAVLIPLIGIVAAQLLKWETKNCSVSSTNANDITQSLTGKGNDSEEEMRFQEVFMEHMSNMEKRIQHILDMEANLMDTEHFQNFSMTTDQRFNDILLQLSTLFSSVQGHGNAIDEISKSLISLNTTLLDLQLNIENLNGKIQENTFKQQEEISKLEERVYNVSAEIMAMKEEQVHLEQEIKGEVKVLNNITNDLRLKDWEHSQTLRNITLIQGPPGPPGEKGDRGPTGESGPRGFPGPIGPPGLKGDRGAIGFPGSRGLPGYAGRPGNSGPKGQKGEKGSGNTLRPVQLTDHIRAGPS

SEQ ID NO: 52207 - protein, 469 aa, Homo sapiens
MCYLSAIISISLLNKKPSMEQWDHFHNQQEDTDSCSESVKFDARSMTALLPPNPKNSPSLQEKLKSFKAALIALYLLVFAVLIPLIGIVAAQLLKWETKNCSVSSTNANDITQSLTGKGNDSEEEMRFQEVFMEHMSNMEKRIQHILDMEANLMDTEHFQNFSMTTDQRFNDILLQLSTLFSSVQGHGNAIDEISKSLISLNTTLLDLQLNIENLNGKIQENTFKQQEEISKLEERVYNVSAEIMAMKEEQVHLEQEIKGEVKVLNNITNDLRLKDWEHSQTLRNITLIQGPPGPPGEKGDRGPTGESGPRGFPGPIGPPGLKGDRGAIGFPGSRGLPGYAGRPGNSGPKGQKGEKGSGNTLTPFTKVRLVGGSGPHEGRVEILHSGQWGTICDDRWEVRVGQVVCRSLGYPGVQAVHKAAHFGQGTGPIWLNEVFCFGRESSIEECKIRQWGTRACSHSEDAGVTCTL

SEQ ID NO: 52208 - protein, 64 aa, Homo sapiens
MEQWDHFHNQQEDTDSCSESVKFDARSMTALLPPNPKNSPSLQEKLKSFKAALIALYLLVFAVL

SEQ ID NO: 52209 - protein, 132 aa, Homo sapiens [sequence omitted]

SEQ ID NO: 52210 - protein, 1400 aa, Homo sapiens
MELLPPLPQSFLLLLLLPAKPAAGEDWQCPRTPYAASRDFDVKYVVPSFSAGGLVQAMVTYEGDRNESAVFVAIRNRLHVLGPDLKSVQSLATGPAGDPGCQTCAACGPGPHGPPGDTDTKVLVLDPALPALVSCGSSLQGRCFLHDLEPQGTAVHLAAPACLFSAHHNRPDDCPDCVASPLGTRVTVVEQGQASYFYVASSLDAAVAASFSPRSVSIRRLKADASGFAPGFVALSVLPKHLVSYSIEYVHSFHTGAFVYFLTVQPASVTDDPSALHTRLARLSATEPELGDYRELVLDCRFAPKRRRRGAPEGGQPYPVLRVAHSAPVGAQLATELSIAEGQEVLFGVFVTGKDGGPGVGPNSVVCAFPIDLLDTLIDEGVERCCESPVHPGLRRGLDFFQSPSFCPNPPGLEALSPNTSCRHFPLLVSSSFSRVDLFNGLLGPVQVTALYVTRLDNVTVAHMGTMDGRILQVELVRSLNYLLYVSNFSLGDSGQPVQRDVSRLGDHLLFASGDQVFQVPIQGPGCRHFLTCGRCLRAWHFMGCGWCGNMCGQQKECPGSWQQDHCPPKLTEFHPHSGPLRGSTRLTLCGSNFYLHPSGLVPEGTHQVTVGQSPCRPLPKDSSKLRPVPRKDFVEEFECELEPLGTQAVGPTNVSLTVTNMPPGKHFRVDGTSVLRGFSFMEPVLIAVQPLFGPRAGGTCLTLEGQSLSVGTSRAVLVNGTECLLARVSEGQLLCATPPGATVASVPLSLQVGGAQVPGSWTFQYREDPVVLSISPNCGYINSHITICGQHLTSAWHLVLSFHDGLRAVESRCERQLPEQQLCRLPEYVVRDPQGWVAGNLSARGDGAAGFTLPGFRFLPPPHPPSANLVPLKPEEHAIKFEYIGLGAVADCVGINVTVGGESCQHEFRGDMVVCPLPPSLQLGQDGAPLQVCVDGECHILGRVVRPGPDGVPQSTLLGILLPLLLLVAALATALVFSYWWRRKQLVLPPNLNDLASLDQTAGATPLPILYSGSDYRSGLALPAIDGLDSTTCVHGASFSDSEDESCVPLLRKESIQLRDLDSALLAEVKDVLIPHERVVTHSDRVIGKGHFGVVYHGEYIDQAQNRIQCAIKSLSRITEMQQVEAFLREGLLMRGLNHPNVLALIGIMLPPEGLPHVLLPYMCHGDLLQFIRSPQRNPTVKDLISFGLQVARSMEYLAEQKFVHRDLAARNCMLDESFTVKVADFGLARDILDREYYSVQQHRHARLPVKWMALESLQTYRFTTKSDVWSFGVLLWELLTRGAPPYRHIDPFDLTHFLAQGRRLPQPEYCPDSLYQVMQQCWEADPAVRPTFRVLVGEVEQIVSALLGDHYVQLPATYMNLGPSTSHEMNVRPEQPQFSPMPGNVRRPRPLSEPPRPT

SEQ ID NO: 52211 - protein, 1351 aa, Homo sapiens
MELLPPLPQSFLLLLLLPAKPAAGEDWQCPRTPYAASRDFDVKYVVPSFSAGGLVQAMVTYEGDRNESAVFVAIRNRLHVLGPDLKSVQSLATGPAGDPGCQTCAACGPGPHGPPGDTDTKVLVLDPALPALVSCGSSLQGRCFLHDLEPQGTAVHLAAPACLFSAHHNRPDDCPDCVASPLGTRVTVVEQGQASYFYVASSLDAAVAASFSPRSVSIRRLKADASGFAPGFVALSVLPKHLVSYSIEYVHSFHTGAFVYFLTVQPASVTDDPSALHTRLARLSATEPELGDYRELVLDCRFAPKRRRRGAPEGGQPYPVLRVAHSAPVGAQLATELSIAEGQEVLFGVFVTGKDGGPGVGPNSVVCAFPIDLLDTLIDEGVERCCESPVHPGLRRGLDFFQSPSFCPNPPGLEALSPNTSCRHFPLLVSSSFSRVDLFNGLLGPVQVTALYVTRLDNVTVAHMGTMDGRILQVELVRSLNYLLYVSNFSLGDSGQPVQRDVSRLGDHLLFASGDQVFQVPIQGPGCRHFLTCGRCLRAWHFMGCGWCGNMCGQQKECPGSWQQDHCPPKLTEFHPHSGPLRGSTRLTLCGSNFYLHPSGLVPEGTHQVTVGQSPCRPLPKDSSKLRPVPRKDFVEEFECELEPLGTQAVGPTNVSLTVTNMPPGKHFRVDGTSVLRGFSFMEPVLIAVQPLFGPRAGGTCLTLEGQSLSVGTSRAVLVNGTECLLARVSEGQLLCATPPGATVASVPLSLQVGGAQVPGSWTFQYREDPVVLSISPNCGYINSHITICGQHLTSAWHLVLSFHDGLRAVESRCERQLPEQQLCRLPEYVVRDPQGWVAGNLSARGDGAAGFTLPGFRFLPPPHPPSANLVPLKPEEHAIKFEVCVDGECHILGRVVRPGPDGVPQSTLLGILLPLLLLVAALATALVFSYWWRRKQLVLPPNLNDLASLDQTAGATPLPILYSGSDYRSGLALPAIDGLDSTTCVHGASFSDSEDESCVPLLRKESIQLRDLDSALLAEVKDVLIPHERVVTHSDRVIGKGHFGVVYHGEYIDQAQNRIQCAIKSLSRITEMQQVEAFLREGLLMRGLNHPNVLALIGIMLPPEGLPHVLLPYMCHGDLLQFIRSPQRNPTVKDLISFGLQVARSMEYLAEQKFVHRDLAARNCMLDESFTVKVADFGLARDILDREYYSVQQHRHARLPVKWMALESLQTYRFTTKSDVWSFGVLLWELLTRGAPPYRHIDPFDLTHFLAQGRRLPQPEYCPDSLYQVMQQCWEADPAVRPTFRVLVGEVEQIVSALLGDHYVQLPATYMNLGPSTSHEMNVRPEQPQFSPMPGNVRRPRPLSEPPRPT

SEQ ID NO: 52212 - protein, 718 aa, Homo sapiens
MEDLGENTMVLSTLRSLNNFISQRVEGGSGLDISTSAPGSLQMQYQQSMQLEERAEQIRSKSHLIQVEREKMQMELSHKRARVELERAASTSARNYEREVDRNQELLTRIRQLQEREAGAEEKMQEQLERNRQCQQNLDAASKRLREKEDSLAQAGETINALKGRISELQWSVMDQEMRVKRLESEKQELQEQLDLQHKKCQEANQKIQELQASQEARADHEQQIKDLEQKLSLQEQDAAIVKNMKSELVRLPRLERELKQLREESAHLREMRETNGLLQEELEGLQRKLGRQEKMQETLVGLELENERLLAKLQSWERLDQTMGLSIRTPEDLSRFVVELQQRELALKDKNSAVTSSARGLEKARQQLQEELRQVSGQLLEERKKRETHEALARRLQKRVLLLTKERDGMRAILGSYDSELTPAEYSPQLTRRMREAEDMVQKVHSHSAEMEAQLSQALEELGGQKQRADMLEMELKMLKSQSSSAEQSFLFSREEADTLRLKVEELEGERSRLEEEKRMLEAQLERRALQGDYDQSRTKVLHMSLNPTSVARQRLREDHSQLQAECERLRGLLRAMERGGTVPADLEAAAASLPSSKEVAELKKQVESAELKNQRLKEVFQTKIQEFRKACYTLTGYQIDITTENQYRLTSLYAEHPGDCLIFKATSPSGSKMQLLETEFSHTVGELIEVHLRRQDSIPAFLSSLTLELFSRQTVA

SEQ ID NO: 52213 - protein, 718 aa, Homo sapiens; identical to SEQ ID NO: 52212

SEQ ID NO: 52214 - protein, 626 aa, Homo sapiens
MLPARGCVRKRTVWPRLARVLIVTLLTLELSYAPLPCQLSGVPYNTGDPVGRWARPCIWPCPWHTTINALKGRISELQWSVMDQEMRVKRLESEKQELQEQLDLQHKKCQEANQKIQELQASQEARADHEQQIKDLEQKLSLQEQDAAIVKNMKSELVRLPRLERELKQLREESAHLREMRETNGLLQEELEGLQRKLGRQEKMQETLVGLELENERLLAKLQSWERLDQTMGLSIRTPEDLSRFVVELQQRELALKDKNSAVTSSARGLEKARQQLQEELRQVSGQLLEERKKRETHEALARRLQKRVLLLTKERDGMRAILGSYDSELTPAEYSPQLTRRMREAEDMVQKVHSHSAEMEAQLSQALEELGGQKQRADMLEMELKMLKSQSSSAEQSFLFSREEADTLRLKVEELEGERSRLEEEKRMLEAQLERRALQGDYDQSRTKVLHMSLNPTSVARQRLREDHSQLQAECERLRGLLRAMERGGTVPADLEAAAASLPSSKEVAELKKQVESAELKNQRLKEVFQTKIQEFRKACYTLTGYQIDITTENQYRLTSLYAEHPGDCLIFKATSPSGSKMQLLETEFSHTVGELIEVHLRRQDSIPAFLSSLTLELFSRQTVA

SEQ ID NO: 52215 - protein, 718 aa, Homo sapiens; identical to SEQ ID NO: 52212

SEQ ID NO: 52216 - protein, 157 aa, Homo sapiens
MEDLGENTMVLSTLRSLNNFISQRVEGGSGLDISTSAPGSLQMQYQQSMQLEERAEQIRSKSHLIQVEREKMQMELSHKRARVELERAASTSARNYEREVDRNQELLTRIRQLQEREAGAEEKMQEQLERNRQCQQNLDAASKRLREKEDSLAQAGE

SEQ ID NO: 52217 - protein, 269 aa, Homo sapiens
MRELEFAKLECCLAWQLQASRRELEMELKMLKSQSSSAEQSFLFSREEADTLRLKVEELEGERSRLEEEKRMLEAQLERRALQGDYDQSRTKVLHMSLNPTSVARQRLREDHSQLQAECERLRGLLRAMERGGTVPADLEAAAASLPSSKEVAELKKQVESAELKNQRLKEVFQTKIQEFRKACYTLTGYQIDITTENQYRLTSLYAEHPGDCLIFKATSPSGSKMQLLETEFSHTVGELIEVHLRRQDSIPAFLSSLTLELFSRQTVA

SEQ ID NO: 52218 - protein, 205 aa, Homo sapiens
MALQLSREQGITLRGSAEIVAEFFSFGINSILYQRGIYPSETFTRVQKYGLTLLVTTDLELIKYLNNVVEQLKDWLYKCSVQKLVVVISNIESGEVLERWQFDIECDKTAKDDSAPREKSQKAIQDEIRSVIRQITATVTFLPLLEVSCSFDLLIYTDKDLVVPEKWEESGPQFITNSEEVRLRSFTTTIHKVNSMVAYKIPVND

SEQ ID NO: 52219 - protein, 403 aa, Homo sapiens
MPNRKASRNAYYFFVQEKIPELRRRGLPVARVADAIPYCSSDWAKPVFTPLRRPGMLVPKQNVSPPDMSALSLKGDQALLGGIFYFLNIFSHGELPPHCEQRFLPCEIGCVKYSLQEGIMADFHSFINPGEIPRGFRFHCQAASDSSHKIPISNFERGHNQATVLQNLYRFIHPNPGNWPPIYCKSDDRTRVNWCLKHMAKASEIRQDLQLLTVEDLVVGIYQQKFLKEPSKTWIRSLLDVAMWDYSSNTRCKWHEENDILFCALAVCKKIAYCISNSLATLFGIQLTEAHVPLQDYEASNSVTPKMVVLDAGRYQKLRVGSSGFSHFNSSNEEQRSNTPIGDYPSRAKISGQNSSVRGRGITRLLESISNSSSNIHKFSNCDTSLSPYMSQKDGYKSFSSLS

SEQ ID NO: 52220 - protein, 434 aa, Homo sapiens
MPNRKASRNAYYFFVQEKIPELRRRGLPVARVADAIPYCSSDWALLREEEKEKYAEMAREWRAAQGKDPGPSEKQKPVFTPLRRPGMLVPKQNVSPPDMSALSLKGDQALLGGIFYFLNIFSHGELPPHCEQRFLPCEIGCVKYSLQEGIMADFHSFINPGEIPRGFRFHCQAASDSSHKIPISNFERGHNQATVLQNLYRFIHPNPGNWPPIYCKSDDRTRVNWCLKHMAKASEIRQDLQLLTVEDLVVGIYQQKFLKEPSKTWIRSLLDVAMWDYSSNTRCKWHEENDILFCALAVCKKIAYCISNSLATLFGIQLTEAHVPLQDYEASNSVTPKMVVLDAGRYQKLRVGSSGFSHFNSSNEEQRSNTPIGDYPSRAKISGQNSSVRGRGITRLLESISNSSSNIHKFSNCDTSLSPYMSQKDGYKSFSSLS

SEQ ID NO: 52221 - protein, 316 aa, Homo sapiens
MPNRKASRNAYYFFVQEKIPELRRRGLPVARVADAIPYCSSDWAKPVFTPLRRPGMLVPKQNVSPPDMSALSLKGDQALLGGIFYFLNIFSHGELPPHCEQRFLPCEIGCVKYSLQEGIMADFHSFINPGEIPRGFRFHCQAASDSSHKIPISNFERGHNQATVLQNLYRFIHPNPGNWPPIYCKSDDRTRVNWCLKHMAKASEIRQDLQLLTVEDLVVGIYQQKFLKEPSKTWIRSLLDVAMWDYSSNTRCKWHEENDILFCALAVCKKIAYCISNSLATLFGIQLTEAHVPLQDYEASNSVTPKMVVLDAGRYQ

SEQ ID NO: 52222 - protein, 156 aa, Homo sapiens
LLQRCKWHEENDILFCALAVCKKIAYCISNSLATLFGIQLTEAHVPLQDYEASNSVTPKMVVLDAGRYQKLRVGSSGFSHFNSSNEEQRSNTPIGDYPSRAKISGQNSSVRGRGITRLLESISNSSSNIHKFSNCDTSLSPYMSQKDGYKSFSSLS

SEQ ID NO: 52223 - protein, 248 aa, Homo sapiens
MDQRQRRILGQPLSIPTSQPKQKRTSMISFFSKVSWKLRFQKREPLKNVFFILAERARDPSAKKRHMAMRNLGTMAYEAPDKVRKYKKIVLDLLVYGLYDPVNLEVIHESMKTLTVVLGKIQGKGLGSFFIDITLQTRTLLDDENDSLRYSAFVLFGQLAAFAGRKWKKFFTSQVKQTRDSLLIHLQDRNPQVAKACKTTFQACSPYLKLKEEYSFQSEEDQRNTKLYQQLSHYHPEILQFFYANKIL

SEQ ID NO: 52224 - protein, 248 aa, Homo sapiens; identical to SEQ ID NO: 52223

SEQ ID NO: 52225 - protein, 196 aa, Homo sapiens
MDQRQRRILGQPLSIPTSQPKQKRTSMISFFSKVSWKLRFQKREPLKNVFFILAERARDPSAKKRHMAMRNLGTMAYEAPDKVRKYKKIVLDLLVYGLYDPVNLEVIHESMKTLTVVLGKIQGKGLGSFFIDITLQTRTLLDDACKTTFQACSPYLKLKEEYSFQSEEDQRNTKLYQQLSHYHPEILQFFYANKIL

SEQ ID NO: 52226 - protein, 210 aa, Homo sapiens
MAWGSKGIQGWENLAESSHLATTRESSPPESGTGSGSSRGSRLQEPQVSWKLRFQKREPLKNVFFILAERARDPSAKKRHMAMRNLGTMAYEAPDKVRKYKKIVLDLLVYGLYDPVNLEVIHESMKTLTVVLGKIQGKGLGSFFIDITLQTRTLLDDACKTTFQACSPYLKLKEEYSFQSEEDQRNTKLYQQLSHYHPEILQFFYANKIL

SEQ ID NO: 52227 - protein, 262 aa, Homo sapiens
MAWGSKGIQGWENLAESSHLATTRESSPPESGTGSGSSRGSRLQEPQVSWKLRFQKREPLKNVFFILAERARDPSAKKRHMAMRNLGTMAYEAPDKVRKYKKIVLDLLVYGLYDPVNLEVIHESMKTLTVVLGKIQGKGLGSFFIDITLQTRTLLDDENDSLRYSAFVLFGQLAAFAGRKWKKFFTSQVKQTRDSLLIHLQDRNPQVAKACKTTFQACSPYLKLKEEYSFQSEEDQRNTKLYQQLSHYHPEILQFFYANKIL

SEQ ID NO: 52228 - protein, 196 aa, Homo sapiens; identical to SEQ ID NO: 52225

SEQ ID NO: 52229 - protein, 256 aa, Homo sapiens
MKLLENSSFEAINSQLTVETGDAHIIGRIESYSCKMAGDDKHMFKQFCQEGQPHVLEALSPPQTSGLSPSRLSKSQGGEEEGPLSDKCSRKTLFYLIATLNESFRPDYDFSTARSHEFSREPSLSWVVNAVNCSLFSAVREDFKDLKPQLWNAVDEEICLAECDIYSYNPDLDSDPFGEDGSLWSFNYFFYNKRLKRIVFFSCRSISGSTYTPSEAGNELDMELGEEEVEEESRSGGSGAEETSTMEEDRVPVICI

SEQ ID NO: 52230 - protein, 70 aa, Homo sapiens
MKLLENSSFEAINSQLTVETGDAHIIGRIESYSCKMAGDDKHMFKQFCQEGQPHVLEALSPPQTSGLSPS

SEQ ID NO: 52231 - protein, 256 aa, Homo sapiens; identical to SEQ ID NO: 52229

SEQ ID NO: 52232 - protein, 367 aa, Homo sapiens
MRKGKGPICLFSRPTLRPSRSKVSLIEGRGANMAARWRFWCVSVTMVVALLIVCDVPSASAQRKKEMVLSEKVSQLMEWTNKRPVIRMNGDKFRRLVKAPPRNYSVIVMFTALQLHRQCVVCKQADEEFQILANSWRYSSAFTNRIFFAMVDFDEGSDVFQMLNMNSAPTFINFPAKGKPKRGDTYELQVRGFSAEQIARWIADRTDVNIRVIRPPNYAGPLMLGLLLAVIGGLVYLRRSNMEFLFNKTGWAFAALCFVLAMTSGQMWNHIRGPPYAHKNPHTGHVNYIHGSSQAQFVAETHIVLLFNGGVTLGMVLLCEAATSDMDIGKRKIMCVAGIGLVVLFFSWMLSIFRSKYHGYPYSFLMS

SEQ ID NO: 52233 - protein, 218 aa, Homo sapiens
MVDFDEGSDVFQMLNMNSAPTFINFPAKGKPKRGDTYELQVRGFSAEQIARWIADRTDVNIRVIRPPNYAGPLMLGLLLAVIGGLVYLRRSNMEFLFNKTGWAFAALCFVLAMTSGQMWNHIRGPPYAHKNPHTGHVNYIHGSSQAQFVAETHIVLLFNGGVTLGMVLLCEAATSDMDIGKRKIMCVAGIGLVVLFFSWMLSIFRSKYHGYPYSFLMS

SEQ ID NO: 52234 - protein, 109 aa, Homo sapiens
MESDFYLRYYVGHKGKFGHEFLEFEFRPDGKLRYANNSNYKNDVMIRKEELEIVIGDEHISFTTSKIGSLIDVNQSKDPEGLRVFYYLVQDLKCLVFSLIGLHFKIKPI

SEQ ID NO: 52235 - protein, 146 aa, Homo sapiens
MESDFYLRYYVGHKGKFGHEFLEFEFRPDGKLRYANNSNYKNDVMIRKEAYVHKSVMEELKRIIDDSEITKEDDALWPPPDRVGRQELEIVIGDEHISFTTSKIGSLIDVNQSKDPEGLRVFYYLVQDLKCLVFSLIGLHFKIKPI

SEQ ID NO: 52236 - protein, 576 aa, Homo sapiens
MGSILSRRIAGVEDIDIQANSAYRYPPKSGNYFASHFFMGGEKFDTPHPEGYLFGENMDLNFLGSRPVQFPYVTPAPHEPVKTLRSLVNIRKDSLRLVRYKDDADSPTEDGDKPRVLYSLEFTFDADARVAITIYCQASEEFLNGRAVYSPKSPSLQSETVHYKRGVSQQFSLPSFKIDFSEWKDDELNFDLDRGVFPVVIQAVVDEGDVVEVTGHAHVLLAAFEKHMDGSFSVKPLKQKQIVDRVSYLLQEIYGIENKNNQETKPSDDENSDNSNECVVCLSDLRDTLILPCRHLCLCTSCADTLRYQANNCPICRLPFRALLQIRAVRKKPGALSPVSFSPVLAQSLEHDEHSCPFKKSKPHPASLASKKPKRETNSDSVPPGYEPISLLEALNGLRAVSPAIPSAPLYEEITYSGISDGLSQASCPLAAIDHILDSSRQKGRPQSKAPDSTLRSPSSPIHEEDEEKLSEDVDAPPPLGGAELALRESSSPESFITEEVDESSSPQQGTRAASIENVLQDSSPEHCGRGPPADIYLPGRPTSMETAHGLATTSPTWPPLGGPSPDPSAAELTPL

SEQ ID NO: 52237 - protein, 552 aa, Homo sapiens
MGSILSRRIAGVEDIDIQANSAYRYPPKSGNYFASHFFMGGEKFDTPHPEGYLFGENMDLNFLGSRPVQFPYVTPAPHEPVKTLRSLVNIRKDSLRLVRYKDDADSPTEDGDKPRVLYSLEFTFDADARVAITIYCQASEEFLNGRAVYSPKSPSLQSETVHYKRGVSQQFSLPSFKIDFSEWKDDELNFDLDRGVFPVVIQAVVDEGDVVEVTGHAHVLLAAFEKHMDGSFSVKPLKQKQIVDRVSYLLQEIYGIENKNNQETKPSDDENSDNSNECVVCLSDLRDTLILPCRHLCLCTSCADTLRYQANNCPICRLPFRALLQIRAVRKKPGALSPVSFSPVLAQSLEHDEHSCPFKKSKPHPASLASKKPKRETNSDSVPPGYEPISLLEALNGLRAVSPAIPSAPLYEEITYSGISDGLSQASCPLAAIDHILDSSRQKGRPQSKAPDSTLRSPSSPIHEEDEEKLSEDVDAPPPLGGAELALRESSSPESFITEEVDESSSPQQGTRAASIENVLQDSSPEHCGRGPPADIYLPALGPDSCSVGIDE

SEQ ID NO: 52238 - protein, 531 aa, Homo sapiens
MGSILSRRIAGVEDIDIQANSAYRYPPKSGNYFASHFFMGGEKFDTPHPEGYLFGENMDLNFLGSRPVQFPYVTPAPHEPVKTLRSLVNIRKDSLRLVRYKDDADSPTEDGDKPRVLYSLEFTFDADARVAITIYCQASEEFLNGRAVYSPKSPSLQSETVHYKRGVSQQFSLPSFKIDFSEWKDDELNFDLDRGVFPVVIQAVVDEGDAVVEVTGHAHVLLAAFEKHMDGSFSVKPLKQKQIVDRVSYLLQEIYGIENKNNQETKPSDDENSDNSNECVVCLSDLRDTLILPCRHLCLCTSCADTLRYQANNCPICRLPFRALLQIRAVRKKPGALSPVSFSPVLAQSLEHDEHSNSDSVPPGYEPISLLEALNGLRAVSPAIPSAPLYEEITYSGISDGLSQASCPLAAIDHILDSSRQKGRPQSKAPDSTLRSPSSPIHEEDEEKLSEDVDAPPPLGGAELALRESSSPESFITEEVDESSSPQQGTRAASIENVLQDSSPEHCGRGPPADIYLPALGPDSCSVGIDE

SEQ ID NO: 52239 - protein, 320 aa, Homo sapiens
MGSILSRRIAGVEDIDIQANSAYRYPPKSGNYFASHFFMGGEKFDTPHPEGYLFGENMDLNFLGSRPVQFPYVTPAPHEPVKTLRSLVNIRKDSLRLVRYKDDADSPTEDGDKPRVLYSLEFTFDADARVAITIYCQASEEFLNGRAVYSPKSPSLQSETVHYKRGVSQQFSLPSFKIDFSEWKDDELNFDLDRGVFPVVIQAVVDEGDVVEVTGHAHVLLAAFEKHMDGSFSVKPLKQKQIVDRVSYLLQEIYGIENKNNQETKPSDDENSDNSNECVVCLSDLRDTLILPCRHLCLCTSCADTLRYQANNCPICRLQL

SEQ ID NO: 52240 - protein, 543 aa, Homo sapiens
MAKGEGAESGSAAGLLPTSILQSTERPAQVKKEPKKKKQQLSVCNKLCYALGGAPYQVTGCALGFFLQIYLLDVAQKDEEVVFCFSSFQVGPFSASIILFVGRAWDAITDPLVGLCISKSPWTCLGRLMPWIIFSTPLAVIAYFLIWFVPDFPHGQTYWYLLFYCLFETMVTCFHVPYSALTMFISTEQTERDSATAYRMTVEVLGTVLGTAIQGQIVGQADTPCFQDLNSSTVASQSANHTHGTTSHRETQKAYLLAAGVIVCIYIICAVILILGVREQREPYEAQQSEPIAYFRGLRLVMSHGPYIKLITGFLFTSLAFMLVEGNFVLFCTYTLGFRNEFQNLLLAIMLSATLTIPIWQWFLTRFGKKTAVYVGISSAVPFLILVALMESNLIITYAVAVAAGISVAAAFLLPWSMLPDVIDDFHLKQPHFHGTEPIFFSFYVFFTKFASGVSLGISTLSLDFAGYQTRGCSQPERVKFTLNMLVTMAPIVLILLGLLLFKMYPIDEERRRQNKKALQALRDEASSSGCSETDSTELASIL

SEQ ID NO: 52241 - protein, 530 aa, Homo sapiens
MAKGEGAESGSAAGLLPTSILQSTERPAQVKKEPKKKKQQLSVCNKLCYALGGAPYQVTGCALGFFLQIYLLDVAQVGPFSASIILFVGRAWDAITDPLVGLCISKSPWTCLGRLMPWIIFSTPLAVIAYFLIWFVPDFPHGQTYWYLLFYCLFETMVTCFHVPYSALTMFISTEQTERDSATAYRMTVEVLGTVLGTAIQGQIVGQADTPCFQDLNSSTVASQSANHTHGTTSHRETQKAYLLAAGVIVCIYIICAVILILGVREQREPYEAQQSEPIAYFRGLRLVMSHGPYIKLITGFLFTSLAFMLVEGNFVLFCTYTLGFRNEFQNLLLAIMLSATLTIPIWQWFLTRFGKKTAVYVGISSAVPFLILVALMESNLIITYAVAVAAGISVAAAFLLPWSMLPDVIDDFHLKQPHFHGTEPIFFSFYVFFTKFASGVSLGISTLSLDFAGYQTRGCSQPERVKFTLNMLVTMAPIVLILLGLLLFKMYPIDEERRRQNKKALQALRDEASSSGCSETDSTELASIL

SEQ ID NO: 52242 - protein, 374 aa, Homo sapiens
MVTCFHVPYSALTMFISTEQTERDSATAYRMTVEVLGTVLGTAIQGQIVGQADTPCFQDLNSSTVASQSANHTHGTTSHRETQKAYLLAAGVIVCIYIICAVILILGVREQREPYEAQQSEPIAYFRGLRLVMSHGPYIKLITGFLFTSLAFMLVEGNFVLFCTYTLGFRNEFQNLLLAIMLSATLTIPIWQWFLTRFGKKTAVYVGISSAVPFLILVALMESNLIITYAVAVAAGISVAAAFLLPWSMLPDVIDDFHLKQPHFHGTEPIFFSFYVFFTKFASGVSLGISTLSLDFAGYQTRGCSQPERVKFTLNMLVTMAPIVLILLGLLLFKMYPIDEERRRQNKKALQALRDEASSSGCSETDSTELASIL

SEQ ID NO: 52243 - protein, 266 aa, Homo sapiens
MAKGEGAESGSAAGLLPTSILQSTERPAQKEPKKKKQQLSVCNKLCYALGGAPYQVTGCALGFFLQIYLLDVAQVGPFSASIILFVGRAWDAITDPLVGLCISKSPWTCLGRLMPWIIFSTPLAVIAYFLIWFVPDFPHGQTYWYLLFYCLFETMVTCFHVPYSALTMFISTEQTERDSATAYRMTVEVLGTVLGTAIQGQIVGQADTPCFQDLNSSTVASQSANHTHGTTSHRETQKAYLLAAGVIVCIYIICAVILILGVREQR

SEQ ID NO: 52244 - protein, 791 aa, Homo sapiens
MADDKVAILTDDEEEQKRKYVLADPFNGISREPEPPSNETPSSTETSAIPEEEIDWIEKHCVKINNDLLISKVFYFFFYSAYGSLYPLLPVYYKQLGMSPSQSGLLVGIRYFIEFCSAPFWGVVADRFKKGKIVLLFSLLCWVLFNLGIGFVKPATLRCVPKIRPTTHPTNASHQLTILPTNSSFTSFLTISPKMREKRNLLETRLNVSDTVTLPTAPNMNSEPTLQPQTGEITNRMMDLTLNSSTATPVSPGSVTKETTTVIVTTTKSLPSDQVMLVYDQQEVEAIFLVILVVVIIGEFFSASSVTIVDTVTLQYLGKHRDRYGLQRMWGSLGWGLAMLSVGIGIDYTHIEVLIDGKGCKPPEYRNYQIVFIVFGVLMTMALIVATQFRFRYNHFKNDDSKGKEVEIPQVERNNSTESSEETPTTTSHSQAFNFWDLIKLLCSVQYGSVLFVAWFMGFGYGFVFTFLYWHLEDLNGTTTLFGVCSVLSHVSELTAYFFSHKLIELIGHIRVLYIGLACNTARYIYISYLENAWTVLPMEVLQGVTHAAIWAACISYLSAAVPPELRTSAQGILQGLHLGLGRGCGAMIGGVLVNYFGAAATFRGIGMACLVILLLFALIQWLAVPDEEEDKTMLAERIPVPSSPVPIATIDLVQQQTEDVMPRIEPRLPPKKTKHQEEQEDVNKPAWGVSSSPWVTFVYALYQIKEMMQLTRDNRASEIQPLQGTNENRENSPAGRAQPVPCETHSDPSRNQPSPDAAASQTQTSPAHPSVDPCTEESEEQQAQLAAGGH

SEQ ID NO: 52245 - protein, 791 aa, Homo sapiens; identical to SEQ ID NO: 52244

SEQ ID NO: 52246 - protein, 42 aa, Homo sapiens
MADDKVAILTDDEEEQKRKYVLADPFNGISREPEPPSNETPS

SEQ ID NO: 52247 - protein, 114 aa, Homo sapiens
MADDKVAILTDDEEEQKRKYVLADPFNGISREPEPPSNETPSSTETSAIPEEEIDWIEKHCVKINNDLLISKVFYFFFYSAYGSLYPLLPVYYKQLGMSPSQSGLLVGIRYFIE

SEQ ID NO: 52248 - protein, 156 aa, Homo sapiens
MADDKVAILTDDEEEQKRKYVLADPFNGISREPEPPSNETPSSTETSAIPEEEIDWIEKHCVKINNDLLISKVFYFFFYSAYGSLYPLLPVYYKQLGMSPSQSGLLVGIRYFIEFCSAPFWGVVADRFKKGKIVLLFSLLCWVLFNLGIGFVKPAT

SEQ ID NO: 52249 - protein, 253 aa, Homo sapiens
MEVLQGVTHAAIWAACISYLSAAVPPELRTSAQGILQGLHLGLGRGCGAMIGGVLVNYFGAAATFRGIGMACLVILLLFALIQWLAVPDEEEDKTMLAERIPVPSSPVPIATIDLVQQQTEDVMPRIEPRLPPKKTKHQEEQEDVNKPAWGVSSSPWVTFVYALYQIKEMMQLTRDNRASEIQPLQGTNENRENSPAGRAQPVPCETHSDPSRNQPSPDAAASQTQTSPAHPSVDPCTEESEEQQAQLAAGGH

SEQ ID NO: 52250 - protein, 231 aa, Homo sapiens
MEVLQGVTHAAIWAACISYLSAAVPPELRTSAQGILQGLHLGLGRGCGAMIGGVLVNYFGAAATFRGIGMACLVILLLFALIQWLAVPDEEEDKTMLAERIPVPSSPVPIATIDLVQQQTEDVNKPAWGVSSSPWVTFVYALYQIKEMMQLTRDNRASEIQPLQGTNENRENSPAGRAQPVPCETHSDPSRNQPSPDAAASQTQTSPAHPSVDPCTEESEEQQAQLAAGGH

SEQ ID NO: 52251 - protein, 518 aa, Homo sapiens
MAGLRNESEQEPLLGDTPGSREWDILETEEHYKSRWRSIRILYLTMFLSSVGFSVVMMSIWPYLQKIDPTADTSFLGWVIASYSLGQMVASPIFGLWSNYRPRKEPLIVSILISVAANCLYAYLHIPASHNKYYMLVARGLLGIGAGNVAVVRSYTAGATSLQERTSSMANISMCQALGFILGPVFQTCFTFLGEKGVTWDVIKLQINMYTTPVLLSAFLGILNIILILAILREHRVDDSGRQCKSINFEEASTDEAQVPQGNIDQVAVVAINVLFFVTLFIFALFETIITPLTMDMYAWTQEQAVLYNGIILAALGVEAVVIFLGVKLLSKKIGERAILLGGLIVVWVGFFILLPWGNQFPKIQWEDLHNNSIPNTTFGEIIIGLWKSPMEDDNERPTGCSIEQAWCLYTPVIHLAQFLTSAVLIGLGYPVCNLMSYTLYSKILGPKPQGVYMGWLTASGSGARILGPMFISQVYAHWGPRWAFSLVCGIIVLTITLLGVVYKRLIALSVRYGRIQE

SEQ ID NO: 52252 - protein, 153 aa, Homo sapiens
MFLSSVGFSVVMMSIWPYLQKIDPTADTSFLGWVIASYSLGQMVASPIFGLWSNYRPRKEPLIVSILISVAANCLYAYLHIPASHNKYYMLVARGLLGIGAVFQTCFTFLGEKGVTWDVIKLQINMYTTPVLLSAFLGILNIILILAILSKYR

SEQ ID NO: 52253 - protein, 184 aa, Homo sapiens
MFLSSVGFSVVMMSIWPYLQKIDPTADTSFLGWVIASYSLGQMVASPIFGLWSNYRPRKEPLIVSILISVAANCLYAYLHIPASHNKYYMLVARGLLGIGAGNVAVVRSYTAGATSLQERTSSMANISMCQALGFILGPENIVWMTQEDSVKVLILKKQVQMKLRFPKEILTRLLLWPSMFCFL

SEQ ID NO: 52254 - protein, 249 aa, Homo sapiens
MGELMAFLLPLIIVLMVKHSDSRTHSLRYFRLGVSDPIHGVPEFISVGYVDSHPITTYDSVTRQKEPRAPWMAENLAPDHWERYTQLLRGWQQMFKVELKRLQRHYNHSGSHTYQRMIGCELLEDGSTTGFLQYAYDGQDFLIFNKDTLSWLAVDNVAHTIKQAWEANQHELLYQKNWLEEECIAWLKRFLEYGKDTLQRTESETIPLVMKAVSGSIVLVIVLAGVGVLVWRRRPREQNGAIYLPTPDR

SEQ ID NO: 52255 - protein, 260 aa, Homo sapiens
MRPEDRMFHIRAVILRALSLAFLLSLRGAGAIKADHVSTYAAFVQTHRPTGEFMFEFDEDEMFYVDLDKKETVWHLEEFGQAFSFEAQGGLANIAILNNNLNTLIQRSNHTQATNDPPEVTVFPKEPVELGQPNTLICHIDKFFPPVLNVTWLCNGELVTEGVAESLFLPRTDYSFHKFHYLTFVPSAEDFYDCRVEHWGLDQPLLKHWEAQEPIQMPETTETVLCALGLVLGLVGIIVGTVLIIKSLRSGHDPRAQGTL

SEQ ID NO: 52256 - protein, 260 aa, Homo sapiens; identical to SEQ ID NO: 52255

SEQ ID NO: 52257 - protein, 23 aa, Homo sapiens
MRPEDRMFHIRAVILRALSLAFL

SEQ ID NO: 52258 - protein, 128 aa, Homo sapiens
  VARIANT 1: note = MOD_RES - Any amino acid
XNTLICHIDKFFPPVLNVTWLCNGELVTEGVAESLFLPRTDYSFHKFHYLTFVPSAEDFYDCRVEHWGLDQPLLKHWEAQEPIQMPETTETVLCALGLVLGLVGIIVGTVLIIKSLRSGHDPRAQGTL

SEQ ID NO: 52259 - protein, 209 aa, Homo sapiens
MRPEDRMFHIRAVILRALSLAFLLSLRGAGAIKADHVSTYAAFVQTHRPTGEFMFEFDEDEMFYVDLDKKETVWHLEEFGQAFSFEAQGGLANIAILNNNLNTLIQRSNHTQATNDPPEVTVFPKEPVELGQPNTLICHIDKFFPPVLNVTWLCNGELVTEGVAESLFLPRTDYSFHKFHYLTFVPSAEDFYDCRVEHWGLDQPLLKHW

SEQ ID NO: 52260 - protein, 260 aa, Homo sapiens; identical to SEQ ID NO: 52255

SEQ ID NO: 52261 - protein, 23 aa, Homo sapiens
MRPEDRMFHIRAVILRALSLAFL

SEQ ID NO: 52262 - protein, 260 aa, Homo sapiens; identical to SEQ ID NO: 52255

SEQ ID NO: 52263 - protein, 128 aa, Homo sapiens; identical to SEQ ID NO: 52258
  VARIANT 1: note = MOD_RES - Any amino acid

SEQ ID NO: 52264 - protein, 260 aa, Homo sapiens; identical to SEQ ID NO: 52255

SEQ ID NO: 52265 - protein, 23 aa, Homo sapiens
MRPEDRMFHIRAVILRALSLAFL

SEQ ID NO: 52266 - protein, 209 aa, Homo sapiens; identical to SEQ ID NO: 52259

SEQ ID NO: 52267 - protein, 23 aa, Homo sapiens
MRPEDRMFHIRAVILRALSLAFL

SEQ ID NO: 52268 - protein, 128 aa, Homo sapiens; identical to SEQ ID NO: 52258
  VARIANT 1: note = MOD_RES - Any amino acid

SEQ ID NO: 52269 - protein, 260 aa, Homo sapiens; identical to SEQ ID NO: 52255

SEQ ID NO: 52270 - protein, 128 aa, Homo sapiens; identical to SEQ ID NO: 52258
  VARIANT 1: note = MOD_RES - Any amino acid

SEQ ID NO: 52271 - protein, 23 aa, Homo sapiens
MRPEDRMFHIRAVILRALSLAFL

SEQ ID NO: 52272 - protein, 209 aa, Homo sapiens; identical to SEQ ID NO: 52259

SEQ ID NO: 52273 - protein, 212 aa, Homo sapiens
MRPEDRMFHIRAVILRALSLAFLLSLRGAGAIKADHVSTYAAFVQTHRPTGEFMFEFDEDEMFYVDLDKKETVWHLEEFGQAFSFEVTVFPKEPVELGQPNTLICHIDKFFPPVLNVTWLCNGELVTEGVAESLFLPRTDYSFHKFHYLTFVPSAEDFYDCRVEHWGLDQPLLKHWEAQEPIQMPETTETVLCALGLVLGLVGIIVGTVLII

SEQ ID NO: 52274 - protein, 212 aa, Homo sapiens; identical to SEQ ID NO: 52273

SEQ ID NO: 52275 - protein, 128 aa, Homo sapiens; identical to SEQ ID NO: 52258
  VARIANT 1: note = MOD_RES - Any amino acid

SEQ ID NO: 52276 - protein, 212 aa, Homo sapiens; identical to SEQ ID NO: 52273

SEQ ID NO: 52277 - protein, 209 aa, Homo sapiens; identical to SEQ ID NO: 52259

SEQ ID NO: 52278 - protein, 23 aa, Homo sapiens
MRPEDRMFHIRAVILRALSLAFL

SEQ ID NO: 52279 - protein, 212 aa, Homo sapiens; identical to SEQ ID NO: 52273

SEQ ID NO: 52280 - protein, 209 aa, Homo sapiens; identical to SEQ ID NO: 52259

SEQ ID NO: 52281 - protein, 128 aa, Homo sapiens; identical to SEQ ID NO: 52258
  VARIANT 1: note = MOD_RES - Any amino acid

SEQ ID NO: 52282 - protein, 260 aa, Homo sapiens; identical to SEQ ID NO: 52255

SEQ ID NO: 52283 - protein, 212 aa, Homo sapiens; identical to SEQ ID NO: 52273

SEQ ID NO: 52284 - protein, 23 aa, Homo sapiens
MRPEDRMFHIRAVILRALSLAFL

SEQ ID NO: 52285 - protein, 212 aa, Homo sapiens; identical to SEQ ID NO: 52273

SEQ ID NO: 52286 - protein, 23 aa, Homo sapiens
MRPEDRMFHIRAVILRALSLAFL

SEQ ID NO: 52287 - protein, 212 aa, Homo sapiens; identical to SEQ ID NO: 52273

SEQ ID NO: 52288 - protein, 128 aa, Homo sapiens; identical to SEQ ID NO: 52258
  VARIANT 1: note = MOD_RES - Any amino acid

SEQ ID NO: 52289 - protein, 209 aa, Homo sapiens; identical to SEQ ID NO: 52259

SEQ ID NO: 52290 - protein, 260 aa, Homo sapiens; identical to SEQ ID NO: 52255

SEQ ID NO: 52291 - protein, 128 aa, Homo sapiens; identical to SEQ ID NO: 52258
  VARIANT 1: note = MOD_RES - Any amino acid

SEQ ID NO: 52292 - protein, 209 aa, Homo sapiens; identical to SEQ ID NO: 52259

SEQ ID NO: 52293 - protein, 209 aa, Homo sapiens; identical to SEQ ID NO: 52259

SEQ ID NO: 52294 - protein, 260 aa, Homo sapiens; identical to SEQ ID NO: 52255

SEQ ID NO: 52295 - protein, 212 aa, Homo sapiens; identical to SEQ ID NO: 52273

SEQ ID NO: 52296 - protein, 260 aa, Homo sapiens; identical to SEQ ID NO: 52255

SEQ ID NO: 52297 - protein, 260 aa, Homo sapiens; identical to SEQ ID NO: 52255

SEQ ID NO: 52298 - protein, 260 aa, Homo sapiens; identical to SEQ ID NO: 52255

SEQ ID NO: 52299 - protein, 260 aa, Homo sapiens; identical to SEQ ID NO: 52255

SEQ ID NO: 52300 - protein, 260 aa, Homo sapiens; identical to SEQ ID NO: 52255

SEQ ID NO: 52301 - protein, 260 aa, Homo sapiens; identical to SEQ ID NO: 52255

SEQ ID NO: 52302 - protein, 258 aa, Homo sapiens
MMVLQVSAAPRTVALTALLMVLLTSVVQGRATPENYVYQLRQECYAFNGTQRFLERYIYNREEFVRFDSDVGEFRAVTELGRPDEDYWNSQKDLLEEKRAVPDRVCRHNYELDEAVTLQRRVQPKVNVSPSKKGPLQHHNLLVCHVTDFYPGSIQVRWFLNGQEETAGVVSTNLIRNGDWTFQILVMLEMTPQQGDVYICQVEHTSLDSPVTVEWKAQSDSARSKTLTGAGGFVLGLIICGVGIFMHRRSKKVQRGSA

SEQ ID NO: 52303 - protein, 228 aa, Homo sapiens
MMVLQVSAAPRTVALTALLMVLLTSVVQGRATPENYLFQGRQECYAFNGTQRFLERYIYNREELVRFDSDVGEFRAVTELGRPEAEYWNSQKDILEEERAVPDRMCRHNYELGGPMTLQRRGSIQVRWFLNGQEETAGVVSTNLIRNGDWTFQILVMLEMTPQQGDVYTCQVEHTSLDSPVTVEWKAQSDSARSKTLTGAGGFVLGLIICGVGIFMHRRSKKVQRGSA

SEQ ID NO: 52304 - protein, 258 aa, Homo sapiens
MMVLQVSAAPRTVALTALLMVLLTSVVQGRATPENYLFQGRQECYAFNGTQRFLERYIYNREELVRFDSDVGEFRAVTELGRPEAEYWNSQKDILEEERAVPDRMCRHNYELGGPMTLQRRVQPRVNVSPSKKGPLQHHNLLVCHVTDFYPGSIQVRWFLNGQEETAGVVSTNLIRNGDWTFQILVMLEMTPQQGDVYTCQVEHTSLDSPVTVEWKAQSDSARSKTLTGAGGFVLGLIICGVGIFMHRRSKKVQRGSA

SEQ ID NO: 52305 - protein, 229 aa, Homo sapiens
KQAWRGSATRLGPQNSGRQECYAFNGTQRFLERYIYNREELVRFDSDVGEFRAVTELGRPEAEYWNSQKDILEEERAVPDRMCRHNYELGGPMTLQRRVQPRVNVSPSKKGPLQHHNLLVCHVTDFYPGSIQVRWFLNGQEETAGVVSTNLIRNGDWTFQILVMLEMTPQQGDVYTCQVEHTSLDSPVTVEWKAQSDSARSKTLTGAGGFVLGLIICGVGIFMHRRSKK

SEQ ID NO: 52306 - protein, 228 aa, Homo sapiens
MMVLQVSAAPRTVALTALLMVLLTSVVQGRATPENYLFQGRQECYAFNGTQRFLERYIYNREEFARFDSDVGEFRAVTELGRPAAEYWNSQKDILEEKRAVPDRMCRHNYELGGPMTLQRRGSIQVRWFLNGQEETAGVVSTNLIRNGDWTFQILVMLEMTPQQGDVYTCQVEHTSLDSPVTVEWKAQSDSARSKTLTGAGGFVLGLIICGVGIFMHRRSKKVQRGSA

SEQ ID NO: 52307 - protein, 228 aa, Homo sapiens
MMVLQVSAAPRTVALTALLMVLLTSVVQGRATPENYLFQGRQECYAFNGTQRFLERYIYNREEFVRFDSDVGEFRAVTELGRPDEEYWNSQKDILEEKRAVPDRMCRHNYELGGPMTLQRRGSIQVRWFLNGQEETAGVVSTNLIRNGDWTFQILVMLEMTPQQGDVYTCQVEHTSMDSPVTVEWKAQSDSARSKTLTGAGGFVLGLIICGVGIFMHRRSKKVQRGSA

SEQ ID NO: 52308 - protein, 235 aa, Homo sapiens
  VARIANT 1: note = MOD_RES - Any amino acid
XNYLFQGRQECYAFNGTQRFLERYIYNREEFVRFDSDVGEFRAVTELGRPDEEYWNSQKDILEEKRAVPDRMCRHNYELGGPMTLQRRVQPRVNVSPSKKGPLQHHNLLVCHVTDFYPGSIQVRWFLNGQEETAGVVSTNLIRNGDWTFQILVMLEMTPQQGDVYTCQVEHTSMDSPVTVEWKAQSDSARSKTLTGAGGFVLGLIICGVGIFMHRRSKKGEKACRFNEDLHKQGS

SEQ ID NO: 52309 - protein, 258 aa, Homo sapiens
MMVLQVSAAPRTVALTALLMVLLTSVVQGRATPENYLFQGRQECYAFNGTQRFLERYIYNREEFVRFDSDVGEFRAVTELGRPDEEYWNSQKDILEEKRAVPDRMCRHNYELGGPMTLQRRVQPRVNVSPSKKGPLQHHNLLVCHVTDFYPGSIQVRWFLNGQEETAGVVSTNLIRNGDWTFQILVMLEMTPQQGDVYTCQVEHTSMDSPVTVEWKAQSDSARSKTLTGAGGFVLGLIICGVGIFMHRRSKKVQRGSA

SEQ ID NO: 52310 - protein, 228 aa, Homo sapiens; identical to SEQ ID NO: 52306

SEQ ID NO: 52311 - protein, 229 aa, Homo sapiens
KQAWRGSATRLGPQNSGRQECYAFNGTQRFLERYIYNREEFVRFDSDVGEFRAVTELGRPDEEYWNSQKDILEEERAVPDRMCRHNYELGGPMTLQRRVQPRVNVSPSKKGPLQHHNLLVCHVTDFYPGSIQVRWFLNGQEETAGVVSTNLIRNGDWTFQILVMLEMTPQQGDVYTCQVEHTSLDSPVTVEWKAQSDSARSKTLTGAGGFVLGLIICGVGIFMHRRSKK

SEQ ID NO: 52312 - protein, 258 aa, Homo sapiens
MMVLQVSAAPRTVALTALLMVLLTSVVQGRATPENYLFQGRQECYAFNGTQRFLERYIYNREEFVRFDSDVGEFRAVTELGRPDEEYWNSQKDILEEERAVPDRMCRHNYELGGPMTLQRRVQPRVNVSPSKKGPLQHHNLLVCHVTDFYPGSIQVRWFLNGQEETAGVVSTNLIRNGDWTFQILVMLEMTPQQGDVYTCQVEHTSLDSPVTVEWKAQSDSARSKTLTGAGGFVLGLIICGVGIFMHRRSKKVQRGSA

SEQ ID NO: 52313 - protein, 235 aa, Homo sapiens
  VARIANT 1: note = MOD_RES - Any amino acid
XNYLFQGRQECYAFNGTQRFLERYIYNREEFARFDSDVGEFRAVTELGRPAAEYWNSQKDILEEKRAVPDRMCRHNYELGGPMTLQRRVQPRVNVSPSKKGPLQHHNLLVCHVTDFYPGSIQVRWFLNGQEETAGVVSTNLIRNGDWTFQILVMLEMTPQQGDVYTCQVEHTSLDSPVTVEWKAQSDSARSKTLTGAGGFVLGLIICGVGIFMHRRSKKGEKACRFNEDLHKQGS

SEQ ID NO: 52314 - protein, 229 aa, Homo sapiens
KQAWRGSATRLGPQNSGRQECYAFNGTQRFLERYIYNREEFARFDSDVGEFRAVTELGRPAAEYWNSQKDILEEKRAVPDRMCRHNYELGGPMTLQRRVQPRVNVSPSKKGPLQHHNLLVCHVTDFYPGSIQVRWFLNGQEETAGVVSTNLIRNGDWTFQILVMLEMTPQQGDVYTCQVEHTSLDSPVTVEWKAQSDSARSKTLTGAGGFVLGLIICGVGIFMHRRSKK

SEQ ID NO: 52315 - protein, 258 aa, Homo sapiens
MMVLQVSAAPRTVALTALLMVLLTSVVQGRATPENYLFQGRQECYAFNGTQRFLERYIYNREEFARFDSDVGEFRAVTELGRPAAEYWNSQKDILEEKRAVPDRMCRHNYELGGPMTLQRRVQPRVNVSPSKKGPLQHHNLLVCHVTDFYPGSIQVRWFLNGQEETAGVVSTNLIRNGDWTFQILVMLEMTPQQGDVYTCQVEHTSLDSPVTVEWKAQSDSARSKTLTGAGGFVLGLIICGVGIFMHRRSKKVQRGSA

SEQ ID NO: 52316 - protein, 82 aa, Homo sapiens
MTPQQGDVYTCQVEHTSLDSPVTVEWKAQSDSARSKTLTGAGGRAGAHHLWSGHLHAQEEQESSTRICINRVPELTEKTIVP

SEQ ID NO: 52317 - protein, 258 aa, Homo sapiens; identical to SEQ ID NO: 52309

SEQ ID NO: 52318 - protein, 229 aa, Homo sapiens; identical to SEQ ID NO: 52314

SEQ ID NO: 52319 - protein, 235 aa, Homo sapiens
  VARIANT 1: note = MOD_RES - Any amino acid
XNYLFQGRQECYAFNGTQRFLERYIYNREELVRFDSDVGEFRAVTELGRPEAEYWNSQKDILEEERAVPDRMCRHNYELGGPMTLQRRVQPRVNVSPSKKGPLQHHNLLVCHVTDFYPGSIQVRWFLNGQEETAGVVSTNLIRNGDWTFQILVMLEMTPQQGDVYTCQVEHTSLDSPVTVEWKAQSDSARSKTLTGAGGFVLGLIICGVGIFMHRRSKKGEKACRFNEDLHKQGS

SEQ ID NO: 52320 - protein, 258 aa, Homo sapiens; identical to SEQ ID NO: 52315

SEQ ID NO: 52321 - protein, 235 aa, Homo sapiens
  VARIANT 1: note = MOD_RES - Any amino acid
XNYVYQLRQECYAFNGTQRFLERYIYNREEFVRFDSDVGEFRAVTELGRPDEDYWNSQKDLLEEKRAVPDRVCRHNYELDEAVTLQRRVQPKVNVSPSKKGPLQHHNLLVCHVTDFYPGSIQVRWFLNGQEETAGVVSTNLIRNGDWTFQILVMLEMTPQQGDVYICQVEHTSLDSPVTVEWKAQSDSARSKTLTGAGGFVLGLIICGVGIFMHRRSKKGEKACKFNEDLHKQGS

SEQ ID NO: 52322 - protein, 229 aa, Homo sapiens
KQAWRGSATRLGPQNSGRQECYAFNGTQRFLERYIYNREEFVRFDSDVGEFRAVTELGRPDEEYWNSQKDILEEKRAVPDRMCRHNYELGGPMTLQRRVQPRVNVSPSKKGPLQHHNLLVCHVTDFYPGSIQVRWFLNGQEETAGVVSTNLIRNGDWTFQILVMLEMTPQQGDVYTCQVEHTSMDSPVTVEWKAQSDSARSKTLTGAGGFVLGLIICGVGIFMHRRSKK

SEQ ID NO: 52323 - protein, 228 aa, Homo sapiens
MMVLQVSAAPRTVALTALLMVLLTSVVQGRATPENYVYQLRQECYAFNGTQRFLERYIYNREEFVRFDSDVGEFRAVTELGRPDEDYWNSQKDLLEEKRAVPDRVCRHNYELDEAVTLQRRGSIQVRWFLNGQEETAGVVSTNLIRNGDWTFQILVMLEMTPQQGDVYICQVEHTSLDSPVTVEWKAQSDSARSKTLTGAGGFVLGLIICGVGIFMHRRSKKVQRGSA

SEQ ID NO: 52324 - protein, 228 aa, Homo sapiens; identical to SEQ ID NO: 52307

SEQ ID NO: 52325 - protein, 228 aa, Homo sapiens; identical to SEQ ID NO: 52306

SEQ ID NO: 52326 - protein, 229 aa, Homo sapiens; identical to SEQ ID NO: 52322

SEQ ID NO: 52327 - protein, 235 aa, Homo sapiens
  VARIANT 1: note = MOD_RES - Any amino acid
XNYLFQGRQECYAFNGTQRFLERYIYNREEFVRFDSDVGEFRAVTELGRPDEEYWNSQKDILEEERAVPDRMCRHNYELGGPMTLQRRVQPRVNVSPSKKGPLQHHNLLVCHVTDFYPGSIQVRWFLNGQEETAGVVSTNLIRNGDWTFQILVMLEMTPQQGDVYTCQVEHTSLDSPVTVEWKAQSDSARSKTLTGAGGFVLGLIICGVGIFMHRRSKKGEKACRFNEDLHKQGS

SEQ ID NO: 52328 - protein, 235 aa, Homo sapiens; identical to SEQ ID NO: 52313
  VARIANT 1: note = MOD_RES - Any amino acid

SEQ ID NO: 52329 - protein, 228 aa, Homo sapiens
MMVLQVSAAPRTVALTALLMVLLTSVVQGRATPENYLFQGRQECYAFNGTQRFLERYIYNREEFVRFDSDVGEFRAVTELGRPDEEYWNSQKDILEEERAVPDRMCRHNYELGGPMTLQRRGSIQVRWFLNGQEETAGVVSTNLIRNGDWTFQILVMLEMTPQQGDVYTCQVEHTSLDSPVTVEWKAQSDSARSKTLTGAGGFVLGLIICGVGIFMHRRSKKVQRGSA

SEQ ID NO: 52330 - protein, 229 aa, Homo sapiens
KQAWRGSATRLGPQNSLRQECYAFNGTQRFLERYIYNREEFVRFDSDVGEFRAVTELGRPDEDYWNSQKDLLEEKRAVPDRVCRHNYELDEAVTLQRRVQPKVNVSPSKKGPLQHHNLLVCHVTDFYPGSIQVRWFLNGQEETAGVVSTNLIRNGDWTFQILVMLEMTPQQGDVYICQVEHTSLDSPVTVEWKAQSDSARSKTLTGAGGFVLGLIICGVGIFMHRRSKK

SEQ ID NO: 52331 - protein, 258 aa, Homo sapiens; identical to SEQ ID NO: 52315

SEQ ID NO: 52332 - protein, 235 aa, Homo sapiens; identical to SEQ ID NO: 52308
  VARIANT 1: note = MOD_RES - Any amino acid

SEQ ID NO: 52333 - protein, 229 aa, Homo sapiens; identical to SEQ ID NO: 52314

SEQ ID NO: 52334 - protein, 235 aa, Homo sapiens; identical to SEQ ID NO: 52313
  VARIANT 1: note = MOD_RES - Any amino acid

SEQ ID NO: 52335 - protein, 123 aa, Homo sapiens
MMVLQVSAAPRTVALTALLMVLLTSVVQGRATPENYLFQGRQECYAFNGTQRFLERYIYNREEFARFDSDVGEFRAVTELGRPAAEYWNSQKDILEEKRAVPDRMCRHNYELGGPMTLQRRGE

SEQ ID NO: 52336 - protein, 82 aa, Homo sapiens; identical to SEQ ID NO: 52316

SEQ ID NO: 52337 - protein, 82 aa, Homo sapiens; identical to SEQ ID NO: 52316

SEQ ID NO: 52338 - protein, 123 aa, Homo sapiens
MMVLQVSAAPRTVALTALLMVLLTSVVQGRATPENYLFQGRQECYAFNGTQRFLERYIYNREELVRFDSDVGEFRAVTELGRPEAEYWNSQKDILEEERAVPDRMCRHNYELGGPMTLQRRGE

SEQ ID NO: 52339 - protein, 123 aa, Homo sapiens
MMVLQVSAAPRTVALTALLMVLLTSVVQGRATPENYLFQGRQECYAFNGTQRFLERYIYNREEFVRFDSDVGEFRAVTELGRPDEEYWNSQKDILEEKRAVPDRMCRHNYELGGPMTLQRRGE

SEQ ID NO: 52340 - protein, 123 aa, Homo sapiens
MMVLQVSAAPRTVALTALLMVLLTSVVQGRATPENYLFQGRQECYAFNGTQRFLERYIYNREEFVRFDSDVGEFRAVTELGRPDEEYWNSQKDILEEERAVPDRMCRHNYELGGPMTLQRRGE

SEQ ID NO: 52341 - protein, 249 aa, Homo sapiens
MVLLTSVVQGRATPENYVYQLRQECYAFNGTQRFLERYIYNREEFVRFDSDVGEFRAVTELGRPDEDYWNSQKDLLEEKRAVPDRVCRHNYELDEAVTLQRRVQPKVNVSPSKKGPLQHHNLLVCHVTDFYPGSIQVRWFLNGQEETAGVVSTNLIRNGDWTFQILVMLEMTPQQGDVYICQVEHTSLDSPVTVEWKAQSDSARSKTLTGAGGFVLGLIICGVGIFMHRRSKKGEKACKFNEDLHKQGS

SEQ ID NO: 52342 - protein, 82 aa, Homo sapiens; identical to SEQ ID NO: 52316

SEQ ID NO: 52343 - protein, 123 aa, Homo sapiens; identical to SEQ ID NO: 52335

SEQ ID NO: 52344 - protein, 123 aa, Homo sapiens; identical to SEQ ID NO: 52335

SEQ ID NO: 52345 - protein, 65 aa, Homo sapiens
MDSPVTVEWKAQSDSARSKTLTGAGGRAGAHHLWSGHLHAQEEQESSTRICINRVPELTEKTIVP

SEQ ID NO: 52346 - protein, 126 aa, Homo sapiens
MMVLQVSAAPRTVALTALLMVLLTSVVQGRATPENYVYQLRQECYAFNGTQRFLERYIYNREEFVRFDSDVGEFRAVTELGRPDEDYWNSQKDLLEEKRAVPDRVCRHNYELDEAVTLQRRERGKK

SEQ ID NO: 52347 - protein, 82 aa, Homo sapiens
MTPQQGDVYICQVEHTSLDSPVTVEWKAQSDSARSKTLTGAGGRAGAHHLWSGHLHAQEEQESSTRICINRVPDLTEKTNVP

SEQ ID NO: 52348 - protein, 82 aa, Homo sapiens; identical to SEQ ID NO: 52316

SEQ ID NO: 52349 - protein, 123 aa, Homo sapiens; identical to SEQ ID NO: 52339

SEQ ID NO: 52350 - protein, 65 aa, Homo sapiens; identical to SEQ ID NO: 52345

SEQ ID NO: 52351 - protein, 255 aa, Homo sapiens
MILNKALLLGALALTTVMSPCGGEDIVADHVASCGVNLYQFYGPSGQYTHEFDGDEQFYVDLERKETAWRWPEFSKFGGFDPQGALRNMAVAKHNLNIMIKRYNSTAATNEVPEVTVFSKSPVTLGQPNTLICLVDNIFPPVVNITWLSNGQSVTEGVSETSFLSKSDHSFFKISYLTFLPSADEIYDCKVEHWGLDQPLLKHWEPEIPAPMSELTETVVCALGLSVGLMGIVVGTVFIIQGLRSVGASRHQGPL

SEQ ID NO: 52352 - protein, 255 aa, Homo sapiens; identical to SEQ ID NO: 52351

SEQ ID NO: 52353 - protein, 254 aa, Homo sapiens
MILNKALMLGALALTTVMSPCGGEDIVADHVASYGVNLYQSYGPSGQYTHEFDGDEQFYVDLGRKETVWCLPVLRQFRFDPQFALTNIAVLKHNLNSLIKRSNSTAATNEVPEVTVFSKSPVTLGQPNILICLVDNIFPPVVNITWLSNGHSVTEGVSETSFLSKSDHSFFKISYLTLLPSAEESYDCKVEHWGLDKPLLKHWEPEIPAPMSELTETVVCALGLSVGLVGIVVGTVFIIRGLRSVGASRHQGPL

SEQ ID NO: 52354 - protein, 255 aa, Homo sapiens; identical to SEQ ID NO: 52351

SEQ ID NO: 52355 - protein, 255 aa, Homo sapiens; identical to SEQ ID NO: 52351

SEQ ID NO: 52356 - protein, 254 aa, Homo sapiens; identical to SEQ ID NO: 52353

SEQ ID NO: 52357 - protein, 254 aa, Homo sapiens; identical to SEQ ID NO: 52353

SEQ ID NO: 52358 - protein, 24 aa, Homo sapiens
MILNKALMLGALALTTVMSPCGGE

SEQ ID NO: 52359 - protein, 254 aa, Homo sapiens
MILNKALMLGALALTTVMSPCGGEDIVADHVASYGVNLYQSYGPSGQFTHEFDGDEEFYVDLERKETVWKLPLFHRLRFDPQFALTNIAVLKHNLNILIKRSNSTAATNEVPEVTVFSKSPVTLGQPNTLICLVDNIFPPVVNITWLSNGHSVTEGVSETSFLSKSDHSFFKISYLTFLPSADEIYDCKVEHWGLDEPLLKHWEPEIPAPMSELTETVVCALGLSVGLVGIVVGTVLIIRGLRSVGASRHQGPL

SEQ ID NO: 52360 - protein, 255 aa, Homo sapiens
MILNKALMLGALALTTVMSPCGGEDIVADHVASYGVNLYQSYGPSGQYSHEFDGDEEFYVDLERKETVWQLPLFRRFRRFDPQFALTNIAVLKHNLNIVIKRSNSTAATNEVPEVTVFSKSPVTLGQPNTLICLVDNIFPPVVNITWLSNGHSVTEGVSETSFLSKSDHSFFKISYLTFLPSADEIYDCKVEHWGLDEPLLKHWEPEIPTPMSELTETVVCALGLSVGLVGIVVGTVLIIRGLRSVGASRHQGPL

SEQ ID NO: 52361 - protein, 255 aa, Homo sapiens
MILNKALMLGALALTTVMSPCGGEDIVADHVASYGVNLYQSYGPSGQYSHEFDGDEEFYVDLERKETVWQLPLFRRFRRFDPQFALTNIAVLKHNLNIVIKRSNSTAATNEVPEVTVFSKSPVTLGQPNTLICLVDNIFPPVVNITWLSNGHSVTEGVSETSFLSKSDHSFFKISYLTFLPSDDEIYDCKVEHWGLDEPLLKHWEPEIPTPMSELTETVVCALGLSVGLVGIVVGTVLIIRGLRSVGASRHQGPL

SEQ ID NO: 52362 - protein, 24 aa, Homo sapiens
MILNKALLLGALALTTVMSPCGGE

SEQ ID NO: 52363 - protein, 255 aa, Homo sapiens; identical to SEQ ID NO: 52361

SEQ ID NO: 52364 - protein, 254 aa, Homo sapiens; identical to SEQ ID NO: 52359

SEQ ID NO: 52365 - protein, 254 aa, Homo sapiens; identical to SEQ ID NO: 52359

SEQ ID NO: 52366 - protein, 254 aa, Homo sapiens; identical to SEQ ID NO: 52359

SEQ ID NO: 52367 - protein, 255 aa, Homo sapiens; identical to SEQ ID NO: 52360

SEQ ID NO: 52368 - protein, 24 aa, Homo sapiens
MILNKALMLGALALTTVMSPCGGE

SEQ ID NO: 52369 - protein, 24 aa, Homo sapiens
MILNKALMLGALALTTVMSPCGGE

SEQ ID NO: 52370 - protein, 255 aa, Homo sapiens; identical to SEQ ID NO: 52361

SEQ ID NO: 52371 - protein, 254 aa, Homo sapiens; identical to SEQ ID NO: 52359

SEQ ID NO: 52372 - protein, 254 aa, Homo sapiens; identical to SEQ ID NO: 52359

SEQ ID NO: 52373 - protein, 254 aa, Homo sapiens; identical to SEQ ID NO: 52359

SEQ ID NO: 52374 - protein, 255 aa, Homo sapiens; identical to SEQ ID NO: 52361

SEQ ID NO: 52375 - protein, 254 aa, Homo sapiens; identical to SEQ ID NO: 52359

SEQ ID NO: 52376 - protein, 214 aa, Homo sapiens
MILNKALLLGALALTTVMSPCGGEDIVADHVASCGVNLYQFYGPSGQYTHEFDGDEQFYVDLERKETAWRWPEFSKFGGFDPQGALRNMAVAKHNLNIMIKRYNSTAATNEVPEVTVFSKSPVTLGQPNTLICLVDNIFPPVVNITWLSNGQSVTEGVSETSFLSKSDHSFFKISYLTFLPSADEIYDCKVEHWGLDQPLLKHWGASPSTGAEE

SEQ ID NO: 52377 - protein, 191 aa, Homo sapiens
MSPCGGEDIVADHVASYGVNLYQSYGPSGQYSHEFDGDEEFYVDLERKETVWQLPLFRRFRRFDPQFALTNIAVLKHNLNIVIKRSNSTAATNEVPEVTVFSKSPVTLGQPNTLICLVDNIFPPVVNITWLSNGHSVTEGVSETSFLSKSDHSFFKISYLTFLPSADEIYDCKVEHWGLDEPLLKHWGLLH

SEQ ID NO: 52378 - protein, 146 aa, Homo sapiens [sequence omitted]

SEQ ID NO: 52379 - protein, 253 aa, Homo sapiens
GCLGKRMILNKALMLGALALTTVMSPCGGEDIVADHVASYGVNLYQSYGPSGQYTHEFDGDEQFYVDLGRKETVWCLPVLRQFRFDPQFALTNIAVLKHNLNSLIKRSNSTAATNEVPEVTVFSKSPVTLGQPNILICLVDNIFPPVVNITWLSNGHSVTEGVSETSFLSKSDHSFFKISYLTLLPSAEESYDCKVEHWGLDKPLLKHWGKDEFHHFLMLSCLSSSELPAFYSYIPKLVFHTSWVSFFLIFFF

SEQ ID NO: 52380 - protein, 200 aa, Homo sapiens
MSPCGGEDIVADHVASYGVNLYQSYGPSGQYSHEFDGDEEFYVDLERKETVWQLPLFRRFRRFDPQFALTNIAVLKHNLNIVIKRSNSTAATNEVPEVTVFSKSPVTLGQPNTLICLVDNIFPPVVNITWLSNGHSVTEGVSETSFLSKSDHSFFKISYLTFLPSADEIYDCKVEHWGLDEPLLKHWESQSRESEESTKS

SEQ ID NO: 52381 - protein, 193 aa, Homo sapiens
MSPCGGEDIVADHVASYGVNLYQSYGPSGQYTHEFDGDEQFYVDLGRKETVWCLPVLRQFRFDPQFALTNIAVLKHNLNSLIKRSNSTAATNEVPEVTVFSKSPVTLGQPNILICLVDNIFPPVVNITWLSNGHSVTEGVSETSFLSKSDHSFFKISYLTLLPSAEESYDCKVEHWGLDKPLLKHWVHGFLSF

SEQ ID NO: 52382 - protein, 201 aa, Homo sapiens
MSPCGGEDIVADHVASYGVNLYQSYGPSGQYSHEFDGDEEFYVDLERKETVWQLPLFRRFRRFDPQFALTNIAVLKHNLNIVIKRSNSTAATNEVPEVTVFSKSPVTLGQPNTLICLVDNIFPPVVNITWLSNGHSVTEGVSETSFLSKSDHSFFKISYLTFLPSADEIYDCKVEHWGLDEPLLKHWGIQAEEGQRRKKLG

SEQ ID NO: 52383 - protein, 85 aa, Homo sapiens
NTLICLVDNIFPPVVNITWLSNGHSVTEGVSETSFLSKSDHSFFKISYLTFLPSADEIYDCKVEHWGLDEPLLKHWGKDFMSFFY

SEQ ID NO: 52384 - protein, 129 aa, Homo sapiens
GCLGKRMILNKALMLGALALTTVMSPCGGEDIVADHVASYGVNLYQSYGPSGQYSHEFDGDEEFYVDLERKETVWQLPLFRRFRRFDPQFALTNIAVLKHNLNIVIKRSNSTAATNEVPEVTVFSKSPV

SEQ ID NO: 52385 - protein, 255 aa, Homo sapiens
MILNKALLLGALALTAVMSPCGGEDIVADHVASYGVNFYQSHGPSGQYTHEFDGDEEFYVDLETKETVWQLPMFSKFISFDPQSALRNMAVGKHTLEFMMRQSNSTAATNEVPEVTVFSKFPVTLGQPNTLICLVDNIFPPVVNITWLSNGHSVTEGVSETSFLSKSDHSFFKISYLTFLPSADEIYDCKVEHWGLDEPLLKHWEPEIPAPMSELTETLVCALGLSVGLMGIVVGTVFIIQGLRSVDASRHQGLL

SEQ ID NO: 52386 - protein, 255 aa, Homo sapiens
MILNKALLLGALALTAVMSPCGGEDIVADHVASYGVNFYQSHGPSGQYTHEFDGDEEFYVDLETKETVWQLPMFSKFISFDPQSALRNMAVGKHTLEFMMRQSNSTAATNEVPEVTVFSKFPVTLGQPNTLICLVDNIFPPVVNITWLSNGHSVTEGVSETSFLSKSDHSFFKISYLTFLPSADEIYDCKVEHWGLDEPLLKHWEPEIPAPMSELTETLVCALGLSVGLMGIVVGTVFIIQGLRSVGASRHQGLL

SEQ ID NO: 52387 - protein, 255 aa, Homo sapiens [sequence omitted]

SEQ ID NO: 52388 - protein, 255 aa, Homo sapiens; identical to SEQ ID NO: 52386

SEQ ID NO: 52389 - protein, 255 aa, Homo sapiens [sequence omitted]

SEQ ID NO: 52390 - protein, 255 aa, Homo sapiens; identical to SEQ ID NO: 52386

SEQ ID NO: 52391 - protein, 255 aa, Homo sapiens; identical to SEQ ID NO: 52386

SEQ ID NO: 52392 - protein, 255 aa, Homo sapiens [sequence omitted]

SEQ ID NO: 52393 - protein, 255 aa, Homo sapiens; identical to SEQ ID NO: 52386

SEQ ID NO: 52394 - protein, 82 aa, Homo sapiens
DHVASYGVNFYQSHGPSGQYTHEFDGDEEFYVDLETKETVWQLPMFSKFISFDPQSALRNMAVGKHTLEFMMRQSNSTAATN

SEQ ID NO: 52395 - protein, 255 aa, Homo sapiens; identical to SEQ ID NO: 52386

SEQ ID NO: 52396 - protein, 27 aa, Homo sapiens
MILNKALLLGALALTAVMSPCGGEDIV

SEQ ID NO: 52397 - protein, 269 aa, Homo sapiens
MSWKKALRIPGDLRVATVTLMLAMLSSLLAEGRDSPEDFVFQFKGMCYFTNGTERVRLVTRYIYNREEYARFDSDVGVYRAVTPQGRPDAEYWNSQKEVLEGTRAELDTVCRHNYEVAFRGILQRRVEPTVTISPSRTEALNHHNLLVCSVTDFYPGQIKVRWFRNDQEETAGVVSTPLIRNGDWTFQILVMLEMTPQRGDVYTCHVEHPSLQSPITVEWRAQSESAQSKMLSGVGGFVLGLIFLGLGLIIRQRSQKGPQGPPPAGLLH

SEQ ID NO: 52398 - protein, 261 aa, Homo sapiens
MSWKKALRIPGGLRAATVTLMLSMLSTPVAEGRDSPEDFVYQFKGMCYFTNGTERVRLVSRSIYNREEIVRFDSDVGEFRAVTLLGLPAAEYWNSQKDILERKRAAVDRVCRHNYQLELRTTLQRRVEPTVTISPSRTEALNHHNLLVCSVTDFYPAQIKVRWFRNDQEETAGVVSTPLIRNGDWTFQILVMLEMTPQRGDVYTCHVEHPSLQSPITVEWRAQSESAQSKMLSGIGGFVLGLIFLGLGLIIHHRSQKGLLH

SEQ ID NO: 52399 - protein, 261 aa, Homo sapiens; identical to SEQ ID NO: 52398

SEQ ID NO: 52400 - protein, 269 aa, Homo sapiens
MSWKKALRIPGGLRAATVTLMLAMLSTPVAEGRDSPEDFVYQFKAMCYFTNGTERVRYVTRYIYNREEYARFDSDVEVYRAVTPLGPPDAEYWNSQKEVLERTRAELDTVCRHNYQLELRTTLQRRVEPTVTISPSRTEALNHHNLLVCSVTDFYPAQIKVRWFRNDQEETTGVVSTPLIRNGDWTFQILVMLEMTPQHGDVYTCHVEHPSLQNPITVEWRAQSESAQSKMLSGIGGFVLGLIFLGLGLIIHHRSQKGPQGPPPAGLLH

SEQ ID NO: 52401 - protein, 269 aa, Homo sapiens
MSWKKALRIPGGLRVATVTLMLAMLSTPVAEGRDSPEDFVYQFKGMCYFTNGTERVRLVTRYIYNREEYARFDSDVGVYRAVTPLGPPDAEYWNSQKEVLERTRAELDTVCRHNYQLELRTTLQRRVEPTVTISPSRTEALNHHNLLVCSVTDFYPAQIKVRWFRNDQEETTGVVSTPLIRNGDWTFQILVMLEMTPQRGDVYTCHVEHPSLQNPIIVEWRAQSESAQSKMLSGIGGFVLGLIFLGLGLIIHHRSQKGPQGPPPAGLLH

SEQ ID NO: 52402 - protein, 224 aa, Homo sapiens
MSWKKALRIPGDLRVATVTLMLAMLSSLLAEGRDSPEDFVFQFKGMCYFTNGTERVRLVTRYIYNREEYARFDSDVGVYRAVTPQGRPDAEYWNSQKEVLEGTRAELDTVCRHNYEVAFRGILQRRVEPTVTISPSRTEALNHHNLLVCSVTDFYPGQIKVRWFRNDQEETAGVVSTPLIRNGDWTFQILVMLEMTPQRGDVYTCHVEHPSLQSPITVEWRLLH

SEQ ID NO: 52403 - protein, 261 aa, Homo sapiens
MSWKKALRIPGDLRVATVTLMLAMLSSLLAEGRDSPEDFVFQFKGMCYFTNGTERVRLVTRYIYNREEYARFDSDVGVYRAVTPQGRPDAEYWNSQKEVLEGTRAELDTVCRHNYEVAFRGILQRRVEPTVTISPSRTEALNHHNLLVCSVTDFYPGQIKVRWFRNDQEETAGVVSTPLIRNGDWTFQILVMLEMTPQRGDVYTCHVEHPSLQSPITVEWRAQSESAQSKMLSGVGGFVLGLIFLGLGLIIRQRSQKGLLH

SEQ ID NO: 52404 - protein, 261 aa, Homo sapiens
MSWKKALRIPGGLRAATVTLMLAMLSTPVAEGRDSPEDFVYQFKAMCYFTNGTERVRYVTRYIYNREEYARFDSDVEVYRAVTPLGPPDAEYWNSQKEVLERTRAELDTVCRHNYQLELRTTLQRRVEPTVTISPSRTEALNHHNLLVCSVTDFYPAQIKVRWFRNDQEETTGVVSTPLIRNGDWTFQILVMLEMTPQHGDVYTCHVEHPSLQNPITVEWRAQSESAQSKMLSGIGGFVLGLIFLGLGLIIHHRSQKGLLH

SEQ ID NO: 52405 - protein, 224 aa, Homo sapiens
MSWKKALRIPGGLRAATVTLMLSMLSTPVAEGRDSPEDFVYQFKGMCYFTNGTERVRLVSRSIYNREEIVRFDSDVGEFRAVTLLGLPAAEYWNSQKDILERKRAAVDRVCRHNYQLELRTTLQRRVEPTVTISPSRTEALNHHNLLVCSVTDFYPAQIKVRWFRNDQEETAGVVSTPLIRNGDWTFQILVMLEMTPQRGDVYTCHVEHPSLQSPITVEWRLLH

SEQ ID NO: 52406 - protein, 261 aa, Homo sapiens; identical to SEQ ID NO: 52404

SEQ ID NO: 52407 - protein, 261 aa, Homo sapiens
MSWKKALRIPGGLRVATVTLMLAMLSTPVAEGRDSPEDFVYQFKGMCYFTNGTERVRGVTRYIYNREEYARFDSDVGVYRAVTPLGPPAAEYWNSQKEVLERTRAELDTVCRHNYQLELRTTLQRRVEPTVTISPSRTEALNHHNLLVCSVTDFYPAQIKVRWFRNDQEETTGVVSTPLIRNGDWTFQILVMLEMTPQRGDVYTCHVEHPSLQNPIIVEWRAQSESAQSKMLSGIGGFVLGLIFLGLGLIIHHRSQKGLLH

SEQ ID NO: 52408 - protein, 224 aa, Homo sapiens
MSWKKALRIPGGLRAATVTLMLSMLSTPVAEGRDSPEDFVYQFKGMCYFTNGTERVRLVSRSIYNREEIVRFDSDVGEFRAVTLLGLPAAEYWNSQKDILERKRAAVDRVCRHNYQLELRTTLQRRVEPTVTISPSRTEALNHHNLLVCSVTDFYPAQIKVRWFRNGQEETAGVVSTPLIRNGDWTFQILVMLEMTPQRGDVYTCHVEHPSLQSPITVEWRLLH

SEQ ID NO: 52409 - protein, 261 aa, Homo sapiens [sequence omitted]

SEQ ID NO: 52410 - protein, 261 aa, Homo sapiens
MSWKKALRIPGGLRAATVTLMLSMLSTPVAEGRDSPEDFVYQFKGMCYFTNGTERVRLVSRSIYNREEIVRFDSDVGEFRAVTLLGLPAAEYWNSQKDILERKRAAVDRVCRHNYQLELRTTLQRRVEPTVTISPSRTEALNHHNLLVCSVTDFYPAQIKVRWFRNGQEETAGVVSTPLIRNGDWTFQILVMLEMTPQRGDVYTCHVEHPSLQSPITVEWRAQSESAQSKMLSGIGGFVLGLIFLGLGLIIHHRSQKGLLH

SEQ ID NO: 52411 - protein, 269 aa, Homo sapiens
MSWKKALRIPGGLRAATVTLMLSMLSTPVAEGRDSPEDFVYQFKGMCYFTNGTERVRLVSRSIYNREEIVRFDSDVGEFRAVTLLGLPAAEYWNSQKDILERKRAAVDRVCRHNYQLELRTTLQRRVEPTVTISPSRTEALNHHNLLVCSVTDFYPAQIKVRWFRNGQEETAGVVSTPLIRNGDWTFQILVMLEMTPQRGDVYTCHVEHPSLQSPITVEWRAQSESAQSKMLSGIGGFVLGLIFLGLGLIIHHRSQKGPQGPPPAGLLH

SEQ ID NO: 52412 - protein, 261 aa, Homo sapiens [sequence omitted]

SEQ ID NO: 52413 - protein, 224 aa, Homo sapiens
MSWKKALRIPGGLRAATVTLMLAMLSTPVAEGRDSPEDFVYQFKAMCYFTNGTERVRYVTRYIYNREEYARFDSDVEVYRAVTPLGPPDAEYWNSQKEVLERTRAELDTVCRHNYQLELRTTLQRRVEPTVTISPSRTEALNHHNLLVCSVTDFYPAQIKVRWFRNDQEETTGVVSTPLIRNGDWTFQILVMLEMTPQHGDVYTCHVEHPSLQNPITVEWRLLH

SEQ ID NO: 52414 - protein, 261 aa, Homo sapiens; identical to SEQ ID NO: 52410

SEQ ID NO: 52415 - protein, 134 aa, Homo sapiens
MSWKKALRIPGGLRAATVTLMLSMLSTPVAEGRDSPVEPTVTISPSRTEALNHHNLLVCSVTDFYPAQIKVRWFRNGQEETAGVVSTPLIRNGDWTFQILVMLEMTPQRGDVYTCHVEHPSLQSPITVEWRLLH

SEQ ID NO: 52416 - protein, 134 aa, Homo sapiens
MSWKKALRIPGGLRVATVTLMLAMLSTPVAEGRDSPVEPTVTISPSRTEALNHHNLLVCSVTDFYPAQIKVRWFRNDQEETTGVVSTPLIRNGDWTFQILVMLEMTPQRGDVYTCHVEHPSLQNPIIVEWRLLH

SEQ ID NO: 52417 - protein, 144 aa, Homo sapiens
MSWKKALRIPGGLRVATVTPLGPPDAEYWNSQKEVLERTRAELDTVCRHNYQLELRTTLQRRVEPTVTISPSRTEALNHHNLLVCSVTDFYPAQIKVRWFRNDQEETTGVVSTPLIRNGDWTFQILVMLEMTPQRGDVYTCHVE

SEQ ID NO: 52418 - protein, 134 aa, Homo sapiens
MSWKKALRIPGGLRAATVTLMLAMLSTPVAEGRDSPVEPTVTISPSRTEALNHHNLLVCSVTDFYPAQIKVRWFRNDQEETTGVVSTPLIRNGDWTFQILVMLEMTPQHGDVYTCHVEHPSLQNPITVEWRLLH

SEQ ID NO: 52419 - protein, 261 aa, Homo sapiens; identical to SEQ ID NO: 52403

SEQ ID NO: 52420 - protein, 224 aa, Homo sapiens
MSWKKALRIPGGLRVATVTLMLAMLSTPVAEGRDSPEDFVYQFKGMCYFTNGTERVRLVTRYIYNREEYARFDSDVGVYRAVTPLGPPDAEYWNSQKEVLERTRAELDTVCRHNYQLELRTTLQRRVEPTVTISPSRTEALNHHNLLVCSVTDFYPAQIKVRWFRNDQEETTGVVSTPLIRNGDWTFQILVMLEMTPQRGDVYTCHVEHPSLQNPIIVEWRLLH

SEQ ID NO: 52421 - protein, 144 aa, Homo sapiens
MSWKKALRIPGDLRVATVTPQGRPDAEYWNSQKEVLEGTRAELDTVCRHNYEVAFRGILQRRVEPTVTISPSRTEALNHHNLLVCSVTDFYPGQIKVRWFRNDQEETAGVVSTPLIRNGDWTFQILVMLEMTPQRGDVYTCHVE

SEQ ID NO: 52422 - protein, 144 aa, Homo sapiens
MSWKKALRIPGGLRAATVTLLGLPAAEYWNSQKDILERKRAAVDRVCRHNYQLELRTTLQRRVEPTVTISPSRTEALNHHNLLVCSVTDFYPAQIKVRWFRNGQEETAGVVSTPLIRNGDWTFQILVMLEMTPQRGDVYTCHVE

SEQ ID NO: 52423 - protein, 144 aa, Homo sapiens
MSWKKALRIPGGLRAATVTPLGPPDAEYWNSQKEVLERTRAELDTVCRHNYQLELRTTLQRRVEPTVTISPSRTEALNHHNLLVCSVTDFYPAQIKVRWFRNDQEETTGVVSTPLIRNGDWTFQILVMLEMTPQHGDVYTCHVE

SEQ ID NO: 52424 - protein, 136 aa, Homo sapiens
MSWKKALRIPGGLRAATVTLMLSMLSTPVAEGRDSPEDFVYQFKGMCYFTNGTERVRLVSRSIYNREEIVRFDSDVGEFRAVTLLGLPAAEYWNSQKDILERKRAAVDRVCRHNYQLELRTTLQRRGMVTGPSRSW

SEQ ID NO: 52425 - protein, 136 aa, Homo sapiens
MSWKKALRIPGGLRAATVTLMLAMLSTPVAEGRDSPEDFVYQFKAMCYFTNGTERVRYVTRYIYNREEYARFDSDVEVYRAVTPLGPPDAEYWNSQKEVLERTRAELDTVCRHNYQLELRTTLQRRGTVTGPSRSW

SEQ ID NO: 52426 - protein, 136 aa, Homo sapiens
MSWKKALRIPGDLRVATVTLMLAMLSSLLAEGRDSPEDFVFQFKGMCYFTNGTERVRLVTRYIYNREEYARFDSDVGVYRAVTPQGRPDAEYWNSQKEVLEGTRAELDTVCRHNYEVAFRGILQRRGMVTGLSRSW

SEQ ID NO: 52427 - protein, 238 aa, Homo sapiens
MLSTPVAEGRDSPEDFVYQFKGMCYFTNGTERVRLVSRSIYNREEIVRFDSDVGEFRAVTLLGLPAAEYWNSQKDILERKRAAVDRVCRHNYQLELRTTLQRRVEPTVTISPSRTEALNHHNLLVCSVTDFYPAQIKVRWFRNGQEETAGVVSTPLIRNGDWTFQILVMLEMTPQRGDVYTCHVEHPSLQSPITVEWRAQSESAQSKMLSGIGGFVLGLIFLGLGLIIHHRSQKGLLH

SEQ ID NO: 52428 - protein, 180 aa, Homo sapiens
MCYFTNGTERVRGVTRYIYNREEYARFDSDVGVYRAVTPLGPPAAEYWNSQKEVLERTRAELDTVCRHNYQLELRTTLQRRVEPTVTISPSRTEALNHHNLLVCSVTDFYPAQIKVRWFRNDQEETTGVVSTPLIRNGDWTFQILVMLEMTPQRGDVYTCHVEHPSLQNPIIVEWRMDEF

SEQ ID NO: 52429 - protein, 238 aa, Homo sapiens
MLSTPVAEGRDSPEDFVYQFKGMCYFTNGTERVRLVSRSIYNREEIVRFDSDVGEFRAVTLLGLPAAEYWNSQKDILERKRAAVDRVCRHNYQLELRTTLQRRVEPTVTISPSRTEALNHHNLLVCSVTDFYPAQIKVRWFRNDQEETAGVVSTPLIRNGDWTFQILVMLEMTPQRGDVYTCHVEHPSLQSPITVEWRAQSESAQSKMLSGIGGFVLGLIFLGLGLIIHHRSQKGLLH

SEQ ID NO: 52430 - protein, 247 aa, Homo sapiens
MLSTPVAEGRDSPEDFVYQFKGMCYFTNGTERVRGVTRYIYNREEYARFDSDVGVYRAVTPLGPPAAEYWNSQKEVLERTRAELDTVCRHNYQLELRTTLQRRVEPTVTISPSRTEALNHHNLLVCSVTDFYPAQIKVRWFRNDQEETTGVVSTPLIRNGDWTFQILVMLEMTPQRGDVYTCHVEHPSLQNPIIVEWRAQSESAQSKMLSGIGGFVLGLIFLGLGLIIHHRSQKALPQGPPPAGDIS

SEQ ID NO: 52431 - protein, 238 aa, Homo sapiens; identical to SEQ ID NO: 52429

SEQ ID NO: 52432 - protein, 266 aa, Homo sapiens
MVCLRLPGGSCMAVLTVTLMVLSSPLALAGDTRPRFLEYSTSECHFFNGTERVRYLDRYFHNQEENVRFDSDVGEFRAVTELGRPDAEYWNSQKDLLEQKRGRVDNYCRHNYGVVESFTVQRRVHPKVTVYPSKTQPLQHHNLLVCSVSGFYPGSIEVRWFRNGQEEKTGVVSTGLIHNGDWTFQTLVMLETVPRSGEVYTCQVEHPSVTSPLTVEWRARSESAQSKMLSGVGGFVLGLLFLGAGLFIYFRNQKGHSGLQPRGFLS

SEQ ID NO: 52433 - protein, 266 aa, Homo sapiens
MVCLKLPGGSCMTALTVTLMVLSSPLALSGDTRPRFLWQPKRECHFFNGTERVRFLDRYFYNQEESVRFDSDVGEFRAVTELGRPDAEYWNSQKDILEQARAAVDTYCRHNYGVVESFTVQRRVQPKVTVYPSKTQPLQHHNLLVCSVSGFYPGSIEVRWFLNGQEEKAGMVSTGLIQNGDWTFQTLVMLETVPRSGEVYTCQVEHPSVTSPLTVEWRARSESAQSKMLSGVGGFVLGLLFLGAGLFIYFRNQKGHSGLQPTGFLS

SEQ ID NO: 52434 - protein, 266 aa, Homo sapiens; identical to SEQ ID NO: 52432

SEQ ID NO: 52435 - protein, 250 aa, Homo sapiens
LLKLTRDFPQRHEKYQSWAGTFHLCLKKNKYPDSRSTFIKHAGSYLKRGEFLSIHTAITCFFLQISARFLEQVKHECHFFNGTERVRFLDRYFYHQEEYVRFDSDVGEYRAVTELGRPDAEYWNSQKDLLEQRRAEVDTYCRHNYGVVESFTVQRRVYPEVTVYPAKTQPLQHHNLLVCSVNGFYPGSIEVRWFRNGQEEKTGVVSTGLIQNGDWTFQTLVMLETVPRSGEVYTCQVEHPSLTSPLTVEW

SEQ ID NO: 52436 - protein, 251 aa, Homo sapiens
  VARIANT 1: note = MOD_RES - Any amino acid
XLLKLTRDFPQRHEKYQSWAGTFHLCLKKNKYPDSRSTFIKHAGSYLKRGEFLAIHTAITCFFRQISARFLEYSTSECHFFNGTERVRYLDRYFHNQEENVRFDSDVGEFRAVTELGRPDAEYWNSQKDLLEQKRGRVDNYCRHNYGVVESFTVQRRVHPKVTVYPSKTQPLQHHNLLVCSVSGFYPGSIEVRWFRNGQEEKTGVVSTGLIHNGDWTFQTLVMLETVPRSGEVYTCQVEHPSVTSPLTVEW

SEQ ID NO: 52437 - protein, 266 aa, Homo sapiens
MVCLKFPGGSCMAALTVTLMVLSSPLALAGDTRPRFLEQVKHECHFFNGTERVRFLDRYFYHQEEYVRFDSDVGEYRAVTELGRPDAEYWNSQKDLLEQRRAEVDTYCRHNYGVVESFTVQRRVYPEVTVYPAKTQPLQHHNLLVCSVNGFYPGSIEVRWFRNGQEEKTGVVSTGLIQNGDWTFQTLVMLETVPRSGEVYTCQVEHPSLTSPLTVEWRARSESAQSKMLSGVGGFVLGLLFLGAGLFIYFRNQKGHSGLQPTGFLS

SEQ ID NO: 52438 - protein, 251 aa, Homo sapiens; identical to SEQ ID NO: 52436
  VARIANT 1: note = MOD_RES - Any amino acid

SEQ ID NO: 52439 - protein, 250 aa, Homo sapiens
  VARIANT 1: note = MOD_RES - Any amino acid
XLLKLTRDFPQRHEKYQSWAGTFHLCLKKNKYPDSRSTFIKHAGSYLKRGEFLSIHTAITCFFLQISARFLWQGKYKCHFFNGTERVQFLERLFYNQEEFVRFDSDVGEYRAVTELGRPVAESWNSQKDILEDRRGQVDTVCRHNYGVGESFTVQRRVHPEVTVYPAKTQPLQHHNLLVCSVSGFYPGSIEVRWFRNGQEEKAGVVSTGLIQNGDWTFQTLVMLETVPRSGEVYTCQVEHPSVMSPLTVE

SEQ ID NO: 52440 - protein, 266 aa, Homo sapiens
MVCLKLPGGSCMAALTVTLMVLSSPLALAGDTQPRFLWQGKYKCHFFNGTERVQFLERLFYNQEEFVRFDSDVGEYRAVTELGRPVAESWNSQKDILEDRRGQVDTVCRHNYGVGESFTVQRRVHPEVTVYPAKTQPLQHHNLLVCSVSGFYPGSIEVRWFRNGQEEKAGVVSTGLIQNGDWTFQTLVMLETVPRSGEVYTCQVEHPSVMSPLTVEWRARSESAQSKMLSGVGGFVLGLLFLGAGLFIYFRNQKGHSGLQPTGFLS

SEQ ID NO: 52441 - protein, 266 aa, Homo sapiens; identical to SEQ ID NO: 52440

SEQ ID NO: 52442 - protein, 269 aa, Homo sapiens
MSWKKALRIPGGLRVATVTLMLAMLSTPVAEGRDSPEDFVYQFKGMCYFTNGTERVRGVTRYIYNREEYARFDSDVGVYRAVTPLGPPAAEYWNSQKEVLERTRAELDTVCRHNYQLELRTTLQRRVYPEVTVYPAKTQPLQHHNLLVCSVNGFYPGSIEVRWFRNGQEEKTGVVSTGLIQNGDWTFQTLVMLETVPRSGEVYTCQVEHPSLTSPLTVEWRARSESAQSKMLSGVGGFVLGLLFLGAGLFIYFRNQKGHSGLQPTGFLS

SEQ ID NO: 52443 - protein, 263 aa, Homo sapiens
MVCLKFPGGSCMAALTVTLMVLSSPLALAGDTRPRFLEQVKHECHFFNGTERVRFLDRYFYHQEEYVRFDSDVGEYRAVTELGRPDAEYWNSQKDLLEQRRAEVDTYCRHNYGVVESFTVQRRVYPEVTVYPAKTQPLQHHNLLVCSVNGFYPGSIEVRWFRNGQEEKTGVVSTGLIQNGDWTFQTLVMLETVPRSGEVYTCQVEHPSLTSPLTVEWRARSESAQSKMLSGVGGFVLGLLFLGAGLFIYFRNQKGHSGLQPTG

SEQ ID NO: 52444 - protein, 46 aa, Homo sapiens
HSGLQPTGNTFSSSLRNRFGGQAQHACNPSTLGGRGGRIMRIPELK

SEQ ID NO: 52445 - protein, 296 aa, Homo sapiens
MVCLKFPGGSCMAALTVTLMVLSSPLALAGDTRPRFLEQVKHECHFFNGTERVRFLDRYFYHQEEYVRFDSDVGEYRAVTELGRPDAEYWNSQKDLLEQRRAEVDTYCRHNYGVVESFTVQRRVYPEVTVYPAKTQPLQHHNLLVCSVNGFYPGSIEVRWFRNGQEEKTGVVSTGLIQNGDWTFQTLVMLETVPRSGEVYTCQVEHPSLTSPLTVEWRARSESAQSKMLSGVGGFVLGLLFLGAGLFIYFRNQKGHSGLQPTGNTFSSSLRNRFGGQAQWLTPVIPALWEAEAGES

SEQ ID NO: 52446 - protein, 266 aa, Homo sapiens
MVCLKLPGGSSLAALTVTLMVLSSRLAFAGDTRPRFLELLKSECHFFNGTERVRFLERHFHNQEEYARFDSDVGEYRAVRELGRPDAEYWNSQKDLLEQKRGQVDNYCRHNYGVGESFTVQRRVHPQVTVYPAKTQPLQHHNLLVCSVSGFYPGSIEVRWFRNGQEEKAGVVSTGLIQNGDWTFQTLVMLETVPRSGEVYTCQVEHPSVTSPLTVEWSARSESAQSKMLSGVGGFVLGLLFLGAGLFIYFRNQKGHSGLQPTGFLS

SEQ ID NO: 52447 - protein, 266 aa, Homo sapiens
MVCLKLPGGSSLAALTVTLMVLSSRLAFAGDTRPRFLELRKSECHFFNGTERVRYLDRYFHNQEEFLRFDSDVGEYRAVTELGRPVAESWNSQKDLLEQKRGRVDNYCRHNYGVGESFTVQRRVHPQVTVYPAKTQPLQHHNLLVCSVSGFYPGSIEVRWFRNGQEEKAGVVSTGLIQNGDWTFQTLVMLETVPRSGEVYTCQVEHPSVTSALTVEWRARSESAQSKMLSGVGGFVLGLLFLGAGLFIYFRNQKGHSGLQPTGFLS

SEQ ID NO: 52448 - protein, 266 aa, Homo sapiens; identical to SEQ ID NO: 52446

SEQ ID NO: 52449 - protein, 266 aa, Homo sapiens
MVCLKLPGGSYMAKLTVTLMVLSSPLALAGDTRPRFLQQDKYECHFFNGTERVRFLHRDIYNQEEDLRFDSDVGEYRAVTELGRPDAEYWNSQKDFLEDRRAAVDTYCRHNYGVGESFTVQRRVEPKVTVYPARTQTLQHHNLLVCSVNGFYPGSIEVRWFRNSQEEKAGVVSTGLIQNGDWTFQTLVMLETVPRSGEVYTCQVEHPSVTSPLTVEWRAQSESAQSKMLSGVGGFVLGLLFLGAGLFIYFKNQKGHSGLHPTGLVS

SEQ ID NO: 52450 - protein, 296 aa, Homo sapiens
MGELMAFLLPLIIVLMVKHSDSRTHSLRYFRLGVSDPIHGVPEFISVGYVDSHPITTYDSVTRQKEPRAPWMAENLAPDHWERYTQLLRGWQQMFKVELKRLQRHYNHSDNVAHTIKQAWEANQHELLYQKNWLEEECIAWLKRFLEYGKDTLQRTEPPLVRVNRKETFPGVTALFCKAHGFYPPEIYMTWMKNGEEIVQEIDYGDILPSGDGTYQAWASIELDPQSSNLYSCHVEHCGVHMVLQVPQESETIPLVMKAVSGSIVLVIVLAGVGVLVWRRRPREQNGAIYLPTPDR

SEQ ID NO: 52451 - protein, 341 aa, Homo sapiens
MGELMAFLLPLIIVLMVKHSDSRTHSLRYFRLGVSDPIHGVPEFISVGYVDSHPITTYDSVTRQKEPRAPWMAENLAPDHWERYTQLLRGWQQMFKVELKRLQRHYNHSGSHTYQRMIGCELLEDGSTTGFLQYAYDGQDFLIFNKDTLSWLAVDNVAHTIKQAWEANQHELLYQKNWLEEECIAWLKRFLEYGKDTLQRTEPPLVRVNRKETFPGVTALFCKAHGFYPPEIYMTWMKNGEEIVQEIDYGDILPSGDGTYQAWASIELDPQSSNLYSCHVEHCGVHMVLQVPQESETIPLVMKAVSGSIVLVIVLAGVGVLVWRRRPREQNGAIYLPTPDR

SEQ ID NO: 52452 - protein, 214 aa, Homo sapiens
MGELMAFLLPLIIVLMVKHSDSRTHSLRYFRLGVSDPIHGVPEFISVGYVDSHPITTYDSVTRQKEPRAPWMAENLAPDHWERYTQLLRGWQQMFKVELKRLQRHYNHSGSHTYQRMIGCELLEDGSTTGFLQYAYDGQDFLIFNKDTLSWLAVDNVAHTIKQAWEANQHELLYQKNWLEEECIAWLKRFLEYGKDTLQRTEQNGAIYLPTPDR

SEQ ID NO: 52453 - protein, 263 aa, Homo sapiens
MWELRSASFWRAIFAEFFATLFYVFFGLGSSLRWAPGPLHVLQVAMAFGLALATLVQSVGHISGAHVNPAVTFAFLVGSQMSLLRAFCYMAAQLLGAVAGAAVLYSVTPPAVRGNLALNTLHPAVSVGQATTVEIFLTLQFVLCIFATYDERRNGQLGSVALAVGFSLALGHLFGMYYTGAGMNPARSFAPAILTGNFTNHWVYWVGPIIGGGLGSLLYDFLLFPRLKSISERLSVLKGAKPDVSNGQPEVTGEPVELNTQAL

SEQ ID NO: 52454 - protein, 893 aa, Homo sapiens
MATEEFIIRIPPYHYIHVLDQNSNVSRVEVGPKTYIRQDNERVLFAPMRMVTVPPRHYCTVANPVSRDAQGLVLFDVTGQVRLRHADLEIRLAQDPFPLYPGEVLEKDITPLQVVLPNTALHLKALLDFEDKDGDKVVAGDEWLFEGPGTYIPRKEVEVVEIIQATIIRQNQALRLRARKECWDRDGKERVTGEEWLVTTVGAYLPAVFEEVLDLVDAVILTEKTALHLRARRNFRDFRGVSRRTGEEWLVTVQDTEAHVPDVHEEVLGVVPITTLGPHNYCVILDPVGPDGKNQLGQKRVVKGEKSFFLQPGEQLEQGIQDVYVLSEQQGLLLRALQPLEEGEDEEKVSHQAGDHWLIRGPLEYVPSAKVEVVEERQAIPLDENEGIYVQDVKTGKVRAVIGSTYMLTQDEVLWEKELPPGVEELLNKGQDPLADRGEKDTAKSLQPLAPRNKTRVVSYRVPHNAAVQVYDYREKRARVVFGPELVSLGPEEQFTVLSLSAGRPKRPHARRALCLLLGPDFFTDVITIETADHARLQLQLAYNWHFEVNDRKDPQETAKLFSVPDFVGDACKAIASRVRGAVASVTFDDFHKNSARIIRTAVFGFETSEAKGPDGMALPRPRDQAVFPQNGLVVSSVDVQSVEPVDQRTRDALQRSVQLAIEITTNSQEAAAKHEAQRLEQEARGRLERQKILDQSEAEKARKELLELEALSMAVESTGTAKAEAESRAEAARIEGEGSVLQAKLKAQALAIETEAELQRVQKVRELELVYARAQLELEVSKAQQLAEVEVKKFKQMTEAIGPSTIRDLAVAGPEMQVKLLQSLGLKSTLITDGSTPINLFNTAFGLLGMGPEGQPLGRRVASGPSPGEGISPQSAQAPQAPGDNHVVPVLR

SEQ ID NO: 52455 - protein, 893 aa, Homo sapiens; identical to SEQ ID NO: 52454

SEQ ID NO: 52456 - protein, 159 aa, Homo sapiens
MCWTRTATCPVWRSGQRPTSGRTMRGSGFGGRRHPYGKDSPAPPGSAELPGLQGSVPPHWGGVAGNSAGHRGPRARCPRGGAGGCAHHHPGPPQLLRDSRPCRTGWQESAGAEARGQGREVFFPPARRAAGTRHPGCVCAVGAAGAAAEGPAAPGGGGG

SEQ ID NO: 52457 - protein, 416 aa, Homo sapiens
MSTKQITCRYFMHGVCREGSQCLFSHDLANSKPSTICKYYQKGYCAYGTRCRYDHTRPSAAAGGAVGTMAHSVPSPAFHSPHPPSEVTASIVKTNSHEPGKREKRTLVLRDRNLSGMAERKTQPSMVSNPGSCSDPQPSPEMKPHSYLDAIRSGLDDVEASSSYSNEQQLCPYAAAGECRFGDACVYLHGEVCEICRLQVLHPFDPEQRKAHEKICMLTFEHEMEKAFAFQASQDKVCSICMEVILEKASASERRFGILSNCNHTYCLSCIRQWRCAKQFENPIIKSCPECRVISEFVIPSVYWVEDQNKKNELIEAFKQGMGKKACKYFEQGKGTCPFGSKCLYRHAYPDGRLAEPEKPRKQLSSQGTVRFFNSVRLWDFIENRESRHVPNNEDVDMTELGDLFMHLSGVESSEP

SEQ ID NO: 52458 - protein, 507 aa, Homo sapiens
MEEPAAPSEAHEAAGAQAGAEAAREGVSGPDLPVCEPSGESAAPDSALPHAARGWAPFPVAPVPAHLRRGGLRPAPASGGGAWPSPLPSRSSGIWTKQIICRYYIHGQCKEGENCRYSHDLSGRKMATEGGVSPPGASAGGGPSTAAHIEPPTQEVAEAPPAASSLSLPVIGSAAERGFFEAERDNADRGAAGGAGVESWADAIEFVPGQPYRGRWVASAPEAPLQSSETERKQMAVGSGLRFCYYASRGVCFRGESCMYLHGDICDMCGLQTLHPMDAAQREEHMRACIEAHEKDMELSFAVQRGMDKVCGICMEVVYEKANPNDRRFGILSNCNHSFCIRCIRRWRSARQFENRIVKSCPQCRVTSELVIPSEFWVEEEEEKQKLIQQYKEAMSNKACRYFAEGRGNCPFGDTCFYKHEYPEGWGDEPPGPGGGSFSAYWHQLVEPVRMGEGNMLYKSIKKELVVLRLASLLFKRFLSLRDELPFSEDQWDLLHYELEEYFNLIL

SEQ ID NO: 52459 - protein, 153 aa, Homo sapiens
MAPAAATGGSTLPSGFSVFTTLPDLLFIFEFIFGGLVWILVASSLVPWPLVQGWVMFVSVFCFVATTTLIILYIIGAHGGETSWVTLDAAYHCTAALFYLSASVLEALATITMQDGFTYRHYHENIAAVVFSYIATLLYVVHAVFSLIRWKSS

SEQ ID NO: 52460 - protein, 55 aa, Homo sapiens
MAPAAATGGSTLPSGFSVFTTLPDLLFIFEFVFSYIATLLYVVHAVFSLIRWKSS

SEQ ID NO: 52461 - protein, 111 aa, Homo sapiens
MAPAAATGGSTLPSGFSVFTTLPDLLFIFEFIFGGLVWILVASSLVPWPLVQGWVMFVSVFCFVATTTLIILYIIGAHGGETSWVTLVFSYIATLLYVVHAVFSLIRWKSS

SEQ ID NO: 52462 - protein, 97 aa, Homo sapiens
MAPAAATGGSTLPSGFSVFTTLPDLLFIFEFDAAYHCTAALFYLSASVLEALATITMQDGFTYRHYHENIAAVVFSYIATLLYVVHAVFSLIRWKSS

SEQ ID NO: 52463 - protein, 153 aa, Homo sapiens
MASPDPPATSYAPSDVPSGVALFLTIPFAFFLPELIFGFLVWTMVAATHIVYPLLQGWVMYVSLTSFLISLMFLLSYLFGFYKRFESWRVLDSLYHGTTGILYMSAAVLQVHATIVSEKLLDPRIYYINSAASFFAFIATLLYILHAFSIYYH

SEQ ID NO: 52464 - protein, 334 aa, Homo sapiens
MSEPIRVLVTGAAGQIAYSLLYSIGNGSVFGKDQPIILVLLDITPMMGVLDGVLMELQDCALPLLKDVIATDKEDVAFKDLDVAILVGSMPRREGMERKDLLKANVKIFKSQGAALDKYAKKSVKVIVVGNPANTNCLTASKSAPSIPKENFSCLTRLDHNRAKAQIALKLGVTANDVKNVIIWGNHSSTQYPDVNHAKVKLQGKEVGVYEALKDDSWLKGEFVTTVQQRGAAVIKARKLSSAMSAAKAICDHVRDIWFGTPEGEFVSMGVISDGNSYGVPDDLLYSFPVVIKNKTWKFVEGLPINDFSREKMDLTAKELTEEKESAFEFLSSA

SEQ ID NO: 52465 - protein, 334 aa, Homo sapiens; identical to SEQ ID NO: 52464

SEQ ID NO: 52466 - protein, 352 aa, Homo sapiens
MRRCSYFPKDVTVFDKDDKSEPIRVLVTGAAGQIAYSLLYSIGNGSVFGKDQPIILVLLDITPMMGVLDGVLMELQDCALPLLKDVIATDKEDVAFKDLDVAILVGSMPRREGMERKDLLKANVKIFKSQGAALDKYAKKSVKVIVVGNPANTNCLTASKSAPSIPKENFSCLTRLDHNRAKAQIALKLGVTANDVKNVIIWGNHSSTQYPDVNHAKVKLQGKEVGVYEALKDDSWLKGEFVTTVQQRGAAVIKARKLSSAMSAAKAICDHVRDIWFGTPEGEFVSMGVISDGNSYGVPDDLLYSFPVVIKNKTWKFVEGLPINDFSREKMDLTAKELTEEKESAFEFLSSA

SEQ ID NO: 52467 - protein, 245 aa, Homo sapiens
MPRREGMERKDLLKANVKIFKSQGAALDKYAKKSVKVIVVGNPANTNCLTASKSAPSIPKENFSCLTRLDHNRAKAQIALKLGVTANDVKNVIIWGNHSSTQYPDVNHAKVKLQGKEVGVYEALKDDSWLKGEFVTTVQQRGAAVIKARKLSSAMSAAKAICDHVRDIWFGTPEGEFVSMGVISDGNSYGVPDDLLYSFPVVIKNKTWKFVEGLPINDFSREKMDLTAKELTEEKESAFEFLSSA

SEQ ID NO: 52468 - protein, 338 aa, Homo sapiens
MLSALARPASAALRRSFSTSAQNNAKVAVLGASGGIGQPLSLLLKNSPLVSRLTLYDIAHTPGVAADLSHIETKAAVKGYLGPEQLPDCLKGCDVVVIPAGVPRKPGMTRDDLFNTNATIVATLTAACAQHCPEAMICVIANPVNSTIPITAEVFKKHGVYNPNKIFGVTTLDIVRANTFVAELKGLDPARVNVPVIGGHAGKTIIPLISQCTPKVDFPQDQLTALTGRIQEAGTEVVKAKAGAGSATLSMAYAGARFVFSLVDAMNGKEGVVECSFVKSQETECTYFSTPLLLGKKGIEKNLGIGKVSSFEEKMISDAIPELKASIKKGEDFVKTLK

SEQ ID NO: 52469 - protein, 623 aa, Homo sapiens
MNRYTTMRQLGDGTYGSVLMGKSNESGELVAIKRMKRKFYSWDECMNLREVKSLKKLNHANVIKLKEVIRENDHLYFIFEYMKENLYQLMKDRNKLFPESVIRNIMYQILQGLAFIHKHGFFHRDMKPENLLCMGPELVKIADFGLARELRSQPPYTDYVSTRWYRAPEVLLRSSVYSSPIDVWAVGSIMAELYMLRPLFPGTSEVDEIFKICQVLGTPKKSDWPEGYQLASSMNFRFPQCVPINLKTLIPNASNEAIQLMTEMLNWDPKKRPTASQALKHPYFQVGQVLGPSSNHLESKQSLNKQLQPLESKPSLVEVEPKPLPDIIDQVVGQPQPKTSQQPLQPIQPPQNLSVQQPPKQQSQEKPPQTLFPSIVKNMPTKPNGTLSHKSGRRRWGQTIFKSGDSWEELEDYDFGASHSKKPSMGVFKEKRKKDSPFRLPEPVPSGSNHSTGENKSLPAVTSLKSDSELSTAPTSKQYYLKQSRYLPGVNPKKVSLIASGKEINPHTWSNQLFPKSLGPVGAELAFKRSNAGNLGSYATYNQSGYIPSFLKKEVQSAGQRIHLAPLNATASEYTWNTKTGRGQFSGRTYNPTAKNLNIVNRAQPIPSVHGRTDWVAKYGGHR

SEQ ID NO: 52470 - protein, 623 aa, Homo sapiens; identical to SEQ ID NO: 52469

SEQ ID NO: 52471 - protein, 288 aa, Homo sapiens
MNRYTTMRQLGDGTYGSVLMGKSNESGELVAIKRMKRKFYSWDECMNLREVKSLKKLNHANVIKLKEVIRENDHLYFIFEYMKENLYQLMKDRNKLFPESVIRNIMYQILQGLAFIHKHGFFHRDMKPENLLCMGPELVKIADFGLARELRSQPPYTDYVSTRWYRAPEVLLRSSVYSSPIDVWAVGSIMAELYMLRPLFPGTSEVDEIFKICQVLGTPKKSDWPEGYQLASSMNFRFPQCVPINLKTLIPNASNEAIQLMTEMLNWDPKKRPTASQPCFLVEVERPN

SEQ ID NO: 52472 - protein, 457 aa, Homo sapiens
MNRYTTMRQLGDGTYGSVLMGKSNESGELVAIKRMKRKFYSWDECMNLREVKSLKKLNHANVIKLKEVIRENDHLYFIFEYMKENLYQLMKDRNKLFPESVIRNIMYQILQGLAFIHKHGFFHRDMKPENLLCMGPELVKIADFGLARELRSQPPYTDYVSTRWYRAPEVLLRSSVYSSPIDVWAVGSIMAELYMLRPLFPGTSEVDEIFKICQVLGTPKKSDWPEGYQLASSMNFRFPQCVPINLKTLIPNASNEAIQLMTEMLNWDPKKRPTASQALKHPYFQVGQVLGPSSNHLESKQSLNKQLQPLESKPSLVEVEPKPLPDIIDQVVGQPQPKTSQQPLQPIQPPQNLSVQQPPKQQSQEKPPQTLFPSIVKNMPTKPNGTLSHKSGRRRWGQTIFKSGDSWEELEDYDFGASHSKKPSMGVFKEKRKKDSPFRQQVKMAVISLSAHQFPTL

SEQ ID NO: 52473 - protein, 292 aa, Homo sapiens
MLGAWAVEGTAVALLRLLLLLLPPAIRGPGLGVAGVAGAAGAGLPESVIWAVNAGGEAHVDVHGIHFRKDPLEGRVGRASDYGMKLPILRSNPEDQILYQTERYNEETFGYEVPIKEEGDYVLVLKFAEVYFAQSQQKVFDVRLNGHVVVKDLDIFDRVGHSTAHDEIIPMSIRKGKLSVQGEVSTFTGKLYIEFVKGYYDNPKVCALYIMAGTVDDVPKLQPHPGLEKKEEEEEEEEYDEGSNLKKQTNKNRVQSGPRTPNPYASDNSSLMFPILVAFGVFIPTLFCLCRL

SEQ ID NO: 52474 - protein, 185 aa, Homo sapiens
MGPERHLSGAPARMATVVLGGDTMGPERIFPNQTEELGHQGPSEGTGDWSSEEPEEEQEETGSGPAGYSYQPLNQDPEQEEVELAPVGDGDVVADIQDRIQALGLHLPDPPLESEDEDEEGATALNNHSSIPMDPEHVELVKRTMAGVSLPAPGVPAWAREISDAQWEDVVQKALQARQASPAWK

SEQ ID NO: 52475 - protein, 572 aa, Homo sapiens
MEPEAPRRRHTHQRGYLLTRNPHLNKDLAFTLEERQQLNIHGLLPPSFNSQEIQVLRVVKNFEHLNSDFDRYLLLMDLQDRNEKLFYRVLTSDIEKFMPIVYTPTVGLACQQYSLVFRKPRGLFITIHDRGHIASVLNAWPEDVIKAIVVTDGERILGLGDLGCNGMGIPVGKLALYTACGGMNPQECLPVILDVGTENEELLKDPLYIGLRQRRVRGSEYDDFLDEFMEAVSSKYGMNCLIQFEDFANVNAFRLLNKYRNQYCTFNDDIQGTASVAVAGLLAALRITKNKLSDQTILFQGAGEAALGIAHLIVMALEKEGLPKEKAIKKIWLVDSKGLIVKGRASLTQEKEKFAHEHEEMKNLEAIVQEIKPTALIGVAAIGGAFSEQILKDMAAFNERPIIFALSNPTSKAECSAEQCYKITKGRAIFASGSPFDPVTLPNGQTLYPGQGNNSYVFPGVALGVVACGLRQITDNIFLTTAEVIAQQVSDKHLEEGRLYPPLNTIRDVSLKIAEKIVKDAYQEKTATVYPEPQNKEAFVRSQMYSTDYDQILPDCYSWPEEVQKIQTKVDQ

SEQ ID NO: 52476 - protein, 232 aa, Homo sapiens
VKGRASLTQEKEKFAHEHEEMKNLEAIVQEIKPTALIGVAAIGGAFSEQILKDMAAFNERPIIFALSNPTSKAECSAEQCYKITKGRAIFASGSPFDPVTLPNGQTLYPGQGNNSYVFPGVALGVVACGLRQITDNIFLTTAEVIAQQVSDKHLEEGRLYPPLNTIRDVSLKIAEKIVKDAYQEKTATVYPEPQNKEAFVRSQMYSTDYDQILPDCYSWPEEVQKIQTKVDQ

SEQ ID NO: 52477 - protein, 406 aa, Homo sapiens [sequence omitted]

SEQ ID NO: 52478 - protein, 497 aa, Homo sapiens
MDLQDRNEKLFYRVLTSDIEKFMPIVYTPTVGLACQQYSLVFRKPRGLFITIHDRGHIASVLNAWPEDVIKAIVVTDGERILGLGDLGCNGMGIPVGKLALYTACGGMNPQECLPVILDVGTENEELLKDPLYIGLRQRRVRGSEYDDFLDEFMEAVSSKYGMNCLIQFEDFANVNAFRLLNKYRNQYCTFNDDIQGTASVAVAGLLAALRITKNKLSDQTILFQGAGEAALGIAHLIVMALEKEGLPKEKAIKKIWLVDSKGLIVKGRASLTQEKEKFAHEHEEMKNLEAIVQEIKPTALIGVAAIGGAFSEQILKDMAAFNERPIIFALSNPTSKAECSAEQCYKITKGRAIFASGSPFDPVTLPNGQTLYPGQGNNSYVFPGVALGVVACGLRQITDNIFLTTAEVIAQQVSDKHLEEGRLYPPLNTIRDVSLKIAEKIVKDAYQEKTATVYPEPQNKEAFVRSQMYSTDYDQILPDCYSWPEEVQKIQTKVDQ

SEQ ID NO: 52479 - protein, 584 aa, Homo sapiens
MLSRLRVVSTTCTLACRHLHIKEKGKPLMLNPRTNKGMAFTLQERQMLGLQGLLPPKIETQDIQALRFHRNLKKMTSPLEKYIYIMGIQERNEKLFYRILQDDIESLMPIVYTPTVGLACSQYGHIFRRPKGLFISISDRGHVRSIVDNWPENHVKAVVVTDGERILGLGDLGVYGMGIPVGKLCLYTACAGIRPDRCLPVCIDVGTDNIALLKDPFYMGLYQKRDRTQQYDDLIDEFMKAITDRYGRNTLIQFEDFGNHNAFRFLRKYREKYCTFNDDIQGTAAVALAGLLAAQKVISKPISEHKILFLGAGEAALGIANLIVMSMVENGLSEQEAQKKIWMFDKYGLLVKGRKAKIDSYQEPFTHSAPESIPDTFEDAVNILKPSTIIGVAGAGRLFTPDVIRAMASINERPVIFALSNPTAQAECTAEEAYTLTEGRCLFASGSPFGPVKLTDGRVFTPGQGNNVYIFPGVALAVILCNTRHISDSVFLEAAKALTSQLTDEELAQGRLYPPLANIQEVSINIAIKVTEYLYANKMAFRYPEPEDKAKYVKERTWRSEYDSLLPDVYEWPESASSPPVITE

SEQ ID NO: 52480 - protein, 479 aa, Homo sapiens
MLSRLRVVSTTCTLACRHLHIKEKGKPLMLNPRTNKGMAFTLQERQMLGLQGLLPPKIETQDIQALRFHRNLKKMTSPLEKYIYIMGIQERNEKLFYRILQDDIESLMPIVYTPTVGLACSQYGHIFRRPKGLFISISDRGHVRSIVDNWPENHVKAVVVTDGERILGLGDLGVYGMGIPVGKLCLYTACAGIRPDRCLPVCIDVGTDNIALLKDPFYMGLYQKRDRTQQYDDLIDEFMKAITDRYGRNTLIQFEDFGNHNAFRFLRKYREKYCTFNDDIQGTAAVALAGLLAAQKVISKPISEHKILFLGAGEAALGIANLIVMSMVENGLSEQEAQKKIWMFDKYGLLVKGRKAKIDSYQEPFTHSAPESIPDTFEDAVNILKPSTIIGVAGAGRLFTPDVIRAMASINERPVIFALSNPTAQAECTAEEAYTLTEGRCLFASGSPFGPVKLTDGRVFTPGQGNNVYIFPGYRIPIC

SEQ ID NO: 52481 - protein, 259 aa, Homo sapiens
MAFTLEERLQLGIHGLIPPCFLSQDVQLLRIMRYYERQQSDLDKYIILMTLQDRNEKLFYRVLTSDVEKFMPIVYTPTVGLACQHYGLTFRRPRGLFITIHDKGHLATMLNSWPEDNIKAVVVTDGERILGLGDLGCYGMGIPVGKLALYTACGGVNPQQCLPVLLDVGTNNEELLRDPLYIGLKHQRVHGKAYDDLLDEFMQAVTDKFGINCLIQFEDFANANAFRLLNKYRNKYCMFNDDIQDDFSRGPKRSQLFFK

SEQ ID NO: 52482 - protein, 604 aa, Homo sapiens
MGAALGTGTRLAPWPGRACGALPRWTPTAPAQGCHSKPGPARPVPLKKRGYDVTRNPHLNKGMAFTLEERLQLGIHGLIPPCFLSQDVQLLRIMRYYERQQSDLDKYIILMTLQDRNEKLFYRVLTSDVEKFMPIVYTPTVGLACQHYGLTFRRPRGLFITIHDKGHLATMLNSWPEDNIKAVVVTDGERILGLGDLGCYGMGIPVGKLALYTACGGVNPQQCLPVLLDVGTNNEELLRDPLYIGLKHQRVHGKAYDDLLDEFMQAVTDKFGINCLIQFEDFANANAFRLLNKYRNKYCMFNDDIQGTASVAVAGILAALRITKNKLSNHVFVFQGAGEAAMGIAHLLVMALEKEGVPKAEATRKIWMVDSKGLIVKGRSHLNHEKEMFAQDHPEVNSLEEVVRLVKPTAIIGVAAIAGAFTEQILRDMASFHERPIIFALSNPTSKAECTAEKCYRVTEGRGIFASGSPFKSVTLEDGKTFIPGQGNNAYVFPGVALGVIAGGIRHIPDEIFLLTAEQIAQEVSEQHLSQGRLYPPLSTIRDVSLRIAIKVLDYAYKHNLASYYPEPKDKEAFVRSLVYTPDYDSFTLDSYTWPKEAMNVQTV

SEQ ID NO: 52483 - protein, 604 aa, Homo sapiens; identical to SEQ ID NO: 52482

SEQ ID NO: 52484 - protein, 581 aa, Homo sapiens
MGAALGTGTRLAPWPGRACGALPRWTPTAPAQGCHSKPGPARPVPLKKRGYDVTRNPHLNKGMAFTLEERLQLGIHGLIPPCFLSQDVQLLRIMRYYERQQSDLDKYIILMTLQDRNEKLFYRVLTSDVEKFMPIVYTPTVGLACQHYGLTFRRPRGLFITIHDKGHLATMLNSWPEDNIKAVVVTDGERILGLGDLGCYGMGIPVGKLALYTACGGVNPQQCLPVLLDVGTNNEELLRDPLYIGLKHQRVHGKAYDDLLDEFMQAVTDKFGINCLIQFEDFANANAFRLLNKYRNKYCMFNDDIQGTASVAVAGILAALRITKNKLSNHVFVFQGAGEAAMGIAHLLVMALEKEGVPKAEATRKIWMVDSKGLIVKGRSHLNHEKEMFAQDHPEVNSLEEVVRLVKPTAIIGVAAIAGAFTEQILRDMASFHERPIIFALSNPTSKAECTAEKCYRVTEGRGIFASGSPFKSVTLEDGKTFIPGQGNNAYVFPGVALGVIAGGIRHIPDEIFLLTAEQIAQEVSEQHLSQGRLYPPLSTIRDVSLRIAIKVLDYAYKHNLASYYPEPKDKEAFVRSLVYT

SEQ ID NO: 52485 - protein, 342 aa, Homo sapiens
MGAALGTGTRLAPWPGRACGALPRWTPTAPAQGCHSKPGPARPVPLKKRGYDVTRNPHLNKGMAFTLEERLQLGIHGLIPPCFLSQDVQLLRIMRYYERQQSDLDKYIILMTLQDRNEKLFYRVLTSDVEKFMPIVYTPTVGLACQHYGLTFRRPRGLFITIHDKGHLATMLNSWPEDNIKAVVVTDGERILGLGDLGCYGMGIPVGKLALYTACGGVNPQQCLPVLLDVGTNNEELLRDPLYIGLKHQRVHGKAYDDLLDEFMQAVTDKFGINCLIQFEDFANANAFRLLNKYRNKYCMFNDDIQGTTCHTFSCPWHLWAQVMFQHIPGPMGFSEWLPRNS

SEQ ID NO: 52486 - protein, 62 aa, Homo sapiens
MGAALGTGTRLAPWPGRACGALPRWTPTAPAQGCHSKPGPARPVPLKKRGYDVTRNPHLNKV

SEQ ID NO: 52487 - protein, 61 aa, Homo sapiens
MGAALGTGTRLAPWPGRACGALPRWTPTAPAQGCHSKPGPARPVPLKKRGYDVTRNPHLNK

SEQ ID NO: 52488 - protein, 151 aa, Homo sapiens
MGAALGTGTRLAPWPGRACGALPRWTPTAPAQGCHSKPGPARPVPLKKRGYDVTRNPHLNKGMAFTLEERLQLGIHGLIPPCFLSQDVQLLRIMRYYERQQSDLDKYIILMTLQDRNEKLFYRVLTSDVEKFMPIVYTPTVGLACQHYGLT

SEQ ID NO: 52489 - protein, 79 aa, Homo sapiens
MGAALGTGTRLAPWPGRACGALPRWTPTAPAQGCHSKPGPARPVPLKKRGYDVTRNPHLNKVMGQRAGRPALRSRGCRK

SEQ ID NO: 52490 - protein, 604 aa, Homo sapiens; identical to SEQ ID NO: 52482

SEQ ID NO: 52491 - protein, 252 aa, Homo sapiens
MAFTLEERLQLGIHGLIPPCFLSQDVQLLRIMRYYERQQSDLDKYIILMTLQDRNEKLFYRVLTSDVEKFMPIVYTPTVGLACQHYGLTFRRPRGLFITIHDKGHLATMLNSWPEDNIKAVVVTDGERILGLGDLGCYGMGIPVGKLALYTACGGVNPQQCLPVLLDVGTNNEELLRDPLYIGLKHQRVHGKAYDDLLDEFMQAVTDKFGINCLIQFEDFANANAFRLLNKYRNKYCMFNDDIQAPSTAPAT

SEQ ID NO: 52492 - protein, 493 aa, Homo sapiens
MRGFGPGLTARRLLPLRLPPRPPGPRLASGQAAGALERAMDELLRRAVPPTPAYELREKTPAPAEGQCADFVSFYGGLAETAQRAELLGRLARGFGVDHGQVAEQSAGVLHLRQQQREAAVLLQAEDRLRYALVPRYRGLFHHISKLDGGVRFLVQLRADLLEAQALKLVEGPDVREMNGVLKGMLSEWFSSGFLNLERVTWHSPCEVLQKISEAEAVHPVKNWMDMKRRVGPYRRCYFFSHCSTPGEPLVVLHVALTGDISSNIQAIVKEHPPSETEEKNKITAAIFYSISLTQQGLQGVELGTFLIKRVVKELQREFPHLGVFSSLSPIPGFTKWLLGLLNSQTKEHGRNELFTDSECKEISEITGGPINETLKLLLSSSEWVQSEKLVRALQTPLMRLCAWYLYGEKHRGYALNPVANFHLQNGAVLWRINWMADVSLRGITGSCGLMANYRYFLEETGPNSTSYLGSKIIKASEQVLSLVAQFQKNSKL

SEQ ID NO: 52493 - protein, 185 aa, Homo sapiens
MARKKLKKFTTLEIVLSVLLLVLFIISIVLIVLLAKESLKSTAPDPGTTGTPDPGTTGTPDPGTTGTTHARTTGPPDPGTTGTTPVSAECPVVNELERINCIPDQPPTKATCDQRGCCWNPQGAVSVPWCYYSKNHSYHVEGNLVNTNAGFTARLKNLPSSPVFGSNVDNVLLTAEYQTSNRFHF

SEQ ID NO: 52494 - protein, 1662 aa, Homo sapiens
AVSVPWCYYSKNHSYHVEGNLVNTNAGFTARLKNLPSSPVFGSNVDNVLLTAEYQTSNRFHFKLTDQTNNRFEVPHEHVQSFSGNAAASLTYQVEISRQPFSIKVTRRSNNRVLFDSSIGPLLFADQFLQLSTRLPSTNVYGLGEHVHQQYRHDMNWKTWPIFNRDTTPNGNGTNLYGAQTFFLCLEDASGLSFGVFLMNSNAMEVVLQPAPAITYRTIGGILDFYVFLGNTPEQVVQEYLELIGRPALPSYWALGFHLSRYEYGTLDNMREVVERNRAAQLPYDVQHADIDYMDERRDFTYDSVDFKGFPEFVNELHNNGQKLVIIVDPAISNNSSSSKPYGPYDRGSDMKIWVNSSDGVTPLIGEVWPGQTVFPDYTNPNCAVWWTKEFELFHNQVEFDGIWIDMNEVSNFVDGSVSGCSTNNLNNPPFTPRILDGYLFCKTLCMDAVQHWGKQYDIHNLYGYSMAVATAEAAKTVFPNKRSFILTRSTFAGSGKFAAHWLGDNTATWDDLRWSIPGVLEFNLFGIPMVGPDICGFALDTPEELCRRWMQLGAFYPFSRNHNGQGYKDQDPASFGADSLLLNSSRHYLNIRYTLLPYLYTLFFRAHSRGDTVARPLLHEFYEDNSTWDVHQQFLWGPGLLITPVLDEGAEKVMAYVPDAVWYDYETGSQVRWRKQKVEMELPGDKIGLHLRGGYIFPTQQPNTTTLASRKNPLGLIIALDENKEAKGELFWDNGETKDTVANKVYLLCEFSVTQNRLEVNISQSTYKDPNNLAFNEIKILGTEEPSNVTVKHNGVPSQTSPTVTYDSNLKVAIITDIDLLLGEAYTVEWSIKIRDEEKIDCYPDENGASAENCTARGCIWEASNSSGVPFCYFVNDLYSVSDVQYNSHGATADISLKSSVYANAFPSTPVNPLRLDVTYHKNEMLQFKIYDPNKNRYEVPVPLNIPSMPSSTPEGQLYDVLIKKNPFGIEIRRKSTGTIIWDSQLLGFTFSDMFIRISTRLPSKYLYGFGETEHRSYRRDLEWHTWGMFSRDQPPGYKKNSYGVHPYYMGLEEDGSAHGVLLLNSNAMDVTFQPLPALTYRTTGGVLDFYVFLGPTPELVTQQYTELIGRPVMVPYWSLGFQLCRYGYQNDSEIASLYDEMVAAQIPYDVQYSDIDYMERQLDFTLSPKFAGFPALINRMKADGMRVILILDPAISGNETQPYPAFTRGVEDDVFIKYPNDGDIVWGKVWPDFPDVVVNGSLDWDSQVELYRAYVAFPDFFRNSTAKWWKREIEELYNNPQNPERSLKFDGMWIDMNEPSSFVNGAVSPGCRDASLNHPPYMPHLESRDRGLSSKTLCMESQQILPDGSLVQHYNVHNLYGWSQTRPTYEAVQEVTGQRGVVITRSTFPSSGRWAGHWLGDNTAAWDQLKKSIIGMMEFSLFGISYTGADICGFFQDAEYEMCVRWMQLGAFYPFSRNHNTIGTRRQDPVSWDAAFVNISRNVLQTRYTLLPYLYTLMQKAHTEGVTVVRPLLHEFVSDQVTWDIDSQFLLGPAFLVSPVLERNARNVTAYFPRARWYDYYTGVDINARGEWKTLPAPLDHINLHVRGGYILPWQEPALNTHLSRKNPLGLIIALDENKEAKGELFWDDGQTKDTVAKKVYLLCEFSVTQQVVFLNIVFN

SEQ ID NO: 52495 - protein, 1857 aa, Homo sapiens
MARKKLKKFTTLEIVLSVLLLVLFIISIVLIVLLAKESLKSTAPDPGTTGTPDPGTTGTPDPGTTGTTHARTTGPPDPGTTGTTPVSAECPVVNELERINCIPDQPPTKATCDQRGCCWNPQGAVSVPWCYYSKNHSYHVEGNLVNTNAGFTARLKNLPSSPVFGSNVDNVLLTAEYQTSNRFHFKLTDQTNNRFEVPHEHVQSFSGNAAASLTYQVEISRQPFSIKVTRRSNNRVLFDSSIGPLLFADQFLQLSTRLPSTNVYGLGEHVHQQYRHDMNWKTWPIFNRDTTPNGNGTNLYGAQTFFLCLEDASGLSFGVFLMNSNAMEVVLQPAPAITYRTIGGILDFYVFLGNTPEQVVQEYLELIGRPALPSYWALGFHLSRYEYGTLDNMREVVERNRAAQLPYDVQHADIDYMDERRDFTYDSVDFKGFPEFVNELHNNGQKLVIIVDPAISNNSSSSKPYGPYDRGSDMKIWVNSSDGVTPLIGEVWPGQTVFPDYTNPNCAVWWTKEFELFHNQVEFDGIWIDMNEVSNFVDGSVSGCSTNNLNNPPFTPRILDGYLFCKTLCMDAVQHWGKQYDIHNLYGYSMAVATAEAAKTVFPNKRSFILTRSTFAGSGKFAAHWLGDNTATWDDLRWSIPGVLEFNLFGIPMVGPDICGFALDTPEELCRRWMQLGAFYPFSRNHNGQGYKDQDPASFGADSLLLNSSRHYLNIRYTLLPYLYTLFFRAHSRGDTVARPLLHEFYEDNSTWDVHQQFLWGPGLLITPVLDEGAEKVMAYVPDAVWYDYETGSQVRWRKQKVEMELPGDKIGLHLRGGYIFPTQQPNTTTLASRKNPLGLIIALDENKEAKGELFWDNGETKDTVANKVYLLCEFSVTQNRLEVNISQSTYKDPNNLAFNEIKILGTEEPSNVTVKHNGVPSQTSPTVTYDSNLKVAIITDIDLLLGEAYTVEWSIKIRDEEKIDCYPDENGASAENCTARGCIWEASNSSGVPFCYFVNDLYSVSDVQYNSHGATADISLKSSVYANAFPSTPVNPLRLDVTYHKNEMLQFKIYDPNKNRYEVPVPLNIPSMPSSTPEGQLYDVLIKKNPFGIEIRRKSTGTIIWDSQLLGFTFSDMFIRISTRLPSKYLYGFGETEHRSYRRDLEWHTWGMFSRDQPPGYKKNSYGVHPYYMGLEEDGSAHGVLLLNSNAMDVTFQPLPALTYRTTGGVLDFYVFLGPTPELVTQQYTELIGRPVMVPYWSLGFQLCRYGYQNDSEIASLYDEMVAAQIPYDVQYSDIDYMERQLDFTLSPKFAGFPALINRMKADGMRVILILDPAISGNETQPYPAFTRGVEDDVFIKYPNDGDIVWGKVWPDFPDVVVNGSLDWDSQVELYRAYVAFPDFFRNSTAKWWKREIEELYNNPQNPERSLKFDGMWIDMNEPSSFVNGAVSPGCRDASLNHPPYMPHLESRDRGLSSKTLCMESQQILPDGSLVQHYNVHNLYGWSQTRPTYEAVQEVTGQRGVVITRSTFPSSGRWAGHWLGDNTAAWDQLKKSIIGMMEFSLFGISYTGADICGFFQDAEYEMCVRWMQLGAFYPFSRNHNTIGTRRQDPVSWDVAFVNISRTVLQTRYTLLPYLYTLMHKAHTEGVTVVRPLLHEFVSDQVTWDIDSQFLLGPAFLVSPVLERNARNVTAYFPRARWYDYYTGVDINARGEWKTLPAPLDHINLHVRGGYILPWQEPALNTHLSRQKFMGFKIALDDEGTAGGWLFWDDGQSIDTYGKGLYYLASFSASQNTMQSHIIFNNYITGTNPLKLGYIEIWGVGSVPVTSVSISVSGMVITPSFNNDPTTQVLSIDVTDRNISLHNFTSLTWISTL

SEQ ID NO: 52496 - protein, 686 aa, Homo sapiens
MLLRGVLLALQALQLAGALDLPAGSCAFEESTCGFDSVLASLPWILNEEGHYIYVDTSFGKQGEKAVLLSPDLQAEEWSCLRLVYQITTSSESLSDPSQLNLYMRFEDESFDRLLWSAKEPSDSWLIASLDLQNSSKKFKILIEGVLGQGNTASIALFEIKMTTGYCIECDFEENHLCGFVNRWNPNVNWFVGGGSIRNVHSILPQDHTFKSELGHYMYVDSVYVKHFQEVAQLISPLTTAPMAGCLSFYYQIQQGNDNVFSLYTRDVAGLYEEIWKADRPGNAAWNLAEVEFSAPYPMEVIFEVAFNGPKGGYVALDDISFSPVHCQNQTELLFSAVEASCNFEQDLCNFYQDKEGPGWTRVKVKPNMYRAGDHTTGLGYYLLANTKFTSQPGYIGRLYGPSLPGNLQYCLRFHYAIYGFLKMSDTLAVYIFEENHVVQEKIWSVLESPRGVWMQAEITFKKPMPTKVVFMSLCKSFWDCGLVALDDITIQLGSCSSSEKLPPPPGECTFEQDECTFTQEKRNRSSWHRRRGETPTSYTGPKGDHTTGVGYYMYIEASHMVYGQKARLLSRPLRGVSGKHCLTFFYHMYGGGTGLLSVYLKKEEDSEESLLWRRRGEQSISWLRALIEYSCERQHQIIFEAIRGVSIRSDIAIDDVKFQAGPCGEMEDTTQQSSGYSEDLNEIEY

SEQ ID NO: 52497 - protein, 959 aa, Homo sapiens
MEVTCLLLLALIPFHCRGQGVYAPAQAQIVHAGQACVVKEDNISERVYTIREGDTLMLQCLVTGHPRPQVRWTKTAGSASDKFQETSVFNETLRIERIARTQGGRYYCKAENGVGVPAIKSIRVDVQYLDEPMLTVHQTVSDVRGNFYQEKTVFLRCTVNSNPPARFIWKRGSDTLSHSQDNGVDIYEPLYTQGETKVLKLKNLRPQDYASYTCQVSVRNVCGIPDKAITFRLTNTTAPPALKLSVNETLVVNPGENVTVQCLLTGGDPLPQLQWSHGPGPLPLGALAQGGTLSIPSVQARDSGYYNCTATNNVGNPAKKTVNLLVRSMKNATFQITPDVIKESENIQLGQDLKLSCHVDAVPQEKVTYQWFKNGKPARMSKRLLVTRNDPELPAVTSSLELIDLHFSDYGTYLCMASFPGAPVPDLSVEVNISSETVPPTISVPKGRAVVTVREGSPAELQCEVRGKPRPPVLWSRVDKEAALLPSGLPLEETPDGKLRLERVSRDMSGTYRCQTARYNGFNVRPREAQVQLNVQSPCFPPEVEPSSQDVRQALGRPVLLRCSLLRGSPQRIASAVWRFKGQLLPPPPVVPAAAEAPDHAELRLDAVTRDSSGSYECSVSNDVGSAACLFQVSAKAYSPEFYFDTPNPTRSHKLSKNYSYVLQWTQREPDAVDPVLNYRLSIRQLNQHNAVVKAIPVRRVEKGQLLEYILTDLRVPHSYEVRLTPYTTFGAGDMASRIIHYTELLALRTLSSDNTCHFEDEKICGYTQDLTDNFDWTRQNALTQNPKRSPNTGPPTDISGTPEGYYMFIETSRPRELGDRARLVSPLYNASAKFYCVSFFYHMYGKHIGSLNLLVRSRNKGALDTHAWSLSGNKGNVWQQAHVPISPSGPFQIIFEGVRGPGYLGDIAIDDVTLKKGECPRKQTDPNKVVVMPGSGAPCQSSPQLWGPMAIFLLALQR

SEQ ID NO: 52498 - protein, 955 aa, Homo sapiens
MEVTCLLLLALIPFHCRGQGVYAPAQAQIVHAGQACVVKEDNISERVYTIREGDTLMLQCLVTGHPRPQVRWTKTAGSASDKFQETSVFNETLRIERIARTQGGRYYCKAENGVGVPAIKSIRVDVQYLDEPMLTVHQTVSDVRGNFYQEKTVFLRCTVNSNPPARFIWKRGSDTLSHSQDNGVDIYEPLYTQGETKVLKLKNLRPQDYASYTCQVSVRNVCGIPDKAITFRLTNTTAPPALKLSVNETLVVNPGENVTVQCLLTGGDPLPQLQWSHGPGPLPLGALAQGGTLSIPSVQARDSGYYNCTATNNVGNPAKKTVNLLVRSMKNATFQITPDVIKESENIQLGQDLKLSCHVDAVPQEKVTYQWFKNGKPARMSKRLLVTRNDPELPAVTSSLELIDLHFSDYGTYLCMASFPGAPVPDLSVEVNISSETVPPTISVPKGRAVVTVREGSPAELQCEVRGKPRPPVLWSRVDKEAALLPSGLPLEETPDGKLRLERVSRDMSGTYRCQTARYNGFNVRPREAQVQLNVQFPPEVEPSSQDVRQALGRPVLLRCSLLRGSPQRIASAVWRFKGQLLPPPPVVPAAAEAPDHAELRLDAVTRDSSGSYECSVSNDVGSAACLFQVSAKAYSPEFYFDTPNPTRSHKLSKNYSYVLQWTQREPDAVDPVLNYRLSIRQLNQHNAVVKAIPVRRVEKGQLLEYILTDLRVPHSYEVRLTPYTTFGAGDMASRIIHYTEPINSPNLSDNTCHFEDEKICGYTQDLTDNFDWTRQNALTQNPKRSPNTGPPTDISGTPEGYYMFIETSRPRELGDRARLVSPLYNASAKFYCVSFFYHMYGKHIGSLNLLVRSRNKGALDTHAWSLSGNKGNVWQQAHVPISPSGPFQIIFEGVRGPGYLGDIAIDDVTLKKGECPRKQTDPNKVVVMPGSGAPCQSSPQLWGPMAIFLLALQR

SEQ ID NO: 52499 - protein, 973 aa, Homo sapiens
MEVTCLLLLALIPFHCRGQGVYAPAQAQIVHAGQACVVKEDNISERVYTIREGDTLMLQCLVTGHPRPQVRWTKTAGSASDKFQETSVFNETLRIERIARTQGGRYYCKAENGVGVPAIKSIRVDVQYLDEPMLTVHQTVSDVRGNFYQEKTVFLRCTVNSNPPARFIWKRGSDTLSHSQDNGVDIYEPLYTQGETKVLKLKNLRPQDYASYTCQVSVRNVCGIPDKAITFRLTNTTAPPALKLSVNETLVVNPGENVTVQCLLTGGDPLPQLQWSHGPGPLPLGALAQGGTLSIPSVQARDSGYYNCTATNNVGNPAKKTVNLLVRSMKNATFQITPDVIKESENIQLGQDLKLSCHVDAVPQEKVTYQWFKNGKPARMSKRLLVTRNDPELPAVTSSLELIDLHFSDYGTYLCMASFPGAPVPDLSVEVNISSETVPPTISVPKGRAVVTVREGSPAELQCEVRGKPRPPVLWSRVDKEAALLPSGLPLEETPDGKLRLERVSRDMSGTYRCQTARYNGFNVRPREAQVQLNVQFPPEVEPSSQDVRQALGRPVLLRCSLLRGSPQRIASAVWRFKGQLLPPPPVVPAAAEAPDHAELRLDAVTRDSSGSYECSVSNDVGSAACLFQVSAKAYSPEFYFDTPNPTRSHKLSKNYSYVLQWTQREPDAVDPVLNYRLSIRQLNQHNAVVKAIPVRRVEKGQLLEYILTDLRVPHSYEVRLTPYTTFGAGDMASRIIHYTEPINSPNLSDNTCHFEDEKICGYTQDLTDNFDWTRQNALTQNPKRSPNTGPPTDISGTPEGYYMFIETSRPRELGDRARLVSPLYNASAKFYCVSFFYHMYGKHIGSLNLLVRSRNKGALDTHAWSLSGNKGNVWQQAHVPISPSGPFQIIFEGVRGPGYLGDIAIDDVTLKKGECPRKQTDPNKGARREGGGGAESGGSCAWRGFLSVEGGCLGLNRGSECLSDGNHVALTV

SEQ ID NO: 52500 - protein, 727 aa, Homo sapiens
MVSFRLSNKTASPSIKLLVDDPIVVNPGEAITLVCVTTGGEPAPSLTWVRSFGTLPEKTVLNGGTLTIPAITSDDAGTYSCIANNNVGNPAKKSTNIIVRALKKGRFWITPDPYHKDDNIQIGREVKISCQVEAVPSEELTFSWFKNGRPLRSSERMVITQTDPDVSPGTTNLDIIDLKFTDFGTYTCVASLKGGGISDISIDVNISSSTVPPNLTVPQEKSPLVTREGDTIELQCQVTGKPKPIILWSRADKEVAMPDGSMQMESYDGTLRIVNVSREMSGMYRCQTSQYNGFNVKPREALVQLIVQYPPAVEPAFLEIRQGQDRSVTMSCRVLRAYPIRVLTYEWRLGNKLLRTGQFDSQEYTEYAVKSLSNENYGVYNCSIINEAGAGRCSFLVTGKAYAPEFYYDTYNPVWQNRHRVYSYSLQWTQMNPDAVDRIVAYRLGIRQAGQQRWWEQEIKINGNIQKGELITYNLTELIKPEAYEVRLTPLTKFGEGDSTIRVIKYSAPVNPHLREFHCGFEDGNICLFTQDDTDNFDWTKQSTATRNTKYTPNTGPNADRSGSKEGFYMYIETSRPRLEGEKARLLSPVFSIAPKNPYGPTNTAYCFSFFYHMYGQHIGVLNVYLRLKGQTTIENPLWSSSGNKGQRWNEAHVNIYPITSFQLIFEGIRGPGIEGDIAIDDVSIAEGECAKQDLATKNSVDGAVGILVHIWLFPIIVLISILSPRR

SEQ ID NO: 52501 - protein, 158 aa, Homo sapiens
MYIETSRPRLEGEKARLLSPVFSIAPKNPYGPTNTAYCFSFFYHMYGQHIGVLNVYLRLKGQTTIENPLWSSSGNKGQRWNEAHVNIYPITSFQLIFEGIRGPGIEGDIAIDDVSIAEGECAKQDLATKNSVDGAVGILVHIWLFPIIVLISILSPRR

SEQ ID NO: 52502 - protein, 1025 aa, Homo sapiens
MSVWSAGLLRSARRRRRGRTDGRRFLLRRAVPGHLGLARARVERAWLAAGLLKVPLRTPWAGYVHVHVKMDLLYGLVWLLTVLLEGISGQGVYAPPTVRIVHSGLACNIEEERYSERVYTIREGETLELTCLVTGHPRPQIRWTKTAGSASDRFQDSSVFNETLRITNIQRHQGGRYYCKAENGLGSPAIKSIRVDVYYLDDPVVTVHQSIGEAKEQFYYERTVFLRCVANSNPPVRYSWRRGQEVLLQGSDKGVEIYEPFFTQGETKILKLKNLRPQDYANYSCIASVRNVCNIPDKMVSFRLSNKTASPSIKLLVDDPIVVNPGEAITLVCVTTGGEPAPSLTWVRSFGTLPEKTVLNGGTLTIPAITSDDAGTYSCIANNNVGNPAKKSTNIIVRALKKGRFWITPDPYHKDDNIQIGREVKISCQVEAVPSEELTFSWFKNGRPLRSSERMVITQTDPDVSPGTTNLDIIDLKFTDFGTYTCVASLKGGGISDISIDVNISSSTVPPNLTVPQEKSPLVTREGDTIELQCQVTGKPKPIILWSRADKEVAMPDGSMQMESYDGTLRIVNVSREMSGMYRCQTSQYNGFNVKPREALVQLIVQYPPAVEPAFLEIRQGQDRSVTMSCRVLRAYPIRVLTYEWRLGNKLLRTGQFDSQEYTEYAVKSLSNENYGVYNCSIINEAGAGRCSFLVTGKAYAPEFYYDTYNPVWQNRHRVYSYSLQWTQMNPDAVDRIVAYRLGIRQAGQQRWWEQEIKINGNIQKGELITYNLTELIKPEAYEVRLTPLTKFGEGDSTIRVIKYSAPVNPHLREFHCGFEDGNICLFTQDDTDNFDWTKQSTATRNTKYTPNTGPNADRSGSKEGFYMYIETSRPRLEGEKARLLSPVFSIAPKNPYGPTNTAYCFSFFYHMYGQHIGVLNVYLRLKGQTTIENPLWSSSGNKGQRWNEAHVNIYPITSFQLIFEGIRGPGIEGDIAIDDVSIAEGECAKQDLATKNSVDGAVGILVHIWLFPIIVLISILSPRR

SEQ ID NO: 52503 - protein, 727 aa, Homo sapiens; identical to SEQ ID NO: 52500

SEQ ID NO: 52504 - protein, 956 aa, Homo sapiens
MDLLYGLVWLLTVLLEGISGQGVYAPPTVRIVHSGLACNIEEERYSERVYTIREGETLELTCLVTGHPRPQIRWTKTAGSASDRFQDSSVFNETLRITNIQRHQGGRYYCKAENGLGSPAIKSIRVDVYYLDDPVVTVHQSIGEAKEQFYYERTVFLRCVANSNPPVRYSWRRGQEVLLQGSDKGVEIYEPFFTQGETKILKLKNLRPQDYANYSCIASVRNVCNIPDKMVSFRLSNKTASPSIKLLVDDPIVVNPGEAITLVCVTTGGEPAPSLTWVRSFGTLPEKTVLNGGTLTIPAITSDDAGTYSCIANNNVGNPAKKSTNIIVRALKKGRFWITPDPYHKDDNIQIGREVKISCQVEAVPSEELTFSWFKNGRPLRSSERMVITQTDPDVSPGTTNLDIIDLKFTDFGTYTCVASLKGGGISDISIDVNISSSTVPPNLTVPQEKSPLVTREGDTIELQCQVTGKPKPIILWSRADKEVAMPDGSMQMESYDGTLRIVNVSREMSGMYRCQTSQYNGFNVKPREALVQLIVQYPPAVEPAFLEIRQGQDRSVTMSCRVLRAYPIRVLTYEWRLGNKLLRTGQFDSQEYTEYAVKSLSNENYGVYNCSIINEAGAGRCSFLVTGKAYAPEFYYDTYNPVWQNRHRVYSYSLQWTQMNPDAVDRIVAYRLGIRQAGQQRWWEQEIKINGNIQKGELITYNLTELIKPEAYEVRLTPLTKFGEGDSTIRVIKYSAPVNPHLREFHCGFEDGNICLFTQDDTDNFDWTKQSTATRNTKYTPNTGPNADRSGSKEGFYMYIETSRPRLEGEKARLLSPVFSIAPKNPYGPTNTAYCFSFFYHMYGQHIGVLNVYLRLKGQTTIENPLWSSSGNKGQRWNEAHVNIYPITSFQLIFEGIRGPGIEGDIAIDDVSIAEGECAKQDLATKNSVDGAVGILVHIWLFPIIVLISILSPRR

SEQ ID NO: 52505 - protein, 380 aa, Homo sapiens
MRWLLLYYALCFSLSKASAHTVELNNMFGQIQSPGYPDSYPSDSEVTWNITVPDGFRIKLYFMHFNLESSYLCEYDYVKVETEDQVLATFCGRETTDTEQTPGQEVVLSPGSFMSITFRSDFSNEERFTGFDAHYMAVDVDECKEREDEELSCDHYCHNYIGGYYCSCRFGYILHTDNRTCRVECSDNLFTQRTGVITSPDFPNPYPKSSECLYTIELEEGFMVNLQFEDIFDIEDHPEVPCPYDYIKIKVGPKVLGPFCGEKAPEPISTQSHSVLILFHSDNSGENRGWRLSYRAAGNECPELQPPVHGKIEPSQAKYFFKDQVLVSCDTGYKVLKDNVEMDTFQIECLKDGTWSNKIPTCKKNEIDLESELKSEQVTE

SEQ ID NO: 52506 - protein, 728 aa, Homo sapiens
MRWLLLYYALCFSLSKASAHTVELNNMFGQIQSPGYPDSYPSDSEVTWNITVPDGFRIKLYFMHFNLESSYLCEYDYVKVETEDQVLATFCGRETTDTEQTPGQEVVLSPGSFMSITFRSDFSNEERFTGFDAHYMAVDVDECKEREDEELSCDHYCHNYIGGYYCSCRFGYILHTDNRTCRVECSDNLFTQRTGVITSPDFPNPYPKSSECLYTIELEEGFMVNLQFEDIFDIEDHPEVPCPYDYIKIKVGPKVLGPFCGEKAPEPISTQSHSVLILFHSDNSGENRGWRLSYRAAGNECPELQPPVHGKIEPSQAKYFFKDQVLVSCDTGYKVLKDNVEMDTFQIECLKDGTWSNKIPTCKIVDCRAPGELEHGLITFSTRNNLTTYKSEIKYSCQEPYYKMLNNNTGIYTCSAQGVWMNKVLGRSLPTCLPECGQPSRSLPSLVKRIIGGRNAEPGLFPWQALIVVEDTSRVPNDKWFGSGALLSASWILTAAHVLRSQRRDTTVIPVSKEHVTVYLGLHDVRDKSGAVNSSAARVVLHPDFNIQNYNHDIALVQLQEPVPLGPHVMPVCLPRLEPEGPAPHMLGLVAGWGISNPNVTVDEIISSGTRTLSDVLQYVKLPVVPHAECKTSYESRSGNYSVTENMFCAGYYEGGKDTCLGDSGGAFVIFDDLSQRWVVQGLVSWGGPEECGSKQVYGVYTKVSNYVDWVWEQMGLPQSVVEPQVER

SEQ ID NO: 52507 - protein, 699 aa, Homo sapiens
MRWLLLYYALCFSLSKASAHTVELNNMFGQIQSPGYPDSYPSDSEVTWNITVPDGFRIKLYFMHFNLESSYLCEYDYVKVETEDQVLATFCGRETTDTEQTPGQEVVLSPGSFMSITFRSDFSNEERFTGFDAHYMAVDVDECKEREDEELSCDHYCHNYIGGYYCSCRFGYILHTDNRTCRVECSDNLFTQRTGVITSPDFPNPYPKSSECLYTIELEEGFMVNLQFEDIFDIEDHPEVPCPYDYIKIKVGPKVLGPFCGEKAPEPISTQSHSVLILFHSDNSGENRGWRLSYRAAGNECPELQPPVHGKIEPSQAKYFFKDQVLVSCDTGYKVLKDNVEMDTFQIECLKDGTWSNKIPTCKIVDCRAPGELEHGLITFSTRNNLTTYKSEIKYSCQEPYYKMLNNNTGIYTCSAQGVWMNKVLGRSLPTCLPVCGLPKFSRKLMARIFNGRPAQKGTTPWIAMLSHLNGQPFCGGSLLGSSWIVTAAHCLHQSLDPEDPTLRDSDLLSPSDFKIILGKHWRLRSDENEQHLGVKHTTLHPQYDPNTFENDVALVELLESPVLNAFVMPICLPEGPQQEGAMVIVSGWGKQFLQRFPETLMEIEIPIVDHSTCQKAYAPLKKKVTRDMICAGEKEGGKDACAGDSGGPMVTLNRERGQWYLVGTVSWGDDCGKKDRYGVYSYIHHNKDWIQRVTGVRN

SEQ ID NO: 52508 - protein, 615 aa, Homo sapiens
MSITFRSDFSNEERFTGFDAHYMAVDVDECKEREDEELSCDHYCHNYIGGYYCSCRFGYILHTDNRTCRVECSDNLFTQRTGVITSPDFPNPYPKSSECLYTIELEEGFMVNLQFEDIFDIEDHPEVPCPYDYIKIKVGPKVLGPFCGEKAPEPISTQSHSVLILFHSDNSGENRGWRLSYRAAGNECPELQPPVHGKIEPSQAKYFFKDQVLVSCDTGYKVLKDNVEMDTFQIECLKDGTWSNKIPTCKIVDCRAPGELEHGLITFSTRNNLTTYKSEIKYSCQEPYYKMLNNNTGIYTCSAQGVWMNKVLGRSLPTCLPECGQPSRSLPSLVKRIIGGRNAEPGLFPWQALIVVEDTSRVPNDKWFGSGALLSASWILTAAHVLRSQRRDTTVIPVSKEHVTVYLGLHDVRDKSGAVNSSAARVVLHPDFNIQNYNHDIALVQLQEPVPLGPHVMPVCLPRLEPEGPAPHMLGLVAGWGISNPNVTVDEIISSGTRTLSDVLQYVKLPVVPHAECKTSYESRSGNYSVTENMFCAGYYEGGKDTCLGDSGGAFVIFDDLSQRWVVQGLVSWGGPEECGSKQVYGVYTKVSNYVDWVWEQMGLPQSVVEPQVER

SEQ ID NO: 52509 - protein, 82 aa, Homo sapiens
MFCAGYYEGGKDTCLGDSGGAFVIFDDLSQRWVVQGLVSWGGPEECGSKQVYGVYTKVSNYVDWVWEQMGLPQSVVEPQVER

SEQ ID NO: 52510 - protein, 480 aa, Homo sapiens
MSITFRSDFSNEERFTGFDAHYMAVDVDECKEREDEELSCDHYCHNYIGGYYCSCRFGYILHTDNRTCRVECSDNLFTQRTGVITSPDFPNPYPKSSECLYTIELEEGFMVNLQFEDIFDIEDHPEVPCPYDYIKIKVGPKVLGPFCGEKAPEPISTQSHSVLILFHSDNSGENRGWRLSYRAAGNECPELQPPVHGKIEPSQAKYFFKDQVLVSCDTGYKVLKDNVEMDTFQIECLKDGTWSNKIPTCKIVDCRAPGELEHGLITFSTRNNLTTYKSEIKYSCQEPYYKMLNNNTGIYTCSAQGVWMNKVLGRSLPTCLPECGQPSRSLPSLVKRIIGGRNAEPGLFPWQALIVVEDTSRVPNDKWFGSGALLSASWILTAAHVLRSQRRDTTVIPVSKEHVTVYLGLHDVRDKSGAVNSSAARVVLHPDFNIQNYNHDIALVQLQEPVPLGPHVMPVCLPRLEPPGGRLGHLQSQCDS

SEQ ID NO: 52511 - protein, 686 aa, Homo sapiens
MRLLTLLGLLCGSVATPLGPKWPEPVFGRLASPGFPGEYANDQERRWTLTAPPGYRLRLYFTHFDLELSHLCEYDFVKLSSGAKVLATLCGQESTDTERAPGKDTFYSLGSSLDITFRSDYSNEKPFTGFEAFYAAEDIDECQVAPGEAPTCDHHCHNHLGGFYCSCRAGYVLHRNKRTCSALCSGQVFTQRSGELSSPEYPRPYPKLSSCTYSISLEEGFSVILDFVESFDVETHPETLCPYDFLKIQTDREEHGPFCGKTLPHRIETKSNTVTITFVTDESGDHTGWKIHYTSTAQPCPYPMAPPNGHVSPVQAKYILKDSFSIFCETGYELLQGHLPLKSFTAVCQKDGSWDRPMPACSIVDCGPPDDLPSGRVEYITGPGVTTYKAVIQYSCEETFYTMKVNDGKYVCEADGFWTSSKGEKSLPVCEPVCGLSARTTGGRIYGGQKAKPGDFPWQVLILGGTTAAGALLYDNWVLTAAHAVYEQKHDASALDIRMGTLKRLSPHYTQAWSEAVFIHEGYTHDAGFDNDIALIKLNNKVVINSNITPICLPRKEAESFMRTDDIGTASGWGLTQRGFLARNLMYVDIPIVDHQKCTAAYEKPPYPRGSVTANMLCAGLESGGKDSCRGDSGGALVFLDSETERWFVGGIVSWGSMNCGEAGQYGVYTKVINYIPWIENIISDF

SEQ ID NO: 52512 - protein, 185 aa, Homo sapiens
MRLLTLLGLLCGSVATPLGPKWPEPVFGRLASPGFPGEYANDQERRWTLTAPPGYRLRLYFTHFDLELSHLCEYDFVKLSSGAKVLATLCGQESTDTERAPGKDTFYSLGSSLDITFRSDYSNEKPFTGFEAFYAAEDIDECQVAPGEAPTCDHHCHNHLGGFYCSCRAGYVLHRNKRTCSEQSL

SEQ ID NO: 52513 - protein, 362 aa, Homo sapiens
MAAPRVFPLSCAVQQYAWGKMGSNSEVARLLASSDPLAQIAEDKPYAELWMGTHPRGDAKILDNRISQKTLSQWIAENQDSLGSKVKDTFNGNLPFLFKVLSVETPLSIQAHPNKELAEKLHLQAPQHYPDANHKPEMAIALTPFQGLCGFRPVEEIVTFLKTAAGNNMEDIFGELLLQLHQQYPGDIGCFAIYFLNLLTLKPGEAMFLEANVPHAYLKGDCVECMACSDNTVRAGLTPKFIDVPTLCEMLSYTPSSSKDRLFLPTRSQEDPYLSIYDPPVPDFTIMKTEVPGSVTEYKVLALDSASILLMVQGTVIASTPTTQTPIPLQRGGVLFIGANESVSLKLTEPKDLLIFRACCLL

SEQ ID NO: 52514 - protein, 423 aa, Homo sapiens
MAAPRVFPLSCAVQQYAWGKMGSNSEVARLLASSDPLAQIAEDKPYAELWMGTHPRGDAKILDNRISQKTLSQWIAENQDSLGSKVKDTFNGNLPFLFKVLSVETPLSIQAHPNKELAEKLHLQAPQHYPDANHKPEMAIALTPFQGLCGFRPVEEIVTFLKKVPEFQFLIGDEAATHLKQTMSHDSQAVASSLQSCFSHLMKSEKKVVVEQLNLLVKRISQQAAAGNNMEDIFGELLLQLHQQYPGDIGCFAIYFLNLLTLKPGEAMFLEANVPHAYLKGDCVECMACSDNTVRAGLTPKFIDVPTLCEMLSYTPSSSKDRLFLPTRSQEDPYLSIYDPPVPDFTIMKTEVPGSVTEYKVLALDSASILLMVQGTVIASTPTTQTPIPLQRGGVLFIGANESVSLKLTEPKDLLIFRACCLL

SEQ ID NO: 52515 - protein, 267 aa, Homo sapiens
MGSNSEVARLLASSDPLAQIAEDKPYAELWMGTHPRGDAKILDNRISQKTLSQWIAENQDSLGSKVKDTFNGNLPFLFKVLSVETPLSIQAHPNKELAEKLHLQAPQHYPDANHKPEMAIALTPFQGLCGFRPVEEIVTFLKKVPEFQFLIGDEAATHLKQTMSHDSQAVASSLQSCFSHLMKSEKKVVVEQLNLLVKRISQQAAAGNNMEDIFGELLLQLHQQYPGDIGCFAIYFLNLLTLKPGEAMFLEANVPHAYLKGGPWLCH

SEQ ID NO: 52516 - protein, 373 aa, Homo sapiens
MGTHPRGDAKILDNRISQKTLSQWIAENQDSLGSKVKDTFNGNLPFLFKVLSVETPLSIQAHPNKELAEKLHLQAPQHYPDANHKPEMAIALTPFQGLCGFRPVEEIVTFLKKVPEFQFLIGDEAATHLKQTMSHDSQAVASSLQSCFSHLMKSEKKVVVEQLNLLVKRISQQAAAGNNMEDIFGELLLQLHQQYPGDIGCFAIYFLNLLTLKPGEAMFLEANVPHAYLKGDCVECMACSDNTVRAGLTPKFIDVPTLCEMLSYTPSSSKDRLFLPTRSQEDPYLSIYDPPVPDFTIMKTEVPGSVTEYKVLALDSASILLMVQGTVIASTPTTQTPIPLQRGGVLFIGANESVSLKLTEPKDLLIFRACCLL

SEQ ID NO: 52517 - protein, 1456 aa, Homo sapiens [sequence omitted]

SEQ ID NO: 52518 - protein, 1479 aa, Homo sapiens
MGPGRPAPAPWPRHLLRCVLLLGCLHLGRPGAPGDAALPEPNVFLIFSHGLQGCLEAQGGQVRVTPACNTSLPAQRWKWVSRNRLFNLGTMQCLGTGWPGTNTTASLGMYECDREALNLRWHCRTLGDQLSLLLGARTSNISKPGTLERGDQTRSGQWRIYGSEEDLCALPYHEVYTIQGNSHGKPCTIPFKYDNQWFHGCTSTGREDGHLWCATTQDYGKDERWGFCPIKSNDCETFWDKDQLTDSCYQFNFQSTLSWREAWASCEQQGADLLSITEIHEQTYINGLLTGYSSTLWIGLNDLDTSGGWQWSDNSPLKYLNWESDQPDNPSEENCGVIRTESSGGWQNRDCSIALPYVCKKKPNATAEPTPPDRWANVKVECEPSWQPFQGHCYRLQAEKRSWQESKKACLRGGGDLVSIHSMAELEFITKQIKQEVEELWIGLNDLKLQMNFEWSDGSLVSFTHWHPFEPNNFRDSLEDCVTIWGPEGRWNDSPCNQSLPSICKKAGQLSQGAAEEDHGCRKGWTWHSPSCYWLGEDQVTYSEARRLCTDHGSQLVTITNRFEQAFVSSLIYNWEGEYFWTALQDLNSTGSFFWLSGDEVMYTHWNRDQPGYSRGGCVALATGSAMGLWEVKNCTSFRARYICRQSLGTPVTPELPGPDPTPSLTGSCPQGWASDTKLRYCYKVFSSERLQDKKSWVQAQGACQELGAQLLSLASYEEEHFVANMLNKIFGESEPEIHEQHWFWIGLNRRDPRGGQSWRWSDGVGFSYHNFDRSRHDDDDIRGCAVLDLASLQWVAMQCDTQLDWICKIPRGTDVREPDDSPQGRREWLRFQEAEYKFFEHHSTWAQAQRICTWFQAELTSVHSQAELDFLSHNLQKFSRAQEQHWWIGLHTSESDGRFRWTDGSIINFISWAPGKPRPVGKDKKCVYMTASREDWGDQRCLTALPYICKRSNVTKETQPPDLPTTALGGCPSDWIQFLNKCFQVQGQEPQSRVKWSEAQFSCEQQEAQLVTITNPLEQAFITASLPNVTFDLWIGLHASQRDFQWVEQEPLMYANWAPGEPSGPSPAPSGNKPTSCAVVLHSPSAHFTGRWDDRSCTEETHGFICQKGTDPSLSPSPAALPPAPGTELSYLNGTFRLLQKPLRWHDALLLCESRNASLAYVPDPYTQAFLTQAARGLRTPLWIGLAGEEGSRRYSWVSEEPLNYVGWQDGEPQQPGGCTYVDVDGAWRTTSCDTKLQGAVCGVSSGPPPPRRISYHGSCPQGLADSAWIPFREHCYSFHMELLLGHKEARQRCQRAGGAVLSILDEMENVFVWEHLQSYEGQSRGAWLGMNFNPKGGTLVWQDNTAVNYSNWGPPGLGPSMLSHNSCYWIQSNSGLWRPGACTNITMGVVCKLPRAEQSSFSPSALPENPAALVVVLMAVLLLLALLTAALILYRRRQSIERGAFEGARYSRSSSSPTEATEKNILVSDMEMNEQQE

SEQ ID NO: 52519 - protein, 345 aa, Homo sapiens
MPTGHLGSPLALALLPVATNRPAVQWSCTAPQPTSLAAGTIGAARRRPMASSARRARGSRRYSWVSEEPLNYVGWQDGEPQQPGGCTYVDVDGAWRTTSCDTKLQGAVCGVSSGPPPPRRISYHGSCPQGLADSAWIPFREHCYSFHMELLLGHKEARQRCQRAGGAVLSILDEMENVFVWEHLQSYEGQSRGAWLGMNFNPKGGTLVWQDNTAVNYSNWGPPGLGPSMLSHNSCYWIQSNSGLWRPGACTNITMGVVCKLPRAEQSSFSPSALPENPAALVVVLMAVLLLLALLTAALILYRRRQSIERGAFEGARYSRSSSSPTEATEKNILVSDMEMNEQQE

SEQ ID NO: 52520 - protein, 277 aa, Homo sapiens
MFPFYSCWRTGLLLLLLAVAVRESWQTEEKTCDLVGEKGKESEKELALVKRLKPLFNKSFESTVGQGSDTYIYIFRVCREAGNHTSGAGLVQINKSNGKETVVGRLNETHIFNGSNWIMLIYKGGDEYDNHCGKEQRRAVVMISCNRHTLADNFNPVSEERGKVQDCFYLFEMDSSLACSPEISHLSVGSILLVTFASLVAVYVVGGFLYQRLVVGAKGMEQFPHLAFWQDLGNLVADGCDFVCRSKPRNVPAAYRGVGDDQLGEESEERDDHLLPM

SEQ ID NO: 52521 - protein, 92 aa, Homo sapiens
MFPFYSCWRTGLLLLLLAVAVRESWQTEEKTCDLVGEKGKESEKELALVKRLKPLFNKSFESTVGQGSDTYIYIFRVCREAGNHTSGAGLVQ

SEQ ID NO: 52522 - protein, 109 aa, Homo sapiens
MFPFYSCWRTGLLLLLLAVAVRESWQTEEKTCDLVGEKGKESEKELALVKRLKPLFNKSFESTVGQGSDTYIYIFRVCREAGNHTSGAGLVQINKSNGKETVVGRLNET

SEQ ID NO: 52523 - protein, 248 aa, Homo sapiens
MSLFPSLPLLLLSMVAASYSETVTCEDAQKTCPAVIACSSPGINGFPGKDGRDGTKGEKGEPGQGLRGLQGPPGKLGPPGNPGPSGSPGPKGQKGDPGKSPDGDSSLAASERKALQTEMARIKKWLTFSLGKQVGNKFFLTNGEIMTFEKVKALCVKFQASVATPRNAAENGAIQNLIKEEAFLGITDEKTEGQFVDLTGNRLTYTNWNEGEPNNAGSDEDCVLLLKNGQWNDVPCSTSHLAVCEFPI

SEQ ID NO: 52524 - protein, 247 aa, Homo sapiens
MAAEADGPLKRLLVPILLPEKCYDQLFVQWDLLHVPCLKILLSKGLGLGIVAGSLLVKLPQVFKILGAKSAEGLSLQSVMLELVALTGTMVYSITNNFPFSSWGEALFLMLQTITICFLVMHYRGQTVKGVAFLACYGLVLLVLLSPLTPLTVVTLLQASNVPAVVVGRLLQAATNYHNGHTGQLSAITVFLLFGGSLARIFTSIQETGDPLMAGTFVVSSLCNGLIAAQLLFYWNAKPPHKQKKAQ

SEQ ID NO: 52525 - protein, 126 aa, Homo sapiens
MAAEADGPLKRLLVPILLPEKCYDQLFVQWDLLHVPCLKILLSKGLGLGIVAGSLLVKLPQVFKILGAKSAAGLKKEDEARPVRSASMRVRGGLGAWGHQQGEGCMEWESQGAGSGYRWAAVPPGA

SEQ ID NO: 52526 - protein, 299 aa, Homo sapiens [sequence omitted]

SEQ ID NO: 52527 - protein, 211 aa, Homo sapiens
MAAEADGPLKRLLVPILLPEKCYDQLFVQWDLLHVPCLKILLSKGLGLGIVAGSLLVKLPQVFKILGAKSAEGLSLQSVMLELVALTGTMVYSITNNFPFSSWGEALFLMLQTITICFLVMHYRGQTVKGVAFLACYGLVLLVLLSPLTPLTVVTLLQASNVPAVVVGRLLQAATNTTTGTQASSQPSQSSCCLGAPWPESSLPFRKPEIP

SEQ ID NO: 52528 - protein, 186 aa, Homo sapiens
MAAEADGPLKRLLVPILLPEKCYDQLFVQWDLLHVPCLKILLSKGLGLGIVAGSLLVKLPQVFKILGAKSAEGLSLQSVMLELVALTGTMVYSITNNFPFRCRFPRLLRPGPAGASLTSDALDCSHPAPGLQCACCGGGEASPGSHQLPQRAHRPALSHHSLPAVWGLPGPNLHFHSGVSIPFSQL

SEQ ID NO: 52529 - protein, 941 aa, Homo sapiens
MAAAPALKHWRTTLERVEKFVSPLYFTDCNLRGRLFGASCPVAVLSSFLTPERLPYQEAVQRDFRPAQVGDSFGPTWWTCWFRVELTIPEAWVGQEVHLCWESDGEGLVWRDGEPVQGLTKEGEKTSYVLTDRLGERDPRSLTLYVEVACNGLLGAGKGSMIAAPDPEKMFQLSRAELAVFHRDVHMLLVDLELLLGIAKAQQLEWVKSRYPGLYSRIQEFACRGQFVPVGGTWVEMDGNLPSGEAMVRQFLQGQNFFLQEFGKMCSEFWLPDTFGYSAQLPQIMHGCGIRRFLTQKLSWNLVNSFPHHTFFWEGLDGSRVLVHFPPGDSYGMQGSVEEVLKTVANNRDKGRANHSAFLFGFGDGGGGPTQTMLDRLKRLSNTDGLPRVQLSSPRQLFSALESDSEQLCTWVGELFLELHNGTYTTHAQIKKGNRECERILHDVELLSSLALARSAQFLYPAAQLQHLWRLLLLNQFHDVVTGSCIQMVAEEAMCHYEDIRSHGNTLLSAAAAALCAGEPGPEGLLIVNTLPWKRIEVMALPKPGGAHSLALVTVPSMGYAPVPPPTSLQPLLPQQPVFVVQETDGSVTLDNGIIRVKLDPTGRLTSLVLVASGREAIAEGAVGNQFVLFDDVPLYWDAWDVMDYHLETRKPVLGQAGTLAVGTEGGLRGSAWFLLQISPNSRLSQEVVLDVGCPYVRFHTEVHWHEAHKFLKVEFPARVRSSQATYEIQFGHLQRPTHYNTSWDWARFEVWAHRWMDLSEHGFGLALLNDCKYGASVRGSILSLSLLRAPKAPDATADTGRHEFTYALMPHKGSFQDAGVIQAAYSLNFPLLALPAPSPAPATSWSAFSVSSPAVVLETVKQAESSPQRRSLVLRLYEAHGSHVDCWLHLSLPVQEAILCDLLERPDPAGHLTLRDNRLKLTFSPFQVLSLLLVLQPPPH

SEQ ID NO: 52530 - protein, 1057 aa, Homo sapiens
MAAAPALKHWRTTLERVEKFVSPLYFTDCNLRGRLFGASCPVAVLSSFLTPERLPYQEAVQRDFRPAQVGDSFGPTWWTCWFRVELTIPEAWVGQEVHLCWESDGEGLVWRDGEPVQGLTKEGEKTSYVLTDRLGERDPRSLTLYVEVACNGLLGAGKGSMIAAPDPEKMFQLSRAELAVFHRDVHMLLVDLELLLGIAKGLGKDNQRSFQALYTANQMVNVCDPAQPETFPVAQALASRFFGQHGGESQHTIHATGHCHIDTAWLWPFKETVRKCARSWVTALQLMERNPEFIFACSQAQQLEWVKSRYPGLYSRIQEFACRGQFVPVGGTWVEMDGNLPSGEAMVRQFLQGQNFFLQEFGKMCSEFWLPDTFGYSAQLPQIMHGCGIRRFLTQKLSWNLVNSFPHHTFFWEGLDGSRVLVHFPPGDSYGMQGSVEEVLKTVANNRDKGRANHSAFLFGFGDGGGGPTQTMLDRLKRLSNTDGLPRVQLSSPRQLFSALESDSEQLCTWVGELFLELHNGTYTTHAQIKKGNRECERILHDVELLSSLALARSAQFLYPAAQLQHLWRLLLLNQFHDVVTGSCIQMVAEEAMCHYEDIRSHGNTLLSAAAAALCAGEPGPEGLLIVNTLPWKRIEVMALPKPGGAHSLGLTPSPGDSAQHGLCSCSSPHLTAAPAAPAACVRSARAPTDSASRPPPTKTDGSVTLDNGIIRVKLDPTGRLTSLVLVASGREAIAEGAVGNQFVLFDDVPLYWDAWDVMDYHLETRKPVLGQAGTLAVGTEGGLRGSAWFLLQISPNSRLSQEVVLDVGCPYVRFHTEVHWHEAHKFLKVEFPARVRSSQATYEIQFGHLQRPTHYNTSWDWARFEVWAHRWMDLSEHGFGLALLNDCKYGASVRGSILSLSLLRAPKAPDATADTGRHEFTYALMPHKGSFQDAGVIQAAYSLNFPLLALPAPSPAPATSWSAFSVSSPAVVLETVKQAESSPQRRSLVLRLYEAHGSHVDCWLHLSLPVQEAILCDLLERPDPAGHLTLRDNRLKLTFSPFQVLSLLLVLQPPPH

SEQ ID NO: 52531 - protein, 1017 aa, Homo sapiens
MAAAPALKHWRTTLERVEKFVSPLYFTDCNLRGRLFGASCPVAVLSSFLTPERLPYQEAVQRDFRPAQVGDSFGPTWWTCWFRVELTIPEAWVGQEVHLCWESDGEGLVWRDGEPVQGLTKEGEKTSYVLTDRLGERDPRSLTLYVEVACNGLLGAGKGSMIAAPDPEKMFQLSRAELAVFHRDVHMLLVDLELLLGIAKGLGKDNQRSFQALYTANQMVNVCDPAQPETFPVAQALASRFFGQHGGESQHTIHATGHCHIDTAWLWPFKETVRKCARSWVTALQLMERNPEFIFACSQAQQLEWVKSRYPGLYSRIQEFACRGQFVPVGGTWVEMDGNLPSGEAMVRQFLQGQNFFLQEFGKMCSEFWLPDTFGYSAQLPQIMHGCGIRRFLTQKLSWNLVNSFPHHTFFWEGLDGSRVLVHFPPGDSYGMQGSVEEVLKTVANNRDKGRANHSAFLFGFGDGGGGPTQTMLDRLKRLSNTDGLPRVQLSSPRQLFSALESDSEQLCTWVGELFLELHNGTYTTHAQIKKGNRECERILHDVELLSSLALARSAQFLYPAAQLQHLWRLLLLNQFHDVVTGSCIQMVAEEAMCHYEDIRSHGNTLLSAAAAALCAGEPGPEGLLIVNTLPWKRIEVMALPKPGGAHSLALVTVPSMGYAPVPPPTSLQPLLPQQPVFVVQETDGSVTLDNGIIRVKLDPTGRLTSLVLVASGREAIAEGAVGNQFVLFDDVPLYWDAWDVMDYHLETRKPVLGQAGTLAVGTEGGLRGSAWFLLQISPNSRLSQEVVLDVGCPYVRFHTEVHWHEAHKFLKVEFPARVRSSQATYEIQFGHLQRPTHYNTSWDWARFEVWAHRWMDLSEHGFGLALLNDCKYGASVRGSILSLSLLRAPKAPDATADTGRHEFTYALMPHKAPSPAPATSWSAFSVSSPAVVLETVKQAESSPQRRSLVLRLYEAHGSHVDCWLHLSLPVQEAILCDLLERPDPAGHLTLRDNRLKLTFSPFQVLSLLLVLQPPPH

SEQ ID NO: 52532 - protein, 367 aa, Homo sapiens
MPVGGLLPLFSSPAGGVLGGGLGGGGGRKGSGPAALRLTEKFVLLLVFSAFITLCFGAIFFLPDSSKLLSGVLFHSSPALQPAADHKPGPGARAEDAAEGRARRREEGAPGDPEAALEDNLARIRENHERALREAKETLQKLPEEIQRDILLEKKKVAQDQLRDKAPFRGLPPVDFVPPIGVESREPADAAIREKRAKIKEEIEARKGQANCPGSSSSCEVEIQMMKHAWNNYKGYAWGLNELKPISKGGHSSSLFGNIKGATIVDALDTLFIMEMKHEFEEAKSWVEENLDFNVNAEISVFEVNIRFVGGLLSAYYLSGEEIFRKKAVELGVKLLPAFHTPSGIPWALLNMKRWMCNIPRAMEATI

SEQ ID NO: 52533 - protein, 653 aa, Homo sapiens
MPVGGLLPLFSSPAGGVLGGGLGGGGGRKGSGPAALRLTEKFVLLLVFSAFITLCFGAIFFLPDSSKLLSGVLFHSSPALQPAADHKPGPGARAEDAAEGRARRREEGAPGDPEAALEDNLARIRENHERALREAKETLQKLPEEIQRDILLEKKKVAQDQLRDKAPFRGLPPVDFVPPIGVESREPADAAIREKRAKIKEMMKHAWNNYKGYAWGLNELKPISKGGHSSSLFGNIKGATIVDALDTLFIMEMKHEFEEAKSWVEENLDFNVNAEISVFEVNIRFVGGLLSAYYLSGEEIFRKKAVELGVKLLPAFHTPSGIPWALLNMKSGIGRNWPWASGGSSILAEFGTLHLEFMHLSHLSGNPIFAEKVMNIRTVLNKLEKPQGLYPNYLNPSSGQWGQHHVSVGGLGDSFYEYLLKAWLMSDKTDLEAKKMYFDAVQAIETHLIRKSSSGLTYIAEWKGGLLEHKMGHLTCFAGGMFALGADAAPEGMAQHYLELGAEIARTCHESYNRTFMKLGPEAFRFDGGVEAIATRQNEKYYILRPEVMETYMYMWRLTHDPKYRKWAWEAVEALENHCRVNGGYSGLRDVYLLHESYDDVQQSFFLAETLKYLYLIFSDDDLLPLEHWIFNSEAHLLPILPKDKKEVEIREE

SEQ ID NO: 52534 - protein, 192 aa, Homo sapiens
MFALGADGSRADKAGHYLELGAEIARTCHESYDRTALKLGPESFKFDGAVEAVAVRQAEKYYILRPEVIETYWYLWRFTHDPRYRQWGWEAALAIEKYCRVNGGFSGVKDVYSSTPTHDDVQQSFFLAETLKYLYLLFSGDDLLPLDHWVFNTEAHPLPVLHLANTTLSGTSQGMRRQNPYFQVLYLYYPDD

SEQ ID NO: 52535 - protein, 641 aa, Homo sapiens
MTTPALLPLSGRRIPPLNLGPPSFPHHRATLRLSEKFILLLILSAFITLCFGAFFFLPDSSKHKRFDLGLEDVLIPHVDAGKGAKNPGVFLIHGPDEHRHREEEERLRNKIRADHEKALEEAKEKLRKSREEIRAEIQTEKNKVVQEMKIKENKPLPPVPIPNLVGIRGGDPEDNDIREKREKIKEMMKHAWDNYRTYGWGHNELRPIARKGHSPNIFGSSQMGATIVDALDTLYIMGLHDEFLDGQRWIEDNLDFSVNSEVSVFEVNIRFIGGLLAAYYLSGEEIFKIKAVQLAEKLLPAFNTPTGIPWAMVNLKSGVGRNWGWASAGSSILAEFGTLHMEFIHLSYLTGDLTYYKKVMHIRKLLQKMDRPNGLYPNYLNPRTGRWGQYHTSVGGLGDSFYEYLLKAWLMSDKTDHEARKMYDDAIEAIEKHLIKKSRGGLTFIGEWKNGHLEKKMGHLACFAGGMFALGADGSRADKAGHYLELGAEIARTCHESYDRTALKLGPESFKFDGAVEAVAVRQAEKYYILRPEVIETYWYLWRFTHDPRYRQWGWEAALAIEKYCRVNGGFSGVKDVYSSTPTHDDVQQSFFLAETLKYLYLLFSGDDLLPLDHWVFNTEAHPLPVLHLANTTLSGNPAVR

SEQ ID NO: 52536 - protein, 375 aa, Homo sapiens
MGLHDEFLDGQRWIEDNLDFSVNSEVSVFEVNIRFIGGLLAAYYLSGEEIFKIKAVQLAEKLLPAFNTPTGIPWAMVNLKSGVGRNWGWASAGSSILAEFGTLHMEFIHLSYLTGDLTYYKKVMHIRKLLQKMDRPNGLYPNYLNPRTGRWGQYHTSVGGLGDSFYEYLLKAWLMSDKTDHEARKMYDDAIEAIEKHLIKKSRGGLTFIGEWKNGHLEKKMGHLACFAGGMFALGADGSRADKAGHYLELGAEIARTCHESYDRTALKLGPESFKFDGAVEAVAVRQAEKYYILRPEVIETYWYLWRFTHDPRYRQWGWEAALAIEKYCRVNGGFSGVKDVYSSTPTHDDVQQSFFLAETLKLASYHERTVFPAG

SEQ ID NO: 52537 - protein, 204 aa, Homo sapiens
  VARIANT 1: note = MOD_RES - Any amino acid
XIKKSRGGLTFIGEWKNGHLEKKMGHLACFAGGMFALGADGSRADKAGHYLELGAEIARTCHESYDRTALKLGPESFKFDGAVEAVAVRQAEKYYILRPEVIETYWYLWRFTHDPRYRQWGWEAALAIEKYCRVNGGFSGVKDVYSSTPTHDDVQQSFFLAETLKYLYLLFSGDDLLPLDHWVFNTEAHPLPVLHLANTTLSES

SEQ ID NO: 52538 - protein, 97 aa, Homo sapiens
EKYCRVNGGFSGVKDVYSSTPTHDDVQQSFFLAETLKYLYLLFSGDDLLPLDHWVFNTEAHPLPVLHLANTTLSGTSQGMRRQNPYFQVLYLYYPDD

SEQ ID NO: 52539 - protein, 344 aa, Homo sapiens
  VARIANT 1: note = MOD_RES - Any amino acid
XIRFIGGLLAAYYLSGEEIFKIKAVQLAEKLLPAFNTPTGIPWAMVNLKSGVGRNWGWASAGSSILAEFGTLHMEFIHLSYLTGDLTYYKKVMHIRKLLQKMDRPNGLYPNYLNPRTGRWGQYHTSVGGLGDSFYEYLLKAWLMSDKTDHEARKMYDDAIEAIEKHLIKKSRGGLTFIGEWKNGHLEKKMGHLACFAGGMFALGADGSRADKAGHYLELGAEIARTCHESYDRTALKLGPESFKFDGAVEAVAVRQAEKYYILRPEVIETYWYLWRFTHDPRYRQWGWEAALAIEKYCRVNGGFSGVKDVYSSTPTHDDVQQSFFLAETLKLASYHERTVFPAG

SEQ ID NO: 52540 - protein, 699 aa, Homo sapiens
MAACEGRRSGALGSSQSDFLTPPVGGAPWAVATTVVMYPPPPPPPHRDFISVTLSFGENYDNSKSWRRRSCWRKWKQLSRLQRNMILFLLAFLLFCGLLFYINLADHWKALAFRLEEEQKMRPEIAGLKPANPPVLPAPQKADTDPENLPEISSQKTQRHIQRGPPHLQIRPPSQDLKDGTQEEATKRQEAPVDPRPEGDPQRTVISWRGAVIEPEQGTELPSRRAEVPTKPPLPPARTQGTPVHLNYRQKGVIDVFLHAWKGYRKFAWGHDELKPVSRSFSEWFGLGLTLIDALDTMWILGLRKEFEEARKWVSKKLHFEKDVDVNLFESTIRILGGLLSAYHLSGDSLFLRKAEDFGNRLMPAFRTPSKIPYSDVNIGTGVAHPPRWTSDSTVAEVTSIQLEFRELSRLTGDKKFQEAVEKVTQHIHGLSGKKDGLVPMFINTHSGLFTHLGVFTLGARADSYYEYLLKQWIQGGKQETQLLEDYVEAIEGVRTHLLRHSEPSKLTFVGELAHGRFSAKMDHLVCFLPGTLALGVYHGLPASHMELAQELMETCYQMNRQMETGLSPEIVHFNLYPQPGRRDVEVKPADRHNLLRPETVESLFYLYRVTGDRKYQDWGWEILQSFSRFTRVPSGGYSSINNVQDPQKPEPRDKMESFFLGETLKYLFLLFSDDPNLLSLDAYVFNTEAHPLPIWTPA

SEQ ID NO: 52541 - protein, 402 aa, Homo sapiens
MWILGLRKEFEEARKWVSKKLHFEKDVDVNLFESTIRILGGLLSAYHLSGDSLFLRKAEDFGNRLMPAFRTPSKIPYSDVNIGTGVAHPPRWTSDSTVAEVTSIQLEFRELSRLTGDKKFQEAVEKVTQHIHGLSGKKDGLVPMFINTHSGLFTHLGVFTLGARADSYYEYLLKQWIQGGKQETQLLEDYVEAIEGVRTHLLRHSEPSKLTFVGELAHGRFSAKMDHLVCFLPGTLALGVYHGLPASHMELAQELMETCYQMNRQMETGLSPEIVHFNLYPQPGRRDVEVKPADRHNLLRPETVESLFYLYRVTGDRKYQDWGWEILQSFSRFTRVPSGGYSSINNVQDPQKPEPRDKMESFFLGETLKYLFLLFSDDPNLLSLDAYVFNTEAHPLPIWTPA

SEQ ID NO: 52542 - protein, 705 aa, Homo sapiens
  VARIANT 1: note = MOD_RES - Any amino acid
XPWAVATTVVMYPPPPPPPHRDFISVTLSFGENYDNSKSWRRRSCWRKWKQLSRLQRNMILFLLAFLLFCGLLFYINLADHWKALAFRLEEEQKMRPEIAGLKPANPPVLPAPQKADTDPENLPEISSQKTQRHIQRGPPHLQIRPPSQDLKDGTQEEATKRQEAPVDPRPEGDPQRTVISWRGAVIEPEQGTELPSRRAEVPTKPPLPPARTQGTPVHLNYRQKGVIDVFLHAWKGYRKFAWGHDELKPVSRSFSEWFGLGLTLIDALDTMWILGLRKEFEEARKWVSKKLHFEKDVDVNLFESTIRILGGLLSAYHLSGDSLFLRKAEDFGNRLMPAFRTPSKIPYSDVNIGTGVAHPPRWTSDSTVAEVTSIQLEFRELSRLTGDKKFQEAVEKVTQHIHGLSGKKDGLVPMFINTHSGLFTHLGVFTLGARADSYYEYLLKQWIQGGKQETQLLEDYVEAIEGVRTHLLRHSEPSKLTFVGELAHGRFSAKMDHLVCFLPGTLALGVYHGLPASHMELAQELMETCYQMNRQMETGLSPEIVHFNLYPQPGRRDVEVKPADRHNLLRPETVESLFYLYRVTGDRKYQDWGWEILQSFSRFTRVSTCPRPAWSRPPGHRHGWAVGLRLAPLLVVAVTWIREGRACRSLGVATLQLGGPGIPIPTELHGCGTQSTWRGWAPLIFISQGLSREGLCCGPSIPPV

SEQ ID NO: 52543 - protein, 1144 aa, Homo sapiens
MKLSRQFTVFGSAIFCVVIFSLYLMLDRGHLDYPRNPRREGSFPQGQLSMLQEKIDHLERLLAENNEIISNIRDSVINLSESVEDGPKSSQSNFSQGAGSHLLPSQLSLSVDTADCLFASQSGSHNSDVQMLDVYSLISFDNPDGGVWKQGFDITYESNEWDTEPLQVFVVPHSHNDPGWLKTFNDYFRDKTQYIFNNMVLKLKEDSRRKFIWSEISYLSKWWDIIDIQKKDAVKSLIENGQLEIVTGGWVMPDEATPHYFALIDQLIEGHQWLENNIGVKPRSGWAIDPFGHSPTMAYLLNRAGLSHMLIQRVHYAVKKHFALHKTLEFFWRQNWDLGSVTDILCHMMPFYSYDIPHTCGPDPKICCQFDFKRLPGGRFGCPWGVPPETIHPGNVQSRARMLLDQYRKKSKLFRTKVLLAPLGDDFRYCEYTEWDLQFKNYQQLFDYMNSQSKFKVKIQFGTLSDFFDALDKADETQRDKGQSMFPVLSGDFFTYADRDDHYWSGYFTSRPFYKRMDRIMESHLRAAEILYYFALRQAHKYKINKFLSSSLYTALTEARRNLGLFQHHDAITGTAKDWVVVDYGTRLFHSLMVLEKIIGNSAFLLILKDKLTYDSYSPDTFLEMDLKQKSQDSLPQKNIIRLSAEPRYLVVYNPLEQDRISLVSVYVSSPTVQVFSASGKPVEVQVSAVWDTANTISETAYEISFRAHIPPLGLKVYKILESASSNSHLADYVLYKNKVEDSGIFTIKNMINTEEGITLENSFVLLRFDQTGLMKQMMTKEDGKHHEVNVQFSWYGTTIKRDKSGAYLFLPDGNAKPYVYTTPPFVRVTHGRIYSEVTCFFDHVTHRVRLYHIQGIEGQSVEVSNIVDIRKVYNREIAMKISSDIKSQNRFYTDLNGYQIQPRMTLSKLPLQANVYPMTTMAYIQDAKHRLTLLSAQSLGVSSLNSGQIEVIMDRRLMQDDNRGLEQGIQDNKITANLFRILLEKRSAVNTEEEKKSVSYPSLLSHITSSLMNHPVIPMANKFSSPTLELQGEFSPLQSSLPCDIHLVNLRTIQSKVGNGHSNEAALILHRKGFDCRFSSKGTGLFCSTTQGKILVQKLLNKFIVESLTPSSLSLMHSPPGTQNISEINLSPMEISTFRIQLR

SEQ ID NO: 52544 - protein, 1150 aa, Homo sapiens
MKLKKQVTVCGAAIFCVAVFSLYLMLDRVQHDPTRHQNGGNFPRSQISVLQNRIEQLEQLLEENHEIISHIKDSVLELTANAEGPPAMLPYYTVNGSWVVPPEPRPSFFSISPQDCQFALGGRGQKPELQMLTVSEELPFDNVDGGVWRQGFDISYDPHDWDAEDLQVFVVPHSHNDPGWIKTFDKYYTEQTQHILNSMVSKLQEDPRRRFLWAEVSFFAKWWDNINVQKRAAVRRLVGNGQLEIATGGWVMPDEANSHYFALIDQLIEGHQWLERNLGATPRSGWAVDPFGYSSTMPYLLRRANLTSMLIQRVHYAIKKHFAATHSLEFMWRQTWDSDSSTDIFCHMMPFYSYDVPHTCGPDPKICCQFDFKRLPGGRINCPWKVPPRAITEANVAERAALLLDQYRKKSQLFRSNVLLVPLGDDFRYDKPQEWDAQFFNYQRLFDFFNSRPNLHVQAQFGTLSDYFDALYKRTGVEPGARPPGFPVLSGDFFSYADREDHYWTGYYTSRPFYKSLDRVLEAHLRGAEVLYSLAAAHARRSGLAGRYPLSDFTLLTEARRTLGLFQHHDAITGTAKEAVVVDYGVRLLRSLVNLKQVIIHAAHYLVLGDKETYHFDPEAPFLQVDDTRLSHDALPERTVIQLDSSPRFVVLFNPLEQERFSMVSLLVNSPRVRVLSEEGQPLAVQISAHWSSATEAVPDVYQVSVPVRLPALGLGVLQLQLGLDGHRTLPSSVRIYLHGRQLSVSRHEAFPLRVIDSGTSDFALSNRYMQVWFSGLTGLLKSIRRVDEEHEQQVDMQVLVYGTRTSKDKSGAYLFLPDGEAKPYVPKEPPVLRVTEGPFFSEVVAYYEHIHQAVRLYNLPGVEGLSLDISSLVDIRDYVNKELALHIHTDIDSQGIFFTDLNGFQVQPRRYLKKLPLQANFYPMPVMAYIQDAQKRLTLHTAQALGVSSLKDGQLEVILDRRLMQDDNRGLGQGLKDNKRTCNRFRLLLERRTVGSEVQDSHSTSYPSLLSHLTSMYLNAPALALPVARMQLPGPGLRSFHPLASSLPCDFHLLNLRTLQAEEDTLPSAETALILHRKGFDCGLEAKNLGFNCTTSQGKVALGSLFHGLDVVFLQPTSLTLLYPLASPSNSTDVYLEPMEIATFRLRLG

SEQ ID NO: 52545 - protein, 340 aa, Homo sapiens
MQVWFSGLTGLLKPYVPKEPPVLRVTEGPFFSEVVAYYEHIHQAVRLYNLPGVEGLSLDISSLVDIRDYVNKELALHIHTDIDSQGIFFTDLNGFQVQPRRYLKKLPLQANFYPMPVMAYIQDAQKRLTLHTAQALGVSSLKDGQLEVILDRRLMQDDNRGLGQGLKDNKRTCNRFRLLLERRTVGSEVQDSHSTSYPSLLSHLTSMYLNAPALALPVARMQLPGPGLRSFHPLASSLPCDFHLLNLRTLQAEEDTLPSAETALILHRKGFDCGLEAKNLGFNCTTSQGKVALGSLFHGLDVVFLQPTSLTLLYPLASPSNSTDVYLEPMEIATFRLRLG

SEQ ID NO: 52546 - protein, 658 aa, Homo sapiens
MTSDMTSPRSGMPSSSTTNGSLTSSTAGLTSMCRGAEVLYSLAAAHARRSGLAGRYPLSDFTLLTEARRTLGLFQHHDAITGTAKEAVVVDYGVRLLRSLVNLKQVIIHAAHYLVLGDKETYHFDPEAPFLQVDDTRLSHDALPERTVIQLDSSPRFVVLFNPLEQERFSMVSLLVNSPRVRVLSEEGQPLAVQISAHWSSATEAVPDVYQVSVPVRLPALGLGVLQLQLGLDGHRTLPSSVRIYLHGRQLSVSRHEAFPLRVIDSGTSDFALSNRYMQVWFSGLTGLLKSIRRVDEEHEQQVDMQVLVYGTRTSKDKSGAYLFLPDGEAKPYVPKEPPVLRVTEGPFFSEVVAYYEHIHQAVRLYNLPGVEGLSLDISSLVDIRDYVNKELALHIHTDIDSQGIFFTDLNGFQVQPRRYLKKLPLQANFYPMPVMAYIQDAQKRLTLHTAQALGVSSLKDGQLEVILDRRLMQDDNRGLGQGLKDNKRTCNRFRLLLERRTVGSEVQDSHSTSYPSLLSHLTSMYLNAPALALPVARMQLPGPGLRSFHPLASSLPCDFHLLNLRTLQAEEDTLPSAETALILHRKGFDCGLEAKNLGFNCTTSQGKVALGSLFHGLDVVFLQPTSLTLLYPLASPSNSTDVYLEPMEIATFRLRLG

SEQ ID NO: 52547 - protein, 72 aa, Homo sapiens
MKLKKQVTVCGAAIFCVAVFSLYLMLDRVQHDPTRHQNGGNFPRSQISVLQNRIEQLEQLLEENHEIISHIK

SEQ ID NO: 52548 - protein, 50 aa, Homo sapiens
MKLKKQVTVCGAAIFCVAVFSLYLMLDRVQHDPTRHQNGGNFPRSQISVL

SEQ ID NO: 52549 - protein, 1063 aa, Homo sapiens
MLPYYTVNGSWVVPPEPRPSFFSISPQDCQFALGGRGQKPELQMLTVSEELPFDNVDGGVWRQGFDISYDPHDWDAEDLQVFVVPHSHNDPGWIKTFDKYYTEQTQHILNSMVSKLQEDPRRRFLWAEVSFFAKWWDNINVQKRAAVRRLVGNGQLEIATGGWVMPDEANSHYFALIDQLIEGHQWLERNLGATPRSGWAVDPFGYSSTMPYLLRRANLTSMLIQRVHYAIKKHFAATHSLEFMWRQTWDSDSSTDIFCHMMPFYSYDVPHTCGPDPKICCQFDFKRLPGGRINCPWKVPPRAITEANVAERAALLLDQYRKKSQLFRSNVLLVPLGDDFRYDKPQEWDAQFFNYQRLFDFFNSRPNLHVQAQFGTLSDYFDALYKRTGVEPGARPPGFPVLSGDFFSYADREDHYWTGYYTSRPFYKSLDRVLEAHLRGAEVLYSLAAAHARRSGLAGRYPLSDFTLLTEARRTLGLFQHHDAITGTAKEAVVVDYGVRLLRSLVNLKQVIIHAAHYLVLGDKETYHFDPEAPFLQVDDTRLSHDALPERTVIQLDSSPRFVVLFNPLEQERFSMVSLLVNSPRVRVLSEEGQPLAVQISAHWSSATEAVPDVYQVSVPVRLPALGLGVLQLQLGLDGHRTLPSSVRIYLHGRQLSVSRHEAFPLRVIDSGTSDFALSNRYMQVWFSGLTGLLKSIRRVDEEHEQQVDMQVLVYGTRTSKDKSGAYLFLPDGEAKPYVPKEPPVLRVTEGPFFSEVVAYYEHIHQAVRLYNLPGVEGLSLDISSLVDIRDYVNKELALHIHTDIDSQGIFFTDLNGFQVQPRRYLKKLPLQANFYPMPVMAYIQDAQKRLTLHTAQALGVSSLKDGQLEVILDRRLMQDDNRGLGQGLKDNKRTCNRFRLLLERRTVGSEVQDSHSTSYPSLLSHLTSMYLNAPALALPVARMQLPGPGLRSFHPLASSLPCDFHLLNLRTLQAEEDTLPSAETALILHRKGFDCGLEAKNLGFNCTTSQGKVALGSLFHGLDVVFLQPTSLTLLYPLASPSNSTDVYLEPMEIATFRLRLG

SEQ ID NO: 52550 - protein, 76 aa, Homo sapiens
MKLKKQVTVCGAAIFCVAVFSLYLMLDRVQHDPTRHQNGGNFPRSQISVLQNRIEQLEQLLEENHEIISHIKDSVL

SEQ ID NO: 52551 - protein, 120 aa, Homo sapiens
MKLKKQVTVCGAAIFCVAVFSLYLMLDRVQHDPTRHQNGGNFPRSQISVLQNRIEQLEQLLEENHEIISHIKDSVLELTANAEGPPAMLPYYTVNGSWVVPPEPRPSFFSISPQDCQFAL

SEQ ID NO: 52552 - protein, 1040 aa, Homo sapiens
MAAAPALKHWRTTLERVEKFVSPLYFTDCNLRGRLFGASCPVAVLSSFLTPERLPYQEAVQRDFRPAQVGDSFGPTWWTCWFRVELTIPEAWVGQEVHLCWESDGEGLVWRDGEPVQGLTKEGEKTSYVLTDRLGERDPRSLTLYVEVACNGLLGAGKGSMIAAPDPEKMFQLSRAELAVFHRDVHMLLVDLELLLGIAKGLGKDNQRSFQALYTANQMVNVCDPAQPETFPVAQALASRFFGQHGGESQHTIHATGHCHIDTAWLWPFKETVRKCARSWVTALQLMERNPEFIFACSQAQQLEWVKSRYPGLYSRIQEFACRGQFVPVGGTWVEMDGNLPSGEAMVRQFLQGQNFFLQEFGKMCSEFWLPDTFGYSAQLPQIMHGCGIRRFLTQKLSWNLVNSFPHHTFFWEGLDGSRVLVHFPPGDSYGMQGSVEEVLKTVANNRDKGRANHSAFLFGFGDGGGGPTQTMLDRLKRLSNTDGLPRVQLSSPRQLFSALESDSEQLCTWVGELFLELHNGTYTTHAQIKKGNRECERILHDVELLSSLALARSAQFLYPAAQLQHLWRLLLLNQFHDVVTGSCIQMVAEEAMCHYEDIRSHGNTLLSAAAAALCAGEPGPEGLLIVNTLPWKRIEVMALPKPGGAHSLALVTVPSMGYAPVPPPTSLQPLLPQQPVFVVQETDGSVTLDNGIIRVKLDPTGRLTSLVLVASGREAIAEGAVGNQFVLFDDVPLYWDAWDVMDYHLETRKPVLGQAGTLAVGTEGGLRGSAWFLLQISPNSRLSQEVVLDVGCPYVRFHTEVHWHEAHKFLKVEFPARVRSSQATYEIQFGHLQRPTHYNTSWDWARFEVWAHRWMDLSEHGFGLALLNDCKYGASVRGSILSLSLLRAPKAPDATADTGRHEFTYALMPHKGSFQDAGVIQAAYSLNFPLLALPAPSPAPATSWSAFSVSSPAVVLETVKQAESSPQRRSLVLRLYEAHGSHVDCWLHLSLPVQEAILCDLLERPDPAGHLTLRDNRLKLTFSPFQVLSLLLVLQPPPH

SEQ ID NO: 52553 - protein, 209 aa, Homo sapiens
MAAAPALKHWRTTLERVEKFVSPLYFTDCNLRGRLFGASCPVAVLSSFLTPERLPYQEAVQRDFRPAQVGDSFGPTWWTCWFRVELTIPEAWVGQEVHLCWESDGEGLVWRDGEPVQGLTKEGEKTSYVLTDRLGERDPRSLTLYVEVACNGLLGAGKGSMIAAPDPEKMFQLSRAELAVFHRDVHMLLVDLELLLGIAKPGFGPSKRL

SEQ ID NO: 52554 - protein, 879 aa, Homo sapiens
MRLHLLLLLALCGAGTTAAELSYSLRGNWSICNGNGSLELPGAVPGCVHSALFQQGLIQDSYYRFNDLNYRWVSLDNWTYSKEFKIPFEISKWQKVNLILEGVDTVSKILFNEVTIGETDNMFNRYSFDITNVVRDVNSIELRFQSAVLYAAQQSKAHTRYQVPPDCPPLVQKGECHVNFVRKEQCSFSWDWGPSFPTQGIWKDVRIEAYNICHLNYFTFSPIYDKSAQEWNLEIESTFDVVSSKPVGGQVIVAIPKLQTQQTYSIELQPGKRIVELFVNISKNITVETWWPHGHGNQTGYNMTVLFELDGGLNIEKSAKVYFRTVELIEEPIKGSPGLSFYFKINGFPIFLKGSNWIPADSFQDRVTSELLRLLLQSVVDANMNTLRVWGGGIYEQDEFYELCDELGIMVWQDFMFACALYPTDQGFLDSVTAEVAYQIKRLKSHPSIIIWSGNNENEEALMMNWYHISFTDRPIYIKDYVTLYVKNIRELVLAGDKSRPFITSSPTNGAETVAEAWVSQNPNSNYFGDVHFYDYISDCWNWKVFPKARFASEYGYQSWPSFSTLEKVSSTEDWSFNSKFSLHRQHHEGGNKQMLYQAGLHFKLPQSTDPLRTFKDTIYLTQVMQAQCVKTETEFYRRSRSEIVDQQGHTMGALYWQLNDIWQAPSWASLEYGGKWKMLHYFAQNFFAPLLPVGFENENTFYIYGVSDLHSDYSMTLSVRVHTWSSLEPVCSRVTERFVMKGGEAVCLYEEPVSELLRRCGNCTRESCVVSFYLSADHELLSPTNYHFLSSPKEAVGLCKAQITAIISQQGDIFVFDLETSAVAPFVWLDVGSIPGRFSDNGFLMTEKTRTILFYPWEPTSKNELEQSFHVTSLTDIY

SEQ ID NO: 52555 - protein, 462 aa, Homo sapiens
MAKFRRRTCIILALFILFIFSLMMGLKMLRPNTATFGAPFGLDLLPELHQRTIHLGKNFDFQKSDRINSETNTKNLKSVEITMKPSKASELNLDELPPLNNYLHVFYYSWYGNPQFDGKYIHWNHPVLEHWDPRIAKNYPQGRHNPPDDIGSSFYPELGSYSSRDPSVIETHMRQMRSASIGVLALSWYPPDVNDENGEPTDNLVPTILDKAHKYNLKVTFHIEPYSNRDDQNMYKNVKYIIDKYGNHPAFYRYKTKTGNALPMFYVYDSYITKPEKWANLLTTSGSRSIRNSPYDGLFIALLVEEKHKYDILQSGFDGIYTYFATNGFTYGSSHQNWASLKLFCDKYNLIFIPSVGPGYIDTSIRPWNTQNTRNRINGKYYEIGLSAALQTRPSLISITSFNEWHEGTQIEKAVPKRTSNTVYLDYRPHKPGLYLELTRKWSEKYSKERATYALDRQLPVS

SEQ ID NO: 52556 - protein, 198 aa, Homo sapiens
MAKFRRRTCIILALFILFIFSLMMGLKMLRPNTATFGAPFGLDLLPELHQRTIHLGKNFDFQKSDRINSETNTKNLKSVEITMKPSKASELNLDELPPLNNYLHVFYYSWYGNPQFDGKYIHWNHPVLEHWDPRIAKNYPQGRHNPPDDIGSSFYPELGSYSSRDPSVIETHMRQMRSASIGNYCIYIYVCLCLYICI

SEQ ID NO: 52557 - protein, 207 aa, Homo sapiens
MAKFRRRTCIILALFILFIFSLMMGLKMLRPNTATFGAPFGLDLLPELHQRTIHLGKNFDFQKSDRINSETNTKNLKSVEITMKPSKASELNLDELPPLNNYLHVFYYSWYGNPQFDGKYIHWNHPVLEHWDPRIAKNYPQGRHNPPDDIGSSFYPELGSYSSRDPSVIETHMRQMRSASIGNYCIYICVFVSVYMHINDFLCNFTS

SEQ ID NO: 52558 - protein, 792 aa, Homo sapiens
MITVNPDGKIMVRRCLVTLRPFRLFVLGIGFFTLCFLMTSLGGQFSARRLGDSPFTIRTEVMGGPESRGVLRKMSDLLELMVKRMDALARLENSSELHRAGGDLHFPADRMPPGAGLMERIQAIAQNVSDIAVKVDQILRHSLLLHSKVSEGRRDQCEAPSDPKFPDCSGKVEWMRARWTSDPCYAFFGVDGTECSFLIYLSEVEWFCPPLPWRNQTAAQRAPKPLPKVQAVFRSNLSHLLDLMGSGKESLIFMKKRTKRLTAQWALAAQRLAQKLGATQRDQKQILVHIGFLTEESGDVFSPRVLKGGPLGEMVQWADILTALYVLGHGLRVTVSLKELQSNLGVPPGRGSCPLTMPLPFDLIYTDYHGLQQMKRHMGLSFKKYRCRIRVIDTFGTEPAYNHEEYATLHGYRTNWGYWNLNPKQFMTMFPHTPDNSFMGFVSEELNETEKRLIKGGKASNMAVVYGKEASIWKLQGKEKFLGILNKYMEIHGTVYYESQRPPEVPAFVKNHGLLPQPEFQQLLRKAKLFIGFGFPYEGPAPLEAIANGCIFLQSRFSPPHSSLNHEFFRGKPTSREVFSQHPYAENFIGKPHVWTVDYNNSEEFEAAIKAIMRTQVDPYLPYEYTCEGMLERIHAYIQHQDFCRAPDPALPEAHAPQSPFVLAPNATHLEWARNTSLAPGAWPPAHALRAWLAVPGRACTDTCLDHGLICEPSFFPFLNSQDAFLKLQVPCDSTESEMNHLYPAFAQPGQECYLQKEPLLFSCAGSNTKYRRLCPCRDFRKGQVALCQGCL

SEQ ID NO: 52559 - protein, 445 aa, Homo sapiens
MLKKQSAGLVLWGAILFVAWNALLLLFFWTRPAPGRPPSVSALDGDPASLTREVIRLAQDAEVELERQRGLLQQIGDALSSQRGRVPTAAPPAQPRVPVTPAPAVIPILVIACDRSTVRRCLDKLLHYRPSAELFPIIVSQDCGHEETAQAIASYGSAVTHIRQPDLSSIAVPPDHRKFQGYYKIARHYRWALGQVFRQFRFPAAVVVEDDLEVAPDFFEYFRATYPLLKADPSLWCVSAWNDNGKEQMVDASRPELLYRTDFFPGLGWLLLAELWAELEPKWPKAFWDDWMRRPEQRQGRACIRPEISRTMTFGRKGVSHGQFFDQHLKFIKLNQQFVHFTQLDLSYLQREAYDRDFLARVYGAPQLQVEKVRTNDRKELGEVRVQYTGRDSFKAFAKALGVMDDLKSGVPRAGYRGIVTFQFRGRRVHLAPPLTWEGYDPSWN

SEQ ID NO: 52560 - protein, 445 aa, Homo sapiens; identical to SEQ ID NO: 52559

SEQ ID NO: 52561 - protein, 445 aa, Homo sapiens; identical to SEQ ID NO: 52559

SEQ ID NO: 52562 - protein, 445 aa, Homo sapiens; identical to SEQ ID NO: 52559

SEQ ID NO: 52563 - protein, 445 aa, Homo sapiens; identical to SEQ ID NO: 52559

SEQ ID NO: 52564 - protein, 302 aa, Homo sapiens
MLKKQSAGLVLWGAILFVAWNALLLLFFWTRPAPGRPPSVSALDGDPASLTRVFRQFRFPAAVVVEDDLEVAPDFFEYFRATYPLLKADPSLWCVSAWNDNGKEQMVDASRPELLYRTDFFPGLGWLLLAELWAELEPKWPKAFWDDWMRRPEQRQGRACIRPEISRTMTFGRKGVSHGQFFDQHLKFIKLNQQFVHFTQLDLSYLQREAYDRDFLARVYGAPQLQVEKVRTNDRKELGEVRVQYTGRDSFKAFAKALGVMDDLKSGVPRAGYRGIVTFQFRGRRVHLAPPLTWEGYDPSWN

SEQ ID NO: 52565 - protein, 103 aa, Homo sapiens
MLKKQSAGLVLWGAILFVAWNALLLLFFWTRPAPGRPPSVSALDGDPASLTREVIRLAQDAEVELERQRGLLQQIGDALSSQRGRVPTAAPPAQPRVPVTPAP

SEQ ID NO: 52566 - protein, 199 aa, Homo sapiens
MLKKQSAGLVLWGAILFVAWNALLLLFFWTRPAPGRPPSVSALDGDPASLTREVIRLAQDAEVELERQRGLLQQIGDALSSQRGRVPTAAPPAQPRVPVTPAPAVIPILVIACDRSTVRRCLDKLLHYRPSAELFPIIVSQDCGHEETAQAIASYGSAVTHIRQPDLSSIAVPPDHRKFQGYYKIARHYRWALGQVFRQ

SEQ ID NO: 52567 - protein, 111 aa, Homo sapiens
MLKKQSAGLVLWGAILFVAWNALLLLFFWTRPAPGRPPSVSALDGDPASLTREVIRLAQDAEVELERQRGLLQQIGDALSSQRGRVPTAAPPAQPRVPVTPAPAVIPILVI

SEQ ID NO: 52568 - protein, 154 aa, Homo sapiens
MLKKQSAGLVLWGAILFVAWNALLLLFFWTRPAPGRPPSVSALDGDPASLTREVIRLAQDAEVELERQRGLLQQIGDALSSQRGRVPTAAPPAQPRVPVTPAPAVIPILVIACDRSTVRRCLDKLLHYRPSAELFPIIVSQDCGHEETAQAIAS

SEQ ID NO: 52569 - protein, 34 aa, Homo sapiens
MLKKQSAGLVLWGAILFVAWNALLLLFFWTRPAP

SEQ ID NO: 52570 - protein, 115 aa, Homo sapiens
MLKKQSAGLVLWGAILFVAWNALLLLFFWTRPAPGRPPSVSALDGDPASLTREVIRLAQDAEVELERQRGLLQQIGDALSSQRGRVPTAAPPAQPRVPVTPAPAVIPILVIACDR

SEQ ID NO: 52571 - protein, 95 aa, Homo sapiens
MLKKQSAGLVLWGAILFVAWNALLLLFFWTRPAPGRPPSVSALDGDPASLTREVIRLAQDAEVELERQRGLLQQIGDALSSQRGRVPTAAPPAQP

SEQ ID NO: 52572 - protein, 127 aa, Homo sapiens
MLKKQSAGLVLWGAILFVAWNALLLLFFWTRPAPGRPPSVSALDGDPASLTREVIRLAQDAEVELERQRGLLQQIGDALSSQRGRVPTAAPPAQPRVPVTPAPAVIPILVIACDRSTVRRCLDKLLH

SEQ ID NO: 52573 - protein, 105 aa, Homo sapiens
MLKKQSAGLVLWGAILFVAWNALLLLFFWTRPAPGRPPSVSALDGDPASLTREVIRLAQDAEVELERQRGLLQQIGDALSSQRGRVPTAAPPAQPRVPVTPAPAV

SEQ ID NO: 52574 - protein, 535 aa, Homo sapiens
MRLRNGTVATALAFITSFLTLSWYTTWQNGKEKLIAYQREFLALKERLRIAEHRISQRSSELNTIVQQFKRVGAETNGSKDALNKFSDNTLKLLKELTSKKSLQVPSIYYHLPHLLKNEGSLQPAVQIGNGRTGVSIVMGIPTVKREVKSYLIETLHSLIDNLYPEEKLDCVIVVFIGETDIDYVHGVVANLEKEFSKEISSGLVEVISPPESYYPDLTNLKETFGDSKERVRWRTKQNLDYCFLMMYAQEKGIYYIQLEDDIIVKQNYFNTIKNFALQLSSEEWMILEFSQLGFIGKMFQAPDLTLIVEFIFMFYKEKPIDWLLDHILWVKVCNPEKDAKHCDRQKANLRIRFRPSLFQHVGLHSSLSGKIQKLTDKDYMKPLLLKIHVNPPAEVSTSLKVYQGHTLEKTYMGEDFFWAITPIAGDYILFKFDKPVNVESYLFHSGNQEHPGDILLNTTVEVLPFKSEGLEISKETKDKRLEDGYFRIGKFENGVAEGMVDPSLNPISAFRLSVIQNSAVWAILNEIHIKKATN

SEQ ID NO: 52575 - protein, 535 aa, Homo sapiens; identical to SEQ ID NO: 52574

SEQ ID NO: 52576 - protein, 535 aa, Homo sapiens; identical to SEQ ID NO: 52574

SEQ ID NO: 52577 - protein, 423 aa, Homo sapiens
MNYSITVSIVMGIPTVKREVKSYLIETLHSLIDNLYPEEKLDCVIVVFIGETDIDYVHGVVANLEKEFSKEISSGLVEVISPPESYYPDLTNLKETFGDSKERVRWRTKQNLDYCFLMMYAQEKGIYYIQLEDDIIVKQNYFNTIKNFALQLSSEEWMILEFSQLGFIGKMFQAPDLTLIVEFIFMFYKEKPIDWLLDHILWVKVCNPEKDAKHCDRQKANLRIRFRPSLFQHVGLHSSLSGKIQKLTDKDYMKPLLLKIHVNPPAEVSTSLKVYQGHTLEKTYMGEDFFWAITPIAGDYILFKFDKPVNVESYLFHSGNQEHPGDILLNTTVEVLPFKSEGLEISKETKDKRLEDGYFRIGKFENGVAEGMVDPSLNPISAFRLSVIQNSAVWAILNEQRVFSGWWQKSRDKAEGPQAPLLF

SEQ ID NO: 52578 - protein, 548 aa, Homo sapiens
MRLRNGTFLTLLLFCLCAFLSLSWYAALSGQKGDVVDVYQREFLALRDRLHAAEQESLKRSKELNLVLDEIKRAVSERQALRDGDGNRTWGRLTEDPRLKPWNGSHRHVLHLPTVFHHLPHLLAKESSLQPAVRVGQGRTGVSVVMGIPSVRREVHSYLTDTLHSLISELSPQEKEDSVIVVLIAETDSQYTSAVTENIKALFPTEIHSGLLEVISPSPHFYPDFSRLRESFGDPKERVRWRTKQNLDYCFLMMYAQSKGIYYVQLEDDIVAKPNYLSTMKNFALQQPSEDWMILEFSQLGFIGKMFKSLDLSLIVEFILMFYRDKPIDWLLDHILWVKVCNPEKDAKHCDRQKANLRIRFKPSLFQHVGTHSSLAGKIQKLKDKDFGKQALRKEHVNPPAEVSTSLKTYQHFTLEKAYLREDFFWAFTPAAGDFIRFRFFQPLRLERFFFRSGNIEHPEDKLFNTSVEVLPFDNPQSDKEALQEGRTATLRYPRSPDGYLQIGSFYKGVAEGEVDPAFGPLEALRLSIQTDSPVWVILSEIFLKKAD

SEQ ID NO: 52579 - protein, 563 aa, Homo sapiens
MSRVAGTRTDVNELLQRWTPRCVRWHTGGARRVALDRPLVTACLPPAGDVVDVYQREFLALRDRLHAAEQESLKRSKELNLVLDEIKRAVSERQALRDGDGNRTWGRLTEDPRLKPWNGSHRHVLHLPTVFHHLPHLLAKESSLQPAVRVGQGRTGVSVVMGIPSVRREVHSYLTDTLHSLISELSPQEKEDSVIVVLIAETDSQYTSAVTENIKALFPTEIHSGLLEVISPSPHFYPDFSRLRESFGDPKERVRWRTKQNLDYCFLMMYAQSKGIYYVQLEDDIVAKPNYLSTMKNFALQQPSEDWMILEFSQLGFIGKMFKSLDLSLIVEFILMFYRDKPIDWLLDHILWVKVCNPEKDAKHCDRQKANLRIRFKPSLFQHVGTHSSLAGKIQKLKDKDFGKQALRKEHVNPPAEVSTSLKTYQHFTLEKAYLREDFFWAFTPAAGDFIRFRFFQPLRLERFFFRSGNIEHPEDKLFNTSVEVLPFDNPQSDKEALQEGRTATLRYPRSPDGYLQIGSFYKGVAEGEVDPAFGPLEALRLSIQTDSPVWVILSEIFLKKAD

SEQ ID NO: 52580 - protein, 447 aa, Homo sapiens
MRFRIYKRKVLILTLVVAACGFVLWSSNGRQRKNEALAPPLLDAEPARGAGGRGGDHPSVAVGIRRVSNVSAASLVPAVPQPEADNLTLRYRSLVYQLNFDQTLRNVDKAGTWAPRELVLVVQVHNRPEYLRLLLDSLRKAQGIDNVLVIFSHDFWSTEINQLIAGVNFCPVLQVFFPFSIQLYPNEFPGSDPRDCPRDLPKNAALKLGCINAEYPDSFGHYREAKFSQTKHHWWWKLHFVWERVKILRDYAGLILFLEEDHYLAPDFYHVFKKMWKLKQQECPECDVLSLGTYSASRSFYGMADKVDVKTWKSTEHNMGLALTRNAYQKLIECTDTFCTYDDYNWDWTLQYLTVSCLPKFWKVLVPQIPRIFHAGDCGMHHKKTCRPSTQSAQIESLLNNNKQYMFPETLTISEKFTVVAISPPRKNGGWGDIRDHELCKSYRRLQ

SEQ ID NO: 52581 - protein, 453 aa, Homo sapiens [sequence omitted]

SEQ ID NO: 52582 - protein, 790 aa, Homo sapiens
MITVNPDGKIMVRRCLVTLRPFRLFVLGIGFFTLCFLMTSLGGQFSARRLGDSPFTIRTEVMGGPESRGVLRKMSDLLELMVKRMDALARLENSSELHRAGGDLHFPADRMPPGAGLMERIQAIAQNVSDIAVKVDQILRHSLLLHSKVSEGRRDQCEAPSDPKFPDCSGKVEWMRARWTSDPCYAFFGVDGTECSFLIYLSEVEWFCPPLPWRNQTAAQRAPKPLPKVQAVFRSNLSHLLDLMGSGKESLIFMKKRTKRLTAQWALAAQRLAQKLGATQRDQKQILVHIGFLTEESGDVFSPRVLKGGPLGEMVQWADILTALYVLGHGLRVTVSLKELQSNLGVPPGRGSCPLTMPLPFDLIYTDYHGLQQMKRHMGLSFKKYRCRIRVIDTFGTEPAYNHEEYATLHGYRTNWGYWNLNPKQFMTMFPHTPDNSFMGFVSEELNETEKRLIKGGKASNMAVVYGKEASIWKGKEKFLGILNKYMEIHGTVYYESQRPPEVPAFVKNHGLLPQPEFQQLLRKAKLFIGFGFPYEGPAPLEAIANGCIFLQSRFSPPHSSLNHEFFRGKPTSREVFSQHPYAENFIGKPHVWTVDYNNSEEFEAAIKAIMRTQVDPYLPYEYTCEGMLERIHAYIQHQDFCRAPDPALPEAHAPQSPFVLAPNATHLEWARNTSLAPGAWPPAHALRAWLAVPGRACTDTCLDHGLICEPSFFPFLNSQDAFLKLQVPCDSTESEMNHLYPAFAQPGQECYLQKEPLLFSCAGSNTKYRRLCPCRDFRKGQVALCQGCL

SEQ ID NO: 52583 - protein, 394 aa, Homo sapiens
MITVNPDGKIMVRRCLVTLRPFRLFVLGIGFFTLCFLMTSLGGQFSARRLGDSPFTIRTEVMGGPESRGVLRKMSDLLELMVKRMDALARLENSSELHRAGGDLHFPADRMPPGAGLMERIQAIAQNVSDIAVKVDQILRHSLLLHSKVSEGRRDQCEAPSDPKFPDCSGKVEWMRARWTSDPCYAFFGVDGTECSFLIYLSEVEWFCPPLPWRNQTAAQRAPKPLPKVQAVFRSNLSHLLDLMGSGKESLIFMKKRTKRLTAQWALAAQRLAQKLGATQRDQKQILVHIGFLTEESGDVFSPRVLKGGPLGEMVQWADILTALYVLGHGLRVTVSLKELQRQRRLRSSQEQARCGVMGACEKMLLEGDVASNTLLIEKPSKKETEKCPKNLVT

SEQ ID NO: 52584 - protein, 801 aa, Homo sapiens
MHSFVKHLCSRYVVERQGTMALPALLTRLLPLRRLFVLGIGFFTLCFLMTSLGGQFSARRLGDSPFTIRTEVMGGPESRGVLRKMSDLLELMVKRMDALARLENSSELHRAGGDLHFPADRMPPGAGLMERIQAIAQNVSDIAVKVDQILRHSLLLHSKVSEGRRDQCEAPSDPKFPDCSGKVEWMRARWTSDPCYAFFGVDGTECSFLIYLSEVEWFCPPLPWRNQTAAQRAPKPLPKVQAVFRSNLSHLLDLMGSGKESLIFMKKRTKRLTAQWALAAQRLAQKLGATQRDQKQILVHIGFLTEESGDVFSPRVLKGGPLGEMVQWADILTALYVLGHGLRVTVSLKELQSNLGVPPGRGSCPLTMPLPFDLIYTDYHGLQQMKRHMGLSFKKYRCRIRVIDTFGTEPAYNHEEYATLHGYRTNWGYWNLNPKQFMTMFPHTPDNSFMGFVSEELNETEKRLIKGGKASNMAVVYGKEASIWKGKEKFLGILNKYMEIHGTVYYESQRPPEVPAFVKNHGLLPQPEFQQLLRKAKLFIGFGFPYEGPAPLEAIANGCIFLQSRFSPPHSSLNHEFFRGKPTSREVFSQHPYAENFIGKPHVWTVDYNNSEEFEAAIKAIMRTQVDPYLPYEYTCEGMLERIHAYIQHQDFCRAPDPALPEAHAPQSPFVLAPNATHLEWARNTSLAPGAWPPAHALRAWLAVPGRACTDTCLDHGLICEPSFFPFLNSQDAFLKLQVPCDSTESEMNHLYPAFAQPGQECYLQKEPLLFSCAGSNTKYRRLCPCRDFRKGQVALCQGCL

SEQ ID NO: 52585 - protein, 533 aa, Homo sapiens
MKMRRYKLFLMFCMAGLCLISFLHFFKTLSYVTFPRELASLSPNLVSSFFWNNAPVTPQASPEPGGPDLLRTPLYSHSPLLQPLPPSKAAEELHRVDLVLPEDTTEYFVRTKAGGVCFKPGTKMLERPPPGRPEEKPEGANGSSARRPPRYLLSARERTGGRGARRKWVECVCLPGWHGPSCGVPTVVQYSNLPTKERLVPREVPRRVINAINVNHEFDLLDVRFHELGDVVDAFVVCESNFTAYGEPRPLKFREMLTNGTFEYIRHKVLYVFLDHFPPGGRQDGWIADDYLRTFLTQDGVSRLRNLRPDDVFIIDDADEIPARDGVLFLKLYDGWTEPFAFHMRKSLYGFFWKQPGTLEVVSGCTVDMLQAVYGLDGIRLRRRQYYTMPNFRQYENRTGHILVQWSLGSPLHFAGWHCSWCFTPEGIYFKLVSAQNGDFPRWGDYEDKRDLNYIRGLIRTGGWFDGTQQEYPPADPSEHMYAPKYLLKNYDRFHYLLDNPYQEPRSTAAGGWRHRGPEGRPPARGKLDEAEV

SEQ ID NO: 52586 - protein, 108 aa, Homo sapiens
MESCSCHPGSGVQWRDHGSLQLPPPGFKMKMRRYKLFLMFCMAGLCLISFLHFFKTLSYVTFPRELASLSPNLVSSFFWNNAPVTPQASPEPGGPDLLRTPLYSHSPL

SEQ ID NO: 52587 - protein, 161 aa, Homo sapiens
MKMRRYKLFLMFCMAGLCLISFLHFFKTLSYVTFPRELASLSPNLVSSFFWNNAPVTPQASPEPGGPDLLRTPLYSHSPLLQPLPPSKAAEELHRVDLVLPEDTTEYFVRTKAGGVCFKPGTKMLERPPPGRPEEKPEGANGSSARRPPRYLLSARERTGG

SEQ ID NO: 52588 - protein, 347 aa, Homo sapiens
MVSSQKLEKPIEMGSSEPLPIADGDRRRKKKRRGRATDSLPGKFEDMYKLTSELLGEGAYAKVQGAVSLQNGKEYAVKIIEKQAGHSRSRVFREVETLYQCQGNKNILELIEFFEDDTRFYLVFEKLQGGSILAHIQKQKHFNEREASRVVRDVAAALDFLHTKGIAHRDLKPENILCESPEKVSPVKICDFDLGSGMKLNNSCTPITTPELTTPCGSAEYMAPEVVEVFTDQATFYDKRCDLWSLGVVLYIMLSGYPPFVGHCGADCGWDRGEVCRVCQNKLFESIQEGKYEFPDKDWAHISSEAKDLISKLLVRDAKQRLSAAQVLQHPWVQGEQQHNGPDALRS

SEQ ID NO: 52589 - protein, 329 aa, Homo sapiens
MAKSMPSKSSRNKQGTVGVGCFERWRRCISVRETSSILAHIQKQKHFNEREASRVVRDVAAALDFLHTKGIAHRDLKPENILCESPEKVSPVKICDFDLGSGMKLNNSCTPITTPELTTPCGSAEYMAPEVVEVFTDQATFYDKRCDLWSLGVVLYIMLSGYPPFVGHCGADCGWDRGEVCRVCQNKLFESIQEGKYEFPDKDWAHISSEAKDLISKLLVRDAKQRLSAAQVLQHPWVQGQAPEKGLPTPQVLQRNSSTMDLTLFAAEAIALNRQLSQHEENELAEEPEALADGLCSMKLSPPCKSRLARRRALAQAGRGEDRSPPTAL

SEQ ID NO: 52590 - protein, 424 aa, Homo sapiens
MVSSQKLEKPIEMGSSEPLPIADGDRRRKKKRRGRATDSLPGKFEDMYKLTSELLGEGAYAKVQGAVSLQNGKEYAVKIIEKQAGHSRSRVFREVETLYQCQGNKNILELIEFFEDDTRFYLVFEKLQGGSILAHIQKQKHFNEREASRVVRDVAAALDFLHTKGIAHRDLKPENILCESPEKVSPVKICDFDLGSGMKLNNSCTPITTPELTTPCGSAEYMAPEVVEVFTDQATFYDKRCDLWSLGVVLYIMLSGYPPFVGHCGADCGWDRGEVCRVCQNKLFESIQEGKYEFPDKDWAHISSEAKDLISKLLVRDAKQRLSAAQVLQHPWVQGQAPEKGLPTPQVLQRNSSTMDLTLFAAEAIALNRQLSQHEENELAEEPEALADGLCSMKLSPPCKSRLARRRALAQAGRGEDRSPPTAL

SEQ ID NO: 52591 - protein, 465 aa, Homo sapiens
MVSSQKLEKPIEMGSSEPLPIADGDRRRKKKRRGRATDSLPGKFEDMYKLTSELLGEGAYAKVQGAVSLQNGKEYAVKIIEKQAGHSRSRVFREVETLYQCQGNKNILELIEFFEDDTRFYLVFEKLQGGSILAHIQKQKHFNEREASRVVRDVAAALDFLHTKDKVSLCHLGWSAMAPSGLTAAPTSLGSSDPPTSASQVAGTTGIAHRDLKPENILCESPEKVSPVKICDFDLGSGMKLNNSCTPITTPELTTPCGSAEYMAPEVVEVFTDQATFYDKRCDLWSLGVVLYIMLSGYPPFVGHCGADCGWDRGEVCRVCQNKLFESIQEGKYEFPDKDWAHISSEAKDLISKLLVRDAKQRLSAAQVLQHPWVQGQAPEKGLPTPQVLQRNSSTMDLTLFAAEAIALNRQLSQHEENELAEEPEALADGLCSMKLSPPCKSRLARRRALAQAGRGEDRSPPTAL

SEQ ID NO: 52592 - protein, 347 aa, Homo sapiens; identical to SEQ ID NO: 52588

SEQ ID NO: 52593 - protein, 178 aa, Homo sapiens
MVSSQKLEKPIEMGSSEPLPIADGDRRRKKKRRGRATDSLPGKFEDMYKLTSELLGEGAYAKVQGAVSLQNGKEYAVKIIEKQAGHSRSRVFREVETLYQCQGNKNILELIEFFEDDTRFYLVFEKLQGGSILAHIQKQKHFNEREASRVVRDVAAALDFLHTKGIAHRDLKPENILC

SEQ ID NO: 52594 - protein, 101 aa, Homo sapiens
MVSSQKLEKPIEMGSSEPLPIADGDRRRKKKRRGRATDSLPGKFEDMYKLTSELLGEGAYAKVQGAVSLQNGKEYAVKIIEKQAGHSRSRVFREVETLYQC

SEQ ID NO: 52595 - protein, 100 aa, Homo sapiens
MVSSQKLEKPIEMGSSEPLPIADGDRRRKKKRRGRATDSLPGKFEDMYKLTSELLGEGAYAKVQGAVSLQNGKEYAVKIIEKQAGHSRSRVFREVETLYQ

SEQ ID NO: 52596 - protein, 133 aa, Homo sapiens
MVSSQKLEKPIEMGSSEPLPIADGDRRRKKKRRGRATDSLPGKFEDMYKLTSELLGEGAYAKVQGAVSLQNGKEYAVKIIEKQAGHSRSRVFREVETLYQCQGNKNILELIEFFEDDTRFYLVFEKLQGGTYR

SEQ ID NO: 52597 - protein, 465 aa, Homo sapiens
MVQKKPAELQGFHRSFKGQNPFELAFSLDQPDHGDSDFGLQCSARPDMPASQPIDIPDAKKRGKKKKRGRATDSFSGRFEDVYQLQEDVLGEGAHARVQTCINLITSQEYAVKIIEKQPGHIRSRVFREVEMLYQCQGHRNVLELIEFFEEEDRFYLVFEKMRGGSILSHIHKRRHFNELEASVVVQDVASALDFLHNKGIAHRDLKPENILCEHPNQVSPVKICDFDLGSGIKLNGDCSPISTPELLTPCGSAEYMAPEVVEAFSEEASIYDKRCDLWSLGVILYILLSGYPPFVGRCGSDCGWDRGEACPACQNMLFESIQEGKYEFPDKDWAHISCAAKDLISKLLVRDAKQRLSAAQVLQHPWVQGCAPENTLPTPMVLQRNSCAKDLTSFAAEAIAMNRQLAQHDEDLAEEEAAGQGQPVLVRATSRCLQLSPPSQSKLAQRRQRASLSSAPVVLVGDHA

SEQ ID NO: 52598 - protein, 414 aa, Homo sapiens
MVQKKPAELQGFHRSFKGQNPFELAFSLDQPDHGDSDFGLQCSARPDMPASQPIDIPDAKKRGKKKKRGRATDSFSGRFEDVYQLQEDVLGEGAHARVQTCINLITSQEYAVKIIEKQPGHIRSRVFREVEMLYQCQGHRNVLELIEFFEEEDRFYLVFEKMRGGSILSHIHKRRHFNELEASVVVQDVASALDFLHNKGIAHRDLKPENILCEHPNQVSPVKICDFDLGSGIKLNGDCSPISTPELLTPCGSAEYMAPEVVEAFSEEASIYDKRCDLWSLGVILYILLSGYPPFVGRCGSDCGWDRGEACPACQNMLFESIQEGKYEFPDKDWAHISCAAKDLISKLLVRDAKQRLSAAQVLQHPWVQGCAPENTLPTPMVLQRWDSHFLLPPHPCRIHVRPGGLVRTVTVNE

SEQ ID NO: 52599 - protein, 334 aa, Homo sapiens
MLYQCQGHRNVLELIEFFEEEDRFYLVFEKMRGGSILSHIHKRRHFNELEASVVVQDVASALDFLHNKGIAHRDLKPENILCEHPNQVSPVKICDFDLGSGIKLNGDCSPISTPELLTPCGSAEYMAPEVVEAFSEEASIYDKRCDLWSLGVILYILLSGYPPFVGRCGSDCGWDRGEACPACQNMLFESIQEGKYEFPDKDWAHISCAAKDLISKLLVRDAKQRLSAAQVLQHPWVQGCAPENTLPTPMVLQRNSCAKDLTSFAAEAIAMNRQLAQHDEDLAEEEAAGQGQPVLVRATSRCLQLSPPSQSKLAQRRQRASLSSAPVVLVGDHA

SEQ ID NO: 52600 - protein, 405 aa, Homo sapiens
MPASQPIDIPDAKKRGKKKKRGRATDSFSGRFEDVYQLQEDVLGEGAHARVQTCINLITSQEYAVKIIEKQPGHIRSRVFREVEMLYQCQGHRNVLELIEKMRGGSILSHIHKRRHFNELEASVVVQDVASALDFLHNKGIAHRDLKPENILCEHPNQVSPVKICDFDLGSGIKLNGDCSPISTPELLTPCGSAEYMAPEVVEAFSEEASIYDKRCDLWSLGVILYILLSGYPPFVGRCGSDCGWDRGEACPACQNMLFESIQEGKYEFPDKDWAHISCAAKDLISKLLVRDAKQRLSAAQVLQHPWVQGCAPENTLPTPMVLQRNSCAKDLTSFAAEAIAMNRQLAQHDEDLAEEEAAGQGQPVLVRATSRCLQLSPPSQSKLAQRRQRASLSSAPVVLVGDHA

SEQ ID NO: 52601 - protein, 795 aa, Homo sapiens
MSARTPLPTVNERDTENHTSVDGYTEPHIQPTKSSSRQNIPRCRNSITSATDEQPHIGNYRLQKTIGKGNFAKVKLARHVLTGREVAVKIIDKTQLNPTSLQKLFREVRIMKILNHPNIVKLFEVIETEKTLYLVMEYASGGEVFDYLVAHGRMKEKEARAKFRQIVSAVQYCHQKYIVHRDLKAENLLLDGDMNIKIADFGFSNEFTVGNKLDTFCGSPPYAAPELFQGKKYDGPEVDVWSLGVILYTLVSGSLPFDGQNLKELRERVLRGKYRIPFYMSTDCENLLKKLLVLNPIKRGSLEQIMKDRWMNVGHEEEELKPYTEPDPDFNDTKRIDIMVTMGFARDEINDALINQKYDEVMATYILLGRKPPEFEGGESLSSGNLCQRSRPSSDLNNSTLQSPAHLKVQRSISANQKQRRFSDHAGPSIPPAVSYTKRPQANSVESEQKEEWDKDVARKLGSTTVGSKSEMTASPLVGPERKKSSTIPSNNVYSGGSMARRNTYVCERTTDRYVALQNGKDSSLTEMSVSSISSAGSSVASAVPSARPRHQKSMSTSGHPIKVTLPTIKDGSEAYRPGTTQRVPAASPSAHSISTATPDRTRFPRGSSSRSTFHGEQLRERRSVAYNGPPASPSHETGAFAHARRGTSTGIISKITSKFVRRDPSEGEASGRTDTSRSTSGEPKERDKEEGKDSKPRSLRFTWSMKTTSSMDPNDMMREIRKVLDANNCDYEQKERFLLFCVHGDARQDSLVQWEMEVCKLPRLSLNGVRFKRISGTSIAFKNIASKIANELKL

SEQ ID NO: 52602 - protein, 758 aa, Homo sapiens
MSARTPLPTVNERDTENHTSVDGYTEPHIQPTKSSSRQNIPRCRNSITSATDEQPHIGNYRLQKTIGKGNFAKVKLARHVLTGREVAVKIIDKTQLNPTSLQKLFREVRIMKILNHPNIGEVFDYLVAHGRMKEKEARAKFRQIVSAVQYCHQKYIVHRDLKAENLLLDGDMNIKIADFGFSNEFTVGNKLDTFCGSPPYAAPELFQGKKYDGPEVDVWSLGVILYTLVSGSLPFDGQNLKELRERVLRGKYRIPFYMSTDCENLLKKLLVLNPIKRGSLEQIMKDRWMNVGHEEEELKPYTEPDPDFNDTKRIDIMVTMGFARDEINDALINQKYDEVMATYILLGRKPPEFEGGESLSSGNLCQRSRPSSDLNNSTLQSPAHLKVQRSISANQKQRRFSDHAGPSIPPAVSYTKRPQANSVESEQKEEWDKDVARKLGSTTVGSKSEMTASPLVGPERKKSSTIPSNNVYSGGSMARRNTYVCERTTDRYVALQNGKDSSLTEMSVSSISSAGSSVASAVPSARPRHQKSMSTSGHPIKVTLPTIKDGSEAYRPGTTQRVPAASPSAHSISTATPDRTRFPRGSSSRSTFHGEQLRERRSVAYNGPPASPSHETGAFAHARRGTSTGIISKITSKFVRRSTSGEPKERDKEEGKDSKPRSLRFTWSMKTTSSMDPNDMMREIRKVLDANNCDYEQKERFLLFCVHGDARQDSLVQWEMEVCKLPRLSLNGVRFKRISGTSIAFKNIASKIANELKL

SEQ ID NO: 52603 - protein, 645 aa, Homo sapiens
MEYASGGEVFDYLVAHGRMKEKEARAKFRQIVSAVQYCHQKYIVHRDLKAENLLLDGDMNIKIADFGFSNEFTVGNKLDTFCGSPPYAAPELFQGKKYDGPEVDVWSLGVILYTLVSGSLPFDGQNLKELRERVLRGKYRIPFYMSTDCENLLKKLLVLNPIKRGSLEQIMKDRWMNVGHEEEELKPYTEPDPDFNDTKRIDIMVTMGFARDEINDALINQKYDEVMATYILLGRKPPEFEGGESLSSGNLCQRSRPSSDLNNSTLQSPAHLKVQRSISANQKQRRFSDHAGPSIPPAVSYTKRPQANSVESEQKEEWDKDVARKLGSTTVGSKSEMTASPLVGPERKKSSTIPSNNVYSGGSMARRNTYVCERTTDRYVALQNGKDSSLTEMSVSSISSAGSSVASAVPSARPRHQKSMSTSGHPIKVTLPTIKDGSEAYRPGTTQRVPAASPSAHSISTATPDRTRFPRGSSSRSTFHGEQLRERRSVAYNGPPASPSHETGAFAHARRGTSTGIISKITSKFVRRSTSGEPKERDKEEGKDSKPRSLRFTWSMKTTSSMDPNDMMREIRKVLDANNCDYEQKERFLLFCVHGDARQDSLVQWEMEVCKLPRLSLNGVRFKRISGTSIAFKNIASKIANELKL

SEQ ID NO: 52604 - protein, 779 aa, Homo sapiens
MSSARTPLPTLNERDTEQPTLGHLDSKPSSKSNMIRGRNSATSADEQPHIGNYRLLKTIGKGNFAKVKLARHILTGKEVAVKIIDKTQLNSSSLQKLFREVRIMKVLNHPNIVKLFEVIETEKTLYLVMEYASGGEVFDYLVAHGRMKEKEARAKFRQIVSAVQYCHQKFIVHRDLKAENLLLDADMNIKIADFGFSNEFTFGNKLDTFCGSPPYAAPELFQGKKYDGPEVDVWSLGVILYTLVSGSLPFDGQNLKELRERVLRGKYRIPFYMSTDCENLLKKFLILNPSKRGTLEQIMKDRWMNVGHEDDELKPYVEPLPDYKDPRRTELMVSMGYTREEIQDSLVGQRYNEVMATYLLLGYKSSELEGDTITLKPRPSADLTNSSAPSPSHKVQRSVSANPKQRRFSDQAAGPAIPTSNSYSKKTQSNNAENKRPEEDRESGRKASSTAKVPASPLPGLERKKTTPTPSTNSVLSTSTNRSRNSPLLERASLGQASIQNGKDSLTMPGSRASTASASAAVSAARPRQHQKSMSASVHPNKASGLPPTESNCEVPRPSTAPQRVPVASPSAHNISSSGGAPDRTNFPRGVSSRSTFHAGQLRQVRDQQNLPYGVTPASPSGHSQGRRGASGSIFSKFTSKFVRRNLNEPESKDRVETLRPHVVGSGGNDKEKEEFREAKPRSLRFTWSMKTTSSMEPNEMMREIRKVLDANSCQSELHEKYMLLCMHGTPGHEDFVQWEMEVCKLPRLSLNGVRFKRISGTSMAFKNIASKIANELKL

SEQ ID NO: 52605 - protein, 709 aa, Homo sapiens
MSSARTPLPTLNERDTEQPTLGHLDSKPSSKSNMIRGRNSATSADEQPHIGNYRLLKTIGKGNFAKVKLARHILTGKEVAVKIIDKTQLNSSSLQKLFREVRIMKVLNHPNIVKLFEVIETEKTLYLVMEYASGGEVFDYLVAHGRMKEKEARAKFRQIVSAVQYCHQKFIVHRDLKAENLLLDADMNIKIADFGFSNEFTFGNKLDTFCGSPPYAAPELFQGKKYDGPEVDVWSLGVILYTLVSGSLPFDGQNLKELRERVLRGKYRIPFYMSTDCENLLKKFLILNPSKRGTLEQIMKDRWMNVGHEDDELKPYVEPLPDYKDPRRTELMVSMGYTREEIQDSLVGQRYNEVMATYLLLGYKSSELEGDTITLKPRPSADLTNSSAPSPSHKVQRSVSANPKQRRFSDQAGPAIPTSNSYSKKTQSNNAENKRPEEDRESGRKASSTAKVPASPLPGLERKKTTPTPSTNSVLSTSTNRSRNSPLLERASLGQASIQNGKDSTAPQRVPVASPSAHNISSSGGAPDRTNFPRGVSSRSTFHAGQLRQVRDQQNLPYGVTPASPSGHSQGRRGASGSIFSKFTSKFVRRPHVVGSGGNDKEKEEFREAKPRSLRFTWSMKTTSSMEPNEMMREIRKVLDANSCQSELHEKYMLLCMHGTPGHEDFVQWEMEVCKLPRLSLNGVRFKRISGTSMAFKNIASKIANELKL

SEQ ID NO: 52606 - protein, 719 aa, Homo sapiens
MSSARTPLPTLNERDTEQPTLGHLDSKPSSKSNMIRGRNSATSADEQPHIGNYRLLKTIGKGNFAKVKLARHILTGKEVAVKIIDKTQLNSSSLQKLFREVRIMKVLNHPNIVKLFEVIETEKTLYLVMEYASGGEVFDYLVAHGRMKEKEARAKFRQIVSAVQYCHQKFIVHRDLKAENLLLDADMNIKIADFGFSNEFTFGNKLDTFCGSPPYAAPELFQGKKYDGPEVDVWSLGVILYTLVSGSLPFDGQNLKELRERVLRGKYRIPFYMSTDCENLLKKFLILNPSKRGTLEQIMKDRWMNVGHEDDELKPYVEPLPDYKDPRRTELMVSMGYTREEIQDSLVGQRYNEVMATYLLLGYKSSELEGDTITLKPRPSADLTNSSAPSPSHKVQRSVSANPKQRRFSDQAAGPAIPTSNSYSKKTQSNNAENKRPEEDRESGRKASSTAKVPASPLPGLERKKTTPTPSTNSVLSTSTNRSRNSPLLERASLGQASIQNGKDSTAPQRVPVASPSAHNISSSGGAPDRTNFPRGVSSRSTFHAGQLRQVRDQQNLPYGVTPASPSGHSQGRRGASGSIFSKFTSKFVRRNLSFRFARRPHVVGSGGNDKEKEEFREAKPRSLRFTWSMKTTSSMEPNEMMREIRKVLDANSCQSELHEKYMLLCMHGTPGHEDFVQWEMEVCKLPRLSLNGVRFKRISGTSMAFKNIASKIANELKL

SEQ ID NO: 52607 - protein, 773 aa, Homo sapiens
MSSARTPLPTLNERDTEQPTLGHLDSKPSSKSNMIRGRNSATSADEQPHIGNYRLLKTIGKGNFAKVKLARHILTGKEVAVKIIDKTQLNSSSLQKLFREVRIMKVLNHPNIVKLFEVIETEKTLYLVMEYASGGEVFDYLVAHGRMKEKEARAKFRQIVSAVQYCHQKFIVHRDLKAENLLLDADMNIKIADFGFSNEFTFGNKLDTFCGSPPYAAPELFQGKKYDGPEVDVWSLGVILYTLVSGSLPFDGQNLKELRERVLRGKYRIPFYMSTDCENLLKKFLILNPSKRGTLEQIMKDRWMNVGHEDDELKPYVEPLPDYKDPRRTELMVSMGYTREEIQDSLVGQRYNEVMATYLLLGYKSSELEGDTITLKPRPSADLTNSSAPSPSHKVQRSVSANPKQRRFSDQAAGPAIPTSNSYSKKTQSNNAENKRPEEDRESGRKASSTAKVPASPLPGLERKKTTPTPSTNSVLSTSTNRSRNSPLLERASLGQASIQNGKDSLTMPGSRASTASASAAVSAARPRQHQKSMSASVHPNKASGLPPTESNCEVPRPSTAPQRVPVASPSAHNISSSGGAPDRTNFPRGVSSRSTFHAGQLRQVRDQQNLPYGVTPASPSGHSQGRRGASGSIFSKFTSKFVRRNLSFRFARRPHVVGSGGNDKEKEEFREAKPRSLRFTWSMKTTSSMEPNEMMREIRKVLDANSCQSELHEKYMLLCMHGTPGHEDFVQWEMEVCKLPRLSLNGVRFKRISGTSMAFKNIASKIANELKL

SEQ ID NO: 52608 - protein, 691 aa, Homo sapiens
MIRGRNSATSADEQPHIGNYRLLKTIGKGNFAKVKLARHILTGKEVAVKIIDKTQLNSSSLQKLFREVRIMKVLNHPNIVKLFEVIETEKTLYLVMEYASGGEVFDYLVAHGRMKEKEARAKFRQIVSAVQYCHQKFIVHRDLKAENLLLDADMNIKIADFGFSNEFTFGNKLDTFCGSPPYAAPELFQGKKYDGPEVDVWSLGVILYTLVSGSLPFDGQNLKELRERVLRGKYRIPFYMSTDCENLLKKFLILNPSKRGTLEQIMKDRWMNVGHEDDELKPYVEPLPDYKDPRRTELMVSMGYTREEIQDSLVGQRYNEVMATYLLLGYKSSELEGDTITLKPRPSADLTNSSAPSPSHKVQRSVSANPKQRRFSDQAGPAIPTSNSYSKKTQSNNAENKRPEEDRESGRKASSTAKVPASPLPGLERKKTTPTPSTNSVLSTSTNRSRNSPLLERASLGQASIQNGKDSTAPQRVPVASPSAHNISSSGGAPDRTNFPRGVSSRSTFHAGQLRQVRDQQNLPYGVTPASPSGHSQGRRGASGSIFSKFTSKFVRRNLNEPESKDRVETLRPHVVGSGGNDKEKEEFREAKPRSLRFTWSMKTTSSMEPNEMMREIRKVLDANSCQSELHEKYMLLCMHGTPGHEDFVQWEMEVCKLPRLSLNGVRFKRISGTSMAFKNIASKIANELKL

SEQ ID NO: 52609 - protein, 788 aa, Homo sapiens
MSSARTPLPTLNERDTEQPTLGHLDSKPSSKSNMIRGRNSATSADEQPHIGNYRLLKTIGKGNFAKVKLARHILTGKEVAVKIIDKTQLNSSSLQKLFREVRIMKVLNHPNIVKLFEVIETEKTLYLVMEYASGGEVFDYLVAHGRMKEKEARAKFRQIVSAVQYCHQKFIVHRDLKAENLLLDADMNIKIADFGFSNEFTFGNKLDTFCGSPPYAAPELFQGKKYDGPEVDVWSLGVILYTLVSGSLPFDGQNLKELRERVLRGKYRIPFYMSTDCENLLKKFLILNPSKRGTLEQIMKDRWMNVGHEDDELKPYVEPLPDYKDPRRTELMVSMGYTREEIQDSLVGQRYNEVMATYLLLGYKSSELEGDTITLKPRPSADLTNSSAPSPSHKVQRSVSANPKQRRFSDQAAGPAIPTSNSYSKKTQSNNAENKRPEEDRESGRKASSTAKVPASPLPGLERKKTTPTPSTNSVLSTSTNRSRNSPLLERASLGQASIQNGKDSLTMPGSRASTASASAAVSAARPRQHQKSMSASVHPNKASGLPPTESNCEVPRPSTAPQRVPVASPSAHNISSSGGAPDRTNFPRGVSSRSTFHAGQLRQVRDQQNLPYGVTPASPSGHSQGRRGASGSIFSKFTSKFVRRNLSFRFARRNLNEPESKDRVETLRPHVVGSGGNDKEKEEFREAKPRSLRFTWSMKTTSSMEPNEMMREIRKVLDANSCQSELHEKYMLLCMHGTPGHEDFVQWEMEVCKLPRLSLNGVRFKRISGTSMAFKNIASKIANELKL

SEQ ID NO: 52610 - protein, 691 aa, Homo sapiens; identical to SEQ ID NO: 52608

SEQ ID NO: 52611 - protein, 734 aa, Homo sapiens
MSSARTPLPTLNERDTEQPTLGHLDSKPSSKSNMIRGRNSATSADEQPHIGNYRLLKTIGKGNFAKVKLARHILTGKEVAVKIIDKTQLNSSSLQKLFREVRIMKVLNHPNIVKLFEVIETEKTLYLVMEYASGGEVFDYLVAHGRMKEKEARAKFRQIVSAVQYCHQKFIVHRDLKAENLLLDADMNIKIADFGFSNEFTFGNKLDTFCGSPPYAAPELFQGKKYDGPEVDVWSLGVILYTLVSGSLPFDGQNLKELRERVLRGKYRIPFYMSTDCENLLKKFLILNPSKRGTLEQIMKDRWMNVGHEDDELKPYVEPLPDYKDPRRTELMVSMGYTREEIQDSLVGQRYNEVMATYLLLGYKSSELEGDTITLKPRPSADLTNSSAPSPSHKVQRSVSANPKQRRFSDQAAGPAIPTSNSYSKKTQSNNAENKRPEEDRESGRKASSTAKVPASPLPGLERKKTTPTPSTNSVLSTSTNRSRNSPLLERASLGQASIQNGKDSTAPQRVPVASPSAHNISSSGGAPDRTNFPRGVSSRSTFHAGQLRQVRDQQNLPYGVTPASPSGHSQGRRGASGSIFSKFTSKFVRRNLSFRFARRNLNEPESKDRVETLRPHVVGSGGNDKEKEEFREAKPRSLRFTWSMKTTSSMEPNEMMREIRKVLDANSCQSELHEKYMLLCMHGTPGHEDFVQWEMEVCKLPRLSLNGVRFKRISGTSMAFKNIASKIANELKL

SEQ ID NO: 52612 - protein, 780 aa, Homo sapiens
MSSARTPLPTLNERDTEQPTLGHLDSKPSSKSNMIRGRNSATSADEQPHIGNYRLLKTIGKGNFAKVKLARHILTGKEVAVKIIDKTQLNSSSLQKLFREVRIMKVLNHPNIVKLFEVIETEKTLYLVMEYASGGEVFDYLVAHGRMKEKEARAKFRQIVSAVQYCHQKFIVHRDLKAENLLLDADMNIKIADFGFSNEFTFGNKLDTFCGSPPYAAPELFQGKKYDGPEVDVWSLGVILYTLVSGSLPFDGQNLKELRERVLRGKYRIPFYMSTDCENLLKKFLILNPSKRGTLEQIMKDRWMNVGHEDDELKPYVEPLPDYKDPRRTELMVSMGYTREEIQDSLVGQRYNEVMATYLLLGYKSSELEGDTITLKPRPSADLTNSSAPSPSHKVQRSVSANPKQRRFSDQAGPAIPTSNSYSKKTQSNNAENKRPEEDRESGRKASSTAKVPASPLPGLERKKTTPTPSTNSVLSTSTNRSRNSPLLERASLGQASIQNGKDSLTMPGSRASTASASAAVSAARPRQHQKSMSASVHPNKASGLPPTESNCEVPRPRQVTAPQRVPVASPSAHNISSSGGAPDRTNFPRGVSSRSTFHAGQLRQVRDQQNLPYGVTPASPSGHSQGRRGASGSIFSKFTSKFVRRNLNEPESKDRVETLRPHVVGSGGNDKEKEEFREAKPRSLRFTWSMKTTSSMEPNEMMREIRKVLDANSCQSELHEKYMLLCMHGTPGHEDFVQWEMEVCKLPRLSLNGVRFKRISGTSMAFKNIASKIANELKL

SEQ ID NO: 52613 - protein, 41 aa, Homo sapiens
MSSARTPLPTLNERDTEQPTLGHLDSKPSSKSNMIRGRNSA

SEQ ID NO: 52614 - protein, 724 aa, Homo sapiens
MSSARTPLPTLNERDTEQPTLGHLDSKPSSKSNMIRGRNSATSADEQPHIGNYRLLKTIGKGNFAKVKLARHILTGKEVAVKIIDKTQLNSSSLQKLFREVRIMKVLNHPNIVKLFEVIETEKTLYLVMEYASGGEVFDYLVAHGRMKEKEARAKFRQIVSAVQYCHQKFIVHRDLKAENLLLDADMNIKIADFGFSNEFTFGNKLDTFCGSPPYAAPELFQGKKYDGPEVDVWSLGVILYTLVSGSLPFDGQNLKELRERVLRGKYRIPFYMSTDCENLLKKFLILNPSKRGTLEQIMKDRWMNVGHEDDELKPYVEPLPDYKDPRRTELMVSMGYTREEIQDSLVGQRYNEVMATYLLLGYKSSELEGDTITLKPRPSADLTNSSAPSPSHKVQRSVSANPKQRRFSDQAGPAIPTSNSYSKKTQSNNAENKRPEEDRESGRKASSTAKVPASPLPGLERKKTTPTPSTNSVLSTSTNRSRNSPLLERASLGQASIQNGKDSTAPQRVPVASPSAHNISSSGGAPDRTNFPRGVSSRSTFHAGQLRQVRDQQNLPYGVTPASPSGHSQGRRGASGSIFSKFTSKFVRRNLNEPESKDRVETLRPHVVGSGGNDKEKEEFREAKPRSLRFTWSMKTTSSMEPNEMMREIRKVLDANSCQSELHEKYMLLCMHGTPGHEDFVQWEMEVCKLPRLSLNGVRFKRISGTSMAFKNIASKIANELKL

SEQ ID NO: 52615 - protein, 61 aa, Homo sapiens [sequence omitted]

SEQ ID NO: 52616 - protein, 112 aa, Homo sapiens
MIRGRNSATSADEQPHIGNYRLLKTIGKGNFAKVKLARHILTGKEVAVKIIDKTQLNSSSLQKLFREVRIMKVLNHPNIVKLFEVIETEKTLYLVMEYASGGEVFDYLVAHG

SEQ ID NO: 52617 - protein, 161 aa, Homo sapiens
MIRGRNSATSADEQPHIGNYRLLKTIGKGNFAKVKLARHILTGKEVAVKIIDKTQLNSSSLQKLFREVRIMKVLNHPNIVKLFEVIETEKTLYLVMEYASGGEVFDYLVAHGRMKEKEARAKFRQIVSAVQYCHQKFIVHRDLKAENLLLDADMNIKIADF

SEQ ID NO: 52618 - protein, 91 aa, Homo sapiens
MGGQRNTSVGNIVQRWRDHVVCQKAGVIYSGRKAQEHGTGRTDFTPAQRLMMPTLGHLDSKPSSKSNMIRGRNSATSADEQPHIGNYRLLK

SEQ ID NO: 52619 - protein, 745 aa, Homo sapiens
MIRGRNSATSADEQPHIGNYRLLKTIGKGNFAKVKLARHILTGKEVAVKIIDKTQLNSSSLQKLFREVRIMKVLNHPNIVKLFEVIETEKTLYLVMEYASGGEVFDYLVAHGRMKEKEARAKFRQIVSAVQYCHQKFIVHRDLKAENLLLDADMNIKIADFGFSNEFTFGNKLDTFCGSPPYAAPELFQGKKYDGPEVDVWSLGVILYTLVSGSLPFDGQNLKELRERVLRGKYRIPFYMSTDCENLLKKFLILNPSKRGTLEQIMKDRWMNVGHEDDELKPYVEPLPDYKDPRRTELMVSMGYTREEIQDSLVGQRYNEVMATYLLLGYKSSELEGDTITLKPRPSADLTNSSAPSPSHKVQRSVSANPKQRRFSDQAGPAIPTSNSYSKKTQSNNAENKRPEEDRESGRKASSTAKVPASPLPGLERKKTTPTPSTNSVLSTSTNRSRNSPLLERASLGQASIQNGKDSLTMPGSRASTASASAAVSAARPRQHQKSMSASVHPNKASGLPPTESNCEVPRPSTAPQRVPVASPSAHNISSSGGAPDRTNFPRGVSSRSTFHAGQLRQVRDQQNLPYGVTPASPSGHSQGRRGASGSIFSKFTSKFVRRNLNEPESKDRVETLRPHVVGSGGNDKEKEEFREAKPRSLRFTWSMKTTSSMEPNEMMREIRKVLDANSCQSELHEKYMLLCMHGTPGHEDFVQWEMEVCKLPRLSLNGVRFKRISGTSMAFKNIASKIANELKL

SEQ ID NO: 52620 - protein, 713 aa, Homo sapiens
MSTRTPLPTVNERDTENHTSHGDGRQEVTSRTSRSGARCRNSIASCADEQPHIGNYRLLKTIGKGNFAKVKLARHILTGREVAIKIIDKTQLNPTSLQKLFREVRIMKILNHPNIVKLFEVIETEKTLYLIMEYASGGEVFDYLVAHGRMKEKEARSKFRQIVSAVQYCHQKRIVHRDLKAENLLLDADMNIKIADFGFSNEFTVGGKLDTFCGSPPYAAPELFQGKKYDGPEVDVWSLGVILYTLVSGSLPFDGQNLKELRERVLRGKYRIPFYMSTDCENLLKRFLVLNPIKRGTLEQIMKDRWINAGHEEDELKPFVEPELDISDQKRIDIMVGMGYSQEEIQESLSKMKYDEITATYLLLGRKSSEVRPSSDLNNSTGQSPHHKVQRSVFSSQKQRRYSDHAGPAIPSVVAYPKRSQTSTADSDLKEDGISSRKSSGSAVGGKGIAPASPMLGNASNPNKADIPERKKSSTVPSSNTASGGMTRRNTYVCSERTTADRHSVIQNGKENSTIPDQRTPVASTHSISSAATPDRIRFPRGTASRSTFHGQPRERRTATYNGPPASPSLSHEATPLSQTRSRGSTNLFSKLTSKLTRSRNVSAEQKDENKEAKPRSLRFTWSMKTTSSMDPGDMMREIRKVLDANNCDYEQRERFLLFCVHGDGHAENLVQWEMEVCKLPRLSLNGVRFKRISGTSIAFKNIASKIANELKL

SEQ ID NO: 52621 - protein, 729 aa, Homo sapiens
MSTRTPLPTVNERDTENHTSHGDGRQEVTSRTSRSGARCRNSIASCADEQPHIGNYRLLKTIGKGNFAKVKLARHILTGREVAIKIIDKTQLNPTSLQKLFREVRIMKILNHPNIVKLFEVIETEKTLYLIMEYASGGEVFDYLVAHGRMKEKEARSKFRQIVSAVQYCHQKRIVHRDLKAENLLLDADMNIKIADFGFSNEFTVGGKLDTFCGSPPYAAPELFQGKKYDGPEVDVWSLGVILYTLVSGSLPFDGQNLKELRERVLRGKYRIPFYMSTDCENLLKRFLVLNPIKRGTLEQIMKDRWINAGHEEDELKPFVEPELDISDQKRIDIMVGMGYSQEEIQESLSKMKYDEITATYLLLGRKSSELDASDSSSSSNLSLAKVRPSSDLNNSTGQSPHHKVQRSVFSSQKQRRYSDHAGPAIPSVVAYPKRSQTSTADSDLKEDGISSRKSSGSAVGGKGIAPASPMLGNASNPNKADIPERKKSSTVPSSNTASGGMTRRNTYVCSERTTADRHSVIQNGKENSTIPDQRTPVASTHSISSAATPDRIRFPRGTASRSTFHGQPRERRTATYNGPPASPSLSHEATPLSQTRSRGSTNLFSKLTSKLTRSRNVSAEQKDENKEAKPRSLRFTWSMKTTSSMDPGDMMREIRKVLDANNCDYEQRERFLLFCVHGDGHAENLVQWEMEVCKLPRLSLNGVRFKRISGTSIAFKNIASKIANELKL

SEQ ID NO: 52622 - protein, 445 aa, Homo sapiens
MKYDEITATYLLLGRKSSELDASDSSSSSNLSLAKVRPSSDLNNSTGQSPHHKVQRSVFSSQKQRRYSDHAGPAIPSVVAYPKRSQTSTADSDLKEDGISSRKSSGSAVGGKGIAPASPMLGNASNPNKADIPERKKSSTVPSSNTASGGMTRRNTYVCSERTTADRHSVIQNGKENSLTEMFAYAASPASVCTSTCRLRHQKSMSMSASGHPKMMLPPIDSEGDNFKAITIPDQRTPVASTHSISSAATPDRIRFPRGTASRSTFHGQPRERRTATYNGPPASPSLSHEATPLSQTRSRGSTNLFSKLTSKLTRRLPTEYERNGRYEGSSRNVSAEQKDENKEAKPRSLRFTWSMKTTSSMDPGDMMREIRKVLDANNCDYEQRERFLLFCVHGDGHAENLVQWEMEVCKLPRLSLNGVRFKRISGTSIAFKNIASKIANELKL

SEQ ID NO: 52623 - protein, 752 aa, Homo sapiens
MSTRTPLPTVNERDTENHTSHGDGRQEVTSRTSRSGARCRNSIASCADEQPHIGNYRLLKTIGKGNFAKVKLARHILTGREVAIKIIDKTQLNPTSLQKLFREVRIMKILNHPNIVKLFEVIETEKTLYLIMEYASGGEVFDYLVAHGRMKEKEARSKFRQGCQAGQTIKVQVSFDLLSLMFTFIVSAVQYCHQKRIVHRDLKAENLLLDADMNIKIADFGFSNEFTVGGKLDTFCGSPPYAAPELFQGKKYDGPEVDVWSLGVILYTLVSGSLPFDGQNLKELRERVLRGKYRIPFYMSTDCENLLKRFLVLNPIKRGTLEQIMKDRWINAGHEEDELKPFVEPELDISDQKRIDIMVGMGYSQEEIQESLSKMKYDEITATYLLLGRKSSELDASDSSSSSNLSLAKVRPSSDLNNSTGQSPHHKVQRSVFSSQKQRRYSDHAGPAIPSVVAYPKRSQTSTADSDLKEDGISSRKSSGSAVGGKGIAPASPMLGNASNPNKADIPERKKSSTVPSSNTASGGMTRRNTYVCSERTTADRHSVIQNGKENSTIPDQRTPVASTHSISSAATPDRIRFPRGTASRSTFHGQPRERRTATYNGPPASPSLSHEATPLSQTRSRGSTNLFSKLTSKLTRSRNVSAEQKDENKEAKPRSLRFTWSMKTTSSMDPGDMMREIRKVLDANNCDYEQRERFLLFCVHGDGHAENLVQWEMEVCKLPRLSLNGVRFKRISGTSIAFKNIASKIANELKL

SEQ ID NO: 52624 - protein, 753 aa, Homo sapiens
MSTRTPLPTVNERDTENHTSHGDGRQEVTSRTSRSGARCRNSIASCADEQPHIGNYRLLKTIGKGNFAKVKLARHILTGREVAIKIIDKTQLNPTSLQKLFREVRIMKILNHPNIVKLFEVIETEKTLYLIMEYASGGEVFDYLVAHGRMKEKEARSKFRQIVSAVQYCHQKRIVHRDLKAENLLLDADMNIKIADFGFSNEFTVGGKLDTFCGSPPYAAPELFQGKKYDGPEVDVWSLGVILYTLVSGSLPFDGQNLKELRERVLRGKYRIPFYMSTDCENLLKRFLVLNPIKRGTLEQIMKDRWINAGHEEDELKPFVEPELDISDQKRIDIMVGMGYSQEEIQESLSKMKYDEITATYLLLGRKSSELDASDSSSSSNLSLAKVRPSSDLNNSTGQSPHHKVQRSVFSSQKQRRYSDHAGPAIPSVVAYPKRSQTSTADSDLKEDGISSRKSSGSAVGGKGIAPASPMLGNASNPNKADIPERKKSSTVPSSNTASGGMTRRNTYVCSERTTADRHSVIQNGKENSTIPDQRTPVASTHSISSAATPDRIRFPRGTASRSTFHGQPRERRTATYNGPPASPSLSHEATPLSQTRSRGSTNLFSKLTSKLTRRNMSFRFIKRLPTEYERNGRYEGSSRNVSAEQKDENKEAKPRSLRFTWSMKTTSSMDPGDMMREIRKVLDANNCDYEQRERFLLFCVHGDGHAENLVQWEMEVCKLPRLSLNGVRFKRISGTSIAFKNIASKIANELKL

SEQ ID NO: 52625 - protein, 659 aa, Homo sapiens
MSTRTPLPTVNERDTENHTSHGDGRQEVTSRTSRSGARCRNSIASCADEQPHIGNYRLLKTIGKGNFAKVKLARHILTGREVAIKIIDKTQLNPTSLQKLFREVRIMKILNHPNIVKLFEVIETEKTLYLIMEYASGGEVFDYLVAHGRMKEKEARSKFRQIVSAVQYCHQKRIVHRDLKELRERVLRGKYRIPFYMSTDCENLLKRFLVLNPIKRGTLEQIMKDRWINAGHEEDELKPFVEPELDISDQKRIDIMVGMGYSQEEIQESLSKMKYDEITATYLLLGRKSSELDASDSSSSSNLSLAKVRPSSDLNNSTGQSPHHKVQRSVFSSQKQRRYSDHAGPAIPSVVAYPKRSQTSTADSDLKEDGISSRKSSGSAVGGKGIAPASPMLGNASNPNKADIPERKKSSTVPSSNTASGGMTRRNTYVCSERTTADRHSVIQNGKENSTIPDQRTPVASTHSISSAATPDRIRFPRGTASRSTFHGQPRERRTATYNGPPASPSLSHEATPLSQTRSRGSTNLFSKLTSKLTRRNMSFRFIKSRNVSAEQKDENKEAKPRSLRFTWSMKTTSSMDPGDMMREIRKVLDANNCDYEQRERFLLFCVHGDGHAENLVQWEMEVCKLPRLSLNGVRFKRISGTSIAFKNIASKIANELKL

SEQ ID NO: 52626 - protein, 744 aa, Homo sapiens
MSTRTPLPTVNERDTENHTSHGDGRQEVTSRTSRSGARCRNSIASCADEQPHIGNYRLLKTIGKGNFAKVKLARHILTGREVAIKIIDKTQLNPTSLQKLFREVRIMKILNHPNIVKLFEVIETEKTLYLIMEYASGGEVFDYLVAHGRMKEKEARSKFRQIVSAVQYCHQKRIVHRDLKAENLLLDADMNIKIADFGFSNEFTVGGKLDTFCGSPPYAAPELFQGKKYDGPEVDVWSLGVILYTLVSGSLPFDGQNLKELRERVLRGKYRIPFYMSTDCENLLKRFLVLNPIKRGTLEQIMKDRWINAGHEEDELKPFVEPELDISDQKRIDIMVGMGYSQEEIQESLSKMKYDEITATYLLLGRKSSELDASDSSSSSNLSLAKVRPSSDLNNSTGQSPHHKVQRSVFSSQKQRRYSDHAGPAIPSVVAYPKRSQTSTADSDLKEDGISSRKSSGSAVGGKGIAPASPMLGNASNPNKADIPERKKSSTVPSSNTASGGMTRRNTYVCSERTTADRHSVIQNGKENSTIPDQRTPVASTHSISSAATPDRIRFPRGTASRSTFHGQPRERRTATYNGPPASPSLSHEATPLSQTRSRGSTNLFSKLTSKLTRRLPTEYERNGRYEGSSRNVSAEQKDENKEAKPRSLRFTWSMKTTSSMDPGDMMREIRKVLDANNCDYEQRERFLLFCVHGDGHAENLVQWEMEVCKLPRLSLNGVRFKRISGTSIAFKNIASKIANELKL

SEQ ID NO: 52627 - protein, 505 aa, Homo sapiens
  VARIANT 1: note = MOD_RES - Any amino acid
XVDVWSLGVILYTLVSGSLPFDGQNLKELRERVLRGKYRIPFYMSTDCENLLKRFLVLNPIKRGTLEQIMKDRWINAGHEEDELKPFVEPELDISDQKRIDIMVGMGYSQEEIQESLSKMKYDEITATYLLLGRKSSEVRPSSDLNNSTGQSPHHKVQRSVFSSQKQRRYSDHAGPAIPSVVAYPKRSQTSTADSDLKEDGISSRKSSGSAVGGKGIAPASPMLGNASNPNKADIPERKKSSTVPSSNTASGGMTRRNTYVCSERTTADRHSVIQNGKENSTIPDQRTPVASTHSISSAATPDRIRFPRGTASRSTFHGQPRERRTATYNGPPASPSLSHEATPLSQTRSRGSTNLFSKLTSKLTRRNMSFRFIKRLPTEYERNGRYEGSSRNVSAEQKDENKEAKPRSLRFTWSMKTTSSMDPGDMMREIRKVLDANNCDYEQRERFLLFCVHGDGHAENLVQWEMEVCKLPRLSLNGVRFKRISGTSIAFKNIASKIANELKL

SEQ ID NO: 52628 - protein, 752 aa, Homo sapiens
MSSRTVLAPGNDRNSDTHGTLGSGRSSDKGPSWSSRSLGARCRNSIASCPEEQPHVGNYRLLRTIGKGNFAKVKLARHILTGREVAIKIIDKTQLNPSSLQKLFREVRIMKGLNHPNIVKLFEVIETEKTLYLVMEYASAGEVFDYLVSHGRMKEKEARAKFRQIVSAVHYCHQKNIVHRDLKAENLLLDAEANIKIADFGFSNEFTLGSKLDTFCGSPPYAAPELFQGKKYDGPEVDIWSLGVILYTLVSGSLPFDGHNLKELRERVLRGKYRVPFYMSTDCESILRRFLVLNPAKRCTLEQIMKDKWINIGYEGEELKPYTEPEEDFGDTKRIEVMVGMGYTREEIKESLTSQKYNEVTATYLLLGRKTEEGGDRGAPGLALARVRAPSDTTNGTSSSKGTSHSKGQRSSSSTYHRQRRHSDFCGPSPAPLHPKRSPTSTGEAELKEERLPGRKASCSTAGSGSRGLPPSSPMVSSAHNPNKAEIPERRKDSTSTPNNLPPSMMTRRNTYVCTERPGAERPSLLPNGKENSSGTPRVPPASPSSHSLAPPSGERSRLARGSTIRSTFHGGQVRDRRAGGGGGGGVQNGPPASPTLAHEAAPLPAGRPRPTTNLFTKLTSKLTRRVADEPERIGGPEVTSCHLPWDQTETAPRLLRFPWSVKLTSSRPPEALMAALRQATAAARCRCRQPQPFLLACLHGGAGGPEPLSHFEVEVCQLPRPGLRGVLFRRVAGTALAFRTLVTRISNDLEL

SEQ ID NO: 52629 - protein, 462 aa, Homo sapiens
MSSRTVLAPGNDRNSDTHGTLGSGRSSDKGPSWSSRSLGARCRNSIASCPEEQPHVGNYRLLRTIGKGNFAKVKLARHILTGREVAIKIIDKTQLNPSSLQKLFREVRIMKGLNHPNIVKLFEVIETEKTLYLVMEYASAGEPPTLSALPLCHLPLPLHLTLTPLGLCPAGEVFDYLVSHGRMKEKEARAKFRQIVSAVHYCHQKNIVHRDLKAENLLLDAEANIKIADFGFSNEFTLGSKLDTFCGSPPYAAPELFQGKKYDGPEVDIWSLGVILYTLVSGSLPFDGHNLKELRERVLRGKYRVPFYMSTDCESILRRFLVLNPAKRCTLEQIMKDKWINIGYEGEELKPYTEPEEDFGDTKRIEVMVGMGYTREEIKESLTSQKYNEVTATYLLLGRKTEPDEHGGGGAEGGAAARPEGELQHRGEWESRAAPLQPHGQQRPQPQQGRDPRAAEGQHEHP

SEQ ID NO: 52630 - protein, 688 aa, Homo sapiens
MSSRTVLAPGNDRNSDTHGTLGSGRSSDKGPSWSSRSLGARCRNSIASCPEEQPHVGNYRLLRTIGKGNFAKVKLARHILTGREVAIKIIDKTQLNPSSLQKLFREVRIMKGLNHPNIVKLFEVIETEKTLYLVMEYASAGEVFDYLVSHGRMKEKEARAKFRQIVSAVHYCHQKNIVHRDLKAENLLLDAEANIKIADFGFSNEFTLGSKLDTFCGSPPYAAPELFQGKKYDGPEVDIWSLGVILYTLVSGSLPFDGHNLKELRERVLRGKYRVPFYMSTDCESILRRFLVLNPAKRCTLEQIMKDKWINIGYEGEELKPYTEPEEDFGDTKRIEVMVGMGYTREEIKESLTSQKYNEVTATYLLLGRKTEEGGDRGAPGLALARVRAPSDTTNGTSSSKGTSHSKGQRSSSSTYHRQRRHSDFCGPSPAPLHPKRSPTSTGEAELKEERLPGRKASCSTAGSGSRGLPPSSPMVSSAHNPNKAEIPERRKDSTSTPNNLPPSMMTRRNTYVCTERPGAERPSLLPNGKENSSGTPRVPPASPSSHSLAPPSGERSRLARGSTIRSTFHGGQVRDRRAGGGGGGGVQNGPPASPTLAHEAAPLPAGRPRPTTNLFTKLTSKLTRRVTLDPSKRQNSNRCVSGASLPQGSKIRSQTNLRESGDLRSQVAIYLGIKRKPPPGCSDSPGV

SEQ ID NO: 52631 - protein, 79 aa, Homo sapiens
MAALRQATAAARCRCRQPQPFLLACLHGGAGGPEPLSHFEVEVCQLPRPGLRGVLFRRVAGTALAFRTLVTRISNDLEL

SEQ ID NO: 52632 - protein, 343 aa, Homo sapiens
MAAATELNRPSSGDRNLERRCRPNLSREVLYEIFRSLHTLVGQLDLRDDVVKITIDWNKLQSLSAFQPALLFSALEQHILYLQPFLAKLQSPIKEENTTAVEEIGRTEMGNKNEVNDKFSIGDLQEEEKHKESDLRDVKKTQIHFDPEVVQIKAGKAEIDRRISAFIERKQAEINENNVREFCNVIDCNQENSCARTDAIFTPYPGFKSHVKVSRVVNTYGPQTRPEGIPGSGHKPNSMLRDCGNQAVEERLQNIEAHLRLQTGGPVPRDIYQRIKKLEDKILELEGISPEYFQSVSFSGKRRKVQPPQNYSLAELDEKISALKQALLRKSREAESMATHHLP

SEQ ID NO: 52633 - protein, 344 aa, Homo sapiens
MAAATELNRPSSGDRNLERRCRPNLSREVLYEIFRSLHTLVGQLDLRDDVVKITIDWNKLQSLSAFQPALLFSALEQHILYLQPFLAKLQSPIKEENTTAVEEIGRTEMGNKNEVNDKFSIGDLQEEEKHKESDLRDVKKTQIHFDPEVVQIKAGKAEIDRRISAFIERKQAEINENNVREFCNVIDCNQENSCARTDAIFTPYPGFKSHVKVSRVVNTYGPQTRPEGIPGSGHKPNSMLRDCGNQAVEERLQNIEAHLRLQTGGPVPRDIYQRIKKLEDKILELEGISPEYFQSVSFSGKRRKVQPPQQNYSLAELDEKISALKQALLRKSREAESMATHHLP

SEQ ID NO: 52634 - protein, 1647 aa, Homo sapiens
MVQKKKFCPRLLDYLVIVGARHPSSDSVAQTPELLRRYPLEDHTEFPLPPDVVFFCQPEGCLSVRQRRMSLRDDTSFVFTLTDKDTGVTRYGICVNFYRSFQKRISKEKGEGGAGSRGKEGTHATCASEEGGTESSESGSSLQPLSADSTPDVNQSPRGKRRAKAGSRSRNSTLTSLCVLSHYPFFSTFRECLYTLKRLVDCCSERLLGKKLGIPRGVQRDTMWRIFTGSLLVEEKSSALLHDLREIEAWIYRLLRSPVPVSGQKRVDIEVLPQELQPALTFALPDPSRFTLVDFPLHLPLELLGVDACLQVLTCILLEHKVVLQSRDYNALSMSVMAFVAMIYPLEYMFPVIPLLPTCMASAEQLLLAPTPYIIGVPASFFLYKLDFKMPDDVWLVDLDSNRVIAPTNAEVLPILPEPESLELKKHLKQALASMSLNTQPILNLEKFHEGQEIPLLLGRPSNDLQSTPSTEFNPLIYGNDVDSVDVATRVAMVRFFNSANVLQGFQMHTRTLRLFPRPVVAFQAGSFLASRPRQTPFAEKLARTQAVEYFGEWILNPTNYAFQRIHNNMFDPALIGDKPKWYAHQLQPIHYRVYDSNSQLAEALSVPPERDSDSEPTDDSGSDSMDYDDSSSSYSSLGDFVSEMMKCDINGDTPNVDPLTHAALGDASEVEIDELQNQKEAEEPGPDSENSQENPPLRSSSSTTASSSPSTVIHGANSEPADSTEMDDKAAVGVSKPLPSVPPSIGKSNVDRRQAEIGEGSVRRRIYDNPYFEPQYGFPPEEDEDEQGESYTPRFSQHVSGNRAQKLLRPNSLRLASDSDAESDSRASSPNSTVSNTSTEGFGGIMSFASSLYRNHSTSFSLSNLTLPTKGAREKATPFPSLKVFGLNTLMEIVTEAGPGSGEGNRRALVDQKSSVIKHSPTVKREPPSPQGRSSNSSENQQFLKEVVHSVLDGQGVGWLNMKKVRRLLESEQLRVFVLSKLNRMVQSEDDARQDIIPDVEISRKVYKGMLDLLKCTVLSLEQSYAHAGLGGMASIFGLLEIAQTHYYSKEPDKRKRSPTESVNTPVGKDPGLAGRGDPKAMAQLRVPQLGPRAPSATGKGPKELDTRSLKEENFIASIELWNKHQEVKKQKALEKQRPEVIKPVFDLGETEEKKSQISADSGVSLTSSSQRTDQDSVIGVSPAVMIRSSSQDSEVSTVVSNSSGETLGADSDLSSNAGDGPGGEGSVHLASSRGTLSDSEIETNSATSTIFGKAHSLKPSIKEKLAGSPIRTSEDVSQRVYLYEGLLGRDKGSMWDQLEDAAMETFSISKERSTLWDQMQFWEDAFLDAVMLEREGMGMDQGPQEMIDRYLSLGEHDRKRLEDDEDRLLATLLHNLISYMLLMKVNKNDIRKKVRRLMGKSHIGLVYSQQINEVLDQLANLNGRDLSIWSSGSRHMKKQTFVVHAGTDTNGDIFFMEVCDDCVVLRSNIGTVYERWWYEKLINMTYCPKTKVLCLWRRNGSETQLNKFYTKKCRELYYCVKDSMERAAARQQSIKPGPELGGEFPVQDLKTGEGGLLQVTLEGINLKFMHNQVFIELNHIKKCNTVRGVFVLEEFVPEIKEVVSHKYKTPMAHEICYSVLCLFSYVAAVHSSEEDLRTPPRPVSS

SEQ ID NO: 52635 - protein, 1588 aa, Homo sapiens
MVQKKKFCPRLLDYLVIVGARHPSSDSVAQTPELLRRYPLEDHTEFPLPPDVVFFCQPEGCLSVRQRRMSLRDDTSFVFTLTDKDTGVTRYGICVNFYRSFQKRISKEKGEGGAGSRGKEGTHATCASEEGGTESSESGSSLQPLSADSTPDVNQSPRGKRRAKAGSRSRNSTLTSLCVLSHYPFFSTFRECLYTLKRLVDCCSERLLGKKLGIPRGVQRDTMWRIFTGSLLVEEKSSALLHDLREIEAWIYRLLRSPVPVSGQKRVDIEVLPQELQPALTFALPDPSRFTLVDFPLHLPLELLGVDACLQVLTCILLEHKVVLQSRDYNALSMSVMAFVAMIYPLEYMFPVIPLLPTCMASAEQLLLAPTPYIIGVPASFFLYKLDFKMPDDVWLVDLDSNRVIAPTNAEVLPILPEPESLELKKHLKQALASMSLNTQPILNLEKFHEGQEIPLLLGRPSNDLQSTPSTEFNPLIYGNDVDSVDVATRVAMVRFFNSANVLQGFQMHTRTLRLFPRPVVAFQAGSFLASRPRQTPFAEKLARTQAVEYFGEWILNPTNYAFQRIHNNMFDPALIGDKPKWYAHQLQPIHYRVYDSNSQLAEALSVPPERDSDSEPTDDSGSDSMDYDDSSSSYSSLGDFVSEMMKCDINGDTPNVDPLTHAALGDASEVEIDELQNQKEAEEPGPDSENSQENPPLRSSSSTTASSSPSTVIHGANSEPADSTEMDDKAAVGVSKPLPSVPPSIGKSNVDRRQAEIGEGSVRRRIYDNPYFEPQYGFPPEEDEDEQGESYTPRFSQHVSGNRAQKLLRPNSLRLASDSDAESDSRASSPNSTVSNTSTEGFGGIMSFASSLYRNHSTSFSLSNLTLPTKGAREKATPFPSLKGNRRALVDQKSSVIKHSPTVKREPPSPQGRSSNSSENQQFLKEVVHSVLDGQGVGWLNMKKVRRLLESEQLRVFVLSKLNRMVQSEDDARQDIIPDVEISRKVYKGMLDLLKCTVLSLEQSYAHAGLGGMASIFGLLEIAQTHYYSKEPDKRKRSPTESVNTPVGKDPGLAGRGDPKAMAQLRVPQLGPRAPSATGKGPKELDTRSLKEENFIASIGPEVIKPVFDLGETEEKKSQISADSGVSLTSSSQRTDQDSVIGVSPAVMIRSSSQDSEVSTVVSNSSGETLGADSDLSSNAGDGPGGEGSVHLASSRGTLSDSEIETNSATSTIFGKAHSLKPSIKEKLAGSPIRTSEDVSQRVYLYEGLLGKERSTLWDQMQFWEDAFLDAVMLEREGMGMDQGPQEMIDRYLSLGEHDRKRLEDDEDRLLATLLHNLISYMLLMKVNKNDIRKKVRRLMGKSHIGLVYSQQINEVLDQLANLNGRDLSIWSSGSRHMKKQTFVVHAGTDTNGDIFFMEVCDDCVVLRSNIGTVYERWWYEKLINMTYCPKTKVLCLWRRNGSETQLNKFYTKKCRELYYCVKDSMERAAARQQSIKPGPELGGEFPVQDLKTGEGGLLQVTLEGINLKFMHNQVFIELNHIKKCNTVRGVFVLEEFVPEIKEVVSHKYKTPMAHEICYSVLCLFSYVAAVHSSEEDLRTPPRPVSS

SEQ ID NO: 52636 - protein, 1608 aa, Homo sapiens
MVQKKKFCPRLLDYLVIVGARHPSSDSVAQTPELLRRYPLEDHTEFPLPPDVVFFCQPEGCLSVRQRRMSLRDDTSFVFTLTDKDTGVTRYGICVNFYRSFQKRISKEKGEGGAGSRGKEGTHATCASEEGGTESSESGSSLQPLSADSTPDVNQSPRGKRRAKAGSRSRNSTLTSLCVLSHYPFFSTFRECLYTLKRLVDCCSERLLGKKLGIPRGVQRDTMWRIFTGSLLVEEKSSALLHDLREIEAWIYRLLRSPVPVSGQKRVDIEVLPQELQPALTFALPDPSRFTLVDFPLHLPLELLGVDACLQVLTCILLEHKVVLQSRDYNALSMSVMAFVAMIYPLEYMFPVIPLLPTCMASAEQLLLAPTPYIIGVPASFFLYKLDFKMPDDVWLVDLDSNRVIAPTNAEVLPILPEPESLELKKHLKQALASMSLNTQPILNLEKFHEGQEIPLLLGRPSNDLQSTPSTEFNPLIYGNDVDSVDVATRVAMVRFFNSANVLQGFQMHTRTLRLFPRPVVAFQAGSFLASRPRQTPFAEKLARTQAVEYFGEWILNPTNYAFQRIHNNMFDPALIGDKPKWYAHQLQPIHYRVYDSNSQLAEALSVPPERDSDSEPTDDSGSDSMDYDDSSSSYSSLGDFVSEMMKCDINGDTPNVDPLTHAALGDASEVEIDELQNQKEAEEPGPDSENSQENPPLRSSSSTTASSSPSTVIHGANSEPADSTEMDDKAAVGVSKPLPSVPPSIGKSNVDRRQAEIGEGSVRRRIYDNPYFEPQYGFPPEEDEDEQGESYTPRFSQHVSGNRAQKLLRPNSLRLASDSDAESDSRASSPNSTVSNTSTEGFGGIMSFASSLYRNHSTSFSLSNLTLPTKGAREKATPFPSLKVFGLNTLMEIVTEAGPGSGEGNRRALVDQKSSVIKHSPTVKREPPSPQGRSSNSSENQQFLKEVVHSVLDGQGVGWLNMKKVRRLLESEQLRVFVLSKLNRMVQSEDDARQDIIPDVEISRKVYKGMLDLLKCTVLSLEQSYAHAGLGGMASIFGLLEIAQTHYYSKEPDKRKRSPTESVNTPVGKDPGLAGRGDPKAMAQLRVPQLGPRAPSATGKGPKELDTRSLKEENFIASIGPEVIKPVFDLGETEEKKSQISADSGVSLTSSSQRTDQDSVIGVSPAVMIRSSSQDSEVSTVVSNSSGETLGADSDLSSNAGDGPGGEGSVHLASSRGTLSDSEIETNSATSTIFGKAHSLKPSIKEKLAGSPIRTSEDVSQRVYLYEGLLGKERSTLWDQMQFWEDAFLDAVMLEREGMGMDQGPQEMIDRYLSLGEHDRKRLEDDEDRLLATLLHNLISYMLLMKVNKNDIRKKVRRLMGKSHIGLVYSQQINEVLDQLANLNGRDLSIWSSGSRHMKKQTFVVHAGTDTNGDIFFMEVCDDCVVLRSNIGTVYERWWYEKLINMTYCPKTKVLCLWRRNGSETQLNKFYTKKCRELYYCVKDSMERAAARQQSIKPGPELGGEFPVQDLKTGEGGLLQVTLEGINLKFMHNQVFIELNHIKKCNTVRGVFVLEEFVPEIKEVVSHKYKTPMAHEICYSVLCLFSYVAAVHSSEEDLRTPPRPVSS

SEQ ID NO: 52637 - protein, 1581 aa, Homo sapiens
MVQKKKFCPRLLDYLVIVGARHPSSDSVAQTPELLRRYPLEDHTEFPLPPDVVFFCQPEGCLSVRQRRMSLRDDTSFVFTLTDKDTGVTRYGICVNFYRSFQKRISKEKGEGGAGSRGKEGTHATCASEEGGTESSESGSSLQPLSADSTPDVNQSPRGKRRAKAGSRSRNSTLTSLCVLSHYPFFSTFRECLYTLKRLVDCCSERLLGKKLGIPRGVQRDTMWRIFTGSLLVEEKSSALLHDLREIEAWIYRLLRSPVPVSGQKRVDIEVLPQELQPALTFALPDPSRFTLVDFPLHLPLELLGVDACLQVLTCILLEHKVVLQSRDYNALSMSVMAFVAMIYPLEYMFPVIPLLPTCMASAEQLLLAPTPYIIGVPASFFLYKLDFKMPDDVWLVDLDSNRVIAPTNAEVLPILPEPESLELKKHLKQALASMSLNTQPILNLEKFHEGQEIPLLLGRPSNDLQSTPSTEFNPLIYGNDVDSVDVATRVAMVRFFNSANVLQGFQMHTRTLRLFPRPVVAFQAGSFLASRPRQTPFAEKLARTQAVEYFGEWILNPTNYAFQRIHNNMFDPALIGDKPKWYAHQLQPIHYRVYDSNSQLAEALSVPPERDSDSEPTDDSGSDSMDYDDSSSSYSSLGDFVSEMMKCDINGDTPNVDPLTHAALGDASEVEIDELQNQKEAEEPGPDSENSQENPPLRSSSSTTASSSPSTVIHGANSEPADSTEMDDKAAVGVSKPLPSVPPSIGKSNVDRRQAEIGEGSVRRRIYDNPYFEPQYGFPPEEDEDEQGESYTPRFSQHVSGNRAQKLLRPNSLRLASDSDAESDSRASSPNSTVSNTSTEGFGGIMSFASSLYRNHSTSFSLSNLTLPTKGAREKATPFPSLKVFGLNTLMEIVTEAGPGSGEGNRRALVDQKSSVIKHSPTVKREPPSPQGRSSNSSENQQFLKEVVHSVLDGQGVGWLNMKKVRRLLESEQLRVFVLSKLNRMVQSEDDARQDIIPDVEISRKVYKGMLDLLKCTVLSLEQSYAHAGLGGMASIFGLLEIAQTHYYSKEPDKRKRSPTESVNTPVGKDPGLAGRGDPKAMAQLRVPQLGPRAPSATGKGPKELDTRSLKEENFIASIELWNKHQEVKKQKALEKQRPEVIKPVFDLGETEEKKSQISADSGVSLTSSSQRTDQDSVIGVSPAVMIRSSSQDSEVSTVVSNSSGETLGADSDLSSNAGDGPGGEGSVHLASSRGTLSDSEIETNSATSTIFGKAHSLKPSIKEKLAGSPIRTSEDVSQRVYLYEGLLGRDKGSMWDQLEDAAMETFSISKERSTLWDQMQFWEDAFLDAVMLEREGMGMDQGPQEMIDRYLSLGEHDRKRLEDDEDRLLATLLHNLISYMLLMKVNKNDIRKKVRRLMGKSHIGLVYSQQINEVLDQLANLNGRDLSIWSSGSRHMKKQTFVVHAGTDTNGDIFFMEVCDDCVVLRSNIGTVYERWWYEKLINMTYCPKTKVLCLWRRNGSETQLNKFYTKKCRELYYCVKDSMERAAARQQSIKPGPELGGEFPVQDLKTGEGGLLQVTLEGINLKFMHNQFLKLKKW

SEQ ID NO: 52638 - protein, 1479 aa, Homo sapiens
MVQKKKFCPRLLDYLVIVGARHPSSDSVAQTPELLRRYPLEDHTEFPLPPDVVFFCQPEGCLSVRQRRMSLRDDTSFVFTLTDKDTGVTRYGICVNFYRSFQKRISKEKGEGGAGSRGKEGTHATCASEEGGTESSESGSSLQPLSADSTPDVNQSPRGKRRAKAGSRSRNSTLTSLCVLSHYPFFSTFRECLYTLKRLVDCCSERLLGKKLGIPRGVQRDTMWRIFTGSLLVEEKSSALLHDLREIEAWIYRLLRSPVPVSGQKRVDIEVLPQELQPALTFALPDPSRFTLVDFPLHLPLELLGVDACLQVLTCILLEHKVVLQSRDYNALSMSVMAFVAMIYPLEYMFPVIPLLPTCMASAEQLLLAPTPYIIGVPASFFLYKLDFKMPDDVWLVDLDSNRVIAPTNAEVLPILPEPESLELKKHLKQALASMSLNTQPILNLEKFHEGQEIPLLLGRPSNDLQSTPSTEFNPLIYGNDVDSVDVATRVAMVRFFNSANVLQGFQMHTRTLRLFPRPVVAFQAGSFLASRPRQTPFAEKLARTQAVEYFGEWILNPTNYAFQRIHNNMFDPALIGDKPKWYAHQLQPIHYRVYDSNSQLAEALSVPPERDSDSEPTDDSGSDSMDYDDSSSSYSSLGDFVSEMMKCDINGDTPNVDPLTHAALGDASEVEIDELQNQKEAEEPGPDSENSQENPPLRSSSSTTASSSPSTVIHGANSEPADSTEMDDKAAVGVSKPLPSVPPSIGKSNVDRRQAEIGEGAQKLLRPNSLRLASDSDAESDSRASSPNSTVSNTSTEGFGGIMSFASSLYRNHSTSFSLSNLTLPTKGAREKATPFPSLKGNRRALVDQKSSVIKHSPTVKREPPSPQGRSSNSSENQQFLKEVVHSVLDGQGVGWLNMKKVRRLLESEQLRVFVLSKLNRMVQSEDDARQDIIPDVEISRKVYKGMLDLLKCTVLSLEQSYAHAGLGGMASIFGLLEIAQTHYYSKEPDKRKRSPTESVNTPVGKDPGLAGRGDPKAMAQLRVPQLGPRAPSATGKGPKELDTRSLKEENFIASIGPEVIKPVFDLGETEEKKSQISADSGVSLTSSSQRTDQDSVIGVSPAVMIRSSSQDSEVSTVVSNSSGETLGADSDLSSNAGDGPGGEGSVHLASSRGTLSDSEIETNSATSTIFGKAHSLKPSIKEKLAGSPIRTSEDVSQRVYLYEGLLGKERSTLWDQMQFWEDAFLDAVMLEREGMGMDQGPQEMIDRYLSLGEHDRKRLEDDEDRLLATLLHNLISYMLLMKVNKNDIRKKVRRLMGKSHIGLVYSQQINEVLDQLANLNGRDLSIWSSGSRHMKKQTFVVHAGTDTNGDIFFMEVCDDCVVLRSNIGTVYERWWYEKLINMTYCPKTKVLCLWRRNGSETQLNKFYTKKCRELYYCVKDSMERAAARQQSIKPGPELGGEFPVQDLKTGEGGLLQVTLEGINLKFMHNQLLRRLRW

SEQ ID NO: 52639 - protein, 1541 aa, Homo sapiens
MVQKKKFCPRLLDYLVIVGARHPSSDSVAQTPELLRRYPLEDHTEFPLPPDVVFFCQPEGCLSVRQRRMSLRDDTSFVFTLTDKDTGVTRYGICVNFYRSFQKRISKEKGEGGAGSRGKEGTHATCASEEGGTESSESGSSLQPLSADSTPDVNQSPRGKRRAKAGSRSRNSTLTSLCVLSHYPFFSTFRECLYTLKRLVDCCSERLLGKKLGIPRGVQRDTMWRIFTGSLLVEEKSSALLHDLREIEAWIYRLLRSPVPVSGQKRVDIEVLPQELQPALTFALPDPSRFTLVDFPLHLPLELLGVDACLQVLTCILLEHKVVLQSRDYNALSMSVMAFVAMIYPLEYMFPVIPLLPTCMASAEQLLLAPTPYIIGVPASFFLYKLDFKMPDDVWLVDLDSNRVIAPTNAEVLPILPEPESLELKKHLKQALASMSLNTQPILNLEKFHEGQEIPLLLGRPSNDLQSTPSTEFNPLIYGNDVDSVDVATRVAMVRFFNSANVLQGFQMHTRTLRLFPRPVVAFQAGSFLASRPRQTPFAEKLARTQAVEYFGEWILNPTNYAFQRIHNNMFDPALIGDKPKWYAHQLQPIHYRVYDSNSQLAEALSVPPERDSDSEPTDDSGSDSMDYDDSSSSYSSLGDFVSEMMKCDINGDTPNVDPLTHAALGDASEVEIDELQNQKEAEEPGPDSENSQENPPLRSSSSTTASSSPSTVIHGANSEPADSTEMDDKAAVGVSKPLPSVPPSIGKSNVDRRQAEIGEGAQKLLRPNSLRLASDSDAESDSRASSPNSTVSNTSTEGFGGIMSFASSLYRNHSTSFSLSNLTLPTKGAREKATPFPSLKGNRRALVDQKSSVIKHSPTVKREPPSPQGRSSNSSENQQFLKEVVHSVLDGQGVGWLNMKKVRRLLESEQLRVFVLSKLNRMVQSEDDARQDIIPDVEISRKVYKGMLDLLKCTVLSLEQSYAHAGLGGMASIFGLLEIAQTHYYSKEPDKRKRSPTESVNTPVGKDPGLAGRGDPKAMAQLRVPQLGPRAPSATGKGPKELDTRSLKEENFIASIGPEVIKPVFDLGETEEKKSQISADSGVSLTSSSQRTDQDSVIGVSPAVMIRSSSQDSEVSNSSGETLGADSDLSSNAGDGPGGEGSVHLASSRGTLSDSEIETNSATSTIFGKAHSLKPSIKEKLAGSPIRTSEDVSQRVYLYEGLLGKERSTLWDQMQFWEDAFLDAVMLEREGMGMDQGPQEMIDRYLSLGEHDRKRLEDDEDRLLATLLHNLISYMLLMKVNKNDIRKKVRRLMGKSHIGLVYSQQINEVLDQLANLNGRDLSIWSSGSRHMKKQTFVVHAGTDTNGDIFFMEVCDDCVVLRSNIGTVYERWWYEKLINMTYCPKTKVLCLWRRNGSETQLNKFYTKKCRELYYCVKDSMERAAARQQSIKPGPELGGEFPVQDLKTGEGGLLQVTLEGINLKFMHNQVFIELNHIKKCNTVRGVFVLEEFVPEIKEVVSHKYKTPMAHEICYSVLCLFSYVAAVHSSEEDLRTPPRPVSS

SEQ ID NO: 52640 - protein, 1587 aa, Homo sapiens
MVQKKKFCPRLLDYLVIVGARHPSSDSVAQTPELLRRYPLEDHTEFPLPPDVVFFCQPEGCLSVRQRRMSLRDDTSFVFTLTDKDTGVTRYGICVNFYRSFQKRISKEKGEGGAGSRGKEGTHATCASEEGGTESSESGSSLQPLSADSTPDVNQSPRGKRRAKAGSRSRNSTLTSLCVLSHYPFFSTFRECLYTLKRLVDCCSERLLGKKLGIPRGVQRDTMWRIFTGSLLVEEKSSALLHDLREIEAWIYRLLRSPVPVSGQKRVDIEVLPQELQPALTFALPDPSRFTLVDFPLHLPLELLGVDACLQVLTCILLEHKVVLQSRDYNALSMSVMAFVAMIYPLEYMFPVIPLLPTCMASAEQLLLAPTPYIIGVPASFFLYKLDFKMPDDVWLVDLDSNRVIAPTNAEVLPILPEPESLELKKHLKQALASMSLNTQPILNLEKFHEGQEIPLLLGRPSNDLQSTPSTEFNPLIYGNDVDSVDVATRVAMVRFFNSANVLQGFQMHTRTLRLFPRPVVAFQAGSFLASRPRQTPFAEKLARTQAVEYFGEWILNPTNYAFQRIHNNMFDPALIGDKPKWYAHQLQPIHYRVYDSNSQLAEALSVPPERDSDSEPTDDSGSDSMDYDDSSSSYSSLGDFVSEMMKCDINGDTPNVDPLTHAALGDASEVEIDELQNQKEAEEPGPDSENSQENPPLRSSSSTTASSSPSTVIHGANSEPADSTEMDDKAAVGVSKPLPSVPPSIGKSNVDRRQAEIGEGSVRRRIYDNPYFEPQYGFPPEEDEDEQGESYTPRFSQHVSGNRAQKLLRPNSLRLASDSDAESDSRASSPNSTVSNTSTEGFGGIMSFASSLYRNHSTSFSLSNLTLPTKGAREKATPFPSLKGNRRALVDQKSSVIKHSPTVKREPPSPQGRSSNSSENQQFLKEVVHSVLDGQGVGWLNMKKVRRLLESEQLRVFVLSKLNRMVQSEDDARQDIIPDVEISRKVYKGMLDLLKCTVLSLEQSYAHAGLGGMASIFGLLEIAQTHYYSKEPDKRKRSPTESVNTPVGKDPGLAGRGDPKAMAQLRVPQLGPRAPSATGKGPKELDTRSLKEENFIASIGPEVIKPVFDLGETEEKKSQISADSGVSLTSSSQRTDQDSVIGVSPAVMIRSSSQDSEVSTVSNSSGETLGADSDLSSNAGDGPGGEGSVHLASSRGTLSDSEIETNSATSTIFGKAHSLKPSIKEKLAGSPIRTSEDVSQRVYLYEGLLGKERSTLWDQMQFWEDAFLDAVMLEREGMGMDQGPQEMIDRYLSLGEHDRKRLEDDEDRLLATLLHNLISYMLLMKVNKNDIRKKVRRLMGKSHIGLVYSQQINEVLDQLANLNGRDLSIWSSGSRHMKKQTFVVHAGTDTNGDIFFMEVCDDCVVLRSNIGTVYERWWYEKLINMTYCPKTKVLCLWRRNGSETQLNKFYTKKCRELYYCVKDSMERAAARQQSIKPGPELGGEFPVQDLKTGEGGLLQVTLEGINLKFMHNQVFIELNHIKKCNTVRGVFVLEEFVPEIKEVVSHKYKTPMAHEICYSVLCLFSYVAAVHSSEEDLRTPPRPVSS

SEQ ID NO: 52641 - protein, 1545 aa, Homo sapiens
MVQKKKFCPRLLDYLVIVGARHPSSDSVAQTPELLRRYPLEDHTEFPLPPDVVFFCQPEGCLSVRQRRMSLRDDTSFVFTLTDKDTGVTRYGICVNFYRSFQKRISKEKGEGGAGSRGKEGTHATCASEEGGTESSESGSSLQPLSADSTPDVNQSPRGKRRAKAGSRSRNSTLTSLCVLSHYPFFSTFRECLYTLKRLVDCCSERLLGKKLGIPRGVQRDTMWRIFTGSLLVEEKSSALLHDLREIEAWIYRLLRSPVPVSGQKRVDIEVLPQELQPALTFALPDPSRFTLVDFPLHLPLELLGVDACLQVLTCILLEHKVVLQSRDYNALSMSVMAFVAMIYPLEYMFPVIPLLPTCMASAEQLLLAPTPYIIGVPASFFLYKLDFKMPDDVWLVDLDSNRVIAPTNAEVLPILPEPESLELKKHLKQALASMSLNTQPILNLEKFHEGQEIPLLLGRPSNDLQSTPSTEFNPLIYGNDVDSVDVATRVAMVRFFNSANVLQGFQMHTRTLRLFPRPVVAFQAGSFLASRPRQTPFAEKLARTQAVEYFGEWILNPTNYAFQRIHNNMFDPALIGDKPKWYAHQLQPIHYRVYDSNSQLAEALSVPPERDSDSEPTDDSGSDSMDYDDSSSSYSSLGDFVSEMMKCDINGDTPNVDPLTHAALGDASEVEIDELQNQKEAEEPGPDSENSQENPPLRSSSSTTASSSPSTVIHGANSEPADSTEMDDKAAVGVSKPLPSVPPSIGKSNVDRRQAEIGEGAQKLLRPNSLRLASDSDAESDSRASSPNSTVSNTSTEGFGGIMSFASSLYRNHSTSFSLSNLTLPTKGAREKATPFPSLKGNRRALVDQKSSVIKHSPTVKREPPSPQGRSSNSSENQQFLKEVVHSVLDGQGVGWLNMKKVRRLLESEQLRVFVLSKLNRMVQSEDDARQDIIPDVEISRKVYKGMLDLLKCTVLSLEQSYAHAGLGGMASIFGLLEIAQTHYYSKEPDKRKRSPTESVNTPVGKDPGLAGRGDPKAMAQLRVPQLGPRAPSATGKGPKELDTRSLKEENFIASIGPEVIKPVFDLGETEEKKSQISADSGVSLTSSSQRTDQDSVIGVSPAVMIRSSSQDSEVSTVVSNSSGETLGADSDLSSNAGDGPGGEGSVHLASSRGTLSDSEIETNSATSTIFGKAHSLKPSIKEKLAGSPIRTSEDVSQRVYLYEGLLGKERSTLWDQMQFWEDAFLDAVMLEREGMGMDQGPQEMIDRYLSLGEHDRKRLEDDEDRLLATLLHNLISYMLLMKVNKNDIRKKVRRLMGKSHIGLVYSQQINEVLDQLANLNGRDLSIWSSGSRHMKKQTFVVHAGTDTNGDIFFMEVCDDCVVLRSNIGTVYERWWYEKLINMTYCPKTKVLCLWRRNGSETQLNKFYTKKCRELYYCVKDSMERAAARQQSIKPGPELGGEFPVQDLKTGEGGLLQVTLEGINLKFMHNQVFIELNHIKKCNTVRGVFVLEEFVPEIKEVVSHKYKTPMAHEICYSVLCLFSYVAAVHSSEEDLRTPPRPVSS

SEQ ID NO: 52642 - protein, 1479 aa, Homo sapiens
MVQKKKFCPRLLDYLVIVGARHPSSDSVAQTPELLRRYPLEDHTEFPLPPDVVFFCQPEGCLSVRQRRMSLRDDTSFVFTLTDKDTGVTRYGICVNFYRSFQKRISKEKGEGGAGSRGKEGTHATCASEEGGTESSESGSSLQPLSADSTPDVNQSPRGKRRAKAGSRSRNSTLTSLCVLSHYPFFSTFRECLYTLKRLVDCCSERLLGKKLGIPRGVQRDTMWRIFTGSLLVEEKSSALLHDLREIEAWIYRLLRSPVPVSGQKRVDIEVLPQELQPALTFALPDPSRFTLVDFPLHLPLELLGVDACLQVLTCILLEHKVVLQSRDYNALSMSVMAFVAMIYPLEYMFPVIPLLPTCMASAEQLLLAPTPYIIGVPASFFLYKLDFKMPDDVWLVDLDSNRVIAPTNAEVLPILPEPESLELKKHLKQALASMSLNTQPILNLEKFHEGQEIPLLLGRPSNDLQSTPSTEFNPLIYGNDVDSVDVATRVAMVRFFNSANVLQGFQMHTRTLRLFPRPVVAFQAGSFLASRPRQTPFAEKLARTQAVEYFGEWILNPTNYAFQRIHNNMFDPALIGDKPKWYAHQLQPIHYRVYDSNSQLAEALSVPPERDSDSEPTDDSGSDSMDYDDSSSSYSSLGDFVSEMMKCDINGDTPNVDPLTHAALGDASEVEIDELQNQKEAEEPGPDSENSQENPPLRSSSSTTASSSPSTVIHGANSEPADSTEMDDKAAVGVSKPLPSVPPSIGKSNVDRRQAEIGEGAQKLLRPNSLRLASDSDAESDSRASSPNSTVSNTSTEGFGGIMSFASSLYRNHSTSFSLSNLTLPTKGAREKATPFPSLKGNRRALVDQKSSVIKHSPTVKREPPSPQGRSSNSSENQQFLKEVVHSVLDGQGVGWLNMKKVRRLLESEQLRVFVLSKLNRMVQSEDDARQDIIPDVEISRKVYKGMLDLLKCTVLSLEQSYAHAGLGGMASIFGLLEIAQTHYYSKEPDKRKRSPTESVNTPVGKDPGLAGRGDPKAMAQLRVPQLGPRAPSATGKGPKELDTRSLKEENFIASIGPEVIKPVFDLGETEEKKSQISADSGVSLTSSSQRTDQDSVIGVSPAVMIRSSSQDSEVSTVVSNSSGETLGADSDLSSNAGDGPGGEGSVHLASSRGTLSDSEIETNSATSTIFGKAHSLKPSIKEKLAGSPIRTSEDVSQRVYLYEGLLGKERSTLWDQMQFWEDAFLDAVMLEREGMGMDQGPQEMIDRYLSLGEHDRKRLEDDEDRLLATLLHNLISYMLLMKVNKNDIRKKVRRLMGKSHIGLVYSQQINEVLDQLANLNGRDLSIWSSGSRHMKKQTFVVHAGTDTNGDIFFMEVCDDCVVLRSNIGTVYERWWYEKLINMTYCPKTKVLCLWRRNGSETQLNKFYTKKCRELYYCVKDSMERAAARQQSIKPGPELGGEFPVQDLKTGEGGLLQVTLEGINLKFMHNQFLKLKKW

SEQ ID NO: 52643 - protein, 1565 aa, Homo sapiens
MVQKKKFCPRLLDYLVIVGARHPSSDSVAQTPELLRRYPLEDHTEFPLPPDVVFFCQPEGCLSVRQRRMSLRDDTSFVFTLTDKDTGVTRYGICVNFYRSFQKRISKEKGEGGAGSRGKEGTHATCASEEGGTESSESGSSLQPLSADSTPDVNQSPRGKRRAKAGSRSRNSTLTSLCVLSHYPFFSTFRECLYTLKRLVDCCSERLLGKKLGIPRGVQRDTMWRIFTGSLLVEEKSSALLHDLREIEAWIYRLLRSPVPVSGQKRVDIEVLPQELQPALTFALPDPSRFTLVDFPLHLPLELLGVDACLQVLTCILLEHKVVLQSRDYNALSMSVMAFVAMIYPLEYMFPVIPLLPTCMASAEQLLLAPTPYIIGVPASFFLYKLDFKMPDDVWLVDLDSNRVIAPTNAEVLPILPEPESLELKKHLKQALASMSLNTQPILNLEKFHEGQEIPLLLGRPSNDLQSTPSTEFNPLIYGNDVDSVDVATRVAMVRFFNSANVLQGFQMHTRTLRLFPRPVVAFQAGSFLASRPRQTPFAEKLARTQAVEYFGEWILNPTNYAFQRIHNNMFDPALIGDKPKWYAHQLQPIHYRVYDSNSQLAEALSVPPERDSDSEPTDDSGSDSMDYDDSSSSYSSLGDFVSEMMKCDINGDTPNVDPLTHAALGDASEVEIDELQNQKEAEEPGPDSENSQENPPLRSSSSTTASSSPSTVIHGANSEPADSTEMDDKAAVGVSKPLPSVPPSIGKSNVDRRQAEIGEGAQKLLRPNSLRLASDSDAESDSRASSPNSTVSNTSTEGFGGIMSFASSLYRNHSTSFSLSNLTLPTKGAREKATPFPSLKVFGLNTLMEIVTEAGPGSGEGNRRALVDQKSSVIKHSPTVKREPPSPQGRSSNSSENQQFLKEVVHSVLDGQGVGWLNMKKVRRLLESEQLRVFVLSKLNRMVQSEDDARQDIIPDVEISRKVYKGMLDLLKCTVLSLEQSYAHAGLGGMASIFGLLEIAQTHYYSKEPDKRKRSPTESVNTPVGKDPGLAGRGDPKAMAQLRVPQLGPRAPSATGKGPKELDTRSLKEENFIASIGPEVIKPVFDLGETEEKKSQISADSGVSLTSSSQRTDQDSVIGVSPAVMIRSSSQDSEVSTVVSNSSGETLGADSDLSSNAGDGPGGEGSVHLASSRGTLSDSEIETNSATSTIFGKAHSLKPSIKEKLAGSPIRTSEDVSQRVYLYEGLLGKERSTLWDQMQFWEDAFLDAVMLEREGMGMDQGPQEMIDRYLSLGEHDRKRLEDDEDRLLATLLHNLISYMLLMKVNKNDIRKKVRRLMGKSHIGLVYSQQINEVLDQLANLNGRDLSIWSSGSRHMKKQTFVVHAGTDTNGDIFFMEVCDDCVVLRSNIGTVYERWWYEKLINMTYCPKTKVLCLWRRNGSETQLNKFYTKKCRELYYCVKDSMERAAARQQSIKPGPELGGEFPVQDLKTGEGGLLQVTLEGINLKFMHNQVFIELNHIKKCNTVRGVFVLEEFVPEIKEVVSHKYKTPMAHEICYSVLCLFSYVAAVHSSEEDLRTPPRPVSS

SEQ ID NO: 52644 - protein, 195 aa, Homo sapiens
MGSQSSKAPRGDVTAEEAAGASPAKANGQENGHVKSNGDLSPKGEGESPPVNGTDEAAGATGDAIEPAPPSQGAEAKGEVPPKETPKKKKKFSFKKPFKLSGLSFKRNRKEGGGDSSASSPTEEEQEQGEIGACSDEGTAQEGKAAATPESQEPQAKGAEASAASEEEAGPQATEPSTPSGPESGPTPASAEQNE

SEQ ID NO: 52645 - protein, 458 aa, Homo sapiens
MSNDGRSRNRDRRYDEVPSDLPYQDTTIRTHPTLHDSERAVSADPLPPPPLPLQPPFGPDFYSSDTEEPAIAPDLKPVRRFVPDSWKNFFRGKKKDPEWDKPVSDIRYISDGVECSPPASPARPNHRSPLNSCKDPYGGSEGTFSSRKEADAVFPRDPYGSLDRHTQTVRTYSEKVEEYNLRYSYMKSWAGLLRILGVVELLLGAGVFACVTAYIHKDSEWYNLFGYSQPYGMGGVGGLGSMYGGYYYTGPKTPFVLVVAGLAWITTIIILVLGMSMYYRTILLDSNWWPLTEFGINVALFILYMAAAIVYVNDTNRGGLCYYPLFNTPVNAVFCRVEGGQIAAMIFLFVTMIVYLISALVCLKLWRHEAARRHREYMEQQEINEPSLSSKRKMCEMATSGDRQRDSEVNFKELRTAKMKPELLSGHIPPPRPANFFVFLVEMGFHRVSQDDLDLLTS

SEQ ID NO: 52646 - protein, 558 aa, Homo sapiens
MSNDGRSRNRDRRYDEVPSDLPYQDTTIRTHPTLHDSERAVSADPLPPPPLPLQPPFGPDFYSSDTEEPAIAPDLKPVRRFVPDSWKNFFRGKKKDPEWDKPVSDIRYISDGVECSPPASPARPNHRSPLNSCKDPYGGSEGTFSSRKEADAVFPRDPYGSLDRHTQTVRTYSEKVEEYNLRYSYMKSWAGLLRILGVVELLLGAGVFACVTAYIHKDSEWYNLFGYSQPYGMGGVGGLGSMYGGYYYTGPKTPFVLVVAGLAWITTIIILVLGMSMYYRTILLDSNWWPLTEFGINVALFILYMAAAIVYVNDTNRGGLCYYPLFNTPVNAVFCRVEGGQIAAMIFLFVTMIVYLISALVCLKLWRHEAARRHREYMEQQEINEPSLSSKRKMCEMATSGDRQRDSEVNFKELRTAKMKPELLSGHIPPGHIPKPIVMPDYVAKYPVIQTDDERERYKAVFQDQFSEYKELSAEVQAVLRKFDELDAVMSRLPHHSESRQEHERISRIHEEFKKKKNDPTFLEKKERCDYLKNKLSHIKQRIQEYDKVMNWDVQGYS

SEQ ID NO: 52647 - protein, 442 aa, Homo sapiens
MSNDGRSRNRDRRYDEVPSDLPYQDTTIRTHPTLHDSERAVSADPLPPPPLPLQPPFGPDFYSSDTEEPAIAPDLKPVRRFVPDSWKNFFRGKKKDPEWDKPVSDIRYISDGVECSPPASPARPNHRSPLNSCKDPYGGSEGTFSSRKEADAVFPRDPYGSLDRHTQTVRTYSEKVEEYNLRYSYMKSWAGLLRILGVVELLLGAGVFACVTAYIHKDSEWYNLFGYSQPYGMGGVGGLGSIALVCLKLWRHEAARRHREYMEQQEINEPSLSSKRKMCEMATSGDRQRDSEVNFKELRTAKMKPELLSGHIPPGHIPKPIVMPDYVAKYPVIQTDDERERYKAVFQDQFSEYKELSAEVQAVLRKFDELDAVMSRLPHHSESRQEHERISRIHEEFKKKKNDPTFLEKKERCDYLKNKLSHIKQRIQEYDKVMNWDVQGYS

SEQ ID NO: 52648 - protein, 546 aa, Homo sapiens
MSNDGRSRNRDRRYDEVPSDLPYQDTTIRTHPTLHDSERAVSADPLPPPPLPLQPPFGPDFYSSDTEEPAIAPDLKPVRRFVPDSWKNFFRGKKKDPEWDKPVSDIRYISDGVECSPPASPARPNHRSPLNSCKDPYGGSEGTFSSRKEADAVFPRDPYGSLDRHTQTVRTYSEKVEEYNLRYSYMKSWAGLLRILGVVELLLGAGVFACVTAYIHKDSEWYNLFGYSQPYGMGGVGGLGSMYGGYYYTGPKTPFVLVVAGLAWITTIIILVLGMSMYYRTILLDSNWWPLTEFGINVALFILYMAAAIVYVNDTNRGGLCYYPLFNTPVNAVFCRVEGGQIAAMIFLFVTMIVYLISALVCLKLWRHEAARRHREYMEQQECEMATSGDRQRDSEVNFKELRTAKMKPELLSGHIPPGHIPKPIVMPDYVAKYPVIQTDDERERYKAVFQDQFSEYKELSAEVQAVLRKFDELDAVMSRLPHHSESRQEHERISRIHEEFKKKKNDPTFLEKKERCDYLKNKLSHIKQRIQEYDKVMNWDVQGYS

SEQ ID NO: 52649 - protein, 516 aa, Homo sapiens
MSNDGRSRNRDRRYDEVPSDLPYQDTTIRTHPTLHDSERAVSADPLPPPPLPLQPPFGPDFYSSDTEEPAIAPDLKPVRRFVPDSWKNFFRGKKKDPEWDKPVSDIRYISDGVECSPPASPARPNHRSPLNSCKDPYGGSEGTFSSRKEADAVFPRDPYGSLDRHTQTVRTYSEKVEEYNLRYSYMKSWAGLLRILGVVELLLGAGVFACVTAYIHKDSEWYNLFGYSQPYGMGGVGGLGSMYGGYYYTGPKTPFVLVVAGLAWITTIIILVLGMSMYYRTILLDSNWWPLTEFGINVALFILYMAAAIVYVNDTNRGGLCYYPLFNTPVNAVFCRVEGGQIAAMIFLFVTMIVYLISALVCLKLWRHEAARRHREYMEQQEINEPSLSSKRKMCEMATSGDRQRDSEVNFKELRTAKMKPELLSGHIPPGHIPKPIVMPDYVAKYPVIQTDDERERYKAVFQDQFSEYKELSAEVQAVLRKFDELDAVMSRLPHHSESRQEHERISRIHEEFKKK

SEQ ID NO: 52650 - protein, 145 aa, Homo sapiens
MSNDGRSRNRDRRYDEVPSDLPYQDTTIRTHPTLHDSERAVSADPLPPPPLPLQPPFGPDFYSSDTEEPAIAPDLKPVRRFVPDSWKNFFRGKKKDPEWDKPVSDIRYISDGVECSPPASPARPNHRSPLNSCKDPYGGSEGTFS

SEQ ID NO: 52651 - protein, 401 aa, Homo sapiens
MEDPSGAREPRARPRERDPGRRPHPDQGRTHDRPRDRPGDPRRKRSSDGNRRRDGDRDPERDQERDGNRDRNRDRERERERERDPDRGPRRDTHRDAGPRAGEHGVWEKPRQSRTRDGARGLTWDAAAPPGPAPWEAPEPPQPQRKGDPGRRRPESEPPSERYLPSTPRPGREEVEYYQSEAEGLLECHKCKYLCTGRACCQMLEVLLNLLILACSSVSYSSTGGYTGITSLGGIYYYQFGGAYSGFDGADGEKAQQLDVQFYQLKLPMVTVAMACSGALTALCCLFVAMGVLRVPWHCPLLLVTEGLLDMLIAGGYIPALYFYFHYLSAAYGSPVCKERQALYQSKGYSGFGCSFHGADIGAGIFAALGIVVFALGAVLAIKGYRKVRKLKEKPAEMFEF

SEQ ID NO: 52652 - protein, 410 aa, Homo sapiens
MEDPSGAREPRARPRERDPGRRPHPDQGRTHDRPRDRPGDPRRKRSSDGNRRRDGDRDPERDQERDGNRDRNRDRERERERERDPDRGPRRDTHRDAGPRAGEHGVWEKPRQSRTRDGARGLTWDAAAPPGPAPWEAPEPPQPQRKGDPGRRRPESEPPSERYLPSTPRPGREEVEYYQSEAEGLLECHKCKYLCTGRGVVQIVEVVLNGMVLICIVASYFVLAGFSASFSSGGGFGNNYYSPFEGTELEQVRQLDQQYTILRSPLIYGGVAVSLGLGVLTMGVLLQGAKSRTMLSGKWLLTEAAFSLLAAVGYCTGIGVYLHVALQINSTDTCKTRERLYARKGLTWMDCQLAGTDGAAATFACLLVIMYGASVVLALRSYREQKRYKGSREQPGSYSDAPEYLWSGTL

SEQ ID NO: 52653 - protein, 325 aa, Homo sapiens
MDGSNVTSFVVEEPTNISTGRNASVGNAHRQIPIVHWVIMSISPVGFVENGILLWFLCFRMRRNPFTVYITHLSIADISLLFCIFILSIDYALDYELSSGHYYTIVTLSVTFLFGYNTGLYLLTAISVERCLSVLYPIWYRCHRPKYQSALVCALLWALSCLVTTMEYVMCIDREEESHSRNDCRAVIIFIAILSFLVFTPLMLVSSTILVVKIRKNTWASHSSKLYIVIMVTIIIFLIFAMPMRLLYLLYYEYWSTFGNLHHISLLFSTINSSANPFIYFFVGSSKKKRFKESLKVVLTRAFKDEMQPRRQKDNCNTVTVETVV

SEQ ID NO: 52654 - protein, 378 aa, Homo sapiens
MVWGKICWFSQRAGWTVFAESQISLSCSLCLHSGDQEAQNPNLVSQLCGVFLQNETNETIHMQMSMAVGQQALPLNIIAPKAVLVSLCGVLLNGTVFWLLCCGATNPYMVYILHLVAADVIYLCCSAVGFLQVTLLTYHGVVFFIPDFLAILSPFSFEVCLCLLVAISTERCVCVLFPIWYRCHRPKYTSNVVCTLIWGLPFCINIVKSLFLTYWKHVKACVIFLKLSGLFHAILSLVMCVSSLTLLIRFLCCSQQQKATRVYAVVQISAPMFLLWALPLSVAPLITDFKMFVTTSYLISLFLIINSSANPIIYFFVGSLRKKRLKESLRVILQRALADKPEVGRNKKAAGIDPMEQPHSTQHVENLLPREHRVDVET

SEQ ID NO: 52655 - protein, 378 aa, Homo sapiens; identical to SEQ ID NO: 52654

SEQ ID NO: 52656 - protein, 378 aa, Homo sapiens; identical to SEQ ID NO: 52654

SEQ ID NO: 52657 - protein, 378 aa, Homo sapiens; identical to SEQ ID NO: 52654

SEQ ID NO: 52658 - protein, 378 aa, Homo sapiens; identical to SEQ ID NO: 52654

SEQ ID NO: 52659 - protein, 378 aa, Homo sapiens; identical to SEQ ID NO: 52654

SEQ ID NO: 52660 - protein, 378 aa, Homo sapiens; identical to SEQ ID NO: 52654

SEQ ID NO: 52661 - protein, 378 aa, Homo sapiens; identical to SEQ ID NO: 52654

SEQ ID NO: 52662 - protein, 321 aa, Homo sapiens
MNQTLNSSGTVESALNYSRGSTVHTAYLVLSSLAMFTCLCGMAGNSMVIWLLGFRMHRNPFCIYILNLAAADLLFLFSMASTLSLETQPLVNTTDKVHELMKRLMYFAYTVGLSLLTAISTQRCLSVLFPIWFKCHRPRHLSAWVCGLLWTLCLLMNGLTSSFCSKFLKFNEDRCFRVDMVQAALIMGVLTPVMTLSSLTLFVWVRRSSQQWRRQPTRLFVVVLASVLVFLICSLPLSIYWFVLYWLSLPPEMQVLCFSLSRLSSSVSSSANPVIYFLVGSRRSHRLPTRSLGTVLQQALREEPELEGGETPTVGTNEMGA

SEQ ID NO: 52663 - protein, 311 aa, Homo sapiens
MEPREAGQHVGAANGAQEDVAFNLIILSLTEGLGLGGLLGNGAVLWLLSSNVYRNPFAIYLLDVACADLIFLGCHMVAIVPDLLQGRLDFPGFVQTSLATLRFFCYIVGLSLLAAVSVEQCLAALFPAWYSCRRPRHLTTCVCALTWALCLLLHLLLSGACTQFFGEPSRHLCRTLWLVAAVLLALLCCTMCGASLMLLLRVERGPQRPPPRGFPGLILLTVLLFLFCGLPFGIYWLSRNLLWYIPHYFYHFSFLMAAVHCAAKPVVYFCLGSAQGRRLPLRLVLQRALGDEAELGAVRETSRRGLVDIAA

SEQ ID NO: 52664 - protein, 312 aa, Homo sapiens
MMEPREAGQHVGAANGAQEDVAFNLIILSLTEGLGLGGLLGNGAVLWLLSSNVYRNPFAIYLLDVACADLIFLGCHMVAIVPDLLQGRLDFPGFVQTSLATLRFFCYIVGLSLLAAVSVEQCLAALFPAWYSCRRPRHLTTCVCALTWALCLLLHLLLSGACTQFFGEPSRHLCRTLWLVAAVLLALLCCTMCGASLMLLLRVERGPQRPPPRGFPGLILLTVLLFLFCGLPFGIYWLSRNLLWYIPHYFYHFSFLMAAVHCAAKPVVYFCLGSAQGRRLPLRLVLQRALGDEAELGAVRETSRRGLVDIAA

SEQ ID NO: 52665 - protein, 343 aa, Homo sapiens
MAGNCSWEAHPGNRNKMCPGLSEAPELYSRGFLTIEQIAMLPPPAVMNYIFLLLCLCGLVGNGLVLWFFGFSIKRNPFSIYFLHLASADVGYLFSKAVFSILNTGGFLGTFADYIRSVCRVLGLCMFLTGVSLLPAVSAERCASVIFPAWYWRRRPKRLSAVVCALLWVLSLLVTCLHNYFCVFLGRGAPGAACRHMDIFLGILLFLLCCPLMVLPCLALILHVECRARRRQRSAKLNHVILAMVSVFLVSSIYLGIDWFLFWVFQIPAPFPEYVTDLCICINSSAKPIVYFLAGRDKSQRLWEPLRVVFQRALRDGAELGEAGGSTPNTVTMEMQCPPGNAS

SEQ ID NO: 52666 - protein, 315 aa, Homo sapiens
MAGNCSWEAHPGNRNKMCPGLSEAPELYSRGFLTIEQIAMLPPPAVMNYIFLLLCLCGLVGNGLVLWFFGFSILNTGGFLGTFADYIRSVCRVLGLCMFLTGVSLLPAVSAERCASVIFPAWYWRRRPKRLSAVVCALLWVLSLLVTCLHNYFCVFLGRGAPGAACRHMDIFLGILLFLLCCPLMVLPCLALILHVECRARRRQRSAKLNHVILAMVSVFLVSSIYLGIDWFLFWVFQIPAPFPEYVTDLCICINSSAKPIVYFLAGRDKSQRLWEPLRVVFQRALRDGAELGEAGGSTPNTVTMEMQCPPGNAS

SEQ ID NO: 52667 - protein, 343 aa, Homo sapiens; identical to SEQ ID NO: 52665

SEQ ID NO: 52668 - protein, 289 aa, Homo sapiens
MFGLFGLWRTFDSVVFYLTLIVGLGGPVGNGLVLWNLGFRIKKGPFSIYLLHLAAADFLFLSCRVGFSVAQAALGAQDTLYFVLTFLWFAVGLWLLAAFSVERCLSDLFPACYQGCRPRHASAVLCALVWTPTLPAVPLPANACGLLRNSACPLVCPRYHVASVTWFLVLARVAWTAGVVLFVWVTCCSTRPRPRLYGIVLGALLLLFFCGLPSVFYWSLQPLLNFLLPVFSPLATLLACVNSSSKPLIYSGLGRQPGKREPLRSVLRRALGEGAELGARGQSLPMGLL

SEQ ID NO: 52669 - protein, 322 aa, Homo sapiens
MDPTISTLDTELTPINGTEETLCYKQTLSLTVLTCIVSLVGLTGNAVVLWLLGCRMRRNAFSIYILNLAAADFLFLSGRLIYSLLSFISIPHTISKILYPVMMFSYFAGLSFLSAVSTERCLSVLWPIWYRCHRPTHLSAVVCVLLWALSLLRSILEWMLCGFLFSGADSAWCQTSDFITVAWLIFLCVVLCGSSLVLLIRILCGSRKIPLTRLYVTILLTVLVFLLCGLPFGIQFFLFLWIHVDREVLFCHVHLVSIFLSALNSSANPIIYFFVGSFRQRQNRQNLKLVLQRALQDASEVDEGGGQLPEEILELSGSRLEQ

SEQ ID NO: 52670 - protein, 330 aa, Homo sapiens
MDPTTPAWGTESTTVNGNDQALLLLCGKETLIPVFLILFIALVGLVGNGFVLWLLGFRMRRNAFSVYVLSLAGADFLFLCFQIINCLVYLSNFFCSISINFPSFFTTVMTCAYLAGLSMLSTVSTERCLSVLWPIWYRCRRPRHLSAVVCVLLWALSLLLSILEGKFCGFLFSDGDSGWCQTFDFITAAWLIFLFMVLCGSSLALLVRILCGSRGLPLTRLYLTILLTVLVFLLCGLPFGIQWFLILWIWKDSDVLFCHIHPVSVVLSSLNSSANPIIYFFVGSFRKQWRLQQPILKLALQRALQDIAEVDHSEGCFRQGTPEMSRSSLV

SEQ ID NO: 52671 - protein, 322 aa, Homo sapiens
MDSTIPVLGTELTPINGREETPCYKQTLSFTGLTCIVSLVALTGNAVVLWLLGCRMRRNAVSIYILNLVAADFLFLSGHIICSPLRLINIRHPISKILSPVMTFPYFIGLSMLSAISTERCLSILWPIWYHCRRPRYLSSVMCVLLWALSLLRSILEWMFCDFLFSGANSVWCETSDFITIAWLVFLCVVLCGSSLVLLVRILCGSRKMPLTRLYVTILLTVLVFLLCGLPFGIQWALFSRIHLDWKVLFCHVHLVSIFLSALNSSANPIIYFFVGSFRQRQNRQNLKLVLQRALQDTPEVDEGGGWLPQETLELSGSRLEQ

SEQ ID NO: 52672 - protein, 246 aa, Homo sapiens
MDSTIPVLGTELTPINGREETPCYKQTLSFTGLTCIVSLVALTGNAVVLWLLGCRMRRNAVSIYILNLVAADFLFLSGHIICSPLRLINIRHPISKILSPVMTFPYFIGLSMLSAISTERCLSILWPIWYHCRRPRYLSSVMCVLLWALSLLRSILEWMFCDFLFSGANSVWCETSDFITIAWLVFLCVVLCGSSLVLLVRILCGSRKMPLTRLYVTILLTVLVFLLCGLPFGIQWALFSRIHLDW

SEQ ID NO: 52673 - protein, 322 aa, Homo sapiens
MDPTVPVFGTKLTPINGREETPCYNQTLSFTVLTCIISLVGLTGNAVVLWLLGYRMRRNAVSIYILNLAAADFLFLSFQIIRLPLRLINISHLIRKILVSVMTFPYFTGLSMLSAISTERCLSVLWPIWYRCRRPTHLSAVVCVLLWGLSLLFSMLEWRFCDFLFSGADSSWCETSDFIPVAWLIFLCVVLCVSSLVLLVRILCGSRKMPLTRLYVTILLTVLVFLLCGLPFGILGALIYRMHLNLEVLYCHVYLVCMSLSSLNSSANPIIYFFVGSFRQRQNRQNLKLVLQRALQDKPEVDKGEGQLPEESLELSGSRLGP

SEQ ID NO: 52674 - protein, 1016 aa, Homo sapiens
MVLPTCPMAEFALPRHSAVMERLRRRIELCRRHHSTCEARYEAVSPERLELERQHTFALHQRCIQAKAKRAGKHRQPPAATAPAPAAPAPRLDAADGPEHGRPATHLHDTVKRNLDSATSPQNGDQQNGYGDLFPGHKKTRREAPLGVAISSNGLPPASPLGQSDKPSGADALQSSGKHSLGLDSLNKKRLADSSLHLNGGSNPSESFPLSLNKELKQEPVEDLPCMITGTVGSISQSNLMPDLNLNEQEWKELIEELNRSVPDEDMKDLFNEDFEEKKDPESSGSATQTPLAQDINIKTEFSPAAFEQEQLGSPQVRAGSAGQTFLGPSSAPVSTDSPSLGGSQTLFHTSGQPRADNPSPNLMPASAQAQNAQRALAGVVLPSQGPGGASELSSAHQLQQIAAKQKREQMLQNPQQATPAPAPGQMSTWQQTGPSHSSLDVPYPMEKPASPSSYKQDFTNSKLLMMPSVNKSSPRPGGPYLQPSHVNLLSHQPPSNLNQNSANNQGSVLDYGNTKPLSHYKADCGQGSPGSGQSKPALMAYLPQQLSHISHEQNSLFLMKPKPGNMPFRSLVPPGQEQNPSSVPVQAQATSVGTQPPAVSVASSHNSSPYLSSQQQAAVMKQHQLLLDQQKQREQQQKHLQQQQFLQRQQHLLAEQEKQQFQRHLTRPPPQYQDPTQGSFPQQVGQFTGSSAAVPGMNTLGPSNSSCPRVFPQAGNLMPMGPGHASVSSLPTNSGQQDRGVAQFPGSQNMPQSSLYGMASGITQIVAQPPPQATNGHAHIPRQTNVGQNTSVSAAYGQNSLGSSGLSQQHNKGTLNPGLTKPPVPRVSPAMGGQNSSWQHQGMPNLSGQTPGNSNVSPFTAASSFHMQQQAHLKMSSPQFSQAVPNRPMAPMSSAAAVGSLLPPVSAQQRTSAPAPAPPPTAPQQGLPGLSPAGPELGAFSQSPASQMGGRAGLHCTQAYPVRTAGQELPFAYSGQPGGSGLSSVAGHTDLIDSLLKNRTSEEWMSDLDDLLGSQ

SEQ ID NO: 52675 - protein, 761 aa, Homo sapiens
RGKQWGRGGGERPRLEVGSKRRLGVGPSGAGGKPAAAREPAPLPSGAWRGREAERGSRGERSPQCQPAPRGPAPGPARAARGPWCCPPAPWRSSRCRGTARSWSAFAGASSCAGATTAPARPAAPAPRLDAADGPEHGRPATHLHDTVKRNLDSATSPQNGDQQNGYGDLFPGHKKTRREAPLGVAISSNGLPPASPLGQSDKPSGADALQSSGKHSLGLDSLNKKRLADSSLHLNGGSNPSESFPLSLNKELKQEPVEDLPCMITGTVGSISQSNLMPDLNLNEQEWKELIEELNRSVPDEDMKDLFNEDFEEKKDPESSGSATQTPLAQDINIKTEFSPAAFEQEQLGSPQVRAGSAGQTFLGPSSAPVSTDSPSLGGSQTLFHTSGQPRADNPSPNLMPASAQAQNAQRALAGVVLPSQGPGGASELSSAHQLQQIAAKQKREQMLQNPQQATPAPAPGQMSTWQQTGPSHSSLDVPYPMEKPASPSSYKQDFTNSKLLMMPSVNKSSPRPGGPYLQPSHVNLLSHQPPSNLNQNSANNQGSVLDYGNTKPLSHYKADCGQGSPGSGQSKPALMAYLPQQLSHISHEQNSLFLMKPKPGNMPFRSLVPPGQEQNPSSVPVQAQATSVGTQPPAVSVASSHNSSPYLSSQQQAAVMKQHQLLLDQQKQREQQQKHLQQQQFLQRQQHLLAEQEKQQFQRHLTRPPPQYQDPTQGSFPQQVGQFTAQGLSCALPMIHSTEVLISSLCNGSAGLSAAQRSW

SEQ ID NO: 52676 - protein, 1156 aa, Homo sapiens
MGDTAPPQAPAGGLGGASGAGLLGGGSVTPRVHSAIVERLRARIAVCRQHHLSCEGRYERGRAESSDRERESTLQLLSLVQHGQGARKAGKHTKATATAATTTAPPPPPAAPPAASQAAATAAPPPPPDYHHHHQQHLLNSSNNGGSGGINGEQQPPASTPGDQRNSALIALQGSLKRKQVVNLSPANSKRPNGFVDNSFLDIKRIRVGENLSAGQGGLQINNGQSQIMSGTLPMSQAPLRKTNTLPSHTHSPGNGLFNMGLKEVKKEPGETLSCSKHMDGQMTQENIFPNRYGDDPGEQLMDPELQELFNELTNISVPPMSDLELENMINATIKQDDPFNIDLGQQSQRSTPRPSLPMEKIVIKSEYSPGLTQGPSGSPQLRPPSAGPAFSMANSALSTSSPIPSVPQSQAQPQTGSGASRALPSWQEVSHAQQLKQIAANRQQHARMQQHQQQHQPTNWSALPSSAGPSPGPFGQEKIPSPSFGQQTFSPQSSPMPGVAGGSGQSKVMANYMYKAGPSAQGGHLDVLMQQKPQDLSRSFINNPHPAMEPRQGNTKPLFHFNSDQANQQMPSVLPSQNKPSLLHYTQQQQQQQQQQQQQQQQQQQQQQQQQQQQQQQQQQSSISAQQQQQQQSSISAQQQQQQQQQQQQQQQQQQQQQQQQQQQPSSQPAQSLPSQPLLRSPLPLQQKLLLQQMQNQPIAGMGYQVSQQQRQDQHSVVGQNTGPSPSPNPCSNPNTGSGYMNSQQSLLNQQLMGKKQTLQRQIMEQKQQLLLQQQMLADAEKIAPQDQINRHLSRPPPDYKDQRRNVGNMQPTAQYSGGSSTISLNSNQALANPVSTHTILTPNSSLLSTSHGTRMPSLSTAVQNMGMYGNLPCNQPNTYSVTSGMNQLTQQRNPKQLLANQNNPMMPRPPTLGPSNNNNVATFGAGSVGNSQQLRPNLTHSMASMPPQRTSNVMITSNTTAPNWASQEGTSKQQEALTSAGVRFPTGTPAAYTPNQSLQQAVGSQQFSQRAVAPPNQLTPAVQMRPMNQMSQTLNGQTMGPLRGLNLRPNQLSTQILPNLNQSGTGLNQSRTGINQPPSLTPSNFPSPNQSSRAFQGTDHSSDLAFDFLSQQNDNMGPALNSDADFIDSLLKTEPGNDDWMKDINLDEILGNNS

SEQ ID NO: 52677 - protein, 1156 aa, Homo sapiens; identical to SEQ ID NO: 52676

SEQ ID NO: 52678 - protein, 543 aa, Homo sapiens
LQETVKRKLEGARSPLNGDQQNGACDGNFSPTSKRIRKDISAGMEAINNLPSNMPLPSASPLHQLDLKPSLPLQNSGTHTPGLLEDLSKNGRLPEIKLPVNGCSDLEDSFTILQSKDLKQEPLDDPTCIDTSETSLSNQNKLFSDINLNDQEWQELIDELANTVPEDDIQDLFNEDFEEKKEPEFSQPATETPLSQESASVKSDPSHSPFAHVSMGSPQARPSSSGPPFSTVSTATSLPSVASTPAAPNPASSPANCAVQSPQTPNQAHTPGQAPPRPGNGYLLNPAAVTVAGSASGPVAVPSSDMSPAEQLKQMAAQQQQRAKLMQQKQQQQQQQQQQQQQQQQQQQQQQQQQHSNQTSNWSPLGPPSSPYGAAFTAEKPNSPMMYPQAFNNQNPIVPPMANNLQKTTMNNYLPQNHMNMINQQPNNLGTNSLNKQHNILTYGNTKPLTHFNADLSQRMTPPVANPNKNPLMPYIQQQQQQQQQQQQQQQQQQPPPPQLQAPRAHLSEDQKRLLLMKQKGVMNQPMAYAALPSHGQEQQPVG

SEQ ID NO: 52679 - protein, 276 aa, Homo sapiens
MSPAEQLKQMAAQQQQRAKLMQQKQQQQQQQQQQQQQQHSNQTSNWSPLGPPSSPYGAAFTAEKPNSPMMYPQAFNNQNPIVPPMANNLQKTTMNNYLPQNHMNMINQQPNNLGTNSLNKQHNILTYGNTKPLTHFNADLSQRMTPPVANPNKNPLMPYIQQQQQQQQQQQQQQQQQQPPPPQLQAPRAHLSEDQKRLLLMKQKGVMNQPMAYAALPSHGQVSVKVTHSSSSSCGAFDCRCVMFYKSTVVGSNCLQKTSLHPQVVARFGVFFFHFS

SEQ ID NO: 52680 - protein, 1138 aa, Homo sapiens
MGDFAAPAAAANGSSICINSSLNSSLGGAGIGVNNTPNSTPAAPSSNHPAAGGCGGSGGPGGGSAAVPKHSTVVERLRQRIEGCRRHHVNCENRYQQAQVEQLELERRDTVSLYQRTLEQRAKKSGAGTGKQQHPSKPQQDAEAASAEQRNHTLIMLQETVKRKLEGARSPLNGDQQNGACDGNFSPTSKRIRKDISAGMEAINNLPSNMPLPSASPLHQLDLKPSLPLQNSGTHTPGLLEDLSKNGRLPEIKLPVNGCSDLEDSFTILQSKDLKQEPLDDPTCIDTSETSLSNQNKLFSDINLNDQEWQELIDELANTVPEDDIQDLFNEDFEEKKEPEFSQPATETPLSQESASVKSDPSHSPFAHVSMGSPQARPSSSGPPFSTVSTATSLPSVASTPAAPNPASSPANCAVQSPQTPNQAHTPGQAPPRPGNGYLLNPAAVTVAGSASGPVAVPSSDMSPAEQLKQMAAQQQQRAKLMQQKQQQQQQQQQQQQQQQQQQQQQQQQQHSNQTSNWSPLGPPSSPYGAAFTAEKPNSPMMYPQAFNNQNPIVPPMANNLQKTTMNNYLPQNHMNMINQQPNNLGTNSLNKQHNILTYGNTKPLTHFNADLSQRMTPPVANPNKNPLMPYIQQQQQQQQQQQQQQQQQQPPPPQLQAPRAHLSEDQKRLLLMKQKGVMNQPMAYAALPSHGQEQHPVGLPRTTGPMQSSVPPGSGGMVSGASPAGPGFLGSQPQAAIMKQMLIDQRAQLIEQQKQQFLREQRQQQQQQQQQILAEQQLQQSHLPRQHLQPQRNPYPVQQVNQFQGSPQDIAAVRSQAALQSMRTSRLMAQNAGMMGIGPSQNPGTMATAAAQSEMGLAPYSTTPTSQPGMYNMSTGMTQMLQHPNQSGMSITHNQAQGPRQPASGQGVGMVSGFGQSMLVNSAITQQHPQMKGPVGQALPRPQAPPRLQSLMGTVQQGAQSWQQRSLQGMPGRTSGELGPFNNGASYPLQAGQPRLTKQHFPQGLSQSVVDANTGTVRTLNPAAMGRQMMPSLPGQQGTSQARPMVMSGLSQGVPGMPAFSQPPAQQQIPSGSFAPSSQSQAYERNAPQDVSYNYSGDGAGGSFPGLPDGADLVDSIIKGGPGDEWMQELDELFGNP

SEQ ID NO: 52681 - protein, 445 aa, Homo sapiens
EQHPVGLPRTTGPMQSSVPPGSGGMVSGASPAGPGFLGSQPQAAIMKQMLIDQRAQLIEQQKQQFLREQRQQQQQQQQQILAEQQLQQSHLPRQHLQPQRNPYPVQQVNQFQGSPQDIAAVRSQAALQSMRTSRLMAQNAGMMGIGPSQNPGTMATAAAQSEMGLAPYSTTPTSQPGMYNMSTGMTQMLQHPNQSGMSITHNQAQGPRQPASGQGVGMVSGFGQSMLVNSAITQQHPQMKGPVGQALPRPQAPPRLQSLMGTVQQGAQSWQQRSLQGMPGRTSGELGPFNNGASYPLQAGQPRLTKQHFPQGLSQSVVDANTGTVRTLNPAAMGRQMMPSLPGQQGTSQARPMVMSGLSQGVPGMPAFSQPPAQQQIPSGSFAPSSQSQAYERNAPQDVSYNYSGDGAGGSFPGLPDGADLVDSIIKGGPGDEWMQELDELFGNP

SEQ ID NO: 52682 - protein, 774 aa, Homo sapiens
MDDWKSRLVIKSMLPHFAMVGNRQEPRKLQESGKKPSWMEEEDLSFLYKSSPGRKHQGTVKRRQEEDHFQFPDMADGGYPNKIKRPCLEDVTLAMGPGAHPSTACAELQVPPLTINPSPAAMGVAGQSLLLENNPMNGNIMGSPFVVPQTTEVGLKGPTVPYYEKINSVPAVDQELQELLEELTKIQDPSPNELDLEKILGTKPEEPLVLDHPQATLSTTPKPSVQMSHLESLASSKEFASSCSQVTGMSLQIPSSSTGISYSIPSTSKQIVSPSSSMAQSKSQVQAMLPVALPPLPVPQWHHAHQLKALAASKQGSATKQQGPTPSWSGLPPPGLSPPYRPVPSPHPPPLPLPPPPPPFSPQSLMVSCMSSNTLSGSTLRGSPNALLSSMTSSSNAALGPAMPYAPEKLPSPALTQQPQFGPQSSILANLMSSTIKTPQGHLMSALPASNPGPSPPYRPEKLSSPGLPQQSFTPQCSLIRSLTPTSNLLSQQQQQQQQQQQANVIFKPISSNSSKTLSMIMQQGMASSSPGATEPFTFGNTKPLSHFVSEPGPQKMPSMPTTSRQPSLLHYLQQPTPTQASSATASSTATATLQLQQQQQQQQQQPDHSSFLLQQMMQQPQRFQRSVASDSMPALPRQGCCHLFAWTSAASSVKPQHQHGNSFTSRQDPQPGDVSPSNITHVDKACKLGEARHPQVSLGRQPPSCQALGSESFLPGSSFAHELARVTSSYSTSEAAPWGSWDPKAWRQVPAPLLPSCDATARGTEIRSYGNDP

SEQ ID NO: 52683 - protein, 136 aa, Homo sapiens
MDDWKSRLVIKSMLPHFAMVGNRQEPRKLQESGKKPSWMEEEDLSFLYKSSPGRKHQGTVKRRQEEDHFQFPDMADGGYPNKIKRPCLEDVTLAMGPGAHPSTACAELQVPPLTINPSPAAMGVAGQSLLLENNPM

SEQ ID NO: 52684 - protein, 774 aa, Homo sapiens; identical to SEQ ID NO: 52682

SEQ ID NO: 52685 - protein, 749 aa, Homo sapiens
MDDWKSRLVIKSMLPHFAMVGNRQEPRKLQESGTVKRRQEEDHFQFPDMADGGYPNKIKRPCLEDVTLAMGPGAHPSTACAELQVPPLTINPSPAAMGVAGQSLLLENNPMNGNIMGSPFVVPQTTEVGLKGPTVPYYEKINSVPAVDQELQELLEELTKIQDPSPNELDLEKILGTKPEEPLVLDHPQATLSTTPKPSVQMSHLESLASSKEFASSCSQVTGMSLQIPSSSTGISYSIPSTSKQIVSPSSSMAQSKSQVQAMLPVALPPLPVPQWHHAHQLKALAASKQGSATKQQGPTPSWSGLPPPGLSPPYRPVPSPHPPPLPLPPPPPPFSPQSLMVSCMSSNTLSGSTLRGSPNALLSSMTSSSNAALGPAMPYAPEKLPSPALTQQPQFGPQSSILANLMSSTIKTPQGHLMSALPASNPGPSPPYRPEKLSSPGLPQQSFTPQCSLIRSLTPTSNLLSQQQQQQQQQQQANVIFKPISSNSSKTLSMIMQQGMASSSPGATEPFTFGNTKPLSHFVSEPGPQKMPSMPTTSRQPSLLHYLQQPTPTQASSATASSTATATLQLQQQQQQQQQQPDHSSFLLQQMMQQPQRFQRSVASDSMPALPRQGCCHLFAWTSAASSVKPQHQHGNSFTSRQDPQPGDVSPSNITHVDKACKLGEARHPQVSLGRQPPSCQALGSESFLPGSSFAHELARVTSSYSTSEAAPWGSWDPKAWRQVPAPLLPSCDATARGTEIRSYGNDP

SEQ ID NO: 52686 - protein, 998 aa, Homo sapiens
MDDWKSRLVIKSMLPHFAMVGNRQEPRKLQESGTVKRRQEEDHFQFPDMADGGYPNKIKRPCLEDVTLAMGPGAHPSTACAELQVPPLTINPSPAAMGVAGQSLLLENNPMNGNIMGSPFVVPQTTEVGLKGPTVPYYEKINSVPAVDQELQELLEELTKIQDPSPNELDLEKILGTKPEEPLVLDHPQATLSTTPKPSVQMSHLESLASSKEFASSCSQVTGMSLQIPSSSTGISYSIPSTSKQIVSPSSSMAQSKSQVQAMLPVALPPLPVPQWHHAHQLKALAASKQGSATKQQGPTPSWSGLPPPGLSPPYRPVPSPHPPPLPLPPPPPPFSPQSLMVSCMSSNTLSGSTLRGSPNALLSSMTSSSNAALGPAMPYAPEKLPSPALTQQPQFGPQSSILANLMSSTIKTPQGHLMSALPASNPGPSPPYRPEKLSSPGLPQQSFTPQCSLIRSLTPTSNLLSQQQQQQQQQQQANVIFKPISSNSSKTLSMIMQQGMASSSPGATEPFTFGNTKPLSHFVSEPGPQKMPSMPTTSRQPSLLHYLQQPTPTQASSATASSTATATLQLQQQQQQQQQQPDHSSFLLQQMMQQPQRFQRSVASDSMPALPRQQEEQRSGLMAMTPERQNAYISQQMSPFEAVQEQVTSKCSRIKASPPSSKHLMPPRTGLLQNNLSPGMIPLTRHQSCEGMGVISPTLGKRQGIFTSSPQCPILSHSGQTPLGRLDSVCQHMQSPKATPPEVPLPGFCPSSLGTQSLSPHQLRRPSVPRMPTAFNNAAWVTAAAAVTTAVSGKTPLSQVDNSVQQHSPSGQACLQRPSDWEAQVPAAMGTQVPLANNPSFSLLGSQSLRQSPVQGPVPVANTTKFLQQGMASFSPLSPIQGIEPPSYVAAAATAAAASAVAASQFPGPFDRTDIPPELPPADFLRQPQPPLNDLISSPDCNEVDFIEALLKGSCVSPDEDWVCNLRLIDDILEQHAAAQNATAQNSGQVTQDAGAL

SEQ ID NO: 52687 - protein, 646 aa, Homo sapiens
MEEEDLSFLYKSSPGRKHQGTVKRRQEEDHFQFPDMADGGYPNKIKRPCLEDVTLAMGPGAHPSTACAELQVPPLTINPSPAAMGVAGQSLLLENNPMNGNIMGSPFVVPQTTEVGLKGPTVPYYEKINSVPAVDQELQELLEELTKIQDPSPNELDLEKILGTKPEEPLVLDHPQATLSTTPKPSVQMSHLESLASSKEFASSCSQVTGMSLQIPSSSTGISYSIPSTSKQIVSPSSSMAQSKSQVQAMLPVALPPLPVPQWHHAHQLKALAASKQGSATKQQGPTPSWSGLPPPGLSPPYRPVPSPHPPPLPLPPPPPPFSPQSLMVSCMSSNTLSGSTLRGSPNALLSSMTSSSNAALGPAMPYAPEKLPSPALTQQPQFGPQSSILANLMSSTIKTPQGHLMSALPASNPGPSPPYRPEKLSSPGLPQQSFTPQCSLLHYLQQPTPTQASSATASSTATATLQLQQQQQQQQQQPDHSSFLLQQMMQQPQRFQRSVASDSMPALPRQGCCHLFAWTSAASSVKPQHQHGNSFTSRQDPQPGDVSPSNITHVDKACKLGEARHPQVSLGRQPPSCQALGSESFLPGSSFAHELARVTSSYSTSEAAPWGSWDPKAWRQVPAPLLPSCDATARGTEIRSYGNDP

SEQ ID NO: 52688 - protein, 214 aa, Homo sapiens
MIMQQGMASSSPGATEPFTFGNTKPLSHFVSEPGPQKMPSMPTTSRQPSLLHYLQQPTPTQASSATASSTATATLQLQQQQQQQQQQPDHSSFLLQQMMQQPQRFQRSVASDSMPALPRQTHVDKACKLGEARHPQVSLGRQPPSCQALGSESFLPGSSFAHELARVTSSYSTSEAAPWGSWDPKAWRQVPAPLLPSCDATARGTEIRSYGNDP

SEQ ID NO: 52689 - protein, 651 aa, Homo sapiens
MKDYDELLKYYELHETIGTGGFAKVKLACHILTGEMVAIKIMDKNTLGSDLPRIKTEIEALKNLRHQHICQLYHVLETANKIFMVLEYCPGGELFDYIISQDRLSEEETRVVFRQIVSAVAYVHSQGYAHRDLKPENLLFDEYHKLKLIDFGLCAKPKGNKDYHLQTCCGSLAYAAPELIQGKSYLGSEADVWSMGILLYVLMCGFLPFDDDNVMALYKKIMRGKYDVPKWLSPSSILLLQQMLQVDPKKRISMKNLLNHPWIMQDYNYPVEWQSKNPFIHLDDDCVTELSVHHRNNRQTMEDLISLWQYDHLTATYLLLLAKKARGKPVRLRLSSFSCGQASATPFTDIKSNNWSLEDVTASDKNYVAGLIDYDWCEDDLSTGAATPRTSQFTKYWTESNGVESKSLTPALCRTPANKLKNKENVYTPKSAVKNEEYFMFPEPKTPVNKNQHKREILTTPNRYTTPSKARNQCLKETPIKIPVNSTGTDKLMTGVISPERRCRSVELDLNQAHMEETPKRKGAKVFGSLERGLDKVITVLTRSKRKGSARDGPRRLKLHYNVTTTRLVNPDQLLNEIMSILPKKHVDFVQKGYTLKCQTQSDFGKVTMQFELEVCQLQKPDVVGIRRQRLKGDAWVYKRLVEDILSSCKV

SEQ ID NO: 52690 - protein, 580 aa, Homo sapiens
MMNFSNIMNYMKLLGQYCPGGELFDYIISQDRLSEEETRVVFRQIVSAVAYVHSQGYAHRDLKPENLLFDEYHKLKLIDFGLCAKPKGNKDYHLQTCCGSLAYAAPELIQGKSYLGSEADVWSMGILLYVLMCGFLPFDDDNVMALYKKIMRGKYDVPKWLSPSSILLLQQMLQVDPKKRISMKNLLNHPWIMQDYNYPVEWQSKNPFIHLDDDCVTELSVHHRNNRQTMEDLISLWQYDHLTATYLLLLAKKARGKPVRLRLSSFSCGQASATPFTDIKSNNWSLEDVTASDKNYVAGLIDYDWCEDDLSTGAATPRTSQFTKYWTESNGVESKSLTPALCRTPANKLKNKENVYTPKSAVKNEEYFMFPEPKTPVNKNQHKREILTTPNRYTTPSKARNQCLKETPIKIPVNSTGTDKLMTGVISPERRCRSVELDLNQAHMEETPKRKGAKVFGSLERGLDKVITVLTRSKRKGSARDGPRRLKLHYNVTTTRLVNPDQLLNEIMSILPKKHVDFVQKGYTLKCQTQSDFGKVTMQFELEVCQLQKPDVVGIRRQRLKGDAWVYKRLVEDILSSCKV

SEQ ID NO: 52691 - protein, 603 aa, Homo sapiens
MKDYDELLKYYELHETIGTGGFAKVKLACHILTGEMVAIKIMDKNTLGSDLPRIKTEIEALKNLRHQHICQLYHVLETANKIFMVLEENLLFDEYHKLKLIDFGLCAKPKGNKDYHLQTCCGSLAYAAPELIQGKSYLGSEADVWSMGILLYVLMCGFLPFDDDNVMALYKKIMRGKYDVPKWLSPSSILLLQQMLQVDPKKRISMKNLLNHPWIMQDYNYPVEWQSKNPFIHLDDDCVTELSVHHRNNRQTMEDLISLWQYDHLTATYLLLLAKKARGKPVRLRLSSFSCGQASATPFTDIKSNNWSLEDVTASDKNYVAGLIDYDWCEDDLSTGAATPRTSQFTKYWTESNGVESKSLTPALCRTPANKLKNKENVYTPKSAVKNEEYFMFPEPKTPVNKNQHKREILTTPNRYTTPSKARNQCLKETPIKIPVNSTGTDKLMTGVISPERRCRSVELDLNQAHMEETPKRKGAKVFGSLERGLDKVITVLTRSKRKGSARDGPRRLKLHYNVTTTRLVNPDQLLNEIMSILPKKHVDFVQKGYTLKCQTQSDFGKVTMQFELEVCQLQKPDVVGIRRQRLKGDAWVYKRLVEDILSSCKV

SEQ ID NO: 52692 - protein, 520 aa, Homo sapiens
MVLEENLLFDEYHKLKLIDFGLCAKPKGNKDYHLQTCCGSLAYAAPELIQGKSYLGSEADVWSMGILLYVLMCGFLPFDDDNVMALYKKIMRGKYDVPKWLSPSSILLLQQMLQVDPKKRISMKNLLNHPWIMQDYNYPVEWQSKNPFIHLDDDCVTELSVHHRNNRQTMEDLISLWQYDHLTATYLLLLAKKARGKPVRLRLSSFSCGQASATPFTDIKSNNWSLEDVTASDKNYVAGLIDYDWCEDDLSTGAATPRTSQFTKYWTESNGVESKSLTPALCRTPANKLKNKENVYTPKSAVKNEEYFMFPEPKTPVNKNQHKREILTTPNRYTTPSKARNQCLKETPIKIPVNSTGTDKLMTGVISPERRCRSVELDLNQAHMEETPKRKGAKVFGSLERGLDKVITVLTRSKRKGSARDGPRRLKLHYNVTTTRLVNPDQLLNEIMSILPKKHVDFVQKGYTLKCQTQSDFGKVTMQFELEVCQLQKPDVVGIRRQRLKGDAWVYKRLVEDILSSCKV

SEQ ID NO: 52693 - protein, 457 aa, Homo sapiens
MGILLYVLMCGFLPFDDDNVMALYKKIMRGKYDVPKWLSPSSILLLQQMLQVDPKKRISMKNLLNHPWIMQDYNYPVEWQSKNPFIHLDDDCVTELSVHHRNNRQTMEDLISLWQYDHLTATYLLLLAKKARGKPVRLRLSSFSCGQASATPFTDIKSNNWSLEDVTASDKNYVAGLIDYDWCEDDLSTGAATPRTSQFTKYWTESNGVESKSLTPALCRTPANKLKNKENVYTPKSAVKNEEYFMFPEPKTPVNKNQHKREILTTPNRYTTPSKARNQCLKETPIKIPVNSTGTDKLMTGVISPERRCRSVELDLNQAHMEETPKRKGAKVFGSLERGLDKVITVLTRSKRKGSARDGPRRLKLHYNVTTTRLVNPDQLLNEIMSILPKKHVDFVQKGYTLKCQTQSDFGKVTMQFELEVCQLQKPDVVGIRRQRLKGDAWVYKRLVEDILSSCKV

SEQ ID NO: 52694 - protein, 610 aa, Homo sapiens
MKDYDELLKYYELHETIGTGGFAKVKLACHILTGEMVAIKIMDKNTLGSDLPRIKTEIEALKNLRHQHICQLYHVLETANKIFMVLEYCPGGELFDYIISQDRLSEEETRVVFRQIVSAVAYVHSQGYAHRDLKPENLLFDEYHKLKLIDFGLCAKPKGNKDYHLQTCCGSLAYAAPELIQGKSYLGSEADVWSMGILLYVLMCGFLPFDDDNVMALYKKIMRGKYDVPKWLSPSSILLLQQMLQVDPKKRISMKNLLNHPWIMQDYNYPVEWQSKNPFIHLDDDCVTELSVHHRNNRQTMEDLISLWQYDHLTATYLLLLAKKARGKPVRLRLSSFSCGQASATPFTDIKFTKYWTESNGVESKSLTPALCRTPANKLKNKENVYTPKSAVKNEEYFMFPEPKTPVNKNQHKREILTTPNRYTTPSKARNQCLKETPIKIPVNSTGTDKLMTGVISPERRCRSVELDLNQAHMEETPKRKGAKVFGSLERGLDKVITVLTRSKRKGSARDGPRRLKLHYNVTTTRLVNPDQLLNEIMSILPKKHVDFVQKGYTLKCQTQSDFGKVTMQFELEVCQLQKPDVVGIRRQRLKGDAWVYKRLVEDILSSCKV

SEQ ID NO: 52695 - protein, 619 aa, Homo sapiens
MMNFSNIMNYMKLLGQSDLPRIKTEIEALKNLRHQHICQLYHVLETANKIFMVLEYCPGGELFDYIISQDRLSEEETRVVFRQIVSAVAYVHSQGYAHRDLKPENLLFDEYHKLKLIDFGLCAKPKGNKDYHLQTCCGSLAYAAPELIQGKSYLGSEADVWSMGILLYVLMCGFLPFDDDNVMALYKKIMRGKYDVPKWLSPSSILLLQQMLQVDPKKRISMKNLLNHPWIMQDYNYPVEWQSKNPFIHLDDDCVTELSVHHRNNRQTMEDLISLWQYDHLTATYLLLLAKKARGKPVRLRLSSFSCGQASATPFTDIKSNNWSLEDVTASDKNYVAGLIDYDWCEDDLSTGAATPRTSQFTKYWTESNGVESKSLTPALCRTPANKLKNKENVYTPKSAVKNEEYFMFPEPKTPVNKNQHKREILTTPNRYTTPSKARNQCLKETPIKIPVNSTGTDKLMTGVISPERRCRSVELDLNQAHMEETPKRKGAKVFGSLERGLDKVITVLTRSKRKGSARDGPRRLKLHYNVTTTRLVNPDQLLNEIMSILPKKHVDFVQKGYTLKCQTQSDFGKVTMQFELEVCQLQKPDVVGIRRQRLKGDAWVYKRLVEDILSSCKV

SEQ ID NO: 52696 - protein, 580 aa, Homo sapiens
MKDYDELLKYYELHETIGTGGFAKVKLACHILTGEMVAIKIMDKNTLGSDLPRIKTEIEALKNLRHQHICQLYHVLETANKIFMVLEGNKDYHLQTCCGSLAYAAPELIQGKSYLGSEADVWSMGILLYVLMCGFLPFDDDNVMALYKKIMRGKYDVPKWLSPSSILLLQQMLQVDPKKRISMKNLLNHPWIMQDYNYPVEWQSKNPFIHLDDDCVTELSVHHRNNRQTMEDLISLWQYDHLTATYLLLLAKKARGKPVRLRLSSFSCGQASATPFTDIKSNNWSLEDVTASDKNYVAGLIDYDWCEDDLSTGAATPRTSQFTKYWTESNGVESKSLTPALCRTPANKLKNKENVYTPKSAVKNEEYFMFPEPKTPVNKNQHKREILTTPNRYTTPSKARNQCLKETPIKIPVNSTGTDKLMTGVISPERRCRSVELDLNQAHMEETPKRKGAKVFGSLERGLDKVITVLTRSKRKGSARDGPRRLKLHYNVTTTRLVNPDQLLNEIMSILPKKHVDFVQKGYTLKCQTQSDFGKVTMQFELEVCQLQKPDVVGIRRQRLKGDAWVYKRLVEDILSSCKV

SEQ ID NO: 52697 - protein, 496 aa, Homo sapiens
MRVLSGTSLMLCSLLLLLQALCSPGLAPQSRGHLCRTRPTDLVFVVDSSRSVRPVEFEKVKVFLSQVIESLDVGPNATRVGMVNYASTVKQEFSLRAHVSKAALLQAVRRIQPLSTGTMTGLAIQFAITKAFGDAEGGRSRSPDISKVVIVVTDGRPQDSVQDVSARARASGVELFAIGVGSVDKATLRQIASEPQDEHVDYVESYSVIEKLSRKFQEAFCVVSDLCATGDHDCEQVCISSPGSYTCACHEGFTLNSDGKTCNVCSGGGGSSATDLVFLIDGSKSVRPENFELVKKFISQIVDTLDVSDKLAQVGLVQYSSSVRQEFPLGRFHTKKDIKAAVRNMSYMEKGTMTGAALKYLIDNSFTVSSGARPGAQKVGIVFTDGRSQDYINDAAKKAKDLGFKMFAVGVGNAVEDELREIASEPVAEHYFYTADFKTINQIGKKLQKKICVEEDPCACESLVKFQAKVEGLLQALTRKLEAVSKRLAILENTVV

SEQ ID NO: 52698 - protein, 957 aa, Homo sapiens
MEKMLAGCFLLILGQIVLLPAEARERSRGRSISRGRHARTHPQTALLESSCENKRADLVFIIDSSRSVNTHDYAKVKEFIVDILQFLDIGPDVTRVGLLQYGSTVKNEFSLKTFKRKSEVERAVKRMRHLSTGTMTGLAIQYALNIAFSEAEGARPLRENVPRVIMIVTDGRPQDSVAEVAAKARDTGILIFAIGVGQVDFNTLKSIGSEPHEDHVFLVANFSQIETLTSVFQKKLCTAHMCSTLEHNCAHFCINIPGSYVCRCKQGYILNSDQTTCRIQDLCAMEDHNCEQLCVNVPGSFVCQCYSGYALAEDGKRCVAVDYCASENHGCEHECVNADGSYLCQCHEGFALNPDKKTCTKIDYCASSNHGCQHECVNTDDSYSCHCLKGFTLNPDKKTCRRINYCALNKPGCEHECVNMEESYYCRCHRGYTLDPNGKTCSRVDHCAQQDHGCEQLCLNTEDSFVCQCSEGFLINEDLKTCSRVDYCLLSDHGCEYSCVNMDRSFACQCPEGHVLRSDGKTCAKLDSCALGDHGCEHSCVSSEDSFVCQCFEGYILREDGKTCRRKDVCQAIDHGCEHICVNSDDSYTCECLEGFRLAEDGKRCRRKDVCKSTHHGCEHICVNNGNSYICKCSEGFVLAEDGRRCKKCTEGPIDLVFVIDGSKSLGEENFEVVKQFVTGIIDSLTISPKAARVGLLQYSTQVHTEFTLRNFNSAKDMKKAVAHMKYMGKGSMTGLALKHMFERSFTQGEGARPLSTRVPRAAIVFTDGRAQDDVSEWASKAKANGITMYAVGVGKAIEEELQEIASEPTNKHLFYAEDFSTMDEISEKLKKGICEALEDSDGRQDSPAGELPKTVQQPTESEPVTINIQDLLSCSNFAVQHRYLFEEDNLLRSTQKLSHSTKPSGSPLEEKHDQCKCENLIMFQNLANEEVRKLTQRLLEEMTQRMEALENRLRYR

SEQ ID NO: 52699 - protein, 917 aa, Homo sapiens
MEKMLAGCFLLILGQIVLLPAEARERSRGRSISRGRHARTHPQTALLESSCENKRADLVFIIDSSRSVNTHDYAKVKEFIVDILQFLDIGPDVTRVGLLQYGSTVKNEFSLKTFKRKSEVERAVKRMRHLSTGTMTGLAIQYALNIAFSEAEGARPLRENVPRVIMIVTDGRPQDSVAEVAAKARDTGILIFAIGVGQVDFNTLKSIGSEPHEDHVFLVANFSQIETLTSVFQKKLCTAHMCSTLEHNCAHFCINIPGSYVCRCKQGYILNSDQTTCRIQDLCAMEDHNCEQLCVNVPGSFVCQCYSGYALAEDGKRCVAVDYCASENHGCEHECVNADGSYLCQCHEGFALNPDKKTCTRINYCALNKPGCEHECVNMEESYYCRCHRGYTLDPNGKTCSRVDHCAQQDHGCEQLCLNTEDSFVCQCSEGFLINEDLKTCSRVDYCLLSDHGCEYSCVNMDRSFACQCPEGHVLRSDGKTCAKLDSCALGDHGCEHSCVSSEDSFVCQCFEGYILREDGKTCRRKDVCQAIDHGCEHICVNSDDSYTCECLEGFRLAEDGKRCRRKDVCKSTHHGCEHICVNNGNSYICKCSEGFVLAEDGRRCKKCTEGPIDLVFVIDGSKSLGEENFEVVKQFVTGIIDSLTISPKAARVGLLQYSTQVHTEFTLRNFNSAKDMKKAVAHMKYMGKGSMTGLALKHMFERSFTQGEGARPLSTRVPRAAIVFTDGRAQDDVSEWASKAKANGITMYAVGVGKAIEEELQEIASEPTNKHLFYAEDFSTMDEISEKLKKGICEALEDSDGRQDSPAGELPKTVQQPTESEPVTINIQDLLSCSNFAVQHRYLFEEDNLLRSTQKLSHSTKPSGSPLEEKHDQCKCENLIMFQNLANEEVRKLTQRYLLEEMTQRMEALENRLRYR

SEQ ID NO: 52700 - protein, 115 aa, Homo sapiens
MEDHNCEQLCVNVPGSFVCQCYSGYALAEDGKRCVAVDYCASENHGCEHECVNADGSYLCQCHEGFALNPDKKTCTKIDYCASSNHGCQHECVNTDDSYSCHCLKGFTLNPDKKT

SEQ ID NO: 52701 - protein, 956 aa, Homo sapiens
MEKMLAGCFLLILGQIVLLPAEARERSRGRSISRGRHARTHPQTALLESSCENKRADLVFIIDSSRSVNTHDYAKVKEFIVDILQFLDIGPDVTRVGLLQYGSTVKNEFSLKTFKRKSEVERAVKRMRHLSTGTMTGLAIQYALNIAFSEAEGARPLRENVPRVIMIVTDGRPQDSVAEVAAKARDTGILIFAIGVGQVDFNTLKSIGSEPHEDHVFLVANFSQIETLTSVFQKKLCTAHMCSTLEHNCAHFCINIPGSYVCRCKQGYILNSDQTTCRIQDLCAMEDHNCEQLCVNVPGSFVCQCYSGYALAEDGKRCVAVDYCASENHGCEHECVNADGSYLCQCHEGFALNPDKKTCTKIDYCASSNHGCQHECVNTDDSYSCHCLKGFTLNPDKKTCRRINYCALNKPGCEHECVNMEESYYCRCHRGYTLDPNGKTCSRVDHCAQQDHGCEQLCLNTEDSFVCQCSEGFLINEDLKTCSRVDYCLLSDHGCEYSCVNMDRSFACQCPEGHVLRSDGKTCAKLDSCALGDHGCEHSCVSSEDSFVCQCFEGYILREDGKTCRRKDVCQAIDHGCEHICVNSDDSYTCECLEGFRLAEDGKRCRRKDVCKSTHHGCEHICVNNGNSYICKCSEGFVLAEDGRRCKKCTEGPIDLVFVIDGSKSLGEENFEVVKQFVTGIIDSLTISPKAARVGLLQYSTQVHTEFTLRNFNSAKDMKKAVAHMKYMGKGSMTGLALKHMFERSFTQGEGARPLSTRVPRAAIVFTDGRAQDDVSEWASKAKANGITMYAVGVGKAIEEELQEIASEPTNKHLFYAEDFSTMDEISEKLKKGICEALEDSDGRQDSPAGELPKTVQQPTESEPVTINIQDLLSCSNFAVQHRYLFEEDNLLRSTQKLSHSTKPSGSPLEEKHDQCKCENLIMFQNLANEEVRKLTQRLEEMTQRMEALENRLRYR

SEQ ID NO: 52702 - protein, 937 aa, Homo sapiens
MEKMLAGCFLLILGQIVLLPAEARERSRGRSISRGRHARTHPQTALLESSCENKRADLVFIIDSSRSVNTHDYAKVKEFIVDILQFLDIGPDVTRVGLLQYGSTVKNEFSLKTFKRKSEVERAVKRMRHLSTGTMTGLAIQYALNIAFSEAEGARPLRENVPRVIMIVTDGRPQDSVAEVAAKARDTGILIFAIGVGQVDFNTLKSIGSEPHEDHVFLVANFSQIETLTSVFQKKLCTAHMCSTLEHNCAHFCINIPGSYVCRCKQGYILNSDQTTCRIQDLCAMEDHNCEQLCVNVPGSFVCQCYSGYALAEDGKRCVAVDYCASENHGCEHECVNADGSYLCQCHEGFALNPDKKTCTKIDYCASSNHGCQHECVNTDDSYSCHCLKGFTLNPDKKTCRRINYCALNKPGCEHECVNMEESYYCRCHRGYTLDPNGKTCSRVDHCAQQDHGCEQLCLNTEDSFVCQCSEGFLINEDLKTCSRVDYCLLSDHGCEYSCVNMDRSFACQCPEGHVLRSDGKTCAKLDSCALGDHGCEHSCVSSEDSFVCQCFEGYILREDGKTCRRKDVCQAIDHGCEHICVNSDDSYTCECLEGFRLAEDGKRCRRKDVCKSTHHGCEHICVNNGNSYICKCSEGFVLAEDGRRCKKCTEGPIDLVFVIDGSKSLGEENFEVVKQFVTGIIDSLTISPKAARVGLLQYSTQVHTEFTLRNFNSAKDMKKAVAHMKYMGKGSMTGLALKHMFERSFTQGEGARPLSTRVPRAAIVFTDGRAQDDVSEWASKAKANGITMYAVGVGKAIEEELQEIASEPTNKHLFYAEDFSTMDEISEKLKKGICEALEDSDGRQDSPAGELPKTVQQPTVQHRYLFEEDNLLRSTQKLSHSTKPSGSPLEEKHDQCKCENLIMFQNLANEEVRKLTQRLEEMTQRMEALENRLRYR

SEQ ID NO: 52703 - protein, 672 aa, Homo sapiens
MEDHNCEQLCVNVPGSFVCQCYSGYALAEDGKRCVAVDYCASENHGCEHECVNADGSYLCQCHEGFALNPDKKTCTKIDYCASSNHGCQHECVNTDDSYSCHCLKGFTLNPDKKTCRRINYCALNKPGCEHECVNMEESYYCRCHRGYTLDPNGKTCSRVDHCAQQDHGCEQLCLNTEDSFVCQCSEGFLINEDLKTCSRVDYCLLSDHGCEYSCVNMDRSFACQCPEGHVLRSDGKTCAKLDSCALGDHGCEHSCVSSEDSFVCQCFEGYILREDGKTCRRKDVCQAIDHGCEHICVNSDDSYTCECLEGFRLAEDGKRCRRKDVCKSTHHGCEHICVNNGNSYICKCSEGFVLAEDGRRCKKCTEGPIDLVFVIDGSKSLGEENFEVVKQFVTGIIDSLTISPKAARVGLLQYSTQVHTEFTLRNFNSAKDMKKAVAHMKYMGKGSMTGLALKHMFERSFTQGEGARPLSTRVPRAAIVFTDGRAQDDVSEWASKAKANGITMYAVGVGKAIEEELQEIASEPTNKHLFYAEDFSTMDEISEKLKKGICEALEDSDGRQDSPAGELPKTVQQPTESEPVTINIQDLLSCSNFAVQHRYLFEEDNLLRSTQKLSHSTKPSGSPLEEKHDQCKCENLIMFQNLANEEVRKLTQRLEEMTQRMEALENRLRYR

SEQ ID NO: 52704 - protein, 915 aa, Homo sapiens
MEKMLAGCFLLILGQIVLLPAEARERSRGRSISRGRHARTHPQTALLESSCENKRADLVFIIDSSRSVNTHDYAKVKEFIVDILQFLDIGPDVTRVGLLQYGSTVKNEFSLKTFKRKSEVERAVKRMRHLSTGTMTGLAIQYALNIAFSEAEGARPLRENVPRVIMIVTDGRPQDSVAEVAAKARDTGILIFAIGVGQVDFNTLKSIGSEPHEDHVFLVANFSQIETLTSVFQKKLCTAHMCSTLEHNCAHFCINIPGSYVCRCKQGYILNSDQTTCRIQDLCAMEDHNCEQLCVNVPGSFVCQCYSGYALAEDGKRCVAVDYCASENHGCEHECVNADGSYLCQCHEGFALNPDKKTCTRINYCALNKPGCEHECVNMEESYYCRCHRGYTLDPNGKTCSRVDHCAQQDHGCEQLCLNTEDSFVCQCSEGFLINEDLKTCSRVDYCLLSDHGCEYSCVNMDRSFACQCPEGHVLRSDGKTCAKLDSCALGDHGCEHSCVSSEDSFVCQCFEGYILREDGKTCRRKDVCQAIDHGCEHICVNSDDSYTCECLEGFRLAEDGKRCRRKDVCKSTHHGCEHICVNNGNSYICKCSEGFVLAEDGRRCKKCTEGPIDLVFVIDGSKSLGEENFEVVKQFVTGIIDSLTISPKAARVGLLQYSTQVHTEFTLRNFNSAKDMKKAVAHMKYMGKGSMTGLALKHMFERSFTQGEGARPLSTRVPRAAIVFTDGRAQDDVSEWASKAKANGITMYAVGVGKAIEEELQEIASEPTNKHLFYAEDFSTMDEISEKLKKGICEALEDSDGRQDSPAGELPKTVQQPTESEPVTINIQDLLSCSNFAVQHRYLFEEDNLLRSTQKLSHSTKPSGSPLEEKHDQCKCENLIMFQNLANEEVRKLTQRLEEMTQRMEALENRLRYR

SEQ ID NO: 52705 - protein, 486 aa, Homo sapiens
MPRPAPARRLPGLLLLLWPLLLLPSAAPDPVARPGFRRLETRGPGGSPGRRPSPAAPDGAPASGTSEPGRARGAGVCKSRPLDLVFIIDSSRSVRPLEFTKVKTFVSRIIDTLDIGPADTRVAVVNYASTVKIEFQLQAYTDKQSLKQAVGRITPLSTGTMSGLAIQTAMDEAFTVEAGAREPSSNIPKVAIIVTDGRPQDQVNEVAARAQASGIELYAVGVDRADMASLKMMASEPLEEHVFYVETYGVIEKLSSRFQETFCALDPCVLGTHQCQHVCISDGEGKHHCECSQGYTLNADKKTCSALDRCALNTHGCEHICVNDRSGSYHCECYEGYTLNEDRKTCSAQDKCALGTHGCQHICVNDRTGSHHCECYEGYTLNADKKTCSVRDKCALGSHGCQHICVSDGAASYHCDCYPGYTLNEDKKTCSATEEARRLVSTEDACGCEATLAFQDKVSSYLQRLNTKLDDILEKLKINEYGQIHR

SEQ ID NO: 52706 - protein, 444 aa, Homo sapiens
MPRPAPARRLPGLLLLLWPLLLLPSAAPDPVARPGFRRLETRGPGGSPGRRPSPAAPDGAPASGTSEPGRARGAGVCKSRPLDLVFIIDSSRSVRPLEFTKVKTFVSRIIDTLDIGPADTRVAVVNYASTVKIEFQLQAYTDKQSLKQAVGRITPLSTGTMSGLAIQTAMDEAFTVEAGAREPSSNIPKVAIIVTDGRPQDQVNEVAARAQASGIELYAVGVDRADMASLKMMASEPLEEHVFYVETYGVIEKLSSRFQETFCALDRCALNTHGCEHICVNDRSGSYHCECYEGYTLNEDRKTCSAQDKCALGTHGCQHICVNDRTGSHHCECYEGYTLNADKKTCSVRDKCALGSHGCQHICVSDGAASYHCDCYPGYTLNEDKKTCSATEEARRLVSTEDACGCEATLAFQDKVSSYLQRLNTKLDDILEKLKINEYGQIHR

SEQ ID NO: 52707 - protein, 622 aa, Homo sapiens
MRGLLCWPVLLLLLQPWETQLQLTGPRCHTGPLDLVFVIDSSRSVRPFEFETMRQFLMGLLRGLNVGPNATRVGVIQYSSQVQSVFPLRAFSRREDMERAIRDLVPLAQGTMTGLAIQYAMNVAFSVAEGARPPEERVPRVAVIVTDGRPQDRVAEVAAQARARGIEIYAVGVQRADVGSLRAMASPPLDEHVFLVESFDLIQEFGLQFQSRLCGKDQCAEGGHGCQHQCVNAWAMFHCTCNPGYKLAADNKSCLAIDLCAEGTHGCEHHCVNSPGSYFCHCQVGFVLQQDQRSCRAIDYCSFGNHSCQHECVSTPGGPRCHCREGHDLQPDGRSCQVRDLCNGVDHGCEFQCVSEGLSYRCLCPEGRQLQADGKSCNRCREGHVDLVLLVDGSKSVRPQNFELVKRFVNQIVDFLDVSPEGTRVGLVQFSSRVRTEFPLGRYGTAAEVKQAVLAVEYMERGTMTGLALRHMVEHSFSEAQGARPRALNVPRVGLVFTDGRSQDDISVWAARAKEEGIVMYAVGVGKAVEAELREIASEPAELHVSYAPDFGTMTHLLENLRGSICPEEGISAGTELRSPCECESLVEFQGRTLGALESLTLNLAQLTARLEDLENQLANQK

SEQ ID NO: 52708 - protein, 581 aa, Homo sapiens
MRGLLCWPVLLLLLQPWETQLQLTGPRCHTGPLDLVFVIDSSRSVRPFEFETMRQFLMGLLRGLNVGPNATRVGVIQYSSQVQSVFPLRAFSRREDMERAIRDLVPLAQGTMTGLAIQYAMNVAFSVAEGARPPEERVPRVAVIVTDGRPQDRVAEVAAQARARGIEIYAVGVQRADVGSLRAMASPPLDEHVFLVESFDLIQEFGLQFQSRLCAIDLCAEGTHGCEHHCVNSPGSYFCHCQVGFVLQQDQRSCRAIDYCSFGNHSCQHECVSTPGGPRCHCREGHDLQPDGRSCQVRDLCNGVDHGCEFQCVSEGLSYRCLCPEGRQLQADGKSCNRCREGHVDLVLLVDGSKSVRPQNFELVKRFVNQIVDFLDVSPEGTRVGLVQFSSRVRTEFPLGRYGTAAEVKQAVLAVEYMERGTMTGLALRHMVEHSFSEAQGARPRALNVPRVGLVFTDGRSQDDISVWAARAKEEGIVMYAVGVGKAVEAELREIASEPAELHVSYAPDFGTMTHLLENLRGSICPEEGISAGTELRSPCECESLVEFQGRTLGALESLTLNLAQLTARLEDLENQLANQK

SEQ ID NO: 52709 - protein, 499 aa, Homo sapiens
MRGLLCWPVLLLLLQPWETQLQLTGPRCHTGPLDLVFVIDSSRSVRPFEFETMRQFLMGLLRGLNVGPNATRVGVIQYSSQVQSVFPLRAFSRREDMERAIRDLVPLAQGTMTGLAIQYAMNVAFSVAEGARPPEERVPRVAVIVTDGRPQDRVAEVAAQARARGIEIYAVGVQRADVGSLRAMASPPLDEHVFLVESFDLIQEFGLQFQSRLCVRDLCNGVDHGCEFQCVSEGLSYRCLCPEGRQLQADGKSCNRCREGHVDLVLLVDGSKSVRPQNFELVKRFVNQIVDFLDVSPEGTRVGLVQFSSRVRTEFPLGRYGTAAEVKQAVLAVEYMERGTMTGLALRHMVEHSFSEAQGARPRALNVPRVGLVFTDGRSQDDISVWAARAKEEGIVMYAVGVGKAVEAELREIASEPAELHVSYAPDFGTMTHLLENLRGSICPEEGISAGTELRSPCECESLVEFQGRTLGALESLTLNLAQLTARLEDLENQLANQK

SEQ ID NO: 52710 - protein, 540 aa, Homo sapiens
MRGLLCWPVLLLLLQPWETQLQLTGPRCHTGPLDLVFVIDSSRSVRPFEFETMRQFLMGLLRGLNVGPNATRVGVIQYSSQVQSVFPLRAFSRREDMERAIRDLVPLAQGTMTGLAIQYAMNVAFSVAEGARPPEERVPRVAVIVTDGRPQDRVAEVAAQARARGIEIYAVGVQRADVGSLRAMASPPLDEHVFLVESFDLIQEFGLQFQSRLCAIDYCSFGNHSCQHECVSTPGGPRCHCREGHDLQPDGRSCQVRDLCNGVDHGCEFQCVSEGLSYRCLCPEGRQLQADGKSCNRCREGHVDLVLLVDGSKSVRPQNFELVKRFVNQIVDFLDVSPEGTRVGLVQFSSRVRTEFPLGRYGTAAEVKQAVLAVEYMERGTMTGLALRHMVEHSFSEAQGARPRALNVPRVGLVFTDGRSQDDISVWAARAKEEGIVMYAVGVGKAVEAELREIASEPAELHVSYAPDFGTMTHLLENLRGSICPEEGISAGTELRSPCECESLVEFQGRTLGALESLTLNLAQLTARLEDLENQLANQK

SEQ ID NO: 52711 - protein, 432 aa, Homo sapiens
MRGLLCWPVLLLLLQPWETQLQLTGKDQCAEGGHGCQHQCVNAWAMFHCTCNPGYKLAADNKSCLAIDLCAEGTHGCEHHCVNSPGSYFCHCQVGFVLQQDQRSCRAIDYCSFGNHSCQHECVSTPGGPRCHCREGHDLQPDGRSCQVRDLCNGVDHGCEFQCVSEGLSYRCLCPEGRQLQADGKSCNRCREGHVDLVLLVDGSKSVRPQNFELVKRFVNQIVDFLDVSPEGTRVGLVQFSSRVRTEFPLGRYGTAAEVKQAVLAVEYMERGTMTGLALRHMVEHSFSEAQGARPRALNVPRVGLVFTDGRSQDDISVWAARAKEEGIVMYAVGVGKAVEAELREIASEPAELHVSYAPDFGTMTHLLENLRGSICPEEGISAGTELRSPCECESLVEFQGRTLGALESLTLNLAQLTARLEDLENQLANQK

SEQ ID NO: 52712 - protein, 432 aa, Homo sapiens; identical to SEQ ID NO: 52711

SEQ ID NO: 52713 - protein, 622 aa, Homo sapiens; identical to SEQ ID NO: 52707

SEQ ID NO: 52714 - protein, 581 aa, Homo sapiens; identical to SEQ ID NO: 52708

SEQ ID NO: 52715 - protein, 283 aa, Homo sapiens
MSKSFQQSSLSRDSQGHGRDLSAAGIGLLAAATQSLSMLLESEDELLVDEEEAAALLESGSSVGDETDLANLGDVASDGKKEPSDKAVKKDGSASAAAKKKLKKRRFPGSMEGFVTLDEVGDEEDSELQKLRKSGMAFKSGDKNDDGLVEIKVDKIEELDQENEAALENGIKNEENTEPGAESSENADDPNKDTSENADGQSDENKDDYTIPDEYRIGPYQPNVPVGIDYVIPKTGFYCKLCSLFYTNEEVAKNTHCSSLPHYQKLKKFLNKLAEERRQKKET

SEQ ID NO: 52716 - protein, 847 aa, Homo sapiens
MSKSFQQSSLSRDSQGHGRDLSAAGIGLLAAATQSLSMPASLGRMNQGTARLASLMNLGMSSSLNQQGAHSALSSASTSSHNLQSIFNIGSRGPLPLSSQHRGDADQASNILASFGLSARDLDELSRYPEDKITPENLPQILLQLKRRRTEEGPTLSYGRDGRSATREPPYRVPRDDWEEKRHFRRDSFDDRGPSLNPVLDYDHGSRSQESGYYDRMDYEDDRLRDGERCRDDSFFGETSHNYHKFDSEYERMGRGPGPLQERSLFEKKRGAPPSSNIEDFHGLLPKGYPHLCSICDLPVHSNKEWSQHINGASHSRRCQLLLEIYPEWNPDNDTGHTMGDPFMLQQSTNPAPGILGPPPPSFHLGGPAVGPRGNLGAGNGNLQGPRHMQKGRVETSRVVHIMDFQRGKNLRYQLLQLVEPFGVISNHLILNKINEAFIEMATTEDAQAAVDYYTTTPALVFGKPVRVHLSQKYKRIKKPEGKPDQKFDQKQELGRVIHLSNLPHSGYSDSAVLKLAEPYGKIKNYILMRMKSQAFIEMETREDAMAMVDHCLKKALWFQGRCVKVDLSEKYKKLVLRIPNRGIDLLKKDKSRKRSYSPDGKESPSDKKSKTDGSQKTESSTEGKEQEEKSGEDGEKDTKDDQTEQEPNMLLESEDELLVDEEEAAALLESGSSVGDETDLANLGDVASDGKKEPSDKAVKKDGSASAAAKKKLKKVDKIEELDQENEAALENGIKNEENTEPGAESSENADDPNKDTSENADGQSDENKDDYTIPDEYRIGPYQPNVPVGIDYVIPKTGFYCKLCSLFYTNEEVAKNTHCSSLPHYQKLKKFLNKLAEERRQKKET

SEQ ID NO: 52717 - protein, 847 aa, Homo sapiens; identical to SEQ ID NO: 52716

SEQ ID NO: 52718 - protein, 99 aa, Homo sapiens
MSKSFQQSSLSRDSQGHGRDLSAAGIGLLAAATQSLSMPASLGRMNQGTARLASLMNLGMSSSLNQQGAHSALSSASTSSHNLQSIFNIGSRGPLPLSS

SEQ ID NO: 52719 - protein, 509 aa, Homo sapiens
MGDPFMLQQSTNPAPGILGPPPPSFHLGGPAVGPRGNLGAGNGNLQGPRHMQKGRVETSRVVHIMDFQRGKNLRYQLLQLVEPFGVISNHLILNKINEAFIEMATTEDAQAAVDYYTTTPALVFGKPVRVHLSQKYKRIKKPEGKPDQKFDQKQELGRVIHLSNLPHSGYSDSAVLKLAEPYGKIKNYILMRMKSQAFIEMETREDAMAMVDHCLKKALWFQGRCVKVDLSEKYKKLVLRIPNRGIDLLKKDKSRKRSYSPDGKESPSDKKSKTDGSQKTESSTEGKEQEEKSGEDGEKDTKDDQTEQEPNMLLESEDELLVDEEEAAALLESGSSVGDETDLANLGDVASDGKKEPSDKAVKKDGSASAAAKKKLKKVDKIEELDQENEAALENGIKNEENTEPGAESSENADDPNKDTSENADGQSDENKDDYTIPDEYRIGPYQPNVPVGIDYVIPKTGFYCKLCSLFYTNEEVAKNTHCSSLPHYQKLKKFLNKLAEERRQKKET

SEQ ID NO: 52720 - protein, 87 aa, Homo sapiens
MSKSFQQSSLSRDSQGHGRDLSAAGIGLLAAATQSLSMPASLGRMNQGTARLASLMNLGMSSSLNQQGAHSALSSASTSSHNLQSIF

SEQ ID NO: 52721 - protein, 559 aa, Homo sapiens
MLGAQWRRNQPSRAAEEWSQHINGASHSRRCQLLLEIYPEWNPDNDTGHTMGDPFMLQQSTNPAPGILGPPPPSFHLGGPAVGPRGNLGAGNGNLQGPRHMQKGRVETSRVVHIMDFQRGKNLRYQLLQLVEPFGVISNHLILNKINEAFIEMATTEDAQAAVDYYTTTPALVFGKPVRVHLSQKYKRIKKPEGKPDQKFDQKQELGRVIHLSNLPHSGYSDSAVLKLAEPYGKIKNYILMRMKSQAFIEMETREDAMAMVDHCLKKALWFQGRCVKVDLSEKYKKLVLRIPNRGIDLLKKDKSRKRSYSPDGKESPSDKKSKTDGSQKTESSTEGKEQEEKSGEDGEKDTKDDQTEQEPNMLLESEDELLVDEEEAAALLESGSSVGDETDLANLGDVASDGKKEPSDKAVKKDGSASAAAKKKLKKVDKIEELDQENEAALENGIKNEENTEPGAESSENADDPNKDTSENADGQSDENKDDYTIPDEYRIGPYQPNVPVGIDYVIPKTGFYCKLCSLFYTNEEVAKNTHCSSLPHYQKLKKFLNKLAEERRQKKET

SEQ ID NO: 52722 - protein, 78 aa, Homo sapiens
MSKSFQQSSLSRDSQGHGRDLSAAGIGLLAAATQSLSMPASLGRMNQGTARLASLMNLGMSSSLNQQGAHSALSSAST

SEQ ID NO: 52723 - protein, 433 aa, Homo sapiens
MSKSFQQSSLSRDSQGHGRDLSAAGIGLLAAATQSLSMPASLGRMNQGTARLASLMNLGMSSSLNQQGAHSALSSASTSSHNLQSIFNIGSRGPLPLSSQHRGDADQASNILASFGLSARDLDELSRYPEDKITPENLPQILLQLKRRRTEEGPTLSYGRDGRSATREPPYRVPRDDWEEKRHFRRDSFDDRGPSLNPVLDYDHGSRSQESGYYDRMDYEDDRLRDGERCRDDSFFGETSHNYHKFDSEYERMGRGPGPLQERSLFEKKRGAPPSSNIEDFHGLLPKGYPHLCSICDLPVHSNKEWSQHINGASHSRRCQLLLEIYPEWNPDNDTGHTMGDPFMLQQSTNPAPGILGPPPPSFHLGGPAVGPRGNLGAGNGNLQGPRHMQKGRVETSRVVHIMDFQRGKNLRYQLLQLVEPFGVISNHLILNK

SEQ ID NO: 52724 - protein, 509 aa, Homo sapiens; identical to SEQ ID NO: 52719

SEQ ID NO: 52725 - protein, 47 aa, Homo sapiens
MSKSFQQSSLSRDSQGHGRDLSAAGIGLLAAATQSLSMPASLGRMNQ

SEQ ID NO: 52726 - protein, 78 aa, Homo sapiens; identical to SEQ ID NO: 52722

SEQ ID NO: 52727 - protein, 847 aa, Homo sapiens; identical to SEQ ID NO: 52716

SEQ ID NO: 52728 - protein, 9 aa, Homo sapiens
MSKSFQQSS

SEQ ID NO: 52729 - protein, 100 aa, Homo sapiens
MSKSFQQSSLSRDSQGHGRDLSAAGIGLLAAATQSLSMPASLGRMNQGTARLASLMNLGMSSSLNQQGAHSALSSASTSSHNLQSIFNIGSRGPLPLSSQ

SEQ ID NO: 52730 - protein, 107 aa, Homo sapiens
MSKSFQQSSLSRDSQGHGRDLSAAGIGLLAAATQSLSMPASLGRMNQGTARLASLMNLGMSSSLNQQGAHSALSSASTSSHNLQSIFNIGSRGPLPLSSQHRGDADQ

SEQ ID NO: 52731 - protein, 525 aa, Homo sapiens
MRVFCVGLLLFSVTWAAPTFQPQTEKTKQSCVEEQRQEEKNKDNIGFHHLGKRINQELSSKENIVQERKKDLSLSEASENKGSSKSQNYFTNRQRLNKEYSISNKENTHNGLRMSIYPKSTGNKGFEDGDDAISKLHDQEEYGAALIRNNMQHIMGPVTAIKLLGEENKENTPRNVLNIIPASMNYAKAHSKDKKKPQRDSQAQKSPVKSKSTHRIQHNIDYLKHLSKVKKIPSDFEGSGYTDLQERGDNDISPFSGDGQPFKDIPGKGEATGPDLEGKDIQTGFAGPSEAESTHLDTKKPGYNEIPEREENGGNTIGTRDETAKEADAVDVSLVEGSNDIMGSTNFKELPGREGNRVDAGSQNAHQGKVEFHYPPAPSKEKRKEGSSDAAESTNYNEIPKNGKGSTRKGVDHSNRNQATLNEKQRFPSKGKSQGLPIPSRGLDNEIKNEMDSFNGPSHENIITHGRKYHYVPHRQNNSTRNKGMPQGKGSWGRQPHSNRRFSSRRRDDSSESSDSGSSSESDGD

SEQ ID NO: 52732 - protein, 525 aa, Homo sapiens; identical to SEQ ID NO: 52731

SEQ ID NO: 52733 - protein, 275 aa, Homo sapiens
MRVFCVGLLLFSVTWAAPTFQPQTEKTKQSCVEEQRQEEKNKDNIGFHHLGKRINQELSSKENIVQERKKDLSLSEASENKGSSKSQNYFTNRQRLNKEYSISNKENTHNGLRMSIYPKSTGNKGFEDGDDAISKLHDQEEYGAALIRNNMQHIMGPVTAIKLLGEENKENTPRNVLNIIPASMNYAKAHSKDKKKPQRDSQAQKSPVKSKSTHRIQHNIDYLKHLSKVKKIPSDFEGSGYTDLQERGDNDISPFSGTANLLRTFLVKEKLLVLT

SEQ ID NO: 52734 - protein, 412 aa, Homo sapiens
MSIYPKSTGNKGFEDGDDAISKLHDQEEYGAALIRNNMQHIMGPVTAIKLLGEENKENTPRNVLNIIPASMNYAKAHSKDKKKPQRDSQAQKSPVKSKSTHRIQHNIDYLKHLSKVKKIPSDFEGSGYTDLQERGDNDISPFSGDGQPFKDIPGKGEATGPDLEGKDIQTGFAGPSEAESTHLDTKKPGYNEIPEREENGGNTIGTRDETAKEADAVDVSLVEGSNDIMGSTNFKELPGREGNRVDAGSQNAHQGKVEFHYPPAPSKEKRKEGSSDAAESTNYNEIPKNGKGSTRKGVDHSNRNQATLNEKQRFPSKGKSQGLPIPSRGLDNEIKNEMDSFNGPSHENIITHGRKYHYVPHRQNNSTRNKGMPQGKGSWGRQPHSNRRFSSRRRDDSSESSDSGSSSESDGD

SEQ ID NO: 52735 - protein, 412 aa, Homo sapiens; identical to SEQ ID NO: 52734

SEQ ID NO: 52736 - protein, 103 aa, Homo sapiens
MKSLILLAILAALAVVTLCYESHESMESYELNPFINRRNANTFISPQQRWRAKVQERIRERSKPVHELNREACDDYRLCERYAMVYGYNAAYNRYFRKRRGTK

SEQ ID NO: 52737 - protein, 128 aa, Homo sapiens
MKSLILLAILAALAVVTLCYGEWQKEENFGFDIVSVLSLNWHRAQESHESMESYELNPFINRRNANTFISPQQRWRAKVQERIRERSKPVHELNREACDDYRLCERYAMVYGYNAAYNRYFRKRRGTK

SEQ ID NO: 52738 - protein, 582 aa, Homo sapiens
MSIETLLEAARFLEWQAQQQQRAREEQERLRLEQEREQEQKKANSLARLAHTLPVEEPRMEAPPLPLSPPAPPPAPPPPLATPAPLTVIPIPVVTNSPQPLPPPPPLPAAAQPLPLAPRQPALVGAPGLSIKEPAPLPSRPQVPTPAPLLPDSKATIPPNGSPKPLQPLPTPVLTIAPHPGVQPQLAPQQPPPPTLGTLKLAPAEEVKSSEQKKRPGGIGTREVHNKLEKNRRAHLKECFETLKRNIPNVDDKKTSNLSVLRTALRYIQSLKRKEKEYEHEMERLAREKIATQQRLAELKHELSQWMDVLEIDRVLRQTGQPEDDQASTSTASEGEDNIDEDMEEDRAGLGPPKLSHRPQPELLKSTLPPPSTTPAPLPPHPHPHPHSVALPPAHLPVQQQQPQQKTPLPAPPPPPAAPAQTLVPAPAHLVATAGGGSTVIAHTATTHASVIQTVNHVLQGPGGKHIAHIAPSAPSPAVQLAPATPPIGHITVHPATLNHVAHLGSQLPLYPQPVAVSHIAHTLSHQQVNGTAGLGPPATVMAKPAVGAQVVHHPQLVGQTVLNPVTMVTMPSFPVSTLKLA

SEQ ID NO: 52739 - protein, 582 aa, Homo sapiens; identical to SEQ ID NO: 52738

SEQ ID NO: 52740 - protein, 197 aa, Homo sapiens
MEPLASNIQVLLQAAEFLERREREAEHGYASLCPHRSPGPIHRRKKRPPQAPGAQDSGRWRAQLKRCLERLKQQMPLGADCARYTTLSLLRRARMHIQKLEDQEQRARQLKERLRSKQQSLQRQLEQLRGLAGAAERERLRADSLDSSGLSSERSDSDQEELEVDVESLVFGGEAELLRGFVAGQEHSYSHGGGAWL

SEQ ID NO: 52741 - protein, 388 aa, Homo sapiens
MEPLASNIQVLLQAAEFLERREREAEHGYASLCPHRSPGPIHRRKKRPPQAPGAQDSGRSVHNELEKRRRAQLKRCLERLKQQMPLGADCARYTTLSLLRRARMHIQKLEDQEQRARQLKERLRSKQQSLQRQLEQLRGLAGAAERERLRADSLDSSGLSSERSDSDQGECPEAEGLCGPRGEPGLLTGPLPAQRSWRWMWRAWCLGVRPSCCGASSPARSTATRTAAAPGYDVPHPGRASALYSCQAHLPGRSPPQAFRAARSHLLEWTKRTLVWEQVLPKHPAAGCQAGPLEGKGQDSSGPPWTPAGQAAWARAQAFGSAAPKGTGSLLGLFPSWTRPPAFASHKLYSIFIKSLFHNFPSIVLPNENGGTPNHRPTGRGNNISSHH

SEQ ID NO: 52742 - protein, 193 aa, Homo sapiens
MEPLASNIQVLLQAAEFLERREREAEHGYASLCPHRSPGPIHRRKKRPPQAPGAQDSGRSVHNELEKRRRAQLKRCLERLKQQMPLGADCARYTTLSLLRRARMHIQKLEDQEQRARQLKERLRSKQQSLQRQLEQLRGLAGAAERERLRADSLDSSGLSSERSDSDQVLPNENGGTPNHRPTGRGNNISSHH

SEQ ID NO: 52743 - protein, 206 aa, Homo sapiens
MEPLASNIQVLLQAAEFLERREREAEHGYASLCPHRSPGPIHRRKKRPPQAPGAQDSGRSVHNELEKRRRAQLKRCLERLKQQMPLGADCARYTTLSLLRRARMHIQKLEDQEQRARQLKERLRSKQQSLQRQLEQLRGLAGAAERERLRADSLDSSGLSSERSDSDQEELEVDVESLVFGGEAELLRGFVAGQEHSYSHGGGAWL

SEQ ID NO: 52744 - protein, 206 aa, Homo sapiens; identical to SEQ ID NO: 52743

SEQ ID NO: 52745 - protein, 3065 aa, Homo sapiens
MEEKQQIILANQDGGTVAGAAPTFFVILKQPGNGKTDQGILVTNQDACALASSVSSPVKSKGKICLPADCTVGGITVTLDNNSMWNEFYHRSTEMILTKQGRRMFPYCRYWITGLDSNLKYILVMDISPVDNHRYKWNGRWWEPSGKAEPHVLGRVFIHPESPSTGHYWMHQPVSFYKLKLTNNTLDQEGHIILHSMHRYLPRLHLVPAEKAVEVIQLNGPGVHTFTFPQTEFFAVTAYQNIQITQLKIDYNPFAKGFRDDGLNNKPQRDGKQKNSSDQEGNNISSSSGHRVRLTEGQGSEIQPGDLDPLSRGHETSGKGLEKTSLNIKRDFLGFMDTDSALSEVPQLKQEISECLIASSFEDDSRVASPLDQNGSFNVVIKEEPLDDYDYELGECPEGVTVKQEETDEETDVYSNSDDDPILEKQLKRHNKVDNPEADHLSSKWLPSSPSGVAKAKMFKLDTGKMPVVYLEPCAVTRSTVKISELPDNMLSTSRKDKSSMLAELEYLPTYIENSNETAFCLGKESENGLRKHSPDLRVVQKYPLLKEPQWKYPDISDSISTERILDDSKDSVGDSLSGKEDLGRKRTTMLKIATAAKVVNANQNASPNVPGKRGRPRKLKLCKAGRPPKNTGKSLISTKNTPVSPGSTFPDVKPDLEDVDGVLFVSFESKEALDIHAVDGTTEESSSLQASTTNDSGYRARISQLEKELIEDLKTLRHKQVIHPGLQEVGLKLNSVDPTMSIDLKYLGVQLPLAPATSFPFWNLTGTNPASPDAGFPFVSRTGKTNDFTKIKGWRGKFHSASASRNEGGNSESSLKNRSAFCSDKLDEYLENEGKLMETSMGFSSNAPTSPVVYQLPTKSTSYVRTLDSVLKKQSTISPSTSYSLKPHSVPPVSRKAKSQNRQATFSGRTKSSYKSILPYPVSPKQKYSHVILGDKVTKNSSGIISENQANNFVVPTLDENIFPKQISLRQAQQQQQQQQGSRPPGLSKSQVKLMDLEDCALWEGKPRTYITEERADVSLTTLLTAQASLKTKPIHTIIRKRAPPCNNDFCRLGCVCSSLALEKRQPAHCRRPDCMFGCTCLKRKVVLVKGGSKTKHFQRKAAHRDPVFYDTLGEEAREEEEGIREEEEQLKEKKKRKKLEYTICETEPEQPVRHYPLWVKVEGEVDPEPVYIPTPSVIEPMKPLLLPQPEVLSPTVKGKLLTGIKSPRSYTPKPNPVIREEDKDPVYLYFESMMTCARVRVYERKKEDQRQPSSSSSPSPSFQQQTSCHSSPENHNNAKEPDSEQQPLKQLTCDLEDDSDKLQEKSWKSSCNEGESSSTSYMHQRSPGGPTKLIEIISDCNWEEDRNKILSILSQHINSNMPQSLKVGSFIIELASQRKSRGEKNPPVYSSRVKISMPSCQDQDDMAEKSGSETPDGPLSPGKMEDISPVQTDALDSVRERLHGGKGLPFYAGLSPAGKLVAYKRKPSSSTSGLIQVASNAKVAASRKPRTLLPSTSNSKMASSSGTATNRPGKNLKAFVPAKRPIAARPSPGGVFTQFVMSKVGALQQKIPGVSTPQTLAGTQKFSIRPSPVMVVTPVVSSEPVQVCSPVTAAVTTTTPQVFLENTTAVTPMTAISDVETKETTYSSGATTTGVVEVSETNTSTSVTSTQSTATVNLTKTTGITTPVASVAFPKSLVASPSTITLPVASTASTSLVVVTAAASSSMVTTPTSSLGSVPIILSGINGSPPVSQRPENAAQIPVATPQVSPNTVKRAGPRLLLIPVQQGSPTLRPVSNTQLQGHRMVLQPVRSPSGMNLFRHPNGQIVQLLPLHQLRGSNTQPNLQPVMFRNPGSVMGIRLPAPSKPSETPPSSTSSSAFSVMNPVIQAVGSSSAVNVITQAPSLLSSGASFVSQAGTLTLRISPPEPQSFASKTGSETKITYSSGGQPVGTASLIPLQSGSFALLQLPGQKPVPSSILQHVASLQMKRESQNPDQKDETNSIKREQETKKVLQSEGEAVDPEANVIKQNSGAATSEETLNDSLEDRGDHLDEECLPEEGCATVKPSEHSCITGSHTDQDYKDVNEEYGARNRKSSKEKVAVLEVRTISEKASNKTVQNLSKVQHQKLGDVKVEQQKGFDNPEENSSEFPVTFKEESKFELSGSKVMEQQSNLQPEAKEKECGDSLEKDRERWRKHLKGPLTRKCVGASQECKKEADEQLIKETKTCQENSDVFQQEQGISDLLGKSGITEDARVLKTECDSWSRISNPSAFSIVPRRAAKSSRGNGHFQGHLLLPGEQIQPKQEKKGGRSSADFTVLDLEEDDEDDNEKTDDSIDEIVDVVSDYQSEEVDDVEKNNCVEYIEDDEEHVDIETVEELSEEINVAHLKTTAAHTQSFKQPSCTHISADEKAAERSRKAPPIPLKLKPDYWSDKLQKEAEAFAYYRRTHTANERRRRGEMRDLFEKLKITLGLLHSSKVSKSLILTRAFSEIQGLTDQADKLIGQKNLLTRKRNILIRKVSSLSGKTEEVVLKKLEYIYAKQQALEAQKRKKKMGSDEFDISPRISKQQEGSSASSVDLGQMFINNRRGKPLILSRKKDQATENTSPLNTPHTSANLVMTPQGQLLTLKGPLFSGPVVAVSPDLLESDLKPQVAGSAVALPENDDLFMMPRIVNVTSLATEGGLVDMGGSKYPHEVPDSKPSDHLKDTVRNEDNSLEDKGRISSRGNRDGRVTLGPTQVFLANKDSGYPQIVDVSNMQKAQEFLPKKISGDMRGIQYKWKESESRGERVKSKDSSFHKLKMKDLKDSSIEMELRKVTSAIEEAALDSSELLTNMEDEDDTDETLTSLLNEIAFLNQQLNDDSVGLAELPSSMDTEFPGDARRAFISKVPPGSRATFQVEHLGTGLKELPDVQGESDSISPLLLHLEDDDFSENEKQLAEPASEPDVLKIVIDSEIKDSLLSNKKAIDGGKNTSGLPAEPESVSSPPTLHMKTGLENSNSTDTLWRPMPKLAPLGLKVANPSSDADGQSLKVMPCLAPIAAKVGSVGHKMNLTGNDQEGRESKVMPTLAPVVAKLGNSGASPSSAGK

SEQ ID NO: 52746 - protein, 3026 aa, Homo sapiens
MEEKQQIILANQDGGTVAGAAPTFFVILKQPGNGKTDQGILVTNQDACALASSVSSPVKSKGKICLPADCTVGGITVTLDNNSMWNEFYHRSTEMILTKQGRRMFPYCRYWITGLDSNLKYILVMDISPVDNHRYKWNGRWWEPSGKAEPHVLGRVFIHPESPSTGHYWMHQPVSFYKLKLTNNTLDQEGHIILHSMHRYLPRLHLVPAEKAVEVIQLNGPGVHTFTFPQTEFFAVTAYQNIQITQLKIDYNPFAKGFRDDGLNNKPQRDGKQKNSSDQEGNNISSSSGHRVRLTEGQGSEIQPGDLDPLSRGHETSGKGLEKTSLNIKRDFLGFMDTDSALSEVPQLKQEISECLIASSFEDDSRVASPLDQNGSFNVVIKEEPLDDYDYELGECPEGVTVKQEETDEETDVYSNSDDDPILEKQLKRHNKVDNPEADHLSSKWLPSSPSGVAKAKMFKLDTGKMPVVYLEPCAVTRSTVKISELPDNMLSTSRKDKSSMLAELEYLPTYIENSNETAFCLGKESENGLRKHSPDLRVVQKYPLLKEPQWKYPDISDSISTERILDDSKDSVGDSLSGKEDLGRKRTTMLKIATAAKVVNANQNASPNVPGKRGRPRKLKLCKAGRPPKNTGKSLISTKNTPVSPGSTFPDVKPDLEDVDGVLFVSFESKEALDIHAVDGTTEESSSLQASTTNDSGYRARISQLEKELIEDLKTLRHKQVIHPGLQEVGLKLNSVDPTMSIDLKYLGVQLPLAPATSFPFWNLTGTNPASPDAGFPFVSRTGKTNDFTKIKGWRGKFHSASASRNEGGNSESSLKNRSAFCSDKLDEYLENEGKLMETSMGFSSNAPTSPVVYQLPTKSTSYVRTLDSVLKKQSTISPSTSYSLKPHSVPPVSRKAKSQNRQATFSGRTKSSYKSILPYPVSPKQKYSHVILGDKVTKNSSGIISENQANNFVVPTLDENIFPKQISLRQAQQQQQQQQGSRPPGLSKSQVKLMDLEDCALWEGKPRTYITEERADVSLTTLLTAQASLKTKPIHTIIRKRAPPCNNDFCRLGCVCSSLALEKRQPAHCRRPDCMFGCTCLKRKVVLVKGGSKTKHFQRKAAHRDPVFYDTLGEEAREEEEGIREEEEQLKEKKKRKKLEYTICETEPEQPVRHYPLWVKVEGEVDPEPVYIPTPSVIEPMKPLLLPQPEVLSPTVKGKLLTGIKSPRSYTPKPNPVIREEDKDPVYLYFESMMTCARVRVYERKKEDQRQPSSSSSPSPSFQQQTSCHSSPENHNNAKEPDSEQQPLKQLTCDLEDDSDKLQEKSWKSSCNEGESSSTSYMHQRSPGGPTKLIEIISDCNWEEDRNKILSILSQHINSNMPQSLKVGSFIIELASQRKSRGEKNPPVYSSRVKISMPSCQDQDDMAEKSGSETPDGPLSPGKMEDISPVQTDALDSVRERLHGGKGLPFYAGLSPAGKLVAYKRKPSSSTSGLIQVASNAKVAASRKPRTLLPSTSNSKMASSSGTATNRPGKNLKAFVPAKRPIAARPSPGGVFTQFVMSKVGALQQKIPGVSTPQTLAGTQKFSIRPSPVMVVTPVVSSEPVQVCSPVTAAVTTTTPQVFLENTTAVTPMTAISDVETKETTYSSGATTTGVVEVSETNTSTSVTSTQSTATVNLTKTTGITTPVASVAFPKSLVASPSTITLPVASTASTSLVVVTAAASSSMVTTPTSSLGSVPIILSGINGSPPVSQRPENAAQIPVATPQVSPNTVKRAGPRLLHPNGQIVQLLPLHQLRGSNTQPNLQPVMFRNPGSVMGIRLPAPSKPSETPPSSTSSSAFSVMNPVIQAVGSSSAVNVITQAPSLLSSGASFVSQAGTLTLRISPPEPQSFASKTGSETKITYSSGGQPVGTASLIPLQSGSFALLQLPGQKPVPSSILQHVASLQMKRESQNPDQKDETNSIKREQETKKVLQSEGEAVDPEANVIKQNSGAATSEETLNDSLEDRGDHLDEECLPEEGCATVKPSEHSCITGSHTDQDYKDVNEEYGARNRKSSKEKVAVLEVRTISEKASNKTVQNLSKVQHQKLGDVKVEQQKGFDNPEENSSEFPVTFKEESKFELSGSKVMEQQSNLQPEAKEKECGDSLEKDRERWRKHLKGPLTRKCVGASQECKKEADEQLIKETKTCQENSDVFQQEQGISDLLGKSGITEDARVLKTECDSWSRISNPSAFSIVPRRAAKSSRGNGHFQGHLLLPGEQIQPKQEKKGGRSSADFTVLDLEEDDEDDNEKTDDSIDEIVDVVSDYQSEEVDDVEKNNCVEYIEDDEEHVDIETVEELSEEINVAHLKTTAAHTQSFKQPSCTHISADEKAAERSRKAPPIPLKLKPDYWSDKLQKEAEAFAYYRRTHTANERRRRGEMRDLFEKLKITLGLLHSSKVSKSLILTRAFSEIQGLTDQADKLIGQKNLLTRKRNILIRKVSSLSGKTEEVVLKKLEYIYAKQQALEAQKRKKKMGSDEFDISPRISKQQEGSSASSVDLGQMFINNRRGKPLILSRKKDQATENTSPLNTPHTSANLVMTPQGQLLTLKGPLFSGPVVAVSPDLLESDLKPQVAGSAVALPENDDLFMMPRIVNVTSLATEGGLVDMGGSKYPHEVPDSKPSDHLKDTVRNEDNSLEDKGRISSRGNRDGRVTLGPTQVFLANKDSGYPQIVDVSNMQKAQEFLPKKISGDMRGIQYKWKESESRGERVKSKDSSFHKLKMKDLKDSSIEMELRKVTSAIEEAALDSSELLTNMEDEDDTDETLTSLLNEIAFLNQQLNDDSVGLAELPSSMDTEFPGDARRAFISKVPPGSRATFQVEHLGTGLKELPDVQGESDSISPLLLHLEDDDFSENEKQLAEPASEPDVLKIVIDSEIKDSLLSNKKAIDGGKNTSGLPAEPESVSSPPTLHMKTGLENSNSTDTLWRPMPKLAPLGLKVANPSSDADGQSLKVMPCLAPIAAKVGSVGHKMNLTGNDQEGRESKVMPTLAPVVAKLGNSGASPSSAGK

SEQ ID NO: 52747 - protein, 2856 aa, Homo sapiens
MEEKQQIILANQDGGTVAGAAPTFFVILKQPGNGKTDQGILVTNQDACALASSVSSPVKSKGKICLPADCTVGGITVTLDNNSMWNEFYHRSTEMILTKQGRRMFPYCRYWITGLDSNLKYILVMDISPVDNHRYKWNGRWWEPSGKAEPHVLGRVFIHPESPSTGHYWMHQPVSFYKLKLTNNTLDQEGHIILHSMHRYLPRLHLVPAEKAVEVIQLNGPGVHTFTFPQTEFFAVTAYQNIQITQLKIDYNPFAKGFRDDGLNNKPQRDGKQKNSSDQEGNNISSSSGHRVRLTEGQGSEIQPGDLDPLSRGHETSGKGLEKTSLNIKRDFLGFMDTDSALSEVPQLKQEISECLIASSFEDDSRVASPLDQNGSFNVVIKEEPLDDYDYELGECPEGVTVKQEETDEETDVYSNSDDDPILEKQLKRHNKVDNPEADHLSSKWLPSSPSGVAKAKMFKLDTGKMPVVYLEPCAVTRSTVKISELPDNMLSTSRKDKSSMLAELEYLPTYIENSNETAFCLGKESENGLRKHSPDLRVVQKYPLLKEPQWKYPDISDSISTERILDDSKDSVGDSLSGKEDLGRKRTTMLKIATAAKVVNANQNASPNVPGKRGRPRKLKLCKAGRPPKNTGKSLISTKNTPVSPGSTFPDVKPDLEDVDGVLFVSFESKEALDIHAVDGTTEESSSLQASTTNDSGYRARISQLEKELIEDLKTLRHKQVIHPGLQEVGLKLNSVDPTMSIDLKYLGVQLPLAPATSFPFWNLTGTNPASPDAGFPFVSRTGKTNDFTKIKGWRGKFHSASASRNEGGNSESSLKNRSAFCSDKLDEYLENEGKLMETSMGFSSNAPTSPVVYQLPTKSTSYVRTLDSVLKKQSTISPSTSYSLKPHSVPPVSRKAKSQNRQATFSGRTKSSYKSILPYPVSPKQKYSHVILGDKVTKNSSGIISENQANNFVVPTLDENIFPKQISLRQAQQQQQQQQGSRPPGLSKSQVKLMDLEDCALWEGKPRTYITEERADVSLTTLLTAQASLKTKPIHTIIRKRAPPCNNDFCRLGCVCSSLALEKRQPAHCRRPDCMFGCTCLKRKVVLVKGGSKTKHFQRKAAHRDPVFYDTLGEEAREEEEGIREEEEQLKEKKKRKKLEYTICETEPEQPVRHYPLWVKVEGEVDPEPVYIPTPSVIEPMKPLLLPQPEVLSPTVKGKLLTGIKSPRSYTPKPNPVIREEDKDPVYLYFESMMTCARVRVYERKKEDQRQPSSSSSPSPSFQQQTSCHSSPENHNNAKEPDSEQQPLKQLTCDLEDDSDKLQEKSWKSSCNEGESSSTSYMHQRSPGGPTKLIEIISDCNWEEDRNKILSILSQHINSNMPQSLKVGSFIIELASQRKSRGEKNPPVYSSRVKISMPSCQDQDDMAEKSGSETPDGPLSPGKMEDISPVQTDALDSVRERLHGGKGLPFYAGLSPAGKLVAYKRKPSSSTSGLIQVASNAKVAASRKPRTLLPSTSNSKMASSSGTATNRPGKNLKAFVPAKRPIENAAQIPVATPQVSPNTVKRAGPRLLLIPVQQGSPTLRPVSNTQLQGHRMVLQPVRSPSGMNLFRHPNGQIVQLLPLHQLRGSNTQPNLQPVMFRNPGSVMGIRLPAPSKPSETPPSSTSSSAFSVMNPVIQAVGSSSAVNVITQAPSLLSSGASFVSQAGTLTLRISPPEPQSFASKTGSETKITYSSGGQPVGTASLIPLQSGSFALLQLPGQKPVPSSILQHVASLQMKRESQNPDQKDETNSIKREQETKKVLQSEGEAVDPEANVIKQNSGAATSEETLNDSLEDRGDHLDEECLPEEGCATVKPSEHSCITGSHTDQDYKDVNEEYGARNRKSSKEKVAVLEVRTISEKASNKTVQNLSKVQHQKLGDVKVEQQKGFDNPEENSSEFPVTFKEESKFELSGSKVMEQQSNLQPEAKEKECGDSLEKDRERWRKHLKGPLTRKCVGASQECKKEADEQLIKETKTCQENSDVFQQEQGISDLLGKSGITEDARVLKTECDSWSRISNPSAFSIVPRRAAKSSRGNGHFQGHLLLPGEQIQPKQEKKGGRSSADFTVLDLEEDDEDDNEKTDDSIDEIVDVVSDYQSEEVDDVEKNNCVEYIEDDEEHVDIETVEELSEEINVAHLKTTAAHTQSFKQPSCTHISADEKAAERSRKAPPIPLKLKPDYWSDKLQKEAEAFAYYRRTHTANERRRRGEMRDLFEKLKITLGLLHSSKVSKSLILTRAFSEIQGLTDQADKLIGQKNLLTRKRNILIRKVSSLSGKTEEVVLKKLEYIYAKQQALEAQKRKKKMGSDEFDISPRISKQQEGSSASSVDLGQMFINNRRGKPLILSRKKDQATENTSPLNTPHTSANLVMTPQGQLLTLKGPLFSGPVVAVSPDLLESDLKPQVAGSAVALPENDDLFMMPRIVNVTSLATEGGLVDMGGSKYPHEVPDSKPSDHLKDTVRNEDNSLEDKGRISSRGNRDGRVTLGPTQVFLANKDSGYPQIVDVSNMQKAQEFLPKKISGDMRGIQYKWKESESRGERVKSKDSSFHKLKMKDLKDSSIEMELRKVTSAIEEAALDSSELLTNMEDEDDTDETLTSLLNEIAFLNQQLNDDSVGLAELPSSMDTEFPGDARRAFISKVPPGSRATFQVEHLGTGLKELPDVQGESDSISPLLLHLEDDDFSENEKQLAEPASEPDVLKIVIDSEIKDSLLSNKKAIDGGKNTSGLPAEPESVSSPPTLHMKTGLENSNSTDTLWRPMPKLAPLGLKVANPSSDADGQSLKVMPCLAPIAAKVGSVGHKMNLTGNDQEGRESKVMPTLAPVVAKLGNSGASPSSAGK

SEQ ID NO: 52748 - protein, 228 aa, Homo sapiens
MERVKMINVQRLLEAAEFLERRERECEHGYASSFPSMPSPRLQHSKPPRRLSRAQKHSSGSSNTSTANRSTHNELEKNRRAHLRLCLERLKVLIPLGPDCTRHTTLGLLNKAKAHIKKLEEAERKSQHQLENLEREQRFLKWRLEQLQGPQEMERIRMDSIGSTISSDRSDSEREEIEVDVESTEFSHGEVDNISTTSISDIDDHSSLPSIGSDEGYSSASVKLSFTS

SEQ ID NO: 52749 - protein, 295 aa, Homo sapiens
MGKRGRPRKEARCEGAGLAPAAPPAVPPAVAAPQPPALPEDPAGAKPRCPFSDIFNTSENSMEKHINTFLQNVQILLEAASYLEQIEKENKKCEHGYASSFPSMPSPRLQHSKPPRRLSRAQKHSSGSSNTSTANRSTHNELEKNRRAHLRLCLERLKVLIPLGPDCTRHTTLGLLNKAKAHIKKLEEAERKSQHQLENLEREQRFLKWRLEQLQGPQEMERIRMDSIGSTISSDRSDSEREEIEVDVESTEFSHGEVDNISTTSISDIDDHSSLPSIGSDEGYSSASVKLSFTS

SEQ ID NO: 52750 - protein, 182 aa, Homo sapiens
MPSPRLQHSKPPRRLSRAQKHSSGSSNTSTANRRAHLRLCLERLKVLIPLGPDCTRHTTLGLLNKAKAHIKKLEEAERKSQHQLENLEREQRFLKWRLEQLQGPQEMERIRMDSIGSTISSDRSDSEREEIEVDVESTEFSHGEVDNISTTSISDIDDHSSLPSIGSDEGYSSASVKLSFTS

SEQ ID NO: 52751 - protein, 192 aa, Homo sapiens
MPSPRLQHSKPPRRLSRAQKHSSGSSNTSTANRSTHNELEKNRRAHLRLCLERLKVLIPLGPDCTRHTTLGLLNKAKAHIKKLEEAERKSQHQLENLEREQRFLKWRLEQLQGPQEMERIRMDSIGSTISSDRSDSEREEIEVDVESTEFSHGEVDNISTTSISDIDDHSSLPSIGSDEGYSSASVKLSFTS

SEQ ID NO: 52752 - protein, 192 aa, Homo sapiens; identical to SEQ ID NO: 52751

SEQ ID NO: 52753 - protein, 192 aa, Homo sapiens; identical to SEQ ID NO: 52751

SEQ ID NO: 52754 - protein, 218 aa, Homo sapiens
MERVKMINVQRLLEAAEFLERRERECEHGYASSFPSMPSPRLQHSKPPRRLSRAQKHSSGSSNTSTANRRAHLRLCLERLKVLIPLGPDCTRHTTLGLLNKAKAHIKKLEEAERKSQHQLENLEREQRFLKWRLEQLQGPQEMERIRMDSIGSTISSDRSDSEREEIEVDVESTEFSHGEVDNISTTSISDIDDHSSLPSIGSDEGYSSASVKLSFTS

SEQ ID NO: 52755 - protein, 218 aa, Homo sapiens; identical to SEQ ID NO: 52754

SEQ ID NO: 52756 - protein, 118 aa, Homo sapiens
MPSPRLQHSKPPRRLSRAQKHSSGSSNTSTANRSTHNELEKNRRAHLRLCLERLKVLIPLGPDCTRHTTLGLLNKAKAHIKKLEEAERKSQHQLENLEREQRFLKWRLEQLQGPQEME

SEQ ID NO: 52757 - protein, 226 aa, Homo sapiens
MGKRGRPRKEARCEGAGLAPAAPPAVPPAVAAPQPPALPEDPAGAKPRCPFSDIFNTSENSMEKHINTFLQNVQILLEAASYLEQIEKENKKCEHGYASSFPSMPSPRLQHSKPPRRLSRAQKHSSGSSNTSTANRRAHLRLCLERLKVLIPLGPDCTRHTTLGLLNKAKAHIKKLEEAERKSQHQLENLEREQRFLKWRLEQLQGPQEMERIRMDSIGSTISSDR

SEQ ID NO: 52758 - protein, 298 aa, Homo sapiens
MTEPGASPEDPWVKASPVGAHAGEGRAGRARARRGAGRRGASLLSPKSPTLSVPRGCREDSSHPACAKVEYAYSDNSLDPGLFVESTRKGSVVSRANSIGSTSASSVPNTDDEDSDYHQEAYKESYKDRRRRAHTQAEQKRRDAIKRGYDDLQTIVPTCQQQDFSIGSQKLSKAIVLQKTIDYIQFLHKEKKKQEEEVSTLRKDVTALKIMKVNYEQIVKAHQDNPHEGEDQVSDQVKFNVFQGIMDSLFQSFNASISVASFQELSACVFSWIEEHCKPQTLREIVIGVLHQLKNQLY

SEQ ID NO: 52759 - protein, 214 aa, Homo sapiens
MTEPGASPEDPWVKVEYAYSDNSLDPDDEDSDYHQEAYKESYKDRRRRAHTQAEQKRRDAIKRGYDDLQTIVPTCQQQDFSIGSQKLSKAIVLQKTIDYIQFLHKEKKKQEEEVSTLRKDVTALKIMKVNYEQIVKAHQDNPHEGEDQVSDQVKFNVFQGIMDSLFQSFNASISVASFQELSACVFSWIEEHCKPQTLREIVIGVLHQLKNQLY

SEQ ID NO: 52760 - protein, 244 aa, Homo sapiens
MTEPGASPEDPWVKVEYAYSDNSLDPGLFVESTRKGSVVSRANSIGSTSASSVPNTDDEDSDYHQEAYKESYKDRRRRAHTQAEQKRRDAIKRGYDDLQTIVPTCQQQDFSIGSQKLSKAIVLQKTIDYIQFLHKEKKKQEEEVSTLRKDVTALKIMKVNYEQIVKAHQDNPHEGEDQVSDQVKFNVFQGIMDSLFQSFNASISVASFQELSACVFSWIEEHCKPQTLREIVIGVLHQLKNQLY

SEQ ID NO: 52761 - protein, 941 aa, Homo sapiens
MAEANPRRGKMRFRRNAASFPGNLHLVLVLRPTSFLQRTFTDIGFWFSQEDFMLKLPVVMLSSVSDLLTYIDDKQLTPELGGTLQYCHSEWIIFRNAIENFALTVKEMAQMLQSFGTELAETELPDDIPSIEEILAIRAERYHLLKNDITAVTKEGKILLTNLEVPDTEGAVSSRLECHRQISGDWQTINKLLTQVHDMETAFDGFWEKHQLKMEQYLQLWKFEQDFQQLVTEVEFLLNQQAELADVTGTIAQVKQKIKKLENLDENSQELLSKAQFVILHGHKLAANHHYALDLICQRCNELRYLSDILVNEIKAKRIQLSRTFKMHKLLQQARQCCDEGECLLANQEIDKFQSKEDAQKALQDIENFLEMALPFINYEPETLQYEFDVILSPELKVQMKTIQLKLENIRSIFENQQAGFRNLADKHVRPIQFVVPTPENLVTSGTPFFSSKQVGVGYSFFQACKLFSKGKKTWRQNQSNLKIEVVPDCQEKRSSGPSSSLDNGNSLDVLKNHVLNELIQTERVYVRELYTVLLGYRAEMDNPEMFDLMPPLLRNKKDILFGNMAEIYEFHNDIFLSSLENCAHAPERVGPCFLERKDDFQMYAKYCQNKPRSETIWRKYSECAFFQECQRKLKHRLRLDSYLLKPVQRITKYQLLLKELLKYSKDCEGSALLKKALDAMLDLLKSVNDSMHQIAINGYIGNLNELGKMIMQGGFSVWIGHKKGATKMKDLARFKPMQRHLFLYEKAIVFCKRRVESGEGSDRYPSYSFKHCWKMDEVGITEYVKGDNRKFEIWYGEKEEVYIVQASNVDVKMTWLKEIRNILLKQQELLTVKKRKQQDQLTERDKFQISLQQNDEKQQGAFISTEETELEHTSTVVEVCEAIASVQAEANTVWTEASQSAEISEEPAEWSSNYFYPTYDENEEENRPLMRPVSEMALLY

SEQ ID NO: 52762 - protein, 860 aa, Homo sapiens
MAEANPRRGKMRFRRNAASFPGNLHLVLVLRPTSFLQRTFTDIGFWFSQEDFMLKLPVVMLSSVSDLLTYIDDKQLTPELGGTLQYCHSEWIIFRNAIENFALTVKEMAQMLQSFGTELAETELPDDIPSIEEILAIRAERYHLLKNDITAVTKEGKILLTNLEVPDTEGAVSSRLECHRQISGDWQTINKLLTQVHDMETAFDGFWEKHQLKMEQYLQLWKFEQDFQQLVTEVEFLLNQQAELADVTGTIAQVKQKIKKLENLDENSQELLSKAQFVILHGHKLAANHHYALDLICQRCNELRYLSDILVNEIKAKRIQLSRTFKMHKLLQQARQCCDEGECLLANQEIDKFQSKEDAQKALQDIENFLEMALPFINYEPETLQYEFDVILSPELKVQMKTIQLKLENIRSIFENQQAGFRNLADKHVRPIQFVVPTPENLVTSGTPFFSSKQGKKTWRQNQSNLKIEVVPDCQEKRSSGPSSSLDNGNSLDVLKNHVLNELIQTERVYVRELYTVLLGYRAEMDNPEMFDLMPPLLRNKKDILFGNMAEIYEFHNDIFLSSLENCAHAPERVGPCFLERKDDFQMYAKYCQNKPRSETIWRKYSECAFFQECQRKLKHRLRLDSYLLKPVQRITKYQLLLKELLKYSKDCEGSALLKKALDAMLDLLKSVNDSMHQIAINGYIGNLNELGKMIMQGGFSVWIGHKKGATKMKDLARFKPMQRHLFLYEKAIVFCKRRVESGEGSDRYPSYSFKHCWKMDEVGITEYVKGDNRKFEIWYGEKEEVYIVQASNVDVKMTWLKEIRNILLKQQELLTVKKRKQQDQLTERDKFQISLQQNDEDLCRRWLSYIDEATMSNGK

SEQ ID NO: 52763 - protein, 925 aa, Homo sapiens
MAEANPRRGKMRFRRNAASFPGNLHLVLVLRPTSFLQRTFTDIGFWFSQEDFMLKLPVVMLSSVSDLLTYIDDKQLTPELGGTLQYCHSEWIIFRNAIENFALTVKEMAQMLQSFGTELAETELPDDIPSIEEILAIRAERYHLLKNDITAVTKEGKILLTNLEVPDTEGAVSSRLECHRQISGDWQTINKLLTQVHDMETAFDGFWEKHQLKMEQYLQLWKFEQDFQQLVTEVEFLLNQQAELADVTGTIAQVKQKIKKLENLDENSQELLSKAQFVILHGHKLAANHHYALDLICQRCNELRYLSDILVNEIKAKRIQLSRTFKMHKLLQQARQCCDEGECLLANQEIDKFQSKEDAQKALQDIENFLEMALPFINYEPETLQYEFDVILSPELKVQMKTIQLKLENIRSIFENQQAGFRNLADKHVRPIQFVVPTPENLVTSGTPFFSSKQGKKTWRQNQSNLKIEVVPDCQEKRSSGPSSSLDNGNSLDVLKNHVLNELIQTERVYVRELYTVLLGYRAEMDNPEMFDLMPPLLRNKKDILFGNMAEIYEFHNDIFLSSLENCAHAPERVGPCFLERKDDFQMYAKYCQNKPRSETIWRKYSECAFFQECQRKLKHRLRLDSYLLKPVQRITKYQLLLKELLKYSKDCEGSALLKKALDAMLDLLKSVNDSMHQIAINGYIGNLNELGKMIMQGGFSVWIGHKKGATKMKDLARFKPMQRHLFLYEKAIVFCKRRVESGEGSDRYPSYSFKHCWKMDEVGITEYVKGDNRKFEIWYGEKEEVYIVQASNVDVKMTWLKEIRNILLKQQELLTVKKRKQQDQLTERDKFQISLQQNDEKQQGAFISTEETELEHTSTVVEVCEAIASVQAEANTVWTEASQSAEISEEPAEWSSNYFYPTYDENEEENRPLMRPVSEMALLY

SEQ ID NO: 52764 - protein, 1070 aa, Homo sapiens
MPQAAASAPWTSVSCGRIPGLPQNPDGCTFMPIAQAIPLQVDMAMALQRVRIAEKYGKNYLCLLQAVFVAETDLLLRIKDISHFLMQDIAFLSGGRGKDNAWIITFPENCNFRCIPEEVIAKVLTYLTSIARQNGSDSRFTIILDRRLDTWSSLKISLQKISASFPGNLHLVLVLRPTSFLQRTFTDIGFWFSQEDFMLKLPVVMLSSVSDLLTYIDDKQLTPELGGTLQYCHSEWIIFRNAIENFALTVKEMAQMLQSFGTELAETELPDDIPSIEEILAIRAERYHLLKNDITAVTKEGKILLTNLEVPDTEGAVSSRLECHRQISGDWQTINKLLTQVHDMETAFDGFWEKHQLKMEQYLQLWKFEQDFQQLVTEVEFLLNQQAELADVTGTIAQVKQKIKKLENLDENSQELLSKAQFVILHGHKLAANHHYALDLICQRCNELRYLSDILVNEIKAKRIQLSRTFKMHKLLQQARQCCDEGECLLANQEIDKFQSKEDAQKALQDIENFLEMALPFINYEPETLQYEFDVILSPELKVQMKTIQLKLENIRSIFENQQAGFRNLADKHVRPIQFVVPTPENLVTSGTPFFSSKQGKKTWRQNQSNLKIEVVPDCQEKRSSGPSSSLDNGNSLDVLKNHVLNELIQTERVYVRELYTVLLGYRAEMDNPEMFDLMPPLLRNKKDILFGNMAEIYEFHNDIFLSSLENCAHAPERVGPCFLERKDDFQMYAKYCQNKPRSETIWRKYSECAFFQECQRKLKHRLRLDSYLLKPVQRITKYQLLLKELLKYSKDCEGSALLKKALDAMLDLLKSVNDSMHQIAINGYIGNLNELGKMIMQGGFSVWIGHKKGATKMKDLARFKPMQRHLFLYEKAIVFCKRRVESGEGSDRYPSYSFKHCWKMDEVGITEYVKGDNRKFEIWYGEKEEVYIVQASNVDVKMTWLKEIRNILLKQQELLTVKKRKQQDQLTERDKFQISLQQNDEKQQGAFISTEETELEHTSTVVEVCEAIASVQAEANTVWTEASQSAEISEEPAEWSSNYFYPTYDENEEENRPLMRPVSEMALLY

SEQ ID NO: 52765 - protein, 985 aa, Homo sapiens
MQDIAFLSGGRGKDNAWIITFPENCNFRCIPEEVIAKVLTYLTSIARQNGSDSRFTIILDRRLDTWSSLKISLQKISASFPGNLHLVLVLRPTSFLQRTFTDIGFWFSQEDFMLKLPVVMLSSVSDLLTYIDDKQLTPELGGTLQYCHSEWIIFRNAIENFALTVKEMAQMLQSFGTELAETELPDDIPSIEEILAIRAERYHLLKNDITAVTKEGKILLTNLEVPDTEGAVSSRLECHRQISGDWQTINKLLTQVHDMETAFDGFWEKHQLKMEQYLQLWKFEQDFQQLVTEVEFLLNQQAELADVTGTIAQVKQKIKKLENLDENSQELLSKAQFVILHGHKLAANHHYALDLICQRCNELRYLSDILVNEIKAKRIQLSRTFKMHKLLQQARQCCDEGECLLANQEIDKFQSKEDAQKALQDIENFLEMALPFINYEPETLQYEFDVILSPELKVQMKTIQLKLENIRSIFENQQAGFRNLADKHVRPIQFVVPTPENLVTSGTPFFSSKQGKKTWRQNQSNLKIEVVPDCQEKRSSGPSSSLDNGNSLDVLKNHVLNELIQTERVYVRELYTVLLGYRAEMDNPEMFDLMPPLLRNKKDILFGNMAEIYEFHNDIFLSSLENCAHAPERVGPCFLERKDDFQMYAKYCQNKPRSETIWRKYSECAFFQECQRKLKHRLRLDSYLLKPVQRITKYQLLLKELLKYSKDCEGSALLKKALDAMLDLLKSVNDSMHQIAINGYIGNLNELGKMIMQGGFSVWIGHKKGATKMKDLARFKPMQRHLFLYEKAIVFCKRRVESGEGSDRYPSYSFKHCWKMDEVGITEYVKGDNRKFEIWYGEKEEVYIVQASNVDVKMTWLKEIRNILLKQQELLTVKKRKQQDQLTERDKFQISLQQNDEKQQGAFISTEETELEHTSTVVEVCEAIASVQAEANTVWTEASQSAEISEEPAEWSSNYFYPTYDENEEENRPLMRPVSEMALLY

SEQ ID NO: 52766 - protein, 429 aa, Homo sapiens
  VARIANT 1: note = MOD_RES - Any amino acid
XHVLNELIQTERVYVRELYTVLLGYRAEMDNPEMFDLMPPLLRNKKDILFGNMAEIYEFHNDIFLSSLENCAHAPERVGPCFLERKDDFQMYAKYCQNKPRSETIWRKYSECAFFQECQRKLKHRLRLDSYLLKPVQRITKYQLLLKELLKYSKDCEGSALLKKALDAMLDLLKSVNDSMHQIAINGYIGNLNELGKMIMQGGFSVWIGHKKGATKMKDLARFKPMQRHLFLYEKAIVFCKRRVESGEGSDRYPSYSFKHCWKMDEVGITEYVKGDNRKFEIWYGEKEEVYIVQASNVDVKMTWLKEIRNILLKQQELLTVKKRKQQDQLTERDKFQISLQQNDEKQQGAFISTEETELEHTSTVVEVCEAIASVQAEANTVWTEASQSAEISEEPAEWSSNYFYPTYDENEEENRPLMRPVSEMALLY

SEQ ID NO: 52767 - protein, 528 aa, Homo sapiens
VQMKTIQLKLENIRSIFENQQAGFRNLADKHVRPIQFVVPTPENLVTSGTPFFSSKQGKKTWRQNQSNLKIEVVPDCQEKRSSGPSSSLDNGNSLDVLKNHVLNELIQTERVYVRELYTVLLGYRAEMDNPEMFDLMPPLLRNKKDILFGNMAEIYEFHNDIFLSSLENCAHAPERVGPCFLERKDDFQMYAKYCQNKPRSETIWRKYSECAFFQECQRKLKHRLRLDSYLLKPVQRITKYQLLLKELLKYSKDCEGSALLKKALDAMLDLLKSVNDSMHQIAINGYIGNLNELGKMIMQGGFSVWIGHKKGATKMKDLARFKPMQRHLFLYEKAIVFCKRRVESGEGSDRYPSYSFKHCWKMDEVGITEYVKGDNRKFEIWYGEKEEVYIVQASNVDVKMTWLKEIRNILLKQQELLTVKKRKQQDQLTERDKFQISLQQNDEKQQGAFISTEETELEHTSTVVEVCEAIASVQAEANTVWTEASQSAEISEEPAEWSSNYFYPTYDENEEENRPLMRPVSEMALLY

SEQ ID NO: 52768 - protein, 1001 aa, Homo sapiens
MQDIAFLSGGRGKDNAWIITFPENCNFRCIPEEVIAKVLTYLTSIARQNGSDSRFTIILDRRLDTWSSLKISLQKISASFPGNLHLVLVLRPTSFLQRTFTDIGFWFSQEDFMLKLPVVMLSSVSDLLTYIDDKQLTPELGGTLQYCHSEWIIFRNAIENFALTVKEMAQMLQSFGTELAETELPDDIPSIEEILAIRAERYHLLKNDITAVTKEGKILLTNLEVPDTEGAVSSRLECHRQISGDWQTINKLLTQVHDMETAFDGFWEKHQLKMEQYLQLWKFEQDFQQLVTEVEFLLNQQAELADVTGTIAQVKQKIKKLENLDENSQELLSKAQFVILHGHKLAANHHYALDLICQRCNELRYLSDILVNEIKAKRIQLSRTFKMHKLLQQARQCCDEGECLLANQEIDKFQSKEDAQKALQDIENFLEMALPFINYEPETLQYEFDVILSPELKVQMKTIQLKLENIRSIFENQQAGFRNLADKHVRPIQFVVPTPENLVTSGTPFFSSKQVGVGYSFFQACKLFSKGKKTWRQNQSNLKIEVVPDCQEKRSSGPSSSLDNGNSLDVLKNHVLNELIQTERVYVRELYTVLLGYRAEMDNPEMFDLMPPLLRNKKDILFGNMAEIYEFHNDIFLSSLENCAHAPERVGPCFLERKDDFQMYAKYCQNKPRSETIWRKYSECAFFQECQRKLKHRLRLDSYLLKPVQRITKYQLLLKELLKYSKDCEGSALLKKALDAMLDLLKSVNDSMHQIAINGYIGNLNELGKMIMQGGFSVWIGHKKGATKMKDLARFKPMQRHLFLYEKAIVFCKRRVESGEGSDRYPSYSFKHCWKMDEVGITEYVKGDNRKFEIWYGEKEEVYIVQASNVDVKMTWLKEIRNILLKQQELLTVKKRKQQDQLTERDKFQISLQQNDEKQQGAFISTEETELEHTSTVVEVCEAIASVQAEANTVWTEASQSAEISEEPAEWSSNYFYPTYDENEEENRPLMRPVSEMALLY

SEQ ID NO: 52769 - protein, 985 aa, Homo sapiens; identical to SEQ ID NO: 52765

SEQ ID NO: 52770 - protein, 821 aa, Homo sapiens
MAEANPRRGKMRFRRNAASFPGNLHLVLVLRPTSFLQRTFTDIGFWFSQEDFMLKLPAIENFALTVKEMAQMLQSFGTELAETELPDDIPSIEEILAIRAERYHLLKNDITAVTKEGKILLTNLEVPDTEGAVSSRLECHRQISGDWQTINKLLTQVHDMETAFDGFWEKHQLKMEQYLQLWKFEQDFQQLVTEVEFLLNQQAELADVTGTIAQVKQKIKKLENLDENSQELLSKAQFVILHGHKLAANHHYALDLICQRCNELRYLSDILVNEIKAKRIQLSRTFKMHKLLQQARQCCDEGECLLANQEIDKFQSKEDAQKALQDIENFLEMALPFINYEPETLQYEFDVILSPELKVQMKTIQLKLENIRSIFENQQAGFRNLADKHVRPIQFVVPTPENLVTSGTPFFSSKQGKKTWRQNQSNLKIEVVPDCQEKRSSGPSSSLDNGNSLDVLKNHVLNELIQTERVYVRELYTVLLGYRAEMDNPEMFDLMPPLLRNKKDILFGNMAEIYEFHNDIFLSSLENCAHAPERVGPCFLERKDDFQMYAKYCQNKPRSETIWRKYSECAFFQECQRKLKHRLRLDSYLLKPVQRITKYQLLLKELLKYSKDCEGSALLKKALDAMLDLLKSVNDSMHQIAINGYIGNLNELGKMIMQGGFSVWIGHKKGATKMKDLARFKPMQRHLFLYEKAIVFCKRRVESGEGSDRYPSYSFKHCWKMDEVGITEYVKGDNRKFEIWYGEKEEVYIVQASNVDVKMTWLKEIRNILLKQQELLTVKKRKQQDQLTERDKFQISLQQNDEDLCRRWLSYIDEATMSNGK

SEQ ID NO: 52771 - protein, 984 aa, Homo sapiens
MTVRRLSLLCRDLWALWLLLKAGADEIMHQDIVPLCAADIQDQLKKRFAYLSGGRGQDGSPVITFPDYPAFSEIPDKEFQNVMTYLTSIPSLQDAGIGFILVIDRRRDKWTSVKASVLRIAASFPANLQLVLVLRPTGFFQRTLSDIAFKFNRDDFKMKVPVIMLSSVPDLHGYIDKSQLTEDLGGTLDYCHSRWLCQRTAIESFALMVKQTAQMLQSFGTELAETELPNDVQSTSSVLCAHTEKKDKAKEDLRLALKEGHSVLESLRELQAEGSEPSVNQDQLDNQATVQRLLAQLNETEAAFDEFWAKHQQKLEQCLQLRHFEQGFREVKAILDAASQKIATFTDIGNSLAHVEHLLRDLASFEEKSGVAVERARALSLDGEQLIGNKHYAVDSIRPKCQELRHLCDQFSAEIARRRGLLSKSLELHRRLETSMKWCDEGIYLLASQPVDKCQSQDGAEAALQEIEKFLETGAENKIQELNAIYKEYESILNQDLMEHVRKVFQKQASMEEVFHRRQASLKKLAARQTRPVQPVAPRPEALAKSPCPSPGIRRGSENSSSEGGALRRGPYRRAKSEMSESRQGRGSAGEEEESLAILRRHVMSELLDTERAYVEELLCVLEGYAAEMDNPLMAHLLSTGLHNKKDVLFGNMEEIYHFHNRIFLRELENYTDCPELVGRCFLERMEDFQIYEKYCQNKPRSESLWRQCSDCPFFQECQRKLDHKLSLDSYLLKPVQRITKYQLLLKEMLKYSRNCEGAEDLQEALSSILGILKAVNDSMHLIAITGYDGNLGDLGKLLMQGSFSVWTDHKRGHTKVKELARFKPMQRHLFLHEKAVLFCKKREENGEGYEKAPSYSYKQSLNMAAVGITENVKGDAKKFEIWYNAREEVYIVQAPTPEIKAAWVNEIRKVLTSQLQACREASQHRALEQSQSLPLPAPTSTSPSRGNSRNIKKLEERKTDPLSLEGYVSSAPLTKPPEKGKEP

SEQ ID NO: 52772 - protein, 1129 aa, Homo sapiens
MAEKGASRGTLRRLWSLPRRRRGTAGRSRPDEIMHQDIVPLCAADIQDQLKKRFAYLSGGRGQDGSPVITFPDYPAFSEIPDKEFQNVMTYLTSIPSLQDAGIGFILVIDRRRDKWTSVKASVLRIAASFPANLQLVLVLRPTGFFQRTLSDIAFKFNRDDFKMKVPVIMLSSVPDLHGYIDKSQLTEDLGGTLDYCHSRWLCQRTAIESFALMVKQTAQMLQSFGTELAETELPNDVQSTSSVLCAHTEKKDKAKEDLRLALKEGHSVLESLRELQAEGSEPSVNQDQLDNQATVQRLLAQLNETEAAFDEFWAKHQQKLEQCLQLRHFEQGFREVKAILDAASQKIATFTDIGNSLAHVEHLLRDLASFEEKSGVAVERARALSLDGEQLIGNKHYAVDSIRPKCQELRHLCDQFSAEIARRRGLLSKSLELHRRLETSMKWCDEGIYLLASQPVDKCQSQDGAEAALQEIEKFLETGAENKIQELNAIYKEYESILNQDLMEHVRKVFQKQASMEEVFHRRQASLKKLAARQTRPVQPVAPRPEALAKSPCPSPGIRRGSENSSSEGGALRRGPYRRAKSEMSESRQGRGSAGEEEESLAILRRHVMSELLDTERAYVEELLCVLEGYAAEMDNPLMAHLLSTGLHNKKDVLFGNMEEIYHFHNRIFLRELENYTDCPELVGRCFLERMEDFQIYEKYCQNKPRSESLWRQCSDCPFFQECQRKLDHKLSLDSYLLKPVQRITKYQLLLKEMLKYSRNCEGAEDLQEALSSILGILKAVNDSMHLIAITGYDGNLGDLGKLLMQGSFSVWTDHKRGHTKVKELARFKPMQRHLFLHEKAVLFCKKREENGEGYEKAPSYSYKQSLNMAAVGITENVKGDAKKFEIWYNAREEVYIVQAPTPEIKAAWVNEIRKVLTSQLQACREASQHRALEQSQSLPLPAPTSTSPSRGNSRNIKKLEERKTDPLSLEGYVSSAPLTKPPEKGKGWSKTSHSLEAPEDDGGWSSAEEQINSSDAEEDGGLGPKKLVPGKYTVVADHEKGGPDALRVRSGDVVELVQEGDEGLWYVRDPTTGKEGWVPASSLSVRLGPSGSAQCLSSSESSPGSAVLSNSSSCSEGGQAPFSDLQG

SEQ ID NO: 52773 - protein, 1182 aa, Homo sapiens
MARVESPVPAARASLTGSCVLGQAMPLRGGAGPSPASHGPTHGPSDPRTCLPGRGAGGMRPHGRGALGCCGLCSFYTCHGAAGDEIMHQDIVPLCAADIQDQLKKRFAYLSGGRGQDGSPVITFPDYPAFSEIPDKEFQNVMTYLTSIPSLQDAGIGFILVIDRRRDKWTSVKASVLRIAASFPANLQLVLVLRPTGFFQRTLSDIAFKFNRDDFKMKVPVIMLSSVPDLHGYIDKSQLTEDLGGTLDYCHSRWLCQRTAIESFALMVKQTAQMLQSFGTELAETELPNDVQSTSSVLCAHTEKKDKAKEDLRLALKEGHSVLESLRELQAEGSEPSVNQDQLDNQATVQRLLAQLNETEAAFDEFWAKHQQKLEQCLQLRHFEQGFREVKAILDAASQKIATFTDIGNSLAHVEHLLRDLASFEEKSGVAVERARALSLDGEQLIGNKHYAVDSIRPKCQELRHLCDQFSAEIARRRGLLSKSLELHRRLETSMKWCDEGIYLLASQPVDKCQSQDGAEAALQEIEKFLETGAENKIQELNAIYKEYESILNQDLMEHVRKVFQKQASMEEVFHRRQASLKKLAARQTRPVQPVAPRPEALAKSPCPSPGIRRGSENSSSEGGALRRGPYRRAKSEMSESRQGRGSAGEEEESLAILRRHVMSELLDTERAYVEELLCVLEGYAAEMDNPLMAHLLSTGLHNKKDVLFGNMEEIYHFHNRIFLRELENYTDCPELVGRCFLERMEDFQIYEKYCQNKPRSESLWRQCSDCPFFQECQRKLDHKLSLDSYLLKPVQRITKYQLLLKEMLKYSRNCEGAEDLQEALSSILGILKAVNDSMHLIAITGYDGNLGDLGKLLMQGSFSVWTDHKRGHTKVKELARFKPMQRHLFLHEKAVLFCKKREENGEGYEKAPSYSYKQSLNMAAVGITENVKGDAKKFEIWYNAREEVYIVQAPTPEIKAAWVNEIRKVLTSQLQACREASQHRALEQSQSLPLPAPTSTSPSRGNSRNIKKLEERKTDPLSLEGYVSSAPLTKPPEKGKGWSKTSHSLEAPEDDGGWSSAEEQINSSDAEEDGGLGPKKLVPGKYTVVADHEKGGPDALRVRSGDVVELVQEGDEGLWYVRDPTTGKEGWVPASSLSVRLGPSGSAQCLSSSESSPGSAVLSNSSSCSEGGQAPFSDLQG

SEQ ID NO: 52774 - protein, 1137 aa, Homo sapiens
MFDCWRFILCKRPGSNSYSSPQRPNEAKKEETDHQIDVSDVIRLVQDTPEATAMATDEIMHQDIVPLCAADIQDQLKKRFAYLSGGRGQDGSPVITFPDYPAFSEIPDKEFQNVMTYLTSIPSLQDAGIGFILVIDRRRDKWTSVKASVLRIAASFPANLQLVLVLRPTGFFQRTLSDIAFKFNRDDFKMKVPVIMLSSVPDLHGYIDKSQLTEDLGGTLDYCHSRWLCQRTAIESFALMVKQTAQMLQSFGTELAETELPNDVQSTSSVLCAHTEKKDKAKEDLRLALKEGHSVLESLRELQAEGSEPSVNQDQLDNQATVQRLLAQLNETEAAFDEFWAKHQQKLEQCLQLRHFEQGFREVKAILDAASQKIATFTDIGNSLAHVEHLLRDLASFEEKSGVAVERARALSLDGEQLIGNKHYAVDSIRPKCQELRHLCDQFSAEIARRRGLLSKSLELHRRLETSMKWCDEGIYLLASQPVDKCQSQDGAEAALQEIEKFLETGAENKIQELNAIYKEYESILNQDLMEHVRKVFQKQASMEEVFHRRQASLKKLAARQTRPVQPVAPRPEALAKSPCPSPGIRRGSENSSSEGGALRRGPYRRAKSEMSESRQGRGSAGEEEESLAILRRHVMSELLDTERAYVEELLCVLEGYAAEMDNPLMAHLLSTGLHNKKDVLFGNMEEIYHFHNRIFLRELENYTDCPELVGRCFLERMEDFQIYEKYCQNKPRSESLWRQCSDCPFFQECQRKLDHKLSLDSYLLKPVQRITKYQLLLKEMLKYSRNCEGAEDLQEALSSILGILKAVNDSMHLIAITGYDGNLGDLGKLLMQGSFSVWTDHKRGHTKVKELARFKPMQRHLFLHEKAVLFCKKREENGEGYEKAPSYSYKQSLNMAAVGITENVKGDAKKFEIWYNAREEVYIVQAPTPEIKAAWVNEIRKVLTSQLQACREASQHRALEQSQSLPLPAPTSTSPSRGNSRNIKKLEERKTDPLSLEGYVSSAPLTKPPEKGKGWSKTSHSLEAPEDDGGWSSAEEQINSSDAEEDGGLGPKKLVPGKYTVVADHEKGGPDALRVRSGDVVELVQEGDEGLWYVRDPTTGKEGWVPASSLSVRLGPSGSAQCLSSSGKAHVPRAHP

SEQ ID NO: 52775 - protein, 793 aa, Homo sapiens
  VARIANT 1: note = MOD_RES - Any amino acid
XSQKIATFTDIGNSLAHVEHLLRDLASFEEKSGVAVERARALSLDGEQLIGNKHYAVDSIRPKCQELRHLCDQFSAEIARRRGLLSKSLELHRRLETSMKWCDEGIYLLASQPVDKCQSQDGAEAALQEIEKFLETGAENKIQELNAIYKEYESILNQDLMEHVRKVFQKQASMEEVFHRRQASLKKLAARQTRPVQPVAPRPEALAKSPCPSPGIRRGSENSSSEGGALRRGPYRRAKSEMSESRQGRGSAGEEEESLAILRRHVMSELLDTERAYVEELLCVLEGYAAEMDNPLMAHLLSTGLHNKKDVLFGNMEEIYHFHNRIFLRELENYTDCPELVGRCFLERMEDFQIYEKYCQNKPRSESLWRQCSDCPFFQECQRKLDHKLSLDSYLLKPVQRITKYQLLLKEMLKYSRNCEGAEDLQEALSSILGILKAVNDSMHLIAITGYDGNLGDLGKLLMQGSFSVWTDHKRGHTKVKELARFKPMQRHLFLHEKAVLFCKKREENGEGYEKAPSYSYKQSLNMAAVGITENVKGDAKKFEIWYNAREEVYIVQAPTPEIKAAWVNEIRKVLTSQLQACREASQHRALEQSQSLPLPAPTSTSPSRGNSRNIKKLEERKTDPLSLEGYVSSAPLTKPPEKGKASPTSPDKKAKRHEVKSDPTPFGVRGWSKTSHSLEAPEDDGGWSSAEEQINSSDAEEDGGLGPKKLVPGKYTVVADHEKGGPDALRVRSGDVVELVQEGDEGLWYVRDPTTGKEGWVPASSLSVRLGPSGSAQCLSSSGKAHVPRAHP

SEQ ID NO: 52776 - protein, 1096 aa, Homo sapiens
MPLRGGAGPSPASHGPTHGPSDPRTCLPGRGAGGMRPHGRGALGCCGLCSFYTCHGAAGDEIMHQDIVPLCAADIQDQLKKRFAYLSGGRGQDGSPVITFPDYPAFSEIPDKEFQNVMTYLTSIPSLQDAGIGFILVIDRRRDKWTSVKASVLRIAASFPANLQLVLVLRPTGFFQRTLSDIAFKFNRDDFKMKVPVIMLSSVPDLHGYIDKSQLTEDLGGTLDYCHSRWLCQRTAIESFALMVKQTAQMLQSFGTELAETELPNDVQSTSSVLCAHTEKKDKAKEDLRLALKEGHSVLESLRELQAEGSEPSVNQDQLDNQATVQRLLAQLNETEAAFDEFWAKHQQKLEQCLQLRHFEQGFREVKAILDAASQKIATFTDIGNSLAHVEHLLRDLASFEEKSGVAVERARALSLDGEQLIGNKHYAVDSIRPKCQELRHLCDQFSAEIARRRGLLSKSLELHRRLETSMKWCDEGIYLLASQPVDKCQSQDGAEAALQEIEKFLETGAENKIQELNAIYKEYESILNQDLMEHVRKVFQKQASMEEVFHRRQASLKKLAARQTRPVQPVAPRPEALAKSPCPSPGIRRGSENSSSEGGALRRGPYRRAKSEMSESRQGRGSAGEEEESLAILRRHVMSELLDTERAYVEELLCVLEGYAAEMDNPLMAHLLSTGLHNKKDVLFGNMEEIYHFHNRIFLRELENYTDCPELVGRCFLERMEDFQIYEKYCQNKPRSESLWRQCSDCPFFQECQRKLDHKLSLDSYLLKPVQRITKYQLLLKEMLKYSRNCEGAEDLQEALSSILGILKAVNDSMHLIAITGYDGNLGDLGKLLMQGSFSVWTDHKRGHTKVKELARFKPMQRHLFLHEKAVLFCKKREENGEGYEKAPSYSYKQSLNMAAVGITENVKGDAKKFEIWYNAREEVYIVQAPTPEIKAAWVNEIRKVLTSQLQACREASQHRALEQSQSLPLPAPTSTSPSRGNSRNIKKLEERKTDPLSLEGYVSSAPLTKPPEKGKGWSKTSHSLEAPEDDGGWSSAEEQINSSDAEEDGGLGPKKLVPGKYTVVADHEKGGPDALRVRSGDVVELVQEGDEGLW

SEQ ID NO: 52777 - protein, 136 aa, Homo sapiens
MHQDIVPLCAADIQDQLKKRFAYLSGGRGQDGSPVITFPDYPAFSEIPDKEFQNVMTYLTSIPSLQDAGIGFILVIDRRRDKWTSVKASVLRIAASFPANLQLVLVLRPTGFFQRTLSDIAFKFNRDDFKMKVPVI

SEQ ID NO: 52778 - protein, 1123 aa, Homo sapiens
MTVRRLSLLCRDLWALWLLLKAGADEIMHQDIVPLCAADIQDQLKKRFAYLSGGRGQDGSPVITFPDYPAFSEIPDKEFQNVMTYLTSIPSLQDAGIGFILVIDRRRDKWTSVKASVLRIAASFPANLQLVLVLRPTGFFQRTLSDIAFKFNRDDFKMKVPVIMLSSVPDLHGYIDKSQLTEDLGGTLDYCHSRWLCQRTAIESFALMVKQTAQMLQSFGTELAETELPNDVQSTSSVLCAHTEKKDKAKEDLRLALKEGHSVLESLRELQAEGSEPSVNQDQLDNQATVQRLLAQLNETEAAFDEFWAKHQQKLEQCLQLRHFEQGFREVKAILDAASQKIATFTDIGNSLAHVEHLLRDLASFEEKSGVAVERARALSLDGEQLIGNKHYAVDSIRPKCQELRHLCDQFSAEIARRRGLLSKSLELHRRLETSMKWCDEGIYLLASQPVDKCQSQDGAEAALQEIEKFLETGAENKIQELNAIYKEYESILNQDLMEHVRKVFQKQASMEEVFHRRQASLKKLAARQTRPVQPVAPRPEALAKSPCPSPGIRRGSENSSSEGGALRRGPYRRAKSEMSESRQGRGSAGEEEESLAILRRHVMSELLDTERAYVEELLCVLEGYAAEMDNPLMAHLLSTGLHNKKDVLFGNMEEIYHFHNRIFLRELENYTDCPELVGRCFLERMEDFQIYEKYCQNKPRSESLWRQCSDCPFFQECQRKLDHKLSLDSYLLKPVQRITKYQLLLKEMLKYSRNCEGAEDLQEALSSILGILKAVNDSMHLIAITGYDGNLGDLGKLLMQGSFSVWTDHKRGHTKVKELARFKPMQRHLFLHEKAVLFCKKREENGEGYEKAPSYSYKQSLNMAAVGITENVKGDAKKFEIWYNAREEVYIVQAPTPEIKAAWVNEIRKVLTSQLQACREASQHRALEQSQSLPLPAPTSTSPSRGNSRNIKKLEERKTDPLSLEGYVSSAPLTKPPEKGKGWSKTSHSLEAPEDDGGWSSAEEQINSSDAEEDGGLGPKKLVPGKYTVVADHEKGGPDALRVRSGDVVELVQEGDEGLWYVRDPTTGKEGWVPASSLSVRLGPSGSAQCLSSSESSPGSAVLSNSSSCSEGGQAPFSDLQG

SEQ ID NO: 52779 - protein, 246 aa, Homo sapiens
MRFWLRTEEMALEEMVQRLNAVSKHTDEIMHQDIVPLCAADIQDQLKKRFAYLSGGRGQDGSPVITFPDYPAFSEIPDKEFQNVMTYLTSIPSLQDAGIGFILVIDRRRDKWTSVKASVLRIAASFPANLQLVLVLRPTGFFQRTLSDIAFKFNRDDFKMKVPVIMLSSVPDLHGYIDKSQLTEDLGGTLDYCHSRWLCQRTAIESFALMVKQTAQMLQSFGTELAETELPNDVQSTSSVLCAHTE

SEQ ID NO: 52780 - protein, 1113 aa, Homo sapiens
MGDGKAVRISVAEMKSYYLYSEWCSWLLSVAEDEIMHQDIVPLCAADIQDQLKKRFAYLSGGRGQDGSPVITFPDYPAFSEIPDKEFQNVMTYLTSIPSLQDAGIGFILVIDRRRDKWTSVKASVLRIAASFPANLQLVLVLRPTGFFQRTLSDIAFKFNRDDFKMKVPVIMLSSVPDLHGYIDKSQLTEDLGGTLDYCHSRWLCQRTAIESFALMVKQTAQMLQSFGTELAETELPNDVQSTSSVLCAHTEKKDKAKEDLRLALKEGHSVLESLRELQAEGSEPSVNQDQLDNQATVQRLLAQLNETEAAFDEFWAKHQQKLEQCLQLRHFEQGFREVKAILDAASQKIATFTDIGNSLAHVEHLLRDLASFEEKSGVAVERARALSLDGEQLIGNKHYAVDSIRPKCQELRHLCDQFSAEIARRRGLLSKSLELHRRLETSMKWCDEGIYLLASQPVDKCQSQDGAEAALQEIEKFLETGAENKIQELNAIYKEYESILNQDLMEHVRKVFQKQASMEEVFHRRQASLKKLAARQTRPVQPVAPRPEALAKSPCPSPGIRRGSENSSSEGGALRRGPYRRAKSEMSESRQGRGSAGEEEESLAILRRHVMSELLDTERAYVEELLCVLEGYAAEMDNPLMAHLLSTGLHNKKDVLFGNMEEIYHFHNRIFLRELENYTDCPELVGRCFLERMEDFQIYEKYCQNKPRSESLWRQCSDCPFFQECQRKLDHKLSLDSYLLKPVQRITKYQLLLKEMLKYSRNCEGAEDLQEALSSILGILKAVNDSMHLIAITGYDGNLGDLGKLLMQGSFSVWTDHKRGHTKVKELARFKPMQRHLFLHEKAVLFCKKREENGEGYEKAPSYSYKQSLNMAAVGITENVKGDAKKFEIWYNAREEVYIVQAPTPEIKAAWVNEIRKVLTSQLQACREASQHRALEQSQSLPLPAPTSTSPSRGNSRNIKKLEERKTDPLSLEGYVSSAPLTKPPEKGKGWSKTSHSLEAPEDDGGWSSAEEQINSSDAEEDGGLGPKKLVPGKYTVVADHEKGGPDALRVRSGDVVELVQEGDEGLWYVRDPTTGKEGWVPASSLSVRLGPSGSAQCLSSSGKAHVPRAHP

SEQ ID NO: 52781 - protein, 903 aa, Homo sapiens
LKMPVIMLSSVPDLHGYIDKSQLTEDLGGTLDYCHSRWLCQRTAIESFALMVKQTAQMLQSFGTELAETELPNDVQSTSSVLCAHTEKKDKAKEDLRLALKEGHSVLESLRELQAEGSEPSVNQDQLDNQATVQRLLAQLNETEAAFDEFWAKHQQKLEQCLQLRHFEQGFREVKAILDAASQKIATFTDIGNSLAHVEHLLRDLASFEEKSGVAVERARALSLDGEQLIGNKHYAVDSIRPKCQELRHLCDQFSAEIARRRGLLSKSLELHRRLETSMKWCDEGIYLLASQPVDKCQSQDGAEAALQEIEKFLETGAENKIQELNAIYKEYESILNQDLMEHVRKVFQKQASMEEVFHRRQASLKKLAARQTRPVQPVAPRPEALAKSPCPSPGIRRGSENSSSEGGALRRGPYRRAKSEMSESRQGRGSAGEEEESLAILRRHVMSELLDTERAYVEELLCVLEGYAAEMDNPLMAHLLSTGLHNKKDVLFGNMEEIYHFHNRIFLRELENYTDCPELVGRCFLERMEDFQIYEKYCQNKPRSESLWRQCSDCPFFQECQRKLDHKLSLDSYLLKPVQRITKYQLLLKEMLKYSRNCEGAEDLQEALSSILGILKAVNDSMHLIAITGYDGNLGDLGKLLMQGSFSVWTDHKRGHTKVKELARFKPMQRHLFLHEKAVLFCKKREENGEGYEKAPSYSYKQSLNMAAVGITENVKGDAKKFEIWYNAREEVYIVQAPTPEIKAAWVNEIRKVLTSQLQACREASQHRALEQSQSLPLPAPTSTSPSRGNSRNIKKLEERKTDPLSLEGYVSSAPLTKPPEKGKGWSKTSHSLEAPEDDGGWSSAEEQINSSDAEEDGGLGPKKLVPGKYTVVADHEKGGPDALRVRSGDVVELVQEGDEGL

SEQ ID NO: 52782 - protein, 1137 aa, Homo sapiens; identical to SEQ ID NO: 52774

SEQ ID NO: 52783 - protein, 1125 aa, Homo sapiens
MRFWLRTEEMALEEMVQRLNAVSKHTDEIMHQDIVPLCAADIQDQLKKRFAYLSGGRGQDGSPVITFPDYPAFSEIPDKEFQNVMTYLTSIPSLQDAGIGFILVIDRRRDKWTSVKASVLRIAASFPANLQLVLVLRPTGFFQRTLSDIAFKFNRDDFKMKVPVIMLSSVPDLHGYIDKSQLTEDLGGTLDYCHSRWLCQRTAIESFALMVKQTAQMLQSFGTELAETELPNDVQSTSSVLCAHTEKKDKAKEDLRLALKEGHSVLESLRELQAEGSEPSVNQDQLDNQATVQRLLAQLNETEAAFDEFWAKHQQKLEQCLQLRHFEQGFREVKAILDAASQKIATFTDIGNSLAHVEHLLRDLASFEEKSGVAVERARALSLDGEQLIGNKHYAVDSIRPKCQELRHLCDQFSAEIARRRGLLSKSLELHRRLETSMKWCDEGIYLLASQPVDKCQSQDGAEAALQEIEKFLETGAENKIQELNAIYKEYESILNQDLMEHVRKVFQKQASMEEVFHRRQASLKKLAARQTRPVQPVAPRPEALAKSPCPSPGIRRGSENSSSEGGALRRGPYRRAKSEMSESRQGRGSAGEEEESLAILRRHVMSELLDTERAYVEELLCVLEGYAAEMDNPLMAHLLSTGLHNKKDVLFGNMEEIYHFHNRIFLRELENYTDCPELVGRCFLERMEDFQIYEKYCQNKPRSESLWRQCSDCPFFQECQRKLDHKLSLDSYLLKPVQRITKYQLLLKEMLKYSRNCEGAEDLQEALSSILGILKAVNDSMHLIAITGYDGNLGDLGKLLMQGSFSVWTDHKRGHTKVKELARFKPMQRHLFLHEKAVLFCKKREENGEGYEKAPSYSYKQSLNMAAVGITENVKGDAKKFEIWYNAREEVYIVQAPTPEIKAAWVNEIRKVLTSQLQACREASQHRALEQSQSLPLPAPTSTSPSRGNSRNIKKLEERKTDPLSLEGYVSSAPLTKPPEKGKGWSKTSHSLEAPEDDGGWSSAEEQINSSDAEEDGGLGPKKLVPGKYTVVADHEKGGPDALRVRSGDVVELVQEGDEGLWYVRDPTTGKEGWVPASSLSVRLGPSGSAQCLSSSESSPGSAVLSNSSSCSEGGQAPFSDLQG

SEQ ID NO: 52784 - protein, 570 aa, Homo sapiens
MSRLEAKKPSLCKSEPLTTERVRTTLSVLKRIVTSCYGPSGRLKQLHNGFGGYVCTTSQSSALLSHLLVTHPILKILTASIQNHVSSFSDCGLFTAILCCNLIENVQRLGLTPTTVIRLNKHLLSLCISYLKSETCGCRIPVDFSSTQILLCLVRSILTSKPACMLTRKETEHVSALILRAFLLTIPENAEGHIILGKSLIVPLKGQRVIDSTVLPGILIEMSEVQLMRLLPIKKSTALKVALFCTTLSGDTSDTGEGTVVVSYGVSLENAVLDQLLNLGRQLISDHVDLVLCQKVIHPSLKQFLNMHRIIAIDRIGVTLMEPLTKMTGTQPIGSLGSICPNSYGSVKDVCTAKFGSKHFFHLIPNEATICSLLLCNRNDTAWDELKLTCQTALHVLQLTLKEPWALLGGGCTETHLAAYIRHKTHNDPESILKDDECTQTELQLIAEAFCSALESVVGSLEHDGGEILTDMKYGHLWSVQADSPCVANWPDLLSQCGCGLYNSQEELNWSFLRSTRRPFVPQSCLPHEAVGSASNLTLDCLTAKLSGLQVAVETANLILDLSYVIEDKN

SEQ ID NO: 52785 - protein, 570 aa, Homo sapiens; identical to SEQ ID NO: 52784

SEQ ID NO: 52786 - protein, 714 aa, Homo sapiens
MPVRFKGLSEYQRNFLWKKSYLSESCNSSVGRKYPWAGLRSDQLGITKEPSFISKRRVPYHDPQISKSLEWNGAISESNVVASPEPEAPETPKSQEAEQKDVTQERVHSLEASRVPKRTRSHSADSRAEGASDVENNEGVTNHTPVNENVELEHSTKVLSENVDNGLDRLLRKKAGLTVVPSYNALRNSEYQRQFVWKTSKETAPAFAANQVFHNKSQFVPPFKGNSVIHETEYKRNFKGLSPVKEPKLRNDLRENRNLETVSPERKSNKIDDRLKLEAEMELKDLHQPKRKLTPWKHQRLGKVNSEYRAKFLSPAQYLYKAGAWTHVKGNMPNQVKELREKAEFYRKRVQGTHFSRDHLNQILSDSNCCWDVSSTTSSEGTVSSNIRALDLAGDPTSHKTLQKCPSTEPEEKGNIVEEQPQKNTTEKLGVSAPTIPVRRRLAWDTENTSEDVQKQPGEKEEEDDNEEEGDRKTGKQAFMGEQEKLDVREKSKADKMKEGSDSSVSSEKGGRLPTPKLRELGGIQRTHHDLTTPAVGGAVLVSPSKMKPPAPEQRKRMTSQDCLETSKNDFTKKESRAVSLLTSPAAGIKTVDPLPLREDSEDNIHKFAEATLPVSKIPKYPTNPPGQLPSPPHVPSYWHPSRRIQGSLRDPEFQHNVGKARMNNLQLPQHEAFNDEDEDRLSEISARSAASSLRAFQTLARAKKRKENFWGKT

SEQ ID NO: 52787 - protein, 69 aa, Homo sapiens
MPVRFKGLSEYQRNFLWKKSYLSESCNSSVGRKYPWAGLRSDQLGNQGRCRTKIQHSDISSLLILVCST

SEQ ID NO: 52788 - protein, 222 aa, Homo sapiens
MPVRFKGLSEYQRNFLWKKSYLSESCNSSVGRKYPWAGLRSDQLGITKEPSFISKRRVPYHDPQISKSLEWNGAISESNVVASPEPEAPETPKSQEAEQKDVTQERVHSLEASRVPKRTRSHSADSRAEGASDVENNEGVTNHTPVNENVELEHSTKVLSENVDNGVGIFTAFLFKSIEFFIGFIVISVILHFVFQNFPLLFSCLMSIRIVDNRLLTLVIVN

SEQ ID NO: 52789 - protein, 679 aa, Homo sapiens
MPVRFKGLSEYQRNFLWKKSYLSESCNSSVGRKYPWAGLRSDQLGITKEPSFISKRRVPYHDPQISKSLEWNGAISESNVVASPEPEAPETPKSQEAEQKDVTQERVHSLEASRVPKRTRSHSADSRAEGASDVENNEGVTNHTPVNENVELEHSTKVLSENVDNGVFHNKSQFVPPFKGNSVIHETEYKRNFKGLSPVKEPKLRNDLRENRNLETVSPERKSNKIDDRLKLEAEMELKDLHQPKRKLTPWKHQRLGKVNSEYRAKFLSPAQYLYKAGAWTHVKGNMPNQGSLNAMWYAEVKELREKAEFYRKRVQGTHFSRDHLNQILSDSNCCWDVSSTTSSEGTVSSNIRALDLAGDPTSHKTLQKCPSTEPEEKGNIVEEQPQKNTTEKLGVSAPTIPVRRRLAWDTENTSEDVQKQPGEKEEEDDNEEEGDRKTGKQAFMGEQEKLDVREKSKADKMKEGSDSSVSSEKGGRLPTPKLRELGGIQRTHHDLTTPAVGGAVLVSPSKMKPPAPEQRKRMTSQDCLETSKNDFTKKESRAVSLLTSPAAGIKTVDPLPLREDSEDNIHKFAEATLPVSKIPKYPTNPPGQLPSPPHVPSYWHPSRRIQGSLRDPEFQHNVGKARMNNLQLPQHEAFNDEDEDRLSEISARSAASSLRAFQTLARAKKRKENFWGKT

SEQ ID NO: 52790 - protein, 904 aa, Homo sapiens
MDRYLLLVIWGEGKFPSAASREAEHGPEVSSGEGTENQPDFTAANVYHLLKRSISASINPEDSTFPACSVGGIPGSKKWFFAVQAIYGFYQFCSSDWQEIHFDTEKDKIEDVLQTNIEECLGAVECFEEEDSNSRESLSLADLYEEAAENLHQLSDKLPAPGRAMVDIILLLSDKDPPKLKDYLPTVGALKHLREWYSAKITIAGNHCEINCQKIAEYLSANVVSLEDLRNVIDSKELWRGKIQIWERKFGFEISFPEFCLKGVTLKNFSTSNLNTDFLAKKIIPSKDKNILPKVFHYYGPALEFVQMIKLSDLPSCYMSDIEFELGLTNSTKQNSVLLLEQISSLCSKVGALFVLPCTISNILIPPPNQLSSRKWKEYIAKKPKTISVPDVEVKGECSSYYLLLQGNGNRRCKATLIHSANQINGSFALNLIHGKMKTKTEEAKLSFPFDLLSLPHFSGEQIVQREKQLANVQVLALEECLKRRKLAKQPETVSVAELKSLLVLTRKHFLDYFDAVIPKMILRKMDKIKTFNILNDFSPVEPNSSSLMETNPLEWPERHVLQNLETFEKTKQKMRTGSLPHSSEQLLGHKEGPRDSITLLDAKELLKYFTSDGLPIGDLQPLPIQKGEKTFVLTPELSPGKLQVLPFEKASVCHYHGIEYCLDDRKALERDGGFSELQSRLIRYETQTTCTRESFPVPTVLSPLPSPVVSSDPGSVPDGEVLQNELRTEVSRLKRRSKDLNCLYPRKRLVKSESSESLLSQTTGNSNHYHHHVTSRKPQTERSLPVTCPLVPIPSCETPKLATKTSSGQKSMHESKTSRQIKESRSQKHTRILKEVVTETLKKHSITETHECFTACSQRLFEISKFYLKDLKTSRGLFEEMKKTANNNAVQVIDWVLEKTSKK

SEQ ID NO: 52791 - protein, 457 aa, Homo sapiens
  VARIANT 1: note = MOD_RES - Any amino acid
XMAETVWSTDTGEAVYRSRDPVRNLRLRVHLQRITSSNFLHYQPAAELGKDLIDLATFRPQPTASGHRPEEDEEEEIVIGWQEKLFSQFEVDLYQNETACQSPLDYQYRQEILKLENSGGKKNRRIFTYTDSDRYTNLEEHCQRMTTAASEVPSFLVERMANVRRRRQDRRGMEGGILKSRIVTWEPSEEFVRNNHVINTPLQTMHIMADLGPYKKLGYKKYEHVLCTLKVDSNGVITVKPDFTGLKGPYRIETEGEKQELWKYTIDNVSPHAQPEEEERERRVFKDLYGRHKEYLSSLVGTDFEMTVPGALRLFVNGEVVSAQGYEYDNLYVHFFVELPTAHWSSPAFQQLSGVTQTCTTKSLAMDKVAHFSYPFTFEAFFLHEDESSDALPEWPVLYCEVLSLDFWQRYRVEGYGAVVLPATPGPSWNRAPFRKGCGVCWTVWKGSASRVPFTMC

SEQ ID NO: 52792 - protein, 521 aa, Homo sapiens
MAETVWSTDTGEAVYRSRDPVRNLRLRVHLQRITSSNFLHYQPAAELGKDLIDLATFRPQPTASGHRPEEDEEEEIVIGWQEKLFSQFEVDLYQNETACQSPLDYQYRQEILKLENSGGKKNRRIFTYTDSDRYTNLEEHCQRMTTAASEVPSFLVERMANVRRRRQDRRGMEGGILKSRIVTWEPSEEFVRNNHVINTPLQTMHIMADLGPYKKLGYKKYEHVLCTLKVDSNGVITVKPDFTGLKGPYRIETEGEKQELWKYTIDNVSPHAQPEEEERERRVFKDLYGRHKEYLSSLVGTDFEMTVPGALRLFVNGEVVSAQGYEYDNLYVHFFVELPTAHWSSPAFQQLSGVTQTCTTKSLAMDKVAHFSYPFTFEAFFLHEDESSDALPEWPVLYCEVLSLDFWQRYRVEGYGAVVLPATPGSHTLTVSTWRPVELGTVAELRRFFIGGSLELEDLSYVRIPGSFKALLSSSKTKEGRKVDGERVLNPQPVSLSLFPGKPHSTAWGLLRLRYELFLSK

SEQ ID NO: 52793 - protein, 559 aa, Homo sapiens
MAETVWSTDTGEAVYRSRDPVRNLRLRVHLQRITSSNFLHYQPAAELGKDLIDLATFRPQPTASGHRPEEDEEEEIVIGWQEKLFSQFEVDLYQNETACQSPLDYQYRQEILKLENSGGKKNRRIFTYTDSDRYTNLEEHCQRMTTAASEVPSFLVERMANVRRRRQDRRGMEGGILKSRIVTWEPSEEFVRNNHVINTPLQTMHIMADLGPYKKLGYKKYEHVLCTLKVDSNGVITVKPDFTGLKGPYRIETEGEKQELWKYTIDNVSPHAQPEEEERERRVFKDLYGRHKEYLSSLVGTDFEMTVPGALRLFVNGEVVSAQGYEYDNLYVHFFVELPTAHWSSPAFQQLSGVTQTCTTKSLAMDKVAHFSYPFTFEAFFLHEDESSDALPEWPVLYCEVLSLDFWQRYRVEGYGAVVLPATPGSHTLTVSTWRPVELGTVAELRRFFIGGSLELEDLSYVRIPGSFKGERLSRFGLRTETTGTVTFRLHCLQQSRAFMESSSLQKRMRSVLDRLEGFSQQSSIHNVLEAFRRARRRMQEARESLPQDLVSPSGTLVS

SEQ ID NO: 52794 - protein, 520 aa, Homo sapiens
MAETVWSTDTGEAVYRSRDPVRNLRLRVHLQRITSSNFLHYQPAAELGKDLIDLATFRPQPTASGHRPEEDEEEEIVIGWQEKLFSQFEVDLYQNETACQSPLDYQYRQEILKLENSGGKKNRRIFTYTDSDRYTNLEEHCQRMTTAASEVPSFLVERMANVRRRRQDRRGMEGGILKSRIVTWEPSEEFVRNNHVINTPLQTMHIMADLGPYKKLGYKKYEHVLCTLKVDSNGVITVKPDFTGLKGPYRIETEGEKQELWKYTIDNVSPHAQPEEEERERRVFKDLYGRHKEYLSSLVGTDFEMTVPGALRLFVNGEVVSAQGYEYDNLYVHFFVELPTAHWSSPAFQQLSGVTQTCTTKSLAMDKVAHFSYPFTFEAFFLHEDESSDALPEWPVLYCEVLSLDFWQRYRVEGYGAVVLPATPGSHTLTVSTWRPVELGTVAELRRFFIGGSLELEDLSYVRIPGSFKGLSSSKTKEGRKVDGERVLNPQPVSLSLFPGKPHSTAWGLLRLRYELFLSK

SEQ ID NO: 52795 - protein, 549 aa, Homo sapiens
MAVPVSSFAQRTRSRFRVHLQRITSSNFLHYQPAAELGKDLIDLATFRPQPTASGHRPEEDEEEEIVIGWQEKLFSQFEVDLYQNETACQSPLDYQYRQEILKLENSGGKKNRRIFTYTDSDRYTNLEEHCQRMTTAASEVPSFLVERMANVRRRRQDRRGMEGGILKSRIVTWEPSEEFVRNNHVINTPLQTMHIMADLGPYKKLGYKKYEHVLCTLKVDSNGVITVKPDFTGLKGPYRIETEGEKQELWKYTIDNVSPHAQPEEEERERRVFKDLYGRHKEYLSSLVGTDFEMTVPGALRLFVNGEVVSAQGYEYDNLYVHFFVELPTAHWSSPAFQQLSGVTQTCTTKSLAMDKVAHFSYPFTFEAFFLHEDESSDALPEWPVLYCEVLSLDFWQRYRVEGYGAVVLPATPGSHTLTVSTWRPVELGTVAELRRFFIGGSLELEDLSYVRIPGSFKGERLSRFGLRTETTGTVTFRLHCLQQSRAFMESSSLQKRMRSVLDRLEGFSQQSSIHNVLEAFRRARRRMQEARESLPQDLVSPSGTLVS

SEQ ID NO: 52796 - protein, 356 aa, Homo sapiens
MHIMADLGPYKKLGYKKYEHVLCTLKVDSNGVITVKPDFTGLKGPYRIETEGEKQELWKYTIDNVSPHAQPEEEERERRVFKDLYGRHKEYLSSLVGTDFEMTVPGALRLFVNGEVVSAQGYEYDNLYVHFFVELPTAHWSSPAFQQLSGVTQTCTTKSLAMDKVAHFSYPFTFEAFFLHEDESSDALPEWPVLYCEVLSLDFWQRYRVEGYGAVVLPATPGSHTLTVSTWRPVELGTVAELRRFFIGGSLELEDLSYVRIPGSFKGERLSRFGLRTETTGTVTFRLHCLQQSRAFMESSSLQKRMRSVLDRLEGFSQQSSIHNVLEAFRRARRRMQEARESLPQDLVSPSGTLVS

SEQ ID NO: 52797 - protein, 1581 aa, Homo sapiens
MKAQGETEESEKLSKMSSLLERLHAKFNQNRPWSETIKLVRQVMEKRVVMSSGGHQHLVSCLETLQKALKVTSLPAMTDRLESIARQNGLGSHLSASGTECYITSDMFYVEVQLDPAGQLCDVKVAHHGENPVSCPELVQQLREKNFDEFSKHLKGLVNLYNLPGDNKLKTKMYLALQSLEQDLSKMAIMYWKATNAGPLDKILHGSVGYLTPRSGGHLMNLKYYVSPSDLLDDKTASPIILHENNVSRSLGMNASVTIEGTSAVYKLPIAPLIMGSHPVDNKWTPSFSSITSANSVDLPACFFLKFPQPIPVSRAFVQKLQNCTGIPLFETQPTYAPLYELITQFELSKDPDPIPLNHNMRFYAALPGQQHCYFLNKDAPLPDGRSLQGTLVSKITFQHPGRVPLILNLIRHQVAYNTLIGSCVKRTILKEDSPGLLQFEVCPLSESRFSVSFQHPVNDSLVCVVMDVQDSTHVSCKLYKGLSDALICTDDFIAKVVQRCMSIPVTMRAIRRKAETIQADTPALSLIAETVEDMVKKNLPPASSPGYGMTTGNNPMSGTTTPTNTFPGGPITTLFNMSMSIKDRHESVGHGEDFSKVSQNPILTSLLQITGNGGSTIGSSPTPPHHTPPPVSSMAGNTKNHPMLMNLLKDNPAQDFSTLYGSSPLERQNSSSGSPRMEICSGSNKTKKKKSSRLPPEKPKHQTEDDFQRELFSMDVDSQNPIFDVNMTADTLDTPHITPAPSQCSTPPTTYPQPVPHPQPSIQRMVRLSSSDSIGPDVTDILSDIAEEASKLPSTSDDCPAIGTPLRDSSSSGHSQSTLFDSDVFQTNNNENPYTDPADLIADAAGSPSSDSPTNHFFHDGVDFNPDLLNSQSQSGFGEEYFDESSQSGDNDDFKGFASQALNTLGVPMLGGDNGETKFKGNNQADTVDFSIISVAGKALAPADLMEHHSGSQGPLLTTGDLGKEKTQKRVKEGNGTSNSTLSGPGLDSKPGKRSRTPSNDGKSKDKPPKRKKADTEGKSPSHSSSNRPFTPPTSTGGSKSPGSAGRSQTPPGVATPPIPKITIQIPKGTVMVGKPSSHSQYTSSGSVSSSGSKSHHSHSSSSSSSASTSGKMKSSKSEGSSSSKLSSSMYSSQGSSGSSQSKNSSQSGGKPGSSPITKHGLSSGSSSTKMKPQGKPSSLMNPSLSKPNISPSHSRPPGGSDKLASPMKPVPGTPPSSKAKSPISSGSGGSHMSGTSSSSGMKSSSGLGSSGSLSQKTPPSSNSCTASSSSFSSSGSSMSSSQNQHGSSKGKSPSRNKKPSLTAVIDKLKHGVVTSGPGGEDPLDGQMGVSTNSSSHPMSSKHNMSGGEFQGKREKSDKDKSKVSTSGSSVDSSKKTSESKNVGSTGVAKIIISKHDGGSPSIKAKVTLQKPGESSGEGLRPQMASSKNYGSPLISGSTPKHERGSPSHSKSPAYTPQNLDSESESGSSIAEKSYQNSPSSDDGIRPLPEYSTEKHKKHKKEKKKVKDKDRDRDRDKDRDKKKSHSIKPESWSKSPISSDQSLSMTSNTILSADRPSRLSPDFMIGEEDDDLMDVALIGN

SEQ ID NO: 52798 - protein, 556 aa, Homo sapiens
MKAQGETEESEKLSKMSSLLERLHAKFNQNRPWSETIKLVRQVMEKRVVMSSGGHQHLVSCLETLQKALKVTSLPAMTDRLESIARQNGLGSHLSASGTECYITSDMFYVEVQLDPAGQLCDVKVAHHGENPVSCPELVQQLREKNFDEFSKHLKGLVNLYNLPGDNKLKTKMYLALQSLEQDLSKMAIMYWKATNAGPLDKILHGSVGYLTPRSGGHLMNLKYYVSPSDLLDDKTASPIILHENNVSRSLGMNASVTIEGTSAVYKLPIAPLIMGSHPVDNKWTPSFSSITSANSVDLPACFFLKFPQPIPVSRAFVQKLQNCTGIPLFETQPTYAPLYELITQFELSKDPDPIPLNHNMRFYAALPGQQHCYFLNKDAPLPDGRSLQGTLVSKITFQHPGRVPLILNLIRHQVAYNTLIGSCVKRTILKEDSPGLLQFEVCPLSESRFSVSFQHPVNDSLVCVVMDVQDSTHVSCKLYKGLSDALICTDDFIAKVVQRCMSIPVTMRAIRRKAETIQADTPALSLIAETVEDMVKKNLPPASSPGSKNPELGSG

SEQ ID NO: 52799 - protein, 135 aa, Homo sapiens
MAEKFDHLEEHLEKFVENIRQLGIIVSDFQPSSQAGLNQKLNFIVTGLQDIDKCRQQLHDITVPLEVFEYIDQGRNPQLYTKECLERALAKNEQVKGKIDTMKKFKSLLIQELSKVFPEDMAKYRSIRGEDHPPS

SEQ ID NO: 52800 - protein, 117 aa, Homo sapiens
MATYSLANERLRALEDIEREIGAILQNAGTVILELSKEKTNERLLDRQAAAFTASVQHVEAELSAQIRYLTQVATGQPHEGSSYSSRKDCQMALKRVDYARLKLSDVARTCEQMLEN

SEQ ID NO: 52801 - protein, 2180 aa, Homo sapiens
MAAFGILSYEHRPLKRPRLGPPDVYPQDPKQKEDELTALNVKQGFNNQPAVSGDEHGSAKNVSFNPAKISSNFSSIIAEKLRCNTLPDTGRRKPQVNQKDNFWLVTARSQSAINTWFTDLAGTKPLTQLAKKVPIFSKKEEVFGYLAKYTVPVMRAAWLIKMTCAYYAAISETKVKKRHVDPFMEWTQIITKYLWEQLQKMAEYYRPGPAGSGGCGSTIGPLPHDVEVAIRQWDYTEKLAMFMFQDGMLDRHEFLTWVLECFEKIRPGEDELLKLLLPLLLRYSGEFVQSAYLSRRLAYFCTRRLALQLDGVSSHSSHVISAQSTSTLPTTPAPQPPTSSTPSTPFSDLLMCPQHRPLVFGLSCILQTILLCCPSALVWHYSLTDSRIKTGSPLDHLPIAPSNLPMPEGNSAFTQQVRAKLREIEQQIKERGQAVEVRWSFDKCQEATAGFTIGRVLHTLEVLDSHSFERSDFSNSLDSLCNRIFGLGPSKDGHEISSDDDAVVSLLCEWAVSCKRSGRHRAMVVAKLLEKRQAEIEAERCGESEAADEKGSIASGSLSAPSAPIFQDVLLQFLDTQAPMLTDPRSESERVEFFNLVLLFCELIRHDVFSHNMYTCTLISRGDLAFGAPGPRPPSPFDDPADDPEHKEAEGSSSSKLEDPGLSESMDIDPSSSVLFEDMEKPDFSLFSPTMPCEGKGSPSPEKPDVEKEVKPPPKEKIEGTLGVLYDQPRHVQYATHFPIPQEESCSHECNQRLVVLFGVGKQRDDARHAIKKITKDILKVLNRKGTAETDQLAPIVPLNPGDLTFLGGEDGQKRRRNRPEAFPTAEDIFAKFQHLSHYDQHQVTAQVSRNVLEQITSFALGMSYHLPLVQHVQFIFDLMEYSLSISGLIDFAIQLLNELSVVEAELLLKSSDLVGSYTTSLCLCIVAVLRHYHACLILNQDQMAQVFEGLCGVVKHGMNRSDGSSAERCILAYLYDLYTSCSHLKNKFGELFSDFCSKVKNTIYCNVEPSESNMRWAPEFMIDTLENPAAHTFTYTGLGKSLSENPANRYSFVCNALMHVCVGHHDPDRVNDIAILCAELTGYCKSLSAEWLGVLKALCCSSNNGTCGFNDLLCNVDVSDLSFHDSLATFVAILIARQCLLLEDLIRCAAIPSLLNAACSEQDSEPGARLTCRILLHLFKTPQLNPCQSDGNKPTVGIRSSCDRHLLAASQNRIVDGAVFAVLKAVFVLGDAELKGSGFTVTGGTEELPEEEGGGGSGGRRQGGRNISVETASLDVYAKYVLRSICQQEWVGERCLKSLCEDSNDLQDPVLSSAQAQRLMQLICYPHRLLDNEDGENPQRQRIKRILQNLDQWTMRQSSLELQLMIKQTPNNEMNSLLENIAKATIEVFQQSAETGSSSGSTASNMPSSSKTKPVLSSLERSGVWLVAPLIAKLPTSVQGHVLKAAGEELEKGQHLGSSSRKERDRQKQKSMSLLSQQPFLSLVLTCLKGQDEQREGLLTSLYSQVHQIVNNWRDDQYLDDCKPKQLMHEALKLRLNLVGGMFDTVQRSTQQTTEWAMLLLEIIISGTVDMQSNNELFTTVLDMLSVLINGTLAADMSSISQGSMEENKRAYMNLAKKLQKELGERQSDSLEKVRQLLPLPKQTRDVITCEPQGSLIDTKGNKIAGFDSIFKKEGLQVSTKQKISPWDLFEGLKPSAPLSWGWFGTVRVDRRVARGEEQQRLLLYHTHLRPRPRAYYLEPLPLPPEDEEPPAPTLLEPEKKAPEPPKTDKPGAAPPSTEERKKKSTKGKKRSQPATKTEDYGMGPGRSGPYGVTVPPDLLHHPNPGSITHLNYRQGSIGLYTQNQPLPAGGPRVDPYRPVRLPMQKLPTRPTYPGVLPTTMTGVMGLEPSSYKTSVYRQQQPAVPQGQRLRQQLQAKIQSQGMLGQSSVHQMTPSSSYGLQTSQGYTPYVSHVGLQQHTGPAGTMVPPSYSSQPYQSTHPSTNPTLVDPTRHLQQRPSGYVHQQAPTYGHGLTSTQRFSHQTLQQTPMISTMTPMSAQGVQAGVRSTAILPEQQQQQQQQQQQQQQQQQQQQQQQQQQYHIRQQQQQQILRQQQQQQQQQQQQQQQQQQQQQQQQQQHQQQQQQQAAPPQPQPQSQPQFQRQGLQQTQQQQQTAALVRQLQQQLSNTQPQPSTNIFGRY

SEQ ID NO: 52802 - protein, 2177 aa, Homo sapiens
MAAFGILSYEHRPLKRPRLGPPDVYPQDPKQKEDELTALNVKQGFNNQPAVSGDEHGSAKNVSFNPAKISSNFSSIIAEKLRCNTLPDTGRRKPQVNQKDNFWLVTARSQSAINTWFTDLAGTKPLTQLAKKVPIFSKKEEVFGYLAKYTVPVMRAAWLIKMTCAYYAAISETKVKKRHVDPFMEWTQIITKYLWEQLQKMAEYYRPGPAGSGGCGSTIGPLPHDVEVAIRQWDYTEKLAMFMFQDGMLDRHEFLTWVLECFEKIRPGEDELLKLLLPLLLRYSGEFVQSAYLSRRLAYFCTRRLALQLDGVSSHSSHVISAQSTSTLPTTPAPQPPTSSTPSTPFSDLLMCPQHRPLVFGLSCILQTILLCCPSALVWHYSLTDSRIKTGSPLDHLPIAPSNLPMPEGNSAFTQQVRAKLREIEQQIKERGQAVEVRWSFDKCQEATAGFTIGRVLHTLEVLDSHSFERSDFSNSLDSLCNRIFGLGPSKDGHEISSDDDAVVSLLCEWAVSCKRSGRHRAMVVAKLLEKRQAEIEAERCGESEAADEKGSIASGSLSAPSAPIFQDVLLQFLDTQAPMLTDPRSESERVEFFNLVLLFCELIRHDVFSHNMYTCTLISRGDLAFGAPGPRPPSPFDDPADDPEHKEAEGSSSSKLEDPGLSESMDIDPSSSVLFEDMEKPDFSLFSPTMPCEGKGSPSPEKPDVEKEVKPPPKEKIEGTLGVLYDQPRHVQYATHFPIPQEESCSHECNQRLVVLFGVGKQRDDARHAIKKITKDILKVLNRKGTAETDQLAPIVPLNPGDLTFLGGEDGQKRRRNRPEAFPTAEDIFAKFQHLSHYDQHQVTAQVSRNVLEQITSFALGMSYHLPLVQHVQFIFDLMEYSLSISGLIDFAIQLLNELSVVEAELLLKSSDLVGSYTTSLCLCIVAVLRHYHACLILNQDQMAQVFEGLCGVVKHGMNRSDGSSAERCILAYLYDLYTSCSHLKNKFGELFSDFCSKVKNTIYCNVEPSESNMRWAPEFMIDTLENPAAHTFTYTGLGKSLSENPANRYSFVCNALMHVCVGHHDPDRVNDIAILCAELTGYCKSLSAEWLGVLKALCCSSNNGTCGFNDLLCNVDVSDLSFHDSLATFVAILIARQCLLLEDLIRCAAIPSLLNAACSEQDSEPGARLTCRILLHLFKTPQLNPCQSDGNKPTVGIRSSCDRHLLAASQNRIVDGAVFAVLKAVFVLGDAELKGSGFTVTGGTEELPEEEGGGGSGGRRQGGRNISVETASLDVYAKYVLRSICQQEWVGERCLKSLCEDSNDLQDPVLSSAQAQRLMQLICYPHRLLDNEDGENPQRQRIKRILQNLDQWTMRQSSLELQLMIKQTPNNEMNSLLENIAKATIEVFQQSAETGSSSGSTASNMPSSSKTKPVLSSLERSGVWLVAPLIAKLPTSVQGHVLKAAGEELEKGQHLGSSSRKERDRQKQKSMSLLSQQPFLSLVLTCLKGQDEQREGLLTSLYSQVHQIVNNWRDDQYLDDCKPKQLMHEALKLRLNLVGGMFDTVQRSTQQTTEWAMLLLEIIISGTVDMQSNNELFTTVLDMLSVLINGTLAADMSSISQGSMEENKRAYMNLAKKLQKELGERQSDSLEKVRQLLPLPKQTRDVITCEPQGSLIDTKGNKIAGFDSIFKKEGLQVSTKQKISPWDLFEGLKPSAPLSWGWFGTVRVDRRVARGEEQQRLLLYHTHLRPRPRAYYLEPLPLPPEDEEPPAPTLLEPEKKAPEPPKTDKPGAAPPSTEERKKKSTKGKKRSQPATKTEDYGMGPGRSGPYGVTVPPDLLHHPNPGSITHLNYRQGSIGLYTQNQPLPAGGPRVDPYRPVRLPMQKLPTRPTYPGVLPTTMTGVMGLEPSSYKTSVYRQQQPAVPQGQRLRQQLQQSQGMLGQSSVHQMTPSSSYGLQTSQGYTPYVSHVGLQQHTGPAGTMVPPSYSSQPYQSTHPSTNPTLVDPTRHLQQRPSGYVHQQAPTYGHGLTSTQRFSHQTLQQTPMISTMTPMSAQGVQAGVRSTAILPEQQQQQQQQQQQQQQQQQQQQQQQQQQYHIRQQQQQQILRQQQQQQQQQQQQQQQQQQQQQQQQQQHQQQQQQQAAPPQPQPQSQPQFQRQGLQQTQQQQQTAALVRQLQQQLSNTQPQPSTNIFGRY

SEQ ID NO: 52803 - protein, 2176 aa, Homo sapiens
MAAFGILSYEHRPLKRPRLGPPDVYPQDPKQKEDELTALNVKQGFNNQPAVSGDEHGSAKNVSFNPAKISSNFSSIIAEKLRCNTLPDTGRRKPQVNQKDNFWLVTARSQSAINTWFTDLAGTKPLTQLAKKVPIFSKKEEVFGYLAKYTVPVMRAAWLIKMTCAYYAAISETKVKKRHVDPFMEWTQIITKYLWEQLQKMAEYYRPGPAGSGGCGSTIGPLPHDVEVAIRQWDYTEKLAMFMFQDGMLDRHEFLTWVLECFEKIRPGEDELLKLLLPLLLRYSGEFVQSAYLSRRLAYFCTRRLALQLDGVSSHSSHVISAQSTSTLPTTPAPQPPTSSTPSTPFSDLLMCPQHRPLVFGLSCILQTILLCCPSALVWHYSLTDSRIKTGSPLDHLPIAPSNLPMPEGNSAFTQQVRAKLREIEQQIKERGQAVEVRWSFDKCQEATAGFTIGRVLHTLEVLDSHSFERSDFSNSLDSLCNRIFGLGPSKDGHEISSDDDAVVSLLCEWAVSCKRSGRHRAMVVAKLLEKRQAEIEAERCGESEAADEKGSIASGSLSAPSAPIFQDVLLQFLDTQAPMLTDPRSESERVEFFNLVLLFCELIRHDVFSHNMYTCTLISRGDLAFGAPGPRPPSPFDDPADDPEHKEAEGSSSSKLEDPGLSESMDIDPSSSVLFEDMEKPDFSLFSPTMPCEGKGSPSPEKPDVEKEVKPPPKEKIEGTLGVLYDQPRHVQYATHFPIPQEESCSHECNQRLVVLFGVGKQRDDARHAIKKITKDILKVLNRKGTAETDQLAPIVPLNPGDLTFLGGEDGQKRRRNRPEAFPTAEDIFAKFQHLSHYDQHQVTAQVSRNVLEQITSFALGMSYHLPLVQHVQFIFDLMEYSLSISGLIDFAIQLLNELSVVEAELLLKSSDLVGSYTTSLCLCIVAVLRHYHACLILNQDQMAQVFEGLCGVVKHGMNRSDGSSAERCILAYLYDLYTSCSHLKNKFGELFSDFCSKVKNTIYCNVEPSESNMRWAPEFMIDTLENPAAHTFTYTGLGKSLSENPANRYSFVCNALMHVCVGHHDPDRVNDIAILCAELTGYCKSLSAEWLGVLKALCCSSNNGTCGFNDLLCNVDVSDLSFHDSLATFVAILIARQCLLLEDLIRCAAIPSLLNAACSEQDSEPGARLTCRILLHLFKTPQLNPCQSDGNKPTVGIRSSCDRHLLAASQNRIVDGAVFAVLKAVFVLGDAELKGSGFTVTGGTEELPEEEGGGGSGGRRQGGRNISVETASLDVYAKYVLRSICQQEWVGERCLKSLCEDSNDLQDPVLSSAQAQRLMQLICYPHRLLDNEDGENPQRQRIKRILQNLDQWTMRQSSLELQLMIKQTPNNEMNSLLENIAKATIEVFQQSAETGSSSGSTASNMPSSSKTKPVLSSLERSGVWLVAPLIAKLPTSVQGHVLKAAGEELEKGQHLGSSSRKERDRQKQKSMSLLSQQPFLSLVLTCLKGQDEQREGLLTSLYSQVHQIVNNWRDDQYLDDCKPKQLMHEALKLRLNLVGGMFDTVQRSTQQTTEWAMLLLEIIISGTVDMQSNNELFTTVLDMLSVLINGTLAADMSSISQGSMEENKRAYMNLAKKLQKELGERQSDSLEKVRQLLPLPKQTRDVITCEPQGSLIDTKGNKIAGFDSIFKKEGLQVSTKQKISPWDLFEGLKPSAPLSWGWFGTVRVDRRVARGEEQQRLLLYHTHLRPRPRAYYLEPLPLPPEDEEPPAPTLLEPEKKAPEPPKTDKPGAAPPSTEERKKKSTKGKKRSQPATKTEDYGMGPGRSGPYGVTVPPDLLHHPNPGSITHLNYRQGSIGLYTQNQPLPAGGPRVDPYRPVRLPMQKLPTRPTYPGVLPTTMTGVMGLEPSSYKTSVYRQQQPAVPQGQRLRQQLQSQGMLGQSSVHQMTPSSSYGLQTSQGYTPYVSHVGLQQHTGPAGTMVPPSYSSQPYQSTHPSTNPTLVDPTRHLQQRPSGYVHQQAPTYGHGLTSTQRFSHQTLQQTPMISTMTPMSAQGVQAGVRSTAILPEQQQQQQQQQQQQQQQQQQQQQQQQQQYHIRQQQQQQILRQQQQQQQQQQQQQQQQQQQQQQQQQQHQQQQQQQAAPPQPQPQSQPQFQRQGLQQTQQQQQTAALVRQLQQQLSNTQPQPSTNIFGRY

SEQ ID NO: 52804 - protein, 130 aa, Homo sapiens
  VARIANT 1: note = MOD_RES - Any amino acid
XTPNRRRKKQLNAAFLPQDELTALNVKQGFNNQPAVSGDEHGSAKNVSFNPAKISSNFSSIIAEKLRCNTLPDTGRRKPQVNQKDNFWLVTARSQSAINTWFTDLAGTKPLTQLAKKVPIFSKKEEVFGY

SEQ ID NO: 52805 - protein, 2127 aa, Homo sapiens
EDELTALNVKQGFNNQPAVSGDEHGSAKNVSFNPAKISSNFSSIIAEKLRCNTLPDTGRRKPQVNQKDNFWLVTARSQSAINTWFTDLAGTKPLTQLAKKVPIFSKKEEVFGYLAKYTVPVMRAAWLIKMTCAYYAAISETKVKKRHVDPFMEWTQIITKYLWEQLQKMAEYYRPGPAGSGGCGSTIGPLPHDVEVAIRQWDYTEKLAMFMFQDGMLDRHEFLTWVLECFEKIRPGEDELLKLLLPLLLRYSGEFVQSAYLSRRLAYFCTRRLALQLDGVSSHSSHVISAQSTSTLPTTPAPQPPTSSTPSTPFSDLLMCPQHRPLVFGLSCILQTILLCCPSALVWHYSLTDSRIKTGSPLDHLPIAPSNLPMPEGNSAFTQQVRAKLREIEQQIKERGQAVEVRWSFDKCQEATAGFTIGRVLHTLEVLDSHSFERSDFSNSLDSLCNRIFGLGPSKDGHEISSDDDAVVSLLCEWAVSCKRSGRHRAMVVAKLLEKRQAEIEAERCGESEAADEKGSIASGSLSAPSAPIFQDVLLQFLDTQAPMLTDPRSESERVEFFNLVLLFCELIRHDVFSHNMYTCTLISRGDLAFGAPGPRPPSPFDDPADDPEHKEAEGSSSSKLEDPGLSESMDIDPSSSVLFEDMEKPDFSLFSPTMPCEGKGSPSPEKPDVEKEVKPPPKEKIEGTLGVLYDQPRHVQYATHFPIPQEESCSHECNQRLVVLFGVGKQRDDARHAIKKITKDILKVLNRKGTAETDQLAPIVPLNPGDLTFLGGEDGQKRRRNRPEAFPTAEDIFAKFQHLSHYDQHQVTAQVSRNVLEQITSFALGMSYHLPLVQHVQFIFDLMEYSLSISGLIDFAIQLLNELSVVEAELLLKSSDLVGSYTTSLCLCIVAVLRHYHACLILNQDQMAQVFEGLCGVVKHGMNRSDGSSAERCILAYLYDLYTSCSHLKNKFGELFSDFCSKVKNTIYCNVEPSESNMRWAPEFMIDTLENPAAHTFTYTGLGKSLSENPANRYSFVCNALMHVCVGHHDPDRVNDIAILCAELTGYCKSLSAEWLGVLKALCCSSNNGTCGFNDLLCNVDVSDLSFHDSLATFVAILIARQCLLLEDLIRCAAIPSLLNAACSEQDSEPGARLTCRILLHLFKTPQLNPCQSDGNKPTVGIRSSCDRHLLAASQNRIVDGAVFAVLKAVFVLGDAELKGSGFTVTGGTEELPEEEGGGGSGGRRQGGRNISVETASLDVYAKYVLRSICQQEWVGERCLKSLCEDSNDLQDPVLSSAQAQRLMQLICYPHRLLDNEDGENPQRQRIKRILQNLDQWTMRQSSLELQLMIKQTPNNEMNSLLENIAKATIEVFQQSAETGSSSGSTASNMPSSSKTKPVLSSLERSGVWLVAPLIAKLPTSVQGHVLKAAGEELEKGQHLGSSSRKERDRQKQKSMSLLSQQPFLSLVLTCLKGQDEQREGLLTSLYSQVHQIVNNWRDDQYLDDCKPKQLMHEALKLRLNLVGGMFDTVQRSTQQTTEWAMLLLEIIISGTVDMQSNNELFTTVLDMLSVLINGTLAADMSSISQGSMEENKRAYMNLAKKLQKELGERQSDSLEKVRQLLPLPKQTRDVITCEPQGSLIDTKGNKIAGFDSIFKKEGLQVSTKQKISPWDLFEGLKPSAPLSWGWFGTVRVDRRVARGEEQQRLLLYHTHLRPRPRAYYLEPLPLPPEDEEPPAPTLLEPEKKAPEPPKTDKPGAAPPSTEERKKKSTKGKKRSQPATKTEDYGMGPGRSGPYGVTVPPDLLHHPNPGSITHLNYRQGSIGLYTQNQPLPAGGPRVDPYRPVRLPMQKLPTRPTYPGVLPTTMTGVMGLEPSSYKTSVYRQQQPAVPQGQRLRQQLQQSQGMLGQSSVHQMTPSSSYGLQTSQLSPSSLQGYTPYVSHVGLQQHTGPADPTRHLQQRPSGYVHQQAPTYGHGLTSTQRFSHQTLQQTPMISTMTPMSAQGVQAGVRSTAILPEQQQQQQQQQQQQQQQQQQQQQQQQQQYHIRQQQQQQILRQQQQQQQQQQQQQQQQQQQQQQQQQQHQQQQQQQAAPPQPQPQSQPQFQRQGLQQTQQQQQTAALVRQLQQQLSNTQPQPSTNIFGRY

SEQ ID NO: 52806 - protein, 925 aa, Homo sapiens
GGSGGRRQGGRNISVETASLDVYAKYVLRSICQQEWVGERCLKSLCEDSNDLQDPVLSSAQAQRLMQLICYPHRLLDNEDGENPQRQRIKRILQNLDQWTMRQSSLELQLMIKQTPNNEMNSLLENIAKATIEVFQQSAETGSSSGSTASNMPSSSKTKPVLSSLERSGVWLVAPLIAKLPTSVQGHVLKAAGEELEKGQHLGSSSRKERDRQKQKSMSLLSQQPFLSLVLTCLKGQDEQREGLLTSLYSQVHQIVNNWRDDQYLDDCKPKQLMHEALKLRLNLVGGMFDTVQRSTQQTTEWAMLLLEIIISGTVDMQSNNELFTTVLDMLSVLINGTLAADMSSISQGSMEENKRAYMNLAKKLQKELGERQSDSLEKVRQLLPLPKQTRDVITCEPQGSLIDTKGNKIAGFDSIFKKEGLQVSTKQKISPWDLFEGLKPSAPLSWGWFGTVRVDRRVARGEEQQRLLLYHTHLRPRPRAYYLEPLPLPPEDEEPPAPTLLEPEKKAPEPPKTDKPGAAPPSTEERKKKSTKGKKRSQPATKTEDYGMGPGRSGPYGVTVPPDLLHHPNPGSITHLNYRQGSIGLYTQNQPLPAGGPRVDPYRPVRLPMQKLPTRPTYPGVLPTTMTGVMGLEPSSYKTSVYRQQQPAVPQGQRLRQQLQAKIQSQGMLGQSSVHQMTPSSSYGLQTSQGYTPYVSHVGLQQHTGPAGTMVPPSYSSQPYQSTHPSTNPTLVDPTRHLQQRPSGYVHQQAPTYGHGLTSTQRFSHQTLQQTPMISTMTPMSAQGVQAGVRSTAILPEQQQQQQQQQQQQQQQQQQQQQQQQQQYHIRQQQQQQILRQQQQQQQQQQQQQQQQQQQQQQQQQQHQQQQQQQAAPPQPQPQSQPQFQRQGLQQTQQQQQTAALVRQLQQQLSNTQPQPSTNIFGRY

SEQ ID NO: 52807 - protein, 251 aa, Homo sapiens
  VARIANT 1: note = MOD_RES - Any amino acid
XERKKKSTKGKKRSQPATKTEDYGMGPGRSGPYGVTVPPDLLHHPNPGSITHLNYRQGSIGLYTQNQPLPAGGPRVDPYRPVRLPMQKLPTRPTYPGVLPTTMTGVMGLEPSSYKTSVYRQQQPAVPQGQRLRQQLQQSQGMLGQSSVHQMTPSSSYGLQTSQGYTPYVSHVGLQQHTGPADPTRHLQQRPSGYVHQQAPTYGHGLTSTQRFSHQTLQQTPMISTMTPMSAQGVQAGVRSTAILPEQQQQQ

SEQ ID NO: 52808 - protein, 2000 aa, Homo sapiens
MAAFGILSYEHRPLKRPRLGPPDVYPQDPKQKEDELTALNVKQGFNNQPAVSGDEHGSAKNVSFNPAKISSNFSSIIAEKLRCNTLPDTGRRKPQVNQKDNFWLVTARSQSAINTWFTDLAGTKPLTQLAKKVPIFSKKEEVFGYLAKYTVPVMRAAWLIKMTCAYYAAISETKVKKRHVDPFMEWTQIITKYLWEQLQKMAEYYRPGPAGSGGCGSTIGPLPHDVEVAIRQWDYTEKLAMFMFQDGMLDRHEFLTWVLECFEKIRPGEDELLKLLLPLLLRYSGEFVQSAYLSRRLAYFCTRRLALQLDGVSSHSSHVISAQSTSTLPTTPAPQPPTSSTPSTPFSDLLMCPQHRPLVFGLSCILQTILLCCPSALVWHYSLTDSRIKTGSPLDHLPIAPSNLPMPEGNSAFTQQVRAKLREIEQQIKERGQAVEVRWSFDKCQEATAGFTIGRVLHTLEVLDSHSFERSDFSNSLDSLCNRIFGLGPSKDGHEISSDDDAVVSLLCEWAVSCKRSGRHRAMVVAKLLEKRQAEIEAERCGESEAADEKGSIASGSLSAPSAPIFQDVLLQFLDTQAPMLTDPRSESERVEFFNLVLLFCELIRHDVFSHNMYTCTLISRGDLAFGAPGPRPPSPFDDPADDPEHKEAEGSSSSKLEDPGLSESMDIDPSSSVLFEDMEKPDFSLFSPTMPCEGKGSPSPEKPDVEKEVKPPPKEKIEGTLGVLYDQPRHVQYATHFPIPQEESCSHECNQRLVVLFGVGKQRDDARHAIKKITKDILKVLNRKGTAETDQLAPIVPLNPGDLTFLGGEDGQKRRRNRPEAFPTAEDIFAKFQHLSHYDQHQVTAQVSRNVLEQITSFALGMSYHLPLVQHVQFIFDLMEYSLSISGLIDFAIQLLNELSVVEAELLLKSSDLVGSYTTSLCLCIVAVLRHYHACLILNQDQMAQVFEGLCGVVKHGMNRSDGSSAERCILAYLYDLYTSCSHLKNKFGELFSDFCSKVKNTIYCNVEPSESNMRWAPEFMIDTLENPAAHTFTYTGLGKSLSENPANRYSFVCNALMHVCVGHHDPDRVNDIAILCAELTGYCKSLSAEWLGVLKALCCSSNNGTCGFNDLLCNVDVSDLSFHDSLATFVAILIARQCLLLEDLIRCAAIPSLLNAACSEQDSEPGARLTCRILLHLFKTPQLNPCQSDGNKPTVGIRSSCDRHLLAASQNRIVDGAVFAVLKAVFVLGDAELKGSGFTVTGGTEELPEEEGGGGSGGRRQGGRNISVETASLDVYAKYVLRSICQQEWVGERCLKSLCEDSNDLQDPVLSSAQAQRLMQLICYPHRLLDNEDGENPQRQRIKRILQNLDQWTMRQSSLELQLMIKQTPNNEMNSLLENIAKATIEVFQQSAETGSSSGSTASNMPSSSKTKPVLSSLERSGVWLVAPLIAKLPTSVQGHVLKAAGEELEKGQHLGSSSRKERDRQKQKSMSLLSQQPFLSLVLTCLKGQDEQREGLLTSLYSQVHQIVNNWRDDQYLDDCKPKQLMHEALKLRLNLVGGMFDTVQRSTQQTTEWAMLLLEIIISGTVDMQSNNELFTTVLDMLSVLINGTLAADMSSISQGSMEENKRAYMNLAKKLQKELGERQSDSLEKVRQLLPLPKQTRDVITCEPQGSLIDTKGNKIAGFDSIFKKEGLQVSTKQKISPWDLFEGLKPSAPLSWGWFGTVRVDRRVARGEEQQRLLLYHTHLRPRPRAYYLEPLPLPPEDEEPPAPTLLEPEKKAPEPPKTDKPGAAPPSTEERKKKSTKGKKRSQPATKTEDYGMGPGRSGPYGVTVPPDLLHHPNPGSITHLNYRQGSIGLYTQNQPLPAGGPRVDPYRPVRLPMQKLPTRPTYPGVLPTTMTGVMGLEPSSYKTSVYRQQQPAVPQGQRLRQQLQQSQGMLGQSSVHQMTPSSSYGLQTSQGYTPYVSHVGLQQHTGPADPTRHLQQRPSGYVHQQAPTYGHGLTSTQSFHTRHCSRHP

SEQ ID NO: 52809 - protein, 756 aa, Homo sapiens
MAAFGLLSYEQRPLKRPRLGPPDVYPQDPKQKEDELTAVNVKQGFNNQPAFTGDEHGSARNIVINPSKIGAYFSSILAEKLKLNTFQDTGKKKPQVNAKDNYWLVTARSQSAIHSWFSDLAGNKPLSILAKKVPILSKKEDVFAYLAKYSVPMVRATWLIKMTCAYYSAISEAKIKKRQAPDPNLEWTQISTRYLREQLAKISDFYHMASSTGDGPVPVPPEVEQAMKQWEYNEKLAFHMFQEGMLEKHEYLTWILDVLEKIRPMDDDLLKLLLPLMLQYSDEFVQSAYLSRRLAYFCARRLSLLLSDSPNLLAAHSPHMMIGPNNSSIGAPSPGPPGPGMSPVQLAFSDFLSCAQHGPLVYGLSCMLQTVTLCCPSALVWNYSTNENKSANPGSPLDLLQVAPSSLPMPGGNTAFNQQVRARIYEVEQQIKQRGRAVEVRWSFDKCQESTAGVTISRVLHTLEVLDRHCFDRTDSSNSMETLYHKIFWANQNKDNQEVAPNDEAVVTLLCEWAVSCKRSGKHRAMAVAKLLEKRQAEIEAERCGESEVLDEKESISSSSLAGSSLPVFQNVLLRFLDTQAPSLSDPNSECEKVEFVNLVLLFCEFIRHDVFSHDAYMCTLISRGDLSVTASTRPRSPVGENADEHYSKDHDVKMEEQSIMAHMGIDSGTTNIFDEVDKSDFKTDFGSEFPIFSPMPGESCENANTSLGRRMSVNCEKLVKREKPRELIFPSNYDLLRHLQYATHFPIPLVSHCFS

SEQ ID NO: 52810 - protein, 721 aa, Homo sapiens
MAAFGLLSYEQRPLKRPRLGPPDVYPQDPKQKEDELTAVNVKQGFNNQPAFTGDEHGSARNIVINPSKIGAYFSSILAEKLKLNTFQDTGKKKPQVNAKDNYWLVTARSQSAIHSWFSDLAGNKPLSILAKKVPILSKKEDVFAYLAKYSVPMVRATWLIKMTCAYYSAISEAKIKKRQAPDPNLEWTQISTRYLREQLAKISDFYHMASSTGDGPVPVPPEVEQAMKQWEYNEKLAFHMFQEGMLEKHEYLTWILDVLEKIRPMDDDLLKLLLPLMLQYSDEFVQSAYLSRRLAYFCARRLSLLLSDSPNLLAAHSPHMMIGPNNSSIGAPSPGPPGPGMSPVQLAFSDFLSCAQHGPLVYGLSCMLQTVTLCCPSALVWNYSTNENKSANPGSPLDLLQVAPSSLPMPGGNTAFNQQVRARIYEVEQQIKQRGRAVEVRWSFDKCQESTAGVTISRVLHTLEVLDRHCFDRTDSSNSMETLYHKIFWANQNKDNQEVAPNDEAVVTLLCEWAVSCKRSGKHRAMAVAKLLEKRQAEIEAERCGESEVLDEKESISSSSLAGSSLPVFQNVLLRFLDTQAPSLSDPNSECEKVEFVNLVLLFCEFIRHDVFSHDAYMCTLISRGDLSVTASTRPRSPVGENADEHYSKDHDVKMEIFSPMPGESCENANTSLGRRMSVNCEKLVKREKPRELIFPSNYDLLRHLQYATHFPIPLVSHCFS

SEQ ID NO: 52811 - protein, 2145 aa, Homo sapiens
MAAFGLLSYEQRPLKRPRLGPPDVYPQDPKQKEDELTAVNVKQGFNNQPAFTGDEHGSARNIVINPSKIGAYFSSILAEKLKLNTFQDTGKKKPQVNAKDNYWLVTARSQSAIHSWFSDLAGNKPLSILAKKVPILSKKEDVFAYLAKYSVPMVRATWLIKMTCAYYSAISEAKIKKRQAPDPNLEWTQISTRYLREQLAKISDFYHMASSTGDGPVPVPPEVEQAMKQWEYNEKLAFHMFQEGMLEKHEYLTWILDVLEKIRPMDDDLLKLLLPLMLQYSDEFVQSAYLSRRLAYFCARRLSLLLSDSPNLLAAHSPHMMIGPNNSSIGAPSPGPPGPGMSPVQLAFSDFLSCAQHGPLVYGLSCMLQTVTLCCPSALVWNYSTNENKSANPGSPLDLLQVAPSSLPMPGGNTAFNQQVRARIYEVEQQIKQRGRAVEVRWSFDKCQESTAGVTISRVLHTLEVLDRHCFDRTDSSNSMETLYHKIFWANQNKDNQEVAPNDEAVVTLLCEWAVSCKRSGKHRAMAVAKLLEKRQAEIEAERCGESEVLDEKESISSSSLAGSSLPVFQNVLLRFLDTQAPSLSDPNSECEKVEFVNLVLLFCEFIRHDVFSHDAYMCTLISRGDLSVTASTRPRSPVGENADEHYSKDHDVKMEIFSPMPGESCENANTSLGRRMSVNCEKLVKREKPRELIFPSNYDLLRHLQYATHFPIPLDESSSHECNQRTILLYGVGKERDEARHQLKKITKDILKILNKKSTTETGVGDEGQKARKNKQETFPTLETVFTKLQLLSYFDQHQVTSQISNNVLEQITSFASGTSYHLPLAHHIQLIFDLMEPALNINGLIDFAIQLLNELSVVEAELLLKSSSLAGSYTTGLCVCIVAVLRRYHSCLILNPDQTAQVFEGLCGVVKHVVNPSECSSPERCILAYLYDLYVSCSHLRSKFGDLFSSACSKVKQTIYNNVMPANSNLRWDPDFMMDFIENPSARSINYSMLGKILSDNAANRYSFVCNTLMNVCMGHQDAGRINDIANFSSELTACCTVLSSEWLGVLKALCCSSNHVWGFNDVLCTVDVSDLSFHDSLATFIAILIARQCFSLEDVVQHVALPSLLAAACGDADAEPGARMTCRLLLHLFRAPQACFLPQATGKPFPGIRSSCDRHLLAAAHNSIEVGAVFAVLKAIMMLGDAKIGNNSVSSLKNDDFTMRGLRCDGNADDIWTASQNPKSCGKSISIETANLREYARYVLRTICQQEWVGEHCLKEPERLCTDKELILDPVLSNMQAQKLLQLICYPHGIKECTEGDNLQRQHIKRILQNLEQWTLRQSWLELQLMIKQCLKDPGSGSVAEMNNLLDNIAKATIEVFQQSADLNNSSNSGMSLFNPNSIGSADTSSTRQNGIKTFLSSSERRGVWLVAPLIARLPTSVQGRVLKAAGEELEKGQHLGSSSKKERDRQKQKSMSLLSQQPFLSLVLTCLKGQDEQREGLLTSLQNQVNQILSNWREERYQDDIKARQMMHEALQLRLNLVGGMFDTVQRSTQWTTDWALLLLQIITSGTVDMHTNNELFTTVLDMLGVLINGTLASDLSNASPGGSEENKRAYMNLVKKLKKELGDKRSESIDKVRQLLPLPKQTCDVITCEPMGSLIDTKGNKIAGFDSIDKKQGLQVSTKQKVSPWDLFEGQKNPAPLSWAWFGTVRVDRRVIKYEEQHHLLLYHTHPMPKPRSYYLQPLPLPPEEEEEEPTSPVSQEPERKSAELSDQGKTTTDEEKKTKGRKRKTKSSSRVDEYPQSNIYRVPPNYSPISSQMMHHPQSTLWGYNLVGQPQQPGFFLQNQSLTPGGSRLDPAGSFVPTNTKQALSNMLQRRSGAMMQPPSLHAITSQQQLIQMKLLQQQQQQRLLRQAQTRPFQQGQPGDQAALFAAQARPSPQLPQYPGLQQAQTMPQGYTMYGTQMPLQQTSQQQAGSVVLSPSYNSRAYPAAHSNPVLMERLRQIQQQPSGYVQQQASPYLQPLTGSQRLNHQALQQSPLVGGGIDAVLTSAHPNLPSVPLPQDPMRPRQPQVRQQQRLLQMQQPQQPQPQQPPQPQQSSQSQSQTLGLQAMQPQQPLFPRQGLQQTQQQQQTAALVRQLQKQLSSNQPQQGVTPYGHPSHF

SEQ ID NO: 52812 - protein, 2173 aa, Homo sapiens
MSASFVPNGASLEDCHCNLFCLADLTGIKWKKYVWQGPTSAPILFPVTEEDPILSSFSRCLKADVLGVWRRDQRPGRRELWIFWWGEDPVLLTLFTMTYQKKKMECGRMDFPMNAVLCFQAVHNLLERCLMNRNFVRIGKWFVKPYEKDEKPINKSEHLSCSFTFFLHGDSNVCTSVEINQHQPVYLLSEEHITLAQQSNSPFQVILCPFGLNGTLTGQAFKMSDSATKKLIGEWKQFYPISCCLKEMSEEKQEDMDWEDDSLAAVEVLVAGVRMIYPACFVLVPQSDIPTPSPVGSTHCSSSCLGVHQVPASTRDPAMSSVTLTPPTSPEEVQTVDPQSVQKWVKFSSVSDGFNSDSTSHHGGKIPRKLANHVVDRVWQECNMNRAQNKRKYSASSGGLCEEATAAKVASWDFVEATQRTNCSCLRHKNLKSRNAGQQGQAPSLGQQQQILPKHKTNEKQEKSEKPQKRPLTPFHHRVSVSDDVGMDADSASQRLVISAPDSQVRFSNIRTNDVAKTPQMHGTEMANSPQPPPLSPHPCDVVDEGVTKTPSTPQSQHFYQMPTPDPLVPSKPMEDRIDSLSQSFPPQYQEAVEPTVYVGTAVNLEEDEANIAWKYYKFPKKKDVEFLPPQLPSDKFKDDPVGPFGQESVTSVTELMVQCKKPLKVSDELVQQYQIKNQCLSAIASDAEQEPKIDPYAFVEGDEEFLFPDKKDRQNSEREAGKKHKVEDGTSSVTVLSHEEDAMSLFSPSIKQDAPRPTSHARPPSTSLIYDSDLAVSYTDLDNLFNSDEDELTPGSKKSANGSDDKASCKESKTGNLDPLSCISTADLHKMYPTPPSLEQHIMGFSPMNMNNKEYGSMDTTPGGTVLEGNSSSIGAQFKIEVDEGFCSPKPSEIKDFSYVYKPENCQILVGCSMFAPLKTLPSQYLPPIKLPEECIYRQSWTVGKLELLSSGPSMPFIKEGDGSNMDQEYGTAYTPQTHTSFGMPPSSAPPSNSGAGILPSPSTPRFPTPRTPRTPRTPRGAGGPASAQGSVKYENSDLYSPASTPSTCRPLNSVEPATVPSIPEAHSLYVNLILSESVMNLFKDCNFDSCCICVCNMNIKGADVGVYIPDPTQEAQYRCTCGFSAVMNRKFGNNSGLFLEDELDIIGRNTDCGKEAEKRFEALRATSAEHVNGGLKESEKLSDDLILLLQDQCTNLFSPFGAADQDPFPKSGVISNWVRVEERDCCNDCYLALEHGRQFMDNMSGGKVDEALVKSSCLHPWSKRNDVSMQCSQDILRMLLSLQPVLQDAIQKKRTVRPWGVQGPLTWQQFHKMAGRGSYGTDESPEPLPIPTFLLGYDYDYLVLSPFALPYWERLMLEPYGSQRDIAYVVLCPENEALLNGAKSFFRDLTAIYESCRLGQHRPVSRLLTDGIMRVGSTASKKLSEKLVAEWFSQAADGNNEAFSKLKLYAQVCRYDLGPYLASLPLDSSLLSQPNLVAPTSQSLITPPQMTNTGNANTPSATLASAASSTMTVTSGVAISTSVATANSTLTTASTSSSSSSNLNSGVSSNKLPSFPPFGSMNSNAAGSMSTQANTVQSGQLGGQQTSALQTAGISGESSSLPTQPHPDVSESTMDRDKVGIPTDGDSHAVTYPPAIVVYIIDPFTYENTDESTNSSSVWTLGLLRCFLEMVQTLPPHIKSTVSVQIIPCQYLLQPVKHEDREIYPQHLKSLAFSAFTQCRRPLPTSTNVKTLTGFGPGLAMETALRSPDRPECIRLYAPPFILAPVKDKQTELGETFGEAGQKYNVLFVGYCLSHDQRWILASCTDLYGELLETCIINIDVPNRARRKKSSARKFGLQKLWEWCLGLVQMSSLPWRVVIGRLGRIGHGELKDWSCLLSRRNLQSLSKRLKDMCRMCGISAADSPSILSACLVAMEPQGSFVIMPDSVSTGSVFGRSTTLNMQTSQLNTPQDTSCTHILVFPTSASVQVASATYTTENLDLAFNPNNDGADGMGIFDLLDTGDDLDPDIINILPASPTGSPVHSPGSHYPHGGDAGKGQSTDRLLSTEPHEEVPNILQQPLALGYFVSTAKAGPLPDWFWSACPQAQYQCPLFLKASLHLHVPSVQSDELLHSKHSHPLDSNQTSDVLRFVLEQYNALSWLTCDPATQDRRSCLPIHFVVLNQLYNFIMNML

SEQ ID NO: 52813 - protein, 2174 aa, Homo sapiens
MSASFVPNGASLEDCHCNLFCLADLTGIKWKKYVWQGPTSAPILFPVTEEDPILSSFSRCLKADVLGVWRRDQRPGRRELWIFWWGEDPSFADLIHHDLSEEEDGVWENGLSYECRTLLFKAVHNLLERCLMNRNFVRIGKWFVKPYEKDEKPINKSEHLSCSFTFFLHGDSNVCTSVEINQHQPVYLLSEEHITLAQQSNSPFQVILCPFGLNGTLTGQAFKMSDSATKKLIGEWKQFYPISCCLKEMSEEKQEDMDWEDDSLAAVEVLVAGVRMIYPACFVLVPQSDIPTPSPVGSTHCSSSCLGVHQVPASTRDPAMSSVTLTPPTSPEEVQTVDPQSVQKWVKFSSVSDGFNSDSTSHHGGKIPRKLANHVVDRVWQECNMNRAQNKRKYSASSGGLCEEATAAKVASWDFVEATQRTNCSCLRHKNLKSRNAGQQGQAPSLGQQQQILPKHKTNEKQEKSEKPQKRPLTPFHHRVSVSDDVGMDADSASQRLVISAPDSQVRFSNIRTNDVAKTPQMHGTEMANSPQPPPLSPHPCDVVDEGVTKTPSTPQSQHFYQMPTPDPLVPSKPMEDRIDSLSQSFPPQYQEAVEPTVYVGTAVNLEEDEANIAWKYYKFPKKKDVEFLPPQLPSDKFKDDPVGPFGQESVTSVTELMVQCKKPLKVSDELVQQYQIKNQCLSAIASDAEQEPKIDPYAFVEGDEEFLFPDKKDRQNSEREAGKKHKVEDGTSSVTVLSHEEDAMSLFSPSIKQDAPRPTSHARPPSTSLIYDSDLAVSYTDLDNLFNSDEDELTPGSKKSANGSDDKASCKESKTGNLDPLSCISTADLHKMYPTPPSLEQHIMGFSPMNMNNKEYGSMDTTPGGTVLEGNSSSIGAQFKIEVDEGFCSPKPSEIKDFSYVYKPENCQILVGCSMFAPLKTLPSQYLPPIKLPEECIYRQSWTVGKLELLSSGPSMPFIKEGDGSNMDQEYGTAYTPQTHTSFGMPPSSAPPSNSGAGILPSPSTPRFPTPRTPRTPRTPRGAGGPASAQGSVKYENSDLYSPASTPSTCRPLNSVEPATVPSIPEAHSLYVNLILSESVMNLFKDCNFDSCCICVCNMNIKGADVGVYIPDPTQEAQYRCTCGFSAVMNRKFGNNSGLFLEDELDIIGRNTDCGKEAEKRFEALRATSAEHVNGGLKESEKLSDDLILLLQDQCTNLFSPFGAADQDPFPKSGVISNWVRVEERDCCNDCYLALEHGRQFMDNMSGGKVDEALVKSSCLHPWSKRNDVSMQCSQDILRMLLSLQPVLQDAIQKKRTVRPWGVQGPLTWQQFHKMAGRGSYGTDESPEPLPIPTFLLGYDYDYLVLSPFALPYWERLMLEPYGSQRDIAYVVLCPENEALLNGAKSFFRDLTAIYESCRLGQHRPVSRLLTDGIMRVGSTASKKLSEKLVAEWFSQAADGNNEAFSKLKLYAQVCRYDLGPYLASLPLDSSLLSQPNLVAPTSQSLITPPQMTNTGNANTPSATLASAASSTMTVTSGVAISTSVATANSTLTTASTSSSSSSNLNSGVSSNKLPSFPPFGSMNSNAAGSMSTQANTVQSGQLGGQQTSALQTAGISGESSSLPTQPHPDVSESTMDRDKVGIPTDGDSHAVTYPPAIVVYIIDPFTYENTDESTNSSSVWTLGLLRCFLEMVQTLPPHIKSTVSVQIIPCQYLLQPVKHEDREIYPQHLKSLAFSAFTQCRRPLPTSTNVKTLTGFGPGLAMETALRSPDRPECIRLYAPPFILAPVKDKQTELGETFGEAGQKYNVLFVGYCLSHDQRWILASCTDLYGELLETCIINIDVPNRARRKKSSARKFGLQKLWEWCLGLVQMSSLPWRVVIGRLGRIGHGELKDWSCLLSRRNLQSLSKRLKDMCRMCGISAADSPSILSACLVAMEPQGSFVIMPDSVSTGSVFGRSTTLNMQTSQLNTPQDTSCTHILVFPTSASVQVASATYTTENLDLAFNPNNDGADGMGIFDLLDTGDDLDPDIINILPASPTGSPVHSPGSHYPHGGDAGKGQSTDRLLSTEPHEEVPNILQQPLALGYFVSTAKAGPLPDWFWSACPQAQYQCPLFLKASLHLHVPSVQSDELLHSKHSHPLDSNQTSDVLRFVLEQYNALSWLTCDPATQDRRSCLPIHFVVLNQLYNFIMNML

SEQ ID NO: 52814 - protein, 2210 aa, Homo sapiens
MTAAANWVANGASLEDCHSNLFSLAELTGIKWRRYNFGGHGDCGPIISAPAQDDPILLSFIRCLQANLLCVWRRDVKPDCKELWIFWWGDEPNLVGVIHHELQVVEEGLWENGLSYECRTLLFKAIHNLLERCLMDKNFVRIGKWFVRPYEKDEKPVNKSEHLSCAFTFFLHGESNVCTSVEIAQHQPIYLINEEHIHMAQSSPAPFQVLVSPYGLNGTLTGQAYKMSDPATRKLIEEWQYFYPMVLKKKEESKEEDELGYDDDFPVAVEVIVGGVRMVYPSAFVLISQNDIPVPQSVASAGGHIAVGQQGLGSVKDPSNCGMPLTPPTSPEQAILGESGGMQSAASHLVSQDGGMITMHSPKRSGKIPPKLHNHMVHRVWKECILNRTQSKRSQMSTPTLEEEPASNPATWDFVDPTQRVSCSCSRHKLLKRCAVGPNRPPTVSQPGFSAGPSSSSSLPPPASSKHKTAERQEKGDKLQKRPLIPFHHRPSVAEELCMEQDTPGQKLGLAGIDSSLEVSSSRKYDKQMAVPSRNTSKQMNLNPMDSPHSPISPLPPTLSPQPRGQETESLDPPSVPVNPALYGNGLELQQLSTLDDRTVLVGQRLPLMAEVSETALYCGIRPSNPESSEKWWHSYRLPPSDDAEFRPPELQGERCDAKMEVNSESTALQRLLAQPNKRFKIWQDKQPQLQPLHFLDPLPLSQQPGDSLGEVNDPYTFEDGDIKYIFTANKKCKQGTEKDSLKKNKSEDGFGTKDVTTPGHSTPVPDGKNAMSIFSSATKTDVRQDNAAGRAGSSSLTQVTDLAPSLHDLDNIFDNSDDDELGAVSPALRSSKMPAVGTEDRPLGKDGRAAVPYPPTVADLQRMFPTPPSLEQHPAFSPVMNYKDGISSETVTALGMMESPMVSMVSTQLTEFKMEVEDGLGSPKPEEIKDFSYVHKVPSFQPFVGSSMFAPLKMLPSHCLLPLKIPDACLFRPSWAIPPKIEQLPMPPAATFIRDGYNNVPSVGSLADPDYLNTPQMNTPVTLNSAAPASNSGAGVLPSPATPRFSVPTPRTPRTPRTPRGGGTASGQGSVKYDSTDQGSPASTPSTTRPLNSVEPATMQPIPEAHSLYVTLILSDSVMNIFKDRNFDSCCICACNMNIKGADVGLYIPDSSNEDQYRCTCGFSAIMNRKLGYNSGLFLEDELDIFGKNSDIGQAAERRLMMCQSTFLPQVEGTKKPQEPPISLLLLLQNQHTQPFASLNFLDYISSNNRQTLPCVSWSYDRVQADNNDYWTECFNALEQGRQYVDNPTGGKVDEALVRSATVHSWPHSNVLDISMLSSQDVVRMLLSLQPFLQDAIQKKRTGRTWENIQHVQGPLTWQQFHKMAGRGTYGSEESPEPLPIPTLLVGYDKDFLTISPFSLPFWERLLLDPYGGHRDVAYIVVCPENEALLEGAKTFFRDLSAVYEMCRLGQHKPICKVLRDGIMRVGKTVAQKLTDELVSEWFNQPWSGEENDNHSRLKLYAQVCRHHLAPYLATLQLDSSLLIPPKYQTPPAAAQGQATPGNAGPLAPNGSAAPPAGSAFNPTSNSSSTNPAASSSASGSSVPPVSSSASAPGISQISTTSSSGFSGSVGGQNPSTGGISADRTQGNIGCGGDTDPGQSSSQPSQDGQESVTERERIGIPTEPDSADSHAHPPAVVIYMVDPFTYAAEEDSTSGNFWLLSLMRCYTEMLDNLPEHMRNSFILQIVPCQYMLQTMKDEQVFYIQYLKSMAFSVYCQCRRPLPTQIHIKSLTGFGPAASIEMTLKNPERPSPIQLYSPPFILAPIKDKQTELGETFGEASQKYNVLFVGYCLSHDQRWLLASCTDLHGELLETCVVNIALPNRSRRSKVSARKIGLQKLWEWCIGIVQMTSLPWRVVIGRLGRLGHGELKDWSILLGECSLQTISKKLKDVCRMCGISAADSPSILSACLVAMEPQGSFVVMPDAVTMGSVFGRSTALNMQSSQLNTPQDASCTHILVFPTSSTIQVAPANYPNEDGFSPNNDDMFVDLPFPDDMDNDIGILMTGNLHSSPNSSPVPSPGSPSGIGVGSHFQHSRSQGERLLSREAPEELKQQPLALGYFVSTAKAENLPQWFWSSCPQAQNQCPLFLKASLHHHISVAQTDELLPARNSQRVPHPLDSKTTSDVLRFVLEQYNALSWLTCNPATQDRTSCLPVHFVVLTQLYNAIMNIL

SEQ ID NO: 52815 - protein, 1454 aa, Homo sapiens
MAPVQLENHQLVPPGGGGGGSGGPPSAPAPPPPGAAVAAAAAAAASPGYRLSTLIEFLLHRAYSELMVLTDLLPRKSDVERKIEIVQFASRTRQLFVRLLALVKWANNAGKVEKCAMISSFLDQQAILFVDTADRLASLARDALVHARLPSFAIPYAIDVLTTGSYPRLPTCIRDKIIPPDPITKIEKQATLHQLNQILRHRLVTTDLPPQLANLTVANGRVKFRVEGEFEATLTVMGDDPDVPWRLLKLEILVEDKETGDGRALVHSMQISFIHQLVQSRLFADEKPLQDMYNCLHSFCLSLQLEVLHSQTLMLIRERWGDLVQVERYHAGKCLSLSVWNQQVLGRKTGTASVHKVTIKIDENDVSKPLQIFHDPPLPASDSKLVERAMKIDHLSIEKLLIDSVHARAHQKLQELKAILRGFNANENSSIETALPALVVPILEPCGNSECLHIFVDLHSGMFQLMLYGLDQATLDDMEKSVNDDMKRIIPWIQQLKFWLGQQRCKQSIKHLPTISSETLQLSNYSTHPIGNLSKNKLFIKLTRLPQYYIVVEMLEVPNKPTQLSYKYYFMSVNAADREDSPAMALLLQQFKENIQDLVFRTKTGKQTRTNAKRKLSDDPCPVESKKTKRAGEMCAFNKVLAHFVAMCDTNMPFVGLRLELSNLEIPHQGVQVEGDGFSHAIRLLKIPPCKGITEETQKALDRSLLDCTFRLQGRNNRTWVAELVFANCPLNGTSTREQGPSRHVYLTYENLLSEPVGGRKVVEMFLNDWNSIARLYECVLEFARSLPDIPAHLNIFSEVRVYNYRKLILCYGTTKGSSISIQWNSIHQKFHISLGTVGPNSGCSNCHNTILHQLQEMFNKTPNVVQLLQVLFDTQAPLNAINKLPTVPMLGLTQRTNTAYQCFSILPQSSTHIRLAFRNMYCIDIYCRSRGVVAIRDGAYSLFDNSKLVEGFYPAPGLKTFLNMFVDSNQDARRRSVNEDDNPPSPIGGDMMDSLISQLQPPPQQQPFPKQPGTSGAYPLTSPPTSYHSTVNQSPSMMHTQSPGNLHAASSPSGALRAPSPASFVPTPPPSSHGISIGPGASFASPHGTLDPSSPYTMVSPSGRAGNWPGSPQVSGPSPAARMPGMSPANPSLHSPVPDASHSPRAGTSSQTMPTNMPPPRKLPQRSWAASIPTILTHSALNILLLPSPTPGLVPGLAGSYLCSPLERFLGSVIMRRHLQRIIQQETLQLINSNEPGVIMFKTDALKCRVALSPKTNQTLQLKVTPENAGQWKPDELQVLEKFFETRVAGPPFKANTLIAFTKLLGAPTHILRDCVHIMKLELFPDQATQLKWNVQFCLTIPPSAPPIAPPGTPAVVLKSKMLFFLQLTQKTSVPPQEPVSIIVPIIYDMASGTTQQADIPRQQNSSVAAPMMVSNILKRFAEMNPPRQGECTIFAAVRDLMANLTLPPGGRP

SEQ ID NO: 52816 - protein, 155 aa, Homo sapiens
VAGPPFKANTLIAFTKLLGAPTHILRDCVHIMKLELFPDQATQLKWNVQFCLTIPPSAPPIAPPGTPAVVLKSKMLFFLQLTQKTSVPPQEPVSIIVPIIYDMASGTTQQADIPRQQNSSVAAPMMVSNILKRFAEMNPPRQGSIKGTGCPSDFL

SEQ ID NO: 52817 - protein, 331 aa, Homo sapiens
PSGRAGNWPGSPQVSGPSPAARMPGMSPANPSLHSPVPDASHSPRAGTSSQTMPTNMPPPRKLPQRSWAASIPTILTHSALNILLLPSPTPGLVPGLAGSYLCSPLERFLGSVIMRRHLQRIIQQETLQLINSNEPGVIMFKTDALKCRVALSPKTNQTLQLKVTPENAGQWKPDELQVLEKFFETRVAGPPFKANTLIAFTKLLGAPTHILRDCVHIMKLELFPDQATQLKWNVQFCLTIPPSAPPIAPPGTPAVVLKSKMLFFLQLTQKTSVPPQEPVSIIVPIIYDMASGTTQQADIPRQQNSSVAAPMMVSNILKRFAEMNPPRQGT

SEQ ID NO: 52818 - protein, 788 aa, Homo sapiens
MDVSGQETDWRSTAFRQKLVSQIEDAMRKAGVAHSKSSKDMESHVFLKAKTRDEYLSLVARLIIHFRDIHNKKSQASVSDPMNALQSLTGGPAAGAAGIGMPPRGPGQSLGGMGSLGAMGQPMSLSGQPPPGTSGMAPHSMAVVSTATPQTQLQLQQVALQQQQQQQQFQQQQQAALQQQQQQQQQQQFQAQQSAMQQQFQAVVQQQQQLQQQQQQQQHLIKLHHQNQQQIQQQQQQLQRIAQLQLQQQQQQQQQQQQQQQQALQAQPPIQQPPMQQPQPPPSQALPQQLQQMHHTQHHQPPPQPQQPPVAQNQPSQLPPQSQTQPLVSQAQALPGQMLYTQPPLKFVRAPMVVQQPPVQPQVQQQQTAVQTAQAAQMVAPGVQMITEALAQGGMHIRARFPPTTAVSAIPSSSIPLGRQPMAQVSQSSLPMLSSPSPGQQVQTPQSMPPPPQPSPQPGQPSSQPNSNVSSGPAPSPSSFLPSPSPQPSQSPVTARTPQNFSVPSPGPLNTPVNPSSVMSPAGSSQAEEQQYLDKLKQLSKYIEPLRRMINKIDKNEDRKKDLSKMKSLLDILTDPSKRCPLKTLQKCEIALEKLKNDMAVPTPPPPPVPPTKQQYLCQPLLDAVLANIRSPVFNHSLYRTFVPAMTAIHGPPITAPVVCTRKRRLEDDERQSIPSVLQGEVARLDPKFLVNLDPSHCSNNGTVHLICKLDDKDLPSVPPLELSVPADYPAQSPLWIDRQWQYDANPFLQSVHRCMTSRLLQLPDKHSVTALLNTWAQSVHQACLSAA

SEQ ID NO: 52819 - protein, 748 aa, Homo sapiens
MDVSGQETDWRSTAFRQKLVSQIEDAMRKAGVAHSKSSKDMESHVFLKAKTRDEYLSLVARLIIHFRDIHNKKSQASVSDPMNALQSLTGGPAAGAAGIGMPPRGPGQSLGGMGSLGAMGQPMSLSGQPPPGTSGMAPHSMAVVSTATPQTQLQLQQVALQQQQQQQQFQQQQQAALQQQQQQQQQQQFQAQQSAMQQQFQAVVQQQQQLQQQQQQQQHLIKLHHQNQQQIQQQQQQLQRIAQLQLQQQQQQQQQQQQQQQQALQAQPPIQQPPMQQPQPPPSQALPQQLQQMHHTQHHQPPPQPQQPPVAQNQPSQLPPQSQTQPLVSQAQALPGQMLYTQPPLKFVRAPMVVQQPPVQPQVQQQQTAVQTAQAAQMVAPGVQVSQSSLPMLSSPSPGQQVQTPQSMPPPPQPSPQPGQPSSQPNSNVSSGPAPSPSSFLPSPSPQPSQSPVTARTPQNFSVPSPGPLNTPVNPSSVMSPAGSSQAEEQQYLDKLKQLSKYIEPLRRMINKIDKNEDRKKDLSKMKSLLDILTDPSKRCPLKTLQKCEIALEKLKNDMAVPTPPPPPVPPTKQQYLCQPLLDAVLANIRSPVFNHSLYRTFVPAMTAIHGPPITAPVVCTRKRRLEDDERQSIPSVLQGEVARLDPKFLVNLDPSHCSNNGTVHLICKLDDKDLPSVPPLELSVPADYPAQSPLWIDRQWQYDANPFLQSVHRCMTSRLLQLPDKHSVTALLNTWAQSVHQACLSAA

SEQ ID NO: 52820 - protein, 677 aa, Homo sapiens
MDVSGQETDWRSTAFRQKLVSQIEDAMRKAGVAHSKSSKDMESHVFLKAKTRDEYLSLVARLIIHFRDIHNKKSQASVSAQLQLQQVALQQQQQQQQFQQQQQAALQQQQQQQQQQQFQAQQSAMQQQFQAVVQQQQQLQQQQQQQQHLIKLHHQNQQQIQQQQQQLQRIAQLQLQQQQQQQQQQQQQQQQALQAQPPIQQPPMQQPQPPPSQALPQQLQQMHHTQHHQPPPQPQQPPVAQNQPSQLPPQSQTQPLVSQAQALPGQMLYTQPPLKFVRAPMVVQQPPVQPQVQQQQTAVQTAQAAQMVAPGVQVSQSSLPMLSSPSPGQQVQTPQSMPPPPQPSPQPGQPSSQPNSNVSSGPAPSPSSFLPSPSPQPSQSPVTARTPQNFSVPSPGPLNTPVNPSSVMSPAGSSQAEEQQYLDKLKQLSKYIEPLRRMINKIDKNEDRKKDLSKMKSLLDILTDPSKRCPLKTLQKCEIALEKLKNDMAVPTPPPPPVPPTKQQYLCQPLLDAVLANIRSPVFNHSLYRTFVPAMTAIHGPPITAPVVCTRKRRLEDDERQSIPSVLQGEVARLDPKFLVNLDPSHCSNNGTVHLICKLDDKDLPSVPPLELSVPADYPAQSPLWIDRQWQYDANPFLQSVHRCMTSRLLQLPDKHSVTALLNTWAQSVHQACLSAA

SEQ ID NO: 52821 - protein, 722 aa, Homo sapiens
MRKAGVAHSKSSKDMESHVFLKAKTRDEYLSLVARLIIHFRDIHNKKSQASVSDPMNALQSLTGGPAAGAAGIGMPPRGPGQSLGGMGSLGAMGQPMSLSGQPPPGTSGMAPHSMAVVSTATPQTQLQLQQVALQQQQQQQQFQQQQQAALQQQQQQQQQQQFQAQQSAMQQQFQAVVQQQQQLQQQQQQQQHLIKLHHQNQQQIQQQQQQLQRIAQLQLQQQQQQQQQQQQQQQQALQAQPPIQQPPMQQPQPPPSQALPQQLQQMHHTQHHQPPPQPQQPPVAQNQPSQLPPQSQTQPLVSQAQALPGQMLYTQPPLKFVRAPMVVQQPPVQPQVQQQQTAVQTAQAAQMVAPGVQVSQSSLPMLSSPSPGQQVQTPQSMPPPPQPSPQPGQPSSQPNSNVSSGPAPSPSSFLPSPSPQPSQSPVTARTPQNFSVPSPGPLNTPVNPSSVMSPAGSSQAEEQQYLDKLKQLSKYIEPLRRMINKIDKNEDRKKDLSKMKSLLDILTDPSKRCPLKTLQKCEIALEKLKNDMAVPTPPPPPVPPTKQQYLCQPLLDAVLANIRSPVFNHSLYRTFVPAMTAIHGPPITAPVVCTRKRRLEDDERQSIPSVLQGEVARLDPKFLVNLDPSHCSNNGTVHLICKLDDKDLPSVPPLELSVPADYPAQSPLWIDRQWQYDANPFLQSVHRCMTSRLLQLPDKHSVTALLNTWAQSVHQACLSAA

SEQ ID NO: 52822 - protein, 637 aa, Homo sapiens
MESHVFLKAKTRDEYLSLVARLIIHFRDIHNKKSQASVSAQLQLQQVALQQQQQQQQFQQQQQAALQQQQQQQQQQQFQAQQSAMQQQFQAVVQQQQQLQQQQQQQQHLIKLHHQNQQQIQQQQQQLQRIAQLQLQQQQQQQQQQQQQQQQALQAQPPIQQPPMQQPQPPPSQALPQQLQQMHHTQHHQPPPQPQQPPVAQNQPSQLPPQSQTQPLVSQAQALPGQMLYTQPPLKFVRAPMVVQQPPVQPQVQQQQTAVQTAQAAQMVAPGVQVSQSSLPMLSSPSPGQQVQTPQSMPPPPQPSPQPGQPSSQPNSNVSSGPAPSPSSFLPSPSPQPSQSPVTARTPQNFSVPSPGPLNTPVNPSSVMSPAGSSQAEEQQYLDKLKQLSKYIEPLRRMINKIDKNEDRKKDLSKMKSLLDILTDPSKRCPLKTLQKCEIALEKLKNDMAVPTPPPPPVPPTKQQYLCQPLLDAVLANIRSPVFNHSLYRTFVPAMTAIHGPPITAPVVCTRKRRLEDDERQSIPSVLQGEVARLDPKFLVNLDPSHCSNNGTVHLICKLDDKDLPSVPPLELSVPADYPAQSPLWIDRQWQYDANPFLQSVHRCMTSRLLQLPDKHSVTALLNTWAQSVHQACLSAA

SEQ ID NO: 52823 - protein, 722 aa, Homo sapiens; identical to SEQ ID NO: 52821

SEQ ID NO: 52824 - protein, 718 aa, Homo sapiens
MRKAGVAHSKSSKDMESHVFLKAKTRDEYLSLVARLIIHFRDIHNKKSQASVSDPMNALQSLTGGPAAGAAGIGMPPRGPGQSLGGMGSLGAMGQPMSLSGQPPPGTSGMAPHSMAVVSTATPQTQLQLQQVALQQQQQQQQFQQQQQAALQQQQQQQQQQQFQAQQSAMQQQFQAVVQQQQQLQQQQQQQQHLIKLHHQNQQQQQQQALQAQPPIQQPPMQQPQPPPSQALPQQLQQMHHTQHHQPPPQPQQPPVAQNQPSQLPPQSQTQPLVSQAQALPGQMLYTQPPLKFVRAPMVVQQPPVQPQVQQQQTAVQTAQAAQMVAPGVQMITEALAQGGMHIRARFPPTTAVSAIPSSSIPLGRQPMAQQVQTPQSMPPPPQPSPQPGQPSSQPNSNVSSGPAPSPSSFLPSPSPQPSQSPVTARTPQNFSVPSPGPLNTPVNPSSVMSPAGSSQAEEQQYLDKLKQLSKYIEPLRRMINKIDKNEDRKKDLSKMKSLLDILTDPSKRCPLKTLQKCEIALEKLKNDMAVPTPPPPPVPPTKQQYLCQPLLDAVLANIRSPVFNHSLYRTFVPAMTAIHGPPITAPVVCTRKRRLEDDERQSIPSVLQGEVARLDPKFLVNLDPSHCSNNGTVHLICKLDDKDLPSVPPLELSVPADYPAQSPLWIDRQWQYDANPFLQSVHRCMTSRLLQLPDKHSVTALLNTWAQSVHQACLSAA

SEQ ID NO: 52825 - protein, 189 aa, Homo sapiens
MQQQFQAVVQQQQQLQQQQQQQQHLIKLHHQNQQQIQQQQQQLQRIAQLQLQQQQQQQQQQQQQQQQALQAQPPIQQPPMQQPQPPPSQALPQQLQQMHHTQHHQPPPQPQQPPVAQNQPSQLPPQSQTQPLVSQAQALPGQMLYTQPPLKFVRAPMVVQQPPVQPQVQQQQTAVQTAQAAQMVAPGVQ

SEQ ID NO: 52826 - protein, 651 aa, Homo sapiens
MSGVRAVRISIESACEKQVHEVGLDGTETYLPPLSMSQNLARLAQRIDFSQGSGSEEEEAAGTEGDAQEWPGAGSSADQDDEEGVVKFQPSLWPWDSVRNNLRSALTEMCVLYDVLSIVRDKKFMTLDPVSQDALPPKQNPQTLQLISKKKSLAGAAQILLKGAERLTKSVTENQENKLQRDFNSELLRLRQHWKLRKVGDKILGDLSYRSAGSLFPHHGTFEVIKNTDLDLDKKIPEDYCPLDVQIPSDLEGSAYIKVSIQKQAPDIGDLGTVNLFKRPLPKSKPGSPHWQTKLEAAQNVLLCKEIFAQLSREAVQIKSQVPHIVVKNQIISQPFPSLQLSISLCHSSNDKKSQKFATEKQCPEDHLYVLEHNLHLLIREFHKQTLSSIMMPHPASAPFGHKRMRLSGPQAFDKNEINSLQSSEGLLEKIIKQAKHIFLRSRAAATIDSLASRIEDPQIQAHWSNINDVYESSVKVLITSQGYEQICKSIQLQLNIGVEQIRVVHRDGRVITLSYQEQELQDFLLSQMSQHQVHAVQQLAKVMGWQVLSFSNHVGLGPIESIGNASAITVASPSGDYAISVRNGPESGSKIMVQFPRNQCKDLPKSDVLQDNKWSHLRGPFKEVQWNKMEGRNFVYKMELLMSALSPCLL

SEQ ID NO: 52827 - protein, 621 aa, Homo sapiens
MSGVRAVRISIESACEKQVHEVGLDGTETYLPPLSMSQEWPGAGSSADQDDEEGVVKFQPSLWPWDSVRNNLRSALTEMCVLYDVLSIVRDKKFMTLDPVSQDALPPKQNPQTLQLISKKKSLAGAAQILLKGAERLTKSVTENQENKLQRDFNSELLRLRQHWKLRKVGDKILGDLSYRSAGSLFPHHGTFEVIKNTDLDLDKKIPEDYCPLDVQIPSDLEGSAYIKVSIQKQAPDIGDLGTVNLFKRPLPKSKPGSPHWQTKLEAAQNVLLCKEIFAQLSREAVQIKSQVPHIVVKNQIISQPFPSLQLSISLCHSSNDKKSQKFATEKQCPEDHLYVLEHNLHLLIREFHKQTLSSIMMPHPASAPFGHKRMRLSGPQAFDKNEINSLQSSEGLLEKIIKQAKHIFLRSRAAATIDSLASRIEDPQIQAHWSNINDVYESSVKVLITSQGYEQICKSIQLQLNIGVEQIRVVHRDGRVITLSYQEQELQDFLLSQMSQHQVHAVQQLAKVMGWQVLSFSNHVGLGPIESIGNASAITVASPSGDYAISVRNGPESGSKIMVQFPRNQCKDLPKSDVLQDNKWSHLRGPFKEVQWNKMEGRNFVYKMELLMSALSPCLL

SEQ ID NO: 52828 - protein, 145 aa, Homo sapiens
MSGVRAVRISIESACEKQVHEVGLDGTETYLPPLSMSQNLARLAQRIDFSQGSGSEEEEAAGTEGDAQEWPGAGSSADQDDEEGVVKFQPSLWPWDSVRNNLRSALTEMCVLYDVLSIVRDKKFMTLDPVSQDALPPKQVFVDFN

SEQ ID NO: 52829 - protein, 208 aa, Homo sapiens [sequence omitted]

SEQ ID NO: 52830 - protein, 208 aa, Homo sapiens [sequence omitted]

SEQ ID NO: 52831 - protein, 194 aa, Homo sapiens
MENFTALFGAQADPPPPPTALGFGPGKPPPPPPPPAGGGPGTAPPPTAATAPPGADKSGAGCGPFYLMRELPGSTELTGSTNLITHYNLEQAYNKFCGKKVKEKLSNFLPDLPGMIDLPGSHDNSSLRSLIEKPPILSSSFNPITGTMLAGFRLHTGPLPEQCRLMHIQPPKKKNKHKHKQSRTQDPVPPGKPS

SEQ ID NO: 52832 - protein, 244 aa, Homo sapiens
MENFTALFGAQADPPPPPTALGFGPGKPPPPPPPPAGGGPGTAPPPTAATAPPGADKSGAGCGPFYLMRELPGSTELTGSTNLITHYNLEQAYNKFCGKKVKEKLSNFLPDLPGMIDLPGSHDNSSLRSLIEKPPILSSSFNPITGTMLAGFRLHTGPLPEQCRLMHIQPPKKKNKHKHKQSRTQDPVPPETPSDSDHKKKKKKKEEDPERKRKKKEKKKKKNRHSPDHPGMGSSQASSSSSLR

SEQ ID NO: 52833 - protein, 212 aa, Homo sapiens
MGVTCVSQMPVAEGKSVQQTVELLTRKLEMLGAEKQGTFCVDCETYHTAASTLGSQGQTGKLMYVMHNSEYPLSCFALFENGPCLIADTNFDVLMVKLKGFFQSAKASKIETRGTRYQYCDFLVKVGTVTMGPSARGISVEVEYGPCVVASDCWSLLLEFLQSFLGSHTPGAPAVFGNRHDAVYGPADTMVQYMELFNKIRKQQQVPVAGIR

SEQ ID NO: 52834 - protein, 140 aa, Homo sapiens
MPVAEGKSVQQTVELLTRKLEMLGAEKQGTFCVDCETYHTAASTLGSQGQTGKLMYVMHNSEYPLSCFALFENGPCLIADTNFDVLMVKLKGFFQSAKASKIETRGTRYQYCDFLVKVGTVTMGPSARGISVEVEYGPCV

SEQ ID NO: 52835 - protein, 145 aa, Homo sapiens
MGVTCVSQMPVAEGKSVQQTVELLTRKLEMLGAEKQGTFCVDCETYHTAASTLGSQGQTGKLMYVMHNSEYPLSCFALFENGPCLIADTNFDVLMVKLKGFFQSAKASKIETRGTRYQYCDFLVKVGTVTMGPSARGISVEVRPW

SEQ ID NO: 52836 - protein, 123 aa, Homo sapiens
MGVTCVSQMPVAEGKSVQQTVELLTRKLEMLGAEKQGTFCVDCETYHTAASTLGSQGQTGKLMYVMHNSEYPLSCFALFENGPCLIADTNFDVLMVKLKGFFQSAKASKIETRGTRWSMAPVW

SEQ ID NO: 52837 - protein, 144 aa, Homo sapiens
MADRLTQLQDAVNSLADQFCNAIGVLQQCGPPASFNNIQTAINKDQPANPTEEYAQLFAALIARTAKDIDVLIDSLPSEESTAALQAASLYKLEEENHEAATCLEDVVYRGDMLLEKIQSALADIAQSQLKTRSGTHSQSLPDS

SEQ ID NO: 52838 - protein, 1365 aa, Homo sapiens
METQLQSIFEEVVKTEVIEEAFPGMFMDTPEDEKTKLISCLGAFRQFWGGLSQESHEQCIQWIVKFIHGQHSPKRISFLYDCLAMAVETGLLPPRLVCESLINSDTLEWERTQLWALTFKLVRKIIGGVDYKGVRDLLKVILEKILTIPNTVSSAVVQQLLAAREVIAYILERNACLLPAYFAVTEIRKLYPEGKLPHWLLGNLVSDFVDTFRPTARINSICGRCSLLPVVNNSGAICNSWKLDPATLRFPLKGLLPYDKDLFEPQTALLRYVLEQPYSRDMVCNMLGLNKQTLNIAQHKQRCPVLEDQLVDLVVYAMERSETEEKFDDGGTSQLLWQHLSSQLIFFVLFQFASFPHMVLSLHQKLAGRGLIKGRDHLMWVLLQFISGSIQKNALADFLPVMKLFDLLYPEKEYIPVPDINKPQSTHAFAMTCIWIHLNRKAQNDNSKLQIPIPHSLRLHHEFLQQSLRNKSLQMNDYKIALLCNAYSTNSECFTLPMGALVETIYGNGIMRIPLPGTNCMASGSITPLPMNLLDSLTVHAKMSLIHSIATRVIKLAHAKSSVALAPALVETYSRLLVYMEIESLGIKGFISQLLPTVFKSHAWGILHTLLEMFSYRMHHIQPHYRVQLLSHLHTLAAVAQTNQNQLHLCVESTALRLITALGSSEVQPQFTRFLSDPKTVLSAESEELNRALILTLARATHVTDFFTGSDSIQGTWCKDILQTIMSFTPHNWASHTLSCFPGPLQAFFKQNNVPQESRFNLKKNVEEEYRKWKSMSNENDIITHFSMQGSPPLFLCLLWKMLLETDHINQIGYRVLERIGARALVAHVRTFADFLVYEFSTSAGGQQLNKCIEILNDMVWKYNIVTLDRLILCLAMRSHEGNEAQVCYFIIQLLLLKPNDFRNRVSDFVKENSPEHWLQNDWHTKHMNYHKKYPEKLYFEGLAEQVDPPVQIQSPYLPIYFGNVCLRFLPVFDIVIHRFLELLPVSKSLETLLDHLGGLYKFHDRPVTYLYNTLHYYEMHLRDRAFLKRKLVHAIIGSLKDNRPQGWCLSDTYLKCAMNAREENPWVPDDTYYCRLIGRLVDTMAGKSPGPFPNCDWRFNEFPNPAAHALHVTCVELMALAVSGKEVGNALLNVVLKSQPLVPRENITAWMNAIGLIITALPEPYWIVLHDRIVSVISSPSLTSETEWVGYPFRLFDFTACHQSYSEMSCSYTLALAHAVWHHSSIGQLSLIPKFLTEVLLPIVKTEFQLLYVYHLVGPFLQRFQQERTRCMIEIGVAFYDMLLNVDQCSTHLNYMDPICDFLYHMKYMFTGDSVKEQVEKIICNLKPALKLRLRFITHISKMEPAAVPPQAMNSGSPAPQSNQ

SEQ ID NO: 52839 - protein, 886 aa, Homo sapiens
METQLQSIFEEVVKTEVIEEAFPGMFMDTPEDEKTKLISCLGAFRQFWGGLSQESHEQCIQWIVKFIHGQHSPKRISFLYDCLAMAVETGLLPPRLVCESLINSDTLEWERTQLWALTFKLVRKIIGGVDYKGVRDLLKVILEKILTIPNTVSSAVVQQLLAAREVIAYILERNACLLPAYFAVTEIRKLYPEGKLPHWLLGNLVSDFVDTFRPTARINSICGRCSLLPVVNNSGAICNSWKLDPATLRFPLKGLLPYDKDLFEPQTALLRYVLEQPYSRDMVCNMLGLNKQTLNIAQHKQRCPVLEDQLVDLVVYAMERSETEEKFDDGGTSQLLWQHLSSQLIFFVLFQFASFPHMVLSLHQKLAGRGLIKGRDHLMWVLLQFISGSIQKNALADFLPVMKLFDLLYPEKEYIPVPDINKPQSTHAFAMTCIWIHLNRKAQNDNSKLQIPIPHSLRLHHEFLQQSLRNKSLQMNDYKIALLCNAYSTNSECFTLPMGALVETIYGNGIMRIPLPGTNCMASGSITPLPMNLLDSLTVHAKMSLIHSIATRVIKLAHAKSSVALAPALVETYSRLLVYMEIESLGIKGFISQLLPTVFKSHAWGILHTLLEMFSYRMHHIQPHYRVQLLSHLHTLAAVAQTNQNQLHLCVESTALRLITALGSSEVQPQFTRFLSDPKTVLSAESEELNRALILTLARATHVTDFFTGSDSIQGTWCKDILQTIMSFTPHNWASHTLSCFPGPLQAFFKQNNVPQESRFNLKKNVEEEYRKWKSMSNENDIITHFSMQGSPPLFLCLLWKMLLETDHINQIGYRVLERIGARALVAHVRTFADFLVYEFSTSAGGQQLNKCIEILNDMVWKYNIVTLDRLILCLVRINTFLSLFS

SEQ ID NO: 52840 - protein, 1374 aa, Homo sapiens
METQLQSIFEEVVKTEVIEEAFPGMFMDTPEDEKTKLISCLGAFRQFWGGLSQESHEQCIQWIVKFIHGQHSPKRISFLYDCLAMAVETGLLPPRLVCESLINSDTLEWERTQLWALTFKLVRKIIGGVDYKGVRDLLKVILEKILTIPNTVSSAVVQQLLAAREVIAYILERNACLLPAYFAVTEIRKLYPEGKLPHWLLGNLVSDFVDTFRPTARINSICGRCSLLPVVNNSGAICNSWKLDPATLRFPLKGLLPYDKDLFEPQTALLRYVLEQPYSRDMVCNMLGLNKQTLNIAQHKQRCPVLEDQLVDLVVYAMERSETEEKFDDGGTSQLLWQHLSSQLIFFVLFQFASFPHMVLSLHQKLAGRGLIKGRDHLMWVLLQFISGSIQKNALADFLPVMKLFDLLYPEKEYIPVPDINKPQSTHAFAMTCIWIHLNRKAQNDNSKLQIPIPHSLRLHHEFLQQSLRNKSLQMNDYKIALLCNAYSTNSECFTLPMGALVETIYGNGIMRIPLPGTNCMASGSITPLPMNLLDSLTVHAKMSLIHSIATRVIKLAHAKSSVALAPALVETYSRLLVYMEIESLGIKGFISQLLPTVFKSHAWGILHTLLEMFSYRMHHIQPHYRVQLLSHLHTLAAVAQTNQNQLHLCVESTALRLITALGSSEVQPQFTRFLSDPKTVLSAESEELNRALILTLARATHVTDFFTGSDSIQGTWCKDILQTIMSFTPHNWASHTLSCFPGPLQAFFKQNNVPQESRFNLKKNVEEEYRKWKSMSNENDIITHFSMQGSPPLFLCLLWKMLLETDHINQIGYRVLERIGARALVAHVRTFADFLVYEFSTSAGGQQLNKCIEILNDMVWKYNIVTLDRLILCLAMRSHEGNEAQVCYFIIQLLLLKPNDFRNRVSDFVKENSPEHWLQNDWHTKHMNYHKKYPEKLYFEGLAEQVDPPVQIQSPYLPIYFGNVCLRFLPVFDIVIHRFLELLPVSKSLETLLDHLGGLYKFHDRPVTYLYNTLHYYEMHLRDRAFLKRKLVHAIIGSLKDNRPQGWCLSDTYLKCAMNAREENPWVPDDTYYCRLIGRLVDTMAGKSPGPFPNCDWRFNEFPNPAAHALHVTCVELMALAVSGKEVGNALLNVVLKSQPLVPRENITAWMNAIGLIITALPEPYWIVLHDRIVSVISSPSLTSETEWVGYPFRLFDFTACHQSYSEMSCSYTLALAHAVWHHSSIGQLSLIPKFLTEVLLPIVKTEFQLLYVYHLVGPFLQRFQQERTRCMIEIGVAFYDMLLNVDQCSTHLNYMDPICDFLYHMKYMFTGDSVKEQVKKIICNLKPALKLRLRFITHISKMEPAAVPPQAMNSGSPAPQSNQVPVSLPVTQ

SEQ ID NO: 52841 - protein, 1364 aa, Homo sapiens
METQLQSIFEEVVKTEVIEEAFPGMFMDTPEDEKTKLISCLGAFRQFWGGLSQESHEQCIQWIVKFIHGQHSPKRISFLYDCLAMAVETGLLPPRLVCESLINSDTLEWERTQLWALTFKLVRKIIGGVDYKGVRDLLKVILEKILTIPNTVSSAVVQQLLAAREVIAYILERNACLLPAYFAVTEIRKLYPEGKLPHWLLGNLVSDFVDTFRPTARINSICGRCSLLPVVNNSGAICNSWKLDPATLRFPLKGLLPYDKDLFEPQTALLRYVLEQPYSRDMVCNMLGLNKQHKQRCPVLEDQLVDLVVYAMERSETEEKFDDGGTSQLLWQHLSSQLIFFVLFQFASFPHMVLSLHQKLAGRGLIKGRDHLMWVLLQFISGSIQKNALADFLPVMKLFDLLYPEKEYIPVPDINKPQSTHAFAMTCIWIHLNRKAQNDNSKLQIPIPHSLRLHHEFLQQSLRNKSLQMNDYKIALLCNAYSTNSECFTLPMGALVETIYGNGIMRIPLPGTNCMASGSITPLPMNLLDSLTVHAKMSLIHSIATRVIKLAHAKSSVALAPALVETYSRLLVYMEIESLGIKGFISQLLPTVFKSHAWGILHTLLEMFSYRMHHIQPHYRVQLLSHLHTLAAVAQTNQNQLHLCVESTALRLITALGSSEVQPQFTRFLSDPKTVLSAESEELNRALILTLARATHVTDFFTGSDSIQGTWCKDILQTIMSFTPHNWASHTLSCFPGPLQAFFKQNNVPQESRFNLKKNVEEEYRKWKSMSNENDIITHFSMQGSPPLFLCLLWKMLLETDHINQIGYRVLERIGARALVAHVRTFADFLVYEFSTSAGGQQLNKCIEILNDMVWKYNIVTLDRLILCLAMRSHEGNEAQVCYFIIQLLLLKPNDFRNRVSDFVKENSPEHWLQNDWHTKHMNYHKKYPEKLYFEGLAEQVDPPVQIQSPYLPIYFGNVCLRFLPVFDIVIHRFLELLPVSKSLETLLDHLGGLYKFHDRPVTYLYNTLHYYEMHLRDRAFLKRKLVHAIIGSLKDNRPQGWCLSDTYLKCAMNAREENPWVPDDTYYCRLIGRLVDTMAGKSPGPFPNCDWRFNEFPNPAAHALHVTCVELMALAVSGKEVGNALLNVVLKSQPLVPRENITAWMNAIGLIITALPEPYWIVLHDRIVSVISSPSLTSETEWVGYPFRLFDFTACHQSYSEMSCSYTLALAHAVWHHSSIGQLSLIPKFLTEVLLPIVKTEFQLLYVYHLVGPFLQRFQQERTRCMIEIGVAFYDMLLNVDQCSTHLNYMDPICDFLYHMKYMFTGDSVKEQVEKIICNLKPALKLRLRFITHISKMEPAAVPPQAMNSGSPAPQSNQVDTLT

SEQ ID NO: 52842 - protein, 1368 aa, Homo sapiens
METQLQSIFEEVVKTEVIEEAFPGMFMDTPEDEKTKLISCLGAFRQFWGGLSQESHEQCIQWIVKFIHGQHSPKRISFLYDCLAMAVETGLLPPRLVCESLINSDTLEWERTQLWALTFKLVRKIIGGVDYKGVRDLLKVILEKILTIPNTVSSAVVQQLLAAREVIAYILERNACLLPAYFAVTEIRKLYPEGKLPHWLLGNLVSDFVDTFRPTARINSICGRCSLLPVVNNSGAICNSWKLDPATLRFPLKGLLPYDKDLFEPQTALLRYVLEQPYSRDMVCNMLGLNKQHKQRCPVLEDQLVDLVVYAMERSETEEKFDDGGTSQLLWQHLSSQLIFFVLFQFASFPHMVLSLHQKLAGRGLIKGRDHLMWVLLQFISGSIQKNALADFLPVMKLFDLLYPEKEYIPVPDINKPQSTHAFAMTCIWIHLNRKAQNDNSKLQIPIPHSLRLHHEFLQQSLRNKSLQMNDYKIALLCNAYSTNSECFTLPMGALVETIYGNGIMRIPLPGTNCMASGSITPLPMNLLDSLTVHAKMSLIHSIATRVIKLAHAKSSVALAPALVETYSRLLVYMEIESLGIKGFISQLLPTVFKSHAWGILHTLLEMFSYRMHHIQPHYRVQLLSHLHTLAAVAQTNQNQLHLCVESTALRLITALGSSEVQPQFTRFLSDPKTVLSAESEELNRALILTLARATHVTDFFTGSDSIQGTWCKDILQTIMSFTPHNWASHTLSCFPGPLQAFFKQNNVPQESRFNLKKNVEEEYRKWKSMSNENDIITHFSMQGSPPLFLCLLWKMLLETDHINQIGYRVLERIGARALVAHVRTFADFLVYEFSTSAGGQQLNKCIEILNDMVWKYNIVTLDRLILCLAMRSHEGNEAQVCYFIIQLLLLKPNDFRNRVSDFVKENSPEHWLQNDWHTKHMNYHKKYPEKLYFEGLAEQVDPPVQIQSPYLPIYFGNVCLRFLPVFDIVIHRFLELLPVSKSLETLLDHLGGLYKFHDRPVTYLYNTLHYYEMHLRDRAFLKRKLVHAIIGSLKDNRPQGWCLSDTYLKCAMNAREENPWVPDDTYYCRLIGRLVDTMAGKSPGPFPNCDWRFNEFPNPAAHALHVTCVELMALAVSGKEVGNALLNVVLKSQPLVPRENITAWMNAIGLIITALPEPYWIVLHDRIVSVISSPSLTSETEWVGYPFRLFDFTACHQSYSEMSCSYTLALAHAVWHHSSIGQLSLIPKFLTEVLLPIVKTEFQLLYVYHLVGPFLQRFQQERTRCMIEIGVAFYDMLLNVDQCSTHLNYMDPICDFLYHMKYMFTGDSVKEQVEKIICNLKPALKLRLRFITHISKMEPAAVPPQAMNSGSPAPQSNQVPVSLPVTQ

SEQ ID NO: 52843 - protein, 1374 aa, Homo sapiens
METQLQSIFEEVVKTEVIEEAFPGMFMDTPEDEKTKLISCLGAFRQFWGGLSQESHEQCIQWIVKFIHGQHSPKRISFLYDCLAMAVETGLLPPRLVCESLINSDTLEWERTQLWALTFKLVRKIIGGVDYKGVRDLLKVILEKILTIPNTVSSAVVQQLLAAREVIAYILERNACLLPAYFAVTEIRKLYPEGKLPHWLLGNLVSDFVDTFRPTARINSICGRCSLLPVVNNSGAICNSWKLDPATLRFPLKGLLPYDKDLFEPQTALLRYVLEQPYSRDMVCNMLGLNKQLISALQHKQRCPVLEDQLVDLVVYAMERSETEEKFDDGGTSQLLWQHLSSQLIFFVLFQFASFPHMVLSLHQKLAGRGLIKGRDHLMWVLLQFISGSIQKNALADFLPVMKLFDLLYPEKEYIPVPDINKPQSTHAFAMTCIWIHLNRKAQNDNSKLQIPIPHSLRLHHEFLQQSLRNKSLQMNDYKIALLCNAYSTNSECFTLPMGALVETIYGNGIMRIPLPGTNCMASGSITPLPMNLLDSLTVHAKMSLIHSIATRVIKLAHAKSSVALAPALVETYSRLLVYMEIESLGIKGFISQLLPTVFKSHAWGILHTLLEMFSYRMHHIQPHYRVQLLSHLHTLAAVAQTNQNQLHLCVESTALRLITALGSSEVQPQFTRFLSDPKTVLSAESEELNRALILTLARATHVTDFFTGSDSIQGTWCKDILQTIMSFTPHNWASHTLSCFPGPLQAFFKQNNVPQESRFNLKKNVEEEYRKWKSMSNENDIITHFSMQGSPPLFLCLLWKMLLETDHINQIGYRVLERIGARALVAHVRTFADFLVYEFSTSAGGQQLNKCIEILNDMVWKYNIVTLDRLILCLAMRSHEGNEAQVCYFIIQLLLLKPNDFRNRVSDFVKENSPEHWLQNDWHTKHMNYHKKYPEKLYFEGLAEQVDPPVQIQSPYLPIYFGNVCLRFLPVFDIVIHRFLELLPVSKSLETLLDHLGGLYKFHDRPVTYLYNTLHYYEMHLRDRAFLKRKLVHAIIGSLKDNRPQGWCLSDTYLKCAMNAREENPWVPDDTYYCRLIGRLVDTMAGKSPGPFPNCDWRFNEFPNPAAHALHVTCVELMALAVSGKEVGNALLNVVLKSQPLVPRENITAWMNAIGLIITALPEPYWIVLHDRIVSVISSPSLTSETEWVGYPFRLFDFTACHQSYSEMSCSYTLALAHAVWHHSSIGQLSLIPKFLTEVLLPIVKTEFQLLYVYHLVGPFLQRFQQERTRCMIEIGVAFYDMLLNVDQCSTHLNYMDPICDFLYHMKYMFTGDSVKEQVEKIICNLKPALKLRLRFITHISKMEPAAVPPQAMNSGSPAPQSNQVPVSLPVTQ

SEQ ID NO: 52844 - protein, 37 aa, Homo sapiens [sequence omitted]

SEQ ID NO: 52845 - protein, 43 aa, Homo sapiens [sequence omitted]

SEQ ID NO: 52846 - protein, 475 aa, Homo sapiens
METQLQSIFEEVVKTEVIEEAFPGMFMDTPEDEKTKLISCLGAFRQFWGGLSQESHEQCIQWIVKFIHGQHSPKRISFLYDCLAMAVETGLLPPRLVCESLINSDTLEWERTQLWALTFKLVRKIIGGVDYKGVRDLLKVILEKILTIPNTVSSAVVQQLLAAREVIAYILERNACLLPAYFAVTEIRKLYPEGKLPHWLLGNLVSDFVDTFRPTARINSICGRCSLLPVVNNSGAICNSWKLDPATLRFPLKGLLPYDKDLFEPQTALLRYVLEQPYSRDMVCNMLGLNKQHKQRCPVLEDQLVDLVVYAMERSETEEKFDDGGTSQLLWQHLSSQLIFFVLFQFASFPHMVLSLHQKLAGRGLIKGRDHLMWVLLQFISGSIQKNALADFLPVMKLFDLLYPEKEYIPVPDINKPQSTHAFAMTCIWIHLNRKAQNDNSKLQIPIPHSLRLHHESAFANCFQITCMGDLTHTP

SEQ ID NO: 52847 - protein, 142 aa, Homo sapiens
MHHIQPHYRVQLLSHLHTLAAVAQTNQNQLHLCVESTALRLITALGSSEVQPQFTRFLSDPKTVLSAESEELNRALILTLARATHVTDFFTGSDSIQGTWCKDILQTIMSFTPHNWASHTLSCFPGPLQTLLILGELALRKT

SEQ ID NO: 52848 - protein, 886 aa, Homo sapiens
METQLQSIFEEVVKTEVIEEAFPGMFMDTPEDEKTKLISCLGAFRQFWGGLSQESHEQCIQWIVKFIHGQHSPKRISFLYDCLAMAVETGLLPPRLVCESLINSDTLEWERTQLWALTFKLVRKIIGGVDYKGVRDLLKVILEKILTIPNTVSSAVVQQLLAAREVIAYILERNACLLPAYFAVTEIRKLYPEGKLPHWLLGNLVSDFVDTFRPTARINSICGRCSLLPVVNNSGAICNSWKLDPATLRFPLKGLLPYDKDLFEPQTALLRYVLEQPYSRDMVCNMLGLNKQVLKIFKHKQRCPVLEDQLVDLVVYAMERSETEEKFDDGGTSQLLWQHLSSQLIFFVLFQFASFPHMVLSLHQKLAGRGLIKGRDHLMWVLLQFISGSIQKNALADFLPVMKLFDLLYPEKEYIPVPDINKPQSTHAFAMTCIWIHLNRKAQNDNSKLQIPIPHSLRLHHEFLQQSLRNKSLQMNDYKIALLCNAYSTNSECFTLPMGALVETIYGNGIMRIPLPGTNCMASGSITPLPMNLLDSLTVHAKMSLIHSIATRVIKLAHAKSSVALAPALVETYSRLLVYMEIESLGIKGFISQLLPTVFKSHAWGILHTLLEMFSYRMHHIQPHYRVQLLSHLHTLAAVAQTNQNQLHLCVESTALRLITALGSSEVQPQFTRFLSDPKTVLSAESEELNRALILTLARATHVTDFFTGSDSIQGTWCKDILQTIMSFTPHNWASHTLSCFPGPLQAFFKQNNVPQESRFNLKKNVEEEYRKWKSMSNENDIITHFSMQGSPPLFLCLLWKMLLETDHINQIGYRVLERIGARALVAHVRTFADFLVYEFSTSAGGQQLNKCIEILNDMVWKYNIVTLDRLILCLVRINTFLSLFS

SEQ ID NO: 52849 - protein, 1009 aa, Homo sapiens
MERSETEEKFDDGGTSQLLWQHLSSQLIFFVLFQFASFPHMVLSLHQKYIPVPDINKPQSTHAFAMTCIWIHLNRKAQNDNSKLQIPIPHSLRLHHEFLQQSLRNKSLQMNDYKIALLCNAYSTNSECFTLPMGALVETIYGNGIMRIPLPGTNCMASGSITPLPMNLLDSLTVHAKMSLIHSIATRVIKLAHAKSSVALAPALVETYSRLLVYMEIESLGIKGFISQLLPTVFKSHAWGILHTLLEMFSYRMHHIQPHYRVQLLSHLHTLAAVAQTNQNQLHLCVESTALRLITALGSSEVQPQFTRFLSDPKTVLSAESEELNRALILTLARATHVTDFFTGSDSIQGTWCKDILQTIMSFTPHNWASHTLSCFPGPLQAFFKQNNVPQESRFNLKKNVEEEYRKWKSMSNENDIITHFSMQGSPPLFLCLLWKMLLETDHINQIGYRVLERIGARALVAHVRTFADFLVYEFSTSAGGQQLNKCIEILNDMVWKYNIVTLDRLILCLAMRSHEGNEAQVCYFIIQLLLLKPNDFRNRVSDFVKENSPEHWLQNDWHTKHMNYHKKYPEKLYFEGLAEQVDPPVQIQSPYLPIYFGNVCLRFLPVFDIVIHRFLELLPVSKSLETLLDHLGGLYKFHDRPVTYLYNTLHYYEMHLRDRAFLKRKLVHAIIGSLKDNRPQGWCLSDTYLKCAMNAREENPWVPDDTYYCRLIGRLVDTMAGKSPGPFPNCDWRFNEFPNPAAHALHVTCVELMALAVSGKEVGNALLNVVLKSQPLVPRENITAWMNAIGLIITALPEPYWIVLHDRIVSVISSPSLTSETEWVGYPFRLFDFTACHQSYSEMSCSYTLALAHAVWHHSSIGQLSLIPKFLTEVLLPIVKTEFQLLYVYHLVGPFLQRFQQERTRCMIEIGVAFYDMLLNVDQCSTHLNYMDPICDFLYHMKYMFTGDSVKEQVEKIICNLKPALKLRLRFITHISKMEPAAVPPQAMNSGSPAPQSNQVPVSLPVTQ

SEQ ID NO: 52850 - protein, 989 aa, Homo sapiens
MKVVNLKQAILQAWKERWSDYQWAINMKKFFPKGATWDILNLADALLEQAMIGPSPNPLILSYLKYAISSQMVSYSSVLTAISKFDDFSRDLCVQALLDIMDMFCDRLSCHGKAEECIGLCRALLSALHWLLRCTAASAERLREGLEAGTPAAGEKQLAMCLQRLEKTLSSTKNRALLHIAKLEEASSWTAIEHSLLKLGEILANLSNPQLRSQAEQCGTLIRSIPTMLSVHAEQMHKTGFPTVHAVILLEGTMNLTGETQSLVEQLTMVKRMQHIPTPLFVLEIWKACFVGLIESPEGTEELKWTAFTFLKIPQVLVKLKKYSHGDKDFTEDVNCAFEFLLKLTPLLDKADQRCNCDCTNFLLQECGKQGLLSEASVNNLMAKRKADREHAPQQKSGENANIQPNIQLILRAEPTVTNILKTMDADHSKSPEGLLGVLGHMLSGKSLDLLLAAAAATGKLKSFARKFINLNEFTTYGSEESTKPASVRALLFDISFLMLCHVAQTYGSEVILSESRTGAEVPFFETWMQTCMPEEGKILNPDHPCFRPDSTKVESLVALLNNSSEMKLVQMKWHEACLSISAAILEILNAWENGVLAFESIQKITDNIKGKVCSLAVCAVAWLVAHVRMLGLDEREKSLQMIRQLAGPLFSENTLQFYNERVVIMNSILERMCADVLQQTATQIKFPSTGVDTMPYWNLLPPKRPIKEVLTDIFAKVLEKGWVDSRSIHIFDTLLHMGGVYWFCNNLIKELLKETRKEHTLRAVELLYSIFCLDMQQVTLVLLGHILPGLLTDSSKWHSLMDPPGTALAKLAVWCALSSYSSHKGQASTRQKKRHREDIEDYISLFPLDDVQPSKLMRLLSSNEDDANILSSPTDRSMSSSLSASQLHTVNMRDPLNRVLANLFLLISSILGSRTAGPHTQFVQWFMEECVDCLEQGGRGSVLQFMPFTTVSELVKVSAMSSPKVVLAITDLSLPLGRQVAAKAIAAL

SEQ ID NO: 52851 - protein, 989 aa, Homo sapiens; identical to SEQ ID NO: 52850

SEQ ID NO: 52852 - protein, 976 aa, Homo sapiens
MKVVNLKQAILQAWKERWSDYQWAINMKKFFPKGATWDILNLADALLEQAMIGPSPNPLILSYLKYAISSQFDDFSRDLCVQALLDIMDMFCDRLSCHGKAEECIGLCRALLSALHWLLRCTAASAERLREGLEAGTPAAGEKQLAMCLQRLEKTLSSTKNRALLHIAKLEEASSWTAIEHSLLKLGEILANLSNPQLRSQAEQCGTLIRSIPTMLSVHAEQMHKTGFPTVHAVILLEGTMNLTGETQSLVEQLTMVKRMQHIPTPLFVLEIWKACFVGLIESPEGTEELKWTAFTFLKIPQVLVKLKKYSHGDKDFTEDVNCAFEFLLKLTPLLDKADQRCNCDCTNFLLQECGKQGLLSEASVNNLMAKRKADREHAPQQKSGENANIQPNIQLILRAEPTVTNILKTMDADHSKSPEGLLGVLGHMLSGKSLDLLLAAAAATGKLKSFARKFINLNEFTTYGSEESTKPASVRALLFDISFLMLCHVAQTYGSEVILSESRTGAEVPFFETWMQTCMPEEGKILNPDHPCFRPDSTKVESLVALLNNSSEMKLVQMKWHEACLSISAAILEILNAWENGVLAFESIQKITDNIKGKVCSLAVCAVAWLVAHVRMLGLDEREKSLQMIRQLAGPLFSENTLQFYNERVVIMNSILERMCADVLQQTATQIKFPSTGVDTMPYWNLLPPKRPIKEVLTDIFAKVLEKGWVDSRSIHIFDTLLHMGGVYWFCNNLIKELLKETRKEHTLRAVELLYSIFCLDMQQVTLVLLGHILPGLLTDSSKWHSLMDPPGTALAKLAVWCALSSYSSHKGQASTRQKKRHREDIEDYISLFPLDDVQPSKLMRLLSSNEDDANILSSPTDRSMSSSLSASQLHTVNMRDPLNRVLANLFLLISSILGSRTAGPHTQFVQWFMEECVDCLEQGGRGSVLQFMPFTTVSELVKVSAMSSPKVVLAITDLSLPLGRQVAAKAIAAL

SEQ ID NO: 52853 - protein, 989 aa, Homo sapiens; identical to SEQ ID NO: 52850

SEQ ID NO: 52854 - protein, 287 aa, Homo sapiens
  VARIANT 1: note = MOD_RES - Any amino acid
XNLIKELLKETRKEHTLRAVELLYSIFCLDMQQVTLVLLGHILPGLLTDSSKWHSLMDPPGTALAKLAVWCALSSYSSHKGQASTRQKKRHREDIEDYISLFPLDDVQPSKLMRLLSSNEDDANILSSPRSSLGSPCTSYLRWVKVGLGHPRGAPLLHSAGCFPALHLLRPTADRSMSSSLSASQLHTVNMRDPLNRVLANLFLLISSILGSRTAGPHTQFVQWFMEECVDCLEQGGRGSVLQFMPFTTVSELVKVSAMSSPKVVLAITDLSLPLGRQVAAKAIAAL

SEQ ID NO: 52855 - protein, 301 aa, Homo sapiens
MKVVNLKQAILQAWKERWSDYQWAINMKKFFPKGATWDILNLADALLEQAMIGPSPNPLILSYLKYAISSQMVSYSSVLTAISKFDDFSRDLCVQALLDIMDMFCDRLSCHGKAEECIGLCRALLSALHWLLRCTAASAERLREGLEAGTPAAGEKQLAMCLQRLEKTLSSTKNRALLHIAKLEEASLHTSQGLGQGGTRANQPTASWTAIEHSLLKLGEILANLSNPQLRSQAEQCGTLIRSIPTMLSVHAEQMHKTGFPTVHAVILLEGTMNLTGETQSLVEQLTMVKRMQHIPTPLFV

SEQ ID NO: 52856 - protein, 899 aa, Homo sapiens
MPLVPRWCPTLLSSQPSVSCHGKAEECIGLCRALLSALHWLLRCTAASAERLREGLEAGTPAAGEKQLAMCLQRLEKTLSSTKNRALLHIAKLEEASSWTAIEHSLLKLGEILANLSNPQLRSQAEQCGTLIRSIPTMLSVHAEQMHKTGFPTVHAVILLEGTMNLTGETQSLVEQLTMVKRMQHIPTPLFVLEIWKACFVGLIESPEGTEELKWTAFTFLKIPQVLVKLKKYSHGDKDFTEDVNCAFEFLLKLTPLLDKADQRCNCDCTNFLLQECGKQGLLSEASVNNLMAKRKADREHAPQQKSGENANIQPNIQLILRAEPTVTNILKTMDADHSKSPEGLLGVLGHMLSGKSLDLLLAAAAATGKLKSFARKFINLNEFTTYGSEESTKPASVRALLFDISFLMLCHVAQTYGSEVILSESRTGAEVPFFETWMQTCMPEEGKILNPDHPCFRPDSTKVESLVALLNNSSEMKLVQMKWHEACLSISAAILEILNAWENGVLAFESIQKITDNIKGKVCSLAVCAVAWLVAHVRMLGLDEREKSLQMIRQLAGPLFSENTLQFYNERVVIMNSILERMCADVLQQTATQIKFPSTGVDTMPYWNLLPPKRPIKEVLTDIFAKVLEKGWVDSRSIHIFDTLLHMGGVYWFCNNLIKELLKETRKEHTLRAVELLYSIFCLDMQQVTLVLLGHILPGLLTDSSKWHSLMDPPGTALAKLAVWCALSSYSSHKGQASTRQKKRHREDIEDYISLFPLDDVQPSKLMRLLSSNEDDANILSSPTDRSMSSSLSASQLHTVNMRDPLNRVLANLFLLISSILGSRTAGPHTQFVQWFMEECVDCLEQGGRGSVLQFMPFTTVSELVKVSAMSSPKVVLAITDLSLPLGRQVAAKAIAAL

SEQ ID NO: 52857 - protein, 251 aa, Homo sapiens
MKKFFPKGATWDILNLADALLEQAMIGPSPNPLILSYLKYAISSQMVSYSSVLTAIMEILNAWENGVLAFESIQKITDNIKGKVCSLAVCAVAWLVAHVRMLGLDEREKSLQMIRQLAGPLFSENTLQFYNERVVIMNSILERMCADVLQQTATQIKFPSTGVDTMPYWNLLPPKRPIKEVLTDIFAKVLEKGWVDSRSIHIFDTLLHMGGVYWFCNNLIKELLKETRKEHTLRAVELLYSIFCLDMQQVT

SEQ ID NO: 52858 - protein, 821 aa, Homo sapiens
MIGPSPNPLILSYLKYAISSQMVSYSSVLTAISKFDDFSRDLCVQALLDIMDMFCDRLSCHGKAEECIGLCRALLSALHWLLRCTAASAERLREGLEAGTPAAGEKQLAMCLQRLEKTLSSTKNRALLHIAKLEEASSWTAIEHSLLKLGEILANLSNPQLRSQAEQCGTLIRSIPTMLSVHAEQMHKTGFPTVHAVILLEGTMNLTGETQSLVEQLTMVKRMQHIPTPLFVLEIWKACFVGLIESPEGTEELKWTAFTFLKIPQVLVKLKKYSHGDKDFTEDVNCAFEFLLKLTPLLDKADQRCNCDCTNFLLQECGKQGLLSEASVNNLMAKRKADREHAPQQKSGENANIQPNIQLILRAEPTVTNILKTMDADHSKSPEGLLGVLGHMLSGKSLDLLLAAAAATGKLKSFARKFINLNEFTTYGSEESTKPASVRALLFDISFLMLCHVAQTYGSEVILSESRTGAEVPFFETWMQTCMPEEGKILNPDHPCFRPDSTKVESLVALLNNSSEMKLVQMKWHEACLSISAAILEILNAWENGVLAFESIQKITDNIKGKVCSLAVCAVAWLVAHVRMLGLDEREKSLQMIRQLAGPLFSENTLQFYNERVVIMNSILERMCADVLQQTATQIKFPSTGVDTMPYWNLLPPKRPIKEVLTDIFAKVLEKGWVDSRSIHIFDTLLHMGGVYWFCNNLIKELLKETRKEHTLRAVELLYSIFCLDMQQVTLVLLGHILPGLLTDSSKWHSLMDPPGTALAKLAVWCALSSYSSHKGQASTRQKKRHREDIEDYISPKVVLAITDLSLPLGRQVAAKAIAAL

SEQ ID NO: 52859 - protein, 341 aa, Homo sapiens
MKKFFPKGATWDILNLADALLEQAMIGPSPNPLILSYLKYAISSQMVSYSSVLTAISKFDDFSRDLCVQALLDIMDMFCDRLSCHGKAEECIGLCRALLSALHWLLRCTAASAERLREGLEAGTPAAGEKQLAMCLQRLEKTLSSTKNRALLHIAKLEEASSWTAIEHSLLKLGEILANLSNPQLRSQAEQCGTLIRSIPTMLSVHAEQMHKTGFPTVHAVILLEGTMNLTGETQSLVEQQTATQIKFPSTGVDTMPYWNLLPPKRPIKEVLTDIFAKVLEKGWVDSRSIHIFDTLLHMGGVYWFCNNLIKELLKETRKEHTLRAVELLYSIFCLDMQQVT

SEQ ID NO: 52860 - protein, 931 aa, Homo sapiens
MKVVNLKQAILQAWKERWSDYQWAINMKKFFPKGATWDILNLADALLEQAMIGPSPNPLILSYLKYAISSQMVSYSSVLTAIMCLQRLEKTLSSTKNRALLHIAKLEEASLHTSQGLGQGGTRANQPTASWTAIEHSLLKLGEILANLSNPQLRSQAEQCGTLIRSIPTMLSVHAEQMHKTGFPTVHAVILLEGTMNLTGETQSLVEQLTMVKRMQHIPTPLFVLEIWKACFVGLIESPEGTEELKWTAFTFLKIPQVLVKLKKYSHGDKDFTEDVNCAFEFLLKLTPLLDKADQRCNCDCTNFLLQECGKQGLLSEASVNNLMAKRKADREHAPQQKSGENANIQPNIQLILRAEPTVTNILKTMDADHSKSPEGLLGVLGHMLSGKSLDLLLAAAAATGKLKSFARKFINLNEFTTYGSEESTKPASVRALLFDISFLMLCHVAQTYGSEVILSESRTGAEVPFFETWMQTCMPEEGKILNPDHPCFRPDSTKVESLVALLNNSSEMKLVQMKWHEACLSISAAILEILNAWENGVLAFESIQKITDNIKGKVCSLAVCAVAWLVAHVRMLGLDEREKSLQMIRQLAGPLFSENTLQFYNERVVIMNSILERMCADVLQQTATQIKFPSTGVDTMPYWNLLPPKRPIKEVLTDIFAKVLEKGWVDSRSIHIFDTLLHMGGVYWFCNNLIKELLKETRKEHTLRAVELLYSIFCLDMQQVTLVLLGHILPGLLTDSSKWHSLMDPPGTALAKLAVWCALSSYSSHKGQASTRQKKRHREDIEDYISLFPLDDVQPSKLMRLLSSNEDDANILSSPTDRSMSSSLSASQLHTVNMRDPLNRVLANLFLLISSILGSRTAGPHTQFVQWFMEECVDCLEQGGRGSVLQFMPFTTVSELVKVSAMSSPKVVLAITDLSLPLGRQVAAKAIAAL

SEQ ID NO: 52861 - protein, 147 aa, Homo sapiens
MKKFFPKGATWDILNLADALLEQAMIGPSPNPLILSYLKYAISSQMVSYSSVLTAISKFDDFSRDLCVQALLDIMDMFCDRLSCHGKAEECIGLCRALLSALHFMPFTTVSELVKVSAMSSPKVVLAITDLSLPLGRQVAAKAIAAL

SEQ ID NO: 52862 - protein, 306 aa, Homo sapiens
MKKFFPKGATWDILNLADALLEQAMIGPSPNPLILSYLKYAISSQMVSYSSVLTAISKFDDFSRDLCVQALLDIMDMFCDRLSCHGKAEECIGLCRALLSALHWLLRCTAASAERLREGLEAGTPAAGEKQLAMCLQRLEKTLSSTKNRALLHIAKLEEASSWTAIEHSLLKLGEILANLSNPQLRSQAEQCGTLIRSIPTMLSVHAEQMHKTGFPTVHAVILLEGTMNLTGETQSLVEQLTMVKRMQHIPTPLFGRGSVLQFMPFTTVSELVKVSAMSSPKVVLAITDLSLPLGRQVAAKAIAAL

SEQ ID NO: 52863 - protein, 747 aa, Homo sapiens
MVPGSEGPARAGSVVADVVFVIEGTANLGPYFEGLRKHYLLPAIEYFNGGPPAETDFGGDYGGTQYSLVVFNTVDCAPESYVQCHAPTSSAYEFVTWLDGIKFMGGGGESCSLIAEGLSTALQLFDDFKKMREQIGQTHRVCLLICNSPPYLLPAVESTTYSGCTTENLVQQIGERGIHFSIVSPRKLPALRLLFEKAAPPALLEPLQPPTDVSQDPRHMVLVRGLVLPVGGGSAPGPLQSKQPVPLPPAAPSGATLSAAPQQPLPPVPPQYQVPGNLSAAQVAAQNAVEAAKNQKAGLGPRFSPITPLQQAAPGVGPPFSQAPAPQLPPGPPGAPKPPPASQPSLVSTVAPGSGLAPTAQPGAPSMAGTVAPGGVSGPSPAQLGAPALGGQQSVSNKLLAWSGVLEWQEKPKPASVDANTKLTRSLPCQVYVNHGENLKTEQWPQKLIMQLIPQQLLTTLGPLFRNSRMVQFHFTNKDLESLKGLYRIMGNGFAGCVHFPHTAPCEVRVLMLLYSSKKKIFMGLIPYDQSGFVNGIRQVITNHKQVQQQKLEQQQRGMGGQQAPPGLGPILEDQARPSQNLLQLRPPQPQPQGTVGASGATGQPQPQGTAQPPPGAPQGPPGAASGPPPPGPILRPQNPGANPQLRSLLLNPPPPQTGVPPPQASLHHLQPPGAPALLPPPHQGLGQPQLGPPLLHPPPAQSWPAQLPPRAPLPGQMLLSGGPRGPVPQPGLQPSVMEDDILMDLI

SEQ ID NO: 52864 - protein, 755 aa, Homo sapiens
MVPGSEGPARAGSVVADVVFVIEGTANLGPYFEGLRKHYLLPAIEYFNGGPPAETDFGGDYGGTQYSLVVFNTVDCAPESYVQCHAPTSSAYEFVTWLDGIKFMGGGGESCSLIAEGLSTALQLFDDFKKMREQIGQTHRVCLLICNSPPYLLPAVESTTYSGCTTENLVQQIGERGIHFSIVSPRKLPALRLLFEKAAPPALLEPLQPPTDVSQDPRHMVLVRGLVLPVGGGSAPGPLQSKQPVPLPPAAPSGATLSAAPQQPLPPVPPQYQVPGNLSAAQVAAQNAVEAAKNQKAGLGPRFSPITPLQQAAPGVGPPFSQAPAPQLPPGPPGAPKPPPASQPSLVSTVAPGSGLAPTAQPGAPSMAGTVAPGGVSGPSPAQLGAPALGGQQSVSNKLLAWSGVLEWQEKPKPASVDANTKLTRSLPCQVYVNHGENLKTEQWPQKLIMQLIPQQLLTTLGPLFRNSRMVQFHFTNKDLESLKGLYRIMGNGFAGCVHFPHTAPCEVRVLMLLYSSKKKIFMGLIPYDQSGFVNGIRQVITNHKQVQQQKLEQQQRGMGGQQAPPGLGPILEDQARPSQNLLQLRPPQPQPQGTVGASGATGQPQPQGTAQPPPGAPQGPPGAASGPPPPGPILRPQNPGANPQLRSLLLNPPPPQTGVPPPQASLHHHLPSPGPHNFPLGLHCQVRGPGGGQRSGLSVPAAPGLEHQDRVLLGSKDIGSKNEGSPIRACSPASWRTTSSWISSESPTPNKVPF

SEQ ID NO: 52865 - protein, 782 aa, Homo sapiens
MVPGSEGPARAGSVVADVVFVIEGTANLGPYFEGLRKHYLLPAIEYFNGGPPAETDFGGDYGGTQYSLVVFNTVDCAPESYVQCHAPTSSAYEFVTWLDGIKFMGGGGESCSLIAEGLSTALQLFDDFKKMREQIGQTHRVCLLICNSPPYLLPAVESTTYSGCTTENLVQQIGERGIHFSIVSPRKLPALRLLFEKAAPPALLEPLQPPTDVSQDPRHMVLVRGLVLPVGGGSAPGPLQSKQPVPLPPAAPSGATLSAAPQQPLPPVPPQYQVPGNLSAAQVAAQNAVEAAKNQKAGLGPRFSPITPLQQAAPGVGPPFSQAPAPQLPPGPPGAPKPPPASQPSLVSTVAPGSGLAPTAQPGAPSMAGTVAPGGVSGPSPAQLGAPALGGQQSVSNKLLAWSGVLEWQEKPKPASVDANTKLTRSLPCQVYVNHGENLKTEQWPQKLIMQLIPQQLLTTLGPLFRNSRMVQFHFTNKDLESLKGLYRIMGNGFAGCVHFPHTAPCEVRVLMLLYSSKKKIFMGLIPYDQSGFVNGIRQVITNHKQVQQQKLEQQQRGMGGQQAPPGLGPILEDQARPSQNLLQLRPPQPQPQGTVGASGATGQPQPQGTAQPPPGAPQGPPGAASGPPPPGPILRPQNPGANPQLRSLLLNPPPPQTGVPPPQASLHHLQPPGAPALLPPPHQGLGQPQLGPPLLHPPPAQSWPAQLPPRAPLPAAKRKREGEGRVFREKWERAYFFVEVKSMPMCLICKQIVSVLKEYNLKRHYESKHSKSYDQYTEQTR

SEQ ID NO: 52866 - protein, 482 aa, Homo sapiens
MVPGSEGPARAGSVVADVVFVIEGTANLGPYFEGLRKHYLLPAIEYFNGGPPAPFSQAPAPQLPPGPPGAPKPPPASQPSLVSTVAPGSGLAPTAQPGAPSMAGTVAPGGVSGPSPAQLGAPALGGQQSVSNKLLAWSGVLEWQEKPKPASVDANTKLTRSLPCQVYVNHGENLKTEQWPQKLIMQLIPQQLLTTLGPLFRNSRMVQFHFTNKDLESLKGLYRIMGNGFAGCVHFPHTAPCEVRVLMLLYSSKKKIFMGLIPYDQSGFVNGIRQVITNHKQVQQQKLEQQQRGMGGQQAPPGLGPILEDQARPSQNLLQLRPPQPQPQGTVGASGATGQPQPQGTAQPPPGAPQGPPGAASGPPPPGPILRPQNPGANPQLRSLLLNPPPPQTGVPPPQASLHHLQPPGAPALLPPPHQGLGQPQLGPPLLHPPPAQSWPAQLPPRAPLPGQMLLSGGPRGPVPQPGLQPSVMEDDILMDLI

SEQ ID NO: 52867 - protein, 794 aa, Homo sapiens
MVPGSEGPARAGSVVADVVFVIEGTANLGPYFEGLRKHYLLPAIEYFNGGPPAETDFGGDYGGTQYSLVVFNTVDCAPESYVQCHAPTSSAYEFVTWLDGIKFMGGGGESCSLIAEGLSTALQLFDDFKKMREQIGQTHRVCLLICNSPPYLLPAVESTTYSGCTTENLVQQIGERGIHFSIVSPRKLPALRLLFEKAAPPALLEPLQPPTDVSQDPRHMVLVRGLVLPVGGGSAPGPLQSKQPVPLPPAAPSGATLSAAPQQPLPPVPPQYQVPGNLSAAQVAAQNAVEAAKNQKAGLGPRFSPITPLQQAAPGVGPPFSQAPAPQLPPGPPGAPKPPPASQPSLVSTVAPGSGLAPTAQPGAPSMAGTVAPGGVSGPSPAQLGAPALGGQQSVSNKLLAWSGVLEWQEKPKPASVDANTKLTRSLPCQVYVNHGENLKTEQWPQKLIMQLIPQQLLTTLGPLFRNSRMVQFHFTNKDLESLKGLYRIMGNGFAGCVHFPHTAPCEVRVLMLLYSSKKKIFMGLIPYDQSGFVNGIRQVITNHKQVQQQKLEQQQRGMGGQQAPPGLGPILEDQARPSQNLLQLRPPQPQPQGTVGASGATGQPQPQGTAQPPPGAPQGPPGAASGPPPPGPILRPQNPGANPQLRSLLLNPPPPQTGVPPPQASLHHLQPPGAPALLPPPHQGLGQPQLGPPLLHPPPDGARRSDAAERGSPGPGRSPQSPPLPLGFPVRQRVTAFHVSITSGKTKERRRGPCVSRKMGASLFLCGSEEHAYVFNMQTNRVCVERIQPETPL

SEQ ID NO: 52868 - protein, 724 aa, Homo sapiens
MVPGSEGPARAGSVVADVVFVIEGTANLGPYFEGLRKHYLLPAIEYFNGGPPAETDFGGDYGGTQYSLVVFNTVDCAPESYVQCHAPTSSAYEFVTWLDGIKFMGGGGESCSLIAEGLSTALQLFDDFKKMREQIGQTHRVCLLICNSPPYLLPAVESTTYSGCTTENLVQQIGERGIHFSIVSPRKLPALRLLFEKAAPPALLEPLQPPTDVSQDPRHMVLVRGLVLPVGGGSAPGPLQSKQPVPLPPAAPSGATLSAAPQQPLPPVPPQYQVPGNLSAAQVAAQNAVEAAKNQKAGLGPRFSPITPLQQAAPGVGPPFSQAPAPQLPPGPPGAPKPPPASQPSLVSTVAPGSGLAPTAQPGAPSMAGTVAPGGVSGPSPAQLGAPALGGQQSVSNKLLAWSGVLEWQEKPKPASVDANTKLTRSLPCQVYVNHGENLKTEQWPQKLIMQLIPQQLLTTLGPLFRNSRMVQFHFTNKDLESLKGLYRIMGNGFAGCVHFPHTAPCEVRVLMLLYSSKKKIFMGLIPYDQSGFVNGIRQVITNHKQVQQQKLEQQQRGMGGQQAPPGLGPILEDQARPSQNLLQLRPPQPQPPPGAPQGPPGAASGPPPPGPILRPQNPGANPQLRSLLLNPPPPQTGVPPPQASLHHLQPPGAPALLPPPHQGLGQPQLGPPLLHPPPAQSWPAQLPPRAPLPGKGTRGRAEVWTECPSSSWARAPRPSAPGK

SEQ ID NO: 52869 - protein, 250 aa, Homo sapiens
MLLYSSKKKIFMGLIPYDQSGFVNGIRQVITNHKQVQQQKLEQQQRGMGGQQAPPGLGPILEDQARPSQNLLQLRPPQPQPQGTVGASGATGQPQPQGTAQPPPGAPQGPPGAASGPPPPGPIFGPRTLGPTLSCEASSSTHHRRRLGCPHPRPPSTTSSHQGLLRCCLRRQGLGQPQLGPHSCIHHLPSPGPHNFPLGLHCQVRGPGGGQRSGLSVPAAPGLEHQDRVLLGSKDIGSKNEGSPMAFAEL

SEQ ID NO: 52870 - protein, 534 aa, Homo sapiens
MVPGSEGPARAGSVVADVVFVIEGTANLGPYFEGLRKHYLLPAIEYFNGGPPAETDFGGDVPGNLSAAQVAAQNAVEAAKNQKAGLGPRFSPITPLQQAAPGVGPPFSQAPAPQLPPGPPGAPKPPPASQPSLVSTVAPGSGLAPTAQPGAPSMAGTVAPGGVSGPSPAQLGAPALGGQQSVSNKLLAWSGVLEWQEKPKPASVDANTKLTRSLPCQVYVNHGENLKTEQWPQKLIMQLIPQQLLTTLGPLFRNSRMVQFHFTNKDLESLKGLYRIMGNGFAGCVHFPHTAPCEVRVLMLLYSSKKKIFMGLIPYDQSGFVNGIRQVITNHKQVQQQKLEQQQRGMGGQQAPPGLGPILEDQARPSQNLLQLRPPQPQPQGTVGASGATGQPQPQGTAQPPPGAPQGPPGAASGPPPPGPILRPQNPGANPQLRSLLLNPPPPQTGVPPPQASLHHLQPPGAPALLPPPHQGLGQPQLGPPLLHPPPAQSWPAQLPPRAPLPGQMLLSGGPRGPVPQPGLQPSVMEDDILMDLI

SEQ ID NO: 52871 - protein, 397 aa, Homo sapiens
MVPGSEGPARAGSVVADVVFVIEGTANLGPYFEGLRKHYLLPAIEYFNGGPPAETDFGGDYGGTQYSLVVFNTVDCAPESYVQCHAPTSSAYEFVTWLDGIKFMGGGGESCSLIAEGLSTALQLFDDFKKMREQIGQTHRVCLLICNSPPYLLPAVESTTYSGCTTENLVQQIGERGIHFSIVSPRKLPALRLLFEKAAPPALLEPLQPPTDVSQDPRHMVLVRGLVLPVGGGSAPGPLQSKQPVPLPPAAPSGATLSAAPQQPLPPVPPQYQVPGNLSAAQVAAQNAVEAAKNQKAGLGPRFSPITPLQQAAPGVGPPFSQAPAPALLPPPHQGLGQPQLGPPLLHPPPAQSWPAQLPPRAPLPGQMLLSGGPRGPVPQPGLQPSVMEDDILMDLI

SEQ ID NO: 52872 - protein, 259 aa, Homo sapiens
MVPGSEGPARAGSVVADVVFVIEGTANLGPYFEGLRKHYLLPAIEYFNGGPPAETDFGGDYGGTQYSLVVFNTVDCAPESYVQCHAPTSSAYEFVTWLDGIKFMGGGGESCSLIAEGLSTALQLFDDFKKMREQIGQTHRVCLLICNSPPYLLPAVESTTYSGCTTENLVQQIGERGIHFSIVSPRKLPALRLLFEKAAPGLAGAAAASDRCEPGPEAHGAGSGTRAACWGWLSPRPPPVKAASPPASRRTLRCQVRCC

SEQ ID NO: 52873 - protein, 600 aa, Homo sapiens
MTAAPASPQQIRDRLLQAIDPQSNIRNMVAVLEVISSLEKYPITKEALEETRLGKLINDVRKKTKNEELAKRAKKLLRSWQKLIEPAHQHEAALRGLAGATGSANGGAHNCRPEVGAAGPPRSIHDLKSRNDLQRLPGQRLDRLGSRKRRGDQRDLGHPGPPPKVSKASHDPLVPNSSPLPTNGISGSPESFASSLDGSGHAGPEGSRLERDENDKHSGKIPVNAVRPHTSSPGLGKPPGPCLQPKASVLQQLDRVDETPGPPHPKGPPRCSFSPRNSRHEGSFARQQSLYAPKGSVPSPSPRPQALDATQVPSPLPLAQPSTPPVRRLELLPSAESPVCWLEQPESHQRLAGPGCKAGLSPAEPLLSRAGFSPDSSKADSDAASSGGSDSKKKKRYRPRDYTVNLDGQVAEAGVKPVRLKERKLTFDPMTRQIKPLTQKEPVRADSPVHMEQQSRTELDKQEAKASLQSPFEQTNWKELSRNEIIQSYLSRQSSLLSSSGAQTPGAHHFMSEYLKQEESTRQGARQLHVLVPQSPPTDLPGLTREVTQDDLDRIQASQWPGVNGCQDTQGNWYDWTQCISLDPHGDDGRLNILPYVCLD

SEQ ID NO: 52874 - protein, 93 aa, Homo sapiens
MTAAPASPQQIRDRLLQAIDPQSNIRNMVAVLEVISSLEKYPITKEALEETRLGKLINDVRKKTKNEELAKRAKKLLPGWQWACRPRGQPPGA

SEQ ID NO: 52875 - protein, 311 aa, Homo sapiens
MADVINVSVNLEAFSQAISAIQALRSSVSRVFDCLKDGMRNKETLEGREKAFIAHFQDNLHSVNRDLNELERLSNLVGKPSENHPLHNSGLLSLDPVQDKTPLYSQLLQAYKWSNKLQYHAGLASGLLNQQSLKRSANQMGVSAKRRPKAQPTTLVLPPQYVDDVISRIDRMFPEMSIHLSRPNGTSAMLLVTLGKVLKVIVVMRSLFIDRTIVKGYNENVYTEDGKLDIWSKSNYQVFQKVTDHATTALLHYQLPQMPDVVVRSFMTWLRSYIKLFQAPCQRCGKFLQDGLPPTWRDFRTLEAFHDTCRQ

SEQ ID NO: 52876 - protein, 237 aa, Homo sapiens
MRNKETLEGREKAFIAHFQDNLHSVNRDLNELERLSNLVGKPSENHPLHNSGLLSLDPVQDKTPLYSQLLQAYKWSNKLQYHAGLASGLLNQQSLKRSANQMGVSAKRRPKAQPTTLVLPPQYVDDVISRIDRMFPEMSIHLSRPNGTSAMLLLDIWSKSNYQVFQKVTDHATTALLHYQLPQMPDVVVRSFMTWLRSYIKLFQAPCQRCGKFLQDGLPPTWRDFRTLEAFHDTCRQ

SEQ ID NO: 52877 - protein, 275 aa, Homo sapiens
MADVINVSVNLEAFSQAISAIQALRSSVSRVFDCLKDGMRNKETLEGREKAFIAHFQDNLHSVNRDLNELERLSNLVGKPSENHPLHNSGLLSLDPVQDKTPLYSQLLQAYKWSNKLQYHAGLASGLLNQQSLKRSANQMGVSAKRRPKAQPTTLVLPPQYVDDVISRIDRMFPEMSIHLSRPNGTSAMLLLDIWSKSNYQVFQKVTDHATTALLHYQLPQMPDVVVRSFMTWLRSYIKLFQAPCQRCGKFLQDGLPPTWRDFRTLEAFHDTCRQ

SEQ ID NO: 52878 - protein, 221 aa, Homo sapiens
MLKSNGERRSRNALPAVYARKMAASQQQASAASSAAGVSGPSSAGGPGPQQQPQPPAQLVGPAQSGLLQQQQQDFDPVQRYKMLIPQLKESLQTLMKVAAQNLIQNTNIDNGQKSSDGPIQRFDKCLEEFYALCDQLELCLRLAHECLSQSCDSAKHSPTLVPTATKPDAVQPDSLPYPQYLAVIKAQISCAKDIHTALLDCANKVTGKTPAPPAGPGGTL

SEQ ID NO: 52879 - protein, 139 aa, Homo sapiens
MLIPQLKESLQTLMKVAAQNLIQNTNIDNGQKSSDGPIQRFDKCLEEFYALCDQLELCLRLAHECLSQSCDSAKHSPTLVPTATKPDAVQPDSLPYPQYLAVIKAQISCAKDIHTALLDCANKVTGKTPAPPAGPGGTL

SEQ ID NO: 52880 - protein, 178 aa, Homo sapiens
MSTPPLAASGMAPGPFAGPQAQQAAREVNTASLCRIGQETVQDIVYRTMEIFQLLRNMQLPNGVTYHTGTYQDRLTKLQDNLRQLSVLFRKLRLVYDKCNENCGGMDPIPVEQLIPYVEEDGSKNDDRAGPPRFASEERREIAEVNKKLKQKNQQLKQIMDQLRNLIWDINAMLAMRN

SEQ ID NO: 52881 - protein, 270 aa, Homo sapiens
MAASSSGEKEKERLGGGLGVAGGNSTRERLLSALEDLEVLSRELIEMLAISRNQKLLQAGEENQVLELLIHRDGEFQELMKLALNQGKIHHEMQVLEKEVEKRDSDIQQLQKQLKEAEQILATAVYQAKEKLKSIEKARKGAISSEEIIKYAHRISASNAVCAPLTWVPGDPRRPYPTDLEMRSGLLGQMNNPSTNGVNGHLPGDALAAGRLPDVLAPQYPWQSNDMSMNMLPPNHSSDFLLEPPGHNKENEDDVEIMSTDSSSSSSESD

SEQ ID NO: 52882 - protein, 224 aa, Homo sapiens
MLAISRNQKLLQAGEENQVLELLIHRDGEFQELMKLALNQGKIHHEMQVLEKEVEKRDSDIQQLQKQLKEAEQILATAVYQAKEKLKSIEKARKGAISSEEIIKYAHRISASNAVCAPLTWVPGDPRRPYPTDLEMRSGLLGQMNNPSTNGVNGHLPGDALAAGRLPDVLAPQYPWQSNDMSMNMLPPNHSSDFLLEPPGHNKENEDDVEIMSTDSSSSSSESD

SEQ ID NO: 52883 - protein, 248 aa, Homo sapiens
MKLLWWCDWLPERSHVFTQRELIEMLAISRNQKLLQAGEENQVLELLIHRDGEFQELMKLALNQGKIHHEMQVLEKEVEKRDSDIQQLQKQLKEAEQILATAVYQAKEKLKSIEKARKGAISSEEIIKYAHRISASNAVCAPLTWVPGDPRRPYPTDLEMRSGLLGQMNNPSTNGVNGHLPGDALAAGRLPDVLAPQYPWQSNDMSMNMLPPNHSSDFLLEPPGHNKENEDDVEIMSTDSSSSSSESD

SEQ ID NO: 52884 - protein, 238 aa, Homo sapiens
MKLLWWCDWLPERSHVFTQRELIEMLAISRNQKLLQAGEENQVLELLIHRDGEFQELMKLALNQGKIHHEMQVLEKEVEKRDSDIQQLQKQLKEAEQILATAVYQAKEKLKSIEKARKGAISSEEIIKYAHRISASNAVCAPLTWVPGDPRRPYPTDLEMRSGLLGQMNNPSTNGVNGHLPGDALAAGRLPDVLAPQYPWQSNDMSMNMLPPNHSSDFLLEPPGHNKENEDDVEIMST

SEQ ID NO: 52885 - protein, 233 aa, Homo sapiens
MGEPQQVSALPPPPMQYIKEYTDENIQEGLAPKPPPPIKDSYMMFGNQFQCDDLIIRPLESQGIERLHPMQFDHKKELRKLNMSILINFLDLLDILIRSPGSIKREEKLEDLKLLFVHVHHLINEYRPHQARETLRVMMEVQKRQRLETAERFQKHLERVIEMIQNCLASLPDDLPHSEAGMRVKTEPMDADDSNNCTGQNEHQRENSGHRRDQIIEKDAALCVLIDEMNERP

SEQ ID NO: 52886 - protein, 233 aa, Homo sapiens; identical to SEQ ID NO: 52885

SEQ ID NO: 52887 - protein, 195 aa, Homo sapiens
MGEPQQVSALPPPPMQYIKEYTDENIQEGLAPKPPPPIKDSYMMFGNQFQCDDLIIRPLESQGIERLHPMQFDHKKELRKLNMSILINFLDLLDILIRSPGSIKREEKLEDLKLLFVHVHHLINEYRPHQARETLRVMMEVQKRQRLETAERFQKHLERVIEMIQNCLASLPDDLPHSEAGMRVKTEPMDADDSN

SEQ ID NO: 52888 - protein, 146 aa, Homo sapiens
MASAGVAAGRQAEDVLPPTSDQPLPDTKPLPPPQPPPVPAPQPQQSPAPRPQSPARAREEENYSFLPLVHNIIKCMDKDSPEVHQDLNALKSKFQEMRKLISTMPGIHLSPEQQQQQLQSLREQVRTKNELLQKYKSLCMFEIPKE

SEQ ID NO: 52889 - protein, 297 aa, Homo sapiens
MSNRVVCREASHAGSWYTASGPQLNAQLEGWLSQVQSTKRPARAIIAPHAGYTYCGSCAAHAYKQVDPSITRRIFILGPSHHVPLSRCALSSVDIYRTPLYDLRIDQKIYGELWKTGMFERMSLQTDEDEHSIEMHLPYTAKAMESHKDEFTIIPVLVGALSESKEQEFGKLFSKYLADPSNLFVVSSDFCHWGQRFRYSYYDESQGEIYRSIEHLDKMGMSIIEQLDPVSFSNYLKKYHNTICGRHPIGVLLNAITELQKNGMNMSFSFLNYAQSSQCRNWQDSSVSYAAGALTVH

SEQ ID NO: 52890 - protein, 300 aa, Homo sapiens
MPLWRADKCQDVQSASWRPRRADGPQLNAQLEGWLSQVQSTKRPARAIIAPHAGYTYCGSCAAHAYKQVDPSITRRIFILGPSHHVPLSRCALSSVDIYRTPLYDLRIDQKIYGELWKTGMFERMSLQTDEDEHSIEMHLPYTAKAMESHKDEFTIIPVLVGALSESKEQEFGKLFSKYLADPSNLFVVSSDFCHWGQRFRYSYYDESQGEIYRSIEHLDKMGMSIIEQLDPVSFSNYLKKYHNTICGRHPIGVLLNAITELQKNGMNMSFSFLNYAQSSQCRNWQDSSVSYAAGALTVH

SEQ ID NO: 52891 - protein, 297 aa, Homo sapiens; identical to SEQ ID NO: 52889

SEQ ID NO: 52892 - protein, 274 aa, Homo sapiens
MSNRVVCREASHAGSWYTASGPQLNAQLEGWLSQVQSTKRPARAIIAPRRIFILGPSHHVPLSRCALSSVDIYRTPLYDLRIDQKIYGELWKTGMFERMSLQTDEDEHSIEMHLPYTAKAMESHKDEFTIIPVLVGALSESKEQEFGKLFSKYLADPSNLFVVSSDFCHWGQRFRYSYYDESQGEIYRSIEHLDKMGMSIIEQLDPVSFSNYLKKYHNTICGRHPIGVLLNAITELQKNGMNMSFSFLNYAQSSQCRNWQDSSVSYAAGALTVH

SEQ ID NO: 52893 - protein, 20 aa, Homo sapiens
MSNRVVCREASHAGSWYTAS

SEQ ID NO: 52894 - protein, 1825 aa, Homo sapiens
MEDTQAIDWDVEEEEETEQSSESLRCNVEPVGRLHIFSGAHGPEKDFPLHLGKNVVGRMPDCSVALPFPSISKQHAEIEILAWDKAPILRDCGSLNGTQILRPPKVLSPGVSHRLRDQELILFADLLCQYHRLDVSLPFVSRGPLTVEETPRVQGETQPQRLLLAEDSEEEVDFLSERRMVKKSRTTSSSVIVPESDEEGHSPVLGGLGPPFAFNLNSDTDVEEGQQPATEEASSAARRGATVEAKQSEAEVVTEIQLEKDQPLVKERDNDTKVKRGAGNGVVPAGVILERSQPPGEDSDTDVDDDSRPPGRPAEVHLERAQPFGFIDSDTDAEEERIPATPVVIPMKKRKIFHGVGTRGPGAPGLAHLQESQAGSDTDVEEGKAPQAVPLEKSQASMVINSDTDDEEEVSAALTLAHLKESQPAIWNRDAEEDMPQRVVLLQRSQTTTERDSDTDVEEEELPVENREAVLKDHTKIRALVRAHSEKDQPPFGDSDDSVEADKSSPGIHLERSQASTTVDINTQVEKEVPPGSAIIHIKKHQVSVEGTNQTDVKAVGGPAKLLVVSLEEAWPLHGDCETDAEEGTSLTASVVADVRKSQLPAEGDAGAEWAAAVLKQERAHEVGAQGGPPVAQVEQDLPISRENLTDLVVDTDTLGESTQPQREGAQVPTGREREQHVGGTKDSEDNYGDSEDLDLQATQCFLENQGLEAVQSMEDEPTQAFMLTPPQELGPSHCSFQTTGLLNCKMPPAEKASRIRAAEKVSRGDQESPDACLPPTVPEAPAPPQKPLNSQSQKHLAPPPLLSPLLPSIKPTVRKTRQDGSQEAPEAPLSSELEPFHPKPKIRTRKSSRMTPFPATSAAPEPHPSTSTAQPVTPKPTSQATRSRTNRSSVKTPEPVVPTAPELQPSTSTDQPVTSEPTSQVTRGRKSRSSVKTPETVVPTALELQPSTSTDRPVTSEPTSQATRGRKNRSSVKTPEPVVPTAPELQPSTSTDQPVTSEPTYQATRGRKNRSSVKTPEPVVPTAPELRPSTSTDRPVTPKPTSRTTRSRTNMSSVKTPETVVPTAPELQISTSTDQPVTPKPTSRTTRSRTNMSSVKNPESTVPIAPELPPSTSTEQPVTPEPTSRATRGRKNRSSGKTPETLVPTAPKLEPSTSTDQPVTPEPTSQATRGRTNRSSVKTPETVVPTAPELQPSTSTDQPVTPEPTSQATRGRTDRSSVKTPETVVPTAPELQASASTDQPVTSEPTSRTTRGRKNRSSVKTPETVVPAAPELQPSTSTDQPVTPEPTSRATRGRTNRSSVKTPESIVPIAPELQPSTSRNQLVTPEPTSRATRCRTNRSSVKTPEPVVPTAPEPHPTTSTDQPVTPKLTSRATRRKTNRSSVKTPKPVEPAASDLEPFTPTDQSVTPEAIAQGGQSKTLRSSTVRAMPVPTTPEFQSPVTTDQPISPEPITQPSCIKRQRAAGNPGSLAAPIDHKPCSAPLEPKSQASRNQRWGAVRAAESLTAIPEPASPQLLETPIHASQIQKVEPAGRSRFTPELQPKASQSRKRSLATMDSPPHQKQPQRGEVSQKTVIIKEEEEDTAEKPGKEEDVVTPKPGKRKRDQAEEEPNRIPSRSLRRTKLNQESTAPKVLFTGVVDARGERAVLALGGSLAGSAAEASHLVTDRIRRTVKFLCALGRGIPILSLDWLHQSRKAGFFLPPDEYVVTDPEQEKNFGFSLQDALSRARERRLLEGYEIYVTPGVQPPPPQMGEIISCCGGTYLPSMPRSYKPQRVVITCPQDFPHCSIPLRVGLPLLSPEFLLTGVLKQEAKPEAFVLSPLEMSST

SEQ ID NO: 52895 - protein, 2089 aa, Homo sapiens
MEDTQAIDWDVEEEEETEQSSESLRCNVEPVGRLHIFSGAHGPEKDFPLHLGKNVVGRMPDCSVALPFPSISKQHAEIEILAWDKAPILRDCGSLNGTQILRPPKVLSPGVSHRLRDQELILFADLLCQYHRLDVSLPFVSRGPLTVEETPRVQGETQPQRLLLAEDSEEEVDFLSERRMVKKSRTTSSSVIVPESDEEGHSPVLGGLGPPFAFNLNSDTDVEEGQQPATEEASSAARRGATVEAKQSEAEVVTEIQLEKDQPLVKERDNDTKVKRGAGNGVVPAGVILERSQPPGEDSDTDVDDDSRPPGRPAEVHLERAQPFGFIDSDTDAEEERIPATPVVIPMKKRKIFHGVGTRGPGAPGLAHLQESQAGSDTDVEEGKAPQAVPLEKSQASMVINSDTDDEEEVSAALTLAHLKESQPAIWNRDAEEDMPQRVVLLQRSQTTTERDSDTDVEEEELPVENREAVLKDHTKIRALVRAHSEKDQPPFGDSDDSVEADKSSPGIHLERSQASTTVDINTQVEKEVPPGSAIIHIKKHQVSVEGTNQTDVKAVGGPAKLLVVSLEEAWPLHGDCETDAEEGTSLTASVVADVRKSQLPAEGDAGAEWAAAVLKQERAHEVGAQGGPPVAQVEQDLPISRENLTDLVVDTDTLGESTQPQREGAQVPTGREREQHVGGTKDSEDNYGDSEDLDLQATQCFLENQGLEAVQSMEDEPTQAFMLTPPQELGPSHCSFQTTGTLDEPWEVLATQPFCLRESEDSETQPFDTHLEAYGPCLSPPRAIPGDQHPESPVHTEPMGIQGRGRQTVDKVMGIPKETAERVGPERGPLERETEKLLPERQTDVTGEEELTKGKQDREQKQLLARDTQRQESDKNGESASPERDRESLKVEIETSEEIQEKQVQKQTLPSKAFEREVERPVANRECDPAELEEKVPKVILERDTQRGEPEGGSQDQKGQASSPTPEPGVGAGDLPGPTSAPVPSGSQSGGRGSPVSPRRHQKGLLNCKMPPAEKASRIRAAEKVSRGDQESPDACLPPTVPEAPAPPQKPLNSQSQKHLAPPPLLSPLLPSIKPTVRKTRQDGSQEAPEAPLSSELEPFHPKPKIRTRKSSRMTPFPATSAAPEPHPSTSTAQPVTPKPTSQATRSRTNRSSVKTPEPVVPTAPELQPSTSTDQPVTSEPTSQVTRGRKSRSSVKTPETVVPTALELQPSTSTDRPVTSEPTSQATRGRKNRSSVKTPEPVVPTAPELQPSTSTDQPVTSEPTYQATRGRKNRSSVKTPEPVVPTAPELRPSTSTDRPVTPKPTSRTTRSRTNMSSVKTPETVVPTAPELQISTSTDQPVTPKPTSRTTRSRTNMSSVKNPESTVPIAPELPPSTSTEQPVTPEPTSRATRGRKNRSSGKTPETLVPTAPKLEPSTSTDQPVTPEPTSQATRGRTNRSSVKTPETVVPTAPELQPSTSTDQPVTPEPTSQATRGRTDRSSVKTPETVVPTAPELQASASTDQPVTSEPTSRTTRGRKNRSSVKTPETVVPAAPELQPSTSTDQPVTPEPTSRATRGRTNRSSVKTPESIVPIAPELQPSTSRNQLVTPEPTSRATRCRTNRSSVKTPEPVVPTAPEPHPTTSTDQPVTPKLTSRATRRKTNRSSVKTPKPVEPAASDLEPFTPTDQSVTPEAIAQGGQSKTLRSSTVRAMPVPTTPEFQSPVTTDQPISPEPITQPSCIKRQRAAGNPGSLAAPIDHKPCSAPLEPKSQASRNQRWGAVRAAESLTAIPEPASPQLLETPIHASQIQKVEPAGRSRFTPELQPKASQSRKRSLATMDSPPHQKQPQRGEVSQKTVIIKEEEEDTAEKPGKEEDVVTPKPGKRKRDQAEEEPNRIPSRSLRRTKLNQESTAPKVLFTGVVDARGERAVLALGGSLAGSAAEASHLVTDRIRRTVKFLCALGRGIPILSLDWLHQSRKAGFFLPPDEYVVTDPEQEKNFGFSLQDALSRARERRLLEGYEIYVTPGVQPPPPQMGEIISCCGGTYLPSMPRSYKPQRVVITCPQDFPHCSIPLRVGLPLLSPEFLLTGVLKQEAKPEAFVLSPLEMSST

SEQ ID NO: 52896 - protein, 162 aa, Homo sapiens
MEDTQAIDWDVEEEEETEQSSESLRCNVEPVGRLHIFSGAHGPEKDFPLHLGKNVVGRMPDCSVALPFPSISKQHAEIEILAWDKAPILRDCGSLNGTQILRPPKVLSPGVSHRLRDQELILFADLLCQYHRLDVSLPFVSRGPLTVEETPRVQGETQPQRL

SEQ ID NO: 52897 - protein, 113 aa, Homo sapiens
MEDTQAIDWDVEEEEETEQSSESLRCNVEPVGRLHIFSGAHGPEKDFPLHLGKNVVGRMPDCSVALPFPSISKQHAEIEILAWDKAPILRDCGSLNGTQILRPPKVLSPGVSH

SEQ ID NO: 52898 - protein, 127 aa, Homo sapiens
MEDTQAIDWDVEEEEETEQSSESLRCNVEPVGRLHIFSGAHGPEKDFPLHLGKNVVGRMPDCSVALPFPSISKQHAEIEILAWDKAPILRDCGSLNGTQILRPPKVLSPGVSHRLRDQELILFADLL

SEQ ID NO: 52899 - protein, 162 aa, Homo sapiens; identical to SEQ ID NO: 52896

SEQ ID NO: 52900 - protein, 306 aa, Homo sapiens
  VARIANT 1: note = MOD_RES - Any amino acid
XHVGGTKDSEDNYGDSEDLDLQATQCFLENQGLEAVQSMEDEPTQAFMLTPPQELGPSHCSFQTTGLLNCKMPPAEKASRIRAAEKVSRGDQESPDACLPPTVPEAPAPPQKPLNSQSQKHLAPPPLLSPLLPSIKPTVRKTRQDGSQEAPEAPLSSELEPFHPKPKIRTRKSSRMTPFPATSAAPEPHPSTSTAQPVTPKPTSQATRSRTNRSSVKTPEPVVPTAPELQPSTSTDQPVTSEPTSQVTRGRKSRSSVKTPETVVPTALELQPSTSTDRPVTSEPTSQATRGRKNRSSVKTPEPVVP

SEQ ID NO: 52901 - protein, 127 aa, Homo sapiens; identical to SEQ ID NO: 52898

SEQ ID NO: 52902 - protein, 306 aa, Homo sapiens; identical to SEQ ID NO: 52900
  VARIANT 1: note = MOD_RES - Any amino acid

SEQ ID NO: 52903 - protein, 306 aa, Homo sapiens; identical to SEQ ID NO: 52900
  VARIANT 1: note = MOD_RES - Any amino acid

SEQ ID NO: 52904 - protein, 2089 aa, Homo sapiens; identical to SEQ ID NO: 52895

SEQ ID NO: 52905 - protein, 2089 aa, Homo sapiens; identical to SEQ ID NO: 52895

SEQ ID NO: 52906 - protein, 1655 aa, Homo sapiens
MYHRLDVSLPFVSRGPLTVEETPRVQGETQPQRLLLAEDSEEEVDFLSERRMVKKSRTTSSSVIVPESDEEGHSPVLGGLGPPFAFNLNSDTDVEEGQQPATEEASSAARRGATVEAKQSEAEVVTEIQLEKDQPLVKERDNDTKVKRGAGNGVVPAGVILERSQPPGEDSDTDVDDDSRPPGRPAEVHLERAQPFGFIDSDTDAEEERIPATPVVIPMKKRKIFHGVGTRGPGAPGLAHLQESQAGSDTDVEEGKAPQAVPLEKSQASMVINSDTDDEEEVSAALTLAHLKESQPAIWNRDAEEDMPQRVVLLQRSQTTTERDSDTDVEEEELPVENREAVLKDHTKIRALVRAHSEKDQPPFGDSDDSVEADKSSPGIHLERSQASTTVDINTQVEKEVPPGSAIIHIKKHQVSVEGTNQTDVKAVGGPAKLLVVSLEEAWPLHGDCETDAEEGTSLTASVVADVRKSQLPAEGDAGAEWAAAVLKQERAHEVGAQGGPPVAQVEQDLPISRENLTDLVVDTDTLGESTQPQREGAQVPTGREREQHVGGTKDSEDNYGDSEDLDLQATQCFLENQGLEVQSMEDEPTQAFMLTPPQELGPSHCSFQTTGLLNCKMPPAEKASRIRAAEKVSRGDQESPDACLPPTVPEAPAPPQKPLNSQSQKHLAPPPLLSPLLPSIKPTVRKTRQDGSQEAPEAPLSSELEPFHPKPKIRTRKSSRMTPFPATSAAPEPHPSTSTAQPVTPKPTSQATRSRTNRSSVKTPEPVVPTAPELQPSTSTDQPVTSEPTSQVTRGRKSRSSVKTPETVVPTALELQPSTSTDRPVTSEPTSQATRGRKNRSSVKTPEPVVPTAPELQPSTSTDQPVTSEPTYQATRGRKNRSSVKTPEPVVPTAPELRPSTSTDRPVTPKPTSRTTRSRTNMSSVKNPESTVPIAPELPPSTSTEQPVTPEPTSRATRGRKNRSSGKTPETLVPTAPKLEPSTSTDQPVTPEPTSQATRGRTNRSSVKTPETVVPTAPELQPSTSTDQPVTPEPTSQATRGRTDRSSVKTPETVVPTAPELQASASTDQPVTSEPTSRTTRGRKNRSSVKTPETVVPAAPELQPSTSTDQPVTPEPTSRATRGRTNRSSVKTPESIVPIAPELQPSTSRNQLVTPEPTSRATRCRTNRSSVKTPEPVVPTAPEPHPTTSTDQPVTPKLTSRATRRKTNRSSVKTPKPVEPAASDLEPFTPTDQSVTPEAIAQGGQSKTLRSSTVRAMPVPTTPEFQSPVTTDQPISPEPITQPSCIKRQRAAGNPGSLAAPIDHKPCSAPLEPKSQASRNQRWGAVRAAESLTAIPEPASPQLLETPIHASQIQKVEPAGRSRFTPELQPKASQSRKRSLATMDSPPHQKQPQRGEVSQKTVIIKEEEEDTAEKPGKEEDVVTPKPGKRKRDQAEEEPNRIPSRSLRRTKLNQESTAPKVLFTGVVDARGERAVLALGGSLAGSAAEASHLVTDRIRRTVKFLCALGRGIPILSLDWLHQSRKAGFFLPPDEYVVTDPEQEKNFGFSLQDALSRARERRLLEGYEIYVTPGVQPPPPQMGEIISCCGGTYLPSMPRSYKPQRVVITCPQDFPHCSIPLRVGLPLLSPEFLLTGVLKQEAKPEAFVLSPLEMSST

SEQ ID NO: 52907 - protein, 162 aa, Homo sapiens; identical to SEQ ID NO: 52896

SEQ ID NO: 52908 - protein, 113 aa, Homo sapiens; identical to SEQ ID NO: 52897

SEQ ID NO: 52909 - protein, 113 aa, Homo sapiens; identical to SEQ ID NO: 52897

SEQ ID NO: 52910 - protein, 127 aa, Homo sapiens; identical to SEQ ID NO: 52898

SEQ ID NO: 52911 - protein, 162 aa, Homo sapiens; identical to SEQ ID NO: 52896

SEQ ID NO: 52912 - protein, 113 aa, Homo sapiens; identical to SEQ ID NO: 52897

SEQ ID NO: 52913 - protein, 162 aa, Homo sapiens; identical to SEQ ID NO: 52896

SEQ ID NO: 52914 - protein, 127 aa, Homo sapiens; identical to SEQ ID NO: 52898

SEQ ID NO: 52915 - protein, 306 aa, Homo sapiens; identical to SEQ ID NO: 52900
  VARIANT 1: note = MOD_RES - Any amino acid

SEQ ID NO: 52916 - protein, 2089 aa, Homo sapiens; identical to SEQ ID NO: 52895

SEQ ID NO: 52917 - protein, 1802 aa, Homo sapiens
MEDTQAIDWDVEEEEETEQSSESLRCNVEPVGRLHIFSGAHGPEKDFPLHLGKNVVGRMPDCSVALPFPSISKQHAEIEILAWDKAPILRDCGSLNGTQILRPPKVLSPGVSHRLRDQELILFADLLCQYHRLDVSLPFVSRGPLTVEETPRVQGETQPQRLLLAEDSEEEVDFLSERRMVKKSRTTSSSVIVPESDEEGHSPVLGGLGPPFAFNLNSDTDVEEGQQPATEEASSAARRGATVEAKQSEAEVVTEIQLEKDQPLVKERDNDTKVKRGAGNGVVPAGVILERSQPPGEDSDTDVDDDSRPPGRPAEVHLERAQPFGFIDSDTDAEEERIPATPVVIPMKKRKIFHGVGTRGPGAPGLAHLQESQAGSDTDVEEGKAPQAVPLEKSQASMVINSDTDDEEEVSAALTLAHLKESQPAIWNRDAEEDMPQRVVLLQRSQTTTERDSDTDVEEEELPVENREAVLKDHTKIRALVRAHSEKDQPPFGDSDDSVEADKSSPGIHLERSQASTTVDINTQVEKEVPPGSAIIHIKKHQVSVEGTNQTDVKAVGGPAKLLVVSLEEAWPLHGDCETDAEEGTSLTASVVADVRKSQLPAEGDAGAEWAAAVLKQERAHEVGAQGGPPVAQVEQDLPISRENLTDLVVDTDTLGESTQPQREGAQVPTGREREQHVGGTKDSEDNYGDSEDLDLQATQCFLENQGLEAVQSMEDEPTQAFMLTPPQELGPSHCSFQTTGTLDEPWEVLATQPFCLRESEDSETQPFDTHLEAYGPCLSPPRAIPGDQHPESPVHTEPMGIQGRGRQTVDKVMGIPKETAERVGPERGPLERETEKLLPERQTDVTGEEELTKGKQDREQKQLLARDTQRQESDKNGESASPERDRESLKVEIETSEEIQEKQVQKQTLPSKAFEREVERPVANRECDPAELEEKVPKVILERDTQRGEPEGGSQDQKGQASSPTPEPGVGAGDLPGPTSAPVPSGSQSGGRGSPVSPRRHQKGLLNCKMPPAEKASRIRAAEKVSRGDQESPDACLPPTVPEAPAPPQKPLNSQSQKHLAPPPLLSPLLPSIKPTVRKTRQDGSQEAPEAPLSSELEPFHPKPKIRTRKSSRMTPFPATSAAPKLEPSTSTDQPVTPEPTSQATRGRTNRSSVKTPETVVPTAPELQPSTSTDQPVTPEPTSQATRGRTDRSSVKTPETVVPTAPELQASASTDQPVTSEPTSRTTRGRKNRSSVKTPETVVPAAPELQPSTSTDQPVTPEPTSRATRGRTNRSSVKTPESIVPIAPELQPSTSRNQLVTPEPTSRATRCRTNRSSVKTPEPVVPTAPEPHPTTSTDQPVTPKLTSRATRRKTNRSSVKTPKPVEPAASDLEPFTPTDQSVTPEAIAQGGQSKTLRSSTVRAMPVPTTPEFQSPVTTDQPISPEPITQPSCIKRQRAAGNPGSLAAPIDHKPCSAPLEPKSQASRNQRWGAVRAAESLTAIPEPASPQLLETPIHASQIQKVEPAGRSRFTPELQPKASQSRKRSLATMDSPPHQKQPQRGEVSQKTVIIKEEEEDTAEKPGKEEDVVTPKPGKRKRDQAEEEPNRIPSRSLRRTKLNQESTAPKVLFTGVVDARGERAVLALGGSLAGSAAEASHLVTDRIRRTVKFLCALGRGIPILSLDWLHQSRKAGFFLPPDEYVVTDPEQEKNFGFSLQDALSRARERRLLEGYEIYVTPGVQPPPPQMGEIISCCGGTYLPSMPRSYKPQRVVITCPQDFPHCSIPLRVGLPLLSPEFLLTGVLKQEAKPEAFVLSPLEMSST

SEQ ID NO: 52918 - protein, 113 aa, Homo sapiens; identical to SEQ ID NO: 52897

SEQ ID NO: 52919 - protein, 2089 aa, Homo sapiens
MEDTQAIDWDVEEEEETEQSSESLRCNVEPVGRLHIFSGAHGPEKDFPLHLGKNVVGRMPDCSVALPFPSISKQHAEIEILAWDKAPILRDCGSLNGTQILRPPKVLSPGVSHRLRDQELILFADLLCQYHRLDVSLPFVSRGPLTVEETPRVQGETQPQRLLLAEDSEEEVDFLSERRMVKKSRTTSSSVIVPESDEEGHSPVLGGLGPPFAFNLNSDTDVEEGQQPATEEASSAARRGATVEAKQSEAEVVTEIQLEKDQPLVKERDNDTKVKRGAGNGVVPAGVILERSQPPGEDSDTDVDDDSRPPGRPAEVHLERAQPFGFIDSDTDAEEERIPATPVVIPMKKRKIFHGVGTRGPGAPGLAHLQESQAGSDTDVEEGKAPQAVPLEKSQASMVINSDTDDEEEVSAALTLAHLKESQPAIWNRDAEEDMPQRVVLLQRSQTTTERDSDTDVEEEELPVENREAVLKDHTKIRALVRAHSEKDQPPFGDSDDSVEADKSSPGIHLERSQASTTVDINTQVEKEVPPGSAIIHIKKHQVSVEGTNQTDVKAVGGPAKLLVVSLEEAWPLHGDCETDAEEGTSLTASVVADVRKSQLPAEGDAGAEWAAAVLKQERAHEVGAQGGPPVAQVEQDLPISRENLTDLVVDTDTLGESTQPQREGAQVPTGREREQHVGGTKDSEDNYGDSEDLDLQATQCFLENQGLEAVQSMEDEPTQAFMLTPPQELGPSHCSFQTTGTLDEPWEVLATQPFCLRESEDSETQPFDTHLEAYGPCLSPPRAIPGDQHPESPVHTEPMGIQGRGRQTVDKVMGIPKETAERVGPERGPLERETEKLLPERQTDVTGEEELTKGKQDREQKQLLARDTQRQESDKNGESASPERDRESLKVEIETSEEIQEKQVQKQTLPSKAFEREVERPVANRECDPAELEEKVPKVILERDTQRGEPEGGSQDQKGQASSPTPEPGVGAGDLPGPTSAPVPSGSQSGGRGSPVSPRRHQKGLLNCKMPPAEKASRIRAAEKVSRGDQESPDACLPPTVPEAPAPPQKPLNSQSQKHLAPPPLLSPLLPSIKPTVRKTRQDGSQEAPEAPLSSELEPFHPKPKIRTRKSSRMTPFPATSAAPEPHPSTSTAQPVTPKPTSQATRSRTNRSSVKTPEPVVPTAPELQPSTSTDQPVTSEPTSQVTRGRKSRSSVKTPETVVPTALELQPSTSTDRPVTSEPTSQATRGRKNRSSVKTPEPVVPTAPELQPSTSTDQPVTSEPTYQATRGRKNRSSVKTPEPVVPTAPELRPSTSTDRPVTPKPTSRTTRSRTNMSSVKTPETVVPTAPELQISTSTDQPVTPKPTSRTTRSRTNMSSVKNPESTVPIAPELPPSTSTEQPVTPEPTSRATRGRKNRSSGKTPETLVPTAPKLEPSTSTDQPVTPEPTSQATRGRTNRSSVKTPETVVPTAPELQPSTSTDQPVTPEPTSQATRGRTDRSSVKTPETVVPTAPELQASASTDQPVTSEPTSRTTRGRKNRSSVKTPETVVPAAPALQPSTSTDQPVTPEPTSRATRGRTNRSSVKTPESIVPIAPELQPSTSRNQLVTPEPTSRATRCRTNRSSVKTPEPVVPTAPEPHPTTSTDQPVTPKLTSRATRRKTNRSSVKTPKPVEPAASDLEPFTPTDQSVTPEAIAQGGQSKTLRSSTVRAMPVPTTPEFQSPVTTDQPISPEPITQPSCIKRQRAAGNPGSLAAPIDHKPCSAPLEPKSQASRNQRWGAVRAAESLTAIPEPASPQLLETPIHASQIQKVEPAGRSRFTPELQPKASQSRKRSLATMDSPPHQKQPQRGEVSQKTVIIKEEEEDTAEKPGKEEDVVTPKPGKRKRDQAEEEPNRIPSRSLRRTKLNQESTAPKVLFTGVVDARGERAVLALGGSLAGSAAEASHLVTDRIRRTVKFLCALGRGIPILSLDWLHQSRKAGFFLPPDEYVVTDPEQEKNFGFSLQDALSRARERRLLEGYEIYVTPGVQPPPPQMGEIISCCGGTYLPSMPRSYKPQRVVITCPQDFPHCSIPLRVGLPLLSPEFLLTGVLKQEAKPEAFVLSPLEMSST

SEQ ID NO: 52920 - protein, 245 aa, Homo sapiens
MEDTQAIDWDVEEEEETEQSSESLRCNVEPVGRLHIFSGAHGPEKDFPLHLGKNVVGRMPDCSVALPFPSISKQHAEIEILAWDKAPILRDCGSLNGTQILRPPKVLSPGVSHRLRDQELILFADLLCQYHRLDVSLPFVSRGPLTVEETPRVQGETQPQRLLLAEDSEEEVDFLSERRMVKKSRTTSSSVIVPESDEEGHSPVLGGLGPPFAFNLNSDTDVEEGQQPATEEASSAARRGATVEA

SEQ ID NO: 52921 - protein, 113 aa, Homo sapiens; identical to SEQ ID NO: 52897

SEQ ID NO: 52922 - protein, 127 aa, Homo sapiens; identical to SEQ ID NO: 52898

SEQ ID NO: 52923 - protein, 2089 aa, Homo sapiens; identical to SEQ ID NO: 52895

SEQ ID NO: 52924 - protein, 162 aa, Homo sapiens; identical to SEQ ID NO: 52896

SEQ ID NO: 52925 - protein, 306 aa, Homo sapiens; identical to SEQ ID NO: 52900
  VARIANT 1: note = MOD_RES - Any amino acid

SEQ ID NO: 52926 - protein, 306 aa, Homo sapiens; identical to SEQ ID NO: 52900
  VARIANT 1: note = MOD_RES - Any amino acid

SEQ ID NO: 52927 - protein, 127 aa, Homo sapiens; identical to SEQ ID NO: 52898

SEQ ID NO: 52928 - protein, 306 aa, Homo sapiens; identical to SEQ ID NO: 52900
  VARIANT 1: note = MOD_RES - Any amino acid

SEQ ID NO: 52929 - protein, 162 aa, Homo sapiens; identical to SEQ ID NO: 52896

SEQ ID NO: 52930 - protein, 2089 aa, Homo sapiens; identical to SEQ ID NO: 52895

SEQ ID NO: 52931 - protein, 244 aa, Homo sapiens
MEDTQAIDWDVEEEEETEQSSESLRCNVEPVGRLHIFSGAHGPEKDFPLHLGKNVVGRMPDCSVALPFPSISKQHAEIEILAWDKAPILRDCGSLNGTQILRPPKVLSPGVSHRLRDQELILFADLLCQYHRLDVSLPFVSRGPLTVEETPRVQGETQPQRLLLAEDSEEEVDFLSERRMVKKSRTTSSSVIVPESDEEGHSPVLGGLGPPFAFNLNSDTDVEEGQQPHRGGLLSCQKRCHCRG

SEQ ID NO: 52932 - protein, 127 aa, Homo sapiens; identical to SEQ ID NO: 52898

SEQ ID NO: 52933 - protein, 113 aa, Homo sapiens; identical to SEQ ID NO: 52897

SEQ ID NO: 52934 - protein, 1802 aa, Homo sapiens; identical to SEQ ID NO: 52917

SEQ ID NO: 52935 - protein, 244 aa, Homo sapiens; identical to SEQ ID NO: 52931

SEQ ID NO: 52936 - protein, 1802 aa, Homo sapiens; identical to SEQ ID NO: 52917

SEQ ID NO: 52937 - protein, 244 aa, Homo sapiens; identical to SEQ ID NO: 52931

SEQ ID NO: 52938 - protein, 244 aa, Homo sapiens; identical to SEQ ID NO: 52931

SEQ ID NO: 52939 - protein, 245 aa, Homo sapiens; identical to SEQ ID NO: 52920

SEQ ID NO: 52940 - protein, 1825 aa, Homo sapiens; identical to SEQ ID NO: 52894

SEQ ID NO: 52941 - protein, 245 aa, Homo sapiens; identical to SEQ ID NO: 52920

SEQ ID NO: 52942 - protein, 1802 aa, Homo sapiens; identical to SEQ ID NO: 52917

SEQ ID NO: 52943 - protein, 245 aa, Homo sapiens; identical to SEQ ID NO: 52920

SEQ ID NO: 52944 - protein, 1802 aa, Homo sapiens
MEDTQAIDWDVEEEEETEQSSESLRCNVEPVGRLHIFSGAHGPEKDFPLHLGKNVVGRMPDCSVALPFPSISKQHAEIEILAWDKAPILRDCGSLNGTQILRPPKVLSPGVSHRLRDQELILFADLLCQYHRLDVSLPFVSRGPLTVEETPRVQGETQPQRLLLAEDSEEEVDFLSERRMVKKSRTTSSSVIVPESDEEGHSPVLGGLGPPFAFNLNSDTDVEEGQQPATEEASSAARRGATVEAKQSEAEVVTEIQLEKDQPLVKERDNDTKVKRGAGNGVVPAGVILERSQPPGEDSDTDVDDDSRPPGRPAEVHLERAQPFGFIDSDTDAEEERIPATPVVIPMKKRKIFHGVGTRGPGAPGLAHLQESQAGSDTDVEEGKAPQAVPLEKSQASMVINSDTDDEEEVSAALTLAHLKESQPAIWNRDAEEDMPQRVVLLQRSQTTTERDSDTDVEEEELPVENREAVLKDHTKIRALVRAHSEKDQPPFGDSDDSVEADKSSPGIHLERSQASTTVDINTQVEKEVPPGSAIIHIKKHQVSVEGTNQTDVKAVGGPAKLLVVSLEEAWPLHGDCETDAEEGTSLTASVVADVRKSQLPAEGDAGAEWAAAVLKQERAHEVGAQGGPPVAQVEQDLPISRENLTDLVVDTDTLGESTQPQREGAQVPTGREREQHVGGTKDSEDNYGDSEDLDLQATQCFLENQGLEAVQSMEDEPTQAFMLTPPQELGPSHCSFQTTGTLDEPWEVLATQPFCLRESEDSETQPFDTHLEAYGPCLSPPRAIPGDQHPESPVHTEPMGIQGRGRQTVDKVMGIPKETAERVGPERGPLERETEKLLPERQTDVTGEEELTKGKQDREQKQLLARDTQRQESDKNGESASPERDRESLKVEIETSEEIQEKQVQKQTLPSKAFEREVERPVANRECDPAELEEKVPKVILERDTQRGEPEGGSQDQKGQASSPTPEPGVGAGDLPGPTSAPVPSGSQSGGRGSPVSPRRHQKGLLNCKMPPAEKASRIRAAEKVSRGDQESPDACLPPTVPEAPAPPQKPLNSQSQKHLAPPPLLSPLLPSIKPTVRKTRQDGSQEAPEAPLSSELEPFHPKPKIRTRKSSRMTPFPATSAAPKLEPSTSTDQPVTPEPTSQATRGRTNRSSVKTPETVVPTAPELQPSTSTDQPVTPEPTSQATRGRTDRSSVKTPETVVPTAPELQASASTDQPVTSEPTSRTTRGRKNRSSVKTPETVVPAAPALQPSTSTDQPVTPEPTSRATRGRTNRSSVKTPESIVPIAPELQPSTSRNQLVTPEPTSRATRCRTNRSSVKTPEPVVPTAPEPHPTTSTDQPVTPKLTSRATRRKTNRSSVKTPKPVEPAASDLEPFTPTDQSVTPEAIAQGGQSKTLRSSTVRAMPVPTTPEFQSPVTTDQPISPEPITQPSCIKRQRAAGNPGSLAAPIDHKPCSAPLEPKSQASRNQRWGAVRAAESLTAIPEPASPQLLETPIHASQIQKVEPAGRSRFTPELQPKASQSRKRSLATMDSPPHQKQPQRGEVSQKTVIIKEEEEDTAEKPGKEEDVVTPKPGKRKRDQAEEEPNRIPSRSLRRTKLNQESTAPKVLFTGVVDARGERAVLALGGSLAGSAAEASHLVTDRIRRTVKFLCALGRGIPILSLDWLHQSRKAGFFLPPDEYVVTDPEQEKNFGFSLQDALSRARERRLLEGYEIYVTPGVQPPPPQMGEIISCCGGTYLPSMPRSYKPQRVVITCPQDFPHCSIPLRVGLPLLSPEFLLTGVLKQEAKPEAFVLSPLEMSST

SEQ ID NO: 52945 - protein, 1825 aa, Homo sapiens; identical to SEQ ID NO: 52894

SEQ ID NO: 52946 - protein, 1655 aa, Homo sapiens; identical to SEQ ID NO: 52906

SEQ ID NO: 52947 - protein, 1655 aa, Homo sapiens
MYHRLDVSLPFVSRGPLTVEETPRVQGETQPQRLLLAEDSEEEVDFLSERRMVKKSRTTSSSVIVPESDEEGHSPVLGGLGPPFAFNLNSDTDVEEGQQPATEEASSAARRGATVEAKQSEAEVVTEIQLEKDQPLVKERDNDTKVKRGAGNGVVPAGVILERSQPPGEDSDTDVDDDSRPPGRPAEVHLERAQPFGFIDSDTDAEEERIPATPVVIPMKKRKIFHGVGTRGPGAPGLAHLQESQAGSDTDVEEGKAPQAVPLEKSQASMVINSDTDDEEEVSAALTLAHLKESQPAIWNRDAEEDMPQRVVLLQRSQTTTERDSDTDVEEEELPVENREAVLKDHTKIRALVRAHSEKDQPPFGDSDDSVEADKSSPGIHLERSQASTTVDINTQVEKEVPPGSAIIHIKKHQVSVEGTNQTDVKAVGGPAKLLVVSLEEAWPLHGDCETDAEEGTSLTASVVADVRKSQLPAEGDAGAEWAAAVLKQERAHEVGAQGGPPVAQVEQDLPISRENLTDLVVDTDTLGESTQPQREGAQVPTGREREQHVGGTKDSEDNYGDSEDLDLQATQCFLENQGLEVQSMEDEPTQAFMLTPPQELGPSHCSFQTTGLLNCKMPPAEKASRIRAAEKVSRGDQESPDACLPPTVPEAPAPPQKPLNSQSQKHLAPPPLLSPLLPSIKPTVRKTRQDGSQEAPEAPLSSELEPFHPKPKIRTRKSSRMTPFPATSAAPEPHPSTSTAQPVTPKPTSQATRSRTNRSSVKTPEPVVPTAPELQPSTSTDQPVTSEPTSQVTRGRKSRSSVKTPETVVPTALELQPSTSTDRPVTSEPTSQATRGRKNRSSVKTPEPVVPTAPELQPSTSTDQPVTSEPTYQATRGRKNRSSVKTPEPVVPTAPELRPSTSTDRPVTPKPTSRTTRSRTNMSSVKNPESTVPIAPELPPSTSTEQPVTPEPTSRATRGRKNRSSGKTPETLVPTAPKLEPSTSTDQPVTPEPTSQATRGRTNRSSVKTPETVVPTAPELQPSTSTDQPVTPEPTSQATRGRTDRSSVKTPETVVPTAPELQASASTDQPVTSEPTSRTTRGRKNRSSVKTPETVVPAAPALQPSTSTDQPVTPEPTSRATRGRTNRSSVKTPESIVPIAPELQPSTSRNQLVTPEPTSRATRCRTNRSSVKTPEPVVPTAPEPHPTTSTDQPVTPKLTSRATRRKTNRSSVKTPKPVEPAASDLEPFTPTDQSVTPEAIAQGGQSKTLRSSTVRAMPVPTTPEFQSPVTTDQPISPEPITQPSCIKRQRAAGNPGSLAAPIDHKPCSAPLEPKSQASRNQRWGAVRAAESLTAIPEPASPQLLETPIHASQIQKVEPAGRSRFTPELQPKASQSRKRSLATMDSPPHQKQPQRGEVSQKTVIIKEEEEDTAEKPGKEEDVVTPKPGKRKRDQAEEEPNRIPSRSLRRTKLNQESTAPKVLFTGVVDARGERAVLALGGSLAGSAAEASHLVTDRIRRTVKFLCALGRGIPILSLDWLHQSRKAGFFLPPDEYVVTDPEQEKNFGFSLQDALSRARERRLLEGYEIYVTPGVQPPPPQMGEIISCCGGTYLPSMPRSYKPQRVVITCPQDFPHCSIPLRVGLPLLSPEFLLTGVLKQEAKPEAFVLSPLEMSST

SEQ ID NO: 52948 - protein, 221 aa, Homo sapiens
MEDTQAIDWDVEEEEETEQSSESLRCNVEPVGRLHIFSGAHGPEKDFPLHLGKNVVGRMPDCSVALPFPSISKQHAEIEILAWDKAPILRDCGSLNGTQILSSSLPPPQTSLLPLSLRLRLLGEEQIDPLSRLLKQLSPQPLSYRLPPPQTSLSPLSPHLGPLGEEKIGPLSRPLKQLCPQPLSSSLPPPQTNLSPLSPHLGPLGAGQIGPLSRPLNQLSL

SEQ ID NO: 52949 - protein, 221 aa, Homo sapiens; identical to SEQ ID NO: 52948

SEQ ID NO: 52950 - protein, 245 aa, Homo sapiens; identical to SEQ ID NO: 52920

SEQ ID NO: 52951 - protein, 1655 aa, Homo sapiens; identical to SEQ ID NO: 52906

SEQ ID NO: 52952 - protein, 1825 aa, Homo sapiens; identical to SEQ ID NO: 52894

SEQ ID NO: 52953 - protein, 1655 aa, Homo sapiens; identical to SEQ ID NO: 52906

SEQ ID NO: 52954 - protein, 1655 aa, Homo sapiens; identical to SEQ ID NO: 52906

SEQ ID NO: 52955 - protein, 244 aa, Homo sapiens; identical to SEQ ID NO: 52931

SEQ ID NO: 52956 - protein, 1802 aa, Homo sapiens; identical to SEQ ID NO: 52917

SEQ ID NO: 52957 - protein, 1655 aa, Homo sapiens; identical to SEQ ID NO: 52906

SEQ ID NO: 52958 - protein, 1802 aa, Homo sapiens; identical to SEQ ID NO: 52917

SEQ ID NO: 52959 - protein, 221 aa, Homo sapiens
MEDTQAIDWDVEEEEETEQSSESLRCNVEPVGRLHIFSGAHGPEKDFPLHLGKNVVGRMPDCSVALPFPSISKQHAEIEILAWDKAPILRDCGSLNGTQILSSSLPPPQTSLLPLSLRLRLLGEEQIDPLSRLLKQLSPQPLSYRLPPPQTSLSPLSPHLGPLGEEKIGPLSRPLKQLCPQPLRSSLPPPQTNLSPLSPHLGPLGAGQIGPLSRPLNQLSL

SEQ ID NO: 52960 - protein, 221 aa, Homo sapiens; identical to SEQ ID NO: 52948

SEQ ID NO: 52961 - protein, 245 aa, Homo sapiens; identical to SEQ ID NO: 52920

SEQ ID NO: 52962 - protein, 1825 aa, Homo sapiens; identical to SEQ ID NO: 52894

SEQ ID NO: 52963 - protein, 244 aa, Homo sapiens; identical to SEQ ID NO: 52931

SEQ ID NO: 52964 - protein, 244 aa, Homo sapiens; identical to SEQ ID NO: 52931

SEQ ID NO: 52965 - protein, 221 aa, Homo sapiens; identical to SEQ ID NO: 52948

SEQ ID NO: 52966 - protein, 221 aa, Homo sapiens; identical to SEQ ID NO: 52948

SEQ ID NO: 52967 - protein, 1825 aa, Homo sapiens; identical to SEQ ID NO: 52894

SEQ ID NO: 52968 - protein, 245 aa, Homo sapiens; identical to SEQ ID NO: 52920

SEQ ID NO: 52969 - protein, 781 aa, Homo sapiens
MAKTPSDHLLSTLEELVPYDFEKFKFKLQNTSVQKEHSRIPRSQIQRARPVKMATLLVTYYGEEYAVQLTLQVLRAINQRLLAEELHRAAIQEYSTQENGTDDSAASSSLGENKPRSLKTPDHPEGNEGNGPRPYGGGAASLRCSQPEAGRGLSRKPLSKRREKASEGLDAQGKPRTRSPALPGGRSPGPCRALEGGQAEVRLRRNASSAGRLQGLAGGAPGQKECRPFEVYLPSGKMRPRSLEVTISTGEKAPANPEILLTLEEKTAANLDSATEPRARPTPDGGASADLKEGPGNPEHSVTGRPPDTAASPRCHAQEGDPVDGTCVRDSCSFPEAVSGHPQASGSRSPGCPRCQDSHERKSPGSLSPQPLPQCKRHLKQVQLLFCEDHDEPICLICSLSQEHQGHRVRPIEEVALEHKKKIQKQLEHLKKLRKSGEEQRSYGEEKAVSFLKQTEALKQRVQRKLEQVYYFLEQQEHFFVASLEDVGQMVGQIRKAYDTRVSQDIALLDALIGELEAKECQSEWELLQDIGDILHRAKTVPVPEKWTTPQEIKQKIQLLHQKSEFVEKSTKYFSETLRSEMEMFNVPELIGAQAHAVNVILDAETAYPNLIFSDDLKSVRLGNKWERLPDGPQRFDSCIIVLGSPSFLSGRRYWEVEVGDKTAWILGACKTSISRKGNMTLSPENGYWVVIMMKENEYQASSVPPTRLLIKEPPKRVGIFVDYRVGSISFYNVTARSHIYTFASCSFSGPLQPIFSPGTRDGGKNTAPLTICPVGGQGPD

SEQ ID NO: 52970 - protein, 601 aa, Homo sapiens
MAKTPSDHLLSTLEELVPYDFEKFKFKLQNTSVQKEHSRIPRSQIQRARPVKMATLLVTYYGEEYAVQLTLQVLRAINQRLLAEELHRAAIQDMGSCYVAQVGLELLISNNPPIFASETAGITGRPPDTAASPRCHAQEGDPVDGTCVRDSCSFPEAVSGHPQASGSRSPGCPRCQDSHERKSPGSLSPQPLPQCKRHLKQVQLLFCEDHDEPICLICSLSQEHQGHRVRPIEEVALEHKKKIQKQLEHLKKLRKSGEEQRSYGEEKAVSFLKQTEALKQRVQRKLEQVYYFLEQQEHFFVASLEDVGQMVGQIRKAYDTRVSQDIALLDALIGELEAKECQSEWELLQDIGDILHRAKTVPVPEKWTTPQEIKQKIQLLHQKSEFVEKSTKYFSETLRSEMEMFNVPELIGAQAHAVNVILDAETAYPNLIFSDDLKSVRLGNKWERLPDGPQRFDSCIIVLGSPSFLSGRRYWEVEVGDKTAWILGACKTSISRKGNMTLSPENGYWVVIMMKENEYQASSVPPTRLLIKEPPKRVGIFVDYRVGSISFYNVTARSHIYTFASCSFSGPLQPIFSPGTRDGGKNTAPLTICPVGGQGPD

SEQ ID NO: 52971 - protein, 412 aa, Homo sapiens
MAKTPSDHLLSTLEELVPYDFEKFKFKLQNTSVQKEHSRIPRSQIQRARPVKMATLLVTYYGEEYAVQLTLQVLRAINQRLLAEELHRAAIQGRPPDTAASPRCHAQEGDPVDGTCVRDSCSFPEAVSGHPQASGSRSPGCPRCQDSHERKSPGSLSPQPLPQCKRHLKQVQLLFCEDHDEPICLICSLSQEHQGHRVRPIEEVALEHKKKIQKQLEHLKKLRKSGEEQRSYGEEKAVSFLKQTEALKQRVQRKLEQVYYFLEQQEHFFVASLEDVGQMVGQIRKAYDTRVSQDIALLDALIGELEAKECQSEWELLQDIGDILHRAKTVPVPEKWTTPQEIKQKIQLLHQKSEFVEKSTKYFSETLRSEMEMFNDHSPQHGLGSWEERDYTQHSMQGPKQGVPCFLVVRTV

SEQ ID NO: 52972 - protein, 570 aa, Homo sapiens
MAKTPSDHLLSTLEELVPYDFEKFKFKLQNTSVQKEHSRIPRSQIQRARPVKMATLLVTYYGEEYAVQLTLQVLRAINQRLLAEELHRAAIQGRPPDTAASPRCHAQEGDPVDGTCVRDSCSFPEAVSGHPQASGSRSPGCPRCQDSHERKSPGSLSPQPLPQCKRHLKQVQLLFCEDHDEPICLICSLSQEHQGHRVRPIEEVALEHKKKIQKQLEHLKKLRKSGEEQRSYGEEKAVSFLKQTEALKQRVQRKLEQVYYFLEQQEHFFVASLEDVGQMVGQIRKAYDTRVSQDIALLDALIGELEAKECQSEWELLQDIGDILHRAKTVPVPEKWTTPQEIKQKIQLLHQKSEFVEKSTKYFSETLRSEMEMFNVPELIGAQAHAVNVILDAETAYPNLIFSDDLKSVRLGNKWERLPDGPQRFDSCIIVLGSPSFLSGRRYWEVEVGDKTAWILGACKTSISRKGNMTLSPENGYWVVIMMKENEYQASSVPPTRLLIKEPPKRVGIFVDYRVGSISFYNVTARSHIYTFASCSFSGPLQPIFSPGTRDGGKNTAPLTICPVGGQGPD

SEQ ID NO: 52973 - protein, 402 aa, Homo sapiens
MAKTPSDHLLSTLEELVPYDFEKFKFKLQNTSVQKEHSRIPRSQIQRARPVKMATLLVTYYGEEYAVQLTLQVLRAINQRLLAEELHRAAIQGRPPDTAASPRCHAQEGDPVDGTCVRDSCSFPEAVSGHPQASGSRSPGCPRCQDSHERKSPGSLSPQPLPQCKRHLKQVQLLFCEDHDEPICLICSLSQEHQGHRVRPIEEVALEHKKKIQKQLEHLKKLRKSGEEQRSYGEEKAVSFLKQTEALKQRVQRKLEQVYYFLEQQEHFFVASLEDVGQMVGQIRKAYDTRVSQDIALLDALIGELEAKECQSEWELLQDIGDILHRAKTVPVPEKWTTPQEIKQKIQLLHQKSEFVEKSTKYFSETLRSEMEMFNGESSGNGVCWPGVVAVFPCAVDLRGPI

SEQ ID NO: 52974 - protein, 445 aa, Homo sapiens
MAKTPSDHLLSTLEELVPYDFEKFKFKLQNTSVQKEHSRIPRSQIQRARPVKMATLLVTYYGEEYAVQLTLQVLRAINQRLLAEELHRAAIQGRPPDTAASPRCHAQEGDPVDGTCVRDSCSFPEAVSGHPQASGSRSPGCPRCQDSHERKSPGSLSPQPLPQCKRHLKQVQLLFCEDHDEPICLICSLSQEHQGHRVRPIEEVALEHKKKIQKQLEHLKKLRKSGEEQRSYGEEKAVSFLKQTEALKQRVQRKLEQVYYFLEQQEHFFVASLEDVGQMVGQIRKAYDTRVSQDIALLDALIGELEAKECQSEWELLQDIGDILHRAKTVPVPEKWTTPQEIKQKIQLLHQKSEFVEKSTKYFSETLRSEMEMFNDHSPQHGLGSWEERDYTQHSMQGPKQGVPCLSLLSGQCNLAPLNANAQDFFPYLIFLRSSGADWRSGTCC

SEQ ID NO: 52975 - protein, 688 aa, Homo sapiens
MAKTPSDHLLSTLEELVPYDFEKFKFKLQNTSVQKEHSRIPRSQIQRARPVKMATLLVTYYGEEYAVQLTLQVLRAINQRLLAEELHRAAIQEYSTQENGTDDSAASSSLGENKPRSLKTPDHPEGNEGNGPRPYGGGAASLRCSQPEAGRGLSRKPLSKRREKASEGLDAQGKPRTRSPALPGGRSPGPCRALEGGQAEVRLRRNASSAGRLQGLAGGAPGQKECRPFEVYLPSGKMRPRSLEVTISTGEKAPANPEILLTLEEKTAANLDSATEPRARPTPDGGASADLKEGPGNPEHSVTGRPPDTAASPRCHAQEGDPVDGTCVRDSCSFPEAVSGHPQASGSRSPGCPRCQDSHERKSPGSLSPQPLPQCKRHLKQVQLLFCEDHDEPICLICSLSQEHQGHRVRPIEEVALEHKKKIQKQLEHLKKLRKSGEEQRSYGEEKAVSFLKQTEALKQRVQRKLEQVYYFLEQQEHFFVASLEDVGQMVGQIRKAYDTRVSQDIALLDALIGELEAKECQSEWELLQDIGDILHRAKTVPVPEKWTTPQEIKQKIQLLHQKSEFVEKSTKYFSETLRSEMEMFNVPELIGAQAHAVNVILDAETAYPNLIFSDDLKSVRLGNKWERLPDGPQRFDSCIIVLGSPSFLSGRRYWEVEVGDKRFSCLSLRSSWDYRRPPPCPANFLHF

SEQ ID NO: 52976 - protein, 931 aa, Homo sapiens
MPPLKSPAAFHEQRRSLERARTEDYLKRKIRSRPERSELVRMHILEETSAEPSLQAKQLKLKRARLADDLNEKIAQRPGPMELVEKNILPVESSLKEAIIVGQVNYPKVADSSSFDEDSSDALSPEQPASHESQGSVPSPLEARVSEPLLSATSASPTQVVSQLPMGRDSREMLFLAEQPPLPPPPLLPPSLTNGTTIPTAKSTPTLIKQSQPKSASEKSQRSKKAKELKPKVKKLKYHQYIPPDQKQDRGAPPMDSSYAKILQQQQLFLQLQILNQQQQQHHNYQAILPAPPKSAGEALGSSGTPPVRSLSTTNSSSSSGAPGPCGLARQNSTSLTGKPGALPANLDDMKVAELKQELKLRSLPVSGTKTELIERLRAYQDQISPVPGAPKAPAATSILHKAGEVVVAFPAARLSTGPALVAAGLAPAEVVVATVASSGVVKFGSTGSTPPVSPTPSERSLLSTGDENSTPGDTFGEMVTSPLTQLTLQASPLQILVKEEGPRAGSCCLSPGGRAELEGRDKDQMLQEKDKQIEALTRMLRQKQQLVERLKLQLEQEKRAQQPAPAPAPLGTPVKQENSFSSCQLSQQPLGPAHPFNPSLAAPATNHIDPCAVAPGPPSVVVKQEALQPEPEPVPAPQLLLGPQGPSLIKGVAPPTLITDSTGTHLVLTVTNKNADSPGLSSGSPQQPSSQPGSPAPAPSAQMDLEHPLQPLFGTPTSLLKKEPPGYEEAMSQQPKQQENGSSSQQMDDLFDILIQSGEISADFKEPPSLPGKEKPSPKTVCGSPLAAQPSPSAELPQAAPPPPGSPSLPGRLEDFLESSTGLPLLTSGHDGPEPLSLIDDLHSQMLSSTAILDHPPSPMDTSELHFVPEPSSTMGLDLADGHLDSMDWLELSSGGPVLSLAPLSTTAPSLFSTDFLDGHDLQLHWDSCL

SEQ ID NO: 52977 - protein, 798 aa, Homo sapiens
MPPLKSPAAFHEQRRSLERARTEDYLKRKIRSRPERSELVRMHILEETSAEPSLQAKQLKLKRARLADDLNEKIAQRPGPMELVEKNILPVESSLKEAIIVGQVNYPKVADSSSFDEDSSDALSPEQPASHESQGSVPSPLEARVSEPLLSATSASPTQVVSQLPMGRDSREMLFLAEQPPLPPPPLLPPSLTNGTTIPTAKSTPTLIKQSQPKSASEKSQRSKKAKELKPKVKKLKYHQYIPPDQKQDRGAPPMDSSYAKILQQQQLFLQLQILNQQQQQHHNYQAILPAPPKSAGEALGSSGTPPVRSLSTTNSSSSSGAPGPCGLARQNSTSLTGKPGALPANLDDMKVAELKQELKLRSLPVSGTKTELIERLRAYQDQISPVPGAPKAPAATSILHKAGEVVVAFPAARLSTGPALVAAGLAPAEVVVATVASSGVVKFGSTGSTPPVSPTPSERSLLSTGDENSTPGDTFGEMVTSPLTQLTLQASPLQILVKEEGPRAGSCCLSPGGRAELEGRDKDQMLQEKDKQIEALTRMLRQKQQLVERLKLQLEQEKRAQQPAPAPAPLGTPVKQENSFSSCQLSQQPLGPAHPFNPSLAAPATNHIDPCAVAPGPPSVVVKQEALQPEPEPVPAPQLLLGPQGPSLIKGVAPPTLITDSTGTHLVLTVTNKNADSPGLSSGSPQQPSSQPGSPAPAPSAQMDLEHPLQPLFGTPTSLLKKEPPGYEEAMSQQPKQQENGSSSQQMDDLFDILIQSGGNPRNFSRFQGAAIPAREGEAIPEDSLWVPPGSTAITFC

SEQ ID NO: 52978 - protein, 881 aa, Homo sapiens
MPPLKSPAAFHEQRRSLERARTEDYLKRKIRSRPERSELVRMHILEETSAEPSLQAKQLKLKRARLADDLNEKIAQRPGPMELVEKNILPVESSLKEAIIVGQVNYPKVADSSSFDEDSSDALSPEQPASHESQGSVPSPLEARVSEPLLSATSASPTQQSQPKSASEKSQRSKKAKELKPKVKKLKYHQYIPPDQKQDRGAPPMDSSYAKILQQQQLFLQLQILNQQQQQHHNYQAILPAPPKSAGEALGSSGTPPVRSLSTTNSSSSSGAPGPCGLARQNSTSLTGKPGALPANLDDMKVAELKQELKLRSLPVSGTKTELIERLRAYQDQISPVPGAPKAPAATSILHKAGEVVVAFPAARLSTGPALVAAGLAPAEVVVATVASSGVVKFGSTGSTPPVSPTPSERSLLSTGDENSTPGDTFGEMVTSPLTQLTLQASPLQILVKEEGPRAGSCCLSPGGRAELEGRDKDQMLQEKDKQIEALTRMLRQKQQLVERLKLQLEQEKRAQQPAPAPAPLGTPVKQENSFSSCQLSQQPLGPAHPFNPSLAAPATNHIDPCAVAPGPPSVVVKQEALQPEPEPVPAPQLLLGPQGPSLIKGVAPPTLITDSTGTHLVLTVTNKNADSPGLSSGSPQQPSSQPGSPAPAPSAQMDLEHPLQPLFGTPTSLLKKEPPGYEEAMSQQPKQQENGSSSQQMDDLFDILIQSGEISADFKEPPSLPGKEKPSPKTVCGSPLAAQPSPSAELPQAAPPPPGSPSLPGRLEDFLESSTGLPLLTSGHDGPEPLSLIDDLHSQMLSSTAILDHPPSPMDTSELHFVPEPSSTMGLDLADGHLDSMDWLELSSGGPVLSLAPLSTTAPSLFSTDFLDGHDLQLHWDSCL

SEQ ID NO: 52979 - protein, 931 aa, Homo sapiens; identical to SEQ ID NO: 52976

SEQ ID NO: 52980 - protein, 85 aa, Homo sapiens
MLSSTAILDHPPSPMDTSELHFVPEPSSTMGLDLADGHLDSMDWLELSSGGPVLSLAPLSTTAPSLFSTDFLDGHDLQLHWDSCL

SEQ ID NO: 52981 - protein, 507 aa, Homo sapiens
MAGRGSLVSWRAFHGCDSAEELPRVSPRFLRAWHPPPVSARMPTRRWAPGTQCITKCEHTRPKPGELAFRKGDVVTILEACENKSWYRVKHHTSGQEGLLAAGALREREALSADPKLSLMPWFHGKISGQEAVQQLQPPEDGLFLVRESARHPGDYVLCVSFGRDVIHYRVLHRDGHLTIDEAVFFCNLMDMVEHYSKDKGAICTKLVRPKRKHGTKSAEEELARAGWLLNLQHLTLGAQIGEGEFGAVLQGEYLGQKVAVKNIKCDVTAQAFLDETAVMTKMQHENLVRLLGVILHQGLYIVMEHVSKGNLVNFLRTRGRALVNTAQLLQFSLHVAEGMEYLESKKLVHRDLAARNILVSEDLVAKVSDFGLAKAERKGLDSSRLPVKWTAPEALKHGKFTSKSDVWSFGVLLWEVFSYGRAPYPKMSLKEVSEAVEKGYRMEPPEGCPGPVHVLMSSCWEAEPARRPPFRKLAEKLARELRSAGAPASVSGQDADGSTSPRSQEP

SEQ ID NO: 52982 - protein, 466 aa, Homo sapiens
MPTRRWAPGTQCITKCEHTRPKPGELAFRKGDVVTILEACENKSWYRVKHHTSGQEGLLAAGALREREALSADPKLSLMPWFHGKISGQEAVQQLQPPEDGLFLVRESARHPGDYVLCVSFGRDVIHYRVLHRDGHLTIDEAVFFCNLMDMVEHYSKDKGAICTKLVRPKRKHGTKSAEEELARAGWLLNLQHLTLGAQIGEGEFGAVLQGEYLGQKVAVKNIKCDVTAQAFLDETAVMTKMQHENLVRLLGVILHQGLYIVMEHVSKGNLVNFLRTRGRALVNTAQLLQFSLHVAEGMEYLESKKLVHRDLAARNILVSEDLVAKVSDFGLAKAERKGLDSSRLPVKWTAPEALKHGKFTSKSDVWSFGVLLWEVFSYGRAPYPKMSLKEVSEAVEKGYRMEPPEGCPGPVHVLMSSCWEAEPARRPPFRKLAEKLARELRSAGAPASVSGQDADGSTSPRSQEP

SEQ ID NO: 52983 - protein, 508 aa, Homo sapiens
MQGHFPAERREGRPRRGTRGQQQLLVSPRFLRAWHPPPVSARMPTRRWAPGTQCITKCEHTRPKPGELAFRKGDVVTILEACENKSWYRVKHHTSGQEGLLAAGALREREALSADPKLSLMPWFHGKISGQEAVQQLQPPEDGLFLVRESARHPGDYVLCVSFGRDVIHYRVLHRDGHLTIDEAVFFCNLMDMVEHYSKDKGAICTKLVRPKRKHGTKSAEEELARAGWLLNLQHLTLGAQIGEGEFGAVLQGEYLGQKVAVKNIKCDVTAQAFLDETAVMTKMQHENLVRLLGVILHQGLYIVMEHVSKGNLVNFLRTRGRALVNTAQLLQFSLHVAEGMEYLESKKLVHRDLAARNILVSEDLVAKVSDFGLAKAERKGLDSSRLPVKWTAPEALKHGKFTSKSDVWSFGVLLWEVFSYGRAPYPKMSLKEVSEAVEKGYRMEPPEGCPGPVHVLMSSCWEAEPARRPPFRKLAEKLARELRSAGAPASVSGQDADGSTSPRSQEP

SEQ ID NO: 52984 - protein, 377 aa, Homo sapiens
MTQEPFREELAYDRMPTLERGRQDPASYAPDAKPSDLQLSKRLPPCFSHKTWVFSVLMGSCLLVTSGFSLYLGNVFPAEMDYLRCAAGSCIPSAIVSFTVSRRNANVIPNFQILFVSTFAVTTTCLIWFGCKLVLNPSAININFNLILLLLLELLMAATVIIAARSSEEDCKKKKGSMSDSANILDEVPFPARVLKSYSVVEVIAGISAVLGGIIALNVDDSVSGPHLSVTFFWILVACFPSAIASHVAAECPSKCLVEVLIAISSLTSPLLFTASGYLSFSIMRIVEMFKDYPPAIKPSYDVLLLLLLLVLLLQAGLNTGTAIQCVRFKVSARLQGASWDTQNGPQERLAGEVARSPLKEFDKEKAWRAVVVQMAQ

SEQ ID NO: 52985 - protein, 377 aa, Homo sapiens; identical to SEQ ID NO: 52984

SEQ ID NO: 52986 - protein, 347 aa, Homo sapiens
MTQEPFREELAYDRMPTLERGRQDPASYAPDAKPSDLQLSKRLPPCFSHKTWVFSVLMGCIPSAIVSFTVSRRNANVIPNFQILFVSTFAVTTTCLIWFGCKLVLNPSAININFNLILLLLLELLMAATVIIAARSSEEDCKKKKGSMSDSANILDEVPFPARVLKSYSVVEVIAGISAVLGGIIALNVDDSVSGPHLSVTFFWILVACFPSAIASHVAAECPSKCLVEVLIAISSLTSPLLFTASGYLSFSIMRIVEMFKDYPPAIKPSYDVLLLLLLLVLLLQAGLNTGTAIQCVRFKVSARLQGASWDTQNGPQERLAGEVARSPLKEFDKEKAWRAVVVQMAQ

SEQ ID NO: 52987 - protein, 223 aa, Homo sapiens
MTQEPFREELAYDRMPTLERGRQDPASYAPDAKPSDLQLSKRLPPCFSHKTWVFSVLMGCIPSAIVSFTVSRRNANVIPNFQILFVSTFAVTTTCLIWFGCKLVLNPSAININFNLILLLLLELLMAATVIIAARSSEEDCKKKKGSMSDSANILDEVPFPARVLKSYSVVEVIAGISAVLGGIIALNVDDSVSGPHLSVTFFWILVACFPSAIASHVAAECP

SEQ ID NO: 52988 - protein, 325 aa, Homo sapiens
MTQEPFREELAYDRMPTLERGRQDPASYAPDAKPSDLQLSKRLPPCFSHKTWVFSVLMGSCLLVTSGFSLYLGNVFPAEMDYLRCAAGSINFNLILLLLLELLMAATVIIAARSSEEDCKKKKGSMSDSANILDEVPFPARVLKSYSVVEVIAGISAVLGGIIALNVDDSVSGPHLSVTFFWILVACFPSAIASHVAAECPSKCLVEVLIAISSLTSPLLFTASGYLSFSIMRIVEMFKDYPPAIKPSYDVLLLLLLLVLLLQAGLNTGTAIQCVRFKVSARLQGASWDTQNGPQERLAGEVARSPLKEFDKEKAWRAVVVQMAQ

SEQ ID NO: 52989 - protein, 298 aa, Homo sapiens
MDYLRCAAGSCIPSAIVSFTVSRRNANVIPNFQILFVSTFAVTTTCLIWFGCKLVLNPSAININFNLILLLLLELLMAATVIIAARSSEEDCKKKKGSMSDSANILDEVPFPARVLKSYSVVEVIAGISAVLGGIIALNVDDSVSGPHLSVTFFWILVACFPSAIASHVAAECPSKCLVEVLIAISSLTSPLLFTASGYLSFSIMRIVEMFKDYPPAIKPSYDVLLLLLLLVLLLQAGLNTGTAIQCVRFKVSARLQGASWDTQNGPQERLAGEVARSPLKEFDKEKAWRAVVVQMAQ

SEQ ID NO: 52990 - protein, 343 aa, Homo sapiens
MTQEPFREELAYDRMPTLERGRQDPASYAPDAKPSDLQLSKRLPPCFSHKTWVFSVLMGSCLLVTSGFSLYLGNVFPAEMDYLRCAAGSCIPSAIVSFTVSRRNANVINFNLILLLLLELLMAATVIIAARSSEEDCKKKKGSMSDSANILDEVPFPARVLKSYSVVEVIAGISAVLGGIIALNVDDSVSGPHLSVTFFWILVACFPSAIASHVAAECPSKCLVEVLIAISSLTSPLLFTASGYLSFSIMRIVEMFKDYPPAIKPSYDVLLLLLLLVLLLQAGLNTGTAIQCVRFKVSARLQGASWDTQNGPQERLAGEVARSPLKEFDKEKAWRAVVVQMAQ

SEQ ID NO: 52991 - protein, 88 aa, Homo sapiens
MASSDVKPKSVSHAKKWSEEIENLYRFQQAGYRDETEYRQVKQVSMVDRWPETGYVKKLQRRDNTFYYYNKQRECDDKEVHKVKIYAY

SEQ ID NO: 52992 - protein, 88 aa, Homo sapiens; identical to SEQ ID NO: 52991

SEQ ID NO: 52993 - protein, 495 aa, Homo sapiens
MGSKRRNLSCSERHQKLVDENYCKKLHVQALKNVNSQIRNQMVQNENDNRVQRKQFLRLLQNEQFELDMEEAIQKAEENKRLKELQLKQEEKLAMELAKLKHESLKDEKMRQQVRENSIELRELEKKLKAAYMNKERAAQIAEKDAIKYEQMKRDAEIAKTMMEEHKRIIKEENAAEDKRNKAKAQYYLDLEKQLEEQEKKKQEAYEQLLKEKLMIDEIVRKIYEEDQLEKQQKLEKMNAMRRYIEEFQKEQALWRKKKREEMEEENRKIIEFANMQQQREEDRMAKVQENEEKRLQLQNALTQKLEEMLRQREDLEQVRQELYQEEQAEIYKSKLKEEAEKKLRKQKEMKQDFEEQMALKELVLQAAKEEEENFRKTMLAKFAEDDRIELMNAQKQRMKQLEHRRAVEKLIEERRQQFLADKQRELEEWQLQQRRQGFINAIIEEERLKLLKEHATNLLGYLPKGVFKKEDDIDLLGEEFRKVYQQRSEICEEK

SEQ ID NO: 52994 - protein, 390 aa, Homo sapiens
MAQRYDDLPHYGGMDGVGIPSTMYGDPHAARSMQPVHHLNHGPPLHSHQYPHTAHTNAMAPSMGSSVNDALKRDKDAIYGHPLFPLLALIFEKCELATCTPREPGVAGGDVCSSESFNEDIAVFAKQIRAEKPLFSSNPELDNLMIQAIQVLRFHLLELEKVHELCDNFCHRYISCLKGKMPIDLVIDDREGGSKSDSEDITRSANLTDQPSWNRDHDDTASTRSGGTPGPSSGGHTSHSGDNSSEQGDGLDNSVASPSTGDDDDPDKDKKRHKKRGIFPKVATNIMRAWLFQHLTHPYPSEEQKKQLAQDTGLTILQVNNWFINARRRIVQPMIDQSNRAVSQGTPYNPDGQPMGGFVMDGQQHMGIRAPGPMSGMGMNMGMEGQWHYM

SEQ ID NO: 52995 - protein, 463 aa, Homo sapiens
MQYDDLPHYGGMDGVGIPSTMYGDPHAARSMQPVHHLNHGPPLHSHQYPHTAHTNAMAPSMGSSVNDALKRDKDAIYGHPLFPLLALIFEKCELATCTPREPGVAGGDVCSSESFNEDIAVFAKQIRAEKPLFSSNPELDNLMIQAIQVLRFHLLELEKVHELCDNFCHRYISCLKGKMPIDLVIDDREGGSKSDSEDITRSANLTDQPSWNRDHDDTASTRSGGTPGPSSGGHTSHSGDNSSEQGDGLDNSVASPSTGDDDDPDKDKKRHKKRGIFPKVATNIMRAWLFQHLTHPYPSEEQKKQLAQDTGLTILQVNNWFINARRRIVQPMIDQSNRAVSQGTPYNPDGQPMGGFVMDGQQHMGIRAPGLQSMPGEYVARGGPMGVSMGQPSYTQPQMPPHPAQLRHGPPMHTYIPGHPHHPTVMMHGGPPHPGMPMSASSPTVLNTGDPTMSGQVMDIHAQ

SEQ ID NO: 52996 - protein, 253 aa, Homo sapiens
MIQAIQVLRFHLLELEKVHELCDNFCHRYISCLKGKMPIDLVIDDREGGSKSDSEDITRSANLTDQPSWNRDHDDTASTRSGGTPGPSSGGHTSHSGDNSSEQGDGLDNSVASPSTGDDDDPDKDKKRHKKRGIFPKVATNIMRAWLFQHLTHPYPSEEQKKQLAQDTGLTILQVNNWFINARRRIVQPMIDQSNRAVSQGTPYNPDGQPMGGFVMDGQQHMGIRAPGPMSGMGMNMGPPCIRTFLDTLTTQQ

SEQ ID NO: 52997 - protein, 465 aa, Homo sapiens
MAQRYDDLPHYGGMDGVGIPSTMYGDPHAARSMQPVHHLNHGPPLHSHQYPHTAHTNAMAPSMGSSVNDALKRDKDAIYGHPLFPLLALIFEKCELATCTPREPGVAGGDVCSSESFNEDIAVFAKQIRAEKPLFSSNPELDNLMIQAIQVLRFHLLELEKVHELCDNFCHRYISCLKGKMPIDLVIDDREGGSKSDSEDITRSANLTDQPSWNRDHDDTASTRSGGTPGPSSGGHTSHSGDNSSEQGDGLDNSVASPSTGDDDDPDKDKKRHKKRGIFPKVATNIMRAWLFQHLTHPYPSEEQKKQLAQDTGLTILQVNNWFINARRRIVQPMIDQSNRAVSQGTPYNPDGQPMGGFVMDGQQHMGIRAPGLQSMPGEYVARGGPMGVSMGQPSYTQPQMPPHPAQLRHGPPMHTYIPGHPHHPTVMMHGGPPHPGMPMSASSPTVLNTGDPTMSGQVMDIHAQ

SEQ ID NO: 52998 - protein, 140 aa, Homo sapiens
MKKNGDEKSPLGTEIMMTRHLLVQEEPQALPAVATRHTVGTTAVSKHPYPSEEQKKQLAQDTGLTILQVNNWFINARRRIVQPMIDQSNRAVSQGTPYNPDGQPMGGFVMDGQQHMGIRAPGPMSGMGMNMGMEGQWHYM

SEQ ID NO: 52999 - protein, 220 aa, Homo sapiens
MQPVHHLNHGPPLHSHQYPHTAHTNAMAPSMGSSVNDALKRDKDAIYGHPLFPLLALIFEKCELATCTPREPGVAGGDVCSSESFNEDIAVFAKQIRAEKPLFSSNPELDNLMIQAIQVLRFHLLELEKVHELCDNFCHRYISCLKGKMPIDLVIDDREGGSKSDSEDITRSANLTDQPSWNRDHDDTASTRSGGTPGPSSGGHTSHSGDNSSEQAPLPF

SEQ ID NO: 53000 - protein, 179 aa, Homo sapiens
MKSLLTFYKCGSELLPAAVWSAGGSPSLFSDLKSKKGKKFSRDHIEVTISNCGVNGNAKGDGLDNSVASPSTGDDDDPDKDKKRHKKRGIFPKVATNIMRAWLFQHLTHPYPSEEQKKQLAQDTGLTILQVNNWFINARRRIVQPMIDQSNRAVSQGTPYNPDGQPMGGFVMDGQQHMG

SEQ ID NO: 53001 - protein, 325 aa, Homo sapiens
MAQGLRLQGSRRKGRHPLFPLLALIFEKCELATCTPREPGVAGGDVCSSESFNEDIAVFAKQIRAEKPLFSSNPELDNLMIQAIQVLRFHLLELEKVHELCDNFCHRYISCLKGKMPIDLVIDDREGGSKSDSEDITRSANLTDQPSWNRDHDDTASTRSGGTPGPSSGGHTSHSGDNSSEQGDGLDNSVASPSTGDDDDPDKDKKRHKKRGIFPKVATNIMRAWLFQHLTHPYPSEEQKKQLAQDTGLTILQVNNWFINARRRIVQPMIDQSNRAVSQGTPYNPDGQPMGGFVMDGQQHMGIRAPGPMSGMGMNMGMEGQWHYM

SEQ ID NO: 53002 - protein, 370 aa, Homo sapiens
MAQRYDDLPHYGGMDGVGIPSTMYGDPHAARSMQPVHHLNHGPPLHSHQYPHTAHTNAMAPSMGSSVNDALKRDKDAIYGHPLFPLLALIFEKCELATCTPREPGVAGGDVCSSESFNEDIAVFAKQIRAEKPLFSSNPELDNLMIQAIQVLRFHLLELEKVHELCDNFCHRYISCLKGKMPIDLVIDDREGGSKSDSEDITRSANLTDQPSWNRDHDDTASTRSGGTPGPSSGGHTSHSGDNSSEQGDGLDNSVASPSTGDDDDPDKDKKRHKKRGIFPKVATNIMRAWLFQHLTHPYPSEEQKKQLAQDTGLTILQVNNWFINARRRIVQPMIDQSNRAGKSPIVTVFKSRKRKPSSSHSPGGPLPGK

SEQ ID NO: 53003 - protein, 255 aa, Homo sapiens
MIQAIQVLRFHLLELEKVHELCDNFCHRYISCLKGKMPIDLVIDERDGSSKSDHEELSGSSTNLADHNPSSWRDHDDATSTHSAGTPGPSSGGHASQSGDNSSEQGDGLDNSVASPGTGDDDDPDKDKKRQKKRGIFPKVATNIMRAWLFQHLTHPYPSEEQKKQLAQDTGLTILQVNNWFINARRRIVQPMIDQSNRAGFLLDPSVSQGAAYSPEGQPMGSFVLDGQQHMGIRPAGPMSGMGMNMGMDGQWHYM

SEQ ID NO: 53004 - protein, 470 aa, Homo sapiens
MAQRYDELPHYGGMDGVGVPASMYGDPHAPRPIPPVHHLNHGPPLHATQHYGAHAPHPNVMPASMGSAVNDALKRDKDAIYGHPLFPLLALVFEKCELATCTPREPGVAGGDVCSSDSFNEDIAVFAKQVRAEKPLFSSNPELDNLMIQAIQVLRFHLLELEKVHELCDNFCHRYISCLKGKMPIDLVIDERDGSSKSDHEELSGSSTNLADHNPSSWRDHDDATSTHSAGTPGPSSGGHASQSGDNSSEQGDGLDNSVASPGTGDDDDPDKDKKRQKKRGIFPKVATNIMRAWLFQHLTHPYPSEEQKKQLAQDTGLTILQVNNWFINARRRIVQPMIDQSNRAVSQGAAYSPEGQPMGSFVLDGQQHMGIRPAGLQSMPGDYVSQGGPMGMSMAQPSYTPPQMTPHPTQLRHGPPMHSYLPSHPHHPAMMMHGGPPTHPGMTMSAQSPTMLNSVDPNVGGQVMDIHAQ

SEQ ID NO: 53005 - protein, 381 aa, Homo sapiens
MDGVGVPASMYGDPHAPRPIPPVHHLNHGPPLHATQHYGAHAPHPNVMPASMGSAVNDALKRDKDAIYGHPLFPLLALVFEKCELATCTPREPGVAGGDVCSSDSFNEDIAVFAKQVRAEKPLFSSNPELDNLMIQAIQVLRFHLLELEKVHELCDNFCHRYISCLKGKMPIDLVIDERDGSSKSDHEELSGSSTNLADHNPSSWRDHDDATSTHSAGTPGPSSGGHASQSGDNSSEQGDGLDNSVASPGTGDDDDPDKDKKRQKKRGIFPKVATNIMRAWLFQHLTHPYPSEEQKKQLAQDTGLTILQVNNWFINARRRIVQPMIDQSNRAVSQGAAYSPEGQPMGSFVLDGQQHMGIRPAGPMSGMGMNMGMDGQWHYM

SEQ ID NO: 53006 - protein, 470 aa, Homo sapiens; identical to SEQ ID NO: 53004

SEQ ID NO: 53007 - protein, 306 aa, Homo sapiens
MALVFEKCELATCTPREPGVAGGDVCSSDSFNEDIAVFAKQVRAEKPLFSSNPELDNLMIQAIQVLRFHLLELEKVHELCDNFCHRYISCLKGKMPIDLVIDERDGSSKSDHEELSGSSTNLADHNPSSWRDHDDATSTHSAGTPGPSSGGHASQSGDNSSEQGDGLDNSVASPGTGDDDDPDKDKKRQKKRGIFPKVATNIMRAWLFQHLTHPYPSEEQKKQLAQDTGLTILQVNNWFINARRRIVQPMIDQSNRAVSQGAAYSPEGQPMGSFVLDGQQHMGIRPAGPMSGMGMNMGMDGQWHYM

SEQ ID NO: 53008 - protein, 306 aa, Homo sapiens; identical to SEQ ID NO: 53007

SEQ ID NO: 53009 - protein, 401 aa, Homo sapiens
MAQRYDELPHYGGMDGVGVPASMYGDPHAPRPIPPVHHLNHGPPLHATQHYGAHAPHPNVMPASMGSAVNDALKRDKDAIYGHPLFPLLALVFEKCELATCTPREPGVAGGDVCSSDSFNEDIAVFAKQVRAEKPLFSSNPELDNLMIQAIQVLRFHLLELEKVHELCDNFCHRYISCLKGKMPIDLVIDERDGSSKSDHEELSGSSTNLADHNPSSWRDHDDATSTHSAGTPGPSSGGHASQSGDNSSEQGDGLDNSVASPGTGDDDDPDKDKKRQKKRGIFPKVATNIMRAWLFQHLTHPYPSEEQKKQLAQDTGLTILQVNNWFINARRRIVQPMIDQSNRAGFLLDPSVSQGAAYSPEGQPMGSFVLDGQQHMGIRPAGPMSGMGMNMGMDGQWHYM

SEQ ID NO: 53010 - protein, 394 aa, Homo sapiens
MAQRYDELPHYGGMDGVGVPASMYGDPHAPRPIPPVHHLNHGPPLHATQHYGAHAPHPNVMPASMGSAVNDALKRDKDAIYGHPLFPLLALVFEKCELATCTPREPGVAGGDVCSSDSFNEDIAVFAKQVRAEKPLFSSNPELDNLMIQAIQVLRFHLLELEKVHELCDNFCHRYISCLKGKMPIDLVIDERDGSSKSDHEELSGSSTNLADHNPSSWRDHDDATSTHSAGTPGPSSGGHASQSGDNSSEQGDGLDNSVASPGTGDDDDPDKDKKRQKKRGIFPKVATNIMRAWLFQHLTHPYPSEEQKKQLAQDTGLTILQVNNWFINARRRIVQPMIDQSNRAVSQGAAYSPEGQPMGSFVLDGQQHMGIRPAGPMSGMGMNMGMDGQWHYM

SEQ ID NO: 53011 - protein, 238 aa, Homo sapiens
MDGVGVPASMYGDPHAPRPIPPVHHLNHGPPLHATQHYGAHAPHPNVMPASMGSAVNDALKRDKDAIYGHPLFPLLALVFEKCELATCTPREPGVAGGDVCSSDSFNEDIAVFAKQVRAEKPLFSSNPELDNLMIQAIQVLRFHLLELEKVHELCDNFCHRYISCLKGKMPIDLVIDERDGSSKSDHEELSGSSTNLADHNPSSWRDHDDATSTHSAGTPGPSSGGHASQSGDNSSEQ

SEQ ID NO: 53012 - protein, 79 aa, Homo sapiens
MALVFEKCELATCTPREPGVAGGDVCSSDSFNEDIAVFAKQVRAEKPLFSSNPELDNLMIQAIQVLRFHLLELEKVSRK

SEQ ID NO: 53013 - protein, 388 aa, Homo sapiens
MDGVGVPASMYGDPHAPRPIPPVHHLNHGPPLHATQHYGAHAPHPNVMPASMGSAVNDALKRDKDAIYGHPLFPLLALVFEKCELATCTPREPGVAGGDVCSSDSFNEDIAVFAKQVRAEKPLFSSNPELDNLMIQAIQVLRFHLLELEKVHELCDNFCHRYISCLKGKMPIDLVIDERDGSSKSDHEELSGSSTNLADHNPSSWRDHDDATSTHSAGTPGPSSGGHASQSGDNSSEQGDGLDNSVASPGTGDDDDPDKDKKRQKKRGIFPKVATNIMRAWLFQHLTHPYPSEEQKKQLAQDTGLTILQVNNWFINARRRIVQPMIDQSNRAGFLLDPSVSQGAAYSPEGQPMGSFVLDGQQHMGIRPAGPMSGMGMNMGMDGQWHYM

SEQ ID NO: 53014 - protein, 394 aa, Homo sapiens; identical to SEQ ID NO: 53010

SEQ ID NO: 53015 - protein, 477 aa, Homo sapiens
MAQRYDELPHYGGMDGVGVPASMYGDPHAPRPIPPVHHLNHGPPLHATQHYGAHAPHPNVMPASMGSAVNDALKRDKDAIYGHPLFPLLALVFEKCELATCTPREPGVAGGDVCSSDSFNEDIAVFAKQVRAEKPLFSSNPELDNLMIQAIQVLRFHLLELEKVHELCDNFCHRYISCLKGKMPIDLVIDERDGSSKSDHEELSGSSTNLADHNPSSWRDHDDATSTHSAGTPGPSSGGHASQSGDNSSEQGDGLDNSVASPGTGDDDDPDKDKKRQKKRGIFPKVATNIMRAWLFQHLTHPYPSEEQKKQLAQDTGLTILQVNNWFINARRRIVQPMIDQSNRAGFLLDPSVSQGAAYSPEGQPMGSFVLDGQQHMGIRPAGLQSMPGDYVSQGGPMGMSMAQPSYTPPQMTPHPTQLRHGPPMHSYLPSHPHHPAMMMHGGPPTHPGMTMSAQSPTMLNSVDPNVGGQVMDIHAQ

SEQ ID NO: 53016 - protein, 477 aa, Homo sapiens; identical to SEQ ID NO: 53015

SEQ ID NO: 53017 - protein, 118 aa, Homo sapiens
MPREDAHFIYGYPKKGHGHSYTTAEEAAGIGILTVILGVLLLIGCWYCRRRNGYRALMDKSLHVGTQCALTRRCPQEGFDHRDSKVSLQEKNCEPVVPNAPPAYEKLSAEQSPPPYSP

SEQ ID NO: 53018 - protein, 118 aa, Homo sapiens; identical to SEQ ID NO: 53017

SEQ ID NO: 53019 - protein, 118 aa, Homo sapiens; identical to SEQ ID NO: 53017

SEQ ID NO: 53020 - protein, 422 aa, Homo sapiens
MSVGAMKKGVGRAVGLGGGSGCQATEEDPLPNCGACAPGQGGRRWRLPQPAWVEGSSARLWEQATGTGWMDLEASLLPTGPNASNTSDGPDNLTSAGSPPRTGSISYINIIMPSVFGTICLLGIIGNSTVIFAVVKKSKLHWCNNVPDIFIINLSVVDLLFLLGMPFMIHQLMGNGVWHFGETMCTLITAMDANSQFTSTYILTAMAIDRYLATVHPISSTKFRKPSVATLVICLLWALSFISITPVWLYARLIPFPGGAVGCGIRLPNPDTDLYWFTLYQFFLAFALPFVVITAAYVRILQRMTSSVAPASQRSIRLRTKRVTRTAIAICLVFFVCWAPYYVLQLTQLSISRPTLTFVYLYNAAISLGYANSCLNPFVYIVLCETFRKRLVLSVKPAAQGQLRAVSNAQTADEERTESKGT

SEQ ID NO: 53021 - protein, 296 aa, Homo sapiens
MSVGAMKKGVGRAVGLGGGSGCQATEEDPLPNCGACAPGQGGRRWRLPQPAWVEGSSARLWEQATGTGWMDLEASLLPTGPNASNTSDGPDNLTSAGSPPRTGSISYINIIMPSVFGTICLLGIIGNSTVIFAVVKKSKLHWCNNVPDIFIINLSFFLAFALPFVVITAAYVRILQRMTSSVAPASQRSIRLRTKRVTRTAIAICLVFFVCWAPYYVLQLTQLSISRPTLTFVYLYNAAISLGYANSCLNPFVYIVLCETFRKRLVLSVKPAAQGQLRAVSNAQTADEERTESKGT

SEQ ID NO: 53022 - protein, 340 aa, Homo sapiens
MNPFHASCWNTSAELLNKSWNKEFAYQTASVVDTVILPSMIGIICSTGLVGNILIVFTIIRSRKKTVPDIYICNLAVADLVHIVGMPFLIHQWARGGEWVFGGPLCTIITSLDTCNQFACSAIMTVMSVDRYFALVQPFRLTRWRTRYKTIRINLGLWAASFILALPVWVYSKVIKFKDGVESCAFDLTSPDDVLWYTLYLTITTFFFPLPLILVCYILILCYTWEMYQQNKDARCCNPSVPKQRVMKLTKMVLVLVVVFILSAAPYHVIQLVNLQMEQPTLAFYVGYYLSICLSYASSSINPFLYILLSGNFQKRLPQIQRRATEKEINNMGNTLKSHF

SEQ ID NO: 53023 - protein, 340 aa, Homo sapiens; identical to SEQ ID NO: 53022

SEQ ID NO: 53024 - protein, 340 aa, Homo sapiens; identical to SEQ ID NO: 53022

SEQ ID NO: 53025 - protein, 172 aa, Homo sapiens
MANGTNASAPYYSYEYYLDYLDLIPVDEKKLKAHKHSIVIAFWVSLAAFVVLLFLILLYMSWSASPQMRNSPKHHQTCPWSHGLNLHLCIQKCLPCHREPLATSQAQASSVEPGSRTGPDQPLRQESSSTLPLGGFQTHPTLLWELTLNGGPLVRSKPSEPPPGDRTSQLQS

SEQ ID NO: 53026 - protein, 102 aa, Homo sapiens
MANGTNASAPYYSYEYYLDYLDLIPVDEKKLKAHKHSIVIAFWVSLAAFVVLLFLILLYMSWSASPQMSFNTDESLLHSEVLPQTRAISCDELQAPREEGAA

SEQ ID NO: 53027 - protein, 172 aa, Homo sapiens; identical to SEQ ID NO: 53025

SEQ ID NO: 53028 - protein, 102 aa, Homo sapiens; identical to SEQ ID NO: 53026

SEQ ID NO: 53029 - protein, 369 aa, Homo sapiens
MPRAPKRQRCMPEEDLQSQSETQGLEGAQAPLAVEEDASSSTSTSSSFPSSFPSSSSSSSSSCYPLIPSTPEEVSADDETPNPPQSAQIACSSPSVVASLPLDQSDEGSSSQKEESPSTLQVLPDSESLPRSEIDEKVTDLVQFLLFKYQMKEPITKAEILESVIRNYEDHFPLLFSEASECMLLVFGIDVKEVDPTGHSFVLVTSLGLTYDGMLSDVQSMPKTGILILILSIVFIEGYCTPEEVIWEALNMMGLYDGMEHLIYGEPRKLLTQDWVQENYLEYRQVPGSDPARYEFLWGPRAHAEIRKMSLLKFLAKVNGSDPRSFPLWYEEALKDEEERAQDRIATTDDTTAMASASSSATGSFSYPE

SEQ ID NO: 53030 - protein, 369 aa, Homo sapiens; identical to SEQ ID NO: 53029

SEQ ID NO: 53031 - protein, 161 aa, Homo sapiens
MPRAPKRQRCMPEEDLQSQSETQGLEGAQAPLAVEEDASSSTSTSSSFPSSFPSSSSSSSSSCYPLIPSTPEEVSADDETPNPPQSAQIACSSPSVVASLPLDQSDEGSSSQKEESPSTLQVLPDSESLPRSEIDEKVTDLVQFLLFKYQMKEPITKAEIL

SEQ ID NO: 53032 - protein, 190 aa, Homo sapiens
MPRAPKRQRCMPEEDLQSQSETQGLEGAQAPLAVEEDASSSTSTSSSFPSSFPSSSSSSSSSCYPLIPSTPEEVSADDETPNPPQSAQIACSSPSVVASLPLDQSDEGSSSQKEESPSTLQVLPDSESLPRSEIDEKVTDLVQFLLFKYQMKEPITKAEILESVIRNYEDHFPLLFSEASECMLLVFGID

SEQ ID NO: 53033 - protein, 400 aa, Homo sapiens
MSKVSTMFSEDDFQSTERAPYGPQLQWSQDLPRVQVFREQANLEDRSPRRTQRITGGEQVLWGPITQIFPTVRPADLTRVIMPLEQRSQHCKPEEGLQAQEEDLGLVGAQALQAEEQEAAFFSSTLNVGTLEELPAAESPSPPQSPQEESFSPTAMDAIFGSLSDEGSGSQEKEGPSTSPDLIDPESFSQDILHDKIIDLVHLLLRKYRVKGLITKAEMLGSVIKNYEDYFPEIFREASVCMQLLFGIDVKEVDPTSHSYVLVTSLNLSYDGIQCNEQSMPKSGLLIIVLGVIFMEGNCIPEEVMWEVLSIMGVYAGREHFLFGEPKRLLTQNWVQEKYLVYRQVPGTDPACYEFLWGPRAHAETSKMKVLEYIANANGRDPTSYPSLYEDALREEGEGV

SEQ ID NO: 53034 - protein, 429 aa, Homo sapiens
METQFRRGGLGCSPASIKRKKKREDSGDFGLQVSTMFSEDDFQSTERAPYGPQLQWSQDLPRVQVFREQANLEDRSPRRTQRITGGEQVLWGPITQIFPTVRPADLTRVIMPLEQRSQHCKPEEGLQAQEEDLGLVGAQALQAEEQEAAFFSSTLNVGTLEELPAAESPSPPQSPQEESFSPTAMDAIFGSLSDEGSGSQEKEGPSTSPDLIDPESFSQDILHDKIIDLVHLLLRKYRVKGLITKAEMLGSVIKNYEDYFPEIFREASVCMQLLFGIDVKEVDPTSHSYVLVTSLNLSYDGIQCNEQSMPKSGLLIIVLGVIFMEGNCIPEEVMWEVLSIMGVYAGREHFLFGEPKRLLTQNWVQEKYLVYRQVPGTDPACYEFLWGPRAHAETSKMKVLEYIANANGRDPTSYPSLYEDALREEGEGV

SEQ ID NO: 53035 - protein, 314 aa, Homo sapiens
MPLEQRSQHCKPEEGLEAQGEALGLVGAQAPATEEQETASSSSTLVEVTLREVPAAESPSPPHSPQGASTLPTTINYTLWSQSDEGSSNEEQEGPSTFPDLETSFQVALSRKMAELVHFLLLKYRAREPFTKAEMLGSVIRNFQDFFPVIFSKASEYLQLVFGIEVVEVVRIGHLYILVTCLGLSYDGLLGDNQIVPKTGLLIIVLAIIAKEGDCAPEEKIWEELSVLEASDGREDSVFAHPRKLLTQDLVQENYLEYRQVPGSDPACYEFLWGPRALVETSYVKVLHHLLKISGGPHISYPPLHEWAFREGEE

SEQ ID NO: 53036 - protein, 314 aa, Homo sapiens; identical to SEQ ID NO: 53035

SEQ ID NO: 53037 - protein, 314 aa, Homo sapiens; identical to SEQ ID NO: 53035

SEQ ID NO: 53038 - protein, 314 aa, Homo sapiens
MPLEQRSQHCKPEEGLEARGEALGLVGAQAPATEEQQTASSSSTLVEVTLGEVPAADSPSPPHSPQGASSFSTTINYTLWRQSDEGSSNQEEEGPRMFPDLESEFQAAISRKMVELVHFLLLKYRAREPVTKAEMLESVLRNCQDFFPVIFSKASEYLQLVFGIEVVEVVPISHLYILVTCLGLSYDGLLGDNQVMPKTGLLIIVLAIIAIEGDCAPEEKIWEELSMLEVFEGREDSVFAHPRKLLMQDLVQENYLEYRQVPGSDPACYEFLWGPRALIETSYVKVLHHTLKIGGEPHISYPPLHERALREGEE

SEQ ID NO: 53039 - protein, 314 aa, Homo sapiens; identical to SEQ ID NO: 53038

SEQ ID NO: 53040 - protein, 314 aa, Homo sapiens; identical to SEQ ID NO: 53038

SEQ ID NO: 53041 - protein, 314 aa, Homo sapiens; identical to SEQ ID NO: 53038

SEQ ID NO: 53042 - protein, 314 aa, Homo sapiens
MPLEQRSQHCKPEEGLEARGEALGLVGAQAPATEEQEAASSSSTLVEVTLGEVPAAESPDPPQSPQGASSLPTTMNYPLWSQSYEDSSNQEEEGPSTFPDLESEFQAALSRKVAELVHFLLLKYRAREPVTKAEMLGSVVGNWQYFFPVIFSKASSSLQLVFGIELMEVDPIGHLYIFATCLGLSYDGLLGDNQIMPKAGLLIIVLAIIAREGDCAPEEKIWEELSVLEVFEGREDSILGDPKKLLTQHFVQENYLEYRQVPGSDPACYEFLWGPRALVETSYVKVLHHMVKISGGPHISYPPLHEWVLREGEE

SEQ ID NO: 53043 - protein, 314 aa, Homo sapiens; identical to SEQ ID NO: 53042

SEQ ID NO: 53044 - protein, 198 aa, Homo sapiens
MPLEQRSQHCKPEEGLEARGEALGLVGAQAPATEEQEAASSSSTLVEVTLGEVPAAESPDPPQSPQGASSLPTTMNYPLWSQSYEDSSNQEEEGPSTFPDLESEFQAALSRKVAELVHFLLLKYRAREPVTKAEMLGSVVGNWQYFFPVIFSKASSSLQLVFGIELMEVDPIGHLYIFATCLGLSYDGLLGDNQIMPK

SEQ ID NO: 53045 - protein, 317 aa, Homo sapiens
MSSEQKSQHCKPEEGVEAQEEALGLVGAQAPTTEEQEAAVSSSSPLVPGTLEEVPAAESAGPPQSPQGASALPTTISFTCWRQPNEGSSSQEEEGPSTSPDAESLFREALSNKVDELAHFLLRKYRAKELVTKAEMLERVIKNYKRCFPVIFGKASESLKMIFGIDVKEVDPASNTYTLVTCLGLSYDGLLGNNQIFPKTGLLIIVLGTIAMEGDSASEEEIWEELGVMGVYDGREHTVYGEPRKLLTQDWVQENYLEYRQVPGSNPARYEFLWGPRALAETSYVKVLEHVVRVNARVRIAYPSLREAALLEEEEGV

SEQ ID NO: 53046 - protein, 317 aa, Homo sapiens; identical to SEQ ID NO: 53045

SEQ ID NO: 53047 - protein, 317 aa, Homo sapiens; identical to SEQ ID NO: 53045

SEQ ID NO: 53048 - protein, 317 aa, Homo sapiens; identical to SEQ ID NO: 53045

SEQ ID NO: 53049 - protein, 317 aa, Homo sapiens; identical to SEQ ID NO: 53045

SEQ ID NO: 53050 - protein, 317 aa, Homo sapiens; identical to SEQ ID NO: 53045

SEQ ID NO: 53051 - protein, 317 aa, Homo sapiens; identical to SEQ ID NO: 53045

SEQ ID NO: 53052 - protein, 230 aa, Homo sapiens
MSSEQKSQHCKPEEGVEAQEEALGLVGAQAPTTEEQEAAVSSSSPLVPGTLEEVPAAESAGPPQSPQGASALPTTISFTCWRQPNEGSSSQEEEGPSTSPDAESLFREALSNKVDELAHFLLRKYRAKELVTKAEMLERVIKNYKRCFPVIFGKASESLKMIFGIDVKEVDPASNTYTLVTCLGLSYDGLLGNNQIFPKTGLLIIVLGTIAMEGDSASEEEIWEELGVMG

SEQ ID NO: 53053 - protein, 217 aa, Homo sapiens
MSSEQKSQHCKPEEGVEAQEEALGLVGAQAPTTEEQEAAVSSSSPLVPGTLEEVPAAESAGPPQSPQGASALPTTISFTCWRQPNEGSSSQEEEGPSTSPDAESLFREALSNKVDELAHFLLRKYRAKELVTKAEMLERVIKNYKRCFPVIFGKASESLKMIFGIDVKEVDPASNTYTLVTCLGLSYDGLLGNNQIFPKTGLLIIVLGTIAMEGDSA

SEQ ID NO: 53054 - protein, 241 aa, Homo sapiens
MSSEQKSQHCKPEEGVEAQEEALGLVGAQAPTTEEQEAAVSSSSPLVPGTLEEVPAAESAGPPQSPQGASALPTTISFTCWRQPNEGSSSQEEEGPSTSPDAESLFREALSNKVDELAHFLLRKYRAKELVTKAEMLERVIKNYKRCFPVIFGKASESLKMIFGIDVKEVDPASNTYTLVTCLGLSYDGLLGNNQIFPKTGLLIIVLGTIAMEGDSASEEEIWEELGVMGVYDGREHTVYG

SEQ ID NO: 53055 - protein, 172 aa, Homo sapiens
MSSEQKSQHCKPEEGVEAQEEALGLVGAQAPTTEEQEAAVSSSSPLVPGTLEEVPAAESAGPPQSPQGASALPTTISFTCWRQPNEGSSSQEEEGPSTSPDAESLFREALSNKVDELAHFLLRKYRAKELVTKAEMLERVIKNYKRCFPVIFGKASESLKMIFGIDVKEVDP

SEQ ID NO: 53056 - protein, 241 aa, Homo sapiens; identical to SEQ ID NO: 53054

SEQ ID NO: 53057 - protein, 241 aa, Homo sapiens; identical to SEQ ID NO: 53054

SEQ ID NO: 53058 - protein, 217 aa, Homo sapiens; identical to SEQ ID NO: 53053

SEQ ID NO: 53059 - protein, 241 aa, Homo sapiens; identical to SEQ ID NO: 53054

SEQ ID NO: 53060 - protein, 314 aa, Homo sapiens
MPLEQRSQHCKPEEGLEARGEALGLVGAQAPATEEQEAASSSSTLVEVTLGEVPAAESPDPPQSPQGASSLPTTMNYPLWSQSYEDSSNQEEEGPSTFPDLESEFQAALSRKVAKLVHFLLLKYRAREPVTKAEMLGSVVGNWQYFFPVIFSKASDSLQLVFGIELMEVDPIGHVYIFATCLGLSYDGLLGDNQIMPKTGFLIIILAIIAKEGDCAPEEKIWEELSVLEVFEGREDSIFGDPKKLLTQYFVQENYLEYRQVPGSDPACYEFLWGPRALIETSYVKVLHHMVKISGGPRISYPLLHEWALREGEE

SEQ ID NO: 53061 - protein, 201 aa, Homo sapiens
MPLEQRSQHCKPEEGLEARGEALGLVGAQAPATEEQEAASSSSTLVEVTLGEVPAAESPDPPQSPQGASSLPTTMNYPLWSQSYEDSSNQEEEGPSTFPDLESEFQAALSRKVAKLVHFLLLKYRAREPVTKAEMLGSVVGNWQYFFPVIFSKASDSLQLVFGIELMEVDPIGHVYIFATCLGLSYDGLLGDNQIMPKTGF

SEQ ID NO: 53062 - protein, 235 aa, Homo sapiens
MPLEQRSQHCKPEEGLEARGEALGLVGAQAPATEEQEAASSSSTLVEVTLGEVPAAESPDPPQSPQGASSLPTTMNYPLWSQSYEDSSNQEEEGPSTFPDLESEFQAALSRKVAKLVHFLLLKYRAREPVTKAEMLGSVVGNWQYFFPVIFSKASDSLQLVFGIELMEVDPIGHVYIFATCLGLSYDGLLGDNQIMPKTGFLIIILAIIAKEGDCAPEEKIWEELSVLEVFEGRE

SEQ ID NO: 53063 - protein, 318 aa, Homo sapiens
MLLGQKSQRYKAEEGLQAQGEAPGLMDVQIPTAEEQKAASSSSTLIMGTLEEVTDSGSPSPPQSPEGASSSLTVTDSTLWSQSDEGSSSNEEEGPSTSPDPAHLESLFREALDEKVAELVRFLLRKYQIKEPVTKAEMLESVIKNYKNHFPDIFSKASECMQVIFGIDVKEVDPAGHSYILVTCLGLSYDGLLGDDQSTPKTGLLIIVLGMILMEGSRAPEEAIWEALSVMGLYDGREHSVYWKLRKLLTQEWVQENYLEYRQAPGSDPVRYEFLWGPRALAETSYVKVLEHVVRVNARVRISYPSLHEEALGEEKGV

SEQ ID NO: 53064 - protein, 318 aa, Homo sapiens; identical to SEQ ID NO: 53063

SEQ ID NO: 53065 - protein, 318 aa, Homo sapiens; identical to SEQ ID NO: 53063

SEQ ID NO: 53066 - protein, 315 aa, Homo sapiens
MSLEQRSPHCKPDEDLEAQGEDLGLMGAQEPTGEEEETTSSSDSKEEEVSAAGSSSPPQSPQGGASSSISVYYTLWSQFDEGSSSQEEEEPSSSVDPAQLEFMFQEALKLKVAELVHFLLHKYRVKEPVTKAEMLESVIKNYKRYFPVIFGKASEFMQVIFGTDVKEVDPAGHSYILVTALGLSCDSMLGDGHSMPKAALLIIVLGVILTKDNCAPEEVIWEALSVMGVYVGKEHMFYGEPRKLLTQDWVQENYLEYRQVPGSDPAHYEFLWGSKAHAETSYEKVINYLVMLNAREPICYPSLYEEVLGEEQEGV

SEQ ID NO: 53067 - protein, 114 aa, Homo sapiens
MSLEQRSPHCKPDEDLEAQGEDLGLMGAQEPTGEEEETTSSSDSKEEEVSAAGSSSPPQSPQGGASSSISVYYTLWSQFDEGSSSQEEEEPSSSVDPAQLEFMFQEALKLKVAE

SEQ ID NO: 53068 - protein, 309 aa, Homo sapiens
MSLEQRSPHCKPDEDLEAQGEDLGLMGAQEPTGEEEETTSSSDSKEEEVSAAGSSSPPQSPQGGASSSISVYYTLWSQFDEGSSSQEEEEPSSSVDPAQLEFMFQEALKLKVAELVHFLLHKYRVKEPVTKAEMLESVIKNYKRYFPVIFGKASEFMQVIFGTDVKEVDPAGHSYILVTALGLSCDSMLGDGHSMPKAALLIIVLGVILTKDNCAPEEVIWEALSVMGVYVGKEHMFYGEPRKLLTQDWVQENYLEYRQVPGSDPAHYEFLWGSKAHAETSYEKVINYLVMLNAREPICYPSLYEEVLG

SEQ ID NO: 53069 - protein, 196 aa, Homo sapiens
MSLEQRSPHCKPDEDLEAQGEDLGLMGAQEPTGEEEETTSSSDSKEEEVSAAGSSSPPQSPQGGASSSISVYYTLWSQFDEGSSSQEEEEPSSSVDPAQLEFMFQEALKLKVAELVHFLLHKYRVKEPVTKAEMLESVIKNYKRYFPVIFGKASEFMQVIFGTDVKEVDPAGHSYILVTALGLSCDSMLGDGHSMP

SEQ ID NO: 53070 - protein, 97 aa, Homo sapiens
MSLEQRSPHCKPDEDLEAQGEDLGLMGAQEPTGEEEETTSSSDSKEEEVSAAGSSSPPQSPQGGASSSISVYYTLWSQFDEGSSSQEEEEPSSSVDP

SEQ ID NO: 53071 - protein, 315 aa, Homo sapiens; identical to SEQ ID NO: 53066

SEQ ID NO: 53072 - protein, 347 aa, Homo sapiens
MPRGQKSKLRAREKRRKAREETQGLKVAHATAAEKEECPSSSPVLGDTPTSSPAAGIPQKPQGAPPTTTAAAAVSCTESDEGAKCQGEENASFSQATTSTESSVKDPVAWEAGMLMHFILRKYKMREPIMKADMLKVVDEKYKDHFTEILNGASRRLELVFGLDLKEDNPSGHTYTLVSKLNLTNDGNLSNDWDFPRNGLLMPLLGVIFLKGNSATEEEIWKFMNVLGAYDGEEHLIYGEPRKFITQDLVQEKYLKYEQVPNSDPPRYQFLWGPRAYAETTKMKVLEFLAKMNGATPRDFPSHYEEALRDEEERAQVRSSVRARRRTTATTFRARSRAPFSRSSHPM

SEQ ID NO: 53073 - protein, 347 aa, Homo sapiens; identical to SEQ ID NO: 53072

SEQ ID NO: 53074 - protein, 347 aa, Homo sapiens; identical to SEQ ID NO: 53072

SEQ ID NO: 53075 - protein, 347 aa, Homo sapiens
MPRGQKSKLRAREKRRQARGGLEDLIDALDILEEEEESPPSASACLKDVFQSSLDGASNNPHGLREAQSTSTSATAASHTRHPEGVNDQMEERPICTQDLEATDSFPRGPVDEKVIILVHYLLYKYQMKEPITKADMLRNVTQMSKSQFPVILSRASEHLELIFGLDLKEVEPNKHIYVLVNKLDLGCDAKLSDETGVPKTGLLMTVLGIIFTNGNCVAEEEVWKVFNTMGLYDGIEHFMFGEPRKLLTKDLVKENYLEYQQVPNSDPPRYQFLWGPRAHAETSKMKVLEFLAKVNDTAPSEFSNWYTEALQDEEERARARVAAKARVSATAGARSKVKSSKSSQLQ

SEQ ID NO: 53076 - protein, 324 aa, Homo sapiens
MSQDQESPRCTHDQHLQTFSETQSLEVAQVSKALEKTLLSSSHPLVPGKLKEAPAAKAESPLEVPQSFCSSSIAVTTTSSSESDEASSNQEEEDSPSSSEDTSDPRNVPADALDQKVAFLVNFMLHKCQMKKPITKADMLKIIIKDDESHFSEILLRASEHLEMIFGLDVVEVDPTTHCYGLFIKLGLTYDGMLSGEKGVPKTGLLIIVLGVIFMKGNRATEEEVWEVLNLTGVYSGKKHFIFGEPRMLITKDFVKEKYLEYQQVANSDPARYEFLWGPRAKAETSKMKVLEFVAKVHGSYPHSFPSQYAEALKEEEERARARI

SEQ ID NO: 53077 - protein, 324 aa, Homo sapiens; identical to SEQ ID NO: 53076

SEQ ID NO: 53078 - protein, 324 aa, Homo sapiens; identical to SEQ ID NO: 53076

SEQ ID NO: 53079 - protein, 324 aa, Homo sapiens; identical to SEQ ID NO: 53076

SEQ ID NO: 53080 - protein, 356 aa, Homo sapiens
MGTEAQPVVKAVILHCLPSCPHSCLLPPTRVIMSQDQESPRCTHDQHLQTFSETQSLEVAQVSKALEKTLLSSSHPLVPGKLKEAPAAKAESPLEVPQSFCSSSIAVTTTSSSESDEASSNQEEEDSPSSSEDTSDPRNVPADALDQKVAFLVNFMLHKCQMKKPITKADMLKIIIKDDESHFSEILLRASEHLEMIFGLDVVEVDPTTHCYGLFIKLGLTYDGMLSGEKGVPKTGLLIIVLGVIFMKGNRATEEEVWEVLNLTGVYSGKKHFIFGEPRMLITKDFVKEKYLEYQQVANSDPARYEFLWGPRAKAETSKMKVLEFVAKVHGSYPHSFPSQYAEALKEEEERARARI

SEQ ID NO: 53081 - protein, 331 aa, Homo sapiens
MPRGQASKRRAREKRRQARGEDQCLGGAQATAAEKEKLPSSSSPACQSPPQSFPNAGIPQESQRASYPSSPASAVSLTSSDEGAKGQKGESPNSFHGPSSSESTGRDLLNTKTGELVQFLLNKYIRKEPITREAMLKVINRKYKQHFPEILRRSTENVEVVFGLYLKEMDPSRQSYVLVGKLDFPNQGSLSDGGGFPLSGLLMVLLSTIFMHGNRATEEEMWECLNALGMYKGRKHFIYGEPQELVTKDLVREGYLEYQQVPSSDPPRYEFLWGPRARAETSKMKVLEFVAKLNDTVASTYKSRYEEALREEEEQARARAVARDSARARAS

SEQ ID NO: 53082 - protein, 336 aa, Homo sapiens
MPRGQASKRRAREKRRQARGEDQCLGGAQATAAEKEKLPSSSSPACQSPPQSFPNAGIPQESQRASYPSSPASAVSLTSSDEGAKGQKGESPNSFHGPSSSESTGRDLLNTKTGELVQFLLNKYIRKEPITREAMLKVINRKYKQHFPEILRRSTENVEVVFGLYLKEMDPSRQSYVLVGKLDFPNQGSLSDGGGFPLSGLLMVLLSTIFMHGNRATEEEMWECLNALGMYKGRKHFIYGEPQELVTKDLVREGYLEYQQVPSSDPPRYEFLWGPRARAETSKMKVLEFVAKLNDTVASTYKSRYEEALREEEEQARARAVARDSARARASRSFQP

SEQ ID NO: 53083 - protein, 336 aa, Homo sapiens; identical to SEQ ID NO: 53082

SEQ ID NO: 53084 - protein, 319 aa, Homo sapiens
MPRGQKSKLRAREKRRKARDETRGLNVPQVTEAEEEEAPCCSSSVSGGAASSSPAAGIPQEPQRAPTTAAAAAAGVSSTKSKKGAKSHQGEKNASSSQASTSTKSPSEDPLTRKSGSLVQFLLYKYKIKKSVTKGEMLKIVGKRFREHFPEILKKASEGLSVVFGLELNKVNPNGHTYTFIDKVDLTDEESLLSSWDFPRRKLLMPLLGVIFLNGNSATEEEIWEFLNMLGVYDGEEHSVFGEPWKLITKDLVQEKYLEYKQVPSSDPPRFQFLWGPRAYAETSKMKVLEFLAKVNGTTPCAFPTHYEEALKDEEKAGV

SEQ ID NO: 53085 - protein, 346 aa, Homo sapiens
MPRGQKSTLHAREKRQQTRGQTQDHQGAQITATNKKKVSFSSPLILGATIQKKSAGRSRSALKKPQRALSTTTSVDVSYKKSYKGANSKIEKKQSFSQGLSSTVQSRTDPLIMKTNMLVQFLMEMYKMKKPIMKADMLKIVQKSHKNCFPEILKKASFNMEVVFGVDLKKVDSTKDSYVLVSKMDLPNNGTVTRGRGFPKTGLLLNLLGVIFMKGNCATEEKIWEFLNKMRIYDGKKHFIFGEPRKLITQDLVKLKYLEYRQVPNSNPARYEFLWGPRAHAETSKMKVLEFWAKVNKTVPSAFQFWYEEALRDEEERVQAAAMLNDGSSAMGRKCSKAKASSSSHA

SEQ ID NO: 53086 - protein, 346 aa, Homo sapiens; identical to SEQ ID NO: 53085

SEQ ID NO: 53087 - protein, 346 aa, Homo sapiens
MPRGQKSKLRAREKRQRTRGQTQDLKVGQPTAAEKEESPSSSSSVLRDTASSSLAFGIPQEPQREPPTTSAAAAMSCTGSDKGDESQDEENASSSQASTSTERSLKDSLTRKTKMLVQFLLYKYKMKEPTTKAEMLKIISKKYKEHFPEIFRKVSQRTELVFGLALKEVNPTTHSYILVSMLGPNDGNQSSAWTLPRNGLLMPLLSVIFLNGNCAREEEIWEFLNMLGIYDGKRHLIFGEPRKLITQDLVQEKYLEYQQVPNSDPPRYQFLWGPRAHAETSKMKVLEFLAKVNDTTPNNFPLLYEEALRDEEERAGARPRVAARRGTTAMTSAYSRATSSSSSQPM

SEQ ID NO: 53088 - protein, 275 aa, Homo sapiens
MTSAGVFNAGSDERANSRDEEYPCSSEVSPSTESSCSNFINIKVGLLEQFLLYKFKMKQRILKEDMLKIVNPRYQNQFAEIHRRASEHIEVVFAVDLKEVNPTCHLYDLVSKLKLPNNGRIHVGKVLPKTGLLMTFLVVIFLKGNCANKEDTWKFLDMMQIYDGKKYYIYGEPRKLITQDFVRLTYLEYHQVPCSYPAHYQFLWGPRAYTETSKMKVLEYLAKVNDIAPGAFSSQYEEALQDEEESPSQRCSRNWHYCSGQDCLRAKFSSFSQPY

SEQ ID NO: 53089 - protein, 407 aa, Homo sapiens
MPRGHKSKLRTCEKRQETNGQPQGLTGPQATAEKQEESHSSSSSSRACLGDCRRSSDASIPQESQGVSPTGSPDAVVSYSKSDVAANGQDEKSPSTSRDASVPQESQGASPTGSPDAGVSGSKYDVAANGQDEKSPSTSHDVSVPQESQGASPTGSPDAGVSGSKYDVAAEGEDEESVSASQKAIIFKRLSKDAVKKKACTLAQFLQKKFEKKESILKADMLKCVRREYKPYFPQILNRTSQHLVVAFGVELKEMDSSGESYTLVSKLGLPSEGILSGDNALPKSGLLMSLLVVIFMNGNCATEEEVWEFLGLLGIYDGILHSIYGDARKIITEDLVQDKYVVYRQVCNSDPPCYEFLWGPRAYAETTKMRVLRVLADSSNTSPGLYPHLYEDALIDEVERALRLRA

SEQ ID NO: 53090 - protein, 1142 aa, Homo sapiens
MGDKDMPTAGMPSLLQSSSESPQSCPEGEDSQSPLQIPQSSPESDDTLYPLQSPQSRSEGEDSSDPLQRPPEGKDSQSPLQIPQSSPEGDDTQSPLQNSQSSPEGKDSLSPLEISQSPPEGEDVQSPLQNPASSFFSSALLSIFQSSPESTQSPFEGFPQSVLQIPVSAASSSTLVSIFQSSPESTQSPFEGFPQSPLQIPVSRSFSSTLLSIFQSSPERTQSTFEGFAQSPLQIPVSPSSSSTLLSLFQSFSERTQSTFEGFAQSSLQIPVSPSFSSTLVSLFQSSPERTQSTFEGFPQSPLQIPVSSSSSSTLLSLFQSSPERTHSTFEGFPQSLLQIPMTSSFSSTLLSIFQSSPESAQSTFEGFPQSPLQIPGSPSFSSTLLSLFQSSPERTHSTFEGFPQSPLQIPMTSSFSSTLLSILQSSPESAQSAFEGFPQSPLQIPVSSSFSYTLLSLFQSSPERTHSTFEGFPQSPLQIPVSSSSSSSTLLSLFQSSPECTQSTFEGFPQSPLQIPQSPPEGENTHSPLQIVPSLPEWEDSLSPHYFPQSPPQGEDSLSPHYFPQSPPQGEDSLSPHYFPQSPQGEDSLSPHYFPQSPPQGEDSMSPLYFPQSPLQGEEFQSSLQSPVSICSSSTPSSLPQSFPESSQSPPEGPVQSPLHSPQSPPEGMHSQSPLQSPESAPEGEDSLSPLQIPQSPLEGEDSLSSLHFPQSPPEWEDSLSPLHFPQFPPQGEDFQSSLQSPVSICSSSTSLSLPQSFPESPQSPPEGPAQSPLQRPVSSFFSYTLASLLQSSHESPQSPPEGPAQSPLQSPVSSFPSSTSSSLSQSSPVSSFPSSTSSSLSKSSPESPLQSPVISFSSSTSLSPFSEESSSPVDEYTSSSDTLLESDSLTDSESLIESEPLFTYTLDEKVDELARFLLLKYQVKQPITKAEMLTNVISRYTGYFPVIFRKAREFIEILFGISLREVDPDDSYVFVNTLDLTSEGCLSDEQGMSQNRLLILILSIIFIKGTYASEEVIWDVLSGIGVRAGREHFAFGEPRELLTKVWVQEHYLEYREVPNSSPPRYEFLWGPRAHSEVIKRKVVEFLAMLKNTVPITFPSSYKDALKDVEERAQAIIDTTDDSTATESASSSVMSPSFSSE

SEQ ID NO: 53091 - protein, 117 aa, Homo sapiens
GDKDMPTAGMPSLLQSSSESPQSCPEGEDSQSPLQIPVSPSSSSTLLSLFQSFSERTQSTFEGFAQSSLQIPVSPSFSSTLVSLFQSSPERTQSTFEGFPQSPLQIPVSSSSSSTLL

SEQ ID NO: 53092 - protein, 118 aa, Homo sapiens
MGDKDMPTAGMPSLLQSSSESPQSCPEGEDSQSPLQIPVSPSSSSTLLSLFQSFSERTQSTFEGFAQSSLQIPVSPSFSSTLVSLFQSSPERTQSTFEGFPQSPLQIPVSSSSSSTLL

SEQ ID NO: 53093 - protein, 209 aa, Homo sapiens
MLTNVISRYTGYFPVIFRKAREFIEILFGISLREVDPDDSYVFVNTLDLTSEGCLSDEQGMSQNRLLILILSIIFIKGTYASEEVIWDVLSGIGVRAGREHFAFGEPRELLTKVWVQEHYLEYREVPNSSPPRYEFLWGPRAHSEVIKRKVVEFLAMLKNTVPITFPSSYKDALKDVEERAQAIIDTTDDSTATESASSSVMSPSFSSE

SEQ ID NO: 53094 - protein, 373 aa, Homo sapiens
MPPVPGVPFRNVDNDSPTSVELEDWVDAQHPTDEEEEEASSASSTLYLVFSPSSFSTSSSLILGGPEEEEVPSGVIPNLTESIPSSPPQGPPQGPSQSPLSSCCSSFSWSSFSEESSSQKGEDTGTCQGLPDSESSFTYTLDEKVAELVEFLLLKYEAEEPVTEAEMLMIVIKYKDYFPVILKRAREFMELLFGLALIEVGPDHFCVFANTVGLTDEGSDDEGMPENSLLIIILSVIFIKGNCASEEVIWEVLNAVGVYAGREHFVYGEPRELLTKVWVQGHYLEYREVPHSSPPYYEFLWGPRAHSESIKKKVLEFLAKLNNTVPSSFPSWYKDALKDVEERVQATIDTADDATVMASESLSVMSSNVSFSE

SEQ ID NO: 53095 - protein, 643 aa, Homo sapiens
MLLPCHWVLDATFSDGSLGQWVKNTCATYALSPVVLPPQPQPRKKATDKDYSAFHLGHLREVRLFLRGGTSDQRMDSLVLCPTYFKLWRTLSGSPGLQLSDLHFGSQPEGKFSLRRAVSVKQREEPQDWPLNEKRTLWKDSDLPTWRRGTGYTLSLPAVSPGKRLWGEKAGSLPESEPLFTYTLDEKVDKLVQFLLLKYQAKEPLTRAEMQMNVINTYTGYFPMIFRKAREFIEILFGISLTEVDPDHFYVFVNTLDLTCEGSLSDEQGMPQNRLLILILSVIFIKGNCASEEVIWEVLNAIGPWSALAGFADVLSRLALWESEGPEAFCEESGLRSAEGSVLDLANPQGLAGHRQEDGRRGLTEASPQQKKGGEDEDMPAAGMPPLPQSPPEIPPQGPPKISPQGPPQSPPQSPLDSCSSPLLWTRLDEESSSEEEDTATWHALPESESLPRYALDEKVAELVQFLLLKYQTKEPVTKAEMLTTVIKKYKDYFPMIFGKAHEFIELIFGIALTDMDPDNHSYFFEDTLDLTYEGSLIDDQGMPKNCLLILILSMIFIKGSCVPEEVIWEVLSAIGPIQRPAREVLEFLSKLSSIIPSAFPSWYMDALKDMEDRAQAIIDTTDDATAMASASPSVMSTNFCPE

SEQ ID NO: 53096 - protein, 266 aa, Homo sapiens
MPAAGMPPLPQSPPEIPPQGPPKISPQGPPQSPPQSPLDSCSSPLLWTRLDEESSSEEEDTATWHALPESESLPRYALDEKVAELVQFLLLKYQTKEPVTKAEMLTTVIKKYKDYFPMIFGKAHEFIELIFGIALTDMDPDNHSYFFEDTLDLTYEGSLIDDQGMPKNCLLILILSMIFIKGSCVPEEVIWEVLSAIGVCAGREHFIYGDPRKLLTIHWVQRKYLEYREVPNSAPPRYEFLWGPRAHSEASKRSLRVFIQAIQYHP

SEQ ID NO: 53097 - protein, 126 aa, Homo sapiens
MDTGQLQLSRERSPGAGQQARRELCGRIAISQHGGKAQASPSHSLLSPLDKTDGEPWSALAGFADVLSRLALWESEGPEAFCEESGLRSAEGSVLDLANPQGKGPKGELRDFAPRTEEAPVCPALP

SEQ ID NO: 53098 - protein, 346 aa, Homo sapiens
MPLFPNLPRLSFEEDFQNPSVTEDLVDAQDSIDEEEEDASSTSSSSFHFLFPSSSSLSSSSPLSSPLPSTLILGVPEDEDMPAAGMPPLPQSPPEIPPQGPPKISPQGPPQSPPQSPLDSCSSPLLWTRLDEESSSEEEDTATWHALPESESLPRYALDEKVAELVQFLLLKYQTKEPVTKAEMLTTVIKKYKDYFPMIFGKAHEFIELIFGIALTDMDPDNHSYFFEDTLDLTYEGSLIDDQGMPKNCLLILILSMIFIKGSCVPEEVIWEVLSAIGVCAGREHFIYGDPRKLLTIHWVQRKYLEYREVPNSAPPRYEFLWGPRAHSEASKRSLRVFIQAIQYHP

SEQ ID NO: 53099 - protein, 346 aa, Homo sapiens; identical to SEQ ID NO: 53098

SEQ ID NO: 53100 - protein, 778 aa, Homo sapiens
MAQKMDCGAGLLGFQAEASVEDSALLMQTLMEAIQISEAPPTNQATAAASPQSSQPPTANEMADIQVSAAAARPKSAFKVQNATTKGPNGVYDFSQAHNAKDVPNTQPKAAFKSQNATPKGPNAAYDFSQAATTGELAANKSEMAFKAQNATTKVGPNATYNFSQSLNANDLANSRPKTPFKAWNDTTKAPTADTQTQNVNQAKMATSQADIETDPGISEPDGATAQTSADGSQAQNLESRTIIRGKRTRKINNLNVEENSSGDQRRAPLAAGTWRSAPVPVTTQNPPGAPPNVLWQTPLAWQNPSGWQNQTARQTPPARQSPPARQTPPAWQNPVAWQNPVIWPNPVIWQNPVIWPNPIVWPGPVVWPNPLAWQNPPGWQTPPGWQTPPGWQGPPDWQGPPDWPLPPDWPLPPDWPLPTDWPLPPDWIPADWPIPPDWQNLRPSPNLRPSPNSRASQNPGAAQPRDVALLQERANKLVKYLMLKDYTKVPIKRSEMLRDIIREYTDVYPEIIERACFVLEKKFGIQLKEIDKEEHLYILISTPESLAGILGTTKDTPKLGLLLVILGVIFMNGNRASEAVLWEALRKMGLRPGVRHPLLGDLRKLLTYEFVKQKYLDYRRVPNSNPPEYEFLWGLRSYHETSKMKVLRFIAEVQKRDPRDWTAQFMEAADEALDALDAAAAEAEARAEARTRMGIGDEAVSGPWSWDDIEFELLTWDEEGDFGDPWSRIPFTFWARYHQNARSRFPQTFAGPIIGPGGTASANFAANFGAIGFFWVE

SEQ ID NO: 53101 - protein, 834 aa, Homo sapiens
MAQKMDCGAGLLGFQNPDACRAVCHPLPQPPASTLPLSAFPTLCDPPYSQLRDPPAVLSCYCTPLGASPAPAEASVEDSALLMQTLMEAIQISEAPPTNQATAAASPQSSQPPTANEMADIQVSAAAARPKSAFKVQNATTKGPNGVYDFSQAHNAKDVPNTQPKAAFKSQNATPKGPNAAYDFSQAATTGELAANKSEMAFKAQNATTKVGPNATYNFSQSLNANDLANSRPKTPFKAWNDTTKAPTADTQTQNVNQAKMATSQADIETDPGISEPDGATAQTSADGSQAQNLESRTIIRGKRTRKINNLNVEENSSGDQRRAPLAAGTWRSAPVPVTTQNPPGAPPNVLWQTPLAWQNPSGWQNQTARQTPPARQSPPARQTPPAWQNPVAWQNPVIWPNPVIWQNPVIWPNPIVWPGPVVWPNPLAWQNPPGWQTPPGWQTPPGWQGPPDWQGPPDWPLPPDWPLPPDWPLPTDWPLPPDWIPADWPIPPDWQNLRPSPNLRPSPNSRASQNPGAAQPRDVALLQERANKLVKYLMLKDYTKVPIKRSEMLRDIIREYTDVYPEIIERACFVLEKKFGIQLKEIDKEEHLYILISTPESLAGILGTTKDTPKLGLLLVILGVIFMNGNRASEAVLWEALRKMGLRPGVRHPLLGDLRKLLTYEFVKQKYLDYRRVPNSNPPEYEFLWGLRSYHETSKMKVLRFIAEVQKRDPRDWTAQFMEAADEALDALDAAAAEAEARAEARTRMGIGDEAVSGPWSWDDIEFELLTWDEEGDFGDPWSRIPFTFWARYHQNARSRFPQTFAGPIIGPGGTASANFAANFGAIGFFWVE

SEQ ID NO: 53102 - protein, 778 aa, Homo sapiens; identical to SEQ ID NO: 53100

SEQ ID NO: 53103 - protein, 778 aa, Homo sapiens; identical to SEQ ID NO: 53100

SEQ ID NO: 53104 - protein, 137 aa, Homo sapiens
MAQKMDCGAGLLGFQAEASVEDSALLMQTLMEAIQISEAPPTNQATAAASPQSSQPPTANEMADIQVSAAAARPKSAFKVQNATTKGPNGVYDFSQSLNANDLANSRPKTQVSLNLTVQLHRHQQMVPRLRIWSPGQ

SEQ ID NO: 53105 - protein, 606 aa, Homo sapiens
MSDTSESGAGLTRFQAEASEKDSSSMMQTLLTVTQNVEVPETPKASKALEVSEDVKVSKASGVSKATEVSKTPEAREAPATQASSTTQLTDTQVLAAENKSLAADTKKQNADPQAVTMPATETKKVSHVADTKVNTKAQETEAAPSQAPADEPEPESAAAQSQENQDTRPKVKAKKARKVKHLDGEEDGSSDQSQASGTTGGRRVSKALMASMARRASRGPIAFWARRASRTRLAAWARRALLSLRSPKARRGKARRRAAKLQSSQEPEAPPPRDVALLQGRANDLVKYLLAKDQTKIPIKRSDMLKDIIKEYTDVYPEIIERAGYSLEKVFGIQLKEIDKNDHLYILLSTLEPTDAGILGTTKDSPKLGLLMVLLSIIFMNGNRSSEAVIWEVLRKLGLRPGIHHSLFGDVKKLITDEFVKQKYLDYARVPNSNPPEYEFFWGLRSYYETSKMKVLKFACKVQKKDPKEWAAQYREAMEADLKAAAEAAAEAKARAEIRARMGIGLGSENAAGPCNWDEADIGPWAKARIQAGAEAKAKAQESGSASTGASTSTNNSASASASTSGGFSAGASLTATLTFGLFAGLGGAGASTSGSSGACGFSYK

SEQ ID NO: 53106 - protein, 588 aa, Homo sapiens
MSDTSESGAGLTRFQAEASEKDSSSMMQTLLTVTQNVEVPETPKASKATEVSKTPEAREAPATQASSTTQLTDTQVLAAENKSLAADTKKQNADPQAVTMPATETKKVSHVADTKVNTKAQETEAAPSQAPADEPEPESAAAQSQENQDTRPKVKAKKARKVKHLDGEEDGSSDQSQASGTTGGRRVSKALMASMARRASRGPIAFWARRASRTRLAAWARRALLSLRSPKARRGKARRRAAKLQSSQEPEAPPPRDVALLQGRANDLVKYLLAKDQTKIPIKRSDMLKDIIKEYTDVYPEIIERAGYSLEKVFGIQLKEIDKNDHLYILLSTLEPTDAGILGTTKDSPKLGLLMVLLSIIFMNGNRSSEAVIWEVLRKLGLRPGIHHSLFGDVKKLITDEFVKQKYLDYARVPNSNPPEYEFFWGLRSYYETSKMKVLKFACKVQKKDPKEWAAQYREAMEADLKAAAEAAAEAKARAEIRARMGIGLGSENAAGPCNWDEADIGPWAKARIQAGAEAKAKAQESGSASTGASTSTNNSASASASTSGGFSAGASLTATLTFGLFAGLGGAGASTSGSSGACGFSYK

SEQ ID NO: 53107 - protein, 550 aa, Homo sapiens
MWRSQRHRRPQRVSKTPEAREAPATQASSTTQLTDTQVLAAENKSLAADTKKQNADPQAVTMPATETKKVSHVADTKVNTKAQETEAAPSQAPADEPEPESAAAQSQENQDTRPKVKAKKARKVKHLDGEEDGSSDQSQASGTTGGRRVSKALMASMARRASRGPIAFWARRASRTRLAAWARRALLSLRSPKARRGKARRRAAKLQSSQEPEAPPPRDVALLQGRANDLVKYLLAKDQTKIPIKRSDMLKDIIKEYTDVYPEIIERAGYSLEKVFGIQLKEIDKNDHLYILLSTLEPTDAGILGTTKDSPKLGLLMVLLSIIFMNGNRSSEAVIWEVLRKLGLRPGIHHSLFGDVKKLITDEFVKQKYLDYARVPNSNPPEYEFFWGLRSYYETSKMKVLKFACKVQKKDPKEWAAQYREAMEADLKAAAEAAAEAKARAEIRARMGIGLGSENAAGPCNWDEADIGPWAKARIQAGAEAKAKAQESGSASTGASTSTNNSASASASTSGGFSAGASLTATLTFGLFAGLGGAGASTSGSSGACGFSYK

SEQ ID NO: 53108 - protein, 606 aa, Homo sapiens; identical to SEQ ID NO: 53105

SEQ ID NO: 53109 - protein, 606 aa, Homo sapiens; identical to SEQ ID NO: 53105

SEQ ID NO: 53110 - protein, 521 aa, Homo sapiens
MSDTSESGAGLTRFQAEASEKDSSSMMQTLLTVTQNVEVPETPKASSTTQLTDTQVLAAENKSLAADTKKQNADPQAVTMPATETKKVSHVADTKVNTKAQETEAAPSQAPADEPEPESAAAQSQENQDTRPKVKAKKARKVKHLDGEEDGSSDQSQASGTTGGRRVSKARRRAAKLQSSQEPEAPPPRDVALLQGRANDLVKYLLAKDQTKIPIKRSDMLKDIIKEYTDVYPEIIERAGYSLEKVFGIQLKEIDKNDHLYILLSTLEPTDAGILGTTKDSPKLGLLMVLLSIIFMNGNRSSEAVIWEVLRKLGLRPGIHHSLFGDVKKLITDEFVKQKYLDYARVPNSNPPEYEFFWGLRSYYETSKMKVLKFACKVQKKDPKEWAAQYREAMEADLKAAAEAAAEAKARAEIRARMGIGLGSENAAGPCNWDEADIGPWAKARIQAGAEAKAKAQESGSASTGASTSTNNSASASASTSGGFSAGASLTATLTFGLFAGLGGAGASTSGSSGACGFSYK

SEQ ID NO: 53111 - protein, 521 aa, Homo sapiens; identical to SEQ ID NO: 53110

SEQ ID NO: 53112 - protein, 606 aa, Homo sapiens; identical to SEQ ID NO: 53105

SEQ ID NO: 53113 - protein, 606 aa, Homo sapiens; identical to SEQ ID NO: 53105

SEQ ID NO: 53114 - protein, 739 aa, Homo sapiens
MAEGSFSVQSESYSVEDMDEGSDEVGEEEMVEGNDYEEFGAFGGYGTLTSFDIHILRAFGSLGPGLRILSNEPWELENPVLAQTLVEALQLDPETLANETAARAANVARAAASNRAARAAAAAARTAFSQVVASHRVATPQVSGEDTQPTTYAAEAQGPTPEPPLASPQTSQMLVTSKMAAPEAPATSAQSQTGSPAQEAATEGPSSACAFSQAPCAREVDANRPSTAFLGQNDVFDFTQPAGVSGMAFPRPKRPAPAQEAATEGPSAASGVPQTGPGREVAATRPKTTKSGKALAKTRWVEPQNVVAAAAAKAKMATSIPEPEGAAAATAQHSAEPWARMGGKRTKKSKHLDDEYESSEEERETPAVPPTWRASQPSLTVRAQLAPRPPMAPRSQIPSRHVLCLPPRNVTLLQERANKLVKYLMIKDYKKIPIKRADMLKDVIREYDEHFPEIIERATYTLEKKFGIHLKEIDKEEHLYILVCTRDSSARLLGKTKDTPRLSLLLVILGVIFMNGNRASEAVLWEALRKMGLRPGVRHPFLGDLRKLITDDFVKQKYLEYKKIPNSNPPEYEFLWGLRARHETSKMRVLRFIAQNQNRDPREWKAHFLEAVDDAFKTMDVDMAEEHARAQMRAQMNIGDEALIGRWSWDDIQVELLTWDEDGDFGDAWARIPFAFWARYHQYILNSNRANRRATWRAGVSSGTNGGASTSVLDGPSTSSTIRTRNAARAGASFFSWIQ

SEQ ID NO: 53115 - protein, 757 aa, Homo sapiens
MAEGSFSVQSESYSVEDMDEGSDEVGEEEMVEGNDYEEFGAFGGYGTLTSFDIHILRAFGSLGPGLRILSNEPWELENPVLAQTLVEALQLDPETLANETAARAANVARAAASNRAARAAAAAARTAFSQVVASHRVATPQVSGEDTQPTTYAAEAQGPTPEPPLASPQTSQMLVTSKMAAPEAPATSAQSQTGSPAQEAATEGPSSACAFSQAPCAREVDANRPSTAFLGQNDVFDFTQPAGVSGMAFPRPKRPAPAQEAATEGPSAASGVPQTGPGREVAATRPKTTKSGKALAKTRWVEPQNVVAAAAAKAKMATSIPEPEGAAAATAQHSAEPWARMGGKRTKKSKHLDDEYESSEEERETPAVPPTWRASQPSLTVRAQLAPRPPMAPRSQIPSRHVLCLPPRNVTLLQERANKLVKYLMIKDYKKIPIKRADMLKDVIREYDEHFPEIIERATYTLEKKFGIHLKEIDKEEHLYILVCTRDSSARLLGKTKDTPRLSLLLVILGVIFMNGNRASEAVLWEALRKMGLRPGVRHPFLGDLRKLITDDFVKQKNPELREETPLSMAPSWYLEYKKIPNSNPPEYEFLWGLRARHETSKMRVLRFIAQNQNRDPREWKAHFLEAVDDAFKTMDVDMAEEHARAQMRAQMNIGDEALIGRWSWDDIQVELLTWDEDGDFGDAWARIPFAFWARYHQYILNSNRANRRATWRAGVSSGTNGGASTSVLDGPSTSSTIRTRNAARAGASFFSWIQHR

SEQ ID NO: 53116 - protein, 741 aa, Homo sapiens
MAEGSFSVQSESYSVEDMDEGSDEVGEEEMVEGNDYEEFGAFGGYGTLTSFDIHILRAFGSLGPGLRILSNEPWELENPVLAQTLVEALQLDPETLANETAARAANVARAAASNRAARAAAAAARTAFSQVVASHRVATPQVSGEDTQPTTYAAEAQGPTPEPPLASPQTSQMLVTSKMAAPEAPATSAQSQTGSPAQEAATEGPSSACAFSQAPCAREVDANRPSTAFLGQNDVFDFTQPAGVSGMAFPRPKRPAPAQEAATEGPSAASGVPQTGPGREVAATRPKTTKSGKALAKTRWVEPQNVVAAAAAKAKMATSIPEPEGAAAATAQHSAEPWARMGGKRTKKSKHLDDEYESSEEERETPAVPPTWRASQPSLTVRAQLAPRPPMAPRSQIPSRHVLCLPPRNVTLLQERANKLVKYLMIKDYKKIPIKRADMLKDVIREYDEHFPEIIERATYTLEKKFGIHLKEIDKEEHLYILVCTRDSSARLLGKTKDTPRLSLLLVILGVIFMNGNRASEAVLWEALRKMGLRPGVRHPFLGDLRKLITDDFVKQKYLEYKKIPNSNPPEYEFLWGLRARHETSKMRVLRFIAQNQNRDPREWKAHFLEAVDDAFKTMDVDMAEEHARAQMRAQMNIGDEALIGRWSWDDIQVELLTWDEDGDFGDAWARIPFAFWARYHQYILNSNRANRRATWRAGVSSGTNGGASTSVLDGPSTSSTIRTRNAARAGASFFSWIQHR

SEQ ID NO: 53117 - protein, 739 aa, Homo sapiens; identical to SEQ ID NO: 53114

SEQ ID NO: 53118 - protein, 757 aa, Homo sapiens; identical to SEQ ID NO: 53115

SEQ ID NO: 53119 - protein, 741 aa, Homo sapiens; identical to SEQ ID NO: 53116

SEQ ID NO: 53120 - protein, 957 aa, Homo sapiens
MSLVSQNSRRRRRRVAKATAHNSSWGEMQAPNAPGLPADVPGSDVPQGPSDSQILQGLCASEGPSTSVLPTSAEGPSTFVPPTISEASSASGQPTISEGPGTSVLPTPSEGLSTSGPPTISKGLCTSVTLAASEGRNTSRPPTSSEEPSTSVPPTASEVPSTSLPPTPGEGTSTSVPPTAYEGPSTSVVPTPDEGPSTSVLPTPGEGPGTSVPLAATEGLSTSVQATPDEGPSTSVPPTATEGLSTPVPPTRDEGPSTSVPATPGEGPSTSVLPAASDGQSISLVPTRGKGSSTSVPPTATEGLSTSVQPTAGEGSSTSVPPTPGGGLSTSVPPTATEELSTSVPPTPGEGPSTSVLPIPGEGLSTSVPPTASDGSDTSVPPTPGEGASTLVQPTAPDGPGSSVLPNPGEGPSTLFSSSASVDRNPSKCSLVLPSPRVTKASVDSDSEGPKGAEGPIEFEVLRDCESPNSISIMGLNTSRVAITLKPQDPMEQNVAELLQFLLVKDQSKYPIRESEMREYIVKEYRNQFPEILRRAAAHLECIFRFELRELDPEAHTYILLNKLGPVPFEGLEESPNGPKMGLLMMILGQIFLNGNQAKEAEIWEMLWRMGVQRERRLSIFGNPKRLLSVEFVWQRYLDYRPVTDCKPVEYEFFWGPRSHLETTKMKILKFMAKIYNKDPMDWPEKYNEALEEDAARAFAEGWQALPHFRRPFFEEAAAEVPSPDSEVSSYSSKYAPHSWPESRLESKARKLVQLFLLMDSTKLPIPKKGILYYIGRECSKVFPDLLNRAARTLNHVYGTELVVLDPRNHSYTLYNRREMEETEEIVDSPNRPGNNFLMQVLSFIFIMGNHARESAVWAFLRGLGVQAGRKHVITCRYLSQRYIDSLRVPDSDPVQYEFVWGPRARLETSKMKALRYVARIHRKEPQDWPQQYREAMEDEANRADVGHRQIFVHNFR

SEQ ID NO: 53121 - protein, 523 aa, Homo sapiens
MSLVSQNARHCSAEITADYGDGRGEIQATNASGSPTSMLVVDAPQCPQAPINSQCVNTSQAVQDPNDLEVLIDEQSRRLGALRVHDPLEDRSIALVNFMRMKSQTEGSIQQSEMLEFLREYSDQFPEILRRASAHLDQVFGLNLRVIDPQADTYNLVSKRGFQITDRIAESLDMPKASLLALVLGHILLNGNRAREASIWDLLLKVDMWDKPQRINNLFGNTRNLLTTDFVCMRFLEYWPVYGTNPLEFEFLWGSRAHREITKMEALKFVSDAHDEEPWSWPEEYNKALEGDKTKERSLTAGLEFWSEDTMNDKANDLVQLAISVTEEMLPIHQDELLAHTGKEFEDVFPNILNRATLILDMFYGLSLIEVDTSEHIYLLVQQPESEEEQVMLESLGRPTQEYVMPILGLIFLMGNRVKEANVWNLLRRFSVDVGRKHSITRKLMRQRYLECRPLSYSNPVEYELLWGPRAHHETIKMKVLEYMARLYRKRPQNWPEQYREAVEDEEARAKSEATIMFFLDPT

SEQ ID NO: 53122 - protein, 307 aa, Homo sapiens
MLQTPESRGLPVPQAEGEKDGGHDGETRAPTASQERPKEELGAGREEGAAEPALTRKGARALAAKALARRRAYRRLNRTVAELVQFLLVKDKKKSPITRSEMVKYVIGDLKILFPDIIARAAEHLRYVFGFELKQFDRKHHTYILINKLKPLEEEEEEDLGGDGPRLGLLMMILGLIYMRGNSAREAQVWEMLRRLGVQPSKYHFLFGYPKRLIMEDFVQQRYLSYRRVPHTNPPEYEFSWGPRSNLEISKMEVLGFVAKLHKKEPQHWPVQYREALADEADRARAKARAEASMRARASARAGIHLW

SEQ ID NO: 53123 - protein, 131 aa, Homo sapiens
MARSLVCLGVIILLSAFSGPGVRGGPMPKLADRKLCADQECSHPISMAVALQDYMAPDCRFLTIHRGQVVYVFSKLKGRGRLFWGGSVQGDYYGDLAARLGYFPSSIVREDQTLKPGKVDVKTDKWDFYCQ

SEQ ID NO: 53124 - protein, 213 aa, Homo sapiens
MAETYDFLFKFLVIGSAGTGKSCLLHQFIENKFKQDSNHTIGVEFGSRVVNVGGKTVKLQIWDTAGQERFRSVTRSYYRGAAGALLVYDITSRETYNSLAAWLTDARTLASPNIVVILCGNKKDLDPEREVTFLEASRFAQENELMFLETSALTGENVEEAFLKCARTILNKIDSGELDPERMGSGIQYGDASLRQLRQPRSAQAVAPQPCGC

SEQ ID NO: 53125 - protein, 121 aa, Homo sapiens
MAETYDFLFKFLVIGSAGTGKSCLLHQFIENKFKQDSNHTIGVEFGSRVVNVGGKTVKLQIWDTAGQERFRSVTRSYYRGAAGALLVYDITRADVPGDQRSHRRERGGGVPQVCPHYPQQD

SEQ ID NO: 53126 - protein, 131 aa, Homo sapiens
MARSLVCLGVIILLSAFSGPGVRGGPMPKLADRKLCADQECSHPISMAVALQDYMAPDCRFLTIHRGQVVYVFSKLKGRGRLFWGGSVQGDYYGDLAARLGYFPSSIVREDQTLKPGKVDVKTDTSSSNSW

SEQ ID NO: 53127 - protein, 785 aa, Homo sapiens
MDSVPATVPSIAATPGDPELVGPLSVLYAAFIAKLLELVATLPDDVQPGPDFYGLPWKPVFITAFLGIASFAIFLWRTVLVVTDTLVSVTEQQISEKLKTIMKENTELVQKLSNYEQKIKESKKHVQETRKQNMILSDEAIKYKDKIKTLEKNQEILDDTAKNLRVMLESEREQNVKNQDLISENKKSIEKLKDVISMNASEFSEVQIALNEAKLSEEKVKSECHRVQEENARLKKKKEQLQQEIEDWSKLHAELSEQIKSFEKSQKDLEVALTHKDDNINALTNCITQLNLLECESESEGQNKGGNDSDELANGEVGGDRNEKMKNQIKQMMDVSRTQTAISVVEEDLKLLQLKLRASVSTKCNLEDQVKKLEDDRNSLQAAKAGLEDECKTLRQKVEILNELYQQKEMALQKKLSQEEYERQEREHRLSAADEKAVSAAEEVKTYKRRIEEMEDELQKTERSFKNQIATHEKKAHENWLKARAAERAIAEEKREAANLRHKLLELTQKMAMLQEEPVIVKPMPGKPNTQNPPRRGPLSQNGSFGPSPVSGGECSPPLTVEPPVRPLSATLNRRDMPRSEFGSVDGPLPHPRWSAEASGKPSPSDPGSGTATMMNSSSRGSSPTRVLDEGKVNMAPKGPPPFPGVPLMSTPMGGPVPPPIRYGPPPQLCGPFGPRPLPPPFGPGMRPPLGLREFAPGVPPGRRDLPLHPRGFLPGHAPFRPLGSLGPREYFIPGTRLPPPTHGPQEYPPPPAVRDLLPSGSRDEPPPASQSTSQDCSQALKQSP

SEQ ID NO: 53128 - protein, 1848 aa, Homo sapiens
MAAAPGLLVWLLVLRLPWRVPGQLDPSTGRRFSEHKLCADDECSMLMYRGEALEDFTGPDCRFVNFKKGDPVYVYYKLARGWPEVWAGSVGRTFGYFPKDLIQVVHEYTKEELQVPTDETDFVCFDGGRDDFHNYNVEELLGFLELYNSAATDSEKAVEKTLQDMEKNPELSKEREPEPEPVEANSEESDSVFSENTEDLQEQFTTQKHHSHANSQANHAQGEQASFESFEEMLQDKLKVPESENNKTSNSSQVSNEQDKIDAYKLLKKEMTLDLKTKFGSTADALVSDDETTRLVTSLEDDFDEELDTEYYAVGKEDEENQEDFDELPLLTFTDGEDMKTPAKSGVEKYPTDKEQNSNEEDKVQLTVPPGIKNDDKNILTTWGDTIFSIVTGGEETRDTMDLESSSSEEEKEDDDDALVPDSKQGKPQSATDYSDPDNVDDGLFIVDIPKTNNDKEVNAEHHIKGKGRGVQESKRGLVQDKTELEDENQEGMTVHSSVHSNNLNSMPAAEKGKDTLKSAYDDTENDLKGAAIHISKGMLHEEKPGEQILEGGSESESAQKAAGNQMNDRKIQQESLGSAPLMGDDHPNASRDSVEGDALVNGAKLHTLSVEHQREELKEELVLKTQNQPRFSSPDEIDLPRELEDEVPILGRNLPWQQERDVAATASKQMSEKIRLSEGEAKEDSLDEEFFHHKAMQGTEVGQTDQTDSTGGPAFLSKVEEDDYPSEELLEDENAINAKRSKEKNPGNQGRQFDVNLQVPDRAVLGTIHPDPEIEESKQETSMILDSEKTSETAAKGVNTGGREPNTMVEKERPLADKKAQRPFERSDFSDSIKIQTPELGEVFQNKDSDYLKNDNPEEHLKTSGLAGEPEGELSKEDHENTEKYMGTESQGSAAAEPEDDSFHWTPHTSVEPGHSDKREDLLIISSFFKEQQSLQRFQKYFNVHELEALLQEMSSKLKSAQQESLPYNMEKVLDKVFRASESQILSIAEKMLDTRVAENRDLGMNENNIFEEAAVLDDIQDLIYFVRYKHSTAEETATLVMAPPLEEGLGGAMEEMQPLHEDNFSREKTAELNVQVPEEPTHLDQRVIGDTHASEVSQKPNTEKDLDPGPVTTEDTPMDAIDANKQPETAAEEPASVTPLENAILLIYSFMFYLTKSLVATLPDDVQPGPDFYGLPWKPVFITAFLGIASFAIFLWRTVLVVSNTVYYVTEQQISEKLKTIMKENTELVQKLSNYEQKIKESKKHVQETRKQNMILSDEAIKYKDKIKTLEKNQEILDDTAKNLRVMLESEREQNVKNQDLLQQEIEDWSKLHAELSEQIKSFEKSQKDLEVALTHKDDNINALTNCITQLNLLECESESEGQNKGGNDSDELANGEVGGDRNEKMKNQIKQMMDVSRTQTAISVVEEDLKLLQLKLRASVSTKCNLEDQVKKLEDDRNSLQAAKAGLEDECKTLRQKVEILNELYQQKEMALQKKLSQEEYERQEREHRLSAADEKAVSAAEEVKTYKRRIEEMEDELQKTERSFKNQIATHEKKAHENWLKARAAERAIAEEKREAANLRHKLLELTQKMAMLQEEPVIVKPMPGKPNTQNPPRRGPLSQNGSFGPSPVSGGECSPPLTVEPPVRPLSATLNRRDMPRSEFGSVDGPLPHPRWSAEASGKPSPSDPGSGTATMMNSSSRGSSPTRVLDEGKVNMAPKGPPPFPGVPLMSTPMGGPVPPPIRYGPPPQLCGPFGPRPLPPPFGPGMRPPLGLREFAPGVPPGRRDLPLHPRGFLPGHAPFRPLGSLGPREYFIPGTRLPPPTHGPQEYPPPPAVRDLLPSGSRDEPPPASQSTSQDCSQALKQSP

SEQ ID NO: 53129 - protein, 785 aa, Homo sapiens
MDSVPATVPSIAATPGDPELVGPLSVLYAAFIAKLLELVATLPDDVQPGPDFYGLPWKPVFITAFLGIASFAIFLWRTVLVVKDRVYQVTEQQISEKLKTIMKENTELVQKLSNYEQKIKESKKHVQETRKQNMILSDEAIKYKDKIKTLEKNQEILDDTAKNLRVMLESEREQNVKNQDLISENKKSIEKLKDVISMNASEFSEVQIALNEAKLSEEKVKSECHRVQEENARLKKKKEQLQQEIEDWSKLHAELSEQIKSFEKSQKDLEVALTHKDDNINALTNCITQLNLLECESESEGQNKGGNDSDELANGEVGGDRNEKMKNQIKQMMDVSRTQTAISVVEEDLKLLQLKLRASVSTKCNLEDQVKKLEDDRNSLQAAKAGLEDECKTLRQKVEILNELYQQKEMALQKKLSQEEYERQEREHRLSAADEKAVSAAEEVKTYKRRIEEMEDELQKTERSFKNQIATHEKKAHENWLKARAAERAIAEEKREAANLRHKLLELTQKMAMLQEEPVIVKPMPGKPNTQNPPRRGPLSQNGSFGPSPVSGGECSPPLTVEPPVRPLSATLNRRDMPRSEFGSVDGPLPHPRWSAEASGKPSPSDPGSGTATMMNSSSRGSSPTRVLDEGKVNMAPKGPPPFPGVPLMSTPMGGPVPPPIRYGPPPQLCGPFGPRPLPPPFGPGMRPPLGLREFAPGVPPGRRDLPLHPRGFLPGHAPFRPLGSLGPREYFIPGTRLPPPTHGPQEYPPPPAVRDLLPSGSRDEPPPASQSTSQDCSQALKQSP

SEQ ID NO: 53130 - protein, 1907 aa, Homo sapiens
MAAAPGLLVWLLVLRLPWRVPGQLDPSTGRRFSEHKLCADDECSMLMYRGEALEDFTGPDCRFVNFKKGDPVYVYYKLARGWPEVWAGSVGRTFGYFPKDLIQVVHEYTKEELQVPTDETDFVCFDGGRDDFHNYNVEELLGFLELYNSAATDSEKAVEKTLQDMEKNPELSKEREPEPEPVEANSEESDSVFSENTEDLQEQFTTQKHHSHANSQANHAQGEQASFESFEEMLQDKLKVPESENNKTSNSSQVSNEQDKIDAYKLLKKEMTLDLKTKFGSTADALVSDDETTRLVTSLEDDFDEELDTEYYAVGKEDEENQEDFDELPLLTFTDGEDMKTPAKSGVEKYPTDKEQNSNEEDKVQLTVPPGIKNDDKNILTTWGDTIFSIVTGGEETRDTMDLESSSSEEEKEDDDDALVPDSKQGKPQSATDYSDPDNVDDGLFIVDIPKTNNDKEVNAEHHIKGKGRGVQESKRGLVQDKTELEDENQEGMTVHSSVHSNNLNSMPAAEKGKDTLKSAYDDTENDLKGAAIHISKGMLHEEKPGEQILEGGSESESAQKAAGNQMNDRKIQQESLGSAPLMGDDHPNASRDSVEGDALVNGAKLHTLSVEHQREELKEELVLKTQNQPRFSSPDEIDLPRELEDEVPILGRNLPWQQERDVAATASKQMSEKIRLSEGEAKEDSLDEEFFHHKAMQGTEVGQTDQTDSTGGPAFLSKVEEDDYPSEELLEDENAINAKRSKEKNPGNQGRQFDVNLQVPDRAVLGTIHPDPEIEESKQETSMILDSEKTSETAAKGVNTGGREPNTMVEKERPLADKKAQRPFERSDFSDSIKIQTPELGEVFQNKDSDYLKNDNPEEHLKTSGLAGEPEGELSKEDHENTEKYMGTESQGSAAAEPEDDSFHWTPHTSVEPGHSDKREDLLIISSFFKEQQSLQRFQKYFNVHELEALLQEMSSKLKSAQQESLPYNMEKVLDKVFRASESQILSIAEKMLDTRVAENRDLGMNENNIFEEAAVLDDIQDLIYFVRYKHSTAEETATLVMAPPLEEGLGGAMEEMQPLHEDNFSREKTAELNVQVPEEPTHLDQRVIGDTHASEVSQKPNTEKDLDPGPVTTEDTPMDAIDANKQPETAAEEPASVTPLENAILLIYSFMFYLTKSLVATLPDDVQPGPDFYGLPWKPVFITAFLGIASFAIFLWRTVLVVSNTVYYVTEQQISEKLKTIMKENTELVQKLSNYEQKIKESKKHVQETRKQNMILSDEAIKYKDKIKTLEKNQEILDDTAKNLRVMLESEREQNVKNQDLISENKKSIEKLKDVISMNASEFSEVQIALNEAKLSEEKVKSECHRVQEENARLKKKKEQLQQEIEDWSKLHAELSEQIKSFEKSQKDLEVALTHKDDNINALTNCITQLNLLECESESEGQNKGGNDSDELANGEVGGDRNEKMKNQIKQMMDVSRTQTAISVVEEDLKLLQLKLRASVSTKCNLEDQVKKLEDDRNSLQAAKAGLEDECKTLRQKVEILNELYQQKEMALQKKLSQEEYERQEREHRLSAADEKAVSAAEEVKTYKRRIEEMEDELQKTERSFKNQIATHEKKAHENWLKARAAERAIAEEKREAANLRHKLLELTQKMAMLQEEPVIVKPMPGKPNTQNPPRRGPLSQNGSFGPSPVSGGECSPPLTVEPPVRPLSATLNRRDMPRSEFGSVDGPLPHPRWSAEASGKPSPSDPGSGTATMMNSSSRGSSPTRVLDEGKVNMAPKGPPPFPGVPLMSTPMGGPVPPPIRYGPPPQLCGPFGPRPLPPPFGPGMRPPLGLREFAPGVPPGRRDLPLHPRGFLPGHAPFRPLGSLGPREYFIPGTRLPPPTHGPQEYPPPPAVRDLLPSGSRDEPPPASQSTSQDCSQALKQSP

SEQ ID NO: 53131 - protein, 500 aa, Homo sapiens
MAAAPGLLVWLLVLRLPWRVPGQLDPSTGRRFSEHKLCADDECSMLMYRGEALEDFTGPDCRFVNFKKGDPVYVYYKLARGWPEVWAGSVGRTFGYFPKDLIQVVHEYTKEELQVPTDETDFVCFDGGRDDFHNYNVEELLGFLELYNSAATDSEKAVEKTLQDMEKNPELSKEREPEPEPVEANSEESDSVFSENTEDLQEQFTTQKHHSHANSQANHAQGEQASFESFEEMLQDKLKVPESENNKTSNSSQVSNEQDKIDAYKLLKKEMTLDLKTKFGSTADALVSDDETTRLVTSLEDDFDEELDTEYYAVGKEDEENQEDFDELPLLTFTDGEDMKTPAKSGVEKYPTDKEQNSNEEDKVQLTVPPGIKNDDKNILTTWGDTIFSIVTGGEETRDTMDLESSSSEEEKEDDDDALVPDSKQGKPQSATDYSDPDNVDDGLFIVDIPKTNNDKEVNAEHHIKGKGRGVQESKRGLVQDKTELEDENQEGFKTEPIKL

SEQ ID NO: 53132 - protein, 1907 aa, Homo sapiens
MAAAPGLLVWLLVLRLPWRVPGQLDPSTGRRFSEHKLCADDECSMLMYRGEALEDFTGPDCRFVNFKKGDPVYVYYKLARGWPEVWAGSVGRTFGYFPKDLIQVVHEYTKEELQVPTDETDFVCFDGGRDDFHNYNVEELLGFLELYNSAATDSEKAVEKTLQDMEKNPELSKEREPEPEPVEANSEESDSVFSENTEDLQEQFTTQKHHSHANSQANHAQGEQASFESFEEMLQDKLKVPESENNKTSNSSQVSNEQDKIDAYKLLKKEMTLDLKTKFGSTADALVSDDETTRLVTSLEDDFDEELDTEYYAVGKEDEENQEDFDELPLLTFTDGEDMKTPAKSGVEKYPTDKEQNSNEEDKVQLTVPPGIKNDDKNILTTWGDTIFSIVTGGEETRDTMDLESSSSEEEKEDDDDALVPDSKQGKPQSATDYSDPDNVDDGLFIVDIPKTNNDKEVNAEHHIKGKGRGVQESKRGLVQDKTELEDENQEGMTVHSSVHSNNLNSMPAAEKGKDTLKSAYDDTENDLKGAAIHISKGMLHEEKPGEQILEGGSESESAQKAAGNQMNDRKIQQESLGSAPLMGDDHPNASRDSVEGDALVNGAKLHTLSVEHQREELKEELVLKTQNQPRFSSPDEIDLPRELEDEVPILGRNLPWQQERDVAATASKQMSEKIRLSEGEAKEDSLDEEFFHHKAMQGTEVGQTDQTDSTGGPAFLSKVEEDDYPSEELLEDENAINAKRSKEKNPGNQGRQFDVNLQVPDRAVLGTIHPDPEIEESKQETSMILDSEKTSETAAKGVNTGGREPNTMVEKERPLADKKAQRPFERSDFSDSIKIQTPELGEVFQNKDSDYLKNDNPEEHLKTSGLAGEPEGELSKEDHENTEKYMGTESQGSAAAEPEDDSFHWTPHTSVEPGHSDKREDLLIISSFFKEQQSLQRFQKYFNVHELEALLQEMSSKLKSAQQESLPYNMEKVLDKVFRASESQILSIAEKMLDTRVAENRDLGMNENNIFEEAAVLDDIQDLIYFVRYKHSTAEETATLVMAPPLEEGLGGAMEEMQPLHEDNFSREKTAELNVQVPEEPTHLDQRVIGDTHASEVSQKPNTEKDLDPGPVTTEDTPMDAIDANKQPETAAEEPASVTPLENAILLIYSFMFYLTKSLVATLPDDVQPGPDFYGLPWKPVFITAFLGIASFAIFLWRTVLVVKDRVYQVTEQQISEKLKTIMKENTELVQKLSNYEQKIKESKKHVQETRKQNMILSDEAIKYKDKIKTLEKNQEILDDTAKNLRVMLESEREQNVKNQDLISENKKSIEKLKDVISMNASEFSEVQIALNEAKLSEEKVKSECHRVQEENARLKKKKEQLQQEIEDWSKLHAELSEQIKSFEKSQKDLEVALTHKDDNINALTNCITQLNLLECESESEGQNKGGNDSDELANGEVGGDRNEKMKNQIKQMMDVSRTQTAISVVEEDLKLLQLKLRASVSTKCNLEDQVKKLEDDRNSLQAAKAGLEDECKTLRQKVEILNELYQQKEMALQKKLSQEEYERQEREHRLSAADEKAVSAAEEVKTYKRRIEEMEDELQKTERSFKNQIATHEKKAHENWLKARAAERAIAEEKREAANLRHKLLELTQKMAMLQEEPVIVKPMPGKPNTQNPPRRGPLSQNGSFGPSPVSGGECSPPLTVEPPVRPLSATLNRRDMPRSEFGSVDGPLPHPRWSAEASGKPSPSDPGSGTATMMNSSSRGSSPTRVLDEGKVNMAPKGPPPFPGVPLMSTPMGGPVPPPIRYGPPPQLCGPFGPRPLPPPFGPGMRPPLGLREFAPGVPPGRRDLPLHPRGFLPGHAPFRPLGSLGPREYFIPGTRLPPPTHGPQEYPPPPAVRDLLPSGSRDEPPPASQSTSQDCSQALKQSP

SEQ ID NO: 53133 - protein, 1016 aa, Homo sapiens
  VARIANT 1: note = MOD_RES - Any amino acid
XLVPDSKQGKPQSATDYSDPDNVDDGLFIVDIPKTNNDKEVNAEHHIKGKGRGVQESKRGLVQDKTELEDENQEGMTVHSSVHSNNLNSMPAAEKGKDTLKSAYDDTENDLKGAAIHISKGMLHEEKPGEQILEGGSESESAQKAAGNQMNDRKIQQESLGSAPLMGDDHPNASRDSVEGDALVNGAKLHTLSVEHQREELKEELVLKTQNQPRFSSPDEIDLPRELEDEVPILGRNLPWQQERDVAATASKQMSEKIRLSEGEAKEDSLDEEFFHHKAMQGTEVGQTDQTDSTGGPAFLSKVEEDDYPSEELLEDENAINAKRSKEKNPGNQGRQFDVNLQVPDRAVLGTIHPDPEIEESKQETSMILDSEKTSETAAKGVNTGGREPNTMVEKERPLADKKAQRPFERSDFSDSIKIQTPELGEVFQNKDSDYLKNDNPEEHLKTSGLAGEPEGELSKEDHENTEKYMGTESQGSAAAEPEDDSFHWTPHTSVEPGHSDKREDLLIISSFFKEQQSLQRFQKYFNVHELEALLQEMSSKLKSAQQESLPYNMEKVLDKVFRASESQILSIAEKMLDTRVAENRDLGMNENNIFEEAAVLDDIQDLIYFVRYKHSTAEETATLVMAPPLEEGLGGAMEEMQPLHEDNFSREKTAELNVQVPEEPTHLDQRVIGDTHASEVSQKPNTEKDLDPGPVTTEDTPMDAIDANKQPETAAEEPASVTPLENAILLIYSFMFYLTKSLVATLPDDVQPGPDFYGLPWKPVFITAFLGIASFAIFLWRTVLVVKDRVYQVTEQQISEKLKTIMKENTELVQKLSNYEQKIKESKKHVQETRKQNMILSDEAIKYKDKIKTLEKNQEILDDTAKNLRVMLESEREQNVKNQDLLQQEIEDWSKLHAELSEQIKSFEKSQKDLEVALTHKDDNINALTNCITQLNLLECESESEGQNKGGNDSDELANGEVGGDRNEKMKNQIKQMMDVSRTQTAISVVEEDLKLLQLKLRASVSTKCNLEDQV

SEQ ID NO: 53134 - protein, 107 aa, Homo sapiens
  VARIANT 1: note = MOD_RES - Any amino acid
XSAEASGKPSPSDPGSGTATMMNSSSRGSSPTRVLDEGKVNMAPKGPPPFPGVPLMSTPMGGPVPPPIRYGPPPQLCGPFGPRPLPPPFDKDGRPGTVAHACNPSTL

SEQ ID NO: 53135 - protein, 600 aa, Homo sapiens
MGKKLDLSKLTDEEAQHVLEVVQRDFDLRRKEEERLEALKGKIKKESSKRELLSDTAHLNETHCARCLQPYQLLVNSKRQCLECGLFTCKSCGRVHPEEQGWICDPCHLARVVKIGSLEWYYEHVKARFKRFGSAKVIRSLHGRLQGGAGPELISEERSGDSDQTDEDGEPGSEAQAQAQPFGSKKKRLLSVHDFDFEGDSDDSTQPQGHSLHLSSVPEARDSPQSLTDESCSEKAAPHKAEGLEEADTGASGCHSHPEEQPTSISPSRHGALAELCPPGGSHRMALGTAAALGSNVIRNEQLPLQYLADVDTSDEESIRAHVMASHHSKRRGRASSESQIFELNKHISAVECLLTYLENTVVPPLAKGLGAGVRTEADVEEEALRRKLEELTSNVSDQETSSEEEEAKDEKAEPNRDKSVGPLPQADPEVGTAAHQTNRQEKSPQDPGDPVQYNRTTDEELSELEDRVAVTASEVQQAESEVSDIESRIAALRAAGLTVKPSGKPRRKSNLPIFLPRVAGKLGKRPEDPNADPSSEAKAMAVPYLLRRKFSNSLKSQGKDDDSFDRKSVYRGSLTQRNPNARKGMASHTFAKPVVAHQS

SEQ ID NO: 53136 - protein, 572 aa, Homo sapiens
MGKKLDLSKLTDEEAQHVLEVVQRDFDLRRKEEERLEALKGKIKKESSKRELLSDTAHLNETHCARCLQPYQLLVNSKRQCLECGLFTCKSCGRVHPEEQGWICDPCHLARVVKIGSLEWYYEHVKARFKRFGSAKVIRSLHGRLQGGAGPELISEERSGDSDQTDEDGEPGSEAQAQAQPFGSKKKRLLSVHDFDFEGDSDDSTQPQGHSLHLSSVPEARDSPQSLTDESCSEKAAPHKAEGLEEADTGASGCHSHPEEQPTSISPSRHGALAELCPPGGSHRMALGTAAALGSNVIRNEQLPLQYLADVDTSDEESIRAHVMASHHSKRRGRASSESQGLGAGVRTEADVEEEALRRKLEELTSNVSDQETSSEEEEAKDEKAEPNRDKSVGPLPQADPEVGTAAHQTNRQEKSPQDPGDPVQYNRTTDEELSELEDRVAVTASEVQQAESEVSDIESRIAALRAAGLTVKPSGKPRRKSNLPIFLPRVAGKLGKRPEDPNADPSSEAKAMAVPYLLRRKFSNSLKSQGKDDDSFDRKSVYRGSLTQRNPNARKGMASHTFAKPVVAHQS

SEQ ID NO: 53137 - protein, 131 aa, Homo sapiens
MGKKLDLSKLTDEEAQHVLEVVQRDFDLRRKEEERLEALKGKIKKESSKRELLSDTAHLNETHCARCLQPYQLLVNSKRQCLECGLFTCKSCGRVHPEEQGWICDPCHLARVVKIGSLEWYYEHVKARFKR

SEQ ID NO: 53138 - protein, 70 aa, Homo sapiens
MGKKLDLSKLTDEEAQHVLEVVQRDFDLRRKEEERLEALKGKIKKESSKRELLSDTAHLNETHCARCLQP

SEQ ID NO: 53139 - protein, 551 aa, Homo sapiens
MGKKLDLSKLTDEEAQHVLEVVQRDFDLRRKEEERLEALKGKIKKESSKRELLSDTAHLNETHCARCLQPYQLLVNSKRQCLECGLFTCKSCGRVHPEEQGWICDPCHLARVVKIGSLEWYYEHVKARFKRFGSAKVIRSLHGRLQGGAGPELISEERSGDSDQTDEDGEPGSEAQAQAQPFGSKKKRLLSVHDFDFEGDSDDSTQPQGHSLHLSSVPEARDSPQSLTDESCSEKAAPHKAEGLEEADTGASGCHSHPEEQPTSISPSRHGALAELCPPGGSHRMALGTAAALGSNVIRNEQLPLQYLADVDTSDEESIRAHVMASHHSKRRGRASSESQIFELNKHISAVECLLTYLENTVVPPLAKGLGAGVRTEADVEEEALRRKLEELTSNVSDQETSSEEEEAKDEKAEPNRDKSVGPLPQADPEVGTAAHQTNRQEKSPQDPGDPVQYNRTTDEELSELEDRVAVTASEVQQAESEVSDIESRIAALRAAGLTVKPSGKPRRKSNLPALYEGTLSLCSEDLKHTHPDSVKSKRSRLNHVASCGNP

SEQ ID NO: 53140 - protein, 224 aa, Homo sapiens
MGLRDWLRTVCCCCGCECLEERALPEKEPLVSDNNPYSSFGATLVRDDEKNLWSMPHDVSHTEADDDRTLYNLIVIRNQQAKDSEEWQKLNYDIHTLRQVRREVRNRWKCILEDLGFQKEADSLLSVTKLSTISDSKNTRKAREMLLKLAEETNIFPTSWELSERYLFVVDRLIALDAAEEFFKLARRTYPKKPGVPCLADGQKELHLWGDLSCRLAHMQGVLH

SEQ ID NO: 53141 - protein, 214 aa, Homo sapiens
MGLRDWLRTVCCCCGCECLEERALPEKEPLVSDNNPYSSFGATLVRDDEKNLWSMPHDVSHTEADDDRTLYNLIVIRNQQAKDSEEWQKLNYDIHTLRQVRREVRNRWKCILEDLGFQKEADSLLSVTKLSTISDSKNTRKAREMLLKLAEETNIFPTSWELSERYLFVVDRLIALDAAEEFFKLARRTYPKKPGVPCLADGQKELHYLPFPSP

SEQ ID NO: 53142 - protein, 214 aa, Homo sapiens; identical to SEQ ID NO: 53141

SEQ ID NO: 53143 - protein, 350 aa, Homo sapiens [sequence omitted]

SEQ ID NO: 53144 - protein, 362 aa, Homo sapiens
MSENGSFANCCEAGGWAVRPGWSGAGSARPSRTPRPPWVAPALSAVLIVTTAVDVVGNLLVILSVLRNRKLRNAGNLFLVSLALADLVVAFYPYPLILVAIFYDGWALGEEHCKASAFVMGLSVIGSVFNITAIAINRYCYICHSMAYHRIYRRWHTPLHICLIWLLTVVALLPNFFVGSLEYDPRIYSCTFIQTASTQYTAAVVVIHFLLPIAVVSFCYLRIWVLVLQARRKAKPESRLCLKPSDLRSFLTMFVVFVIFAICWAPLNCIGLAVAINPQEMAPQIPEGLFVTSYLLAYFNSCLNAIVYGLLNQNFRREYKRILLALWNPRHCIQDASKGSHAEGLQSPAPPIIGVQHQADAL

SEQ ID NO: 53145 - protein, 1287 aa, Homo sapiens
MSKVIQKKNHWTSRVHECTVKRGPQGELGVTVLGGAEHGEFPYVGAVAAVEAAGLPGGGEGPRLGEGELLLEVQGVRVSGLPRYDVLGVIDSCKEAVTFKAVRQGGRLNKDLRHFLNQRFQKGSPDHELQQTIRDNLYRHAVPCTTRSPREGEVPGVDYNFLTVKEFLDLEQSGTLLEVGTYEGNYYGTPKPPSQPVSGKVITTDALHSLQSGSKQSTPKRTKSYNDMQNAGIVHAENEEEDDVPEMNSSFTADSGEQEEHTLQETALPPVNSSIIAAPITDPSQKFPQYLPLSAEDNLGPLPENWEMAYTENGEVYFIDHNTKTTSWLDPRCLNKQQKPLEECEDDEGVHTEELDSELELPAGWEKIEDPVYGIYYVDHINRKTQYENPVLEAKRKKQLEQQQQQQQQQQQQQQQQQQQQTEEWTEDHSALVPPVIPNHPPSNPEPAREVPLQGKPFFTRNPSELKGKFIHTKLRKSSRGFGFTVVGGDEPDEFLQIKSLVLDGPAALDGKMETGDVIVSVNDTCVLGHTHAQVVKIFQSIPIGASVDLELCRGYPLPFDPDDPNTSLVTSVAILDKEPIIVNGQETYDSPASHSSKTGKVNGMKDARPSSPADVASNSSHGYPNDTVSLASSIATQPELITVHIVKGPMGFGFTIADSPGGGGQRVKQIVDSPRCRGLKEGDLIVEVNKKNVQALTHNQVVDMLVECPKGSEVTLLVQRGGLPVPKKSPKSQPLERKDSQNSSQHSVSSHRSLHTASPSHSTQVLPEFPPAEAQAPDQTDSSGQKKPDPFKIWAQSRSMYENRPMSPSPASGLSKGEREREINSTNFGECPIPDYQEQDIFLWRKETGFGFRILGGNEPGEPIYIGHIVPLGAADTDGRLRSGDELICVDGTPVIGKSHQLVVQLMQQAAKQGHVNLTVRRKVVFAVPKTENEVPSPASSHHSSNQPASLTEEKRTPQGSQNSLNTVSSGSGSTSGIGSGGGGGSGVVSTVVQPYDVEIRRGENEGFGFVIVSSVSRPEAGTTFGNACVAMPHKIGRIIEGSPADRCGKLKVGDRILAVNGCSITNKSHSDIVNLIKEAGNTVTLRIIPGDESSNATLLTNAEKIATITTTHTPSQQGTQETRNTTKPKQESQFEFKAPQATQEQDFYTVELERGAKGFGFSLRGGREYNMDLYVLRLAEDGPAERCGKMRIGDEILEINGETTKNMKHSRAIELIKNGGRRVRLFLKRGDGSVPEYAMIPPNIAACMRNEKLGEACFYLMGHNQTTTPAATATAPPPVHKVFRK

SEQ ID NO: 53146 - protein, 1462 aa, Homo sapiens
MSKVIQKKNHWTSRVHECTVKRGPQGELGVTVLGGAEHGEFPYVGAVAAVEAAGLPGGGEGPRLGEGELLLEVQGVRVSGLPRYDVLGVIDSCKEAVTFKAVRQGGRLNKDLRHFLNQRFQKGSPDHELQQTIRDNLYRHAVPCTTRSPREGEVPGVDYNFLTVKEFLDLEQSGTLLEVGTYEGNYYGTPKPPSQPVSGKVITTDALHSLQSGSKQSTPKRTKSYNDMQNAGIVHAENEEEDDVPEMNSSFTADSGEQEEHTLQETALPPVNSSIIAAPITDPSQKFPQYLPLSAEDNLGPLPENWEMAYTENGEVYFIDHNTKTTSWLDPRCLNKQQKPLEECEDDEGVHTEELDSELELPAGWEKIEDPVYGIYYVDHINRKTQYENPVLEAKRKKQLEQQQQQQQQQQQQQQQQQQQQTEEWTEDHSALVPPVIPNHPPSNPEPAREVPLQGKPFFTRNPSELKGKFIHTKLRKSSRGFGFTVVGGDEPDEFLQIKSLVLDGPAALDGKMETGDVIVSVNDTCVLGHTHAQVVKIFQSIPIGASVDLELCRGYPLPFDPDDPNTSLVTSVAILDKEPIIVNGQETYDSPASHSSKTGKVNGMKDARPSSPADVASNSSHGYPNDTVSLASSIATQPELITVHIVKGPMGFGFTIADSPGGGGQRVKQIVDSPRCRGLKEGDLIVEVNKKNVQALTHNQVVDMLVECPKGSEVTLLVQRGGLPVPKKSPKSQPLERKDSQNSSQHSVSSHRSLHTASPSHSTQVLPEFPPAEAQAPDQTDSSGQKKPDPFKIWAQSRSMYENRLPDYQEQDIFLWRKETGFGFRILGGNEPGEPIYIGHIVPLGAADTDGRLRSGDELICVDGTPVIGKSHQLVVQLMQQAAKQGHVNLTVRRKVVFAVPKTENEVPSPASSHHSSNQPASLTEEKRTPQGSQNSLNTVSSGSGSTSGIGSGGGGGSGVVSTVVQPYDVEIRRGENEGFGFVIVSSVSRPEAGTTFGNACVAMPHKIGRIIEGSPADRCGKLKVGDRILAVNGCSITNKSHSDIVNLIKEAGNTVTLRIIPGDESSNATLLTNAEKIATITTTHTPSQQGTQETRNTTKPKQESQFEFKAPQATQEQDFYTVELERGAKGFGFSLRGGREYNMDLYVLRLAEDGPAERCGKMRIGDEILEINGETTKNMKHSRAIELIKNGGRRVRLFLKRGDGSVPEYDPSSDRHGPATGPQGVPEVRAGPDRRQHPSLESSYPPDLHKSSPHGEKRAHARDPKGSREYSRQPNEHHTWNGTSRKPDSGACRPKDRAPEGRRDAQAERAAAANGPKRRSPEKRREGTRSADNTLERREKHEKRRDVSPERRRERSPTRRRDGSPSRRRRSLERLLEQRRSPERRRGGSPERRAKSTDRRRARSPERRRERSLDKRNREDRASHREREEANLKQDAGRSSRHPPEQRRRPYKECSTDLSI

SEQ ID NO: 53147 - protein, 1183 aa, Homo sapiens
GGRLNKDLRHFLNQRFQKGSPDHELQQTIRDNLYRHAVPCTTRSPREGEVPGVDYNFLTVKEFLDLEQSGTLLEVGTYEGNYYGTPKPPSQPVSGKVITTDALHSLQSGSKQSTPKRTKSYNDMQNAGIVHAENEEEDDVPEMNSSFTADSGEQEEHTLQETALPPVNSSIIAAPITDPSQKFPQYLPLSAEDNLGPLPENWEMAYTENGEVYFIDHNTKTTSWLDPRCLNKQQKPLEECEDDEGVHTEELDSELELPAGWEKIEDPVYGIYYVDHINRKTQYENPVLEAKRKKQLEQQQQQQQQQQQQQQQQQQQQTEEWTEDHSALVPPVIPNHPPSNPEPAREVPLQGKPFFTRNPSELKGKFIHTKLRKSSRGFGFTVVGGDEPDEFLQIKSLVLDGPAALDGKMETGDVIVSVNDTCVLGHTHAQVVKIFQSIPIGASVDLELCRGYPLPFDPDDPNTSLVTSVAILDKEPIIVNGQETYDSPASHSSKTGKVNGMKDARPSSPADVASNSSHGYPNDTVSLASSIATQPELITVHIVKGPMGFGFTIADSPGGGGQRVKQIVDSPRCRGLKEGDLIVEVNKKNVQALTHNQVVDMLVECPKGSEVTLLVQRGGLPVPKKSPKSQPLERKDSQNSSQHSVSSHRSLHTASPSHSTQVLPEFPPAEAQAPDQTDSSGQKKPDPFKIWAQSRSMYENRPMSPSPASGLSKGEREREINSTNFGECPIPDYQEQDIFLWRKETGFGFRILGGNEPGEPIYIGHIVPLGAADTDGRLRSGDELICVDGTPVIGKSHQLVVQLMQQAAKQGHVNLTVRRKVVFAVPKTENEVPSPASSHHSSNQPASLTEEKRTPQGSQNSLNTVSSGSGSTSGIGSGGGGGSGVVSTVVQPYDVEIRRGENEGFGFVIVSSVSRPEAGTTFGNACVAMPHKIGRIIEGSPADRCGKLKVGDRILAVNGCSITNKSHSDIVNLIKEAGNTVTLRIIPGDESSNATLLTNAEKIATITTTHTPSQQGTQETRNTTKPKQESQFEFKAPQATQEQDFYTVELERGAKGFGFSLRGGREYNMDLYVLRLAEDGPAERCGKMRIGDEILEINGETTKNMKHSRAIELIKNGGRRVRLFLKRGDGSVPEYAMIPPNIAACMRNEKLGEACFYLMGHNQTTTPAATATAPPPVHKVFRK

SEQ ID NO: 53148 - protein, 1256 aa, Homo sapiens
MSKVIQKKNHWTSRVHECTVKRGPQGELGVTVLGGAEHGEFPYVGAVAAVEAAGLPGGGEGPRLGEGELLLEVQGVRVSGLPRYDVLGVIDSCKEAVTFKAVRQGGRLNKDLRHFLNQRFQKGSPDHELQQTIRDNLYRHAVPCTTRSPREGEVPGVDYNFLTVKEFLDLEQSGTLLEVGTYEGNYYGTPKPPSQPVSGKVITTDALHSLQSGSKQSTPKRTKSYNDMQNAGIVHAENEEEDDVPEMNSSFTADSGEQEEHTLQETALPPVNSSIIAAPITDPSQKFPQYLPLSAEDNLGPLPENWEMAYTENGEVYFIDHNTKTTSWLDPRCLNKQQKPLEECEDDEGVHTEELDSELELPAGWEKIEDPVYGIYYVDHINRKTQYENPVLEAKRKKQLEQQQQQQQQQQQQQQQQQQQQTEEWTEDHSALVPPVIPNHPPSNPEPAREVPLQGKPFFTRNPSELKGKFIHTKLRKSSRGFGFTVVGGDEPDEFLQIKSLVLDGPAALDGKMETGDVIVSVNDTCVLGHTHAQVVKIFQSIPIGASVDLELCRGYPLPFDPDDPNTSLVTSVAILDKEPIIVNGQETYDSPASHSSKTGKVNGMKDARPSSPADVASNSSHGYPNDTVSLASSIATQPELITVHIVKGPMGFGFTIADSPGGGGQRVKQIVDSPRCRGLKEGDLIVEVNKKNVQALTHNQVVDMLVECPKGSEVTLLVQRGGLPVPKKSPKSQPLERKDSQNSSQHSVSSHRSLHTASPSHSTQVLPEFPPAEAQAPDQTDSSGQKKPDPFKIWAQSRSMYENRPMSPSPASGLSKGEREREINSTNFGECPIPDYQEQDIFLWRKETGFGFRILGGNEPGEPIYIGHIVPLGAADTDGRLRSGDELICVDGTPVIGKSHQLVVQLMQQAAKQGHVNLTVRRKVVFAVPKTENEVPSPASSHHSSNQPASLTEEKRTPQGSQNSLNTVSSGSGSTSGIGSGGGGGSGVVSTVVQPYDVEIRRGENEGFGFVIVSSVSRPEAGTTFAGNACVAMPHKIGRIIEGSPADRCGKLKVGDRILAVNGCSITNKSHSDIVNLIKEAGNTVTLRIIPGDESSNATLLTNAEKIATITTTHTPSQQGTQETRNTTKPKQESQFEFKAPQATQEQDFYTVELERGAKGFGFSLRGGREYNMDLYVLRLAEDGPAERCGKMRIGDEILEINGETTKNMKHSRAIELIKNGGRRVRLFLKRGDGSVPEYGGSNYENIPSFPGMTP

SEQ ID NO: 53149 - protein, 495 aa, Homo sapiens
MAAEPQPSSLSYRTTGSTYLHPLSELLGIPLDQVNFVVCQLVALFAAFWFRIYLRPGTTSSDVRHAVATIFGIYFVIFCFGWYSVHLFVLVLMCYAIMVTASVSNIHRYSFFVAMGYLTICHISRIYIFHYGILTTDFSGPLMIVTQKITTLAFQVHDGLGRRAEDLSAEQHRLAIKVKPSFLEYLSYLLNFMSVIAGPCNNFKDYIAFIEGKHIHMKLLEVNWKRKGFHSLPEPSPTGAVIHKLGITLVSLLLFLTLTKTFPVTCLVDDWFVHKASFPARLCYLYVVMQASKPKYYFAWTLADAVNNAAGFGFSGVDKNGNFCWDLLSNLNIWKIETATSFKMYLENWNIQTATWLKCVCYQRVPWYPTVLTFILSALWHGVYPGYYFTFLTGILVTLAARAVRNNYRHYFLSSRALKAVYDAGTWAVTQLAVSYTVAPFVMLAVEPTISLYKSMYFYLHIISLLIILFLPMKPQAHTQRRPQTLNSINKRKTD

SEQ ID NO: 53150 - protein, 241 aa, Homo sapiens
MAAEPQPSSLSYRTTGSTYLHPLSELLGIPLDQVNFVVCQLVALFAAFWFRIYLRPGTTSSDVRHAVATIFGIYFVIFCFGWYSVHLFVLVLMCYAIMVTASVSNIHRYSFFVAMGYLTICHISRIYIFHYGILTTDFSGPLMIVTQKITTLAFQVHDGLGRRAEDLSAEQHRLAIKVKPSFLEYLSYLLNFMSVIAGPCNNFKDYIAFIEGKHIHMKLLEVNWKRKGFHSLPEPSPTGHL

SEQ ID NO: 53151 - protein, 346 aa, Homo sapiens
MEFSLRIFLGLGRRAEDLSAEQHRLAIKVKPSFLEYLSYLLNFMSVIAGPCNNFKDYIAFIEGKHIHMKLLEVNWKRKGFHSLPEPSPTGAVIHKLGITLVSLLLFLTLTKTFPVTCLVDDWFVHKASFPARLCYLYVVMQASKPKYYFAWTLADAVNNAAGFGFSGVDKNGNFCWDLLSNLNIWKIETATSFKMYLENWNIQTATWLKCVCYQRVPWYPTVLTFILSALWHGVYPGYYFTFLTGILVTLAARAVRNNYRHYFLSSRALKAVYDAGTWAVTQLAVSYTVAPFVMLAVEPTISLYKSMYFYLHIISLLIILFLPMKPQAHTQRRPQTLNSINKRKTD

SEQ ID NO: 53152 - protein, 520 aa, Homo sapiens
MATTSTTGSTLLQPLSNAVQLPIDQVNFVVCQLFALLAAIWFRTYLHSSKTSSFIRHVVATLLGLYLALFCFGWYALHFLVQSGISYCIMIIIGVENMHNYCFVFALGYLTVCQVTRVYIFDYGQYSADFSGPMMIITQKITSLACEIHDGMFRKDEELTSSQRDLAVRRMPSLLEYLSYNCNFMGILAGPLCSYKDYITFIEGRSYHITQSGENGKEETQYERTEPSPNTAVVQKLLVCGLSLLFHLTICTTLPVEYNIDEHFQATASWPTKIIYLYISLLAARPKYYFAWTLADAINNAAGFGFRGYDENGAARWDLISNLRIQQIEMSTSFKMFLDNWNIQTALWLKRVCYERTSFSPTIQTFILSAIWHGVYPGYYLTFLTGVLMTLAARAMRNNFRHYFIEPSQLKLFYDVITWIVTQVAISYTVVPFVLLSIKPSLTFYSSWYYCLHILGILVLLLLPVKKTQRRKNTHENIQLSQSKKFDEGENSLGQNSFSTTNNVCNQNQEIASRHSSLKQ

SEQ ID NO: 53153 - protein, 435 aa, Homo sapiens
MEWLWLFFLHPISFYQGAAFPFALLFNYLCIMDSFSTRARYLFLLTGGGALAVAAMGSYAVLVFTPAVCAVALLCSLAPQQVHRWTFCFQMSWQTLCHLGLHYTEYYLHEPPSVRFCITLSSLMLLTQRVTSLSLDICEGKVKAASGGFRSRSSLSEHVCKALPYFSYLLFFPALLGGSLCSFQRFQARVQGSSALHPRHSFWALSWRGLQILGLECLNVAVSRVVDAGAGLTDCQQFECIYVVWTTAGLFKLTYYSHWILDDSLLHAAGFGPELGQSPGEEGYVPDADIWTLERTHRISVFSRKWNQSTARWLRRLVFQHSRAWPLLQTFAFSAWWHGLHPGQVFGFVCWAVMVEADYLIHSFANEFIRSWPMRLFYRTLTWAHTQLIIAYIMLAVEVRSLSSLWLLCNSYNSVFPMVYCILLLLLAKRKHKCN

SEQ ID NO: 53154 - protein, 446 aa, Homo sapiens
MTLKASEGESGGSMHTALSDLYLEHLLQKRSRPEAVSHPLNTVTEDMYTNGSPAPGSPAQVKGQEVRKVRLIQFEKVTEEPMGITLKLNEKQSCTVARILHGGMIHRQGSLHVGDEILEINGTNVTNHSVDQLQKAMKETKGMISLKVIPNQQSRLPALQEAGLKFATGDIIQIINKDDSNWWQGRVEGSSKESAGLIPSPELQEWRVASMAQSAPSEAPSCSPFGKKKKYKDKYLAKHSSIFDQLDVVSYEEVVRLPAFKRKTLVLIGASGVGRSHIKNALLSQNPEKFVYPVPYTTRPPRKSEEDGKEYHFISTEEMTRNISANEFLEFGSYQGNMFGTKFETVHQIHKQNKIAILDIEPQTLKIVRTAELSPFIVFIAPTDQGTQTEALQQLQKDSEAIRSQYAHYFDLSLVNNGVDETLKKLQEAFDQACSSPQWVPVSWVY

SEQ ID NO: 53155 - protein, 466 aa, Homo sapiens
MTLKASEGESGGSMHTALSDLYLEHLLQKRSRPEAVSHPLNTVTEDMYTNGSPAPGSPAQVKGQEVRKVRLIQFEKVTEEPMGITLKLNEKQSCTVARILHGGMIHRQGSLHVGDEILEINGTNVTNHSVDQLQKAMKETKGMISLKVIPNQQSRLPALQMFMRAQFDYDPKKDNLIPCKEAGLKFATGDIIQIINKDDSNWWQGRVEGSSKESAGLIPSPELQEWRVASMAQSAPSEAPSCSPFGKKKKYKDKYLAKHSSIFDQLDVVSYEEVVRLPAFKRKTLVLIGASGVGRSHIKNALLSQNPEKFVYPVPYTTRPPRKSEEDGKEYHFISTEEMTRNISANEFLEFGSYQGNMFGTKFETVHQIHKQNKIAILDIEPQTLKIVRTAELSPFIVFIAPTDQGTQTEALQQLQKDSEAIRSQYAHYFDLSLVNNGVDETLKKLQEAFDQACSSPQWVPVSWVY

SEQ ID NO: 53156 - protein, 436 aa, Homo sapiens
MESWAVSHPLNTVTEDMYTNGSPAPGSPAQVKGQEVRKVRLIQFEKVTEEPMGITLKLNEKQSCTVARILHGGMIHRQGSLHVGDEILEINGTNVTNHSVDQLQKAMKETKGMISLKVIPNQQSRLPALQMFMRAQFDYDPKKDNLIPCKEAGLKFATGDIIQIINKDDSNWWQGRVEGSSKESAGLIPSPELQEWRVASMAQSAPSEAPSCSPFGKKKKYKDKYLAKHSSIFDQLDVVSYEEVVRLPAFKRKTLVLIGASGVGRSHIKNALLSQNPEKFVYPVPYTTRPPRKSEEDGKEYHFISTEEMTRNISANEFLEFGSYQGNMFGTKFETVHQIHKQNKIAILDIEPQTLKIVRTAELSPFIVFIAPTDQGTQTEALQQLQKDSEAIRSQYAHYFDLSLVNNGVDETLKKLQEAFDQACSSPQWVPVSWVY

SEQ ID NO: 53157 - protein, 552 aa, Homo sapiens
MPVAATNSETAMQQVLDNLGSLPSATGAAELDLIFLRGIMESPIVRSLAKAHERLEETKLEAVRDNNLELVQEILRDLAHVAEQSSTAAELAHILQEPHFQSLLETHDSVASKTYETPPPSPGLDPTFSNQPVPPDAVRMVGIRKTAGEHLGVTFRVEGGELVIARILHGGMVAQQGLLHVGDIIKEVNGQPVGSDPRALQELLRNASGSVILKILPSYQEPHLPRQVFVKCHFDYDPARDSLIPCKEAGLRFNAGDLLQIVNQDDANWWQACHVEGGSAGLIPSQLLEEKRKAFVKRDLELTPNSGTLCGSLSGKKKKRMMYLTTKNAEFDRHELLIYEEVARMPPFRRKTLVLIGAQGVGRRSLKNKLIMWDPDRYGTTVPYTSRRPKDSEREGQGYSFVSRGEMEADVRAGRYLEHGEYEGNLYGTRIDSIRGVVAAGKVCVLDVNPQAVKVLRTAEFVPYVVFIEAPDFETLRAMNRAALESGISTKQLTEADLRRTVEESSRIQRGYGHYFDLCLVNSNLERTFRELQTAMEKLRTEPQWVPVSWVY

SEQ ID NO: 53158 - protein, 576 aa, Homo sapiens
MPVAATNSETAMQQVLDNLGSLPSATGAAELDLIFLRGIMESPIVRSLAKVIMVLWFMQQNVFVPMKYMLKYFGAHERLEETKLEAVRDNNLELVQEILRDLAHVAEQSSTAAELAHILQEPHFQSLLETHDSVASKTYETPPPSPGLDPTFSNQPVPPDAVRMVGIRKTAGEHLGVTFRVEGGELVIARILHGGMVAQQGLLHVGDIIKEVNGQPVGSDPRALQELLRNASGSVILKILPSYQEPHLPRQVFVKCHFDYDPARDSLIPCKEAGLRFNAGDLLQIVNQDDANWWQACHVEGGSAGLIPSQLLEEKRKAFVKRDLELTPNSGTLCGSLSGKKKKRMMYLTTKNAEFDRHELLIYEEVARMPPFRRKTLVLIGAQGVGRRSLKNKLIMWDPDRYGTTVPYTSRRPKDSEREGQGYSFVSRGEMEADVRAGRYLEHGEYEGNLYGTRIDSIRGVVAAGKVCVLDVNPQAVKVLRTAEFVPYVVFIEAPDFETLRAMNRAALESGISTKQLTEADLRRTVEESSRIQRGYGHYFDLCLVNSNLERTFRELQTAMEKLRTEPQWVPVSWVY

SEQ ID NO: 53159 - protein, 31 aa, Homo sapiens
MPVAATNSETAMQQVLDNLGSLPSATGAAEL

SEQ ID NO: 53160 - protein, 151 aa, Homo sapiens
MPVAATNSETAMQQVLDNLGSLPSATGAAELDLIFLRGIMESPIVRSLAKAHERLEETKLEAVRDNNLELVQEILRDLAHVAEQSSTAAELAHILQEPHFQSLLETHDSVASKTYETPPPSPGLDPTFSNQPVPPDAVRMVGIRKTAGEHL

SEQ ID NO: 53161 - protein, 126 aa, Homo sapiens
MPVAATNSETAMQQVLDNLGSLPSATGAAELDLIFLRGIMESPIVRSLAKAHERLEETKLEAVRDNNLELVQEILRDLAHVAEQSSTAAELAHILQEPHFQSLLETHDSVASKTYETPPPSPGLDP

SEQ ID NO: 53162 - protein, 73 aa, Homo sapiens
MPVAATNSETAMQQVLDNLGSLPSATGAAELDLIFLRGIMESPIVRSLAKAHERLEETKLEAVRDNNLELVQE

SEQ ID NO: 53163 - protein, 148 aa, Homo sapiens
MPVAATNSETAMQQVLDNLGSLPSATGAAELDLIFLRGIMESPIVRSLAKAHERLEETKLEAVRDNNLELVQEILRDLAHVAEQSSTAAELAHILQEPHFQSLLETHDSVASKTYETPPPSPGLDPTFSNQPVPPDAVRMVGIRKTAG

SEQ ID NO: 53164 - protein, 541 aa, Homo sapiens
MQQVLDNLGSLPSATGAAELDLIFLRGIMESPIVRSLAKAHERLEETKLEAVRDNNLELVQEILRDLAHVAEQSSTAAELAHILQEPHFQSLLETHDSVASKTYETPPPSPGLDPTFSNQPVPPDAVRMVGIRKTAGEHLGVTFRVEGGELVIARILHGGMVAQQGLLHVGDIIKEVNGQPVGSDPRALQELLRNASGSVILKILPSYQEPHLPRQVFVKCHFDYDPARDSLIPCKEAGLRFNAGDLLQIVNQDDANWWQACHVEGGSAGLIPSQLLEEKRKAFVKRDLELTPNSGTLCGSLSGKKKKRMMYLTTKNAEFDRHELLIYEEVARMPPFRRKTLVLIGAQGVGRRSLKNKLIMWDPDRYGTTVPYTSRRPKDSEREGQGYSFVSRGEMEADVRAGRYLEHGEYEGNLYGTRIDSIRGVVAAGKVCVLDVNPQAVKVLRTAEFVPYVVFIEAPDFETLRAMNRAALESGISTKQLTEADLRRTVEESSRIQRGYGHYFDLCLVNSNLERTFRELQTAMEKLRTEPQWVPVSWVY

SEQ ID NO: 53165 - protein, 388 aa, Homo sapiens
MELQYPPPPPSPRICRERSGGDNASMPVLSEDSGLHETLALLTSQLRPDSNHKEEMGFLRDVFSEKSLSYLMKIHEKLRYYERQSPTPVLHSAVALAEDVMEELQAASVHSDERELLQLLSTPHLRAVLMVHDTVAQKNFDPVLPPLPDNIDEDFDEESVKIVRLVKNKEPLGATIRRDEHSGAVVVARIMRGGAADRSGLVHVGDELREVNGIAVLHKRPDEISQILAQSQGSITLKIIPATQEEDRLKESKVFMRALFHYNPREDRAIPCQEAGLPFQRRQVLEVVSQDDPTWWQAKRVGDTNLRAGLIPSKGFQERRLSYRRAYGTPISPQFSQPKQELSLPRHWAPTQLLPSCGAHCPGGKGTHTPTLIPILLSPSLQLEFIQY

SEQ ID NO: 53166 - protein, 585 aa, Homo sapiens
MPVLSEDSGLHETLALLTSQLRPDSNHKEEMGFLRDVFSEKSLSYLMKIHEKLRYYERQSPTPVLHSAVALAEDVMEELQAASVHSDERELLQLLSTPHLRAVLMVHDTVAQKNFDPVLPPLPDNIDEDFDEESVKIVRLVKNKEPLGATIRRDEHSGAVVVARIMRGGAADRSGLVHVGDELREVNGIAVLHKRPDEISQILAQSQGSITLKIIPATQEEDRLKESKVFMRALFHYNPREDRAIPCQEAGLPFQRRQVLEVVSQDDPTWWQAKRVGDTNLRAGLIPSKGFQERRLSYRRAAGTLPSPQSLRKPPYDQPCDKETCDCEGYLKGHYVAGLRRSFRLGCRERLGGSQEGKMSSGAESPELLTYEEVARYQHQPGERPRLVVLIGSLGARLHELKQKVVAENPQHFGVAVPHTTRPRKSHEKEGVEYHFVSKQAFEADLHHNKFLEHGEYKENLYGTSLEAIQAVMAKNKVCLVDVEPEALKQLRTSEFKPYIIFVKPAIQEKRKTPPMSPACEDTAAPFDEQQQEMAASAAFIDRHYGHLVDAVLVKEDLQGAYSQLKVVLEKLSKDTHWVPVSWVR

SEQ ID NO: 53167 - protein, 610 aa, Homo sapiens
MELQYPPPPPSPRICRERSGGDNASMPVLSEDSGLHETLALLTSQLRPDSNHKEEMGFLRDVFSEKSLSYLMKIHEKLRYYERQSPTPVLHSAVALAEDVMEELQAASVHSDERELLQLLSTPHLRAVLMVHDTVAQKNFDPVLPPLPDNIDEDFDEESVKIVRLVKNKEPLGATIRRDEHSGAVVVARIMRGGAADRSGLVHVGDELREVNGIAVLHKRPDEISQILAQSQGSITLKIIPATQEEDRLKESKVFMRALFHYNPREDRAIPCQEAGLPFQRRQVLEVVSQDDPTWWQAKRVGDTNLRAGLIPSKGFQERRLSYRRAAGTLPSPQSLRKPPYDQPCDKETCDCEGYLKGHYVAGLRRSFRLGCRERLGGSQEGKMSSGAESPELLTYEEVARYQHQPGERPRLVVLIGSLGARLHELKQKVVAENPQHFGVAVPHTTRPRKSHEKEGVEYHFVSKQAFEADLHHNKFLEHGEYKENLYGTSLEAIQAVMAKNKVCLVDVEPEALKQLRTSEFKPYIIFVKPAIQEKRKTPPMSPACEDTAAPFDEQQQEMAASAAFIDRHYGHLVDAVLVKEDLQGAYSQLKVVLEKLSKDTHWVPVSWVR

SEQ ID NO: 53168 - protein, 593 aa, Homo sapiens
MIQSDKGADPPDKKDMKLSTATNPQNGLSQILRLVLQELSLFYGRDVNGVCLLYDLLHSPWLQALLKIYDCLQEFKEKKLVPATPHAQVLSYEVVELLRETPTSPEIQELRQMLQAPHFKALLSAHDTIAQKDFEPLLPPLPDNIPESEEAMRIVCLVKNQQPLGATIKRHEMTGDILVARIIHGGLAERSGLLYAGDKLVEVNGVSVEGLDPEQVIHILAMSRGTIMFKVVPVSDPPVNSQQMDPDIPCMDAGLPFQKGDILQIVDQNDALWWQARKISDPATCAGLVPSNHLLKRKQREFWWSQPYQPHTCLKSTLYKEEFVGYGQKFFIAGFRRSMRLCRRKSHLSPLHASVCCTGSCYSAVGAPYEEVVRYQRRPSDKYRLIVLMGPSGVGVNELRRQLIEFNPSHFQSAVPHTTRTKKSYEMNGREYHYVSKETFENLIYSHRMLEYGEYKGHLYGTSVDAVQTVLVEGKICVMDLEPQDIQGVRTHELKPYVIFIKPSNMRCMKQSRKNAKVITDYYVDMKFKDEDLQEMENLAQRMETQFGQFFDHVIVNDSLHDACAQLLSAIQKAQEEPQWVPATWISSDTESQ

SEQ ID NO: 53169 - protein, 602 aa, Homo sapiens
MIQSDKGADPPDKKDMKLSTATNPQNGLSQILRLVLQELSLFYGRDVNGVCLLYDLLHSPWLQALLKIYDCLQEFKEKKLVPATPHAQVLSYEVVELLRETPTSPEIQELRQMLQAPHFKGATIKRHEMTGDILVARIIHGGLAERSGLLYAGDKLVEVNGVSVEGLDPEQVIHILAMSRGTIMFKVVPVSDPPVNSQQMVYVRAMTEYWPQEDPDIPCMDAGLPFQKGDILQIVDQNDALWWQARKISDPATCAGLVPSNHLLKRWSFALVAQAGVQWHYLDSLQPLPPGFKRFSCLSLPRSWDYIEDDMKIDEKCVEAEKESIETDKEEFVGYGQKFFIAGFRRSMRLCRRKSHLSPLHASVCCTGSCYSAVGAPYEEVVRYQRRPSDKYRLIVLMGPSGVGVNELRRQLIEFNPSHFQSAVPHTTRTKKSYEMNGREYHYVSKETFENLIYSHRMLEYGEYKGHLYGTSVDAVQTVLVEGKICVMDLEPQDIQGVRTHELKPYVIFIKPSNMRCMKQSRKNAKVITDYYVDMKFKDEDLQEMENLAQRMETQFGQFFDHVIVNDSLHDACAQLLSAIQKAQEEPQWVPATWISSDTESQ

SEQ ID NO: 53170 - protein, 637 aa, Homo sapiens
MIQSDKGADPPDKKDMKLSTATNPQNGLSQILRLVLQELSLFYGRDVNGVCLLYDLLHSPWLQALLKIYDCLQEFKEKKLVPATPHAQVLSYEVVELLRETPTSPEIQELRQMLQAPHFKALLSAHDTIAQKDFEPLLPPLPDNIPESEEAMRIVCLVKNQQPLGATIKRHEMTGDILVARIIHGGLAERSGLLYAGDKLVEVNGVSVEGLDPEQVIHILAMSRGTIMFKVVPVSDPPVNSQQMVYVRAMTEYWPQEDPDIPCMDAGLPFQKGDILQIVDQNDALWWQARKISDPATCAGLVPSNHLLKRKQREFWWSQPYQPHTCLKSTLSISLKGEDDMKIDEKCVEAENSTAESEELNSDKEEFVGYGQKFFIAGFRRSMRLCRRKSHLSPLHASVCCTGSCYSAVGAPYEEVVRYQRRPSDKYRLIVLMGPSGVGVNELRRQLIEFNPSHFQSAVPHTTRTKKSYEMNGREYHYVSKETFENLIYSHRMLEYGEYKGHLYGTSVDAVQTVLVEGKICVMDLEPQDIQGVRTHELKPYVIFIKPSNMRCMKQSRKNAKVITDYYVDMKFKDEDLQEMENLAQRMETQFGQFFDHVIVNDSLHDACAQLLSAIQKAQEEPQWVPATWISSDTESQ

SEQ ID NO: 53171 - protein, 566 aa, Homo sapiens
MIQSDKGADPPDKKDMKLSTATNPQNGLSQILRLVLQELSLFYGRDVNGVCLLYDLLHSPWLQALLKIYDCLQEFKEKKLVPATPHAQVLSYEGATIKRHEMTGDILVARIIHGGLAERSGLLYAGDKLVEVNGVSVEGLDPEQVIHILAMSRGTIMFKVVPVSDPPVNSQQMVYVRAMTEYWPQEDPDIPCMDAGLPFQKGDILQIVDQNDALWWQARKISDPATCAGLVPSNHLLKRKQREFWWSQPYQPHTCLKSTLSISLKGEDDMKIDEKCVEAENSTAESEELNSDKEEFVGYGQKFFIAGFRRSMRLCRRKSHLSPLHASVCCTGSCYSAVGAPYEEVVRYQRRPSDKYRLIVLMGPSGVGVNELRRQLIEFNPSHFQSAVPHTTRTKKSYEMNGREYHYVSKETFENLIYSHRMLEYGEYKGHLYGTSVDAVQTVLVEGKICVMDLEPQDIQGVRTHELKPYVIFIKPSNMRCMKQSRKNAKVITDYYVDMKFKDEDLQEMENLAQRMETQFGQFFDHVIVNDSLHDACAQLLSAIQKAQEEPQWVPATWISSDTESQ

SEQ ID NO: 53172 - protein, 637 aa, Homo sapiens
MIQSDKGADPPDKKDMKLSTATNPQNGLSQILRLVLQELSLFYGRDVNGVCLLYDLLHSPWLQALLKIYDCLQEFKEKKLVPATPHAQVLSYEVVELLRETPTSPEIQELRQMLQAPHFKALLSAHDTIAQKDFEPLLPPLPDNIPESEEAMRIVCLVKNQQPLGATIKRHEMTGDILVARIIHGGLAERSGLLYAGDKLVEVNGVSVEGLDPEQVIHILAMSRGTIMFKVVPVSDPPVNSQQMVYVRAMTEYWPQEDPDIPCMDAGLPFQKGDILQIVDQNDALWWQARKISDPATCAGLVPSNHLLKRKQREFWWSQPYQPHTCLKSTLSISMEEEDDMKIDEKCVEADEETFESEELSEDKEEFVGYGQKFFIAGFRRSMRLCRRKSHLSPLHASVCCTGSCYSAVGAPYEEVVRYQRRPSDKYRLIVLMGPSGVGVNELRRQLIEFNPSHFQSAVPHTTRTKKSYEMNGREYHYVSKETFENLIYSHRMLEYGEYKGHLYGTSVDAVQTVLVEGKICVMDLEPQDIQGVRTHELKPYVIFIKPSNMRCMKQSRKNAKVITDYYVDMKFKDEDLQEMENLAQRMETQFGQFFDHVIVNDSLHDACAQLLSAIQKAQEEPQWVPATWISSDTESQ

SEQ ID NO: 53173 - protein, 675 aa, Homo sapiens
MTTSHMNGHVTEESDSEVKNVDLASPEEHQKHREMAVDCPGDLGTRMMPIRRSAQLERIRQQQEDMRRRREEEGKKQELDLNSSMRLKKLAQIPPKTGIDNPMFDTEEGIVLESPHYAVKILEIEDLFSSLKHIQHTLVDSQSQEDISLLLQLVQNKDFQNAFKIHNAITVHMNKASPPFPLISNAQDLAQEVQTVLKPVHHKEGQELTALLNTPHIQALLLAHDKVAEQEMQLEPITDERVYESIGQYGGETVKIVRIEKARDIPLGATVRNEMDSVIISRIVKGGAAEKSGLLHEGDEVLEINGIEIRGKDVNEVFDLLSDMHGTLTFVLIPSQQIKPPPAKETVIHVKAHFDYDPSDDPYVPCRELGLSFQKGDILHVISQEDPNWWQAYREGDEDNQPLAGLVPGKSFQQQREAMKQTIEEDKEPEKSGKLWCAKKNKKKRKKVLYNANKNDDYDNEEILTYEEMSLYHQPANRKRPIILIGPQNCGQNELRQRLMNKEKDRFASAVPHTTRSRRDQEVAGRDYHFVSRQAFEADIAAGKFIEHGEFEKNLYGTSIDSVRQVINSGKICLLSLRTQSLKTLRNSDLKPYIIFIAPPSQERLRALLAKEGKNPKPEELREIIEKTREMEQNNGHYFDTAIVNSDLDKAYQELLRLINKLDTEPQWVPSTWLR

SEQ ID NO: 53174 - protein, 641 aa, Homo sapiens
MAVDCPGDLGTRMMPIRRSAQLERIRQQQEDMRRRREEEGKKQELDLNSSMRLKKLAQIPPKTGIDNPMFDTEEGIVLESPHYAVKILEIEDLFSSLKHIQHTLVDSQSQEDISLLLQLVQNKDFQNAFKIHNAITVHMNKASPPFPLISNAQDLAQEVQTVLKPVHHKEGQELTALLNTPHIQALLLAHDKVAEQEMQLEPITDERVYESIGQYGGETVKIVRIEKARDIPLGATVRNEMDSVIISRIVKGGAAEKSGLLHEGDEVLEINGIEIRGKDVNEVFDLLSDMHGTLTFVLIPSQQIKPPPAKETVIHVKAHFDYDPSDDPYVPCRELGLSFQKGDILHVISQEDPNWWQAYREGDEDNQPLAGLVPGKSFQQQREAMKQTIEEDKEPEKSGKLWCAKKNKKKRKKVLYNANKNDDYDNEEILTYEEMSLYHQPANRKRPIILIGPQNCGQNELRQRLMNKEKDRFASAVPHTTRSRRDQEVAGRDYHFVSRQAFEADIAAGKFIEHGEFEKNLYGTSIDSVRQVINSGKICLLSLRTQSLKTLRNSDLKPYIIFIAPPSQERLRALLAKEGKNPKPEELREIIEKTREMEQNNGHYFDTAIVNSDLDKAYQELLRLINKLDTEPQWVPSTWLR

SEQ ID NO: 53175 - protein, 4 aa, Homo sapiens
MAVD

SEQ ID NO: 53176 - protein, 149 aa, Homo sapiens
MAVDCPGDLGTRMMPIRRSAQLERIRQQQEDMRRRREEEGKKQELDLNSSMRLKKLAQIPPKTGIDNPMFDTEEGIVLESPHYAVKILEIEDLFSSLKHIQHTLVDSQSQEDISLLLQLVQNKDFQNAFKIHNAITVHMNKASPPFPLI

SEQ ID NO: 53177 - protein, 540 aa, Homo sapiens
MQQVLENLTELPSSTGAEEIDLIFLKGIMENPIVKSLAKAHERLEDSKLEAVSDNNLELVNEILEDITPLINVDENVAELVGILKEPHFQSLLEAHDIVASKCYDSPPSSPEMNNSSINNQLLPVDAIRILGIHKRAGEPLGVTFRVENNDLVIARILHGGMIDRQGLLHVGDIIKEVNGHEVGNNPKELQELLKNISGSVTLKILPSYRDTITPQQVFVKCHFDYNPYNDNLIPCKEAGLKFSKGEILQIVNREDPNWWQASHVKEGGSAGLIPSQFLEEKRKAFVRRDWDNSGPFCGTISSKKKKKMMYLTTRNAEFDRHEIQIYEEVAKMPPFQRKTLVLIGAQGVGRRSLKNRFIVLNPTRFGTTVPFTSRKPREDEKDGQAYKFVSRSEMEADIKAGKYLEHGEYEGNLYGTKIDSILEVVQTGRTCILDVNPQALKVLRTSEFMPYVVFIAAPELETLRAMHKAVVDAGITTKLLTDSDLKKTVDESARIQRAYNHYFDLIIINDNLDKAFEKLQTAIEKLRMEPQWVPISWVY

SEQ ID NO: 53178 - protein, 540 aa, Homo sapiens; identical to SEQ ID NO: 53177

SEQ ID NO: 53179 - protein, 428 aa, Homo sapiens
MNNSSINNQLLPVDAIRILGIHKRAGEPLGVTFRVENNDLVIARILHGGMIDRQGLLHVGDIIKEVNGHEVGNNPKELQELLKNISGSVTLKILPSYRDTITPQQVFVKCHFDYNPYNDNLIPCKEAGLKFSKGEILQIVNREDPNWWQASHVKEGGSAGLIPSQFLEEKRKAFVRRDWDNSGPFCGTISSKKKKKMMYLTTRNAEFDRHEIQIYEEVAKMPPFQRKTLVLIGAQGVGRRSLKNRFIVLNPTRFGTTVPFTSRKPREDEKDGQAYKFVSRSEMEADIKAGKYLEHGEYEGNLYGTKIDSILEVVQTGRTCILDVNPQALKVLRTSEFMPYVVFIAAPELETLRAMHKAVVDAGITTKLLTDSDLKKTVDESARIQRAYNHYFDLIIINDNLDKAFEKLQTAIEKLRMEPQWVPISWVY

SEQ ID NO: 53180 - protein, 307 aa, Homo sapiens
MQQVLENLTELPSSTGAEEIDLIFLKGIMENPIVKSLAKAHERLEDSKLEAVSDNNLELVNEILEDITPLINVDENVAELVGILKEPHFQSLLEAHDIVASKCYDSPPSSPEMNNSSINNQLLPVDAIRILGIHKRAGEPLGVTFRVENNDLVIARILHGGMIDRQGLLHVGDIIKEVNGHEVGNNPKELQELLKNISGSVTLKILPSYRDTITPQQVFVKCHFDYNPYNDNLIPCKEAGLKFSKGEILQIVNREDPNWWQASHVKEGGSAGLIPSQFLEEKRKAFVRRDWDNSGPFCGTISSKKKK

SEQ ID NO: 53181 - protein, 217 aa, Homo sapiens
MQQVLENLTELPSSTGAEEIDLIFLKGIMENPIVKSLAKAHERLEDSKLEAVSDNNLELVNEILEDITPLINVDENVAELVGILKEPHFQSLLEAHDIVASKCYDSPPSSPEMNNSSINNQLLPVDAIRILGIHKRAGEPLGVTFRVENNDLVIARILHGGMIDRQGLLHVGDIIKEVNGHEVGNNPKELQELLKNISGSVTLKILPSYRDTITPQQ

SEQ ID NO: 53182 - protein, 576 aa, Homo sapiens
MPALSTGSGSDTGLYELLAALPAQLQPHVDSQEDLTFLWDMFGEKSLHSLVKIHEKLHYYEKQSPVPILHGAAALADDLAEELQNKPLNSEIRELLKLLSKPNVKALLSVHDTVAQKNYDPVLPPMPEDIDDEEDSVKIIRLVKNREPLGATIKKDEQTGAIIVARIMRGGAADRSGLIHVGDELREVNGIPVEDKRPEEIIQILAQSQGAITFKIIPGSKEETPSKEGKMFIKALFDYNPNEDKAIPCKEAGLSFKKGDILQIMSQDDATWWQAKHEADANPRAGLIPSKHFQERRLALRRPEILVQPLKVSNRKSSGFRKSFRLSRKDKKTNKSMYECKKSDQYDTADVPTYEEVTPYRRQTNEKYRLVVLVGPVGVGLNELKRKLLISDTQHYGVTVPHTTRARRSQESDGVEYIFISKHLFETDVQNNKFIEYGEYKNNYYGTSIDSVRSVLAKNKVCLLDVQPHTVKHLRTLEFKPYVIFIKPPSIERLRETRKNAKIISSRDDQGAAKPFTEEDFQEMIKSAQIMESQYGHLFDKIIINDDLTVAFNELKTTFDKLETETHWVPVSWLHS

SEQ ID NO: 53183 - protein, 576 aa, Homo sapiens; identical to SEQ ID NO: 53182

SEQ ID NO: 53184 - protein, 576 aa, Homo sapiens; identical to SEQ ID NO: 53182

SEQ ID NO: 53185 - protein, 312 aa, Homo sapiens
MPALSTGSGSDTGLYELLAALPAQLQPHVDSQEDLTFLWDMFGEKSLHSLVKHFQERRLALRRPEILVQPLKVSNRKSSGFRKSFRLSRKDKKTNKSMYECKKSDQYDTADVPTYEEVTPYRRQTNEKYRLVVLVGPVGVGLNELKRKLLISDTQHYGVTVPHTTRARRSQESDGVEYIFISKHLFETDVQNNKFIEYGEYKNNYYGTSIDSVRSVLAKNKVCLLDVQPHTVKHLRTLEFKPYVIFIKPPSIERLRETRKNAKIISSRDDQGAAKPFTEEDFQEMIKSAQIMESQYGHLFDKIIINDDLTVA

SEQ ID NO: 53186 - protein, 374 aa, Homo sapiens
MPEDIDDEEDSVKIIRLVKNREPLGATIKKDEQTGAIIVARIMRGGAADRSGLIHVGDELREVNGIPVEDKRPEEIIQILAQSQGAITFKIIPGSKEETPSKEGKMFIKALFDYNPNEDKAIPCKEAGLSFKKGDILQIMSQDDATWWQAKHEADANPRAGLIPSKHFQERRLALRRPEILVQPLKVSNRKSSGFRKSFRLSRKDKKTNKSMYECKKSDQYDTADVPTYEEVTPYRRQTNEKYRLVVLVGPVGVGLNELKRKLLISDTQHYGVTVPHTTRARRSQESDGVEYIFISKHLFETDVQNNKFIEYGEYKNNYYGTSIDSVRSVLAKNKVCLLDVQPHGPWFLLPLMAVPWGAKPPNARMTCGSPLDL

SEQ ID NO: 53187 - protein, 576 aa, Homo sapiens; identical to SEQ ID NO: 53182

SEQ ID NO: 53188 - protein, 289 aa, Homo sapiens
MLGWCEAIARNPHRIPNNTRTPEISGDLADASQTSTLNEKSPGRSASRSSNISKASSPTTGTAPRSQSRLSVCPSTQDICRICHCEGDEESPLITPCRCTGTLRFVHQSCLHQWIKSSDTRCCELCKYDFIMETKLKPLRKWEKLQMTTSERRKIFCSVTFHVIAITCVVWSLYVLIDRTAEEIKQGNDNGVLEWPFWTKLVVVAIGFTGGLVFMYVQCKVYVQLWRRLKAYNRVIFVQNCPDTAKKLEKNFSCNVNTDIKDAVVVPVPQTGANSLPSAEGGPPEVVSV

SEQ ID NO: 53189 - protein, 272 aa, Homo sapiens
MTSSHVCCNFLNMWKKSKISTMYYLNQDAKLSNLFLQASSPTTGTAPRSQSRLSVCPSTQDICRICHCEGDEESPLITPCRCTGTLRFVHQSCLHQWIKSSDTRCCELCKYDFIMETKLKPLRKWEKLQMTTSERRKIFCSVTFHVIAITCVVWSLYVLIDRTAEEIKQGNDNGVLEWPFWTKLVVVAIGFTGGLVFMYVQCKVYVQLWRRLKAYNRVIFVQNCPDTAKKLEKNFSCNVNTDIKDAVVVPVPQTGANSLPSAEGGPPEVVSV

SEQ ID NO: 53190 - protein, 289 aa, Homo sapiens; identical to SEQ ID NO: 53188

SEQ ID NO: 53191 - protein, 141 aa, Homo sapiens
MLGWCEAIARNPHRIPNNTRTPEISGDLADASQTSTLNEKSPGRSASRSSNISKASSPTTGTAPRSQSRLSVCPSTQDICRICHCEGDEESPLITPCRCTGTLRFVHQSCLHQWIKSSDTRCCELCKYDFIMETKLKPLRK

SEQ ID NO: 53192 - protein, 808 aa, Homo sapiens
MLHDARDRQKFFSDVQYLRDMQHKVDSEYQACLRRQEYRRDPNEKKRDQFWGQETSFERSRFSSRSSSKQSSSEEDALTEPRSSIKISAFKCDSKLPAIDQTSVKQKHKSTMTVRKAEKVDPSEPSPADQAPMVLLRKRKPNLRRFTVSPESHSPRASGDRSRQKQQWPAKVPVPRGADQVVQQEGLMCNTKLKRPNQERRNLVPSSQPMTENAPDRAKKGDPSAPSQSELHPALSQAFQGKNSPQVLSEFSGPPLTPTTVGGPRKASFRFRDEDFYSILSLNSRRESDDTEEETQSEECLWVGVRSPCSPSHHKRSRFGGTSTPQAKNKNFEENAENCRGHSSRRSEPSHGSLRISNAMEPATERPSAGQRLSQDPGLPDRESATEKDRGGSENAKKSPLSWDTKSEPRQEVGVNAENVWSDCISVEHRPGTHDSEGYWKDYLNSSQNSLDYFISGRPISPRSSVNSSYNPPASFMHSALRDDIPVDLSMSSTSVHSSDSEGNSGFHVCQPLSPIRNRTPFASAENHNYFPVNSAHEFAVREAEDTTLTSQPQGAPLYTDLLLNPQGNLSLVDSSSSSPSRMNSEGHLHVSGSLQENTPFTFFAVSHFPNQNDNGSRMAASGFTDEKETSKIKADPEKLKKLQESLLEEDSEEEGDLCRICQIAGGSPSNPLLEPCGCVGSLQFVHQECLKKWLKVKITSGADLGAVKTCEMCKQGLLVDLGDFNMIEFYQKHQQSQAQNELMNSGLYLVLLLHLYEQRFAELMRLNHNQVERERLSRNYPQPRTEENENSELGDGNEGSISQSQVV

SEQ ID NO: 53193 - protein, 808 aa, Homo sapiens; identical to SEQ ID NO: 53192

SEQ ID NO: 53194 - protein, 799 aa, Homo sapiens
MLHDARDRQKFFSDVQYLRDMQHKVDSEYQACLRRQEYRRDPNEKKRDQFWGQETSFERSRFSSRSSSKQSSSEEDALTEPRSSIKISAFKCDSKLPAIDQTSVKQKHKSTMTVRKAEKVDPSEPSPDQAPMVLLRKRKPNLRRFTVSPESHSPRASGDRSRQKQQWPAKVPVPRGADQVVQQEGLMCNTKLKRPNQERRNLVPSSQPMTENAPDRAKKGDPSAPSQSELHPALSQAFQGKNSPQVLSEFSGPPLTPTTVGGPRKASFRFRDEDFYSILSLNSRRESDDTEEETQSEECLWVGVRSPCSPSHHKRSRFGGTSTPQAKNKNFEENAENCRGHSSRRSEPSHGSLRISNAMEPATERPSAGQRLSQDPGLPDRESATEKDRGGSENAKKSPLSWDTKSEPRQEVGVNAENVWSDCISVEHRPGTHDSEGYWKDYLNSSQNSLDYFISGRPISPRSSVNSSYNPPASFMHSALRDDIPVDLSMSSTSVHSSDSEGNSGFHVCQPLSPIRNRTPFASAENHNYFPVNSAHEFAVREAEDTTLTSQPQGAPLYTDLLLNPQGNLSLVDSSSSSPSRMNSEGHLHVSGSLQENTPFTFFAVSHFPNQNDNGSRMAASGFTDEKETSKIKADPEKLKKLQESLLEEDSEEEGDLCRICQIAGGSPSNPLLEPCGCVGSLQFVHQECLKKWLKVKITSGADLGAVKTCEMCKQGLLVDLGDFNMIEFYQKHQQSQAQNELMNSGLYLVLLLHLYEQRFAELMRLNHNQVERERLSRNYPQPRTEENESRFWGPVLPF

SEQ ID NO: 53195 - protein, 402 aa, Homo sapiens
MSFEGGHGGSRCRGAESGDAEPPPQPPPPPPPTPPPGEPAPVPAAPRYLPPLPASPETPERAAGPSEPLGEVAPRCRGADELPPPPLPLQPAGQEVAAAGDSGEGPRRLPEAAAAKGGPGESEAGAGGERERRGAGDQPETRSVCSSRSSSSGGGDQRAGHQHQHHQPICKICFQGAEQGELLNPCRCDGSVRYTHQLCLLKWISERGSWTCELCCYRYHVIAIKMKQPCQWQSISITLVEKVQMIAVILGSLFLIASVTWLLWSAFSPYAVWQRKDILFQICYGMYGFMDLVCIGLIVHEGAAVYRVFKRWRAVNLHWDVLNYDKATDIEESSRGESSTSRTLWLPLTALRNRNLVHPTQLTSPRFQCGYVLLHLFNRMRPHEDLSEDNSSGEVVMRVTSV

SEQ ID NO: 53196 - protein, 246 aa, Homo sapiens
MTTGDCCHLPGSLCDCSGSPAFSKVVEATGLGPPQYVAQVTSRDGRLLSTVIRALDTPSDGPFCRICHEGANGECLLSPCGCTGTLGAVHKSCLEKWLSSSNTSYCELCHTEFAVEKRPRPLTEWLKDPGPRTEKRTLCCDMVCFLFITPLAAISGWLCLRGAQDHLRLHSQLEAVGLIALTIALFTIYVLWTLVSFRYHCQLYSEWRKTNQKVRLKIREADSPEGPQHSPLAAGLLKKVAEETPV

SEQ ID NO: 53197 - protein, 176 aa, Homo sapiens
MTTGDCCHLPGSLCDCSGSPAFSKVVEATGLGPPQYVAQVTSRDGRLLSTVIRALDTPSDGPFCRICHEGANGECLLSPCGCTGTLGAVHKSCLEKWLSSSNTSYCELCHTEFAVEKRPRPLTEVSFRYHCQLYSEWRKTNQKVRLKIREADSPEGPQHSPLAAGLLKKVAEETPV

SEQ ID NO: 53198 - protein, 246 aa, Homo sapiens; identical to SEQ ID NO: 53196

SEQ ID NO: 53199 - protein, 253 aa, Homo sapiens
MTTSRCSHLPEVLPDCTSSAAPVVKTVEDCGSLVNGQPQYVMQVSAKDGQLLSTVVRTLATQSPFNDRPMCRICHEGSSQEDLLSPCECTGTLGTIHRSCLEHWLSSSNTSYCELCHFRFAVERKPRPLVEWLRNPGPQHEKRTLFGDMVCFLFITPLATISGWLCLRGAVDHLHFSSRLEAVGLIALTVALFTIYLFWTLVSFRYHCRLYNEWRRTNQRVILLIPKSVNVPSNQPSLLGLHSVKRNSKETVV

SEQ ID NO: 53200 - protein, 410 aa, Homo sapiens
MLMPLCGLLWWWWCCCSGWYCYGLCAPAPQMLRHQGLLKCRCRMLFNDLKVFLLRRPPQAPLPMHGDPQPPGLAANNTLPALGAGGWAGWRGPREVVGREPPPVPPPPPLPPSSVEDDWGGPATEPPASLLSSASSDDFCKEKTEDRYSLGSSLDSGMRTPLCRICFQGPEQGELLSPCRCDGSVKCTHQPCLIKWISERGCWSCELCYYKYHVIAISTKNPLQWQAISLTVIEKVQVAAAILGSLFLIASISWLIWSTFSPSARWQRQDLLFQICYGMYGFMDVVCIGLIIHEGPSVYRIFKRWQAVNQQWKVLNYDKTKDLEDQKAGGRTNPRTSSSTQANIPSSEEETAGTPAPEQGPAQAAGHPSGPLSHHHCAYTILHILSHLRPHEQRSPPGSSRELVMRVTTV

SEQ ID NO: 53201 - protein, 278 aa, Homo sapiens
MPDQALQQMLDRSCWVCFATDEDDRTAEWVRPCRCRGSTKWVHQACLQRWVDEKQRGNSTARVACPQCNAEYLIVFPKLGPVVYVLDLADRLISKACPFAAAGIMVGSIYWTAVTYGAVTVMQVVGHKEGLDVMERADPLFLLIGLPTIPVMLILGKMIRWEDYVLRLWRKYSNKLQILNSIFPGIGCPVPRIPAEANPLADHVSATRILCGALVFPTIATIVGKLMFSSVNSNLQRTILGGIAFVAIKGAFKVYFKQQQYLRQAHRKILNYPEQEEA

SEQ ID NO: 53202 - protein, 910 aa, Homo sapiens
MDTAEEDICRVCRSEGTPEKPLYHPCVCTGSIKFIHQECLVQWLKHSRKEYCELCKHRFAFTPIYSPDMPSRLPIQDIFAGLVTSIGTAIRYWFHYTLVAFAWLGVVPLTACRIYKCLFTGSVSSLLTLPLDMLSTENLLADCLQGCFVVTCTLCAFISLVWLREQIVHGGAPIWLEHAAPPFNAAGHHQNEAPAGGNGAENVAADQPANPPAENAVVGENPDAQDDQAEEEEEDNEEEDDAGVEDAADANNGAQDDMNWNALEWDRAAEELTWERMLGLDGSLVFLEHVFWVVSLNTLFILVFAFCPYHIGHFSLVGLGFEEHVQASHFEGLITTIVGYILLAITLIICHGLATLVKFHRSRRLLGVCYIVVKVSLLVVVEIGVFPLICGWWLDICSLEMFDATLKDRELSFQSAPGTTMFLHWLVGMVYVFYFASFILLLREVLRPGVLWFLRNLNDPDFNPVQEMIHLPIYRHLRRFILSVIVFGSIVLLMLWLPIRIIKSVLPNFLPYNVMLYSDAPVSELSLELLLLQVVLPALLEQGHTRQWLKGLVRAWTVTAGYLLDLHSYLLGDQEENENSANQQVNNNQHARNNNAIPVVGEGLHAAHQAILQQGGPVGFQPYRRPLNFPLRIFLLIVFMCITLLIASLICLTLPVFAGRWLMSFWTGTAKIHELYTAACGLYVCWLTIRAVTVMVAWMPQGRRVIFQKVKEWSLMIMKTLIVAVLLAGVVPLLLGLLFELVIVAPLRVPLDQTPLFYPWQDWALGVLHAKIIAAITLMGPQWWLKTVIEQVYANGIRNIDLHYIVRKLAAPVISVLLLSLCVPYVIASGVVPLLGVTAEMQNLVHRRIYPFLLMVVVLMAILSFQVRQFKRLYEHIKNDKYLVGQRLVNYERKSGKQGSSPPPPQSSQE

SEQ ID NO: 53203 - protein, 704 aa, Homo sapiens
MESKPSRIPRRISVQPSSSLSARMMSGSRGSSLNDTYHSRDSSFRLDSEYQSTSASASASPFQSAWYSESEITQGARSRSQNQQRDHDSKRPKLSCTNCTTSAGRNVGNGLNTLSDSSWRHSQVPRSSSMVLGSFGTDLMRERRDLERRTDSSISNLMDYSHRSGDFTTSSYVQDRVPSYSQGARPKENSMSTLQLNTSSTNHQLPSEHQTILSSRDSRNSLRSNFSSRESESSRSNTQPGFSYSSSRDEAPIISNSERVVSSQRPFQESSDNEGRRTTRRLLSRIASSMSSTFFSRRSSQDSLNTRSLNSENSYVSPRILTASQSRSNVPSASEVPDNRASEASQGFRFLRRRWGLSSLSHNHSSESDSENFNQESEGRNTGPWLSSSLRNRCTPLFSRRRREGRDESSRIPTSDTSSRSHIFRRESNEVVHLEAQNDPLGAAANRPQASAASSSATTGGSTSDSAQGGRNTGISGILPGSLFRFAVPPALGSNLTDNVMITVDIIPSGWNSADGKSDKTKSAPSRDPERLQKIKESLLLEDSEEEEGDLCRICQMAAASSSNLLIEPCKCTGSLQYVHQDCMKKWLQAKINSGSSLEAVTTCELCKEKLELNLEDFDIHELHRAHANEQAEYEFISSGLYLVVLLHLCEQSFSDMMGNTNEPSTRVRFINLARTLQAHMEDLETSEDDSEEDGDHNRTFDIA

SEQ ID NO: 53204 - protein, 704 aa, Homo sapiens; identical to SEQ ID NO: 53203

SEQ ID NO: 53205 - protein, 101 aa, Homo sapiens
MESKPSRIPRRISVQPSSSLSARMMSGSRGSSLNDTYHSRDSSFRLDSEYQSTSASASASPFQSAWYSESEITQGARSRSQNQQRDHDSKRPKLSCTNCTT

SEQ ID NO: 53206 - protein, 635 aa, Homo sapiens
MESKPSRIPRRISVQPSSSLSARMMSGSRGSSLNDTYHSRDSSFRLDSEYQSTSASASASPFQSAWYSESEITQGARSRSQNQQRDHDSKRPKLSCTNCTTSAGRNVGNGLNTLSDVQDRVPSYSQGARPKENSMSTLQLNTSSTNHQLPSEHQTILSSRDSRNSLRSNFSSRESESSRSNTQPGFSYSSSRDEAPIISNSERVVSSQRPFQESSDNEGRRTTRRLLSRIASSMSSTFFSRRSSQDSLNTRSLNSENSYVSPRILTASQSRSNVPSASEVPDNRASEASQGFRFLRRRWGLSSLSHNHSSESDSENFNQESEGRNTGPWLSSSLRNRCTPLFSRRRREGRDESSRIPTSDTSSRSHIFRRESNEVVHLEAQNDPLGAAANRPQASAASSSATTGGSTSDSAQGGRNTGISGILPGSLFRFAVPPALGSNLTDNVMITVDIIPSGWNSADGKSDKTKSAPSRDPERLQKIKESLLLEDSEEEEGDLCRICQMAAASSSNLLIEPCKCTGSLQYVHQDCMKKWLQAKINSGSSLEAVTTCELCKEKLELNLEDFDIHELHRAHANEQAEYEFISSGLYLVVLLHLCEQSFSDMMGNTNEPSTRVRLQRMIPKKTETITGHLILPNFI

SEQ ID NO: 53207 - protein, 291 aa, Homo sapiens
MSMPLHQISAIPSQDAISARVYRSKTKEKEREEQNEKTLGHFMSHSSNISKAGSPPSASAPAPVSSFSRTSITPSSQDICRICHCEGDDESPLITPCHCTGSLHFVHQACLQQWIKSSDTRCCELCKYEFIMETKLKPLRKWEKLQMTSSERRKIMCSVTFHVIAITCVVWSLYVLIDRTAEEIKQGQATGILEWPFWTKLVVVAIGFTGGLLFMYVQCKVYVQLWKRLKAYNRVIYVQNCPETSKKNIFEKSPLTEPNFENKHGYGICHSDTNSSCCTEPEDTGAEIIHV

SEQ ID NO: 53208 - protein, 291 aa, Homo sapiens; identical to SEQ ID NO: 53207

SEQ ID NO: 53209 - protein, 291 aa, Homo sapiens; identical to SEQ ID NO: 53207

SEQ ID NO: 53210 - protein, 456 aa, Homo sapiens
  VARIANT 1: note = MOD_RES - Any amino acid
XICKDTLQASKRNSFGSEWAQALKPAKNTKARRTLKFSRSLNDVGEKAQDTSESFAYVERTCSEGKLILPQDTCLRTNRFHHKEKRTLNHKPLGNSKHSCVSCLSAGRSTASEVEAGKGGRPGLLLEEKADGEATSRSRQLLQYLFSLSHGLSASSLHRFHELESCAARLHTAKSSSGLAGSMGFCSDEMGDDDVFEDSTSAKLKSRVLRAPLCSTEKDSDLDCPSPFSEKLPPISPVSTSGDVCRICHCEGDDESPLITPCHCTGSLHFVHQACLQQWIKSSDTRCCELCKYEFIMETKLKPLRKWEKLQMTSSERRKIMCSVTFHVIAITCVVWSLYVLIDRTAEEIKQGQATGILEWPFWTKLVVVAIGFTGGLLFMYVQCKVYVQLWKRLKAYNRVIYVQNCPETSKKNIFEKSPLTEPNFENKHGYGICHSDTNSSCCTEPEDTGAEIIHV

SEQ ID NO: 53211 - protein, 89 aa, Homo sapiens
MSMPLHQISAIPSQDAISARVYRSKTKEKEREEQNEKTLGHFMSHSSNISKAGSPPSASAPAPVSSFSRTSITPSSQDICRICHCEGDD

SEQ ID NO: 53212 - protein, 346 aa, Homo sapiens
MLKSRLRMFLNELKLLVLTGGGRPRAEPQPRGGRGGGCGWAPFAGCSTRDGDGDEEEYYGSEPRARGLAGDKEPRAGPLPPPAPPLPPPGALDALSLSSSLDSGLRTPQCRICFQGPEQGELLSPCRCDGSVRCTHQPCLIRWISERGSWSCELCYFKYQVLAISTKNPLQWQAISLTVIEKVQIAAIVLGSLFLVASISWLIWSSLSPSAKWQRQDLLFQICYGMYGFMDVVCIGLIIHEGSSVYRIFKRWQAVNQQWKVLNYDKTKDIGGDAGGGTAGKSGPRNSRTGPTSGATSRPPAAQRMRTLLPQRCGYTILHLLGQLRPPDARSSSHSGREVVMRVTTV

SEQ ID NO: 53213 - protein, 233 aa, Homo sapiens
MVSDKCHILDLIKAQRRQMLILPEGFREGSWSTLLFRATHHLALHPFLGLFGALSPTQWQAISLTVIEKVQIAAIVLGSLFLVASISWLIWSSLSPSAKWQRQDLLFQICYGMYGFMDVVCIGLIIHEGSSVYRIFKRWQAVNQQWKVLNYDKTKDIGGDAGGGTAGKSGPRNSRTGPTSGATSRPPAAQRMRTLLPQRCGYTILHLLGQLRPPDARSSSHSGREVVMRVTTV

SEQ ID NO: 53214 - protein, 1052 aa, Homo sapiens
MKLVNIWLLLLVVLLCGKKHLGDRLEKKSFEKAPCPGCSHLTLKVEFSSTVVEYEYIVAFNGYFTAKARNSFISSALKSSEVDNWRIIPRNNPSSDYPSDFEVIQIKEKQKAGLLTLEDHPNIKRVTPQRKVFRSLKYAESDPTVPCNETRWSQKWQSSRPLRRASLSLGSGFWHATGRHSSRRLLRAIPRQVAQTLQADVLWQMGYTGANVRVAVFDTGLSEKHPHFKNVKERTNWTNERTLDDGLGHGTFVAGVIASMRECQGFAPDAELHIFRVFTNNQVSYTSWFLDAFNYAILKKIDVLNLSIGGPDFMDHPFVDKVWELTANNVIMVSAIGNDGPLYGTLNNPADQMDVIGVGGIDFEDNIARFSSRGMTTWELPGGYGRMKPDIVTYGAGVRGSGVKGGCRALSGTSVASPVVAGAVTLLVSTVQKRELVNPASMKQALIASARRLPGVNMFEQGHGKLDLLRAYQILNSYKPQASLSPSYIDLTECPYMWPYCSQPIYYGGMPTVVNVTILNGMGVTGRIVDKPDWQPYLPQNGDNIEVAFSYSSVLWPWSGYLAISISVTKKAASWEGIAQGHVMITVASPAETESKNGAEQTSTVKLPIKVKIIPTPPRSKRVLWDQYHNLRYPPGYFPRDNLRMKNDPLDWNGDHIHTNFRDMYQHLRSMGYFVEVLGAPFTCFDASQYGTLLMVDSEEEYFPEEIAKLRRDVDNGLSLVIFSDWYNTSVMRKVKFYDENTRQWWMPDTGGANIPALNELLSVWNMGFSDGLYEGEFTLANHDMYYASGCSIAKFPEDGVVITQTFKDQGLEVLKQETAVVENVPILGLYQIPAEGGGRIVLYGDSNCLDDSHRQKDCFWLLDALLQYTSYGVTPPSLSHSGNRQRPPSGAGSVTPERMEGNHLHRYSKVLEAHLGDPKPRPLPACPRLSWAKPQPLNETAPSNLWKHQKLLSIDLDKVVLPNFRSNRPQVRPLSPGESGAWDIPGGIMPGRYNQEVGQTIPVFAFLGAMVVLAFFVVQINKAKSRPKRRKPRVKRPQLMQQVHPPKTPSV

SEQ ID NO: 53215 - protein, 497 aa, Homo sapiens
MALVGLPGHLHFCDQESGFLGRHCSGPCHDHCGFPSRDRVKKWCRTDFNSKLPIKVKIIPTPPRSKRVLWDQYHNLRYPPGYFPRDNLRMKNDPLDWNGDHIHTNFRDMYQHLRSMGYFVEVLGAPFTCFDASQYGTLLMVDSEEEYFPEEIAKLRRDVDNGLSLVIFSDWYNTSVMRKVKFYDENTRQWWMPDTGGANIPALNELLSVWNMGFSDGLYEGEFTLANHDMYYASGCSIAKFPEDGVVITQTFKDQGLEVLKQETAVVENVPILGLYQIPAEGGGRIVLYGDSNCLDDSHRQKDCFWLLDALLQYTSYGVTPPSLSHSGNRQRPPSGAGSVTPERMEGNHLHRYSKVLEAHLGDPKPRPLPACPRLSWAKPQPLNETAPSNLWKHQKLLSIDLDKVVLPNFRSNRPQVRPLSPGESGAWDIPGGIMPGRYNQEVGQTIPVFAFLGAMVVLAFFVVQINKAKSRPKRRKPRVKRPQLMQQVHPPKTPSV

SEQ ID NO: 53216 - protein, 330 aa, Homo sapiens
MIPVSLVVVVVGGWTVVYLTDLVLKSSVYFKHSYEDWLENNGLSISPFHIRWQTAVFNRAFYSWGRRKARMLYQWFNFGMVFGVIAMFSSFFLLGKTLMQTLAQMMADSPSSYSSSSSSSSSSSSSSSSSSSSSSSLHNEQVLQVVVPGINLPVNQLTYFFTAVLISGVVHEIGHGIAAIREQVRFNGFGIFLFIIYPGAFVDLFTTHLQLISPVQQLRIFCAGIWHNFVLALLGILALVLLPVILLPFYYTGVGVLITEVAEDSPAIGPRGLFVGDLVTHLQDCPVTNVQDWNECLDTIAYEPQIGYCISASTLQQLSFPVRGVYISSI

SEQ ID NO: 53217 - protein, 519 aa, Homo sapiens
MIPVSLVVVVVGGWTVVYLTDLVLKSSVYFKHSYEDWLENNGLSISPFHIRWQTAVFNRAFYSWGRRKARMLYQWFNFGMVFGVIAMFSSFFLLGKTLMQTLAQMMADSPSSYSSSSSSSSSSSSSSSSSSSSSSSLHNEQVLQVVVPGINLPVNQLTYFFTAVLISGVVHEIGHGIAAIREQVRFNGFGIFLFIIYPGAFVDLFTTHLQLISPVQQLRIFCAGIWHNFVLALLGILALVLLPVILLPFYYTGVGVLITEVAEDSPAIGPRGLFVGDLVTHLQDCPVTNVQDWNECLDTIAYEPQIGYCISASTLQQLSFPVRAYKRLDGSTECCNNHSLTDVCFSYRNNFNKRLHTCLPARKAVEATQVCRTNKDCKKSSSSSFCIIPSLETHTRLIKVKHPPQIDMLYVGHPLHLHYTVSITSFIPRFNFLSIDLPVVVETFVKYLISLSGALAIVNAVPCFALDGQWILNSFLDATLTSVIGDNDVKDLIGFFILLGGSVLLAANVTLGLWMVTAR

SEQ ID NO: 53218 - protein, 68 aa, Homo sapiens
MHQTYSRHCRPEERWSQEGWNIPANGFNICRCLNIGMKLRLWNNLNKSNILGALKIKRREIRAPFLLP

SEQ ID NO: 53219 - protein, 253 aa, Homo sapiens
MVLLKLLEVYRKGSAGTFHKSTIFGNTIMTSQPVPNETIIVLPSNVINFSQAEKPEPTNQGQDSLKKHLHAEIKVIGTIQILCGMMVLSLGIILASASFSPNFTQVTSTLLNSAYPFIGPFFFIISGSLSIATEKRLTKLLVHSSLVGSILSALSALVGFIILSVKQATLNPASLQCELDKNNIPTRSYVSYFYHDSLYTTDCYTAKASLAGTLSLMLICTLLEFCLAVLTAVLRWKQAYSDFPGVSVLAGFT

SEQ ID NO: 53220 - protein, 267 aa, Homo sapiens
MKAEATVIPSRCARGLPSWQVLSPVQPWQTSAPQNTTQPKLLAPHQHEKSQKKSSLLKELGAFHITIALLHLVFGGYLASIVKNLHLVVLKSWYPFWGAASFLISGILAITMKTFSKTYLKMLCLMTNLISLFCVLSGLFVISKDLFLESPFESPIWRMYPNSTVHIQRLELALLCFTVLELFLPVPTAVTAWRGDCPSAKNDDACLVPNTPLHLKGLPVEPPPSYQSVIQGDAQHKQHQRLREVKQVAPDTWIVTDGAAIWTQTAN

SEQ ID NO: 53221 - protein, 267 aa, Homo sapiens
MMSSKPTSHAEVNETIPNPYPPSSFMAPGFQQPLGSINLENQAQGAQRAQPYGITSPGIFASSQPGQGNIQMINPSVGTAVMNFKEEAKALGVIQIMVGLMHIGFGIVLCLISFSFREVLGFASTAVIGGYPFWGGLSFIISGSLSVSASKELSRCLVKGSLGMNIVSSILAFIGVILLLVDMCINGVAGQDYWAVLSGKGISATLMIFSLLEFFVACATAHFANQANTTTNMSVLVIPNMYESNPVTPASSSAPPRCNNYSANAPK

SEQ ID NO: 53222 - protein, 114 aa, Homo sapiens
MMSSKPTSHAEVNETIPNPYPPSSFMAPGFQQPLGSINLENQAQGAQRAQPYGITSPGIFASSQPGQGNIQMINPSVGTAVMNFKEEAKALGVIQIMVGLMHIGFGIVLCLISF

SEQ ID NO: 53223 - protein, 221 aa, Homo sapiens
MMSSKPTSHAEVNETIPNPYPPSSFMAPGFQQPLGSINLENQAQGAQRAQPYGITSPGIFASSQPGQGNIQMINPSVGTAVMNFKEEAKALGFIISGSLSVSASKELSRCLVKGSLGMNIVSSILAFIGVILLLVDMCINGVAGQDYWAVLSGKGISATLMIFSLLEFFVACATAHFANQANTTTNMSVLVIPNMYESNPVTPASSSAPPRCNNYSANAPK

SEQ ID NO: 53224 - protein, 323 aa, Homo sapiens
MTEQVIGANSVPGIIAPDNVHVIQPSNPVASGNHLQPSEVTTYPISPKVIHCDTGRANLQNLLVVNQNSAAGVQSQPIGYQRQYPVGTASLQTVPGVIQYTQGTTNLQTWPGDLQNPLNANPGLTHTSNSSQWNTSFASFTSFNPKKFINEEVRTLGAIQILIGLTHIFSAINPVLYYYPFVTWLSGYPLWGGLSYIVSGSLSVWAAKDPSPCVVNSSISFNIISALFAFAGIFIIITDLSLYYVTTYSKAVSGGLLPFALLEFILTCVVSHFGCQATCCRQFENVAVIPTVFSFNPANTTTSPVNATTGPVNAATGPVSATN

SEQ ID NO: 53225 - protein, 244 aa, Homo sapiens
MDTESNRRANLALPQEPSSVPAFEVLEISPQEVSSGRLLKSASSPPLHTWLTVLKKEQEFLGVTQILTAMICLCFGTVVCSVLDISHIEGDIFSSFKAGYPFWGAIFFSISGMLSIISERRNATYLVRGSLGANTASSIAGGTGITILIINLKKSLAYIHIHSCQKFFETKCFMASFSTEIVVMMLFLTILGLGSAVSLTICGAGEELKGNKVPEDRVYEELNIYSATYSELEDPGEMSPPIDL

SEQ ID NO: 53226 - protein, 41 aa, Homo sapiens
MDTESNRRANLALPQEPSSVPAFEVLEISPQEVSSGRLLKS

SEQ ID NO: 53227 - protein, 214 aa, Homo sapiens
MASHEVDNAELGSASAHGTPGSEAGPEELNTSVYQPIDGSPDYQKAKLQVLGAIQILNAAMILALGVFLGSLQYPYHFQKHFFFFTFYTGYPIWGAVFFCSSGTLSVVAGIKPTRTWIQNSFGMNIASATIALVGTAFLSLNIAVNIQSLRSCHSSSESPDLCNYMGSISNGMVSLLLILTLLELCVTISTIAMWCNANCCNSREEISSPPNSV

SEQ ID NO: 53228 - protein, 168 aa, Homo sapiens
MASHEVDNAELGSASAHGTPGSEAGPEELNTSVYQPIDGSPDYQKAKLQVLGFCSSGTLSVVAGIKPTRTWIQNSFGMNIASATIALVGTAFLSLNIAVNIQSLRSCHSSSESPDLCNYMGSISNGMVSLLLILTLLELCVTISTIAMWCNANCCNSREEISSPPNSV

SEQ ID NO: 53229 - protein, 91 aa, Homo sapiens
MNIASATIALVGTAFLSLNIAVNIQSLRSCHSSSESPDLCNYMGSISNGMVSLLLILTLLELCVTISTIAMWCNANCCNSREEISSPPNSV

SEQ ID NO: 53230 - protein, 168 aa, Homo sapiens; identical to SEQ ID NO: 53228

SEQ ID NO: 53231 - protein, 239 aa, Homo sapiens [sequence omitted]

SEQ ID NO: 53232 - protein, 220 aa, Homo sapiens
MTTMQGMEQAMPGAGPGVPQLGNMAVIHSHLWKGLQEKFLKGEPKVLGVVQILTALMSLSMGITMMCMASNTYGSNPISVYIGYTIWGSVMFIISGSLSIAAGIRTTKGLVRGSLGMNITSSVLAASGILINTFSLAFYSFHHPYCNYYGNSNNCHGTMSILMGLDGMVLLLSVLEFCIAVSLSAFGCKVLCCTPGGVVLILPSHSHMAETASPTPLNEV

SEQ ID NO: 53233 - protein, 220 aa, Homo sapiens; identical to SEQ ID NO: 53232

SEQ ID NO: 53234 - protein, 186 aa, Homo sapiens
MHQTYSRHCRPEESTFSAAMTTMQGMEQAMPGAGPGVPQLGNMAVIHSHLWKGLQEKFLKGEPKVLGVVQILTALMSLSMGITMMCMASNTYGSNPISVYIGYTIWGSVMFIISGSLSIAAGIRTTKGLGLDGMVLLLSVLEFCIAVSLSAFGCKVLCCTPGGVVLILPSHSHMAETASPTPLNEV

SEQ ID NO: 53235 - protein, 132 aa, Homo sapiens
MTTMQGMEQTTPGAGPDVPQLGNIDVIHSYLCKGLQEKFFKRKPKVLGVVRILIALMSLSMGIIMMCVAFSSYEEHPIFVYVAYTIWGSVMYPYQLQQELEQQKVWNYLKNLSWRIMGSYLCFGERSELKPL

SEQ ID NO: 53236 - protein, 110 aa, Homo sapiens
MTTMQGMEQTTPGAGPDVPQLGNIDVIHSYLCKGLQEKFFKRKPKVLGVLCGHKFSTHSVSLSVAAGIRTTKGLELSEEFKLENNGIIFVFWREIRVETTIRRQVRRLLK

SEQ ID NO: 53237 - protein, 204 aa, Homo sapiens
MSYIHICVKDCKRSSSRGNPKSLGFCVDISFQLIRVVRILIALMSLSMGIIMMCVAFSSYEEHPIFVYVAYTIWGSVMYPYQLQQELEQQKVCIYRVLNGAQAGVQWRDLGSLQPPPPSRLPWPPKVPRVQPLPGRHPVWEVRSVSAWPPIVWDVRSPSAWLPSLESEERLCPAAIPSRKWGAPLPGHHPIWEVRSVSARPPIF

SEQ ID NO: 53238 - protein, 132 aa, Homo sapiens; identical to SEQ ID NO: 53235

SEQ ID NO: 53239 - protein, 200 aa, Homo sapiens
MDSSTAHSPVFLVFPPEITASEYESTELSATTFSTQSPLQKLFARKMKILGTIQILFGIMTFSFGVIFLFTLLKPYPRFPFIFLSGYPFWGSVLFINSGAFLIAVKRKTTETLIILSRIMNFLSALGAIAGIILLTFGFILDQNYICGYSHQNSQCKAVTVLFLGILITLMTFSIIELFISLPFSILGCHSEDCDCEQCC

SEQ ID NO: 53240 - protein, 248 aa, Homo sapiens
MTSQPVPNETIIVLPSNVINFSQAEKPEPTNQGQDSLKKHLHAEIKVIGTIQILCGMMVLSLGIILASASFSPNFTQVTSTLLNSAYPFIGPFFFIISGSLSIATEKRLTKLLVHSSLVGSILSALSALVGFIILSVKQATLNPASLQCELDKNNIPTRSYVSYFYHDSLYTTDCYTAKASLAGTLSLMLICTLLEFCLAVLTAVLRWKQAYSDFPGSVLFLPHSYIGNSGMSSKMTHDCGYEELLTS

SEQ ID NO: 53241 - protein, 178 aa, Homo sapiens
MTSQPVPNETIIVLPSNVINFSQAEKPEPTNQGQDSLKKHLHAEIKVIGTIQILCGMMVLSLGIILASASFSPNFTQVTSTLLNSAYPFIGPFFFIISGSLSIATEKRLTKLLVHSSLVGSILSALSALVGFIILSVKQATLNPASLQWNSLSDADLHSAGILPSCAHCCAAVETGLL

SEQ ID NO: 53242 - protein, 180 aa, Homo sapiens
MTSQPVPNETIIVLPSNVINFSQAEKPEPTNQGQDSLKKHLHAEIKVIGFIISGSLSIATEKRLTKLLVHSSLVGSILSALSALVGFIILSVKQATLNPASLQCELDKNNIPTRSYVSYFYHDSLYTTDCYTAKASLAGTLSLMLICTLLEFCLAVLTAVLRWKQAYSDFPGVSVLAGFT

SEQ ID NO: 53243 - protein, 225 aa, Homo sapiens
MTSQPVPNETIIVLPSNVINFSQAEKPEPTNQGQDSLKKHLHAEIKVIGTIQILCGMMVLSLGIILASASFSPNFTQVTSTLLNSAYPFIGPFFFIISGSLSIATEKRLTKLLVHSSLVGSILSALSALVGFIILSVKQATLNPASLQCELDKNNIPTRSYVSYFYHDSLYTTDCYTAKASLAGTLSLMLICTLLEFCLAVLTAVLRWKQAYSDFPGVSVLAGFT

SEQ ID NO: 53244 - protein, 276 aa, Homo sapiens
MVLLKLLEVYRKGSAGTFHKSTIFGNTIMTSQPVPNETIIVLPSNVINFSQAEKPEPTNQGQDSLKKHLHAEIKVIGTIQILCGMMVLSLGIILASASFSPNFTQVTSTLLNSAYPFIGPFFFIISGSLSIATEKRLTKLLVHSSLVGSILSALSALVGFIILSVKQATLNPASLQCELDKNNIPTRSYVSYFYHDSLYTTDCYTAKASLAGTLSLMLICTLLEFCLAVLTAVLRWKQAYSDFPGSVLFLPHSYIGNSGMSSKMTHDCGYEELLTS

SEQ ID NO: 53245 - protein, 248 aa, Homo sapiens; identical to SEQ ID NO: 53240

SEQ ID NO: 53246 - protein, 23 aa, Homo sapiens
MTSQPVPNETIIVLPSNVINFSQ

SEQ ID NO: 53247 - protein, 147 aa, Homo sapiens
MTSQPISNETIIMLPSNVINFSQAEKPEPTNQGQDSLKKRLQAKVKVIGVHSSLAGSILSALSALVGFILLSVNPAALNPASLQCKLDEKDIPTRLLLSYDYHSPYTMDCHRAKASLAGTLSLMLVSTVLEFCLAVLTAVLQWKQTV

SEQ ID NO: 53248 - protein, 240 aa, Homo sapiens
MLLQSQTMGVSHSFTPKGITIPQREKPGHMYQNEDYLQNGLPTETTVLGTVQILCCLLISSLGAILVFAPYPSHFNPAISTTLMSGYPFLGALCFGITGSLSIISGKQSTKPFDLSSLTSNAVSSVTAGAGLFLLADSMVALRTASQHCGSEMDYLSSLPYSEYYYPIYEIKDCLLTSVSLTGVLVVMLIFTVLELLLAAYSSVFWWKQLYSNNPGSSFSSTQSQDHIQQVKKSSSRSWI

SEQ ID NO: 53249 - protein, 195 aa, Homo sapiens
MLLQSQTMGVSHSFTPKGITIPQREKPGHMYQNEDYLQNGLPTETTVLGFGITGSLSIISGKQSTKPFDLSSLTSNAVSSVTAGAGLFLLADSMVALRTASQHCGSEMDYLSSLPYSEYYYPIYEIKDCLLTSVSLTGVLVVMLIFTVLELLLAAYSSVFWWKQLYSNNPGSSFSSTQSQDHIQQVKKSSSRSWI

SEQ ID NO: 53250 - protein, 169 aa, Homo sapiens
MLLQSQTMGVSHSFTPKGITIPQREKPGHMYQNEDYLQNGLPTETTVLGFGITGSLSIISGKQSTKPFDLSSLTSNAVSSVTAGAGLFLLADSMVALRTASQHCGSEMDYLSSLPYSEYYYPIYEIKDCLLTSVSLTGVLVVMLIFTVLELLLAAYSSVFWWKQLYSNN

SEQ ID NO: 53251 - protein, 195 aa, Homo sapiens; identical to SEQ ID NO: 53249

SEQ ID NO: 53252 - protein, 250 aa, Homo sapiens
MNSMTSAVPVANSVLVVAPHNGYPVTPGIMSHVPLYPNSQPQVHLVPGNPPSLVSNVNGQPVQKALKEGKTLGAIQIIIGLAHIGLGSIMATVLVGEYLSISFYGGFPFWGGLWFIISGSLSVAAENQPYSYCLLSGSLGLNIVSAICSAVGVILFITDLSIPHPYAYPDYYPYAWGVNPGMAISGVLLVFCLLEFGIACASSHFGCQLVCCQSSNVSVIYPNIYAANPVITPEPVTSPPSYSSEIQANK

SEQ ID NO: 53253 - protein, 849 aa, Homo sapiens
MVQKESQATLEERESELSSNPAASAGASLEPPAAPAPGEDNPAGAGGAAVAGAAGGARRFLCGVVEGFYGRPWVMEQRKELFRRLQKWELNTYLYAPKDDYKHRMFWREMYSVEEAEQLMTLISAAREYEIEFIYAISPGLDITFSNPKEVSTLKRKLDQVSQFGCRSFALLFDDIDHNMCAADKEVFSSFAHAQVSITNEIYQYLGEPETFLFCPTEYCGTFCYPNVSQSPYLRTVGEKLLPGIEVLWTGPKVVSKEIPVESIEEVSKIIKRAPVIWDNIHANDYDQKRLFLGPYKGRSTELIPRLKGVLTNPNCEFEANYVAIHTLATWYKSNMNGVRKDVVMSRQVAHSGAKASVVDGTPLVAAPSLNATTVVTTVYQEPIMSQGAALSGEPTTLTKEEEKKQPDEEPMDMVVEKQEETDHKNDNQILSEIVEAKMAEELKPMDTDKESIAESKSPEMSMQEDCISDIAPMQTDEQTNKEQFVPGPNEKPLYTAEPVTLEDLQLLADLFYLPYEHGPKGAQMLREFQWLRANSSVVSVNCKGKDSEKIEEWRSRAAKFEEMCGLVMGMFTRLSNCANRTILYDMYSYVWDIKSIMSMVKSFVQWLGCRSHSSAQFLIGDQEPWAFRGGLAGEFQPPPLTPTSKVYTIRPYFPKDEASVYKICREMYDDGVGLPFQSQPDLIGDKLVGGLLSLSLDYCFVLEDEDGICGYALGTVDVTPFIKKCKISWIPFMQEKYTKPNGDKELSEAEKIMLSFHEEQEVLPETFLANFPSLIKMDIHKKVTDPSVAKSMMACLLSSLKANGSRGAFCEVRPDDKRILEFYSKLGCFEIAKMEGFPKDVVILGRSL

SEQ ID NO: 53254 - protein, 916 aa, Homo sapiens
MVQKESQATLEERESELSSNPAASAGASLEPPAAPAPGEDNPAGAGGAAVAGAAGGARRFLCGVVEGFYGRPWVMEQRKELFRRLQKWELNTYLYAPKDDYKHRMFWREMYSVEEAEQLMTLISAAREYEIEFIYAISPGLDITFSNPKEVSTLKRKLDQVSQFGCRSFALLFDDIDHNMCAADKEVFSSFAHAQVSITNEIYQYLGEPETFLFCPTEYCGTFCYPNVSQSPYLRTVGEKLLPGIEVLWTGPKVVSKEIPVESIEEVSKIIKRAPVIWDNIHANDYDQKRLFLGPYKGRSTELIPRLKGVLTNPNCEFEANYVAIHTLATWYKSNMNGVRKDVVMTDSEDSTVSIQIKLENEGSDEDIETDVLYSPQMALKLALTEWLQEFGVPHQYSSRQVAHSGAKASVVDGTPLVAAPSLNATTVVTTVYQEPIMSQGAALSGEPTTLTKEEEKKQPDEEPMDMVVEKQEETDHKNDNQILSEIVEAKMAEELKPMDTDKESIAESKSPEMSMQEDCISDIAPMQTDEQTNKEQFVPGPNEKPLYTAEPVTLEDLQLLADLFYLPYEHGPKGAQMLREFQWLRANSSVVSVNCKGKDSEKIEEWRSRAAKFEEMCGLVMGMFTRLSNCANRTILYDMYSYVWDIKSIMSMVKSFVQWLGCRSHSSAQFLIGDQEPWAFRGGLAGEFQRLLPIDGANDLFFQPPPLTPTSKVYTIRPYFPKDEASVYKICREMYDDGVGLPFQSQPDLIGDKLVGGLLSLSLDYCFVLEDEDGICGYALGTVDVTPFIKKCKISWIPFMQEKYTKPNGDKELSEAEKIMLSFHEEQEVLPETFLANFPSLIKMDIHKKVTDPSVAKSMMACLLSSLKANGSRGAFCEVRPDDKRILEFYSKLGCFEIAKMEGFPKDVVILGRSL

SEQ ID NO: 53255 - protein, 677 aa, Homo sapiens
MVQKESQATLEERESELSSNPAASAGASLEPPAAPAPGEDNPAGAGGAAVAGAAGGARRFLCGVVEGFYGRPWVMEQRKELFRRLQKWELNTYLYAPKDDYKHRMFWREMYSVEEAEQLMTLISAAREYEIEFIYAISPGLDITFSNPKEVSTLKRKLDQVSQFGCRSFALLFDDIDHNMCAADKEVFSSFAHAQVSITNEIYQYLGEPETFLFCPTEYCGTFCYPNVSQSPYLRTVGEKLLPGIEVLWTGPKVVSKEIPVESIEEVSKIIKRAPVIWDNIHANDYDQKRLFLGPYKGRSTELIPRLKGVLTNPNCEFEANYVAIHTLATWYKSNMNGVRKDVVMTDSEDSTVSIQIKLENEGSDEDIETDVLYSPQMALKLALTEWLQEFGVPHQYSSRQVAHSGAKASVVDGTPLVAAPSLNATTVVTTVYQEPIMSQGAALSGEPTTLTKEEEKKQPDEEPMDMVVEKQEETDHKNDNQILSEIVEAKMAEELKPMDTDKESIAESKSPEMSMQEDCISDIAPMQTDEQTNKEQFVPGPNEKPLYTAEPVTLEDLQLLADLFYLPYEHGPKGAQMLREFQWLRANSSVVSVNCKGKDSEKIEEWRSRAAKFEEMCGLVMGMFTRLSNCANRTILYDMYSYVWDIKSIMSMVKSFVQWLGRCTRNNLFSSNILSL

SEQ ID NO: 53256 - protein, 151 aa, Homo sapiens
MVQKESQATLEERESELSSNPAASAGASLEPPAAPAPGEDNPAGAGGAAVAGAAGGARRFLCGVVEGFYGRPWVMEQRKELFRRLQKWELNTYLYAPKDDYKHRMFWREMYSVEEAGSFLFFYLVTIQLAEIERVLCASKVMTICVISWAC

SEQ ID NO: 53257 - protein, 256 aa, Homo sapiens
AAGGARRFLCGVVEGFYGRPWVMEQRKELFRRLQKWELNTYLYAPKDDYKHRMFWREMYSVEEAEQLMTLISAAREYEIEFIYAISPGLDITFSNPKEVSTLKRKLDQVSQFGCRSFALLFDDIDHNMCAADKEVFSSFAHAQVSITNEIYQYLGEPETFLFCPTGPKVVSKEIPVESIEEVSKIIKRAPVIWDNIHANDYDQKRLFLGPYKGRSTELIPRLKGVLTNPNCEFEANYVAIHTLATWYKSNMNGVRK

SEQ ID NO: 53258 - protein, 863 aa, Homo sapiens
MVQKESQATLEERESELSSNPAASAGASLEPPAAPAPGEDNPAGAGGAAVAGAAGGARRFLCGVVEGFYGRPWVMEQRKELFRRLQKWELNTYLYAPKDDYKHRMFWREMYSVEEAEQLMTLISAAREYEIEFIYAISPGLDITFSNPKEVSTLKRKLDQVSQFGCRSFALLFDDIDHNMCAADKEVFSSFAHAQVSITNEIYQYLGEPETFLFCPTEYCGTFCYPNVSQSPYLRTVGEKLLPGIEVLWTGPKVVSKEIPVESIEEVSKIIKRAPVIWDNIHANDYDQKRLFLGPYKGRSTELIPRLKGVLTNPNCEFEANYVAIHTLATWYKSNMNGVRKDVVMSRQVAHSGAKASVVDGTPLVAAPSLNATTVVTTVYQEPIMSQGAALSGEPTTLTKEEEKKQPDEEPMDMVVEKQEETDHKNDNQILSEIVEAKMAEELKPMDTDKESIAESKSPEMSMQEDCISDIAPMQTDEQTNKEQFVPGPNEKPLYTAEPVTLEDLQLLADLFYLPYEHGPKGAQMLREFQWLRANSSVVSVNCKGKDSEKIEEWRSRAAKFEEMCGLVMGMFTRLSNCANRTILYDMYSYVWDIKSIMSMVKSFVQWLGCRSHSSAQFLIGDQEPWAFRGGLAGEFQRLLPIDGANDLFFQPPPLTPTSKVYTIRPYFPKDEASVYKICREMYDDGVGLPFQSQPDLIGDKLVGGLLSLSLDYCFVLEDEDGICGYALGTVDVTPFIKKCKISWIPFMQEKYTKPNGDKELSEAEKIMLSFHEEQEVLPETFLANFPSLIKMDIHKKVTDPSVAKSMMACLLSSLKANGSRGAFCEVRPDDKRILEFYSKLGCFEIAKMEGFPKDVVILGRSL

SEQ ID NO: 53259 - protein, 746 aa, Homo sapiens
MAWIRSTCILFFTLLFAHIAAVPIKYLPEENVHDADFGEQKDISEINLAAGLDLFQGDILLQKSRNGLRDPNTRWTFPIPYILADNLGLNAKGAILYAFEMFRLKSCVDFKPYEGESSYIIFQQFDGCWSEVGDQHVGQNISIGQGCAYKAIIEHEILHALGFYHEQSRTDRDDYVNIWWDQILSGYQHNFDTYDDSLITDLNTPYDYESLMHYQPFSFNKNASVPTITAKIPEFNSIIGQRLDFSAIDLERLNRMYNCTTTHTLLDHCTFEKANICGMIQGTRDDTDWAHQDSAQAGEVDHTLLGQCTGAGYFMQFSTSSGSAEEAALLESRILYPKRKQQCLQFFYKMTGSPSDRLVVWVRRDDSTGNVRKLVKVQTFQGDDDHNWKIAHVVLKEEQKFRYLFQGTKGDPQNSTGGIYLDDITLTETPCPTGVWTVRNFSQVLENTSKGDKLQSPRFYNSEGYGFGVTLYPNSRESSGYLRLAFHVCSGENDAILEWPVENRQVIITILDQEPDVRNRMSSSMVFTTSKSHTSPAINDTVIWDRPSRVGTYHTDCNCFRSIDLGWSGFISHQMLKRRSFLKNDDLIIFVDFEDITHLSQTEVPTKGKRLSPQGLILQGQEQQVSEEGSGKAMLEEALPVSLSQGQPSRQKRSVENTGPLEDHNWPQYFRDPCDPNPCQNDGICVNVKGMASCRCISGHAFFYTGERCQAVQVHGSVLGMVIGGTAGVIFLTFSIIAILSQRPRK

SEQ ID NO: 53260 - protein, 701 aa, Homo sapiens
MDLWNLSWFLFLDALLVISGLATPENFDVDGGMDQDIFDINEGLGLDLFEGDIRLDRAQIRNSIIGEKYRWPHTIPYVLEDSLEMNAKGVILNAFERYRLKTCIDFKPWAGETNYISVFKGSGCWSSVGNRRVGKQELSIGANCDRIATVQHEFLHALGFWHEQSRSDRDDYVRIMWDRILSGREHNFNTYSDDISDSLNVPYDYTSVMHYSKTAFQNGTEPTIVTRISDFEDVIGQRMDFSDSDLLKLNQLYNCSSSLSFMDSCSFELENVCGMIQSSGDNADWQRVSQVPRGPESDHSNMGQCQGSGFFMHFDSSSVNVGATAVLESRTLYPKRGFQCLQFYLYNSGSESDQLNIYIREYSADNVDGNLTLVEEIKEIPTGSWQLYHVTLKVTKKFRVVFEGRKGSGASLGGLSIDDINLSETRCPHHIWHIRNFTQFIGSPNGTLYSPPFYSSKGYAFQIYLNLAHVTNAGIYFHLISGANDDQLQWPCPWQQATMTLLDQNPDIRQRMSNQRSITTDPFMTTDNGNYFWDRPSKVGTVALFSNGTQFRRGGGYGTSAFITHERLKSRDFIKGDDVYILLTVEDISHLNSTQIQLTPAPSVQDLCSKTTCKNDGVCTVRDGKAECRCQSGEDWWYMGERCEKRGSTRDTIVIAVSSTVAVFALMLIITLVSVYCTRKKYRERMSSNRPNLTPQNQHAF

SEQ ID NO: 53261 - protein, 297 aa, Homo sapiens
MASPQLCRALVSAQWVAEALRAPRAGQPLQLLDASWYLPKLGRDARREFEERHIPGAAFFDIDQCSDRTSPYDHMLPGAEHFAEYAGRLGVGAATHVVIYDASDQGLYSAPRVWWMFRAFGHHAVSLLDGGLRHWLRQNLPLSSGKSQPAPAEFRAQLDPAFIKTYEDIKENLESRRFQVVDSRATGRFRGTEPEPRDGIEPGHIPGTVNIPFTDFLSQEGLEKSPEEIRHLFQEKKVDLSKPLVATCGSGVTACHVALGAYLCGKPDVPIYDGSWVEWYMRARPEDVISEGRGKTH

SEQ ID NO: 53262 - protein, 317 aa, Homo sapiens
MAEPGSRESETRARSPSVAAMASPQLCRALVSAQWVAEALRAPRAGQPLQLLDASWYLPKLGRDARREFEERHIPGAAFFDIDQCSDRTSPYDHMLPGAEHFAEYAGRLGVGAATHVVIYDASDQGLYSAPRVWWMFRAFGHHAVSLLDGGLRHWLRQNLPLSSGKSQPAPAEFRAQLDPAFIKTYEDIKENLESRRFQVVDSRATGRFRGTEPEPRDGIEPGHIPGTVNIPFTDFLSQEGLEKSPEEIRHLFQEKKVDLSKPLVATCGSGVTACHVALGAYLCGKPDVPIYDGSWVEWYMRARPEDVISEGRGKTH

SEQ ID NO: 53263 - protein, 297 aa, Homo sapiens; identical to SEQ ID NO: 53261

SEQ ID NO: 53264 - protein, 297 aa, Homo sapiens; identical to SEQ ID NO: 53261

SEQ ID NO: 53265 - protein, 297 aa, Homo sapiens; identical to SEQ ID NO: 53261

SEQ ID NO: 53266 - protein, 297 aa, Homo sapiens; identical to SEQ ID NO: 53261

SEQ ID NO: 53267 - protein, 245 aa, Homo sapiens
MASPQLCRALVSAQWVAEALRAPRAGQPLQLLDASWYLPKLGRDARREFEERHIPGAAFFDIDQCSDRTSPYDHMLPGAEHFAEYAGRLGVGAATHVVIYDASDQGLYSAPRVWWMFRAFGHHAVSLLDGGLRHWLRQNLPLSSGKSQPAPAEFRAQLDPAFIKTYEDIKENLESRRFQVVDSRATGRFRGTEPEPPAVGIEPGHIPGTVNIPFTDFLSQDGSWVEWYMRARPEDVISEGRGKTH

SEQ ID NO: 53268 - protein, 254 aa, Homo sapiens
MDPAASSCMRSLQPPAPVWGCLRNPHSEGNGASGLPHYPPTPFSFHQKPDFLATATAAYPDFSASCLAATPHSLPQEEHIFTEQHPAFPQSPNWHFPVSDARRRPNSGPAGGSKEMGTSSLGLVDTTGGPGDDYGVLGSTANETEKKSSRRRKESSDNQENRGKPEGSSKARKERTAFTKEQLRELEAEFAHHNYLTRLRRYEIAVNLDLSERQVKVWFQNRRMKWKRVKGGQPISPNGQDPEDGDSTASPSSE

SEQ ID NO: 53269 - protein, 184 aa, Homo sapiens
MDPAASSCMRSLQPPAPVWGCLRNPHSEGNGASGLPHYPPTPFSFHQKPDFLATATAAYPDFSASCLAATPHSLPQEEHIFTEQHPAFPQSPNWHFPVSDARRRPNSGPAGGSKEMGTSSLGLVDTTGGPGDDYGVLGSTANETEKKSSRRRKESSGQSVVPEPKDEVEACEGRSAHLPQWAGP

SEQ ID NO: 53270 - protein, 139 aa, Homo sapiens
MGTSSLGLVDTTGGPGDDYGVLGSTANETEKKSSRRRKESSDNQENRGKPEGSSKARKERTAFTKEQLRELEAEFAHHNYLTRLRRYEIAVNLDLSERQVKVWFQNRRMKWKRVKGGQPISPNGQDPEDGDSTASPSSE

SEQ ID NO: 53271 - protein, 304 aa, Homo sapiens
MEHPLFGCLRSPHATAQGLHPFSQSSLALHGRSDHMSYPELSTSSSSCIIAGYPNEEGMFASQHHRGHHHHHHHHHHHHHQQQQHQALQTNWHLPQMSSPPSAARHSLCLQPDSGGPPELGSSPPVLCSNSSSLGSSTPTGAACAPGDYGRQALSPAEAEKRSGGKRKSDSSDSQEGNYKSEVNSKPRKERTAFTKEQIRELEAEFAHHNYLTRLRRYEIAVNLDLTERQVKVWFQNRRMKWKRVKGGQQGAAAREKELVNVKKGTLLPSELSGIGAATLQQTGDSIANEDSHDSDHSSEHAHL

SEQ ID NO: 53272 - protein, 234 aa, Homo sapiens
MAASRWARKAVVLLCASDLLLLLLLLPPPGSCAAEGSPGTPDESTPPPRKKKKDIRDYNDADMARLLEQWEKDDDIEEGDLPEHKRPSAPVDFSKIDPSKPESILKMTKKGKTLMMFVTVSGSPTEKETEEITSLWQGSLFNANYDVQRFIVGSDRAIFMLRDGSYAWEIKDFLVGQDRCADVTLEGQVYPGKGGGSKEKNKTKQDKGKKKKEGDLKSRSSKEENRAGNKREDL

SEQ ID NO: 53273 - protein, 234 aa, Homo sapiens; identical to SEQ ID NO: 53272

SEQ ID NO: 53274 - protein, 397 aa, Homo sapiens
MAQSPPPQSLLGHDHWIFAQGWGWAGHWDSTSPASSSDSSGSCPCDGARGLPQPQPPSCSSRAAEAAATTPRRARTGPAGGQRQSASEREKLRMRTLARALHELRRFLPPSLAPAGQSLTKIETLRLAIRYIGHLSAVLGLSEESLQCRRRQRGDAGSPWGCPLCPDRGPAEAQTQAEGQGQGQGQGQGQGQGQGQGQGQGQGQGRRPGLVSAVLAEASWGSPSACPGAQAAPERLGRGVHDTDPWATPPYCPKIQSPPYSSQGTTSDASLWTPPQGCPWTQSSPEPRNPPVPWTAAPATLELAAVYQGLSVSPEPCLSLGAPSLLPHPSCQRLQPQTPGRCWSHSAEVVPNSEDQGPGAAFQLSEASPPQSSGLRFSGCPELWQEDLEGARLGIFY

SEQ ID NO: 53275 - protein, 335 aa, Homo sapiens
MVRRDRLRRMREWWVQVGLLAVPLLAAYLHIPPPQLSPALHSWKSSGKFFTYKGLRIFYQDSVGVVGSPEIVVLLHGFPTSSYDWYKIWEGLTLRFHRVIALDFLGFGFSDKPRPHHYSIFEQASIVEALLRHLGLQNRRINLLSHDYGDIVAQELLYRYKQNRSGRLTIKSLCLSNGGIFPETHRPLLLQKLLKDGGVLSPILTRLMNFFVFSRGLTPVFGPYTRPSESELWDMWAGIRNNDGNLVIDSLLQYINQRKKFRRRWVGALASVTIPIHFIYGPLDPVNPYPEFLELYRKTLPRSTVSILDDHISHYPQLEDPMGFLNAYMGFINSF

SEQ ID NO: 53276 - protein, 326 aa, Homo sapiens
MREWWVQVGLLAVPLLAAYLHIPPPQLSPALHSWKSSGKFFTYKGLRIFYQDSVGVVGSPEIVVLLHGFPTSSYDWYKIWEGLTLRFHRVIALDFLGFGFSDKPRPHHYSIFEQASIVEALLRHLGLQNRRINLLSHDYGDIVAQELLYRYKQNRSGRLTIKSLCLSNGGIFPETHRPLLLQKLLKDGGVLSPILTRLMNFFVFSRGLTPVFGPYTRPSESELWDMWAGIRNNDGNLVIDSLLQYINQRKKFRRRWVGALASVTIPIHFIYGPLDPVNPYPEFLELYRKTLPRSTVSILDDHISHYPQLEDPMGFLNAYMGFINSF

SEQ ID NO: 53277 - protein, 326 aa, Homo sapiens; identical to SEQ ID NO: 53276

SEQ ID NO: 53278 - protein, 118 aa, Homo sapiens
MREWWVQVGLLAVPLLAAYLHIPPPQLSPALHSWKSSGKFFTYKGLRIFYQDSVGVVGSPEIVVLLHGFPTSSYDWYKIWEGLTLRFHRVIALDFLGFGFSDKPRPHHYSIFEQASIV

SEQ ID NO: 53279 - protein, 207 aa, Homo sapiens
MREWWVQVGLLAVPLLAAYLHIPPPQLSPALHSWKSSGKFFTYKGLRIFYQDSVGVVGSPEIVVLLHGFPTSSYDWYKIWEGLTLRFHRVIALDFLGFGFSDKPRPHHYSIFEQASIVEALLRHLGLQNRRINLLSHDYGDIVAQELLYRYKQNRSGRLTIKSLCLSNGGIFPETHRPLLLQKLLKDGGVLSPILTRLMNFFVFSRG

SEQ ID NO: 53280 - protein, 160 aa, Homo sapiens
MREWWVQVGLLAVPLLAAYLHIPPPQLSPALHSWKSSGKFFTYKGLRIFYQDSVGVVGSPEIVVLLHGFPTSSYDWYKIWEGLTLRFHRVIALDFLGFGFSDKPRPHHYSIFEQASIVEALLRHLGLQNRRINLLSHDYGDIVAQELLYRYKQNRSGRLT

SEQ ID NO: 53281 - protein, 127 aa, Homo sapiens
MREWWVQVGLLAVPLLAAYLHIPPPQLSPALHSWKSSGKFFTYKGLRIFYQDSVGVVGSPEIVVLLHGFPTSSYDWYKIWEGLTLRFHRVIALDFLGFGFSDKPRPHHYSIFEQASIVEALLRHLGL

SEQ ID NO: 53282 - protein, 173 aa, Homo sapiens
MREWWVQVGLLAVPLLAAYLHIPPPQLSPALHSWKSSGKFFTYKGLRIFYQDSVGVVGSPEIVVLLHGFPTSSYDWYKIWEGLTLRFHRVIALDFLGFGFSDKPRPHHYSIFEQASIVEALLRHLGLQNRRINLLSHDYGDIVAQELLYRYKQNRSGRLTIKSLCLSNGGNCL

SEQ ID NO: 53283 - protein, 292 aa, Homo sapiens
MREWWVQVGLLAVPLLAAYLHIPPPQLSPALHSWKSSGKFFTYKGLRIFYQDSVGVVGSPEIVVLLHGFPTSSYDWYKIWEGLTLRFHRVIALDFLGFGFSDKPRPHHYSIFEQASIVEALLRHLGLQNRRINLLSHDYGDIVAQELLYRYKQNRSGRLTIKSLCLSNGGIFPETHRPLLLQKLLKDGGVLSPILTRLMNFFVFSRGLLQYINQRKKFRRRWVGALASVTIPIHFIYGPLDPVNPYPEFLELYRKTLPRSTVSILDDHISHYPQLEDPMGFLNAYMGFINSF

SEQ ID NO: 53284 - protein, 292 aa, Homo sapiens; identical to SEQ ID NO: 53283

SEQ ID NO: 53285 - protein, 193 aa, Homo sapiens
MDNLRETFLSLEDGLGSSDSPGLLSSWDWKDRAGPFELNQASPSQSLSPAPSLESYSSSPCPAVAGLPCEHGGASSGGSEGCSVGGASGLVEVDYNMLAFQPTHLQGGGGPKAQKGTKVRMSVQRRRKASEREKLRMRTLADALHTLRNYLPPVYSQRGQPLTKIQTLKYTIKYIGELTDLLNRGREPRAQSA

SEQ ID NO: 53286 - protein, 630 aa, Homo sapiens
MALPTARPLLGSCGTPALGSLLFLLFSLGWVQPSRTLAGETGQEAAPLDGVLANPPNISSLSPRQLLGFPCAEVSGLSTERVRELAVALAQKNVKLSTEQLRCLAHRLSEPPEDLDALPLDLLLFLNPDAFSGPQACTRFFSRITKANVDLLPRGAPERQRLLPAALACWGVRGSLLSEADVRALGGLACDLPGRFVAESAEVLLPRLVSCPGPLDQDQQEAARAALQGGGPPYGPPSTWSVSTMDALRGLLPVLGQPIIRSIPQGIVAAWRQRSSRDPSWRQPERTILRPRFRREVEKTACPSGKKAREIDESLIFYKKWELEACVDAALLATQMDRVNAIPFTYEQLDVLKHKLDELYPQGYPESVIQHLGYLFLKMSPEDIRKWNVTSLETLKALLEVNKGHEMSPQAPRRPLPQVATLIDRFVKGRGQLDKDTLDTLTAFYPGYLCSLSPEELSSVPPSSIWAVRPQDLDTCDPRQLDVLYPKARLAFQNMNGSEYFVKIQSFLGGAPTEDLKALSQQNVSMDLATFMKLRTDAVLPLTVAEVQKLLGPHVEGLKAEERHRPVRDWILRQRQDDLDTLGLGLQGGIPNGYLVLDLSMQEALSGTPCLLGPGPVLTVLALLLASTLA

SEQ ID NO: 53287 - protein, 622 aa, Homo sapiens
MALPTARPLLGSCGTPALGSLLFLLFSLGWVQPSRTLAGETGQEAAPLDGVLANPPNISSLSPRQLLGFPCAEVSGLSTERVRELAVALAQKNVKLSTEQLRCLAHRLSEPPEDLDALPLDLLLFLNPDAFSGPQACTRFFSRITKANVDLLPRGAPERQRLLPAALACWGVRGSLLSEADVRALGGLACDLPGRFVAESAEVLLPRLVSCPGPLDQDQQEAARAALQGGGPPYGPPSTWSVSTMDALRGLLPVLGQPIIRSIPQGIVAAWRQRSSRDPSWRQPERTILRPRFRREVEKTACPSGKKAREIDESLIFYKKWELEACVDAALLATQMDRVNAIPFTYEQLDVLKHKLDELYPQGYPESVIQHLGYLFLKMSPEDIRKWNVTSLETLKALLEVNKGHEMSPQVATLIDRFVKGRGQLDKDTLDTLTAFYPGYLCSLSPEELSSVPPSSIWAVRPQDLDTCDPRQLDVLYPKARLAFQNMNGSEYFVKIQSFLGGAPTEDLKALSQQNVSMDLATFMKLRTDAVLPLTVAEVQKLLGPHVEGLKAEERHRPVRDWILRQRQDDLDTLGLGLQGGIPNGYLVLDLSMQEALSGTPCLLGPGPVLTVLALLLASTLA

SEQ ID NO: 53288 - protein, 630 aa, Homo sapiens; identical to SEQ ID NO: 53286

SEQ ID NO: 53289 - protein, 622 aa, Homo sapiens; identical to SEQ ID NO: 53287

SEQ ID NO: 53290 - protein, 622 aa, Homo sapiens; identical to SEQ ID NO: 53287

SEQ ID NO: 53291 - protein, 593 aa, Homo sapiens
MRDSTGAGNSLVHKRSPLRRNQKTPTSLTKLSLQDGHKAKKPACKFEEGQDVLARWSDGLFYLGTIKKINILKQSCFIIFEDSSKSWVLWKDIQTGATGSGEMVCTICQEEYSEAPNEMVICDKCGQGYHQLCHTPHIDCSVIDSDEKWLCRQCVFATTTKRGGALKKGPNAKALQVMKQTLPYSVADLEWDAGHKTNVQQCYCYCGGPGDWYLKMLQCCKCKQWFHEACVQCLQKPMLFGDRFYTFICSVCSSGPEYLKRLPLQWVDIAHLCLYNLSVIHKKKYFDSELELMTYINENWDRLHPGELADTPKSERYEHVLEALNDYKTMFMSGKEIKKKKHLFGLRIRVPPVPPNVAFKAEKEPEGTSHEFKIKGRKASKPISDSREVSNGIEKKGKKKSVGRPPGPYTRKMIQKTAEPLLDKESISENPTLDLPCSIGRTEGTAHSSNTSDVDFTGASSAKETTSSSISRHYGLSDSRKRTRTGRSWPAAIPHLRRRRGRLPRRALQTQNSEIVKDDEGKEDYQFDELNTEILNNLADQELQLNHLKNSITSYFGAAGRIACGEKYRVLARRVTLDGKVQYLVEWEGATAS

SEQ ID NO: 53292 - protein, 536 aa, Homo sapiens
MRDSTGAGNSLVHKRSPLRRNQKTPTSLTKLSLQDGHKAKKPACKFEEGQDVLARWSDGLFYLGTIKKINILKQSCFIIFEDSSKSWVLWKDIQTGATGSGEMVCTICQEEYSEAPNEMVICDKCGQGYHQLCHTPHIDCSVIDSDEKWLCRQCVFATTTKRGGALKKGPNAKALQVMKQTLPYSVADLEWDAGHKTNVQQCYCYCGGPGDWYLKMLQCCKCKQWFHEACVQCLQKPMLFGDRFYTFICSVCSSGPEYLKRLPLQWVDIAHLCLYNLSVIHKKKYFDSELELMTYINENWDRLHPGELADTPKSERYEHVLEALNDYKTMEVSNGIEKKGKKKSVGRPPGPYTRKMIQKTAEPLLDKESISENPTLDLPCSIGRTEGTAHSSNTSDVDFTGASSAKETTSSSISRHYGLSDSRKRTRTGRSWPAAIPHLRRRRGRLPRRALQTQNSEIVKDDEGKEDYQFDELNTEILNNLADQELQLNHLKNSITSYFGAAGRIACGEKYRVLARRVTLDGKVQYLVEWEGATAS

SEQ ID NO: 53293 - protein, 286 aa, Homo sapiens
MVCTICQEEYSEAPNEMVICDKCGQGYHQLCHTPHIDCSVIDSDEKWLCRQCVFATTTKRGGALKKGPNAKALQVMKQTLPYSVADLEWDAGHKTNVQQCYCYCGGPGDWYLKMLQCCKCKQWFHEACVQCLQKPMLFGDRFYTFICSVCSSGPEYLKRLPLQWVDIAHLCLYNLSVIHKKKYFDSELELMTYINENWDRLHPGELADTPKSERYEHVLEALNDYKTMFMSGKEIKKKKHLFGLRIRVPPVPPNVAFKAEKEPEGTSHEFKLKAERHPNLYLIQGK

SEQ ID NO: 53294 - protein, 491 aa, Homo sapiens
MVCTICQEEYSEAPNEMVICDKCGQGYHQLCHTPHIDCSVIDSDEKWLCRQCVFATTTKRGGALKKGPNAKALQVMKQTLPYSVADLEWDAGHKTNVQQCYCYCGGPGDWYLKMLQCCKCKQWFHEACVQCLQKPMLFGDRFYTFICSVCSSGPEYLKRLPLQWVDIAHLCLYNLSVIHKKKYFDSELELMTYINENWDRLHPGELADTPKSERYEHVLEALNDYKTMFMSGKEIKKKKHLFGLRIRVPPVPPNVAFKAEKEPEGTSHEFKIKGRKASKPISDSREVSNGIEKKGKKKSVGRPPGPYTRKMIQKTAEPLLDKESISENPTLDLPCSIGRTEGTAHSSNTSDVDFTGASSAKETTSSSISRHYGLSDSRKRTRTGRSWPAAIPHLRRRRGRLPRRALQTQNSEIVKDDEGKEDYQFDELNTEILNNLADQELQLNHLKNSITSYFGAAGRIACGEKYRVLARRVTLDGKVQYLVEWEGATAS

SEQ ID NO: 53295 - protein, 491 aa, Homo sapiens; identical to SEQ ID NO: 53294

SEQ ID NO: 53296 - protein, 396 aa, Homo sapiens
MAMIELGFGRQNFHPLKRKSSLLLKLIAVVFAVLLFCEFLIYYLAIFQCNWPEVKTTASDGEQTTREPVLKAMFLADTHLLGEFLGHWLDKLRREWQMERAFQTALWLLQPEVVFILGDIFDEGKWSTPEAWADDVERFQKMFRHPSHVQLKVVAGNHDIGFHYEMNTYKVERFEKVFSSERLFSWKGINFVMVNSVALNGDGCGICSETEAELIEVSHRLNCSREARGSSRCGPGPLLPTSAPVLLQHYPLYRRSDANCSGEDAAPAEERDIPFKENYDVLSREASQKLLWWLQPRLVLSGHTHSACEVHHGGRVPELSVPSFSWRNRNNPSFIMGSITPTDYTLSKCYLPREDVVLIIYCGVVGFLVVLTLTHFGLLASPFLSGLNLLGKRKTR

SEQ ID NO: 53297 - protein, 333 aa, Homo sapiens
MAMIELGFGRQNFHPLKRKSSLLLKLIAVVFAVLLFCEFLIYYLAIFQCNWPEVKTTASDGEQTTREPVLKAMFLADTHLLGEFLGHWLDKLRREWQMERAFQTALWLLQPEVVFILGDIFDEGKWSTPEAWADDVERFQKMFRHPSHVQLKVVAGNHDIGFHYEMNTYKVERFEKVFSSERLFSWKGINFVMVNSVALNGDGCGICSETEAELIEVSHRLNCSRELLWWLQPRLVLSGHTHSACEVHHGGRVPELSVPSFSWRNRNNPSFIMGSITPTDYTLSKCYLPREDVVLIIYCGVVGFLVVLTLTHFGLLASPFLSGLNLLGKRKTR

SEQ ID NO: 53298 - protein, 243 aa, Homo sapiens
MERAFQTALWLLQPEVVFILGDIFDEGKWSTPEAWADDVERFQKMFRHPSHVQLKVVAGNHDIGFHYEMNTYKVERFEKVFSSERLFSWKGINFVMVNSVALNGDGCGICSETEAELIEVSHRLNCSREARGSSRCGPGPLLPTSAPVLLQHYPLYRRSDANCSGEDAAPAEERDIPFKENYDVLSREASQKLLWWLQPRLVLSGHTHSACEVHHGGRVPELSVPSFSWRNRNNPSFIMGTDA

SEQ ID NO: 53299 - protein, 397 aa, Homo sapiens
MAMIELGFGRQNFHPLKRKSSLLLKLIAVVFAVLLFCEFLIYYLAIFQCNWPEVKTTASDGEQTTREPVLKAMFLADTHLLGEFLGHWLDKLRREWQMERAFQTALWLLQPEVVFILGDIFDEGKWSTPEAWADDVERFQKMFRHPSHVQLKVVAGNHDIGFHYEMNTYKVERFEKVFSSERLFSWKGINFVMVNSVALNGDGCGICSETEAELIEVSHRLNCSREQARGSSRCGPGPLLPTSAPVLLQHYPLYRRSDANCSGEDAAPAEERDIPFKENYDVLSREASQKLLWWLQPRLVLSGHTHSACEVHHGGRVPELSVPSFSWRNRNNPSFIMGSITPTDYTLSKCYLPREDVVLIIYCGVVGFLVVLTLTHFGLLASPFLSGLNLLGKRKTR

SEQ ID NO: 53300 - protein, 341 aa, Homo sapiens
MAMIELGFGRQNFHPLKRKSSLLLKLIAVVFAVLLFCEFLIYYLAIFQCNWPEVKTTASDGEQTTREPVLKAMFLADTHLLGEFLGHWLDKLRREWQMERAFQTALWLLQPEVVFILGDIFDEGKWSTPEAWADDVERFQKMFRHPSHVQLKVVAGNHDIGFHYEMNTYKVERFEKVFSSERLFSWKGINFVMVNSVALNGDGCGICSETEAELIEVSHRLNCSREQARGSSRCGPGPLLPTSAPVLLQHYPLYRRSDANCSGEDAAPAEERDIPFKENYDVLSREASQKLLWWLQPRLVLSGHTHSACEVHHGGRVPELSVPSFSWRNRNNPSFIMGTDA

SEQ ID NO: 53301 - protein, 396 aa, Homo sapiens; identical to SEQ ID NO: 53296

SEQ ID NO: 53302 - protein, 119 aa, Homo sapiens
MWRSRWDASVLKAEALALLPCGLGMAFSQSHVMAARRHQHSRLIIEVDEYSSNPTQAFTFYNINQGRFQPPHVQMVDPVPHDAPKPPGYTRFVCVSDTHSRTDPIQMPYGDVLIHAGDF

SEQ ID NO: 53303 - protein, 220 aa, Homo sapiens
MPYGDVLIHAGDFTELGLPSEVKKFNEWLGSLPYEYKIVIAGNHELTFDQEFMADLIKQDFYYFPSVSKLKPENYENVQSLLTNCIYLQDSEVTVRGFRIYGSPWQPWFYGWGFNLPRGQALLEKWNLIPEGVDILITHGPPLGFLDWVPKKMQRVGCVELLNTVQRRVQPRLHVFGHIHEGYGVMADGTTTYVNASVCTVNYQPVNPPIVIDLPTPRNS

SEQ ID NO: 53304 - protein, 326 aa, Homo sapiens
MWRSRWDASVLKAEALALLPCGLGMAFSQSHVMAARRHQHSRLIIEVDEYSSNPTQAFTFYNINQGRFQPPHVQMVDPVPHDAPKPPGYTRFVCVSDTHSRTDPIQMPYGDVLIHAGDFTELGLPSEVKKFNEWLGSLPYEYKIVIAGNHELTFDQEFMADLIKQDFYYFPSVSKLKPENYENVQSLLTNCIYLQDSEVTVRGFRIYGSPWQPWFYGWGFNLPRGQALLEKWNLIPEGVDILITHGPPLGFLDWVPKKMQRVGCVELLNTVQRRVQPRLHVFGHIHEGYGVMADGTTTYVNASVCTVNYQPVNPPIVIDLPTPRNS

SEQ ID NO: 53305 - protein, 168 aa, Homo sapiens
MADLIKQDFYYFPSVSKLKPENYENVQSLLTNCIYLQDSEVTVRGFRIYGSPWQPWFYGWGFNLPRGQALLEKWNLIPEGVDILITHGPPLGFLDWVPKKMQRVGCVELLNTVQRRVQPRLHVFGHIHEGYGVMADGTTTYVNASVCTVNYQPVNPPIVIDLPTPRNS

SEQ ID NO: 53306 - protein, 326 aa, Homo sapiens; identical to SEQ ID NO: 53304

SEQ ID NO: 53307 - protein, 74 aa, Homo sapiens
MWRSRWDASVLKAEALALLPCGLGMAFSQSHVMAARRHQHSRLIIEVDEYSSNPTQAFTFYNINQGRFQPPHVQ

SEQ ID NO: 53308 - protein, 359 aa, Homo sapiens
MNGRETQSVSRSGGGPGCGGGSGGRCRGGRRRSMWRSRWDASVLKAEALALLPCGLGMAFSQSHVMAARRHQHSRLIIEVDEYSSNPTQAFTFYNINQGRFQPPHVQMVDPVPHDAPKPPGYTRFVCVSDTHSRTDPIQMPYGDVLIHAGDFTELGLPSEVKKFNEWLGSLPYEYKIVIAGNHELTFDQEFMADLIKQDFYYFPSVSKLKPENYENVQSLLTNCIYLQDSEVTVRGFRIYGSPWQPWFYGWGFNLPRGQALLEKWNLIPEGVDILITHGPPLGFLDWVPKKMQRVGCVELLNTVQRRVQPRLHVFGHIHEGYGVMADGTTTYVNASVCTVNYQPVNPPIVIDLPTPRNS

SEQ ID NO: 53309 - protein, 326 aa, Homo sapiens; identical to SEQ ID NO: 53304

SEQ ID NO: 53310 - protein, 304 aa, Homo sapiens
MWRSFSQSHVMAARRHQHSRLIIEVDEYSSNPTQAFTFYNINQGRFQPPHVQMVDPVPHDAPKPPGYTRFVCVSDTHSRTDPIQMPYGDVLIHAGDFTELGLPSEVKKFNEWLGSLPYEYKIVIAGNHELTFDQEFMADLIKQDFYYFPSVSKLKPENYENVQSLLTNCIYLQDSEVTVRGFRIYGSPWQPWFYGWGFNLPRGQALLEKWNLIPEGVDILITHGPPLGFLDWVPKKMQRVGCVELLNTVQRRVQPRLHVFGHIHEGYGVMADGTTTYVNASVCTVNYQPVNPPIVIDLPTPRNS

SEQ ID NO: 53311 - protein, 294 aa, Homo sapiens
MAHGIPSQGKVTITVDEYSSNPTQAFTHYNINQSRFQPPHVHMVDPIPYDTPKPAGHTRFVCISDTHSRTDGIQMPYGDILLHTGDFTELGLPSEVKKFNDWLGNLPYEYKIVIAGNHELTFDKEFMADLVKQDYYRFPSVSKLKPEDFDNVQSLLTNSIYLQDSEVTVKGFRIYGAPWTPWFNGWGFNLPRGQSLLDKWNLIPEGIDILMTHGPPLGFRDWVPKELQRVGCVELLNTVQRRVRPKLHVFGGIHEGYGIMTDGYTTYINASTCTVSFQPTNPPIIFDLPNPQGS

SEQ ID NO: 53312 - protein, 277 aa, Homo sapiens
MAHGIPSQGKVTITVDEYSSNPTQAFTHYNINQSRFQPPHVHMVDPIPYDTPKPAGHTRFVCISDTHSRTDGIQMPYGDILLHTGDFTELGLPSEVKKFNDWLGNLPYEYKIVIAGNHELTFDKEFMADLVKQDYYRFPSVSKLKPEDFDNVQSLLTNSIYLQDSEVTVKGFRIYGAPWTPWFNGWGFNLPRGQSLLDKWNLIPEGIDILMTHGPPLGFRDWVPKELQRVGCVELLNTVQRRVRPKLHVFGGIHEVNPVSISKALRTKICSLPSKTS

SEQ ID NO: 53313 - protein, 43 aa, Homo sapiens
MAHGIPSQGKVTITVDEYSSNPTQAFTHYNINQSRFQPPHVHM

SEQ ID NO: 53314 - protein, 61 aa, Homo sapiens
MDPNCSCATGGSCTCTGSCKCKECKCTSCKKSCCSCCPMSCAKCAQGCICKGASEKCSCCA

SEQ ID NO: 53315 - protein, 61 aa, Homo sapiens
MDPNCSCTTGGSCACAGSCKCKECKCTSCKKCCCSCCPVGCAKCAQGCVCKGSSEKCRCCA

SEQ ID NO: 53316 - protein, 61 aa, Homo sapiens
MDPNCSCATGGSCTCAGSCKCKECKCTSCKKSCCSCCPVGCAKCAQGCVCKGASEKCSCCA

SEQ ID NO: 53317 - protein, 127 aa, Homo sapiens
MDPNCSCATGGSCTCAGSCKCKECKCTSCKKSECGAISRNLGLWLRLGGNSRLALSASFWGTGLSLPSLPVSFPLQAFCPKFRWGRTAFFSWDTNPNCTPYGFRTELCQTKKSILWVWVLSSSQACY

SEQ ID NO: 53318 - protein, 61 aa, Homo sapiens
MDPNCSCAAGVSCTCAGSCKCKECKCTSCKKSCCSCCPVGCSKCAQGCVCKGASEKCSCCD

SEQ ID NO: 53319 - protein, 62 aa, Homo sapiens
MDPNCSCAAAGVSCTCAGSCKCKECKCTSCKKSCCSCCPVGCSKCAQGCVCKGASEKCSCCD

SEQ ID NO: 53320 - protein, 62 aa, Homo sapiens
MDPNCSCAAAGVSCTCASSCKCKECKCTSCKKSCCSCCPVGCAKCAQGCICKGASEKCSCCA

SEQ ID NO: 53321 - protein, 61 aa, Homo sapiens
MDPNCSCAAGVSCTCASSCKCKECKCTSCKKSCCSCCPVGCAKCAQGCICKGASEKCSCCA

SEQ ID NO: 53322 - protein, 61 aa, Homo sapiens
MDPNCSCEAGGSCACAGSCKCKKCKCTSCKKSCCSCCPLGCAKCAQGCICKGASEKCSCCA

SEQ ID NO: 53323 - protein, 61 aa, Homo sapiens
MDPNCSCSPVGSCACAGSCKCKECKCTSCKKSCCSCCPVGCAKCAQGCICKGTSDKCSCCA

SEQ ID NO: 53324 - protein, 61 aa, Homo sapiens
MDPNCSCAAGDSCTCAGSCKCKECKCTSCKKSCCSCCPVGCAKCAQGCICKGASDKCSCCA

SEQ ID NO: 53325 - protein, 68 aa, Homo sapiens
MDPETCPCPSGGSCTCADSCKCEGCKCTSCKKSCCSCCPAECEKCAKDCVCKGGEAAEAEAEKCSCCQ

SEQ ID NO: 53326 - protein, 62 aa, Homo sapiens
MDPRECVCMSGGICMCGDNCKCTTCNCKTYWKSCCPCCPPGCAKCARGCICKGGSDKCSCCP

SEQ ID NO: 53327 - protein, 508 aa, Homo sapiens
MEEGPLPGGLPSPEDAMVTELLSPEGPFASENIGLKAPVKYEEDEFHVFKEAYLGPADPKEPVLHAFNPALGADCKGQVKAKLAGGDSDGGELLGEYPGIPELSALEDVALLQAPQPPACNVHFLSSLLPAHRSPAVLPLGAWVLEGASHPGVRMIPVEIKEAGGTTTSNNPEEATLQNLLAQESCCKFPSSQELEDASCCSLKKDSNPMVICQLKGGTQMLCIDNSRTRELKALHLVPQYQDQNNYLQSDVPKPMTALVGRFLPASTKLNLITQQLEGALPSVVNGSAFPSGSTLPGPPKITLAGYCDCFASGDFCNNCNCNNCCNNLHHDIERFKAIKACLGRNPEAFQPKIGKGQLGNVKPQHNKGCNCRRSGCLKNYCECYEAQIMCSSICKCIGCKNYEESPERKTLMSMPNYMQTGGLEGSHYLPPTKFSGLPRFSHDRRPSSCISWEVVEATCACLLAQGEEAEKEHCSKCLAEQMILEEFGRCLSQILHTEFKSKGLKME

SEQ ID NO: 53328 - protein, 251 aa, Homo sapiens
MEEGPLPGGLPSPEDAMVTELLSPEGPFASENIGLKAPVKYEEDEFHVFKEAYLGPADPKEPVLHAFNPALGADCKGQVKAKLAGGDSDGGELLGEYPGIPELSALEDVALLQAPQPPACNVHFLSSLLPAHRSPAVLPLGAWVLEGASHPGVRMIPVEIKEAGGTTTSNNPEEATLQNLLAQESCCKFPSSQELEDASCCSLKKDSNPMVICQLKGGTQMLCIDNSRTRELKALHLVPQYQDQNNYLQSA

SEQ ID NO: 53329 - protein, 306 aa, Homo sapiens
MEEGPLPGGLPSPEDAMVTELLSPEGPFASENIGLKAPVKYEEDEFHVFKEAYLGPADPKEPVLHAFNPALGADCKGQVKAKLAGGDSDGGELLGEYPGIPELSALEDVALLQAPQPPACNVHFLSSLLPAHRSPAVLPLGAWVLEGASHPGVRMIPVEIKEAGGTTTSNNPEEATLQNLLAQESCCKFPSSQELEDASCCSLKKDSNPMVICQLKGGTQMLCIDNSRTRELKALHLVPQYQDQNNYLQSDVPKPMTALVGRFLPASTKLNLITQQLEGALPSVVNGSAFPSGSTLPGPPKITLAG

SEQ ID NO: 53330 - protein, 753 aa, Homo sapiens
MGEHSPDNNIIYFEAEEDELTPDDKMLRFVDKNGLVPSSSGTVYDRTTVLIEQDPGTLEDEDDDGQCGEHLPFLVGGEEGFHLIDHEAMSQGYVQHIISPDQIHLTINPGSTPMPRNIEGATLTLQSECPETKRKEVKRYQCTFEGCPRTYSTAGNLRTHQKTHRGEYTFVCNQEGCGKAFLTSYSLRIHVRVHTKEKPFECDVQGCEKAFNTLYRLKAHQRLHTGKTFNCESEGCSKYFTTLSDLRKHIRTHTGEKPFRCDHDGCGKAFAASHHLKTHVRTHTGERPFFCPSNGCEKTFSTQYSLKSHMKGHDNKGHSYNALPQHNGSEDTNHSLCLSDLSLLSTDSELRENSSTTQGQDLSTISPAIIFESMFQNSDDTAIQEDPQQTASLTESFNGDAESVSDVPPSTGNSASLSLPLVLQPGLSEPPQPLLPASAPSAPPPAPSLGPGSQQAAFGNPPALLQPPEVPVPHSTQFAANHQEFLPHPQAPQPIVPGLSVVAGASASAAAVASAVAAPAPPQSTTEPLPAMVQTLPLGANSVLTNNPTITITPTPNTAILQSSLVMGEQNLQWILNGATSSPQNQEQIQQASKVEKVFFTTAVPVASSPGSSVQQIGLSVPVIIIKQEEACQCQCACRDSAKERASSRRKGCSSPPPPEPSPQAPDGPSLQLPAQTFSSAPVPGSSSSTLPSSCEQSRQAETPSDPQTETLSAMDVSEFLSLQSLDTPSNLIPIEALLQGEEEMGLTSSFSK

SEQ ID NO: 53331 - protein, 200 aa, Homo sapiens
KQSQVKRYQCTFEGCPRTYSTAGNLRTHQKTHRGEYTFVCNQEGCGKAFLTSYSLRIHVRVHTKEKPFECDVQGCEKAFNTLYRLKAHQRLHTGKTFNCESEGCSKYFTTLSDLRKHIRTHTGEKPFRCDHDGCGKAFAASHHLKTHVRTHTGERPFFCPSNGCEKTFSTQYSLKSHMKGHDNKGHSYNALPQHNGSEST

SEQ ID NO: 53332 - protein, 852 aa, Homo sapiens
MLITERKHFRSGRIAQSMSEANLIDMEAGKLSKSCNITECQDPDLLHNWPDAFTLRGNNASKVANPFWNQLSASNPFLDDITQLRNNRKRNNISILKEDPFLFCREIENGNSFDSSGDELDVHQLLRQTSSRNSGRSKSVSELLDILDDTAHAHQSIHNSDQILLHDLEWLKNDREAYKMAWLSQRQLARSCLDLNTISQSPGWAQTQLAEVTIACKVNHQGGSVQLPESDITVHVPQGHVAVGEFQEVSLRAFLDPPHMLNHDLSCTVSPLLEIMLGNLNTMEALLLEMKIGAEVRKDPFSQVMTEMVCLHSLGKEGPFKVLSNCYIYKDTIQVKLIDLSQVMYLVVAAQAKALPSPAATIWDYIHKTTSIGIYGPKYIHPSFTVVLTVCGHNYMPGQLTISDIKKGGKNISPVVFQLWGKQSFLLDKPQDLSISIFSCDPDFEVKTEGERKEIKQKQLEAGEVVHQQFLFSLVEHREMHLFDFCVQVEPPNGEPVAQFSITTPDPTPNLKRLSNLPGYLQKKEEIKSAPLSPKILVKYPTFQDKTLNFSNYGVTLKAVLRQSKIDYFLEYFKGDTIALLGEGKVKAIGQSKVKEWYVGVLRGKIGLVHCKNVKVISKEQVMFMSDSVFTTRNLLEQIVLPLKKLTYIYSVVLTLVSEKVYDWKVLADVLGYSHLSLEDFDQIQADKESEKVSYVIKKLKEDCHTERNTRKFLYELIVALLKMDCQELVARLIQEAAVLTSAVKLGKGWRELAEKLVRLTKQQMEAYEIPHRGNTGDVAVEMMWKPAYDFLYTWSAHYGNNYRDVLQDLQSALDRMKNPVTKHWRELTGVLILVNSLEVLRVTAFSTSEEV

SEQ ID NO: 53333 - protein, 852 aa, Homo sapiens; identical to SEQ ID NO: 53332

SEQ ID NO: 53334 - protein, 435 aa, Homo sapiens
MLLGGPPRSPRSGTSPKGPWSSTGHVQFGKSPQTWPRRTRPRSPEPAAPSGVRGSTWTRRRDTPRRAGPTALSRYVGHLWMGRRPPSPEARGPVPRSSAASRARRSLASPGISPGPLTATIGGAVAGGGPRQGRAEAHKEVFPGQRVGKMAAPMELFCWSGGWGLPSVDLDSLAVLTYARFTGAPLKVHKISNPWQSPSGTLPALRTSHGEVISVPHKIITHLRKEVHTFWIDTKNYVEVTRKWYAEAMPFPLNFFLPGRMQRQYMERLQLLTGEHRPEDEEELEKELYREARECLTLLSQRLGSQKFFFGDAPASLDAFVFSYLALLLQAKLPSGKLQVHLRGLHNLCAYCTHILSLYFPWDGAEVPPQRQTPAGPETEEEPYRRRNQILSVLAGLAAMVGYALLSGIVSIQRATPARAPGTRTLGMAEEDEEE

SEQ ID NO: 53335 - protein, 466 aa, Homo sapiens
MLLGGPPRSPRSGTSPKGPWSSTGHVQFGKSPQTWPRRTRPRSPEPAAPSGVRGSTWTRRRDTPRRAGPTALSRYVGHLWMGRRPPSPEARGPVPRSSAASRARRSLASPGISPGPLTATIGGAVAGGGPRQGRAEAHKEVFPGQRVGKMAAPMELFCWSGGWGLPSVDLDSLAVLTYARFTGAPLKVHKISNPWQSPSGTLPALRTSHGEVISVPHKIITHLRKEKYNADYDLSARQGADTLAFMSLLEEKLLPVLVHTFWIDTKNYVEVTRKWYAEAMPFPLNFFLPGRMQRQYMERLQLLTGEHRPEDEEELEKELYREARECLTLLSQRLGSQKFFFGDAPASLDAFVFSYLALLLQAKLPSGKLQVHLRGLHNLCAYCTHILSLYFPWDGAEVPPQRQTPAGPETEEEPYRRRNQILSVLAGLAAMVGYALLSGIVSIQRATPARAPGTRTLGMAEEDEEE

SEQ ID NO: 53336 - protein, 316 aa, Homo sapiens
  VARIANT 1: note = MOD_RES - Any amino acid
XEGGQDGGAHGAVLLVRGLGAAVSGPGQPGRADLCQIYWCSTEGTQDQQPLAEPFRYPVSLGGTLPALRTSHGEVISVPHKIITHLRKEKYNADYDLSARQGADTLAFMSLLEEKLLPVLVHTFWIDTKNYVEVTRKWYAEAMPFPLNFFLPGRMQRQYMERLQLLTGEHRPEDEEELEKELYREARECLTLLSQRLGSQKFFFGDAPASLDAFVFSYLALLLQAKLPSGKLQVHLRGLHNLCAYCTHILSLYFPWDGAEVPPQRQTPAGPETEEEPYRRRNQILSVLAGLAAMVGYALLSGIVSIQRATPARAPG

SEQ ID NO: 53337 - protein, 395 aa, Homo sapiens
MNGPVDGLCDHSLSEGVFMFTSESVGEGHPDKICDQISDAVLDAHLKQDPNAKVACETVCKTGMVLLCGEITSMAMVDYQRVVRDTIKHIGYDDSAKGFDFKTCNVLVALEQQSPDIAQCVHLDRNEEDVGAGDQGLMFGYATDETEECMPLTIILAHKLNARMADLRRSGLLPWLRPDSKTQVTVQYMQDNGAVIPVRIHTIVISVQHNEDITLEEMRRALKEQVIRAVVPAKYLDEDTVYHLQPSGRFVIGGPQGDAGVTGRKIIVDTYGGWGAHGGGAFSGKDYTKVDRSAAYAARWVAKSLVKAGLCRRVLVQVSYAIGVAEPLSISIFTYGTSQKTERELLDVVHKNFDLRPGVIVRDLDLKKPIYQKTACYGHFGRSEFPWEVPRKLVF

SEQ ID NO: 53338 - protein, 395 aa, Homo sapiens; identical to SEQ ID NO: 53337

SEQ ID NO: 53339 - protein, 145 aa, Homo sapiens
ESVGEGHPDKICDQISDAVLDAHLKQDPNAKVACGFDFKTCNVLVALEQQSPDIAQCVHLDRNEEDVGAGDQGLMFGYATDETEECMPLTIILAHKLNARMADLRRSGLLPWLRPDSKTQVTVQYMQDNGAVIPVRIHTIVISVQ

SEQ ID NO: 53340 - protein, 395 aa, Homo sapiens
MNGQLNGFHEAFIEEGTFLFTSESVGEGHPDKICDQISDAVLDAHLQQDPDAKVACETVAKTGMILLAGEITSRAAVDYQKVVREAVKHIGYDDSSKGFDYKTCNVLVALEQQSPDIAQGVHLDRNEEDIGAGDQGLMFGYATDETEECMPLTIVLAHKLNAKLAELRRNGTLPWLRPDSKTQVTVQYMQDRGAVLPIRVHTIVISVQHDEEVCLDEMRDALKEKVIKAVVPAKYLDEDTIYHLQPSGRFVIGGPQGDAGLTGRKIIVDTYGGWGAHGGGAFSGKDYTKVDRSAAYAARWVAKSLVKGGLCRRVLVQVSYAIGVSHPLSISIFHYGTSQKSERELLEIVKKNFDLRPGVIVRDLDLKKPIYQRTAAYGHFGRDSFPWEVPKKLKY

SEQ ID NO: 53341 - protein, 176 aa, Homo sapiens
MNGQLNGFHEAFIEEGTFLFTSESVGEGHPDKICDQIGDAGLTGRKIIVDTYGGWGAHGGGAFSGKDYTKVDRSAAYAARWVAKSLVKGGLCRRVLVQVSYAIGVSHPLSISIFHYGTSQKSERELLEIVKKNFDLRPGVIVRDLDLKKPIYQRTAAYGHFGRDSFPWEVPKKLKY

SEQ ID NO: 53342 - protein, 182 aa, Homo sapiens
MARLLWLLRGLTLGTAPRRAVRGQAGGGGPGTGPGLGEAGSLATCELPLAKSEWQKKLTPEQFYVTREKGTEPPFSGIYLNNKEAGMYHCVCCDSPLFSSEKKYCSGTGWPSFSEAHGTSGSDESHTGILRRLDTSLGSARTEVVCKQCEAHLGHVFPDGPGPNGQRFCINSVALKFKPRKH

SEQ ID NO: 53343 - protein, 185 aa, Homo sapiens
MSAFNLLHLVTKSQPVALRACGLPSGSCRDKKNCKVVFSQQELRKRLTPLQYHVTQEKGTESAFEGEYTHHKDPGIYKCVVCGTPLFKSETKFDSGSGWPSFHDVINSEAITFTDDFSYGMHRVETSCSQCGAHLGHIFDDGPRPTGKRYCINSAALSFTPADSSGTAEGGSGVASPAQADKAEL

SEQ ID NO: 53344 - protein, 192 aa, Homo sapiens
MSPRRTLPRPLSLCLSLCLCLCLAAALGSAQSGSCRDKKNCKVVFSQQELRKRLTPLQYHVTQEKGTESAFEGEYTHHKDPGIYKCVVCGTPLFKSETKFDSGSGWPSFHDVINSEAITFTDDFSYGMHRVETSCSQCGAHLGHIFDDGPRPTGKRYCINSAALSFTPADSSGTAEGGSGVASPAQADKAEL

SEQ ID NO: 53345 - protein, 164 aa, Homo sapiens
MSAFNLLHLVTKSQPVALRACGLPSGSCRDKKNCKVVFSQQELRKRLTPLQYHVTQEKGTESAFEGEYTHHKDPGIYKCVVCGTPLFKSETKFDSGSGWPSFHDVINSEAITFTDDFSYGMHRVETSCSQCGAHLGHIFDDGPRPTGKRYCINSAALSFTPADS

SEQ ID NO: 53346 - protein, 185 aa, Homo sapiens; identical to SEQ ID NO: 53343

SEQ ID NO: 53347 - protein, 117 aa, Homo sapiens
MSAFNLLHLVTKSQPVALRACGLPSGSCRDKKNCKVVFSQQELRKRLTPLQYHVTQEKGTESAFEGEYTHHKDPGIYKCVVCGTPLFKSETKFDSGSGWPSFHDVINSEAITFTDDF

SEQ ID NO: 53348 - protein, 900 aa, Homo sapiens
MRLFVSDGVPGCLPVLAAAGRARGRAEVLISTVGPEDCVVPFLTRPKVPVLQLDSGNYLFSTSAICRYFFLLSGWEQDDLTNQWLEWEATELQPALSAALYYLVVQGKKGEDVLGSVRRALTHIDHSLSRQNCPFLAGETESLADIVLWGALYPLLQDPAYLPEELSALHSWFQTLSTQEPCQRAAETVLKQQGVLALRPYLQKQPQPSPAEGRAVTNEPEEEELATLSEEEIAMAVTAWEKGLESLPPLRPQQNPVLPVAGERNVLITSALPYVNNVPHLGNIIGCVLSADVFARYSRLRQWNTLYLCGTDEYGTATETKALEEGLTPQEICDKYHIIHADIYRWFNISFDIFGRTTTPQQTKITQDIFQQLLKRGFVLQDTVEQLRCEHCARFLADRFVEGVCPFCGYEEARGDQCDKCGKLINAVELKKPQCKVCRSCPVVQSSQHLFLDLPKLEKRLEEWLGRTLPGSDWTPNAQFITRSWLRDGLKPRCITRDLKWGTPVPLEGFEDKVFYVWFDATIGYLSITANYTDQWERWWKNPEQVDLYQFMAKDNVPFHSLVFPCSALGAEDNYTLVSHLIATEYLNYEDGKFSKSRGVGVFGDMAQDTGIPADIWRFYLLYIRPEGQDSAFSWTDLLLKNNSELLNNLGNFINRAGMFVSKFFGGYVPEMVLTPDDQRLLAHVTLELQHYHQLLEKVRIRDALRSILTISRHGNQYIQVNEPWKRIKGSEADRQRAGTVTGLAVNIAALLSVMLQPYMPTVSATIQAQLQLPPPACSILLTNFLCTLPAGHQIGTVSPLFQKLENDQIESLRQRFGGGQAKTSPKPAVVETVTTAKPQQIQALMDEVTKQGNIVRELKAQKADKNEVAAEVAKLLDLKKQLAVAEGKPPEAPKGKKKK

SEQ ID NO: 53349 - protein, 635 aa, Homo sapiens
MAVTAWEKGLESLPPLRPQQNPVLPVAGERNVLITSALPYVNNVPHLGNIIGCVLSADVFARYSRLRQWNTLYLCGTDEYGTATETKALEEGLTPQEICDKYHIIHADIYRWFNISFDIFGRTTTPQQTKITQDIFQQLLKRGFVLQDTVEQLRCEHCARFLADRFVEGVCPFCGYEEARGDQCDKCGKLINAVELKKPQCKVCRSCPVVQSSQHLFLDLPKLEKRLEEWLGRTLPGSDWTPNAQFITRSWLRDGLKPRCITRDLKWGTPVPLEGFEDKVFYVWFDATIGYLSITANYTDQWERWWKNPEQVDLYQFMAKDNVPFHSLVFPCSALGAEDNYTLVSHLIATEYLNYEDGKFSKSRGVGVFGDMAQDTGIPADIWRFYLLYIRPEGQDSAFSWTDLLLKNNSELLNNLGNFINRAGMFVSKFFGGYVPEMVLTPDDQRLLAHVTLELQHYHQLLEKVRIRDALRSILTISRHGNQYIQVNEPWKRIKGSEADRQRAGTVTGLAVNIAALLSVMLQPYMPTVSATIQAQLQLPPPACSILLTNFLCTLPAGHQIGTVSPLFQKLENDQIESLRQRFGGGQVRKLKAVPSLHNSHSITSLISLSSPHPSLFPSFGPAASSLTVFLSCLN

SEQ ID NO: 53350 - protein, 546 aa, Homo sapiens
MRLFVSDGVPGCLPVLAAAGRARGRAEVLISTVGPEDCVVPFLTRPKVPVLQLDSGNYLFSTSAICRYFFLLSGWEQDDLTNQWLEWEATELQPALSAALYYLVVQGKKGEDVLGSVRRALTHIDHSLSRQNCPFLAGETESLADIVLWGALYPLLQDPAYLPEELSALHSWFQTLSTQEPCQRAAETVLKQQGVLALRPYLQKQPQPSPAEGRAVTNEPEEEELATLSEEEIAMAVTAWEKGLESLPPLRPQQNPVLPVAGERNVLITSALPYVNNVPHLGNIIGCVLSADVFARYSRLRQWNTLYLCGTDEYGTATETKALEEGLTPQEICDKYHIIHADIYRWFNISFDIFGRTTTPQQTKITQDIFQQLLKRGFVLQDTVEQLRCEHCARFLADRFVEGVCPFCGYEEARGDQCDKCGKLINAVELKKPQCKVCRSCPVVQSSQHLFLDLPKLEKRLEEWLGRTLPGSDWTPNAQFITRSWLRDGLKPRCITRDLKWGTPVPLEGFEDKVFYVWFDATIGYLSITANYTDQWERWWKNPEQP

SEQ ID NO: 53351 - protein, 593 aa, Homo sapiens
MLRTSVLRLLGRTGASRLSLLEDFGPRYYSSGSLSAGDDACDVRAYFTTPIFYVNAAPHIGHLYSALLADALCRHRRLRGPSTAATRFSTGTDEHGLKIQQAAATAGLAPTELCDRVSEQFQQLFQEAGISCTDFIRTTEARHRVAVQHFWGVLKSRGLLYKGVYEGWYCASDECFLPEAKVTQQPGPSGDSFPVSLESGHPVSWTKEENYIFRLSQFRKPLQRWLRGNPQAITPEPFHHVVLQWLDEELPDLSVSRRSSHLHWGIPVPGDDSQTIYVWLDALVNYLTVIGYPNAEFKSWWPATSHIIGKDILKFHAIYWPAFLLGAGMSPPQRICVHSHWTVCGQKMSKSLGNVVDPRTCLNRYTVDGFRYFLLRQGVPNWDCDYYDEKVVKLLNSELADALGGLLNRCTAKRINPSETYPAFCTTCFPSEPGLVGPSVRAQAEDYALVSAVATLPKQVADHYDNFRIYKALEAVSSCVRQTNGFVQRHAPWKLNWESPVDAPWLGTVLHVALECLRVFGTLLQPVTPSLADKLLSRLGVSASERSLGELYFLPRFYGHPCPFEGRRLGPETGLLFPRLDQSRTWLVKAHRT

SEQ ID NO: 53352 - protein, 520 aa, Homo sapiens
MLRTSVLRLLGRTGASRLSLLEDFGPRYYSSGSLSAGDDACDVRAYFTTPIFYVNAAPHIGHLYSALLADALCRHRRLRGPSTAATRFSTGTDEHGLKIQQAAATAGLAPTELCDRVSEQFQQLFQEAGISWTKEENYIFRLSQFRKPLQRWLRGNPQAITPEPFHHVVLQWLDEELPDLSVSRRSSHLHWGIPVPGDDSQTIYVWLDALVNYLTVIGYPNAEFKSWWPATSHIIGKDILKFHAIYWPAFLLGAGMSPPQRICVHSHWTVCGQKMSKSLGNVVDPRTCLNRYTVDGFRYFLLRQGVPNWDCDYYDEKVVKLLNSELADALGGLLNRCTAKRINPSETYPAFCTTCFPSEPGLVGPSVRAQAEDYALVSAVATLPKQVADHYDNFRIYKALEAVSSCVRQTNGFVQRHAPWKLNWESPVDAPWLGTVLHVALECLRVFGTLLQPVTPSLADKLLSRLGVSASERSLGELYFLPRFYGHPCPFEGRRLGPETGLLFPRLDQSRTWLVKAHRT

SEQ ID NO: 53353 - protein, 486 aa, Homo sapiens
MVAGMLGLREEKSEDQDLQGLKDKPLKFKKVKKDKKEEKEGKHEPVQPSAHHSAEPAEAGKAETSEGSGSAPAVPEASASPKQRRSIIRDRGPMYDDPTLPEGWTRKLKQRKSGRSAGKYDVYLINPQGKAFRSKVELIAYFEKVGDTSLDPNDFDFTVTGRGSPSRREQKPPKKPKSPKAPGTGRGRGRPKGSGTTRPKAATSEGVQVKRVLEKSPGKLLVKMPFQTSPGGKAEGGGATTSTQVMVIKRPGRKRKAEADPQAIPKKRGRKPGSVVAAAAAEAKKKAVKESSIRSVQETVLPIKKRKTRETVSIEVKEVVKPLLVSTLGEKSGKGLKTCKSPGRKSKESSPKGRSSSASSPPKKEHHHHHHHSESPKAPVPLLPPLPPPPPEPESSEDPTSPPEPQDLSSSVCKEEKMPRGGSLESDGCPKEPAKTQPAVATAATAAEKYKHRGEGERKDIVSSSMPRPNREEPVDSRTPVTERVS

SEQ ID NO: 53354 - protein, 271 aa, Homo sapiens
MVAGMLGLREEKSEDQDLQGLKDKPLKFKKVKKDKKEEKEGKHEPVQPSAHHSAEPAEAGKAETSEGSGSAPAVPEASASPKQRRSIIRDRGPMYDDPTLPEGWTRKLKQRKSGRSAGKYDVYLINPQGKAFRSKVELIAYFEKVGDTSLDPNDFDFTVTGRGSPSRREQKPPKKPKSPKAPGTGRGRGRPKGSGTTRPKAATSEGVQVKRVLEKSPGKLLVKMPFQTSPGGKAEGGGATTSTQVMVIKRPGRKRSPRAPRTPPAPLSPRT

SEQ ID NO: 53355 - protein, 50 aa, Homo sapiens
MVAGMLGLREEKSEDQDLQGLKDKPLKFKKVKKDKKEEKEGKHEPVQPSA

SEQ ID NO: 53356 - protein, 498 aa, Homo sapiens [sequence omitted]

SEQ ID NO: 53357 - protein, 394 aa, Homo sapiens
MVAGMLGLREEKSEDQDLQGLKDKPLKFKKVKKDKKEEKEGKHEPVQPSAHHSAEPAEAGKAETSEGSGSAPAVPEASASPKQRRSIIRDRGPMYDDPTLPEGWTRKLKQRKSGRSAGKYDVYLINPQGKAFRSKVELIAYFEKVGDTSLDPNDFDFTVTGRGSPSRREQKPPKKPKSPKAPGTGRGRGRPKGSGTTRPKAATSEGVQVKRVLEKSPGKLLVKMPFQTSPGGKAEGGGATTSTQVMVIKRPGRKRKAEADPQAIPKKRGRKPGSVVAAAAAEAKKKAVKESSIRSVQETVLPIKKRKTRETVSIEVKEVVKPLLVSTLGEKSGKGLKTCKSPGRKSKESSPKGRSSSASSPPKKEHHHHHHHSESPKAPVPTRIKAAVVSSPYG

SEQ ID NO: 53358 - protein, 605 aa, Homo sapiens
MAEDWLDCPALGPGWKRREVFRKSGATCGRSDTYYQSPTGDRIRSKVELTRYLGPACDLTLFDFKQGILCYPAPKAHPVAVASKKRKKPSRPAKTRKRQVGPQSGEVRKEAPRDETKADTDTAPASFPAPGCCENCGISFSGDGTQRQRLKTLCKDCRAQRIAFNREQRMFKRVGCGECAACQVTEDCGACSTCLLQLPHDVASGLFCKCERRRCLRIVERSRGCGVCRGCQTQEDCGHCPICLRPPRPGLRRQWKCVQRRCLRGKHARRKGGCDSKMAARRRPGAQPLPPPPPSQSPEPTEPHPRALAPSPPAEFIYYCVDEDELQPYTNRRQNRKCGACAACLRRMDCGRCDFCCDKPKFGGSNQKRQKCRWRQCLQFAMKRLLPSVWSESEDGAGSPPPYRRRKRPSSARRHHLGPTLKPTLATRTAQPDHTQAPTKQEAGGGFVLPPPGTDLVFLREGASSPVQVPGPVAASTEALLQEAQCSGLSWVVALPQVKQEKADTQDEWTPGTAVLTSPVLVPGCPSKAVDPGLPSVKQEPPDPEEDKEENKDDSASKLAPEEEAGGAGTPVITEIFSLGGTRFRDTAVWLPRSKDLKKPGARKQ

SEQ ID NO: 53359 - protein, 586 aa, Homo sapiens
MAEDWLDCPALGPGWKRREVFRKSGATCGRSDTYYQSPTGDRIRSKVELTRYLGPACDLTLFDFKQGILCYPAPKAHPVAVASKKRKKPSRPAKTRKRQVGPQSGEVRKEAPRDETKADTDTAPASFPAPGCCENCGISFSGDGTQRQRLKTLCKDCRAQRIAFNREQRMFKRVGCGECAACQVTEDCGACSTCLLQLPHDVASGLFCKCERRRCLRIVERSRGCGVCRGCQTQEDCGHCPICLRPPRPGLRRQWKCVQRRCLRGKHARRKGGCDSKMAARRRPGAQPLPPPPPSQSPEPTEPQPYTNRRQNRKCGACAACLRRMDCGRCDFCCDKPKFGGSNQKRQKCRWRQCLQFAMKRLLPSVWSESEDGAGSPPPYRRRKRPSSARRHHLGPTLKPTLATRTAQPDHTQAPTKQEAGGGFVLPPPGTDLVFLREGASSPVQVPGPVAASTEALLQAVDPGLPSVKQEPPDPEEDKEENKDDSASKLAPEEEAGGAGTPVITEIFSLGGTRFRDTAVWLPSLQGRHSGREDGCKVWETEDTVEPTSTSWNPRGWPGTHVSLSPPPASMMWVSCRRSWCPSSQS

SEQ ID NO: 53360 - protein, 550 aa, Homo sapiens
MAEDWLDCPALGPGWKRREVFRKSGATCGRSDTYYQSPTGDRIRSKVELTRYLGPACDLTLFDFKQGILCYPAPKAHPVAVASKKRKKPSRPAKTRKRQVGPQSGEVRKEAPRDETKADTDTAPASFPAPGCCENCGISFSGDGTQRQRLKTLCKDCRAQRIAFNREQRMFKRVGCGECAACQVTEDCGACSTCLLQLPHDVASGLFCKCERRRCLRIVERSRGCGVCRGCQTQEDCGHCPICLRPPRPGLRRQWKCVQRRCLRGKHARRKGGCDSKMAARRRPGAQPLPPPPPSQSPEPTEPHPRALAPSPPAEFIYYCVDEDELQPYTNRRQNRKCGACAACLRRMDCGRCDFCCDKPKFGGSNQKRQKCRWRQCLQFAMKRLLPSVWSESEDGAGSPPPYRRRKRPSSARRHHLGPTLKPTLATRTAQPDHTQAPTKQEAGGGFVLPPPGTDLVFLREGASSPVQVPGPVAASTEALLQAVDPGLPSVKQEPPDPEEDKEENKDDSASKLAPEEEAGGAGTPVEPTTQPQYSGNFDNDLYEIYLIDI

SEQ ID NO: 53361 - protein, 549 aa, Homo sapiens
MAEDWLDCPALGPGWKRREVFRKSGATCGRSDTYYQSPTGDRIRSKVELTRYLGPACDLTLFDFKQGILCYPAPKAHPVAVASKKRKKPSRPAKTRKRQVGPQSGEVRKEAPRDETKADTDTAPASFPAPGCCENCGISFSGDGTQRQRLKTLCKDCRAQRIAFNREQRMFKRVGCGECAACQVTEDCGACSTCLLQLPHDVASGLFCKCERRRCLRIVERSRGCGVCRGCQTQEDCGHCPICLRPPRPGLRRQWKCVQRRCLRGKHARRKGGCDSKMAARRRPGAQPLPPPPPSQSPEPTEPHPRALAPSPPAEFIYYCVDEDELKRLLPSVWSESEDGAGSPPPYRRRKRPSSARRHHLGPTLKPTLATRTAQPDHTQAPTKQEAGGGFVLPPPGTDLVFLREGASSPVQVPGPVAASTEALLQEAQCSGLSWVVALPQVKQEKADTQDEWTPGTAVLTSPVLVPGCPSKAVDPGLPSVKQEPPDPEEDKEENKDDSASKLAPEEEAGGAGTPVITEIFSLGGTRFRDTAVWLPRSKDLKKPGARKQ

SEQ ID NO: 53362 - protein, 503 aa, Homo sapiens
MAEDWLDCPALGPGWKRREVFRKSGATCGRSDTYYQSPTGDRIRSKVELTRYLGPACDLTLFDFKQGILCYPAPKAHPVAVASKKRKKPSRPAKTRKRQVGPQSGEVRKEAPRDETKADTDTAPASFPAPGCCENCGISFSGDGTQRQRLKTLCKDCRAQRIAFNREQRMFKRVGCGECAACQVTEDCGACSTCLLQLPHDVASGLFCKCERRRCLRIVERSRGCGVCRGCQTQEDCGHCPICLRPPRPGLRRQWKCVQRRCLRGKHARRKGGCDSKMAARRRPGAQPLPPPPPSQSPEPTEPHPRALAPSPPAEFIYYCVDEDELKRLLPSVWSESEDGAGSPPPYRRRKRPSSARRHHLGPTLKPTLATRTAQPDHTQAPTKQEAGGGFVLPPPGTDLVFLREGASSPVQVPGPVAASTEALLQAVDPGLPSVKQEPPDPEEDKEENKDDSASKLAPEEEAGGAGTPVITEIFSLGGTRFRDTAVWLPRSKDLKKPGARKQ

SEQ ID NO: 53363 - protein, 556 aa, Homo sapiens
MAEDWLDCPALGPGWKRREVFRKSGATCGRSDTYYQSPTGDRIRSKVELTRYLGPACDLTLFDFKQGILCYPAPKAHPVAVASKKRKKPSRPAKTRKRQVGPQSGEVRKEAPRDETKADTDTAPASFPAPGCCENCGISFSGDGTQRQRLKTLCKDCRAQRIAFNREQRMFKSRGCGVCRGCQTQEDCGHCPICLRPPRPGLRRQWKCVQRRCLRGKHARRKGGCDSKMAARRRPGAQPLPPPPPSQSPEPTEPHPRALAPSPPAEFIYYCVDEDELQPYTNRRQNRKCGACAACLRRMDCGRCDFCCDKPKFGGSNQKRQKCRWRQCLQFAMKRLLPSVWSESEDGAGSPPPYRRRKRPSSARRHHLGPTLKPTLATRTAQPDHTQAPTKQEAGGGFVLPPPGTDLVFLREGASSPVQVPGPVAASTEALLQEAQCSGLSWVVALPQVKQEKADTQDEWTPGTAVLTSPVLVPGCPSKAVDPGLPSVKQEPPDPEEDKEENKDDSASKLAPEEEAGGAGTPVITEIFSLGGTRFRDTAVWLPRSKDLKKPGARKQ

SEQ ID NO: 53364 - protein, 605 aa, Homo sapiens; identical to SEQ ID NO: 53358

SEQ ID NO: 53365 - protein, 503 aa, Homo sapiens; identical to SEQ ID NO: 53362

SEQ ID NO: 53366 - protein, 549 aa, Homo sapiens; identical to SEQ ID NO: 53361

SEQ ID NO: 53367 - protein, 605 aa, Homo sapiens; identical to SEQ ID NO: 53358

SEQ ID NO: 53368 - protein, 656 aa, Homo sapiens
MGGFRLRTGRNAALNSDRLLLLPVASMAEDWLDCPALGPGWKRREVFRKSGATCGRSDTYYQSPTGDRIRSKVELTRYLGPACDLTLFDFKQGILCYPAPKAHPVAVASKKRKKPSRPAKTRKRQVGPQSGEVRKEAPRDETKADTDTAPASFPAPGCCENCGISFSGDGTQRQRLKTLCKDCRAQRIAFNREQRMFKRVGCGECAACQVTEDCGACSTCLLQLPHDVASGLFCKCERRRCLRIVERSRGCGVCRGCQTQEDCGHCPICLRPPRPGLRRQWKCVQRRCLRHLAHRLRRRHQRCQRRTPLAVAPPTGKHARRKGGCDSKMAARRRPGAQPLPPPPPSQSPEPTEPHPRALAPSPPAEFIYYCVDEDELQPYTNRRQNRKCGACAACLRRMDCGRCDFCCDKPKFGGSNQKRQKCRWRQCLQFAMKRLLPSVWSESEDGAGSPPPYRRRKRPSSARRHHLGPTLKPTLATRTAQPDHTQAPTKQEAGGGFVLPPPGTDLVFLREGASSPVQVPGPVAASTEALLQEAQCSGLSWVVALPQVKQEKADTQDEWTPGTAVLTSPVLVPGCPSKAVDPGLPSVKQEPPDPEEDKEENKDDSASKLAPEEEAGGAGTPVITEIFSLGGTRFRDTAVWLPRSKDLKKPGARKQ

SEQ ID NO: 53369 - protein, 536 aa, Homo sapiens
MAEDWLDCPALGPGWKRREVFRKSGATCGRSDTYYQSPTGDRIRSKVELTRYLGPACDLTLFDFKQGILCYPAPKAHPVAVASKKRKKPSRPAKTRKRQVGPQSGEVRKEAPRDETKADTDTAPASFPAPGCCENCGISFSGDGTQRQRLKTLCKDCRAQRIAFNREQRMFKRVGCGECAACQVTEDCGACSTCLLQLPHDVASGLFCKCERRRCLRIVERSRGCGVCRGCQTQEDCGHCPICLRPPRPGLRRQWKCVQRRCLRGKHARRKGGCDSKMAARRRPGAQPLPPPPPSQSPEPTEPQPYTNRRQNRKCGACAACLRRMDCGRCDFCCDKPKFGGSNQKRQKCRWRQCLQFAMKRLLPSVWSESEDGAGSPPPYRRRKRPSSARRHHLGPTLKPTLATRTAQPDHTQAPTKQEAGGGFVLPPPGTDLVFLREGASSPVQVPGPVAASTEALLQAVDPGLPSVKQEPPDPEEDKEENKDDSASKLAPEEEAGGAGTPVITEIFSLGGTRFRDTAVWLPRSKDLKKPGARKQ

SEQ ID NO: 53370 - protein, 630 aa, Homo sapiens
MAEDWLDCPALGPGWKRREVFRKSGATCGRSDTYYQSPTGDRIRSKVELTRYLGPACDLTLFDFKQGILCYPAPKAHPVAVASKKRKKPSRPAKTRKRQVGPQSGEVRKEAPRDETKADTDTAPASFPAPGCCENCGISFSGDGTQRQRLKTLCKDCRAQRIAFNREQRMFKRVGCGECAACQVTEDCGACSTCLLQLPHDVASGLFCKCERRRCLRIVERSRGCGVCRGCQTQEDCGHCPICLRPPRPGLRRQWKCVQRRCLRHLAHRLRRRHQRCQRRTPLAVAPPTGKHARRKGGCDSKMAARRRPGAQPLPPPPPSQSPEPTEPHPRALAPSPPAEFIYYCVDEDELQPYTNRRQNRKCGACAACLRRMDCGRCDFCCDKPKFGGSNQKRQKCRWRQCLQFAMKRLLPSVWSESEDGAGSPPPYRRRKRPSSARRHHLGPTLKPTLATRTAQPDHTQAPTKQEAGGGFVLPPPGTDLVFLREGASSPVQVPGPVAASTEALLQEAQCSGLSWVVALPQVKQEKADTQDEWTPGTAVLTSPVLVPGCPSKAVDPGLPSVKQEPPDPEEDKEENKDDSASKLAPEEEAGGAGTPVITEIFSLGGTRFRDTAVWLPRSKDLKKPGARKQ

SEQ ID NO: 53371 - protein, 567 aa, Homo sapiens
MAEDWLDCPALGPGWKRREVFRKSGATCGRSDTYYQSPTGDRIRSKVELTRYLGPACDLTLFDFKQGILCYPAPKAHPVAVASKKRKKPSRPAKTRKRQVGPQSGEVRKEAPRDETKADTDTAPASFPAPGCCENCGISFSGDGTQRQRLKTLCKDCRAQRIAFNREQRMFKSRGCGVCRGCQTQEDCGHCPICLRPPRPGLRRQWKCVQRRCLRGKHARRKGGCDSKMAARRRPGAQPLPPPPPSQSPEPTEPHPRALAPSPPAEFIYYCVDEDELPYTNRRQNRKCGACAACLRRMDCGRCDFCCDKPKFGGSNQKRQKCRWRQCLQFAMKRLLPSVWSESEDGAGSPPPYRRRKRPSSARRHHLGPTLKPTLATRTAQPDHTQAPTKQEAGGGFVLPPPGTDLVFLREGASSPVQVPGPVAASTEALLQEAQCSGLSWVVALPQVKQEKADTQDEWTPGTAVLTSPVLVPGCPSKAVDPGLPSVKQEPPDPEEDKEENKDDSASKLAPEEEAGGAGTPVITEIFSLGGTRFRDTAVWLPRYYHLALDWKCNCGYHLCCRSVLVP

SEQ ID NO: 53372 - protein, 535 aa, Homo sapiens
MAEDWLDCPALGPGWKRREVFRKSGATCGRSDTYYQSPTGDRIRSKVELTRYLGPACDLTLFDFKQGILCYPAPKAHPVAVASKKRKKPSRPAKTRKRQVGPQSGEVRKEAPRDETKADTDTAPASFPAPGCCENCGISFSGDGTQRQRLKTLCKDCRAQRIAFNREQRMFKRVGCGECAACQVTEDCGACSTCLLQLPHDVASGLFCKCERRRCLRIVERSRGCGVCRGCQTQEDCGHCPICLRPPRPGLRRQWKCVQRRCLRGKHARRKGGCDSKMAARRRPGAQPLPPPPPSQSPEPTEPHPRALAPSPPAEFIYYCVDEDELKRLLPSVWSESEDGAGSPPPYRRRKRPSSARRHHLGPTLKPTLATRTAQPDHTQAPTKQEAGGGFVLPPPGTDLVFLREGASSPVQVPGPVAASTEALLQAVDPGLPSVKQEPPDPEEDKEENKDDSASKLAPEEEAGGAGTPVITEIFSLGGTRFRDTAVWLPRAGTREGKMDVKCGRPRTQWSPRARAGTHEDGLEPMSVSHHLQLR

SEQ ID NO: 53373 - protein, 655 aa, Homo sapiens
MAEDWLDCPALGPGWKRREVFRKSGATCGRSDTYYQSPTGDRIRSKVELTRYLGPACDLTLFDFKQGILCYPAPKAHPVAVASKKRKKPSRPAKTRKRQVGPQSGEVRKEAPRDETKADTDTAPASFPAPGCCENCGISFSGDGTQRQRLKTLCKDCRAQRIAFNREQRMFKRVGCGECAACQVTEDCGACSTCLLQLPHDVASGLFCKCERRRCLRIVERSRGCGVCRGCQTQEDCGHCPICLRPPRPGLRRQWKCVQRRCLRGKHARRKGGCDSKMAARRRPGAQPLPPPPPSQSPEPTEPHPRALAPSPPAEFIYYCVDEDELQPYTNRRQNRKCGACAACLRRMDCGRCDFCCDKPKFGGSNQKRQKCRWRQCLQFAMKRLLPSVWSESEDGAGSPPPYRRRKRPSSARRHHLGPTLKPTLATRTAQPDHTQAPTKQEAGGGFVLPPPGTDLVFLREGASSPVQVPGPVAASTEALLQEAQCSGLSWVVALPQVKQEKADTQDEWTPGTAVLTSPVLVPGCPSKAVDPGLPSVKQEPPDPEEDKEENKDDSASKLAPEEEAGGAGTPVITEIFSLGGTRFRDTAVWLPSLQGRHSGREDGCKVWETEDTVEPTSTSWNPRGWPGTHVSLSPPPASMMWVSCRRSWCPSSQS

SEQ ID NO: 53374 - protein, 411 aa, Homo sapiens
MRAHPGGGRCCPEQEEGESAAGGSGAGGDSAIEQGGQGSALAPSPVSGVRREGARGGGRGRGRWKQAGRGGGVCGRGRGRGRGRGRGRGRGRGRGRPPSGGSGLGGDGGGCGGGGSGGGGAPRREPVPFPSGSAGPGPRGPRATESGKRMDCPALPPGWKKEEVIRKSGLSAGKSDVYYFSPSGKKFRSKPQLARYLGNTVDLSSFDFRTGKMMPSKLQKNKQRLRNDPLNQNKGKPDLNTTLPIRQTASIFKQPVTKVTNHPSNKVKSDPQRMNEQPRQLFWEKRLQGLSASDVTEQIIKTMELPKGLQGVGPGSNDETLLSAVASALHTSSAPITGQVSAAVEKNPAVWLNTSQPLCKAFIVTDEDIRKQEERVQQVRKKLEEALMADILSRAADTEEMDIEMDSGDEA

SEQ ID NO: 53375 - protein, 302 aa, Homo sapiens
MRAHPGGGRCCPEQEEGESAAGGSGAGGDSAIEQGGQGSALAPSPVSGVRREGARGGGRGRGRWKQAGRGGGVCGRGRGRGRGRGRGRGRGRGRGRPPSGGSGLGGDGGGCGGGGSGGGGAPRREPVPFPSGSAGPGPRGPRATESGKRMDCPALPPGWKKEEVIRKSGLSAGKSDVYYFSPSGKKFRSKPQLARYLGNTVDLSSFDFRTGKMMPSKLQKNKQRLRNDPLNQNKLRWNTHRPAPWHALSRLCLLIRCLLCLECAYPLPLHLVNSYSSKTQLHCLHLWEACPAYSRQNQSFPP

SEQ ID NO: 53376 - protein, 302 aa, Homo sapiens; identical to SEQ ID NO: 53375

SEQ ID NO: 53377 - protein, 291 aa, Homo sapiens
MERKRWECPALPQGWEREEVPRRSGLSAGHRDVFYYSPSGKKFRSKPQLARYLGGSMDLSTFDFRTGKMLMSKMNKSRQRVRYDSSNQVKGKPDLNTALPVRQTASIFKQPVTKITNHPSNKVKSDPQKAVDQPRQLFWEKKLSGLNAFDIAEELVKTMDLPKGLQGVGPGCTDETLLSAIASALHTSTMPITGQLSAAVEKNPGVWLNTTQPLCKAFMVTDEDIRKQEELVQQVRKRLEEALMADMLAHVEELARDGEAPLDKACAEDDDEEDEEEEEEEPDPDPEMEHV

SEQ ID NO: 53378 - protein, 259 aa, Homo sapiens
MERKSPSGKKFRSKPQLARYLGGSMDLSTFDFRTGKMLMSKMNKSRQRVRYDSSNQVKGKPDLNTALPVRQTASIFKQPVTKITNHPSNKVKSDPQKAVDQPRQLFWEKKLSGLNAFDIAEELVKTMDLPKGLQGVGPGCTDETLLSAIASALHTSTMPITGQLSAAVEKNPGVWLNTTQPLCKAFMVTDEDIRKQEELVQQVRKRLEEALMADMLAHVEELARDGEAPLDKACAEDDDEEDEEEEEEEPDPDPEMEHV

SEQ ID NO: 53379 - protein, 1494 aa, Homo sapiens
MNGGKECDGGDKEGGLPAIQVPVGWQRRVDQNGVLYVSPSGSLLSCLEQVKTYLLTDGTCKCGLECPLILPKVFNFDPGAAVKQRTAEDVKADEDVTKLCIHKRKIIAVATLHKSMEAPHPSLVLTSPGGGTNATPVVPSRAATPRSVRNKSHEGITNSVMPECKNPFKLMIGSSNAMGRLYVQELPGSQQQELHPVYPRQRLGSSEHGQKSPFRGSHGGLPSPASSGSQIYGDGSISPRTDPLGSPDVFTRSNPGFHGAPNSSPIHLNRTPLSPPSVMLHGSPVQSSCAMAGRTNIPLSPTLTTKSPVMKKPMCNFSTNMEIPRAMFHHKPPQGPPPPPPPSCALQKKPLTSEKDPLGILDPIPSKPVNQNPVIINPTSFHSNVHSQVPMMNVSMPPAVVPLPSNLPLPTVKPGHMNHGSHVQRVQHSASTSLSPSPVTSPVHMMGTGIGRIEASPQRSRSSSTSSDHGNFMMPPVGPQATSSGIKVPPRSPRSTIGSPRPSMPSSPSTKSDGHHQYKDIPNPLIAGISNVLNTPSSAAFPTASAGSSSVKSQPGLLGMPLNQILNQHNAASFPASSLLSAAAKAQLANQNKLAGNNSSSSSNSGAVAGSGNTEGHSTLNTMFPPTANMLLPTGEGQSGRAALRDKLMSQQKDALRKRKQPPTTVLSLLRQSQMDSSAVPKPGPDLLRKQGQGSFPISSMSQLLQSMSCQSSHLSSNSTPGCGASNTALPCSANQLHFTDPSMNSSVLQNIPLRGEAVHCHNANTNFVHSNSPVPNHHLAGLINQIQASGNCGMLSQSGMALGNSLHPNPPQSRISTSSTPVIPNSIVSSYNQTSSEAGGSGPSSSIAIAGTNHPAITKTTSVLQDGVIVTTAAGNPLQSQLPIGSDFPFVGQEHALHFPSNSTSNNHLPHPLNPSLLSSLPISLPVNQQHLLNQNLLNILQPSAGEGDMSSINNTLSNHQLTHLQSLLNNNQMFPPNQQQQQLLQGYQNLQAFQGQSTIPCPANNNPMACLFQNFQVRMQEDAALLNKRISTQPGLTALPENPNTTLPPFQDTPCELQPRIDPSLGQQVKDGLVVGGPGDASVDAIYKAVVDAASKGMQVVITTAVNSTTQISPIPALSAMSAFTASIGDPLNLSSAVSAVIHGRNMGGVDHDGRLRNSRGARLPKNLDHGKNVNEGDGFEYFKSASCHTSKKQWDGEQSPRGERNRWKYEEFLDHPGHIHSSPCHERPNNVSTLPFLPGEQHPILLPPRNCPGDKILEENFRYNNYKRTMMSFKERLENTVERCAHINGNRPRQSRGFGELLSTAKQDLVLEEQSPSSSNSLENSLVKDYIHYNGDFNAKSVNGCVPSPSDAKSISSEDDLRNPDSPSSNELIHYRPRTFNVGDLVWGQIKGLTSWPGKLVREDDVHNSCQQSPEEGKVEPEKLKTLTEGLEAYSRVRKRNRKSGKLNNHLEAAIHEAMSELDKMSGTVHQIPQGDRQMRPPKPKRRKISR

SEQ ID NO: 53380 - protein, 725 aa, Homo sapiens
MAAASAVSVLLVAAERNRWHRLPSLLLPPRTWVWRQRTMKYTTATGRNITKVLIANRGEIACRVMRTAKKLGVQTVAVYSEADRNSMHVDMADEAYSIGPAPSQQSYLSMEKIIQVAKTSAAQAIHPGCGFLSENMEFAELCKQEGIIFIGPPPSAIRDMGIKSTSKSIMAAAGVPVVEGYHGEDQSDQCLKEHARRIGYPVMIKAVRGGGGKGMRIVRSEQEFQEQLESARREAKKSFNDDAMLIEKFVDTPRHVEVQVFGDHHGNAVYLFERDCSVQRRHQKIIEEAPAPGIKSEVRKKLGEAAVRAAKAVNYVGAGTVEFIMDSKHNFCFMEMNTRLQVEHPVTEMITGTDLVEWQLRIAAGEKIPLSQEEITLQGHAFEARIYAEDPSNNFMPVAGPLVHLSTPRADPSTRIETGVRQGDEVSVHYDPMIAKLVVWAADRQAALTKLRYSLRQYNIVGLHTNIDFLLNLSGHPEFEAGNVHTDFIPQHHKQLLLSRKAAAKESLCQAALGLILKEKAMTDTFTLQAHDQFSPFSSSSGRRLNISYTRNMTLKDGKNNVAIAVTYNHDGSYSMQIEDKTFQVLGNLYSEGDCTYLKCSVNGVASKAKLIILENTIYLFSKEGSIEIDIPVPKYLSSVSSQETQGGPLAPMTGTIEKVFVKAGDKVKAGDSLMVMIAMKMEHTIKSPKDGTVKKVFYREGAQANRHTPLVEFEEEESDKRESE

SEQ ID NO: 53381 - protein, 575 aa, Homo sapiens
MEKIIQVAKTSAAQHIQSIMAAAGVPVVEGYHGEDQSDQCLKEHARRIGYPVMIKAVRGGGGKGMRIVRSEQEFQEQLESARREAKKSFNDDAMLIEKFVDTPRHVEVQVFGDHHGNAVYLFERDCSVQRRHQKIIEEAPAPGIKSEVRKKLGEAAVRAAKAVNYVGAGTVEFIMDSKHNFCFMEMNTRLQVEHPVTEMITGTDLVEWQLRIAAGEKIPLSQEEITLQGHAFEARIYAEDPSNNFMPVAGPLVHLSTPRADPSTRIETGVRQGDEVSVHYDPMIAKLVVWAADRQAALTKLRYSLRQYNIVGLHTNIDFLLNLSGHPEFEAGNVHTDFIPQHHKQLLLSRKAAAKESLCQAALGLILKEKAMTDTFTLQAHDQFSPFSSSSGRRLNISYTRNMTLKDGKNNVAIAVTYNHDGSYSMQIEDKTFQVLGNLYSEGDCTYLKCSVNGVASKAKLIILENTIYLFSKEGSIEIDIPVPKYLSSVSSQETQGGPLAPMTGTIEKVFVKAGDKVKAGDSLMVMIAMKMEHTIKSPKDGTVKKVFYREGAQANRHTPLVEFEEEESDKRESE

SEQ ID NO: 53382 - protein, 474 aa, Homo sapiens
MAAASAVSVLLVAAERNRWHRLPSLLLPPRTWVWRQRTMKYTTATDEAYSIGPAPSQQSYLSMEKIIQVAKTSAAQAIHPGCGFLSENMEFAELCKQEGIIFIGPPPSAIRDMGIKSTSKSIMAAAGVPVVEGYHGEDQSDQCLKEHARRIGYPVMIKAVRGGGGKGMRIVRSEQEFQEQLESARREAKKSFNDDAMLIEKFVDTPRHVEVQVFGDHHGNAVYLFERDCSVQRRHQKIIEEAPAPGIKSEVRKKLGEAAVRAAKAVNYVGAGTVEFIMDSKHNFCFMEMNTRLQVEHPVTEMITGTDLVEWQLRIAAGEKIPLSQEEITLQGHAFEARIYAEDPSNNFMPVAGPLVHLSTPRADPSTRIETGVRQGDEVSVHYDPMIAKLVVWAADRQAALTKLRYSLRQYNIVGLHTNLTSYSTCLATQSLKLGTCTLISSLNTTNSCCSVGRLQPKSLYARQPWVSSSRRKP

SEQ ID NO: 53383 - protein, 426 aa, Homo sapiens
MEFAELCKQEGIIFIGPPPSAIRDMGIKSTSKSIMAAAGVPVVEGYHGEDQSDQCLKEHARRIGYPVMIKAVRGGGGKGMRIVRSEQEFQEQLESARREAKKSFNDDAMLIEKFVDTPRHVEVQVFGDHHGNAVYLFERDCSVQRRHQKIIEEAPAPGIKSEVRKKLGEAAVRAAKAVNYVGAGTVEFIMDSKHNFCFMEMNTRLQVEHPVTEMITGTDLVEWQLRIAAGEKIPLSQEEITLQGHAFEARIYAEDPSNNFMPVAGPLVHLSTPRADPSTRIETGVRQGDEVSVHYDPMIAKLVVWAADRQAALTKLRYSLRQYNIVGLHTNIDFLLNLSGHPEFEAGNVHTDFIPQHHKQLLLSRKAAAKESLCQAALGLILKEKAMTDTFTLQAHDQFSPFSSSSGRRLNISYTRNMTLKDGKNN

SEQ ID NO: 53384 - protein, 200 aa, Homo sapiens
MEKIIQVAKTSAAQAIHPGCGFLSENMEFAELCKQEGIIFIGPPPSAIRDMGIKSTSKSIMAAAGVPVVEGYHGEDQSDQCLKEHARRIGYPVMIKAVRGGGGKGMRIVRSEQEFQEQLESARREAKKSFNDDAMLIEKFVDTPRHVEVQVFGDHHGNAVYLFERDCSVQRRHQKIIEEAPAPGIKSEVRKKGRSCSQSC

SEQ ID NO: 53385 - protein, 525 aa, Homo sapiens
MWAVLRLALRPCARASPAGPRAYHGDSVASLGTQPDLGSALYQENYKQMKALVNQLHERVEHIKLGGGEKARALHISRGKLLPRERIDNLIDPGSPFLELSQFAGYQLYDNEEVPGGGIITGIGRVSGVECMIIANDATVKGGAYYPVTVKKQLRAQEIAMQNRLPCIYLVDSGGAYLPRQADVFPDRDHFGRTFYNQAIMSSKNIAQVKAATGEEVSAEDLGGADLHCRKSGVSDHWALDDHHALHLTRKVVRNLNYQKKLDVTIEPSEEPLFPADELYGIVGANLKRSFDVREVIARIVDGSRFTEFKAFYGDTLVTGFARIFGYPVGIVGNNGVLFSESAKKGTHFVQLCCQRNIPLLFLQNITGFMVGREYEAEGIAKDGAKMVAAVACAQVPKITLIIGGSYGAGNYGMCGRAYSPRFLYIWPNARISVMGGEQAANVLATITKDQRAREGKQFSSADEAALKEPIIKKFEEEGNPYYSSARVWDDGIIDPADTRLVLGLSFSAALNAPIEKTDFGIFRM

SEQ ID NO: 53386 - protein, 563 aa, Homo sapiens
MWAVLRLALRPCARASPAGPRAYHGDSVASLGTQPDLGSALYQENYKQMKALVNQLHERVEHIKLGGGEKARALHISRGKLLPRERIDNLIDPGSPFLELSQFAGYQLYDNEEVPGGGIITGIGRVSGVECMIIANDATVKGGAYYPVTVKKQLRAQEIAMQNRLPCIYLVDSGGAYLPRQADVFPDRDHFGRTFYNQAIMSSKNIAQIAVVMGSCTAGGAYVPAMADENIIVRKQGTIFLAGPPLVKAATGEEVSAEDLGGADLHCRKSGVSDHWALDDHHALHLTRKVVRNLNYQKKLDVTIEPSEEPLFPADELYGIVGANLKRSFDVREVIARIVDGSRFTEFKAFYGDTLVTGFARIFGYPVGIVGNNGVLFSESAKKGTHFVQLCCQRNIPLLFLQNITGFMVGREYEAEGIAKDGAKMVAAVACAQVPKITLIIGGSYGAGNYGMCGRAYSPRFLYIWPNARISVMGGEQAANVLATITKDQRAREGKQFSSADEAALKEPIIKKFEEEGNPYYSSARVWDDGIIDPADTRLVLGLSFSAALNAPIEKTDFGIFRM

SEQ ID NO: 53387 - protein, 289 aa, Homo sapiens
MAKHIQKEIQRGVESWVSLGNRRPHLSIILVGDNPASHTYVRNKIRAASAVGICSELILKPKDVSQEELLDVTDQLNMDPRVSGILVQLPLPDHVDERTICNGIAPEKDVDGFHIINIGRLCLDQHSLIPATASAVWEIIKRTGIQTFGKNVVVAGRSKNVGMPIAMLLHTDGEHERPGGDATVTIAHRYTPKEQLKIHTQLADIIIVAAGIPKLITSDMVKEGAAVIDVGINYVHDPVTGKTKLVGDVDFEAVKKKAGFITPVPGGVGPMTVAMLLKNTLLAAKKIIY

SEQ ID NO: 53388 - protein, 223 aa, Homo sapiens
MAKHIQKEIQRGVESWVSLGNRRPHLSIILVGDNPASHTYVRNKIRAASAVGICSELILKPKDVSQEELLDVTDQLNMDPRVSGILVQLPLPDHVDERTICNGIAPEKDVDGFHIINIGRLCLDQHSLIPATASAVWEIIKRTGIQTFGKNVVVAGRSKNVGMPIAMLLHTDGEHERPGGDATVTIAHRYTPKEQLKIHTQLADIIIVAAERFHHFAQDLSNS

SEQ ID NO: 53389 - protein, 253 aa, Homo sapiens
MAKHIQKEIQRGVESWVSLGNRRPHLSIILVGDNPASHTYVRNKIRAASAVGICSELILKPKDVSQEELLDVTDQLNMDPRVSGILVQLPLPDHVDERTICNGIAPEKDVDGFHIINIGRLCLDQHSLIPATASAVWEIIKRTGIQTFGKNVVVAGRSKNVGMPIAMLLHTDGEHERPGGDATVTIAHRYTPKEQLKIHTQLADIIIVAAGIPKLITSDMVKEGAAVIDVGINYVHDPVTGKTKLVGDVDFEA

SEQ ID NO: 53390 - protein, 347 aa, Homo sapiens
MTVPVRGFSLLRGRLGRAPALGRSTAPSVRAPGEPGSAFRGFRSSGVRHEAIIISGTEMAKHIQKEIQRGVESWVSLGNRRPHLSIILVGDNPASHTYVRNKIRAASAVGICSELILKPKDVSQEELLDVTDQLNMDPRVSGILVQLPLPDHVDERTICNGIAPEKDVDGFHIINIGRLCLDQHSLIPATASAVWEIIKRTGIQTFGKNVVVAGRSKNVGMPIAMLLHTDGEHERPGGDATVTIAHRYTPKEQLKIHTQLADIIIVAAGIPKLITSDMVKEGAAVIDVGINYVHDPVTGKTKLVGDVDFEAVKKKAGFITPVPGGVGPMTVAMLLKNTLLAAKKIIY

SEQ ID NO: 53391 - protein, 146 aa, Homo sapiens
MDPRVSGILVQLPLPDHVDERTICNGIAPEKDVDGFHIINIGRLCLDQHSLIPATASAVWEIIKRTGIQTFGKNVVVAGRSKNVGMPIAMLLHTDGEHERPGGDATVTIAHRYTPKEQLKIHTQLADIIIVAAERFHHFAQDLSNS

SEQ ID NO: 53392 - protein, 418 aa, Homo sapiens
MPMLLPHPHQHFLKGLLRAPFRCYHFIFHSSTHLGSGIPCAQPFNSLGLHCTKWMLLSDGLKRKLCVQTTLKDHTEGLSDKEQRFVDKLYTGLIQGQRACLAEAITLVESTHSRKKELAQVLLQKVLLYHREQEQSNKGKPLAFRVGLSGPPGAGKSTFIEYFGKMLTERGHKLSVLAVDPSSCTSGGSLLGDKTRMTELSRDMNAYIRPSPTRGTLGGVTRTTNEAILLCEGAGYDIILIETVGVGQSEFAVADMVDMFVLLLPPAGGDELQGIKRGIIEMADLVAVTKSDGDLIVPARRIQAEYVSALKLLRKRSQVWKPKVIRISARSGEGISEMWDKMKDFQDLMLASGELTAKRRKQQKVWMWNLIQESVLEHFRTHPTVREQIPLLEQKVLIGALSPGLAADFLLKAFKSRD

SEQ ID NO: 53393 - protein, 424 aa, Homo sapiens
MPMLLPHPHQHFLKGLLRAPFRCYHFIFHSSTHLGSGIPCAQPFNSLGLHCTKWMLLSDGLKRKLCVQTTLKDHTEGLSDKEQRFVDKLYTGLIQGQRACLAEAITLVESTHSRKKELAQVLLQKVLLYHREQEQSNKGKPLAFRVGLSGPPGAGKSTFIEYFGKMLTERGHKLSVLAVDPSSCTSGGSLLGDKTRMTELSRDMNAYIRPSPTRGTLGGVTRTTNEAILLCEGAGYDIILIETVGVGQSEFAVADMVDMFVLLLPPAGGDELQGIKRGIIEMADLVAVTKSDGDLIVPARRIQAEYVSALKLLRKRSQVWKPKVIRISARSGEGISEMWDKMKDFQDLMLASGELTAKRRKQQKVWMWNLIQESVLEHFRTHPTVREQIPLLEQKVLIGALSPGLAADFLLKALKAETNKIHPV

SEQ ID NO: 53394 - protein, 137 aa, Homo sapiens
MADLVAVTKSDGDLIVPARRIQAEYVSALKLLRKRSQVWKPKVIRISARSGEGISEMWDKMKDFQDLMLASGELTAKRRKQQKVWMWNLIQESVLEHFRTHPTVREQIPLLEQKVLIGALSPGLAADFLLKAFKSRD

SEQ ID NO: 53395 - protein, 159 aa, Homo sapiens
MAGLTRFALELVTEKGHTFAEELQKIQCTLQDVGSALATPCSSAREAHLKYTTFKAGPILELEQWIDKYTSQLPPLTAFILPSGGKISSALHFCRAVCRRAERRVVPLVQMGETDANVAKFLNRLSDYLFTLARYAAMKEGNQEKIYMKNDPSAESEGL

SEQ ID NO: 53396 - protein, 250 aa, Homo sapiens
MAVCGLGSRLGLGSRLGLRGCFGAARLLYPRFQSRGPQGVEDGDRPQPSSKTPRIPKIYTKTGDKGFSSTFTGERRPKDDQVFEAVGTTDELSSAIGFALELVTEKGHTFAEELQKIQCTLQDVGSALATPCSSAREAHLKYTTFKAGPILELEQWIDKYTSQLPPLTAFILPSGGKISSALHFCRAVCRRAERRVVPLVQMGETDANVAKFLNRLSDYLFTLARYAAMKEGNQEKIYMKNDPSAESEGL

SEQ ID NO: 53397 - protein, 282 aa, Homo sapiens
MEPKVAELKQKIEDTLCPFGFEVYPFQVAWYNELLPPAFHLPLPGPTLAFLVLSTPAMFDRALKPFLQSCHLRMLTDPVDQCVAYHLGRVRESLPELQIEIIADYEVHPNRRPKILAQTAAHVAGAAYYYQRQDVEADPWGNQRISGVCIHPRFGGWFAIRGVVLLPGIEVPDLPPRKPHDCVPTRADRIALLEGFNFHWRDWTYRDAVTPQERYSEEQKAYFSTPPAQRLALLGLAQPSEKPSSPSPDLPFTTPAPKKPGNPSRARSWLSPRVSPPASPGP

SEQ ID NO: 53398 - protein, 296 aa, Homo sapiens
MANVLCNRARLVSYLPGFCSLVKRVVNPKAFSTAGSSGSDESHVAAAPPDICSRTVWPDETMGPFGPQDQRFQLPGNIGFDCHLNGTASQKKSLVHKTLPDVLAEPLSSERHEFVMAQYVNEFQGNDAPVEQEINSAETYFESARVECAIQTCPELLRKDFESLFPEVANGKLMILTVTQKTKNDMTVWSEEVEIEREVLLEKFINGAKEICYALRAEGYWADFIDPSSGLAFFGPYTNNTLFETDERYRHLGFSVDDLGCCKVIRHSLWGTHVVVGSIFTNATPDSHIMKKLSGN

SEQ ID NO: 53399 - protein, 296 aa, Homo sapiens; identical to SEQ ID NO: 53398

SEQ ID NO: 53400 - protein, 176 aa, Homo sapiens
MARVLKAAAANAVGLFSRLQAPIPTVRASSTSQPLDQVTGSVWNLGRLNHVAIAVPDLEKAAAFYKNILGAQVSEAVPLPEHGVSVVFVNLGNTKMELLHPLGRDSPIAGFLQKNKAGGMHHICIEVDNINAAVMDLKKKKIRSLSEEVKIGAHGKPVIFLHPKDCGGVLVELEQA

SEQ ID NO: 53401 - protein, 689 aa, Homo sapiens
MIEMAAEKEPFLVPAPPPPLKDESGGGGGPTVPPHQEAASGELRGGTERGPGRCAPSAGSPAAAVGRESPGAAATSSSGPQAQQHRGGGPQAQSHGEARLSDPPGRAAPPDVGEERRGGGGTELGPPAPPRPRNGYQPHRPPGGGGGKRRNSCNVGGGGGGFKHPAFKRRRRVNSDCDSVLPSNFLLGGNIFDPLNLNSLLDEEVSRTLNAETPKSSPLPAKGRDPVEILIPKDITDPLSLNTCTDEGHVVLASPLKTGRKRHRHRGQHHQQQQAAGGSESHPVPPTAPLTPLLHGEGASQQPRHRGQNRDAPQPYELNTAINCRDEVVSPLPSALQGPSGSLSAPPAASVISAPPSSSSRHRKRRRTSSKSEAGARGGGQGSKEKGRGSWGGRHHHHHPLPAAGFKKQQRKFQYGNYCKYYGYRNPSCEDGRLRVLKPEWFRGRDVLDLGCNVGHLTLSIACKWGPSRMVGLDIDSRLIHSARQNIRHYLSEELRLPPQTLEGDPGAEGEEGTTTVRKRSCFPASLTASRGPIAAPQVPLDGADTSVFPNNVVFVTGNYVLDRDDLVEAQTPEYDVVLCLSLTKWVHLNWGDEGLKRMFRRIYRHLRPGGILVLEPQPWSSYGKRKTLTETIYKNYYRIQLKPEQFSSYLTSPDVGFSSYELVATPHNTSKGFQRPVYLFHKARSPSH

SEQ ID NO: 53402 - protein, 220 aa, Homo sapiens
MVGLDIDSRLIHSARQNIRHYLSEELRLPPQTLEGDPGAEGEEGTTTVRKRSCFPASLTASRGPIAAPQVPLDGADTSVFPNNVVFVTGNYVLDRDDLVEAQTPEYDVVLCLSLTKWVHLNWGDEGLKRMFRRIYRHLRPGGILVLEPQPWSSYGKRKTLTETIYKNYYRIQLKPEQFSSYLTSPDVGFSSYELVATPHNTSKGFQRPVYLFHKARSPSH

SEQ ID NO: 53403 - protein, 283 aa, Homo sapiens
MASGTTTTAVKIGIIGGTGLDDPEILEGRTEKYVDTPFGKPSDALILGKIKNVDCVLLARHGRQHTIMPSKVNYQANIWALKEEGCTHVIVTTACGSLREEIQPGDIVIIDQFIDRTTMRPQSFYDGSHSCARGVCHIPMAEPFCPKTREVLIETAKKLGLRCHSKGTMVTIEGPRFSSRAESFMFRTWGADVINMTTVPEVVLAKEAGICYASIAMATDYDCWKEHEEAVSVDRVLKTLKENANKAKSLLLTTIPQIGSTEWSETLHNLKNMAQFSVLLPRH

SEQ ID NO: 53404 - protein, 155 aa, Homo sapiens
MAAETRNVAGAEAPPPQKRYYRQRAHSNPMADHTLRYPVKPEEMDWSELYPEFFAPLTQNQSHDDPKDKKEKRAQAQVEFADIGCGYGGLLADKDVLPLPRPTFQADKAQVANHQSHPASRICLRAKSWGAGVYHNRCAGATRLDVHSFRRAPTV

SEQ ID NO: 53405 - protein, 276 aa, Homo sapiens
MAAETRNVAGAEAPPPQKRYYRQRAHSNPMADHTLRYPVKPEEMDWSELYPEFFAPLTQNQSHDDPKDKKEKRAQAQVEFADIGCGYGGLLVELSPLFPDTLILGLEIRVKVSDYVQDRIRALRAAPAGGFQNIACLRSNAMKHLPNFFYKGQLTKMFFLFPDPHFKRTKHKWRIISPTLLAEYAYVLRVGGLVYTITDVLELHDWMCTHFEEHPLFERVPLEDLSEDPVVGHLGTSTEEGKKVLRNGGKNFPAIFRRIQDPVLQAVTSQTSLPGH

SEQ ID NO: 53406 - protein, 757 aa, Homo sapiens
MAEVGRTGISYPGALLPQGFWAAVEVWLERPQVANKRLCGARLEARWSAALPCAEARGPGTSAGSEQKERGPGPGQGSPGGGPGPRSLSGPEQGTACCELEEAQGQCQQEEAQREAASVPLRDSGHPGHAEGREGDFPAADLDSLWEDFSQSLARGNSELLAFLTSSGAGSQPEAQRELDVVLRTVIPKTSPHCPLTTPRREIVVQDVLNGTITFLPLEEDDEGNLKVKMSNVYQIQLSHSKEEWFISVLIFCPERWHSDGIVYPKPTWLGEELLAKLAKWSVENKKSDFKSTLSLISIMKYSKAYQELKEKYKEMVKVWPEVTDPEKFVYEDVAIAAYLLILWEEERAERRLTARQSFVDLGCGNGLLVHILSSEGHPGRGIDVRRRKIWDMYGPQTQLEEDAITPNDKTLFPDVDWLIGNHSDELTPWIPVIAARSSYNCRFFVLPCCFFDFIGRYSRRQSKKTQYREYLDFIKEVGFTCGFHVDEDCLRIPSTKRVCLVGKSRTYPSSREASVDEKRTQYIKSRRGCPVSPPGWELSPSPRWVAAGSAGHCDGQQALDARVGCVTRAWAAEHGAGPQAEGPWLPGFHPREKAERVRNCAALPRDFIDQVVLQVANLLLGGKQLNTRSSRNGSLKTWNGGESLSLAEVANELDTETLRRLKRECGGLQTLLRNSHQVFQVVNGRVHIRDWREETLWKTKQPEAKQRLLSEACKTRLCWFFMHHPDGCALSTDCCPFAHGPAELRPPRTTPRKKIS

SEQ ID NO: 53407 - protein, 411 aa, Homo sapiens
MCIKFSSVIAKKNERWHSDGIVYPKPTWLGEELLAKLAKWSVENKKSDFKSTLSLISIMKYSKAYQELKEKYKEMVKVWPEVTDPEKFVYEDVAIAAYLLILWEEERAERRLTARQSFVDLGCGNGLLVHILSSEGHPGRGIDVRRRKIWDMYGPQTQLEEDAITPNDKTLFPDVDWLIGNHSDELTPWIPVIAARSSYNCRFFVLPCCFFDFIGRYSRRQSKKTQYREYLDFIKEVGFTCGFHVDEDCLRIPSTKRVCLVGKSRTYPSSREASVDEKRTQYIKSRRGCPVSPPGWELSPSPRWVAAGSAGHCDGQQALDARVGCVTRAWAAEHGAGPQAEGPWLPGFHPREKAERVRNCAALPRDFIDQVVLQVANLLLGGKQLNTRSSRNGSLKTWNGGGKLSTILGRG

SEQ ID NO: 53408 - protein, 580 aa, Homo sapiens
MSDTWSSIQAHKKQLDSLRERLQRRRKQDSGHLDLRNPEAALSPTFRSDSPVPTAPTSGGPKPSTASAVPELATDPELEKKLLHHLSDLALTLPTDAVSICLAISTPDAPATQDGVESLLQKFAAQELIEVKRGLLQDDAHPTLVTYADHSKLSAMMGAVAEKKGPGEVAGTVTGQKRRAEQDSTTVAAFASSLVSGLNSSASEPAKEPAKKSRKHAASDVDLEIESLLNQQSTKEQQSKKVSQEILELLNTTTAKEQSIVEKFRSRGRAQVQEFCDYGTKEECMKASDADRPCRKLHFRRIINKHTDESLGDCSFLNTCFHMDTCKYVHYEIDACMDSEAPGSKDHTPSQELALTQSVGGDSSADRLFPPQWICCDIRYLDVSILGKFAVVMADPPWDIHMELPYGTLTDDEMRRLNIPVLQDDGFLFLWVTGRAMELGRECLNLWGYERVDEIIWVKTNQLQRIIRTGRTGHWLNHGKEHCLVGVKGNPQGFNQGLDCDVIVAEVRSTSHKPDEIYGMIERLSPGTRKIELFGRPHNVQPNWITLGNQLDGIHLLDPDVVARFKQRYPDGIISKPKNL

SEQ ID NO: 53409 - protein, 163 aa, Homo sapiens
MSDTWSSIQAHKKQLDSLRERLQRRRKQDSGHLDLRNPEAALSPTFRSDSPVPTAPTSGGPKPSTASAVPELATDPELEKKLLHHLSDLALTLPTDAVSICLAISTPDAPATQDGVESLLQKFAAQELIEVKRGLLQDDAHPTLVTYADHSKLSAMMGAVAEK

SEQ ID NO: 53410 - protein, 153 aa, Homo sapiens
MSDTWSSIQAHKKQLDSLRERLQRRRKQDSGHLDLRNPEAALSPTFRSDSPVPTAPTSGGPKPSTASAVPELATDPELEKKLLHHLSDLALTLPTDAVSICLAISTPDAPATQDGVESLLQKFAAQELIEHRNQQRSQPRNQGNMLPQMLIWR

SEQ ID NO: 53411 - protein, 396 aa, Homo sapiens
MLSEVLLVSAPGKVILHGEHAVVHGKVALAVSLNLRTFLRLQPHSNGKVDLSLPNIGIKRAWDVARLQSLDTSFLEQGDVTTPTSEQVEKLKEVAGLPDDCAVTERLAVLAFLYLYLSICRKQRALPSLDIVVWSELPPGAGLGSSAAYSVCLAAALLTVCEEIPNPLKDGDCVNRWTKEDLELINKWAFQGERMIHGNPSGVDNAVSTWGGALRYHQGKISSLKRSPALQILLTNTKVPRNTRALVAGVRNRLLKFPEIVAPLLTSIDAISLECERVLGEMGEAPAPEQYLVLEELIDMNQHHLNALGVGHASLDQLCQVTRARGLHSKLTGAGGGGCGITLLKPGLEQPEVEATKQALTSCGFDCLETSIGAPGVSIHSATSLDSRVQQALDGL

SEQ ID NO: 53412 - protein, 344 aa, Homo sapiens
MLSEVLLVSAPGKVILHGEHAVVHGKVALAVSLNLRTFLRLQPHSNGKVDLSLPNIGIKRAWDVARLQSLDTSFLEQGDVTTPTSEQVEKLKEVAGLPDDCAVTERLAVLAFLYLYLSICRKQRWTKEDLELINKWAFQGERMIHGNPSGVDNAVSTWGGALRYHQGKISSLKRSPALQILLTNTKVPRNTRALVAGVRNRLLKFPEIVAPLLTSIDAISLECERVLGEMGEAPAPEQYLVLEELIDMNQHHLNALGVGHASLDQLCQVTRARGLHSKLTGAGGGGCGITLLKPGLEQPEVEATKQALTSCGFDCLETSIGAPGVSIHSATSLDSRVQQALDGL

SEQ ID NO: 53413 - protein, 171 aa, Homo sapiens
MLSEVLLVSAPGKVILHGEHAVVHGKVALAVSLNLRTFLRLQPHSNGKVDLSLPNIGIKRAWDVARLQSLDTSFLEQGDVTTPTSEQVEKLKEVAGLPDDCAVTERLAVLAFLYLYLSICRKQRALPSLDIVVWSELPPGAGLGSSAAYSVCLAAALLTVCEEIPNPLKDG

SEQ ID NO: 53414 - protein, 344 aa, Homo sapiens; identical to SEQ ID NO: 53412

SEQ ID NO: 53415 - protein, 202 aa, Homo sapiens
MIHGNPSGVDNAVSTWGGALRYHQGKISSLKRSPALQILLTNTKVPRNTRALVAGVRNRLLKFPEIVAPLLTSIDAISLECERVLGEMGEAPAPEQYLVLEELIDMNQHHLNALGVGHASLDQLCQVTRARGLHSKLTGAGGGGCGITLLKPGLEQPEVEATKQALTSCGFDCLETSIGAPGVSIHSATSLDSRVQQALDGL

SEQ ID NO: 53416 - protein, 201 aa, Homo sapiens
MLSEVLLVSAPGKVILHGEHAVVHGKVALAVSLNLRTFLRLQPHSNGKVDLSLPNIGIKRAWDVARLQSLDTSFLEQGDVTTPTSEQVEKLKEVAGLPDDCAVTERLAVLAFLYLYLSICRKQRALPSLDIVVWSELPPGAGLGSSAAYSVCLAAALLTVCEEIPNPLKDGDCVNRWTKEDLELINKWAFQGERMIHGNPS

SEQ ID NO: 53417 - protein, 520 aa, Homo sapiens
MPSLVVSGIMERNGGFGELGCFGGSAKDRGLLEDERALQLALDQLCLLGLGEPPAPTAGEDGGGGGGGAPAQPAAPPQPAPPPPPAAPPAAPTAAPAAQTPQPPTAPKGASDAKLCALYKEAELRLKGSSNTTECVPVPTSEHVAEIVGRQGCKIKALRAKTNTYIKTPVRGEEPVFMVTGRREDVATARREIISAAEHFSMIRASRNKSGAAFGVAPALPGQVTIRVRVPYRVVGLVVGPKGATIKRIQQQTNTYIITPSRDRDPVFEITGAPGNVERAREEIETHIAVRTGKILEYNNENDFLAGSPDAAIDSRYSDAWRVHQPGCKPLSTFRQNSLGCIGECGVDSGFEAPRLGEQGGDFGYGGYLFPGYGVGKQDVYYGVAETSPPLWAGQENATPTSVLFSSASSSSSSSAKARAGPPGAHRSPATSAGPELAGLPRRPPGEPLQGFSKLGGGGLRSPGGGRDCMVCFESEVTAALVPCGHNLFCMECAVRICERTDPECPVCHITATQAIRIFS

SEQ ID NO: 53418 - protein, 569 aa, Homo sapiens
MPSSLFADLERNGSGGGGGGSSGGGETLDDQRALQLALDQLSLLGLDSDEGASLYDSEPRKKSVNMTECVPVPSSEHVAEIVGRQGCKIKALRAKTNTYIKTPVRGEEPVFVVTGRKEDVAMARREIISAAEHFSMIRASRNKNTALNGAVPGPPNLPGQTTIQVRVPYRVVGLVVGPKGATIKRIQQQTHTYIVTPSRDKEPVFEVTGMPENVDRAREEIEAHIALRTGGIIELTDENDFHANGTDVGFDLHHGSGGSGPGSLWSKPTPSITPTPGRKPFSSYRNDSSSSLGSASTDSYFGGGTSSSAAATQRLADYSPPSPALSFAHNGNNNNNGNGYTYTAGGEASVPSPDGCPELQPTFDPAPAPPPGAPLIWAQFERSPGGGPAAPVSSSCSSSASSSASSSSVVFPGGGASAPSNANLGLLVHRRLHPGTSCPRLSPPLHMAPGAGEHHLARRVRSDPGGGGLAYAAYANGLGAQLPGLQPSDTSGSSSSSSSSSSSSSSSSGLRRKGSRDCSVCFESEVIAALVPCGHNLFCMECANRICEKSEPECPVCHTAVTQAIRIFS

SEQ ID NO: 53419 - protein, 659 aa, Homo sapiens
MPSGSSAALALAAAPAPLPQPPPPPPPPPPPLPPPSGGPELEGDGLLLRERLAALGLDDPSPAEPGAPALRAPAAAAQGQARRAAELSPEERAPPGRPGAPEAAELELEEDEEEGEEAELDGDLLEEEELEEAEEEDRSSLLLLSPPAATASQTQQIPGGSLGSVLLPAARFDAREAAAAAAAAGVLYGGDDAQGMMAAMLSHAYGPGGCGAAAAALNGEQAALLRRKSVNTTECVPVPSSEHVAEIVGRQGCKIKALRAKTNTYIKTPVRGEEPIFVVTGRKEDVAMAKREILSAAEHFSMIRASRNKNGPALGGLSCSPNLPGQTTVQVRVPYRVVGLVVGPKGATIKRIQQQTHTYIVTPSRDKEPVFEVTGMPENVDRAREEIEMHIAMRTGNYIELNEENDFHYNGTDVSFEGGTLGSAWLSSNPVPPSRARMISNYRNDSSSSLGSGSTDSYFGSNRLADFSPTSPFSTGNFWFGDTLPSVGSEDLAVDSPAFDSLPTSAQTIWTPFEPVNPLSGFGSDPSGNMKTQRRGSQPSTPRLSPTFPESIEHPLARRVRSDPPSTGNHVGLPIYIPAFSNGTNSYSSSNGGSTSSSPPESRRKHDCVICFENEVIAALVPCGHNLFCMECANKICEKRTPSCPVCQTAVTQAIQIHS

SEQ ID NO: 53420 - protein, 165 aa, Homo sapiens
WRWTSCRRSGWGALATRTRRGRPGTPPPPRPSPPDVFAGFAPHPAALGPPTLLADQMSVIGSRKKSVNMTECVPVPSSEHVAEIVGRQGCKIKALRAKTNTYIKTPVRGEEPVFIVTGRKEDVEMAKREILSAAEHFSIIRATRSKAGGLPGAAQGPPNLPGQTT

SEQ ID NO: 53421 - protein, 666 aa, Homo sapiens
MPSSLGQPDGGGGGGGGGGGVGAAGEDPGPGPAPPPEGAQEAAPAPRPPPEPDDAAAALRLALDQLSALGLGGAGDTDEEGAAGDGAAAAGGADGGAAPEPVPPDGPEAGAPPTLAPAVAPGSLPLLDPNASPPPPPPPRPSPPDVFAGFAPHPAALGPPTLLADQMSVIGSRKKSVNMTECVPVPSSEHVAEIVGRQGCKIKALRAKTNTYIKTPVRGEEPVFIVTGRKEDVEMAKREILSAAEHFSIIRATRSKAGGLPGAAQGPPNLPGQTTIQVRVPYRVVGLVVGPKGATIKRIQQRTHTYIVTPGRDKEPVFAVTGMPENVDRAREEIEAHITLRTGAFTDAGPDSDFHANGTDVCLDLLGAAASLWAKTPNQGRRPPTATAGLRGDTALGAPSAPEAFYAGSRGGPSVPDPGPASPYSGSGNGGFAFGAEGPGAPVGTAAPDDCDFGFDFDFLALDLTVPAAATIWAPFERAAPLPAFSGCSTVNGAPGPPAAGARRSSGAGTPRHSPTLPEPGGLRLELPLSRRGAPDPVGALSWRPPQGPVSFPGGAAFSTATSLPSSPAAAACAPLDSGASENSRKPPSASSAPALARECVVCAEGEVMAALVPCGHNLFCMDCAVRICGKSEPECPACRTPATQAIRVETETPQPGGASALQRQY

SEQ ID NO: 53422 - protein, 651 aa, Homo sapiens
MPSSLGQPDGGGGGGGGGGGVGAAGEDPGPGPAPPPEGAQEAAPAPRPPPEPDDAAAALRLALDQLSALGLGGAGDTDEEGAAGDGAAAAGGADGGAAPEPVPPDGPEAGAPPTLAPAVAPGSLPLLDPNASPPPPPPPRPSPPDVFAGFAPHPAALGPPTLLADQMSVIGSRKKSVNMTECVPVPSSEHVAEIVGRQGCKIKALRAKTNTYIKTPVRGEEPVFIVTGRKEDVEMAKREILSAAEHFSIIRATRSKAGGLPGAAQGPPNLPGQTTIQVRVPYRVVGLVVGPKGATIKRIQQRTHTYIVTPGRDKEPVFAVTGMPENVDRAREEIEAHITLRTGAFTDAGPDSDFHANGTDVCLDLLGAAASLWAKTPNQGRRPPTATAGLRGDTALGAPSAPEAFYAGSRGGPSVPDPGPASPYSGSGNGGFAFGAEGPGAPVGTAAPDDCDFGFDFDFLALDLTVPAAATIWAPFERAAPLPAFSGCSTVNGAPGPPAAGARRSSGAGTPRHSPTLPEPGGLRLELPLSRRGAPDPVGALSWRPPQGPVSFPGGAAFSTATSLPSSPAAAACAPLDSGASENSRKPPSASSAPALARECVVCAEGEVMAALVPCGHNLFCMDCAVRICGKSEPECPACRTPATQAIHIFS

SEQ ID NO: 53423 - protein, 321 aa, Homo sapiens
MQCRLPRGLAGALLTLLCMGLLCLRYHLNLSPQRVQGTPELSQPNPGPPKLQLHDVFIAVKTTRAFHRLRLELLLDTWVSRTREQTFVFTDSPDKGLQERLGSHLVVTNCSAEHSHPALSCKMAAEFDTFLASGLRWFCHVDDDNYVNPRALLQLLRAFPLARDVYVGRPSLNRPIHASEPQPHNRTRLVQFWFATGGAGFCINRKLALKMAPWASGSRFMDTSALIRLPDDCTMGYIIECKLGGRLQPSPLFHSHLETLQLLRTAQLPEQVTLSYGVFEGKLNVIKLQGPFSPEEDPSRFRSLHCLLYPDTPWCPQLGAR

SEQ ID NO: 53424 - protein, 307 aa, Homo sapiens
MQCRLPRGLAGALLTLLCMGLLCLRYHLNLSPQRVQGTPELSQPNPGPPKLQLHDVFIAVKTTRAFHRLRLELLLDTWVSRTREQVTRSHLVVTNCSAEHSHPALSCKMAAEFDTFLASGLRWFCHVDDDNYVNPRALLQLLRAFPLARDVYVGRPSLNRPIHASEPQPHNRTRLVQFWFATGGAGFCINRKLALKMAPWASGSRFMDTSALIRLPDDCTMGYIIECKLGGRLQPSPLFHSHLETLQLLRTAQLPEQVTLSYGVFEGKLNVIKLQGPFSPEEDPSRFRSLHCLLYPDTPWCPQLGAR

SEQ ID NO: 53425 - protein, 118 aa, Homo sapiens
MQCRLPRGLAGALLTLLCMGLLCLRYHLNLSPQRVQGTPELSQPNPGPPKLQLHDVFIAVKTTRAFHRLRLELLLDTWVSRTREQTFVFTDSPDKGLQERLGSPDSSSLLQGPTLWSP

SEQ ID NO: 53426 - protein, 132 aa, Homo sapiens
MAAEFDTFLASGLRWFCHVDDDNYVNPRALLQLLRAFPLARDVYVGRPSLNRPIHASEPQPHNRTRLVQFWFATGGAGFCINRKLALKMAPWASGSRFMDTSALIRLPDDCTMGYIIECKLGGRLQPSPLFH

SEQ ID NO: 53427 - protein, 43 aa, Homo sapiens
MAAEFDTFLASGLRWFCHVDDDNYVNPRALLQLLRAFPLARDV

SEQ ID NO: 53428 - protein, 87 aa, Homo sapiens
  VARIANT 1: note = MOD_RES - Any amino acid
XSHLETLQLLRTAQLPEQISLPPLSALSRYTLVSPAGCPMNPELLGKGWAETSGCALAPKVALWVPGKCLVIGSPWQGLRVVGKPRI

SEQ ID NO: 53429 - protein, 332 aa, Homo sapiens
MGLGPVFLLLAGIFPFAPPGAAAEPHSLRYNLTVLSWDGSVQSGFLAEVHLDGQPFLRYDRQKCRAKPQGQWAEDVLGNKTWDRETRDLTGNGKDLRMTLAHIKDQKEGLHSLQEIRVCEIHEDNSTRSSQHFYYDGELFLSQNLETEEWTVPQSSRAQTLAMNVRNFLKEDAMKTKTHYHAMHADCLQELRRYLESGVVLRRTVPPMVNVTRSEASEGNITVTCRASSFYPRNIILTWRQDGVSLSHDTQQWGDVLPDGNGTYQTWVATRICRGEEQRFTCYMEHSGNHSTHPVPSGKVLVLQSHWQTFHVSAVAAGCCYFCYYYFLCPLL

SEQ ID NO: 53430 - protein, 194 aa, Homo sapiens
MGQRDQGLDRERKGPQDDPGSYQGPERRNFLKEDAMKTKTHYHAMHADCLQELRRYLESGVVLRRTVPPMVNVTRSEASEGNITVTCRASSFYPRNIILTWRQDGVSLSHDTQQWGDVLPDGNGTYQTWVATRICRGEEQRFTCYMEHSGNHSTHPVPSGKVLVLQSHWQTFHVSAVAAGCCYFCYYYFLCPLL

SEQ ID NO: 53431 - protein, 289 aa, Homo sapiens
MGLGPVFLLLAGIFPFAPPGAAAEPHSLRYNLTVLSWDGSVQSGFLAEVHLDGQPFLRYDRQKCRAKPQGQWAEDVLGNKTWDRETRDLTGNGKDLRMTLAHIKDQKEVPQSSRAQTLAMNVRNFLKEDAMKTKTHYHAMHADCLQELRRYLESGVVLRRTVPPMVNVTRSEASEGNITVTCRASSFYPRNIILTWRQDGVSLSHDTQQWGDVLPDGNGTYQTWVATRICRGEEQRFTCYMEHSGNHSTHPVPSGKVLVLQSHWQTFHVSAVAAGCCYFCYYYFLCPLL

SEQ ID NO: 53432 - protein, 245 aa, Homo sapiens
MGQRDQRLDRERKGPQDDPGSYQGPERRNFLKEDAMKTKTHYHAMHADCLQELRRYLKSGVVLRRTVPPMVNVTRSEASEGNITVTCRASGFYPWNITLSWRQDGVSLSHDTQQWGDVLPDGNGTYQTWVATRICQGEEQRFTCYMEHSGNHSTHPVPSGKVLVLQSHWQTFHVSAVAAAAIFVIIIFYVRCCKKKTSAAEGPELVSLQVLDQHPVGTSDHRDATQLGFQPLMSDLGSTGSTEGA

SEQ ID NO: 53433 - protein, 383 aa, Homo sapiens
MGLGPVFLLLAGIFPFAPPGAAAEPHSLRYNLTVLSWDGSVQSGFLTEVHLDGQPFLRCDRQKCRAKPQGQWAEDVLGNKTWDRETRDLTGNGKDLRMTLAHIKDQKEGLHSLQEIRVCEIHEDNSTRSSQHFYYDGELFLSQNLETKEWTMPQSSRAQTLAMNVRNFLKEDAMKTKTHYHAMHADCLQELRRYLKSGVVLRRTVPPMVNVTRSEASEGNITVTCRASGFYPWNITLSWRQDGVSLSHDTQQWGDVLPDGNGTYQTWVATRICQGEEQRFTCYMEHSGNHSTHPVPSGKVLVLQSHWQTFHVSAVAAAAIFVIIIFYVRCCKKKTSAAEGPELVSLQVLDQHPVGTSDHRDATQLGFQPLMSDLGSTGSTEGA

SEQ ID NO: 53434 - protein, 289 aa, Homo sapiens; identical to SEQ ID NO: 53431

SEQ ID NO: 53435 - protein, 332 aa, Homo sapiens; identical to SEQ ID NO: 53429

SEQ ID NO: 53436 - protein, 194 aa, Homo sapiens; identical to SEQ ID NO: 53430

SEQ ID NO: 53437 - protein, 276 aa, Homo sapiens
FPFAPPGAAAEPHSLRYNLTVLSWDGSVQSGFLAEVHLDGQPFLRYDRQKCRAKPQGQWAEDVLGNKTWDRETRDLTGNGKDLRMTLAHIKDQKEVPPMVNVTRSEASEGNITVTCRASSFYPRNITLTWRQDGVSLSHDTQQWGDVLPDGNGTYQTWVATRICQGEEQRFTCYMEHSGNHSTHPVPSGKVLVLQSHWQTFHVSAVAAAAAAIFVIIIFYVRCCKKKTSAAEGPELVSLQVLDQHPVGTSDHRDATQLGFQPLMSALGSTGSTEGA

SEQ ID NO: 53438 - protein, 385 aa, Homo sapiens
MGLGPVFLLLAGIFPFAPPGAAAEPHSLRYNLTVLSWDGSVQSGFLAEVHLDGQPFLRYDRQKCRAKPQGQWAEDVLGNKTWDRETRDLTGNGKDLRMTLAHIKDQKEGLHSLQEIRVCEIHEDNSTRSSQHFYYDGELFLSQNVETEEWTVPQSSRAQTLAMNVRNFLKEDAMKTKTHYHAMHADCLQELRRYLESSVVLRRRVPPMVNVTRSEASEGNITVTCRASSFYPRNITLTWRQDGVSLSHDTQQWGDVLPDGNGTYQTWVATRICQGEEQRFTCYMEHSGNHSTHPVPSGKVLVLQSHWQTFHVSAVAAAAAAIFVIIIFYVRCCKKKTSAAEGPELVSLQVLDQHPVGTSDHRDATQLGFQPLMSALGSTGSTEGA

SEQ ID NO: 53439 - protein, 247 aa, Homo sapiens
MGQRDQGLDRERKGPQDDPGSYQGPERRNFLKEDAMKTKTHYHAMHADCLQELRRYLESSVVLRRRVPPMVNVTRSEASEGNITVTCRASSFYPRNITLTWRQDGVSLSHDTQQWGDVLPDGNGTYQTWVATRICQGEEQRFTCYMEHSGNHSTHPVPSGKVLVLQSHWQTFHVSAVAAAAAAIFVIIIFYVRCCKKKTSAAEGPELVSLQVLDQHPVGTSDHRDATQLGFQPLMSALGSTGSTEGA

SEQ ID NO: 53440 - protein, 223 aa, Homo sapiens
FPFAPPGAAAEPHSLRYNLTVLSWDGSVQSGFLAEVHLDGQPFLRYDRQKCRAKPQGQWAEDVLGNKTWDRETRDLTGNGKDLRMTLAHIKDQKEVPPMVNVTRSEASEGNITVTCRASSFYPRNIILTWRQDGVSLSHDTQQWGDVLPDGNGTYQTWVATRICRGEEQRFTCYMEHSGNHSTHPVPSGKVLVLQSHWQTFHVSAVAAGCCYFCYYYFLCPLL

SEQ ID NO: 53441 - protein, 223 aa, Homo sapiens; identical to SEQ ID NO: 53440

SEQ ID NO: 53442 - protein, 223 aa, Homo sapiens; identical to SEQ ID NO: 53440

SEQ ID NO: 53443 - protein, 332 aa, Homo sapiens; identical to SEQ ID NO: 53429

SEQ ID NO: 53444 - protein, 342 aa, Homo sapiens
MGLGPVFLLLAGIFPFAPPGAAAEPHSLRYNLTVLSWDGSVQSGFLAEVHLDGQPFLRYDRQKCRAKPQGQWAEDVLGNKTWDRETRDLTGNGKDLRMTLAHIKDQKEVPQSSRAQTLAMNVRNFLKEDAMKTKTHYHAMHADCLQELRRYLESSVVLRRRVPPMVNVTRSEASEGNITVTCRASSFYPRNITLTWRQDGVSLSHDTQQWGDVLPDGNGTYQTWVATRICQGEEQRFTCYMEHSGNHSTHPVPSGKVLVLQSHWQTFHVSAVAAAAAAIFVIIIFYVRCCKKKTSAAEGPELVSLQVLDQHPVGTSDHRDATQLGFQPLMSALGSTGSTEGA

SEQ ID NO: 53445 - protein, 274 aa, Homo sapiens
FPFAPPGAAAEPHSLRYNLTVLSWDGSVQSGFLTEVHLDGQPFLRCDRQKCRAKPQGQWAEDVLGNKTWDRETRDLTGNGKDLRMTLAHIKDQKEVPPMVNVTRSEASEGNITVTCRASGFYPWNITLSWRQDGVSLSHDTQQWGDVLPDGNGTYQTWVATRICQGEEQRFTCYMEHSGNHSTHPVPSGKVLVLQSHWQTFHVSAVAAAAIFVIIIFYVRCCKKKTSAAEGPELVSLQVLDQHPVGTSDHRDATQLGFQPLMSDLGSTGSTEGA

SEQ ID NO: 53446 - protein, 194 aa, Homo sapiens; identical to SEQ ID NO: 53430

SEQ ID NO: 53447 - protein, 289 aa, Homo sapiens; identical to SEQ ID NO: 53431

SEQ ID NO: 53448 - protein, 332 aa, Homo sapiens; identical to SEQ ID NO: 53429

SEQ ID NO: 53449 - protein, 332 aa, Homo sapiens; identical to SEQ ID NO: 53429

SEQ ID NO: 53450 - protein, 383 aa, Homo sapiens; identical to SEQ ID NO: 53433

SEQ ID NO: 53451 - protein, 332 aa, Homo sapiens; identical to SEQ ID NO: 53429

SEQ ID NO: 53452 - protein, 332 aa, Homo sapiens
MGLGPVFLLLAGIFPFAPPGAAAEPHSLRYNLTVLSWDGSVQSGFLAEVHLDGQPFLRYDRQKCRAKPQGQWAEDVLGNKTWDRETRDLTGNGKDLRMTLAHIKDQKEGLHSLQEIRVCEIHEDNSTRSSQHFYYDGELFLSQNVETEEWTVPQSSRAQTLAMNVRNFLKEDAMKTKTHYHAMHADCLQELRRYLESSVVLRRRVPPMVNVTRSEASEGNITVTCRASSFYPRNITLTWRQDGVSLSHDTQQWGDVLPDGNGTYQTWVATRICQGEEQRFTCYMEHSGNHSTHPVPSGKVLVLQSHWQTFHVSAVAACCCYFCYYYFLCPLL

SEQ ID NO: 53453 - protein, 383 aa, Homo sapiens
MGLGRVLLFLAVAFPFAPPAAAAEPHSLRYNLMVLSQDGSVQSGFLAEGHLDGQPFLRYDRQKRRAKPQGQWAENVLGAKTWDTETEDLTENGQDLRRTLTHIKDQKGGLHSLQEIRVCEIHEDSSTRGSRHFYYDGELFLSQNLETQESTVPQSSRAQTLAMNVTNFWKEDAMKTKTHYRAMQADCLQKLQRYLKSGVAIRRTVPPMVNVTCSEVSEGNITVTCRASSFYPRNITLTWRQDGVSLSHNTQQWGDVLPDGNGTYQTWVATRIRQGEEQRFTCYMEHSGNHGTHPVPSGKALVLQSQRTDFPYVSAAMPCFVIIIILCVPCCKKKTSAAEGPELVSLQVLDQHPVGTGDHRDAAQLGFQPLMSATGSTGSTEGT

SEQ ID NO: 53454 - protein, 383 aa, Homo sapiens
MGLGRVLLFLAVAFPFAPPAAAAEPHSLRYNLMVLSQDGSVQSGFLAEGHLDGQPFLRYDRQKRRAKPQGQWAEDVLGAKTWDTETEDLTENGQDLRRTLTHIKDQKGGLHSLQEIRVCEIHEDSSTRGSRHFYYDGELFLSQNLETQESTVPQSSRAQTLAMNVTNFWKEDAMKTKTHYRAMQADCLQKLQRYLKSGVAIRRTVPPMVNVICSEVSEGNITVTCRASSFYPRNITLTWRQDGVSLSHNTQQWGDVLPDGNGTYQTWVATRIRQGEEQRFTCYMEHSGNHGTHPVPSGKALVLQSQRTDFPYVSAAMPCFVIIIILCVPCCKKKTSAAEGPELVSLQVLDQHPVGTGDHRDAAQLGFQPLMSATGSTGSTEGT

SEQ ID NO: 53455 - protein, 340 aa, Homo sapiens
MGLGRVLLFLAVAFPFAPPAAAAEPHSLRYNLMVLSQDGSVQSGFLAEGHLDGQPFLRYDRQKRRAKPQGQWAENVLGAKTWDTETEDLTENGQDLRRTLTHIKDQKGVPQSSRAQTLAMNVTNFWKEDAMKTKTHYRAMQADCLQKLQRYLKSGVAIRRTVPPMVNVTCSEVSEGNITVTCRASSFYPRNITLTWRQDGVSLSHNTQQWGDVLPDGNGTYQTWVATRIRQGEEQRFTCYMEHSGNHGTHPVPSGKALVLQSQRTDFPYVSAAMPCFVIIIILCVPCCKKKTSAAEGPELVSLQVLDQHPVGTGDHRDAAQLGFQPLMSATGSTGSTEGT

SEQ ID NO: 53456 - protein, 340 aa, Homo sapiens
MGLGRVLLFLAVAFPFAPPAAAAEPHSLRYNLMVLSQDGSVQSGFLAEGHLDGQPFLRYDRQKRRAKPQGQWAEDVLGAKTWDTETEDLTENGQDLRRTLTHIKDQKGVPQSSRAQTLAMNVTNFWKEDAMKTKTHYRAMQADCLQKLQRYLKSGVAIRRTVPPMVNVTCSEVSEGNITVTCRASSFYPRNITLTWRQDGVSLSHNTQQWGDVLPDGNGTYQTWVATRIRQGEEQRFTCYMEHSGNHGTHPVPSGKALVLQSQRTDFPYVSAAMPCFVIIIILCVPCCKKKTSAAEGPELVSLQVLDQHPVGTGDHRDAAQLGFQPLMSATGSTGSTEGA

SEQ ID NO: 53457 - protein, 41 aa, Homo sapiens
MGLGRVLLFLAVAFPFAPPAAAAVEMGFHRVSQDGLDLLTS

SEQ ID NO: 53458 - protein, 360 aa, Homo sapiens
  VARIANT 1: note = MOD_RES - Any amino acid
XPHSLRYNLMVLSQDGSVQSGFLAEGHLDGQPFLRYDRQKRRAKPQGQWAEDVLGAKTWDTETEDLTENGQDLRRTLTHIKDQKGGLHSLQEIRVCEIHEDSSTRGSRHFYYDGELFLSQNLETQESTVPQSSRAQTLAMNVTNFWKEDAMKTKTHYRAMQADCLQKLQRYLKSGVAIRRTVPPMVNVTCSEVSEGNITVTCRASSFYPRNITLTWRQDGVSLSHNTQQWGDVLPDGNGTYQTWVATRIRQGEEQRFTCYMEHSGNHGTHPVPSGKALVLQSQRTDFPYVSAAMPCFVIIIILCVPCCKKKTSAAEGPELVSLQVLDQHPVGTGDHRDAAQLGFQPLMSATGSTGSTEGA

SEQ ID NO: 53459 - protein, 383 aa, Homo sapiens [sequence omitted]

SEQ ID NO: 53460 - protein, 340 aa, Homo sapiens
MGLGRVLLFLAVAFPFAPPAAAAEPHSLRYNLMVLSQDGSVQSGFLAEGHLDGQPFLRYDRQKRRAKPQGQWAEDVLGAETWDTETEDLTENGQDLRRTLTHIKDQKGVPQSSRAQTLAMNVTNFWKEDAMKTKTHYRAMQADCLQKLQRYLKSGVAIRRTVPPMVNVTCSEVSEGNITVTCRASSFYPRNITLTWRQDGVSLSHNTQQWGDVLPDGNGTYQTWVATRIRQGEEQRFTCYMEHSGNHGTHPVPSGKALVLQSQRTDFPYVSAAMPCFVIIIILCVPCCKKKTSAAEGPELVSLQVLDQHPVGTGDHRDAAQLGFQPLMSATGSTGSTEGA

SEQ ID NO: 53461 - protein, 383 aa, Homo sapiens
MGLGRVLLFLAVAFPFAPPAAAAEPHSLRYNLMVLSQDGSVQSGFLAEGHLDGQPFLRYDRQKRRAKPQGQWAEDVLGAETWDTETEDLTENGQDLRRTLTHIKDQKGGLHSLQEIRVCEIHEDSSTRGSRHFYYNGELFLSQNLETQESTVPQSSRAQTLAMNVTNFWKEDAMKTKTHYRAMQADCLQKLQRYLKSGVAIRRTVPPMVNVTCSEVSEGNITVTCRASSFYPRNITLTWRQDGVSLSHNTQQWGDVLPDGNGTYQTWVATRIRQGEEQRFTCYMEHSGNHGTHPVPSGKALVLQSQRTDFPYVSAAMPCFVIIIILCVPCCKKKTSAAEGPELVSLQVLDQHPVGTGDHRDAAQLGFQPLMSATGSTGSTEGA

SEQ ID NO: 53462 - protein, 340 aa, Homo sapiens
MGLGRVLLFLAVAFPFAPPAAAAEPHSLRYNLMVLSQDGSVQSGFLAEGHLDGQPFLRYDRQKRRAKPQGQWAEDVLGAKTWDTETEDLTENGQDLRRTLTHIKDQKGVPQSSRAQTLAMNVTNFWKEDAMKTKTHYRAMQADCLQKLQRYLKSGVAIRRTVPPMVNVICSEVSEGNITVTCRASSFYPRNITLTWRQDGVSLSHNTQQWGDVLPDGNGTYQTWVATRIRQGEEQRFTCYMEHSGNHGTHPVPSGKALVLQSQRTDFPYVSAAMPCFVIIIILCVPCCKKKTSAAEGPELVSLQVLDQHPVGTGDHRDAAQLGFQPLMSATGSTGSTEGT

SEQ ID NO: 53463 - protein, 340 aa, Homo sapiens; identical to SEQ ID NO: 53460

SEQ ID NO: 53464 - protein, 340 aa, Homo sapiens; identical to SEQ ID NO: 53455

SEQ ID NO: 53465 - protein, 383 aa, Homo sapiens [sequence omitted]

SEQ ID NO: 53466 - protein, 383 aa, Homo sapiens; identical to SEQ ID NO: 53453

SEQ ID NO: 53467 - protein, 340 aa, Homo sapiens; identical to SEQ ID NO: 53456

SEQ ID NO: 53468 - protein, 317 aa, Homo sapiens
  VARIANT 1: note = MOD_RES - Any amino acid
XPHSLRYNLMVLSQDGSVQSGFLAEGHLDGQPFLRYDRQKRRAKPQGQWAEDVLGAKTWDTETEDLTENGQDLRRTLTHIKDQKGVPQSSRAQTLAMNVTNFWKEDAMKTKTHYRAMQADCLQKLQRYLKSGVAIRRTVPPMVNVTCSEVSEGNITVTCRASSFYPRNITLTWRQDGVSLSHNTQQWGDVLPDGNGTYQTWVATRIRQGEEQRFTCYMEHSGNHGTHPVPSGKALVLQSQRTDFPYVSAAMPCFVIIIILCVPCCKKKTSAAEGPELVSLQVLDQHPVGTGDHRDAAQLGFQPLMSATGSTGSTEGA

SEQ ID NO: 53469 - protein, 383 aa, Homo sapiens
MGLGRVLLFLAVAFPFAPPAAAAEPHSLRYNLMVLSQDGSVQSGFLAEGHLDGQPFLRYDRQKRRAKPQGQWAEDVLGAETWDTETEDLTENGQDLRRTLTHIKDQKGGLHSLQEIRVCEMHEDSSTRGSRHFYYNGELFLSQNLETQESTVPQSSRAQTLAMNVTNFWKEDAMKTKTHYRAMQADCLQKLQRYLKSGVAIRRTVPPMVNVTCSEVSEGNITVTCRASSFYPRNITLTWRQDGVSLSHNTQQWGDVLPDGNGTYQTWVATRIRQGEEQRFTCYMEHSGNHGTHPVPSGKALVLQSQRTDFPYVSAAMPCFVIIIILCVPCCKKKTSAAEGPELVSLQVLDQHPVGTGDHRDAAQLGFQPLMSATGSTGSTEGA

SEQ ID NO: 53470 - protein, 351 aa, Homo sapiens
MVLSQDGSVQSGFLAEGHLDGQPFLRYDRQKRRAKPQGQWAENVLGAKTWDTETEDLTENGQDLRRTLTHIKDQKGGLHSLQEIRVCEIHEDSSTRGSRHFYYDGELFLSQNLETQESTVPQSSRAQTLAMNVTNFWKEDAMKTKTHYRAMQADCLQKLQRYLKSGVAIRRTVPPMVNVTCSEVSEGNITVTCRASSFYPRNITLTWRQDGVSLSHNTQQWGDVLPDGNGTYQTWVATRIRQGEEQRFTCYMEHSGNHGTHPVPSGKALVLQSQRTDFPYVSAAMPCFVIIIILCVPCCKKKTSAAEGPELVSLQVLDQHPVGTGDHRDAAQLGFQPLMSATGSTGSTEGT

SEQ ID NO: 53471 - protein, 41 aa, Homo sapiens; identical to SEQ ID NO: 53457

SEQ ID NO: 53472 - protein, 41 aa, Homo sapiens; identical to SEQ ID NO: 53457

SEQ ID NO: 53473 - protein, 351 aa, Homo sapiens
MVLSQDGSVQSGFLAEGHLDGQPFLRYDRQKRRAKPQGQWAEDVLGAETWDTETEDLTENGQDLRRTLTHIKDQKGGLHSLQEIRVCEMHEDSSTRGSRHFYYNGELFLSQNLETQESTVPQSSRAQTLAMNVTNFWKEDAMKTKTHYRAMQADCLQKLQRYLKSGVAIRRTVPPMVNVTCSEVSEGNITVTCRASSFYPRNITLTWRQDGVSLSHNTQQWGDVLPDGNGTYQTWVATRIRQGEEQRFTCYMEHSGNHGTHPVPSGKALVLQSQRTDFPYVSAAMPCFVIIIILCVPCCKKKTSAAEGPELVSLQVLDQHPVGTGDHRDAAQLGFQPLMSATGSTGSTEGA

SEQ ID NO: 53474 - protein, 351 aa, Homo sapiens
MVLSQDGSVQSGFLAEGHLDGQPFLRYDRQKRRAKPQGQWAEDVLGAKTWDTETEDLTENGQDLRRTLTHIKDQKGGLHSLQEIRVCEIHEDSSTRGSRHFYYDGELFLSQNLETQESTVPQSSRAQTLAMNVTNFWKEDAMKTKTHYRAMQADCLQKLQRYLKSGVAIRRTVPPMVNVICSEVSEGNITVTCRASSFYPRNITLTWRQDGVSLSHNTQQWGDVLPDGNGTYQTWVATRIRQGEEQRFTCYMEHSGNHGTHPVPSGKALVLQSQRTDFPYVSAAMPCFVIIIILCVPCCKKKTSAAEGPELVSLQVLDQHPVGTGDHRDAAQLGFQPLMSATGSTGSTEGT

SEQ ID NO: 53475 - protein, 41 aa, Homo sapiens; identical to SEQ ID NO: 53457

SEQ ID NO: 53476 - protein, 41 aa, Homo sapiens; identical to SEQ ID NO: 53457

SEQ ID NO: 53477 - protein, 351 aa, Homo sapiens; identical to SEQ ID NO: 53470

SEQ ID NO: 53478 - protein, 41 aa, Homo sapiens; identical to SEQ ID NO: 53457

SEQ ID NO: 53479 - protein, 41 aa, Homo sapiens; identical to SEQ ID NO: 53457

SEQ ID NO: 53480 - protein, 351 aa, Homo sapiens
MVLSQDGSVQSGFLAEGHLDGQPFLRYDRQKRRAKPQGQWAEDVLGAETWDTETEDLTENGQDLRRTLTHIKDQKGGLHSLQEIRVCEIHEDSSTRGSRHFYYNGELFLSQNLETQESTVPQSSRAQTLAMNVTNFWKEDAMKTKTHYRAMQADCLQKLQRYLKSGVAIRRTVPPMVNVTCSEVSEGNITVTCRASSFYPRNITLTWRQDGVSLSHNTQQWGDVLPDGNGTYQTWVATRIRQGEEQRFTCYMEHSGNHGTHPVPSGKALVLQSQRTDFPYVSAAMPCFVIIIILCVPCCKKKTSAAEGPELVSLQVLDQHPVGTGDHRDAAQLGFQPLMSATGSTGSTEGA

SEQ ID NO: 53481 - protein, 695 aa, Homo sapiens
MSPPKDPSPSLPLPSSSSHSSSPPSSSSTSVSGNAPDGSSPPQMTASEPLSQVSRGHPSPPTPNFRRRAVAQGAPREIPLYLPHHPKPEWAEYCLVSPGEDGLSDPAEMTSDECQPAEAPLGDIGSNHRDPHPIWGKDRSWTGQELSPLAGEDREKGSTGARKEEEGGPVLVKEKLGLKKLVLTQEQKTMLLDWNDSIPESVHLKAGERISQKSAENGRGGRVLKPVRPLLLPRAAGEPLPTQRGAQEKMGTPAEQAQGERNVPPPKSPLRLIANAIRRSLEPLLSNSEGGKKAWAKQESKTLPAQACTRSFSLRKTNSNKDGDQHSPGRNQSSAFSPPDPALRTHSLPNRPSKVFPALRSPPCSKIEDVPTLLEKVSLQENFPDASKPPKKRISLFSSLRLKDKSFESFLQESRQRKDIRDLFGSPKRKVLPEDSAQALEKLLQPFKSTSLRQAAPPPPPPPPPPPPPPTAGGADSKNFPLRAQVTEASSSASSTSSSSADEEFDPQLSLQLKEKKTLRRRKKLEKAMKQLVKQEELKRLYKAQAIQRQLEEVEERQRASEIQGVRLEKALRGEADSGTQDEAQLLQEWFKLVLEKNKLMRYESELLIMAQELELEDHQSRLEQKLREKMLKEESQKDEKDLNEEQEVFTELMQVIEQRDKLVDSLEEQRIREKAEDQHFESFVFSRGCQLSRT

SEQ ID NO: 53482 - protein, 29 aa, Homo sapiens
MSPPKDPSPSLPLPSSSSHSSSPPSSSST

SEQ ID NO: 53483 - protein, 173 aa, Homo sapiens
MSLLGPKVLLFLAAFIITSDWIPLGVNSQRGDDVTQATPETFTEDPNLVNDPATDETVLAVLADIAPSTDDLASLSEKNTTAECWDEKFTCTRLYSVHRPVKQCIHQLCFTSLRRMYIVNKEICSRLVCKEHEAMKDELCRQMAGLPPRRLRRSNYFRLPPCENVDLQRPNGL

SEQ ID NO: 53484 - protein, 163 aa, Homo sapiens
MSLLGPKVLLFLAAFIITSDWIPLGVNSQRGDDVTQATPETFTEDPNLVNDPATDETVLAVLADIAPSTDDLECWDEKFTCTRLYSVHRPVKQCIHQLCFTSLRRMYIVNKEICSRLVCKEHEAMKDELCRQMAGLPPRRLRRSNYFRLPPCENVDLQRPNGL

SEQ ID NO: 53485 - protein, 148 aa, Homo sapiens
MSLLGPKVLLFLAAFIITSDWIPLGVNSQRGDDVTQATPETFTEDPNLVNDPATDETECWDEKFTCTRLYSVHRPVKQCIHQLCFTSLRRMYIVNKEICSRLVCKEHEAMKDELCRQMAGLPPRRLRRSNYFRLPPCENVDLQRPNGL

SEQ ID NO: 53486 - protein, 163 aa, Homo sapiens; identical to SEQ ID NO: 53484

SEQ ID NO: 53487 - protein, 91 aa, Homo sapiens
MSLLGPKVLLFLAAFIITSDWIPLGVNSQRGDDVTQATPETFTEDPNLVNDPATDETVLAVLADIAPSTDDLASLSEKNTTAECWDEKFTC

SEQ ID NO: 53488 - protein, 439 aa, Homo sapiens
MSVPSALMKQPPIQSTAGAVPVRNEKGEISMEKVKVKRYVSGKRPDYAPMESSDEEDEEFQFIKKAKEQEAEPEEQEEDSSSDPRLRRLQNRISEDVEERLARHRKIVEPEVVGESDSEVEGDAWRMEREDSSEEEEEEIDDEEIERRRGMMRQRAQERKNEEMEVMEVEDEGRSGEESESESEYEEYTDSEDEMEPRLKPVFIRKKDRVTVQEREAEALKQKELEQEAKRMAEERRKYTLKIVEEETKKELEENKRSLAALDALNTDDENDEEEYEAWKVRELKRIKRDREDREALEKEKAEIERMRNLTEEERRAELRANGKVITNKAVKGKYKFLQKYYHRGAFFMDEDEEVYKRDFSAPTLEDHFNKTILPKVMQVKNFGRSGRTKYTHLVDQDTTSFDSAWGQESAQNTKFFKQKAAGVRDVFERPSAKKRKTT

SEQ ID NO: 53489 - protein, 182 aa, Homo sapiens
MRAAYLFLLFLPGLLAQGQYDLDPLPPFPDHVQYTHYSDQIDNPDYYDYQEVTPRPSEEQFQFQSQQQVQQEVIPAPTPEPGNAELEPTEPGPLDCREEQYPCTRLYSIHRPCKQCLNEVCFYSLRRVYVINKEICVRTVCAHEELLRADLCRDKFSKCGVMASSGLCQSVAASCARSCGSC

SEQ ID NO: 53490 - protein, 183 aa, Homo sapiens
MRAAYLFLLFLPAGLLAQGQYDLDPLPPFPDHVQYTHYSDQIDNPDYYDYQEVTPRPSEEQFQFQSQQQVQQEVIPAPTPEPGNAELEPTEPGPLDCREEQYPCTRLYSIHRPCKQCLNEVCFYSLRRVYVINKEICVRTVCAHEELLRADLCRDKFSKCGVMASSGLCQSVAASCARSCGSC

SEQ ID NO: 53491 - protein, 182 aa, Homo sapiens; identical to SEQ ID NO: 53489

SEQ ID NO: 53492 - protein, 362 aa, Homo sapiens
MKLHCCLFTLVASIIVPAAFVLEDVDFDQMVSLEANRSSYNASFPSSFELSASSHSDDDVIIAKEGTSVSIECLLTASHYEDVHWHNSKGQQLDGRSRGGKWLVSDNFLNITNVAFDDRGLYTCFVTSPIRASYSVTLRVIFTSGDMSVYYMIVCLIAFTITLILNVTRLCMMSSHLRKTEKAINEFFRTEGAEKLQKAFEIAKRIPIITSAKTLELAKVTQFKTMEFARYIEELARSVPLPPLILNCRAFVEEMFEAVRVDDPDDLGERIKERPALNAQGGIYVINPEMGRSNSPGGDSDDGSLNEQGQEIAVQVSVHLQSETKSIDTESQGSSHFSPPDDIGSAESNCNYKDGAYENCQL

SEQ ID NO: 53493 - protein, 362 aa, Homo sapiens; identical to SEQ ID NO: 53492

SEQ ID NO: 53494 - protein, 216 aa, Homo sapiens
MSVYYMIVCLIAFTITLILNVTRLCMMSSHLRKTEKAINEFFRTEGAEKLQKAFEIAKRIPIITSAKTLELAKVTQFKTMEFARYIEELARSVPLPPLILNCRAFVEEMFEAVRVDDPDDLGERIKERPALNAQGGIYVINPEMGRSNSPGGDSDDGSLNEQGQEIAVQVSVHLQSETKSIDTESQGSSHFSPPDDIGSAESNCNYKDGAYENCQL

SEQ ID NO: 53495 - protein, 17 aa, Homo sapiens
MKLHCCLFTLVASIIVP

SEQ ID NO: 53496 - protein, 109 aa, Homo sapiens
MKLHCCLFTLVASIIVPAAFVLEDVDFDQMVSLEANRSSYNASFPSSFELSASSHSDDDVIIAKEGTSVSIECLLTASHYEDVHWHNSKGQQLDGRSRGGKWLVSDNFL

SEQ ID NO: 53497 - protein, 123 aa, Homo sapiens
MKLHCCLFTLVASIIVPAAFVLEDVDFDQMVSLEANRSSYNASFPSSFELSASSHSDDDVIIAKEGTSVSIECLLTASHYEDVHWHNSKGQQLDGRSRGGKWLVSDNFLNITNVAFDDRGLYT

SEQ ID NO: 53498 - protein, 255 aa, Homo sapiens
MKALLALPLLLLLSTPPCAPQVSGIRGDALERFCLQQPLDCDDIYAQGYQSDGVYLIYPSGPSVPVPVFCDMTTEGGKWTVFQKRFNGSVSFFRGWNDYKLGFGRADGEYWLGLQNMHLLTLKQKYELRVDLEDFENNTAYAKYADFSISPNAVSAEEDGYTLFVAGFEDGGAGDSLSYHSGQKFSTFDRDQDLFVQNCAALSSGAFWFRSCHFANLNGFYLGGSHLSYANGINWAQWKGFYYSLKRTEMKIRRA

SEQ ID NO: 53499 - protein, 279 aa, Homo sapiens
MGELSPLQRPLATEGTMKAQGVLLKLALLALPLLLLLSTPPCAPQVSGIRGDALERFCLQQPLDCDDIYAQGYQSDGVYLIYPSGPSVPVPVFCDMTTEGGKWTVFQKRFNGSVSFFRGWNDYKLGFGRADGEYWLGLQNMHLLTLKQKYELRVDLEDFENNTAYAKYADFSISPNAVSAEEDGYTLFVAGFEDGGAGDSLSYHSGQKFSTFDRDQDLFVQNCAALSSGAFWFRSCHFANLNGFYLGGSHLSYANGINWAQWKGFYYSLKRTEMKIRRA

SEQ ID NO: 53500 - protein, 155 aa, Homo sapiens
MVDLTQVMDDEVFMAFASYATIILSKMMLMSTATAFYRLTRKVFANPEDCVAFGKGENAKKYLRTDDRVERVRRAHLNDLENIIPFLGIGLLYSLSGPDPSTAILHFRLFVGARIYHTIAYLTPLPQPNRALSFFVGYGVTLSMAYRLLKSKLYL

SEQ ID NO: 53501 - protein, 155 aa, Homo sapiens; identical to SEQ ID NO: 53500

SEQ ID NO: 53502 - protein, 155 aa, Homo sapiens; identical to SEQ ID NO: 53500

SEQ ID NO: 53503 - protein, 155 aa, Homo sapiens; identical to SEQ ID NO: 53500

SEQ ID NO: 53504 - protein, 77 aa, Homo sapiens
MVDLTQVMDDEVFMAFASYATIILSKMMLMSTATAFYRLTRKVFANPEDCVAFGKGENAKKYLRTDDRVERVRRAHL

SEQ ID NO: 53505 - protein, 42 aa, Homo sapiens
MVDLTQVMDDEVFMAFASYATIILSKMMLMSTATAFYRLTRK

SEQ ID NO: 53506 - protein, 80 aa, Homo sapiens
MVDLTQVMDDEVFMAFASYATIILSKMMLMSTATAFYRLTRKVFANPEDCVAFGKGENAKKYLRTDDRVERVRRAHLNDL

SEQ ID NO: 53507 - protein, 87 aa, Homo sapiens
MVDLTQVMDDEVFMAFASYATIILSKMMLMSTATAFYRLTRKVFANPEDCVAFGKGENAKKYLRTDDRVERVRRIKQTLSIYLASSI

SEQ ID NO: 53508 - protein, 147 aa, Homo sapiens
MAGNSILLAAVSILSACQQSYFALQVGKARLKYKVTPPAVTGSPEFERVFRAQQNCVEFYPIFIITLWMAGWYFNQVFATCLGLVYIYGRHLYFWGYSEAAKKRITGFRLSLGILALLTLLGALGIANSFLDEYLDLNIAKKLRRQF

SEQ ID NO: 53509 - protein, 147 aa, Homo sapiens; identical to SEQ ID NO: 53508

SEQ ID NO: 53510 - protein, 77 aa, Homo sapiens
MAGNSILLAAVSILSACQQSYFALQVGKARLKYKVTPPAVTGSPEFERVFRAHFCYLSGSGVHIWPSPILLGIFRSC

SEQ ID NO: 53511 - protein, 166 aa, Homo sapiens
MPWRGRRFRLCRRKMAVLSKEYGFVLLTGAASFIMVAHLAINVSKARKKYKVEYPIMYSTDPENGHIFNCIQRAHQNTLEVYPPFLFFLAVGGVYHPRIASGLGLAWIVGRVLYAYGYYTGEPSKRSRGALGSIALLGLVGTTVCSAFQHLGWVKSGLGSGPKCCH

SEQ ID NO: 53512 - protein, 152 aa, Homo sapiens
MAVLSKEYGFVLLTGAASFIMVAHLAINVSKARKKYKVEYPIMYSTDPENGHIFNCIQRAHQNTLEVYPPFLFFLAVGGVYHPRIASGLGLAWIVGRVLYAYGYYTGEPSKRSRGALGSIALLGLVGTTVCSAFQHLGWVKSGLGSGPKCCH

SEQ ID NO: 53513 - protein, 166 aa, Homo sapiens; identical to SEQ ID NO: 53511

SEQ ID NO: 53514 - protein, 166 aa, Homo sapiens; identical to SEQ ID NO: 53511

SEQ ID NO: 53515 - protein, 152 aa, Homo sapiens; identical to SEQ ID NO: 53512

SEQ ID NO: 53516 - protein, 166 aa, Homo sapiens; identical to SEQ ID NO: 53511

SEQ ID NO: 53517 - protein, 323 aa, Homo sapiens
MPRLTFAPKGWPHPPTSLHWWLFQELPTPSENSMPPGLSTPTASQEGAGPVPDPSQPTRRQIRLSSPERQRLSSLNLTPDPEMEPPPKPPRSCSALARHALESSFVGWGLPVQSPQALVAMEKEEKESPFSSEEEEEDVPLDSDVEQALQTFAKTSGTMNNYPTWRRTLLRRAKEEEMKRFCKAQTIQRRLNEIEAALRELEAEGVKLELALRRQSSSPEQQKKLWVGQLLQLVDKKNSLVAEEAELMITVQELNLEEKQWQLDQELRGYMNREENLKTAADRQAEDQVLRKLVDLVNQRDALIRFQEERRLSELALGTGAQG

SEQ ID NO: 53518 - protein, 981 aa, Homo sapiens
MASPTSTNPAHAHFESFLQAQLCQDVLSSFQELCGALGLEPGGGLPQYHKIKDQLNYWSAKSLWTKLDKRAGQPVYQQGRACTSTKCLVVGAGPCGLRVAVELALLGARVVLVEKRTKFSRHNVLHLWPFTIHDLRALGAKKFYGRFCTGTLDHISIRQLQLLLLKVALLLGVEIHWGVTFTGLQPPPRKGSGWRAQLQPNPPAQLANYEFDVLISAAGGKFVPEGFKVREMRGKLAIGITANFVNGRTVEETQVPEISGVARIYNQSFFQSLLKATGIDLENIVYYKDDTHYFVMTAKKQCLLRLGVLRQPFWPLGTGVARGFLAAFDAAWMVKRWAEGAESLEVLAERESLYQLLSQTSPENMHRNVAQYGLDPATRYPNLNLRAVTPNQVRDLYDVLAKEPVQRNNDKTDTGMPATGSAGTQEELLRWCQEQTAGYPGVHVSDLSSSWADGLALCALVYRLQPGLLEPSELQGLGALEATAWALKVAENELGITPVVSAQAVVAGSDPLGLIAYLSHFHSAFKSMAHSPGPVSQASPGTSSAVLFLSKLQRTLQRSRAKENAEDAGGKKLRLEMEAETPSTEVPPDPEPGVPLTPPSQHQEAGAGDLCALCGEHLYVLERLCVNGHFFHRSCFRCHTCEATLWPGGYEQHPGDGHFYCLQHLPQTDHKAEGSDRGPESPELPTPSENSMPPGLSTPTASQEGAGPVPDPSQPTRRQIRLSSPERQRLSSLNLTPDPEMEPPPKPPRSCSALARHALESSFVGWGLPVQSPQALVAMEKEEKESPFSSEEEEEDVPLDSDVEQALQTFAKTSGTMNNYPTWRRTLLRRAKEEEMKRFCKAQTIQRRLNEIEAALRELEAEGVKLELALRRQSSSPEQQKKLWVGQLLQLVDKKNSLVAEEAELMITVQELNLEEKQWQLDQELRGYMNREENLKTAADRQAEDQVLRKLVDLVNQRDALIRFQEERRLSELALGTGAQG

SEQ ID NO: 53519 - protein, 1067 aa, Homo sapiens [sequence omitted]

SEQ ID NO: 53520 - protein, 1086 aa, Homo sapiens
MSCLSHSSLPSCCPPQEASMASPTSTNPAHAHFESFLQAQLCQDVLSSFQELCGALGLEPGGGLPQYHKIKDQLNYWSAKSLWTKLDKRAGQPVYQQGRACTSTKCLVVGAGPCGLRVAVELALLGARVVLVEKRTKFSRHNVLHLWPFTIHDLRALGAKKFYGRFCTGTLDHISIRQLQLLLLKVALLLGVEIHWGVTFTGLQPPPRKGSGWRAQLQPNPPAQLANYEFDVLISAAGGKFVPEGFKVREMRGKLAIGITANFVNGRTVEETQVPEISGVARIYNQSFFQSLLKATGIDLENIVYYKDDTHYFVMTAKKQCLLRLGVLRQDWPDTNRLLGSANVVPEALQRFTRAAADFATHGKLGKLEFAQDAHGQPDVSAFDFTSMMRAESSARVQEKHGARLLLGLVGDCLVEPFWPLGTGVARGFLAAFDAAWMVKRWAEGAESLEVLAERESLYQLLSQTSPENMHRNVAQYGLDPATRYPNLNLRAVTPNQVRDLYDVLAKEPVQRNNDKTDTGMPATGSAGTQEELLRWCQEQTAGYPGVHVSDLSSSWADGLALCALVYRLQPGLLEPSELQGLGALEATAWALKVAENELGITPVVSAQAVVAGSDPLGLIAYLSHFHSAFKSMAHSPGPVSQASPGTSSAVLFLSKLQRTLQRSRAKENAEDAGGKKLRLEMEAETPSTEVPPDPEPGVPLTPPSQHQEAGAGDLCALCGEHLYVLERLCVNGHFFHRSCFRCHTCEATLWPGGYEQHPGDGHFYCLQHLPQTDHKAEGSDRGPESPELPTPSENSMPPGLSTPTASQEGAGPVPDPSQPTRRQIRLSSPERQRLSSLNLTPDPEMEPPPKPPRSCSALARHALESSFVGWGLPVQSPQALVAMEKEEKESPFSSEEEEEDVPLDSDVEQALQTFAKTSGTMNNYPTWRRTLLRRAKEEEMKRFCKAQTIQRRLNEIEAALRELEAEGVKLELALRRQSSSPEQQKKLWVGQLLQLVDKKNSLVAEEAELMITVQELNLEEKQWQLDQELRGYMNREENLKTAADRQAEDQVLRKLVDLVNQRDALIRFQEERRLSELALGTGAQG

SEQ ID NO: 53521 - protein, 591 aa, Homo sapiens
PKYVLPSEAQVVPAKQLQPQDRSSVPEHSLLAGTQEELLRWCQEQTAGYPGVHVSDLSSSWADGLALCALVYRLQPGLLEPSELQGLGALEATAWALKVAENELGITPVVSAQAVVAGSDPLGLIAYLSHFHSAFKSMAHSPGPVSQASPGTSSAVLFLSKLQRTLQRSRAKENAEDAGGKKLRLEMEAETPSTEVPPDPEPGVPLTPPSQHQEAGAGDLCALCGEHLYVLERLCVNGHFFHRSCFRCHTCEATLWPGGYEQHPGDGHFYCLQHLPQTDHKAEGSDRGPESPELPTPSENSMPPGLSTPTASQEGAGPVPDPSQPTRRQIRLSSPERQRLSSLNLTPDPEMEPPPKPPRSCSALARHALESSFVGWGLPVQSPQALVAMEKEEKESPFSSEEEEEDVPLDSDVEQALQTFAKTSGTMNNYPTWRRTLLRRAKEEEMKRFCKAQTIQRRLNEIEAALRELEAEGVKLELALRRQSSSPEQQKKLWVGQLLQLVDKKNSLVAEEAELMITVQELNLEEKQWQLDQELRGYMNREENLKTAADRQAEDQVLRKLVDLVNQRDALIRFQEERRLSELALGTGAQG

SEQ ID NO: 53522 - protein, 244 aa, Homo sapiens
MASPTSTNPAHAHFESFLQAQLCQDVLSSFQELCGALGLEPGGGLPQYHKIKDQLNYWSAKSLWTKLDKRAGQPVYQQGRACTSTKCLVVGAGPCGLRVAVELALLGARVVLVEKRTKFSRHNVLHLWPFTIHDLRALGAKKFYGRFCTGTLDHISIRQLQLLLLKVALLLGVEIHWGVTFTGLQPPPRKGSGWRAQLQPNPPAQLANYEFDVLISAAGGKFVPEGFKVREMRGKLAIGITANF

SEQ ID NO: 53523 - protein, 1124 aa, Homo sapiens
MGENEDEKQAQAGQVFENFVQASTCKGTLQAFNILTRHLDLDPLDHRNFYSKLKSKVTTWKAKALWYKLDKRGSHKEYKRGKSCTNTKCLIVGGGPCGLRTAIELAYLGAKVVVVEKRDSFSRNNVLHLWPFTIHDLRGLGAKKFYGKFCAGSIDHISIRQLQLILFKVALMLGVEIHVNVEFVKVLEPPEDQENQKIGWRAEFLPTDHSLSEFEFDVIIGADGRRNTLEGFRRKEFRGKLAIAITANFINRNSTAEAKVEEISGVAFIFNQKFFQDLKEETGIDLENIVYYKDCTHYFVMTAKKQSLLDKGVIINDYIDTEMLLCAENVNQDNLLSYAREAADFATNYQLPSLDFAMNHYGQPDVAMFDFTCMYASENAALVRERQAHQLLVALVGDSLLEPFWPMGTGCARGFLAAFDTAWMVKSWNQGTPPLELLAERESLYRLLPQTTPENINKNFEQYTLDPGTRYPNLNSHCVRPHQVKHLYITKELEHYPLERLGSVRRSVNLSRKESDIRPSKLLTWCQQQTEGYQHVNVTDLTTSWRSGLALCAIIHRFRPELINFDSLNEDDAVENNQLAFDVAEREFGIPPVTTGKEMASAQEPDKLSMVMYLSKFYELFRGTPLRPVDSWRKNYGENADLSLAKSSISNNYLNLTFPRKRTPRVDGQTGENDMNKRRRKGFTNLDEPSNFSSRSLGSNQECGSSKEGGNQNKVKSMANQLLAKFEESTRNPSLMKQERRVSGIGKPVLCSSSGPPVHSCCPKPEEATPSPSPPLKRQFPSVVVTGHVLRELKQVSAGSECLSRPWRARAKSDLQLGGTENFATLPSTRPRAQALSGVLWRLQQVEEKILQKRAQNLANREFHTKNIKEKAAHLASMFGHGDFPQNKLLSKGLSHTHPPSPPSRLPSPDPAASSSPSTVDSASPARKEKKSPSGFHFHPSHLRTVHPQLTVGKVSSGIGAAAEVLVNLYMNDHRPKAQATSPDLESMRKSFPLNLGGSDTCYFCKKRVYVMERLSAEGHFFHRECFRCSICATTLRLAAYTFDCDEGKFYCKPHFIHCKTNSKQRKRRAELKQQREEEATWQEQEAPRRDTPTESSCAVAAIGTLEGSPPVHFSLPVLHPLLG

SEQ ID NO: 53524 - protein, 1103 aa, Homo sapiens
MGENEDEKQAQAGQVFENFVQASTCKGTLQAFNILTRHLDLDPLDHRNFYSKLKSKVTTWKAKALWYKLDKRGSHKEYKRGKSCTNTKCLIVGGGPCGLRTAIELAYLGAKVVVVEKRDSFSRNNVLHLWPFTIHDLRGLGAKKFYGKFCAGSIDHISIRQLQLILFKVALMLGVEIHVNVEFVKVLEPPEDQENQKIGWRAEFLPTDHSLSEFEFDVIIGADGRRNTLEGFRRKEFRGKLAIAITANFINRNSTAEAKVEEISGVAFIFNQKFFQDLKEETGIDLENIVYYKDCTHYFVMTAKKQSLLDKGVIINDYIDTEMLLCAENVNQDNLLSYAREAADFATNYQLPSLDFAMNHYGQPDVAMFDFTCMYASENAALVRERQAHQLLVALVGDSLLEPFWPMGTGCARGFLAAFDTAWMVKSWNQGTPPLELLAERESLYRLLPQTTPENINKNFEQYTLDPGTRYPNLNSHCVRPHQVKHLYITKELEHYPLERLGSVRRSVNLSRKESDIRPSKLLTWCQQQTEGYQHVNVTDLTTSWRSGLALCAIIHRFRPELINFDSLNEDDAVENNQLAFDVAEREFGIPPVTTGKEMASAQEPDKLSMVMYLSKFYELFRGTPLRPVDSWRKNYGENADLSLAKSSISNNYLNLTFPRKRTPRVDGQTGENDMNKRRRKGFTNLDEPSNFSSRSLGSNQECGSSKEGGNQNKVKSMANQLLAKFEESTRNPSLMKQERRVSGIGKPVLCSSSGPPVHSCCPKPEEATPSPSPPLKRQFPSVVVTGHVLRELKQVSAGSECLSRPWRARAKSDLQLGGTENFATLPSTRPRAQALSGVLWRLQQVEEKILQKRAQNLANREFHTKNIKEKAAHLASMFGHGDFPQNKLLSKGLSHTHPPSPPSRLPSPDPAASSSPSTVDSASPARKLTVGKVSSGIGAAAEVLVNLYMNDHRPKAQATSPDLESMRKSFPLNLGGSDTCYFCKKRVYVMERLSAEGHFFHRECFRCSICATTLRLAAYTFDCDEGKFYCKPHFIHCKTNSKQRKRRAELKQQREEEATWQEQEAPRRDTPTESSCAVAAIGTLEGSPPVHFSLPVLHPLLG

SEQ ID NO: 53525 - protein, 976 aa, Homo sapiens
MGENEDEKQAQAGQVFENFVQASTCKGTLQAFNILTRHLDLDPLDHRNFYSKLKSKVTTWKAKALWYKLDKRGSHKEYKRGKSCTNTKCLIVGGGPCGLRTAIELAYLGAKVVVVEKRDSFSRNNVLHLWPFTIHDLRGLGAKKFYGKFCAGSIDHISIRQLQLILFKVALMLGVEIHVNVEFVKVLEPPEDQENQKIGWRAEFLPTDHSLSEFEFDVIIGADGRRNTLEGFRRKEFRGKLAIAITANFINRNSTAEAKVEEISGVAFIFNQKFFQDLKEETGIDLENIVYYKDCTHYFVMTAKKQSLLDKGVIINDYIDTEMLLCAENVNQDNLLSYAREAADFATNYQLPSLDFAMNHYGQPDVAMFDFTCMYASENAALVRERQAHQLLVALVGDSLLEPFWPMGTGCARGFLAAFDTAWMVKSWNQGTPPLELLAERESLYRLLPQTTPENINKNFEQYTLDPGTRYPNLNSHCVRPHQVKHLYITKELEHYPLERLGSVRRSVNLSRKESDIRPSKLLTWCQQQTEGYQHVNVTDLTTSWRSGLALCAIIHRFRPELINFDSLNEDDAVENNQLAFDVAEREFGIPPVTTGKEMASAQEPDKLSMVMYLSKFYELFRGTPLRPVDSWRKNYGENADLSLAKSSISNNYLNLTFPRKRTPRVDGQTGENDMNKRRRKGFTNLDEPSNFSSRSLGSNQECGSSKEGGNQNKVKSMANQLLAKFEESTRNPSLMKQEKKSPSGFHFHPSHLRTVHPQESMRKSFPLNLGGSDTCYFCKKRVYVMERLSAEGHFFHRECFRCSICATTLRLAAYTFDCDEGKFYCKPHFIHCKTNSKQRKRRAELKQQREEEATWQEQEAPRRDTPTESSCAVAAIGTLEGSPPGISTSFFRKVLGWPLRLPRDLCNWMQGLLQAAGLHIRDNAYNYCYMYELLSLGLPLLWAFSEVLAAMYRESEGSLESICNWVLRCFPVKLR

SEQ ID NO: 53526 - protein, 120 aa, Homo sapiens
MGENEDEKQAQAGQVFENFVQASTCKGTLQAFNILTRHLDLDPLDHRNFYSKLKSKVTTWKAKALWYKLDKRGSHKEYKRGKSCTNTKCLIVGGGPCGLRTAIELAYLGAKVVVVEKRDS

SEQ ID NO: 53527 - protein, 134 aa, Homo sapiens
MGENEDEKQAQAGQVFENFVQASTCKGTLQAFNILTRHLDLDPLDHRNFYSKLKSKVTTWKAKALWYKLDKRGSHKEYKRGKSCTNTKCLIVGGGPCGLRTAIELAYLGAKVVVVEKRDSFSRNNVLHLWPFTI

SEQ ID NO: 53528 - protein, 88 aa, Homo sapiens
MGENEDEKQAQAGQVFENFVQASTCKGTLQAFNILTRHLDLDPLDHRNFYSKLKSKVTTWKAKALWYKLDKRGSHKEYKRGKSCTNTK

SEQ ID NO: 53529 - skipped

SEQ ID NO: 53530 - protein, 98 aa, Homo sapiens
MGENEDEKQAQAGQVFENFVQASTCKGTLQAFNILTRHLDLDPLDHRNFYSKLKSKVTTWKAKALWYKLDKRGSHKEYKRGKSCTNTKCLIVGGGPCG

SEQ ID NO: 53531 - protein, 88 aa, Homo sapiens; identical to SEQ ID NO: 53528

SEQ ID NO: 53532 - protein, 102 aa, Homo sapiens
MGENEDEKQAQAGQVFENFVQASTCKGTLQAFNILTRHLDLDPLDHRNFYSKLKSKVTTWKAKALWYKLDKRGSHKEYKRGKSCTNTKCLIVGGGPCGLRTA

SEQ ID NO: 53533 - protein, 934 aa, Homo sapiens
MGENEDEKQAQAGQVFENFVQASTCKGTLQAFNILTRHLDLDPLDHRNFYSKLKSKVTTWKAKALWYKLDKRGSHKEYKRGKSCTNTKCLIVGGGPCGLRTAIELAYLGAKVVVVEKRDSFSRNNVLHLWPFTIHDLRGLGAKKFYGKFCAGSIDHISIRQLQLILFKVALMLGVEIHVNVEFVKVLEPPEDQENQKIGWRAEFLPTDHSLSEFEFDVIIGADGRRNTLEGFRRKEFRGKLAIAITANFINRNSTAEAKVEEISGVAFIFNQKFFQDLKEETGIDLENIVYYKDCTHYFVMTAKKQSLLDKGVIINDYIDTEMLLCAENVNQDNLLSYAREAADFATNYQLPSLDFAMNHYGQPDVAMFDFTCMYASENAALVRERQAHQLLVALVGDSLLEPFWPMGTGCARGFLAAFDTAWMVKSWNQGTPPLELLAERESLYRLLPQTTPENINKNFEQYTLDPGTRYPNLNSHCVRPHQVKHLYITKELEHYPLERLGSVRRSVNLSRKESDIRPSKLLTWCQQQTEGYQHVNVTDLTTSWRSGLALCAIIHRFRPELINFDSLNEDDAVENNQLAFDVAEREFGIPPVTTGKEMASAQEPDKLSMVMYLSKFYELFRGTPLRPVDSWRKNYGENADLSLAKSSISNNYLNLTFPRKRTPRVDGQTGENDMNKRRRKGFTNLDEPSNFSSRSLGSNQECGSSKEGGNQNKVKSMANQLLAKFEESTRNPSLMKQEKKSPSGFHFHPSHLRTVHPQLTVGKVSSGIGAAAEVLVNLYMNDHRPKAQATSPDLESMRKSFPLNLGGSDTCYFCKKRVYVMERLSAEGHFFHRECFRCSICATTLRLAAYTFDCDEGKFYCKPHFIHCKTNSKQRKRRAELKQQREEEATWQEQEAPRRDTPTESSCAVAAIGTLEGSPPVHFSLPVLHPLLG

SEQ ID NO: 53534 - protein, 545 aa, Homo sapiens
MRSSPDLNSHCVRPHQVKHLYITKELEHYPLERLGSVRRSVNLSRKESDIRPSKLLTWCQQQTEGYQHVNVTDLTTSWRSGLALCAIIHRFRPELINFDSLNEDDAVENNQLAFDVAEREFGIPPVTTGKEMASAQEPDKLSMVMYLSKFYELFRGTPLRPVDSWRKNYGENADLSLAKSSISNNYLNLTFPRKRTPRVDGQTGENDMNKRRRKGFTNLDEPSNFSSRSLGSNQECGSSKEGGNQNKVKSMANQLLAKFEESTRNPSLMKQEKKSPSGFHFHPSHLRTVHPQLTVGKVSSGIGAAAEVLVNLYMNDHRPKAQATSPDLESMRKSFPLNLGGSDTCYFCKKRVYVMERLSAEGHFFHRECFRCSICATTLRLAAYTFDCDEGKFYCKPHFIHCKTNSKQRKRRAELKQQREEEATWQEQEAPRRDTPTESSCAVAAIGTLEGSPPGISTSFFRKVLGWPLRLPRDLCNWMQGLLQAAGLHIRDNAYNYCYMYELLSLGLPLLWAFSEVLAAMYRESEGSLESICNWVLRCFPVKLR

SEQ ID NO: 53535 - protein, 976 aa, Homo sapiens
MEERKHETMNPAHVLFDRFVQATTCKGTLKAFQELCDHLELKPKDYRSFYHKLKSKLNYWKAKALWAKLDKRGSHKDYKKGKACTNTKCLIIGAGPCGLRTAIDLSLLGAKVVVIEKRDAFSRNNVLHLWPFTIHDLRGLGAKKFYGKFCAGAIDHISIRQLQLILLKVALILGIEIHVNVEFQGLIQPPEDQENERIGWRALVHPKTHPVSEYEFEVIIGGDGRRNTLEGFRRKEFRGKLAIAITANFINRNTTAEAKVEEISGVAFIFNQKFFQELREATGIDLENIVYYKDDTHYFVMTAKKQSLLDKGVILHDYADTELLLSRENVDQEALLSYAREAADFSTQQQLPSLDFAINHYGQPDVAMFDFTCMYASENAALVREQNGHQLLVALVGDSLLEPFWPMGTGIARGFLAAMDSAWMVRSWSLGTSPLEVLAERESIYRLLPQTTPENVSKNFSQYSIDPVTRYPNINVNFLRPSQVRHLYDTGETKDIHLEMESLVNSRTTPKLTRNESVARSSKLLGWCQRQTDGYAGVNVTDLTMSWKSGLALCAIIHRYRPDLIDFDSLDEQNVEKNNQLAFDIAEKELGISPIMTGKEMASVGEPDKLSMVMYLTQFYEMFKDSLPSSDTLDLNAEEKAVLIASTRSPISFLSKLGQTISRKRSPKDKKEKDLDGAGKRRKTSQSEEEEAPRGHRGERPTLVSTLTDRRMDVAVGNQNKVKYMATQLLAKFEENAPAQSIGIRRQLTQERGASQPSCCLPGQVRPAPTPRWKQGSMKKEFPQNLGGSDTCYFCQKRVYVMERLSAEGKFFHRSCFKCEYCATTLRLSAYAYDIEDGKFYCKPHYCYRLSGYAQRKRPAVAPLSGKEAKGPLQDGATTDANGRANAVASSTERTPGSGVNGLEEPSIAKRLRGTPERIELENYRLSLRQAEALQEVPEETQAEHNLSSVLDTGAEEDVASRSARRAAGRPPATRP

SEQ ID NO: 53536 - protein, 948 aa, Homo sapiens
MEERKHETMNPAHVLFDRFVQATTCKGTLKAFQELCDHLELKPKDYRSFYHKLKSKLNYWKAKALWAKLDKRGSHKDYKKGKACTNTKCLIIGAGPCGLRTAIDLSLLGAKVVVIEKRDAFSRNNVLHLWPFTIHDLRGLGAKKFYGKFCAGAIDHISIRQLQLILLKVALILGIEIHVNVEFQGLIQPPEDQENERIGWRALVHPKTHPVSEYEFEVIIGGDGRRNTLEGFRRKEFRGKLAIAITANFINRNTTAEAKVEEISGVAFIFNQKFFQELREATGIDLENIVYYKDDTHYFVMTAKKQSLLDKGVILHDYADTELLLSRENVDQEALLSYAREAADFSTQQQLPSLDFAINHYGQPDVAMFDFTCMYASENAALVREQNGHQLLVALVGDSLLEPFWPMGTGIARGFLAAMDSAWMVRSWSLGTSPLEVLAERESIYRLLPQTTPENVSKNFSQYSIDPVTRYPNINVNFLRPSQVRHLYDTGETKDIHLEMESLVNSRTTPKLTRNESVARSSKLLGWCQRQTDGYAGVNVTDLTMSWKSGLALCAIIHRYRPDLIDFDSLDEQNVEKNNQLAFDIAEKELGISPIMTGKEMASVGEPDKLSMVMYLTQFYEMFKDSLPSSDTLDLNAEEKAVLIASTRSPISFLSKLGQTISRKRSPKDKKEKDLDGAGKRRKTSQSEEEEAPRGHRGERPTLVSTLTDRRMDVAVGNQNKVKYMATQLLAKFEENAPAQSIGIRRQGSMKKEFPQNLGGSDTCYFCQKRVYVMERLSAEGKFFHRSCFKCEYCATTLRLSAYAYDIEDGKFYCKPHYCYRLSGYAQRKRPAVAPLSGKEAKGPLQDGATTDANGRANAVASSTERTPGSGVNGLEEPSIAKRLRGTPERIELENYRLSLRQAEALQEVPEETQAEHNLSSVLDTGAEEDVASRSARRAAGRPPATRP

SEQ ID NO: 53537 - protein, 966 aa, Homo sapiens
MEERKHETMNPAHVLFDRFVQATTCKGTLKAFQELCDHLELKPKDYRSFYHKLKSKLNYWKAKALWAKLDKRGSHKDYKKGKACTNTKCLIIGAGPCGLRTAIDLSLLGAKVVVIEKRDAFSRNNVLHLWPFTIHDLRGLGAKKFYGKFCAGAIDHISIRQLQLILLKVALILGIEIHVNVEFQGLIQPPEDQENERIGWRALVHPKTHPVSEYEFEVIIGGDGRRNTLEGFRRKEFRGKLAIAITANFINRNTTAEAKVEEISGVAFIFNQKFFQELREATGIDLENIVYYKDDTHYFVMTAKKQSLLDKGVILHDYADTELLLSRENVDQEALLSYAREAADFSTQQQLPSLDFAINHYGQPDVAMFDFTCMYASENAALVREQNGHQLLVALVGDSLLEPFWPMGTGIARGFLAAMDSAWMVRSWSLGTSPLEVLAERESIYRLLPQTTPENVSKNFSQYSIDPVTRYPNINVNFLRPSQVRHLYDTGETKDIHLEMESLVNSRTTPKLTRNESVARSSKLLGWCQRQTDGYAGVNVTDLTMSWKSGLALCAIIHRYRPDLIDFDSLDEQNVEKNNQLAFDIAEKELGISPIMTGKEMASVGEPDKLSMVMYLTQFYEMFKDSLPSSDTLDLNAEEKAVLIASTRSPISFLSKLGQTISRKRSPKDKKEKDLDGAGKRRKTSQSEEEEAPRGHRGERPTLVSTLTDRRMDVAVGNQNKVKYMATQLLAKFEENAPAQSIGIRRQGSMKKEFPQNLGGSDTCYFCQKRVYVMERLSAEGKFFHRSCFKCEYCATTLRLSAYAYDIEDGKFYCKPHYCYRLSGYAQRKRPAVAPLSGKEAKGPLQDGATTDANGRANAVASSTERTPGSGVNGLEEPSIAKRLRGTPERIELENYRLSLRQAEALQEVPEETQAEHNLSSVLDTGAEEDVASRDWVSPWLPRMVSNSWAQMIHPPQPPTVLGSQM

SEQ ID NO: 53538 - protein, 1570 aa, Homo sapiens
MSDSLWTALSNFSMPSFPGGSMFRRTKSCRTSNRKSLILTSTSPTLPRPHSPLPGHLGSSPLDSPRNFSPNTPAHFSFASSRRADGRRWSLASLPSSGYGTNTPSSTVSSSCSSQERLHQLPYQPTVDELHFLSKHFGSTESITDEDGGRRSPAVRPRSRSLSPGRSPSSYDNEIVMMNHVYKERFPKATAQMEEKLRDFTRAYEPDSVLPLADGVLSFIHHQIIELARDCLTKSRDGLITTVYFYELQENLEKLLQDAYERSESLEVAFVTQLVKKLLIIISRPARLLECLEFNPEEFYHLLEAAEGHAKEGHLVKTDIPRYIIRQLGLTRDPFPDVVHLEEQDSGGSNTPEQDDLSEGRSSKAKKPPGENDFDTIKLISNGAYGAVYLVRHRDTRQRFAMKKINKQNLILRNQIQQAFVERDILTFAENPFVVGMFCSFETRRHLCMVMEYVEGGDCATLLKNIGALPVEMARMYFAETVLALEYLHNYGIVHRDLKPDNLLITSMGHIKLTDFGLSKMGLMSLTTNLYEGHIEKDAREFLDKQVCGTPEYIAPEVILRQGYGKPVDWWAMGIILYEFLVGCVPFFGDTPEELFGQVISDDILWPEGDEALPTEAQLLISSLLQTNPLVRLGAGGAFEVKQHSFFRDLDWTGLLRQKAEFIPHLESEDDTSYFDTRSDRYHHVNSYDEDDTTEEEPVEIRQFSSCSPRFSKVYSSMEQLSQHEPKTPVAAAGSSKREPSTKGPEEKVAGKREGLGGLTLREKTWRGGSPEIKRFSASEASFLEGEASPPLGARRRFSALLEPSRFSAPQEDEDEARLRRPPRPSSDPAGSLDARAPKEETQGEGTSSAGDSEATDRPRPGDLCPPSKDGDASGPRATNDLVLRRARHQQMSGDVAVEKRPSRTGGKVIKSASATALSVMIPAVDPHGSSPLASPMSPRSLSSNPSSRDSSPSRDYSPAVSGLRSPITIQRSGKKYGFTLRAIRVYMGDTDVYSVHHIVWHVEEGGPAQEAGLCAGDLITHVNGEPVHGMVHPEVVELILKSGNKVAVTTTPFENTSIRIGPARRSSYKAKMARRNKRPSAKEGQESKKRSSLFRKITKQSNLLHTSRSLSSLNRSLSSSDSLPGSPTHGLPARSPTHSYRSTPDSAYLGASSQSSSPASSTPNSPASSASHHIRPSTLHGLSPKLHRQYRSARCKSAGNIPLSPLAHTPSPTQASPPPLPGHTVGSSHTTQSFPAKLHSSPPVVRPRPKSAEPPRSPLLKRVQSAEKLGASLSADKKGALRKHSLEVGHPDFRKDFHGELALHSLAESDGETPPVEGLGAPRQVAVRRLGRQESPLSLGADPLLPEGASRPPVSSKEKESPGGAEACTPPRATTPGGRTLERDVGCTRHQSVQTEDGTGGMARAVAKAALSPVQEHETGRRSSSGEAGTPLVPIVVEPARPGAKAVVPQPLGADSKGLQEPAPLAPSVPEAPRGRERWVLEVVEERTTLSGPRSKPASPKLSPEPQTPSLAPAKCSAPSSAVTPVPPASLLGSGTKPQVGLTSRCPAEAVPPAGLTKKGVSSPAPPGP

SEQ ID NO: 53539 - protein, 725 aa, Homo sapiens
MSDSLWTALSNFSMPSFPGGSMFRRTKSCRTSNRKSLILTSTSPTLPRPHSPLPGHLGSSPLDSPRNFSPNTPAHFSFASSRRADGRRWSLASLPSSGYGTNTPSSTVSSSCSSQERLHQLPYQPTVDELHFLSKHFGSTESITDEDGGRRSPAVRPRSRSLSPGRSPSSYDNEIVMMNHVYKERFPKATAQMEEKLRDFTRAYEPDSVLPLADGVLSFIHHQIIELARDCLTKSRDGLITTVYFYELQENLEKLLQDAYERSESLEVAFVTQLVKKLLIIISRPARLLECLEFNPEEFYHLLEAAEGHAKEGHLVKTDIPRYIIRQLGLTRDPFPDVVHLEEQDSGGSNTPEQDDLSEGRSSKAKKPPGENDFDTIKLISNGAYGAVYLVRHRDTRQRFAMKKINKQNLILRNQIQQAFVERDILTFAENPFVVGMFCSFETRRHLCMVMEYVEGGDCATLLKNIGALPVEMARMYFAETVLALEYLHNYGIVHRDLKPDNLLITSMGHIKLTDFGLSKMGLMSLTTNLYEGHIEKDAREFLDKQVCGTPEYIAPEVILRQGYGKPVDWWAMGIILYEFLVGCVPFFGDTPEELFGQVISDDILWPEGDEALPTEAQLLISSLLQTNPLVRLGAGGAFEVKQHSFFRDLDWTGLLRQKAEFIPHLESEDDTSYFDTRSDRYHHVNSYDEDDTTEEEPVEIRQFSSCSPRFSKVYSLRIHMYTYK

SEQ ID NO: 53540 - protein, 1798 aa, Homo sapiens
MKRSRCRDRPQPPPPDRREDGVQRAAELSQSLPPRRRAPPGRQRLEERTGPAGPEGKEQDVVTGVSPLLFRKLSNPDIFSSTGKVKLQRQLSQDDCKLWRGNLASSLSGKQLLPLSSSVHSSVGQVTWQSSGEASNLVRMRNQSLGQSAPSLTAGLKELSLPRRGSFCRTSNRKSLIVTSSTSPTLPRPHSPLHGHTGNSPLDSPRNFSPNAPAHFSFVPARRTDGRRWSLASLPSSGYGTNTPSSTVSSSCSSQEKLHQLPFQPTADELHFLTKHFSTESVPDEEGRQSPAMRPRSRSLSPGRSPVSFDSEIIMMNHVYKERFPKATAQMEERLAEFISSNTPDSVLPLADGALSFIHHQVIEMARDCLDKSRSGLITSQYFYELQDNLEKLLQDAHERSESSEVAFVMQLVKKLMIIIARPARLLECLEFDPEEFYHLLEAAEGHAKEGQGIKCDIPRYIVSQLGLTRDPLEEMAQLSSCDSPDTPETDDSIEGHGASLPSKKTPSEEDFETIKLISNGAYGAVFLVRHKSTRQRFAMKKINKQNLILRNQIQQAFVERDILTFAENPFVVSMFCSFDTKRHLCMVMEYVEGGDCATLLKNIGALPVDMVRLYFAETVLALEYLHNYGIVHRDLKPDNLLITSMGHIKLTDFGLSKIGLMSLTTNLYEGHIEKDAREFLDKQVCGTPEYIAPEVILRQGYGKPVDWWAMGIILYEFLVGCVPFFGDTPEELFGQVISDEIVWPEGDEALPPDAQDLTSKLLHQNPLERLGTGSAYEVKQHPFFTGLDWTGLLRQKAEFIPQLESEDDTSYFDTRSERYHHMDSEDEEEVSEDGCLEIRQFSSCSPRFNKVYSSMERLSLLEERRTPPPTKRSLSEEKEDHSDGLAGLKGRDRSWVIGSPEILRKRLSVSESSHTESDSSPPMTVRRRCSGLLDAPRFPEGPEEASSTLRRQPQEGIWVLTPPSGEGVSGPVTEHSGEQRPKLDEEAVGRSSGSSPAMETRGRGTSQLAEGATAKAISDLAVRRARHRLLSGDSTEKRTARPVNKVIKSASATALSLLIPSEHHTCSPLASPMSPHSQSSNPSSRDSSPSRDFLPALGSMRPPIIIHRAGKKYGFTLRAIRVYMGDSDVYTVHHMVWHVEDGGPASEAGLRQGDLITHVNGEPVHGLVHTEVVELILKSGNKVAISTTPLENTSIKVGPARKGSYKAKMARRSKRSRGKDGQESRKRSSLFRKITKQASLLHTSRSLSSLNRSLSSGESGPGSPTHSHSLSPRSPTQGYRVTPDAVHSVGGNSSQSSSPSSSVPSSPAGSGHTRPSSLHGLAPKLQRQYRSPRRKSAGSIPLSPLAHTPSPPPPTASPQRSPSPLSGHVAQAFPTKLHLSPPLGRQLSRPKSAEPPRSPLLKRVQSAEKLAAALAASEKKLATSRKHSLDLPHSELKKELPPREVSPLEVVGARSVLSGKGALPGKGVLQPAPSRALGTLRQDRAERRESLQKQEAIREVDSSEDDTEEGPENSQGAQELSLAPHPEVSQSVAPKGAGESGEEDPFPSRDPRSLGPMVPSLLTGITLGPPRMESPSGPHRRLGSPQAIEEAASSSSAGPNLGQSGATDPIPPEGCWKAQHLHTQALTALSPSTSGLTPTSSCSPPSSTSGKLSMWSWKSLIEGPDRASPSRKATMAGGLANLQDLENTTPAQPKNLSPREQGKTQPPSAPRLAHPSYEDPSQGWLWESECAQAVKEDPALSITQVPDASGDRRQDVPCRGCPLTQKSEPSLRRGQEPGGHQKHRDLALVPDELLKQT

SEQ ID NO: 53541 - protein, 792 aa, Homo sapiens
MFSPTSAPALFLTKVPFSADCALATSPLAIFLNPRAHSSPGTPCSSRPLPWSCRTSNRKSLIVTSSTSPTLPRPHSPLHGHTGNSPLDSPRNFSPNAPAHFSFVPARRTDGRRWSLASLPSSGYGTNTPSSTVSSSCSSQEKLHQLPFQPTADELHFLTKHFSTESVPDEEGRQSPAMRPRSRSLSPGRSPVSFDSEIIMMNHVYKERFPKATAQMEERLAEFISSNTPDSVLPLADGALSFIHHQVIEMARDCLDKSRSGLITSQYFYELQDNLEKLLQDAHERSESSEVAFVMQLVKKLMIIIARPARLLECLEFDPEEFYHLLEAAEGHAKEGQGIKCDIPRYIVSQLGLTRDPLEEMAQLSSCDSPDTPETDDSIEGHGASLPSKKTPSEEDFETIKLISNGAYGAVFLVRHKSTRQRFAMKKINKQNLILRNQIQQAFVERDILTFAENPFVVSMFCSFDTKRHLCMVMEYVEGGDCATLLKNIGALPVDMVRLYFAETVLALEYLHNYGIVHRDLKPDNLLITSMGHIKLTDFGLSKIGLMSLTTNLYEGHIEKDAREFLDKQVCGTPEYIAPEVILRQGYGKPVDWWAMGIILYEFLVGCVPFFGDTPEELFGQVISDEIVWPEGDEALPPDAQDLTSKLLHQNPLERLGTGSAYEVKQHPFFTGLDWTGLLRQKAEFIPQLESEDDTSYFDTRSERYHHMDSEDEEEVSEDGCLEIRQFSSCSPRFNKVYSSMERLSLLEERRTPPPTKRSLSEEKEDHSDGLAGLKGRDRSWVIGSPEHHPSA

SEQ ID NO: 53542 - protein, 1608 aa, Homo sapiens
MKRSRCRDRPQPPPPDRREDGVQRAAELSQSLPPRRRAPPGRQRLEERTGPAGPEGKEQDVVTGVSPLLFRKLSNPDIFSSTGKVKLQRQLSQDDCKLWRGNLASSLSGKQLLPLSSSVHSSVGQVTWQSSGEASNLVRMRNQSLGQSAPSLTAGLKELSLPRRGSFCRTSNRKSLIVTSSTSPTLPRPHSPLHGHTGNSPLDSPRNFSPNAPAHFSFVPARRTDGRRWSLASLPSSGYGTNTPSSTVSSSCSSQEKLHQLPFQPTADELHFLTKHFSTESVPDEEGRQSPAMRPRSRSLSPGRSPVSFDSEIIMMNHVYKERFPKAHERSESSEVAFVMQLVKKLMIIIARPARLLECLEFDPEEFYHLLEAAEGHAKEGQGIKCDIPRYIVSQLGLTRDPLEEMAQLSSCDSPDTPETDDSIEGHGASLPSKKTPSEEDFETIKLISNGAYGAVFLVRHKSTRQRFAMKKINKQNLILRNQIQQAFVERDILTFAENPFVVSMFCSFDTKRHLCMVMEYVEGGDCATLLKNIGALPVDMVRLYFAETVLALEYLHNYGIVHRDLKPDNLLITSMGHIKLTDFGLSKIGLMSLTTNLYEGHIEKDAREFLDKQVCGTPEYIAPEVILRQGYGKPVDWWAMGIILYEFLVGCVPFFGDTPEELFGQVISDEIVWPEGDEALPPDAQDLTSKLLHQNPLERLGTGSAYEVKQHPFFTGLDWTGLLRQKAEFIPQLESEDDTSYFDTRSERYHHMDSEDEEEVSEDGCLEIRQFSSCSPRFNKVYSSMERLSLLEERRTPPPTKRSLSEEKEDHSDGLAGLKGRDRSWVIGSPEILRKRLSVSESSHTESDSSPPMTVRRRCSGLLDAPRFPEGPEEASSTLRRQPQEGIWVLTPPSGEGVSGPVTEHSGEQRPKLDEEAVGRSSGSSPAMETRGRGTSQLAEGATAKAISDLAVRRARHRLLSGDSTEKRTARPVNKVIKSASATALSLLIPSEHHTCSPLASPMSPHSQSSNPSSRDSSPYGFTLRAIRVYMGDSDVYTVHHMVWHVEDGGPASEAGLRQGDLITHVNGEPVHGLVHTEVVELILKSGNKVAISTTPLENTSIKVGPARKGSYKAKMARRSKRSRGKDGQESRKRSSLFRKITKQASLLHTSRSLSSLNRSLSSGESGPGSPTHSHSLSPRSPTQGYRVTPDAVHSELSRPKSAEPPRSPLLKRVQSAEKLAAALAASEKKLATSRKHSLDLPHSELKKELPPREVSPLEVVGARSVLSGKGALPGKGVLQPAPSRALGTLRQDRAERRESLQKQEAIREVDSSEDDTEEGPENSQGAQELSLAPHPEVSQSVAPKGAGESGEEDPFPSRDPRSLGPMVPSLLTGITLGPPRMESPSGPHRRLGSPQAIEEAASSSSAGPNLGQSGATDPIPPEGCWKAQHLHTQALTALSPSTSGLTPTSSCSPPSSTSGKLSMWSWKSLIEGPDRASPSRKATMAGGLANLQDLENTTPAQPKNLSPREQGKTQPPSAPRLAHPSYEDPSQGWLWESECAQAVKEDPALSITQVPDASGDRRQDVPCRGCPLTQKSEPSLRRGQEPGGHQKHRDLALVPDELLKQT

SEQ ID NO: 53543 - protein, 630 aa, Homo sapiens
MRPRSRSLSPGRSPVSFDSEIIMMNHVYKERFPKATAQMEERLAEFISSNTPDSVLPLADGALSFIHHQVIEMARDCLDKSRSGLITSQYFYELQDNLEKLLQDEFDPEEFYHLLEAAEGHAKEGQGIKCDIPRYIVSQLGLTRDPLEEMAQLSSCDSPDTPETDDSIEGHGASLPSKKTPSEEDFETIKLISNGAYGAVFLVRHKSTRQRFAMKKINKQNLILRNQIQQAFVERDILTFAENPFVVSMFCSFDTKRHLCMVMEYVEGGDCATLLKNIGALPVDMVRLYFAETVLALEYLHNYGIVHRDLKPDNLLITSMGHIKLTDFGLSKIGLMSLTTNLYEGHIEKDAREFLDKQVCGTPEYIAPEVILRQGYGKPVDWWAMGIILYEFLVGCVPFFGDTPEELFGQVISDEIVWPEGDEALPPDAQDLTSKLLHQNPLERLGTGSAYEVKQHPFFTGLDWTGLLRQKAEFIPQLESEDDTSYFDTRSERYHHMDSEDEEEVSEDGCLEIRQFSSCSPRFNKVYSSMERLSLLEERRTPPPTKRSLSEEKEDHSDGLAGLKGRDRSWVIGSPEILRKRLSVSESSLLKVAGRPSTFSQHFGTHPHQQLLSSQLHLWEAEHVVLEIPY

SEQ ID NO: 53544 - protein, 344 aa, Homo sapiens
MDDSSILRRRGLQKELSLPRRGSFCRTSNRKSLIVTSSTSPTLPRPHSPLHGHTGNSPLDSPRNFSPNAPAHFSFVPARSHSHRADRTDGRRWSLASLPSSGYGTNTPSSTVSSSCSSQEKLHQLPFQPTADELHFLTKHFSTESVPDEEGRQSPAMRPAPSRALGTLRQDRAERRESLQKQEAIREVDSSEDDTEEGPENSQGAQELSLAPHPEVSQSVAPKGAGESGEEDPFPSRDPRSLGPMVPSLLTGITLGPPRMESPSGPHRRLGSPQAIEEAASSSSAGPNLGQSGATDPIPPEGCWKAQHLHTQALTALSPSTSGLAHLMRIPARAGYGSLSVHKQ

SEQ ID NO: 53545 - protein, 1309 aa, Homo sapiens
MDESSLLRRRGLQKELSLPRRGRGCRSGNRKSLVVGTPSPTLSRPLSPLSVPTAGSSPLDSPRNFSAASALNFPFARRADGRRWSLASLPSSGYGTNTPSSTLSSSSSSRERLHQLPFQPTPDELHFLSKHFRSSENVLDEEGGRSPRLRPRSRSLSPGRATGTFDNEIVMMNHVYRERFPKATAQMEGRLQEFLTAYAPGARLALADGVLGFIHHQIVELARDCLAKSGENLVTSRYFLEMQEKLERLLQDAHERSDSEEVSFIVQLVRKLLIIISRPARLLECLEFDPEEFYHLLEAAEGHAREGQGIKTDLPQYIIGQLGLAKDPLEEMVPLSHLEEEQPPAPESPESRALVGQSRRKPCESDFETIKLISNGAYGAVYLVRHRDTRQRFAIKKINKQNLILRNQIQQVFVERDILTFAENPFVVSMFCSFETRRHLCMVMEYVEGGDCATLLKNMGPLPVDMARLYFAETVLALEYLHNYGIVHRDLKPDNLLITSLGHIKLTDFGLSKIGLMSMATNLYEGHIEKDAREFIDKQVCGTPEYIAPEVIFRQGYGKPVDWWAMGVVLYEFLVGCVPFFGDTPEELFGQVVSDEIMWPEGDEALPADAQDLITRLLRQSPLDRLGTGGTHEVKQHPFFLALDWAGLLRHKAEFVPQLEAEDDTSYFDTRSERYRHLGSEDDETNDEESSTEIPQFSSCSHRFSKVYSSSEFLAVQPTPTFAERSFSEDREEGWERSEVDYGRRLSADIRLRSWTSSGSSCQSSSSQPERGPSPSLLNTISLDTMPKFAFSSEDEGVGPGPAGPKRPVFILGEPDPPPAATPVMPKPSSLSADTAALSHARLRSNSIGARHSTPRPLDAGRGRRLGGPRDPAPEKSRASSSGGSGGGSGGRVPKSASVSALSLIITADDGSGGPLMSPLSPRSLSSNPSSRDSSPSRDPSPVCGSLRPPIVIHSSGKKYGFSLRAIRVYMGDSDVYTVHHVVWSVEDGSPAQEAGLRAGDLITHINGESVLGLVHMDVVELLLKSGNKISLRTTALENTSIKVGPARKNVAKGRMARRSKRSRRRETQDRRKSLFKKISKQTSVLHTSRSFSSGLHHSLSSSESLPGSPTHSLSPSPTTPCRSPAPDVPADTTASPPSASPSSSSPASPAAAGHTRPSSLHGLAAKLGPPRPKTGRRKSTSSIPPSPLACPPISAPPPRSPSPLPGHPPAPARSPRLRRGQSADKLGTGERLDGEAGRRTRGPEAELVVMRRLHLSERRDSFKKQEAVQEVSFDEPQEEATGLPTSVPQIAVEGEEAVPVALGPTGRD

SEQ ID NO: 53546 - protein, 840 aa, Homo sapiens
MDPTAGSKKEPGGGAATEEGVNRIAVPKPPSIEEFSIVKPISRGAFGKVYLGQKGGKLYAVKVVKKADMINKNMTHQVQAERDALALSKSPFIVHLYYSLQSANNVYLVMEYLIGGDVKSLLHIYGYFDEEMAVKYISEVALALDYLHRHGIIHRDLKPDNMLISNEGHIKLTDFGLSKVTLNRDINMMDILTTPSMAKPRQDYSRTPGQVLSLISSLGFNTPIAEKNQDPANILSACLSETSQLSQGLVCPMSVDQKDTTPYSSKLLKSCLETVASNPGMPVKCLTSNLLQSRKRLATSSASSQSHTFISSVESECHSSPKWEKDCQESDEALGPTMMSWNAVEKLCAKSANAIETKGFNKKDLELALSPIHNSSALPTTGRSCVNLAKKCFSGEVSWEAVELDVNNINMDTDTSQLGFHQSNQWAVDSGGISEEHLGKRSLKRNFELVDSSPCKKIIQNKKTCVEYKHNEMTNCYTNQNTGLTVEVQDLKLSVHKSQQNDCANKENIVNSFTDKQQTPEKLPIPMIAKNLMCELDEDCEKNSKRDYLSSSFLCSDDDRASKNISMNSDSSFPGISIMESPLESQPLDSDRSIKESSFEESNIEDPLIVTPDCQEKTSPKGVENPAVQESNQKMLGPPLEVLKTLASKRNAVAFRSFNSHINASNNSEPSRMNMTSLDAMDISCAYSGSYPMAITPTQKRRSCMPHQTPNQIKSGTPYRTPKSVRRGVAPVDDGRILGTPDYLAPELLLGRAHDIPWPEGEEKLSDNAQSAVEILLTIDDTKRAGMKELKRHPLFSDVDWENLQHQTMPFIPQPDDETDTSYFEARNTAQHLTVSGFSL

SEQ ID NO: 53547 - protein, 879 aa, Homo sapiens
MDPTAGSKKEPGGGAATEEGVNRIAVPKPPSIEEFSIVKPISRGAFGKVYLGQKGGKLYAVKVVKKADMINKNMTHQVQAERDALALSKSPFIVHLYYSLQSANNVYLVMEYLIGGDVKSLLHIYGYFDEEMAVKYISEVALALDYLHRHGIIHRDLKPDNMLISNEGHIKLTDFGLSKVTLNRDINMMDILTTPSMAKPRQDYSRTPGQVLSLISSLGFNTPIAEKNQDPANILSACLSETSQLSQGLVCPMSVDQKDTTPYSSKLLKSCLETVASNPGMPVKCLTSNLLQSRKRLATSSASSQSHTFISSVESECHSSPKWEKDCQESDEALGPTMMSWNAVEKLCAKSANAIETKGFNKKDLELALSPIHNSSALPTTGRSCVNLAKKCFSGEVSWEAVELDVNNINMDTDTSQLGFHQSNQWAVDSGGISEEHLGKRSLKRNFELVDSSPCKKIIQNKKTCVEYKHNEMTNCYTNQNTGLTVEVQDLKLSVHKSQQNDCANKENIVNSFTDKQQTPEKLPIPMIAKNLMCELDEDCEKNSKRDYLSSSFLCSDDDRASKNISMNSDSSFPGISIMESPLESQPLDSDRSIKESSFEESNIEDPLIVTPDCQEKTSPKGVENPAVQESNQKMLGPPLEVLKTLASKRNAVAFRSFNSHINASNNSEPSRMNMTSLDAMDISCAYSGSYPMAITPTQKRRSCMPHQQTPNQIKSGTPYRTPKSVRRGVAPVDDGRILGTPDYLAPELLLGRAHGPAVDWWALGVCLFEFLTGIPPFNDETPQQVFQNILKRDIPWPEGEEKLSDNAQSAVEILLTIDDTKRAGMKELKRHPLFSDVDWENLQHQTMPFIPQPDDETDTSYFEARNTAQHLTVSGFSL

SEQ ID NO: 53548 - protein, 878 aa, Homo sapiens
MDPTAGSKKEPGGGAATEEGVNRIAVPKPPSIEEFSIVKPISRGAFGKVYLGQKGGKLYAVKVVKKADMINKNMTHQVQAERDALALSKSPFIVHLYYSLQSANNVYLVMEYLIGGDVKSLLHIYGYFDEEMAVKYISEVALALDYLHRHGIIHRDLKPDNMLISNEGHIKLTDFGLSKVTLNRDINMMDILTTPSMAKPRQDYSRTPGQVLSLISSLGFNTPIAEKNQDPANILSACLSETSQLSQGLVCPMSVDQKDTTPYSSKLLKSCLETVASNPGMPVKCLTSNLLQSRKRLATSSASSQSHTFISSVESECHSSPKWEKDCQESDEALGPTMMSWNAVEKLCAKSANAIETKGFNKKDLELALSPIHNSSALPTTGRSCVNLAKKCFSGEVSWEAVELDVNNINMDTDTSQLGFHQSNQWAVDSGGISEEHLGKRSLKRNFELVDSSPCKKIIQNKKTCVEYKHNEMTNCYTNQNTGLTVEVQDLKLSVHKSQQNDCANKENIVNSFTDKQQTPEKLPIPMIAKNLMCELDEDCEKNSKRDYLSSSFLCSDDDRASKNISMNSDSSFPGISIMESPLESQPLDSDRSIKESSFEESNIEDPLIVTPDCQEKTSPKGVENPAVQESNQKMLGPPLEVLKTLASKRNAVAFRSFNSHINASNNSEPSRMNMTSLDAMDISCAYSGSYPMAITPTQKRRSCMPHQTPNQIKSGTPYRTPKSVRRGVAPVDDGRILGTPDYLAPELLLGRAHGPAVDWWALGVCLFEFLTGIPPFNDETPQQVFQNILKRDIPWPEGEEKLSDNAQSAVEILLTIDDTKRAGMKELKRHPLFSDVDWENLQHQTMPFIPQPDDETDTSYFEARNTAQHLTVSGFSL

SEQ ID NO: 53549 - protein, 5938 aa, Homo sapiens
MQKGLLDQDTGLVLLESQVIMSGLIAPETGENLSLEEGIARNLINPQMYQQLRELQDALALISRLTESRGPLSVVEAIEKRIISETVGLKILEAHLATGGFSLSPSENCINLEEAFHQGLISAWLHSVLESYLRTSKNLIDPNTAEKIGLLDLMQRCIVHQESGFKLLPVKQLAGGMVSLKSGRKVSIFRAVQEGLIDRQVTVRLLEAQLFAGGIVDPRTGHRLTVEEAVRHNLIDQDMACAILIRQLQTGGIIDTVTGQRLTIDEAVSNDLVAAKIALVILESLWSFMGLLWPESGEILPITDALEQGIVSTELAHKILSNRQHIKALFLPATTEILSWKKAIESGILDRDLANNLKSICIPDVMPHMQLADSAEQNINPGAAVLPCSKSHPKATASQSENLLFQLMTHSYINVQNGQRLLLLDKELMETLTSRDEYQTSPPKVVEIGHQRQKTPEGLQESANVKISGTFSSGWTVRLPEFQFSSQNKEYPDREDCTTEKGKKTTVETEDSSVENPEQDLFVEQKERNPNIDALKVINKVKLEVQRQLIGTQREDQTAVSVRENASRGHLLTIPPAEAEGVPLVVDKDVFSVETPKKEHQPLRNTSFTCQNEQAHTLETEYIHDETGGSHIKPQSKKLQVQVKKTLGIKLELKSETDGNVHPLDKKEMLKKTFLAKDDHKESQEAQNIAGGSMMMSEKTDEEDSGREIFLSCSHPLELLEEATLNVLSAQLLDGGIFHEQTGQKLLLNEAISRGIVPSHTAVKLMEKLNMFQGFFDSQTCESLTTEEVINEGLMDEKLLHNVLMADKAISGVLDPRTQTLCSVKDAVTVGLLDKETATRILERQVVTGGIIDLKRGKKVSVTLASTLGLVDVADQPELINLEKASKGRDAEKTVRERLISLQMETTGLIDPDSKAPLTVVQSIDRGLLEREEAVRLLTKQVVDGGIIHHISGMRLSVDNAFRHGLIGEDLAEKLKRVENLNIHQIFNPETKENISLPKAIKLDLITSDLKREIQEVQAFTGNFVDLISGQRLTLAEAKKEGLLTNEAVLSPGMMHGIVDPENCRIVPYSELVKKCKIDIESGQRYLEVIPFSDIKDGVSDKVLTLSQAIQLGKVDFASTLKVLEAQANTGGIIDTATGKRLTLASALEEKLVDENMVRIIASHQVLNGGIVDIFSDQRVTLVEAIEKRLISPELANMIQIDSSEFSDHRAQIEKQEGIEVCALQNEFLGKDMLIACNQTAEMSCNKVEESERLFQVENQSAQEKVKVRVSDGEQAKKSREISLKEFGCKDQRKPRMSSDAKEFISIINPHNLKGKSLGQVSLTHPYSECDFKLKEVARNNMGNDTNEEQEKAVTKIEIISHMKQSTSCLDSEEIRENQGEVILEVQETYCETSGKLPSEQVLQQPMNARVKSKREKREVIVEESIRTCKPAFLSEEKLYQETAIRDEHDSHIKSQPREMTSSEKGKEADTEMGFSITFKIEESSSQVVPQGISVKHLDALTLFSSKQANEGKVNNLSLCLTLKPEENLSREIACGAQSEPFPCMTPRPEGLHYQESDGKAQVTGPSQISKTDKSFQGTTRQETNYQDSWVTSKTKETKHQISSSNECKEKSYQEVSFDPARGLKLEEITVSRPDSKEVRYLEFSDRKDLHHQGSKSDDKLCGTLKSEIATQELTGEKFLEMANPNVAGLEAGSIEDIVTQRGSRVLGSFLPEKLFKGVSQKENTGQQNAIISPTVLETSEEKTVSLTVCSAVKTEKTPQEKLRESPGSEQTPFMTAPEGKGNGGVNPEPFRATQNVFTRQLCLEHDEKLVSYLSLLRNIEMRTKQIQPLELNLAELQDLLCQAKVLERELKDLTTLVSQELECVNQIIISQPQEVPAQLLKALEKDAKNLQKSLSSVSDTWNSRLLHFQNAVEIEKTKVLNQHTQLEGRLQDLRAWVGNKNLILNSKGSNSEIDVDSLNLCLQQYEDLKQPMAERKAQLDALAFDIQFFISEHAQDLSPQQNRQMLRLLNELQRSFQDILEQTAAQVDALQGHLQQMEQEALVKTLQKQQNTCHQQLEDLCSWVGQAERALAGHQGRTTQQDLSALQKNQSDLKDLQDDIQNRATSFATVVKDIEGFMEENQTKLSPRELTALREKLHQAKEQYEALQEETRVAQKELEEAVTSALQQETEKSKAAKELAENKKKIDALLDWVTSVGSSGGQLLTNLPGMEQLSGASLEKGALDTTDGYMGVNQAPEKLDKQCEMMKARHQELLSQQQNFILATQSAQAFLDQHGHNLTPEEQQMLQQKLGELKEQYSTSLAQSEAELKQVQTLQDELQKFLQDHKEFESWLERSEKELENMHKGGSSPETLPSLLKRQGSFSEDVISHKGDLRFVTISGQKVLDMENSFKEGKEPSEIGNLVKDKLKDATERYTALHSKCTRLGSHLNMLLGQYHQFQNSADSLQAWMQACEANVEKLLSDTVASDPGVLQEQLATTKQLQEELAEHQVPVEKLQKVARDIMEIEGEPAPDHRHVQETTDSILSHFQSLSYSLAERSSLLQKAIAQSQSVQESLESLLQSIGEVEQNLEGKQVSSLSSGVIQEALATNMKLKQDIARQKSSLEATREMVTRFMETADSTTAAVLQGKLAEVSQRFEQLCLQQQEKESSLKKLLPQAEMFEHLSGKLQQFMENKSRMLASGNQPDQDITHFFQQIQELNLEMEDQQENLDTLEHLVTELSSCGFALDLCQHQDRVQNLRKDFTELQKTVKEREKDASSCQEQLDEFRKLVRTFQKWLKETEGSIPPTETSMSAKELEKQIEHLKSLLDDWASKGTLVEEINCKGTSLENLIMEITAPDSQGKTGSILPSVGSSVGSVNGYHTCKDLTEIQCDMSDVNLKYEKLGGVLHERQESLQAILNRMEEVHKEANSVLQWLESKEEVLKSMDAMSSPTKTETVKAQAESNKAFLAELEQNSPKIQKVKEALAGLLVTYPNSQEAENWKKIQEELNSRWERATEVTVARQRQLEESASHLACFQAAESQLRPWLMEKELMMGVLGPLSIDPNMLNAQKQQVQFMLKEFEARRQQHEQLNEAAQGILTGPGDVSLSTSQVQKELQSINQKWVELTDKLNSRSSQIDQAIVKSTQYQELLQDLSEKVRAVGQRLSVQSAISTQPEAVKQQLEETSEIRSDLEQLDHEVKEAQTLCDELSVLIGEQYLKDELKKRLETVALPLQGLEDLAADRINRLQAALASTQQFQQMFDELRTWLDDKQSQQAKNCPISAKLERLQSQLQENEEFQKSLNQHSGSYEVIVAEGESLLLSVPPGEEKRTLQNQLVELKNHWEELSKKTADRQSRLKDCMQKAQKYQWHVEDLVPWIEDCKAKMSELRVTLDPVQLESSLLRSKAMLNEVEKRRSLLEILNSAADILINSSEADEDGIRDEKAGINQNMDAVTEELQAKTGSLEEMTQRLREFQESFKNIEKKVEGAKHQLEIFDALGSQACSNKNLEKLRAQQEVLQALEPQVDYLRNFTQGLVEDAPDGSDASQLLHQAEVAQQEFLEVKQRVNSGCVMMENKLEGIGQFHCRVREMFSQLADLDDELDGMGAIGRDTDSLQSQIEDVRLFLNKIHVLKLDIEASEAECRHMLEEEGTLDLLGLKRELEALNKQCGKLTERGKARQEQLELTLGRVEDFYRKLKGLNDATTAAEEAEALQWVVGTEVEIINQQLADFKMFQKEQVDPLQMKLQQVNGLGQGLIQSAGKDCDVQGLEHDMEEINARWNTLNKKVAQRIAQLQEALLHCGKFQDALEPLLSWLADTEELIANQKPPSAEYKVVKAQIQEQKLLQRLLDDRKATVDMLQAEGGRIAQSAELADREKITGQLESLESRWTELLSKAAARQKQLEDILVLAKQFHETAEPISDFLSVTEKKLANSEPVGTQTAKIQQQIIRHKALEEDIENHATDVHQAVKIGQSLSSLTSPAEQGVLSEKIDSLQARYSEIQDRCCRKAALLDQALSNARLFGEDEVEVLNWLAEVEDKLSSVFVKDFKQDVLHRQHADHLALNEEIVNRKKNVDQAIKNGQALLKQTTGEEVLLIQEKLDGIKTRYADITVTSSKALRTLEQARQLATKFQSTYEELTGWLREVEEELATSGGQSPTGEQIPQFQQRQKELKKEVMEHRLVLDTVNEVSRALLELVPWRAREGLDKLVSDANEQYKLVSDTIGQRVDEIDAAIQRSQQYEQAADAELAWVAETKRKLMALGPIRLEQDQTTAQLQVQKAFSIDIIRHKDSMDELFSHRSEIFGTCGEEQKTVLQEKTESLIQQYEAISLLNSERYARLERAQVLVNQFWETYEELSPWIEETRALIAQLPSPAIDHEQLRQQQEEMRQLRESIAEHKPHIDKLLKIGPQLKELNPEEGEMVEEKYQKAENMYAQIKEEVRQRALALDEAVSQSTQITEFHDKIEPMLETLENLSSRLRMPPLIPAEVDKIRECISDNKSATVELEKLQPSFEALKRRGEELIGRSQGADKDLAAKEIQDKLDQMVFFWEDIKARAEEREIKFLDVLELAEKFWYDMAALLTTIKDTQDIVHDLESPGIDPSIIKQQVEAAETIKEETDGLHEELEFIRILGADLIFACGETEKPEVRKSIDEMNNAWENLNKTWKERLEKLEDAMQAAVQYQDTLQAMFDWLDNTVIKLCTMPPVGTDLNTVKDQLNEMKEFKVEVYQQQIEMEKLNHQGELMLKKATDETDRDIIREPLTELKHLWENLGEKIAHRQHKLEGALLALGQFQHALEELMSWLTHTEELLDAQRPISGDPKVIEVELAKHHVLKNDVLAHQATVETVNKAGNELLESSAGDDASSLRSRLEAMNQCWESVLQKTEEREQQLQSTLQQAQGFHSEIEDFLLELTRMESQLSASKPTGGLPETAREQLDTHMELYSQLKAKEETYNQLLDKGRLMLLSRDDSGSGSKTEQSVALLEQKWHVVSSKMEERKSKLEEALNLATEFQNSLQEFINWLTLAEQSLNIASPPSLILNTVLSQIEEHKVFANEVNAHRDQIIELDQTGNQLKFLSQKQDVVLIKNLLVSVQSRWEKVVQRSIERGRSLDDARKRAKQFHEAWKKLIDWLEDAESHLDSELEISNDPDKIKLQLSKHKEFQKTLGGKQPVYDTTIRTGRALKEKTLLPEDSQKLDNFLGEVRDKWDTVCGKSVERQHKLEEALLFSGQFMDALQALVDWLYKVEPQLAEDQPVHGDLDLVMNLMDAHKVFQKELGKRTGTVQVLKRSGRELIENSRDDTTWVKGQLQELSTRWDTVCKLSVSKQSRLEQALKQAEVFRDTVHMLLEWLSEAEQTLRFRGALPDDTEALQSLIDTHKEFMKKVEEKRVDVNSAVAMGEVILAVCHPDCITTIKHWITIIRARFEEVLTWAKQHQQRLETALSELVANAELLEELLAWIQWAETTLIQRDQEPIPQNIDRVKALIAEHQTFMEEMTRKQPDVDRVTKTYKRKNIEPTHAPFIEKSRSGGRKSLSQPTPPPMPILSQSEAKNPRINQLSARWQQVWLLALERQRKLNDALDRLEELKEFANFDFDVWRKKYMRWMNHKKSRVMDFFRRIDKDQDGKITRQEFIDGILASKFPTTKLEMTAVADIFDRDGDGYIDYYEFVAALHPNKDAYRPTTDADKIEDEVTRQVAQCKCAKRFQVEQIGENKYRFFLGNQFGDSQQLRLVRILRSTVMVRVGGGWMALDEFLVKNDPCRARGRTNIELREKFILPEGASQGMTPFRSRGRRSKPSSRAASPTRSSSSASQSNHSCTSMPSSPATPASGTKVIPSSGSKLKRPTPTFHSSRTSLAGDTSNSSSPASTGAKTNRADPKKSASRPGSRAGSRAGSRASSRRGSDASDFDLLETQSACSDTSESSAAGGQGNSRRGLNKPSKIPTMSKKTTTASPRTPGPKR

SEQ ID NO: 53550 - protein, 5430 aa, Homo sapiens
MSSSDEETLSERSCRSERSCRSERSYRSERSGSLSPCPPGDTLPWNLPLHEQKKRKSQDSVLDPAERAVVRVADERDRVQKKTFTKWVNKHLMKVRKHINDLYEDLRDGHNLISLLEVLSGIKLPREKGRMRFHRLQNVQIALDFLKQRQVKLVNIRNDDITDGNPKLTLGLIWTIILHFQISDIYISGESGDMSAKEKLLLWTQKVTAGYTGIKCTNFSSCWSDGKMFNALIHRYRPDLVDMERVQIQSNRENLEQAFEVAERLGVTRLLDAEDVDVPSPDEKSVITYVSSIYDAFPKVPEGGEGISATEVDSRWQEYQSRVDSLIPWIKQHTILMSDKTFPQNPVELKALYNQYIHFKETEILAKEREKGRIEELYKLLEVWIEFGRIKLPQGYHPNDVEEEWGKLIIEMLEREKSLRPAVERLELLLQIANKIQNGALNCEEKLTLAKNTLQADAAHLESGQPVQCESDVIMYIQECEGLIRQLQVDLQILRDENYYQLEELAFRVMRLQDELVTLRLECTNLYRKGHFTSLELVPPSTLTTTHLKAEPLTKATHSSSTSWFRKPMTRAELVAISSSEDEGNLRFVYELLSWVEEMQMKLERAEWGNDLPSVELQLETQQHIHTSVEELGSSVKEARLYEGKMSQNFHTSYAETLGKLETQYCKLKETSSFRMRHLQSLHKFVSRATAELIWLNEKEEEELAYDWSDNNSNISAKRNYFSELTMELEEKQDVFRSLQDTAELLSLENHPAKQTVEAYSAAVQSQLQWMKQLCLCVEQHVKENTAYFQFFSDARELESFLRNLQDSIKRKYSCDHNTSLSRLEDLLQDSMDEKEQLIQSKSSVASLVGRSKTIVQLKPRSPDHVLKNTISVKAVCDYRQIEITICKNDECVLEDNSQRTKWKVISPTGNEAMVPSVCFLIPPPNKDAIEMASRVEQSYQKVMALWHQLHVNTKSLISWNYLRKDLDLVQTWNLEKLRSSAPGECHQIMKNLQAHYEDFLQDSRDSVLFSVADRLRLEEEVEACKARFQHLMKSMENEDKEETVAKMYISELKNIRLRLEEYEQRVVKRIQSLASSRTDRDAWQDNALRIAEQEHTQEDLQQLRSDLDAVSMKCDSFLHQSPSSSSVPTLRSELNLLVEKMDHVYGLSTVYLNKLKTVDVIVRSIQDAELLVKGYEIKLSQEEVVLADLSALEAHWSTLRHWLSDVKDKNSVFSVLDEEIAKAKVVAEQMSRLTPERNLDLERYQEKGSQLQERWHRVIAQLEIRQSELESIQEVLGDYRACHGTLIKWIEETTAQQEMMKPGQAEDSRVLSEQLSQQTALFAEIERNQTKLDQCQKFSQQYSTIVKDYELQLMTYKAFVESQQKSPGKRRRMLSSSDAITQEFMDLRTRYTALVTLTTQHVKYISDALRRLEEEEKVVEEEKQEHVEKVKELLGWVSTLARNTQGKATSSETKESTDIEKAILEQQVLSEELTTKKEQVSEAIKTSQIFLAKHGHKLSEKEKKQISEQLNALNKAYHDLCDGSANQLQQLQSQLAHQTEQKTLQKQQNTCHQQLEDLCSWVGQAERALAGHQGRTTQQDLSALQKNQSDLKDLQDDIQNRATSFATVVKDIEGFMEENQTKLSPRELTALREKLHQAKEQYEALQEETRVAQKELEEAVTSALQQETEKSKAAKELAENKKKIDALLDWVTSVGSSGGQLLTNLPGMEQLSGASLEKGALDTTDGYMGVNQAPEKLDKQCEMMKARHQELLSQQQNFILATQSAQAFLDQHGHNLTPEEQQMLQQKLGELKEQYSTSLAQSEAELKQVQTLQDELQKFLQDHKEFESWLERSEKELENMHKGGSSPETLPSLLKRQGSFSEDVISHKGDLRFVTISGQKVLDMENSFKEGKEPSEIGNLVKDKLKDATERYTALHSKCTRLGSHLNMLLGQYHQFQNSADSLQAWMQACEANVEKLLSDTVASDPGVLQEQLATTKQLQEELAEHQVPVEKLQKVARDIMEIEGEPAPDHRHVQETTDSILSHFQSLSYSLAERSSLLQKAIAQSQSVQESLESLLQSIGEVEQNLEGKQVSSLSSGVIQEALATNMKLKQDIARQKSSLEATREMVTRFMETADSTTAAVLQGKLAEVSQRFEQLCLQQQEKESSLKKLLPQAEMFEHLSGKLQQFMENKSRMLASGNQPDQDITHFFQQIQELNLEMEDQQENLDTLEHLVTELSSCGFALDLCQHQDRVQNLRKDFTELQKTVKEREKDASSCQEQLDEFRKLVRTFQKWLKETEGSIPPTETSMSAKELEKQIEHLKSLLDDWASKGTLVEEINCKGTSLENLIMEITAPDSQGKTGSILPSVGSSVGSVNGYHTCKDLTEIQCDMSDVNLKYEKLGGVLHERQESLQAILNRMEEVHKEANSVLQWLESKEEVLKSMDAMSSPTKTETVKAQAESNKAFLAELEQNSPKIQKVKEALAGLLVTYPNSQEAENWKKIQEELNSRWERATEVTVARQRQLEESASHLACFQAAESQLRPWLMEKELMMGVLGPLSIDPNMLNAQKQQVQFMLKEFEARRQQHEQLNEAAQGILTGPGDVSLSTSQVQKELQSINQKWVELTDKLNSRSSQIDQAIVKSTQYQELLQDLSEKVRAVGQRLSVQSAISTQPEAVKQQLEETSEIRSDLEQLDHEVKEAQTLCDELSVLIGEQYLKDELKKRLETVALPLQGLEDLAADRINRLQAALASTQQFQQMFDELRTWLDDKQSQQAKNCPISAKLERLQSQLQENEEFQKSLNQHSGSYEVIVAEGESLLLSVPPGEEKRTLQNQLVELKNHWEELSKKTADRQSRLKDCMQKAQKYQWHVEDLVPWIEDCKAKMSELRVTLDPVQLESSLLRSKAMLNEVEKRRSLLEILNSAADILINSSEADEDGIRDEKAGINQNMDAVTEELQAKTGSLEEMTQRLREFQESFKNIEKKVEGAKHQLEIFDALGSQACSNKNLEKLRAQQEVLQALEPQVDYLRNFTQGLVEDAPDGSDASQLLHQAEVAQQEFLEVKQRVNSGCVMMENKLEGIGQFHCRVREMFSQLADLDDELDGMGAIGRDTDSLQSQIEDVRLFLNKIHVLKLDIEASEAECRHMLEEEGTLDLLGLKRELEALNKQCGKLTERGKARQEQLELTLGRVEDFYRKLKGLNDATTAAEEAEALQWVVGTEVEIINQQLADFKMFQKEQVDPLQMKLQQVNGLGQGLIQSAGKDCDVQGLEHDMEEINARWNTLNKKVAQRIAQLQEALLHCGKFQDALEPLLSWLADTEELIANQKPPSAEYKVVKAQIQEQKLLQRLLDDRKATVDMLQAEGGRIAQSAELADREKITGQLESLESRWTELLSKAAARQKQLEDILVLAKQFHETAEPISDFLSVTEKKLANSEPVGTQTAKIQQQIIRHKALEEDIENHATDVHQAVKIGQSLSSLTSPAEQGVLSEKIDSLQARYSEIQDRCCRKAALLDQALSNARLFGEDEVEVLNWLAEVEDKLSSVFVKDFKQDVLHRQHADHLALNEEIVNRKKNVDQAIKNGQALLKQTTGEEVLLIQEKLDGIKTRYADITVTSSKALRTLEQARQLATKFQSTYEELTGWLREVEEELATSGGQSPTGEQIPQFQQRQKELKKEVMEHRLVLDTVNEVSRALLELVPWRAREGLDKLVSDANEQYKLVSDTIGQRVDEIDAAIQRSQQYEQAADAELAWVAETKRKLMALGPIRLEQDQTTAQLQVQKAFSIDIIRHKDSMDELFSHRSEIFGTCGEEQKTVLQEKTESLIQQYEAISLLNSERYARLERAQVLVNQFWETYEELSPWIEETRALIAQLPSPAIDHEQLRQQQEEMRQLRESIAEHKPHIDKLLKIGPQLKELNPEEGEMVEEKYQKAENMYAQIKEEVRQRALALDEAVSQSTQVSQFHDKIEPMLETLENLSSRLRMPPLIPAEVDKIRECISDNKSATVELEKLQPSFEALKRRGEELIGRSQGADKDLAAKEIQDKLDQMVFFWEDIKARAEEREIKFLDVLELAEKFWYDMAALLTTIKDTQDIVHDLESPGIDPSIIKQQVEAAETIKEETDGLHEELEFIRILGADLIFACGETEKPEVRKSIDEMNNAWENLNKTWKERLEKLEDAMQAAVQYQDTLQAMFDWLDNTVIKLCTMPPVGTDLNTVKDQLNEMKEFKVEVYQQQIEMEKLNHQGELMLKKATDETDRDIIREPLTELKHLWENLGEKIAHRQHKLEGALLALGQFQHALEELMSWLTHTEELLDAQRPISGDPKVIEVELAKHHVLKNDVLAHQATVETVNKAGNELLESSAGDDASSLRSRLEAMNQCWESVLQKTEEREQQLQSTLQQAQGFHSEIEDFLLELTRMESQLSASKPTGGLPETAREQLDTHMELYSQLKAKEETYNQLLDKGRLMLLSRDDSGSGSKTEQSVALLEQKWHVVSSKMEERKSKLEEALNLATEFQNSLQEFINWLTLAEQSLNIASPPSLILNTVLSQIEEHKVFANEVNAHRDQIIELDQTGNQLKFLSQKQDVVLIKNLLVSVQSRWEKVVQRSIERGRSLDDARKRAKQFHEAWKKLIDWLEDAESHLDSELEISNDPDKIKLQLSKHKEFQKTLGGKQPVYDTTIRTGRALKEKTLLPEDSQKLDNFLGEVRDKWDTVCGKSVERQHKLEEALLFSGQFMDALQALVDWLYKVEPQLAEDQPVHGDLDLVMNLMDAHKVFQKELGKRTGTVQVLKRSGRELIENSRDDTTWVKGQLQELSTRWDTVCKLSVSKQSRLEQALKQAEVFRDTVHMLLEWLSEAEQTLRFRGALPDDTEALQSLIDTHKEFMKKVEEKRVDVNSAVAMGEVILAVCHPDCITTIKHWITIIRARFEEVLTWAKQHQQRLETALSELVANAELLEELLAWIQWAETTLIQRDQEPIPQNIDRVKALIAEHQTFMEEMTRKQPDVDRVTKTYKRKNIEPTHAPFIEKSRSGGRKSLSQPTPPPMPILSQSEAKNPRINQLSARWQQVWLLALERQRKLNDALDRLEELKEFANFDFDVWRKKYMRWMNHKKSRVMDFFRRIDKDQDGKITRQEFIDGILASKFPTTKLEMTAVADIFDRDGDGYIDYYEFVAALHPNKDAYRPTTDADKIEDEVTRQVAQCKCAKRFQVEQIGENKYRFGDSQQLRLVRILRSTVMVRVGGGWMALDEFLVKNDPCRARGRTNIELREKFILPEGASQGMTPFRSRGRRSKPSSRAASPTRSSSSASQSNHSCTSMPSSPATPASGTKVIPSSGSKLKRPTPTFHSSRTSLAGDTSNSSSPASTGAKTNRADPKKSASRPGSRAGSRAGSRASSRRGSDASDFDLLETQSACSDTSESSAAGGQGNSRRGLNKPSKIPTMSKKTTTASPRTPGPKR

SEQ ID NO: 53551 - protein, 5430 aa, Homo sapiens
MSSSDEETLSERSCRSERSCRSERSYRSERSGSLSPCPPGDTLPWNLPLHEQKKRKSQDSVLDPAERAVVRVADERDRVQKKTFTKWVNKHLMKVRKHINDLYEDLRDGHNLISLLEVLSGIKLPREKGRMRFHRLQNVQIALDFLKQRQVKLVNIRNDDITDGNPKLTLGLIWTIILHFQISDIYISGESGDMSAKEKLLLWTQKVTAGYTGIKCTNFSSCWSDGKMFNALIHRYRPDLVDMERVQIQSNRENLEQAFEVAERLGVTRLLDAEDVDVPSPDEKSVITYVSSIYDAFPKVPEGGEGISATEVDSRWQEYQSRVDSLIPWIKQHTILMSDKTFPQNPVELKALYNQYIHFKETEILAKEREKGRIEELYKLLEVWIEFGRIKLPQGYHPNDVEEEWGKLIIEMLEREKSLRPAVERLELLLQIANKIQNGALNCEEKLTLAKNTLQADAAHLESGQPVQCESDVIMYIQECEGLIRQLQVDLQILRDENYYQLEELAFRVMRLQDELVTLRLECTNLYRKGHFTSLELVPPSTLTTTHLKAEPLTKATHSSSTSWFRKPMTRAELVAISSSEDEGNLRFVYELLSWVEEMQMKLERAEWGNDLPSVELQLETQQHIHTSVEELGSSVKEARLYEGKMSQNFHTSYAETLGKLETQYCKLKETSSFRMRHLQSLHKFVSRATAELIWLNEKEEEELAYDWSDNNSNISAKRNYFSELTMELEEKQDVFRSLQDTAELLSLENHPAKQTVEAYSAAVQSQLQWMKQLCLCVEQHVKENTAYFQFFSDARELESFLRNLQDSIKRKYSCDHNTSLSRLEDLLQDSMDEKEQLIQSKSSVASLVGRSKTIVQLKPRSPDHVLKNTISVKAVCDYRQIEITICKNDECVLEDNSQRTKWKVISPTGNEAMVPSVCFLIPPPNKDAIEMASRVEQSYQKVMALWHQLHVNTKSLISWNYLRKDLDLVQTWNLEKLRSSAPGECHQIMKNLQAHYEDFLQDSRDSVLFSVADRLRLEEEVEACKARFQHLMKSMENEDKEETVAKMYISELKNIRLRLEEYEQRVVKRIQSLASSRTDRDAWQDNALRIAEQEHTQEDLQQLRSDLDAVSMKCDSFLHQSPSSSSVPTLRSELNLLVEKMDHVYGLSTVYLNKLKTVDVIVRSIQDAELLVKGYEIKLSQEEVVLADLSALEAHWSTLRHWLSDVKDKNSVFSVLDEEIAKAKVVAEQMSRLTPERNLDLERYQEKGSQLQERWHRVIAQLEIRQSELESIQEVLGDYRACHGTLIKWIEETTAQQEMMKPGQAEDSRVLSEQLSQQTALFAEIERNQTKLDQCQKFSQQYSTIVKDYELQLMTYKAFVESQQKSPGKRRRMLSSSDAITQEFMDLRTRYTALVTLTTQHVKYISDALRRLEEEEKVVEEEKQEHVEKVKELLGWVSTLARNTQGKATSSETKESTDIEKAILEQQVLSEELTTKKEQVSEAIKTSQIFLAKHGHKLSEKEKKQISEQLNALNKAYHDLCDGSANQLQQLQSQLAHQTEQKTLQKQQNTCHQQLEDLCSWVGQAERALAGHQGRTTQQDLSALQKNQSDLKDLQDDIQNRATSFATVVKDIEGFMEENQTKLSPRELTALREKLHQAKEQYEALQEETRVAQKELEEAVTSALQQETEKSKAAKELAENKKKIDALLDWVTSVGSSGGQLLTNLPGMEQLSGASLEKGALDTTDGYMGVNQAPEKLDKQCEMMKARHQELLSQQQNFILATQSAQAFLDQHGHNLTPEEQQMLQQKLGELKEQYSTSLAQSEAELKQVQTLQDELQKFLQDHKEFESWLERSEKELENMHKGGSSPETLPSLLKRQGSFSEDVISHKGDLRFVTISGQKVLDMENSFKEGKEPSEIGNLVKDKLKDATERYTALHSKCTRLGSHLNMLLGQYHQFQNSADSLQAWMQACEANVEKLLSDTVASDPGVLQEQLATTKQLQEELAEHQVPVEKLQKVARDIMEIEGEPAPDHRHVQETTDSILSHFQSLSYSLAERSSLLQKAIAQSQSVQESLESLLQSIGEVEQNLEGKQVSSLSSGVIQEALATNMKLKQDIARQKSSLEATREMVTRFMETADSTTAAVLQGKLAEVSQRFEQLCLQQQEKESSLKKLLPQAEMFEHLSGKLQQFMENKSRMLASGNQPDQDITHFFQQIQELNLEMEDQQENLDTLEHLVTELSSCGFALDLCQHQDRVQNLRKDFTELQKTVKEREKDASSCQEQLDEFRKLVRTFQKWLKETEGSIPPTETSMSAKELEKQIEHLKSLLDDWASKGTLVEEINCKGTSLENLIMEITAPDSQGKTGSILPSVGSSVGSVNGYHTCKDLTEIQCDMSDVNLKYEKLGGVLHERQESLQAILNRMEEVHKEANSVLQWLESKEEVLKSMDAMSSPTKTETVKAQAESNKAFLAELEQNSPKIQKVKEALAGLLVTYPNSQEAENWKKIQEELNSRWERATEVTVARQRQLEESASHLACFQAAESQLRPWLMEKELMMGVLGPLSIDPNMLNAQKQQVQFMLKEFEARRQQHEQLNEAAQGILTGPGDVSLSTSQVQKELQSINQKWVELTDKLNSRSSQIDQAIVKSTQYQELLQDLSEKVRAVGQRLSVQSAISTQPEAVKQQLEETSEIRSDLEQLDHEVKEAQTLCDELSVLIGEQYLKDELKKRLETVALPLQGLEDLAADRINRLQAALASTQQFQQMFDELRTWLDDKQSQQAKNCPISAKLERLQSQLQENEEFQKSLNQHSGSYEVIVAEGESLLLSVPPGEEKRTLQNQLVELKNHWEELSKKTADRQSRLKDCMQKAQKYQWHVEDLVPWIEDCKAKMSELRVTLDPVQLESSLLRSKAMLNEVEKRRSLLEILNSAADILINSSEADEDGIRDEKAGINQNMDAVTEELQAKTGSLEEMTQRLREFQESFKNIEKKVEGAKHQLEIFDALGSQACSNKNLEKLRAQQEVLQALEPQVDYLRNFTQGLVEDAPDGSDASQLLHQAEVAQQEFLEVKQRVNSGCVMMENKLEGIGQFHCRVREMFSQLADLDDELDGMGAIGRDTDSLQSQIEDVRLFLNKIHVLKLDIEASEAECRHMLEEEGTLDLLGLKRELEALNKQCGKLTERGKARQEQLELTLGRVEDFYRKLKGLNDATTAAEEAEALQWVVGTEVEIINQQLADFKMFQKEQVDPLQMKLQQVNGLGQGLIQSAGKDCDVQGLEHDMEEINARWNTLNKKVAQRIAQLQEALLHCGKFQDALEPLLSWLADTEELIANQKPPSAEYKVVKAQIQEQKLLQRLLDDRKATVDMLQAEGGRIAQSAELADREKITGQLESLESRWTELLSKAAARQKQLEDILVLAKQFHETAEPISDFLSVTEKKLANSEPVGTQTAKIQQQIIRHKALEEDIENHATDVHQAVKIGQSLSSLTSPAEQGVLSEKIDSLQARYSEIQDRCCRKAALLDQALSNARLFGEDEVEVLNWLAEVEDKLSSVFVKDFKQDVLHRQHADHLALNEEIVNRKKNVDQAIKNGQALLKQTTGEEVLLIQEKLDGIKTRYADITVTSSKALRTLEQARQLATKFQSTYEELTGWLREVEEELATSGGQSPTGEQIPQFQQRQKELKKEVMEHRLVLDTVNEVSRALLELVPWRAREGLDKLVSDANEQYKLVSDTIGQRVDEIDAAIQRSQQYEQAADAELAWVAETKRKLMALGPIRLEQDQTTAQLQVQKAFSIDIIRHKDSMDELFSHRSEIFGTCGEEQKTVLQEKTESLIQQYEAISLLNSERYARLERAQVLVNQFWETYEELSPWIEETRALIAQLPSPAIDHEQLRQQQEEMRQLRESIAEHKPHIDKLLKIGPQLKELNPEEGEMVEEKYQKAENMYAQIKEEVRQRALALDEAVSQSTQITEFHDKIEPMLETLENLSSRLRMPPLIPAEVDKIRECISDNKSATVELEKLQPSFEALKRRGEELIGRSQGADKDLAAKEIQDKLDQMVFFWEDIKARAEEREIKFLDVLELAEKFWYDMAALLTTIKDTQDIVHDLESPGIDPSIIKQQVEAAETIKEETDGLHEELEFIRILGADLIFACGETEKPEVRKSIDEMNNAWENLNKTWKERLEKLEDAMQAAVQYQDTLQAMFDWLDNTVIKLCTMPPVGTDLNTVKDQLNEMKEFKVEVYQQQIEMEKLNHQGELMLKKATDETDRDIIREPLTELKHLWENLGEKIAHRQHKLEGALLALGQFQHALEELMSWLTHTEELLDAQRPISGDPKVIEVELAKHHVLKNDVLAHQATVETVNKAGNELLESSAGDDASSLRSRLEAMNQCWESVLQKTEEREQQLQSTLQQAQGFHSEIEDFLLELTRMESQLSASKPTGGLPETAREQLDTHMELYSQLKAKEETYNQLLDKGRLMLLSRDDSGSGSKTEQSVALLEQKWHVVSSKMEERKSKLEEALNLATEFQNSLQEFINWLTLAEQSLNIASPPSLILNTVLSQIEEHKVFANEVNAHRDQIIELDQTGNQLKFLSQKQDVVLIKNLLVSVQSRWEKVVQRSIERGRSLDDARKRAKQFHEAWKKLIDWLEDAESHLDSELEISNDPDKIKLQLSKHKEFQKTLGGKQPVYDTTIRTGRALKEKTLLPEDSQKLDNFLGEVRDKWDTVCGKSVERQHKLEEALLFSGQFMDALQALVDWLYKVEPQLAEDQPVHGDLDLVMNLMDAHKVFQKELGKRTGTVQVLKRSGRELIENSRDDTTWVKGQLQELSTRWDTVCKLSVSKQSRLEQALKQAEVFRDTVHMLLEWLSEAEQTLRFRGALPDDTEALQSLIDTHKEFMKKVEEKRVDVNSAVAMGEVILAVCHPDCITTIKHWITIIRARFEEVLTWAKQHQQRLETALSELVANAELLEELLAWIQWAETTLIQRDQEPIPQNIDRVKALIAEHQTFMEEMTRKQPDVDRVTKTYKRKNIEPTHAPFIEKSRSGGRKSLSQPTPPPMPILSQSEAKNPRINQLSARWQQVWLLALERQRKLNDALDRLEELKEFANFDFDVWRKKYMRWMNHKKSRVMDFFRRIDKDQDGKITRQEFIDGILASKFPTTKLEMTAVADIFDRDGDGYIDYYEFVAALHPNKDAYRPTTDADKIEDEVTRQVAQCKCAKRFQVEQIGENKYRFGDSQQLRLVRILRSTVMVRVGGGWMALDEFLVKNDPCRARGRTNIELREKFILPEGASQGMTPFRSRGRRSKPSSRAASPTRSSSSASQSNHSCTSMPSSPATPASGTKVIPSSGSKLKRPTPTFHSSRTSLAGDTSNSSSPASTGAKTNRADPKKSASRPGSRAGSRAGSRASSRRGSDASDFDLLETQSACSDTSESSAAGGQGNSRRGLNKPSKIPTMSKKTTTASPRTPGPKR

SEQ ID NO: 53552 - protein, 1062 aa, Homo sapiens
MGNSLGCFKEPKESIAIPEKAPISPKKRVRFKRRWRGKKIPTPEASHQEETSEGTGVIEETETLTKLTESLQKEDGVGGVEHTPPDILLPGDSAPNSRVVDRGMIVQVKERFQGEVQTAHLLLENESSVAGGVWDSLEEGMTVIAHLLDNPAERNCEKSVSQLVEFPRTASCSSRAVLLPLQGETAVEKGNIQRGFRSCALPRTDYPTDKGNQEQFSEGWSVEEGTKSVSGAPQTASWIIECSVSSLLLDQPGGQRRTEPSHVGQVPPQDSRLPTSQSDLSISGVTVSILPSSSGYGSDGPHIHGIQPKDTEPEKSSTSFSEEDGTLSLEASHTPSWGLEEISDIYISGESGDMSAKEKLLLWTQKVTAGYTGIKCTNFSSCWSDGKMFNALIHRYRPDLVDMERVQIQSNRENLEQAFEVAERLGVTRLLDAEDVDVPSPDEKSVITYVSSIYDAFPKVPEGGEGISATEVDSRWQEYQSRVDSLIPWIKQHTILMSDKTFPQNPVELKALYNQYIHFKETEILAKEREKGRIEELYKLLEVWIEFGRIKLPQGYHPNDVEEEWGKLIIEMLEREKSLRPAVERLELLLQIANKIQNGALNCEEKLTLAKNTLQADAAHLESGQPVQCESDVIMYIQECEGLIRQLQVDLQILRDENYYQLEELAFRVMRLQDELVTLRLECTNLYRKGHFTSLELVPPSTLTTTHLKAEPLTKATHSSSTSWFRKPMTRAELVAISSSEDEGNLRFVYELLSWVEEMQMKLERAEWGNDLPSVELQLETQQHIHTSVEELGSSVKEARLYEGKMSQNFHTSYAETLGKLETQYCKLKETSSFRMRHLQSLHKFVSRATAELIWLNEKEEEELAYDWSDNNSNISAKRNYFSELTMELEEKQDVFRSLQDTAELLSLENHPAKQTVEAYSAAVQSQLQWMKQLCLCVEQHVKENTAYFQFFSDARELESFLRNLQDSIKRKYSCDHNTSLSRLEDLLQDSMFQDEKEQLIQSKSSVASLVGRSKTIVQLKPRSPDHVLKNTISVKAVCDYRQIEGRTILSEGYGPLASAAC

SEQ ID NO: 53553 - protein, 7388 aa, Homo sapiens
MSSSDEETLSERSCRSERSCRSERSYRSERSGSLSPCPPGDTLPWNLPLHEQKKRKSQDSVLDPAERAVVRVADERDRVQKKTFTKWVNKHLMKVRKHINDLYEDLRDGHNLISLLEVLSGIKLPREKGRMRFHRLQNVQIALDFLKQRQVKLVNIRNDDITDGNPKLTLGLIWTIILHFQISDIYISGESGDMSAKEKLLLWTQKVTAGYTGIKCTNFSSCWSDGKMFNALIHRYRPDLVDMERVQIQSNRENLEQAFEVAERLGVTRLLDAEDVDVPSPDEKSVITYVSSIYDAFPKVPEGGEGISATEVDSRWQEYQSRVDSLIPWIKQHTILMSDKTFPQNPVELKALYNQYIHFKETEILAKEREKGRIEELYKLLEVWIEFGRIKLPQGYHPNDVEEEWGKLIIEMLEREKSLRPAVERLELLLQIANKIQNGALNCEEKLTLAKNTLQADAAHLESGQPVQCESDVIMYIQECEGLIRQLQVDLQILRDENYYQLEELAFRVMRLQDELVTLRLECTNLYRKGHFTSLELVPPSTLTTTHLKAEPLTKATHSSSTSWFRKPMTRAELVAISSSEDEGNLRFVYELLSWVEEMQMKLERAEWGNDLPSVELQLETQQHIHTSVEELGSSVKEARLYEGKMSQNFHTSYAETLGKLETQYCKLKETSSFRMRHLQSLHKFVSRATAELIWLNEKEEEELAYDWSDNNSNISAKRNYFSELTMELEEKQDVFRSLQDTAELLSLENHPAKQTVEAYSAAVQSQLQWMKQLCLCVEQHVKENTAYFQFFSDARELESFLRNLQDSIKRKYSCDHNTSLSRLEDLLQDSMDEKEQLIQSKSSVASLVGRSKTIVQLKPRSPDHVLKNTISVKAVCDYRQIEITICKNDECVLEDNSQRTKWKVISPTGNEAMVPSVCFLIPPPNKDAIEMASRVEQSYQKVMALWHQLHVNTKSLISWNYLRKDLDLVQTWNLEKLRSSAPGECHQIMKNLQAHYEDFLQDSRDSVLFSVADRLRLEEEVEACKARFQHLMKSMENEDKEETVAKMYISELKNIRLRLEEYEQRVVKRIQSLASSRTDRDAWQDNALRIAEQEHTQEDLQQLRSDLDAVSMKCDSFLHQSPSSSSVPTLRSELNLLVEKMDHVYGLSTVYLNKLKTVDVIVRSIQDAELLVKGYEIKLSQEEVVLADLSALEAHWSTLRHWLSDVKDKNSVFSVLDEEIAKAKVVAEQMSRLTPERNLDLERYQEKGSQLQERWHRVIAQLEIRQSELESIQEVLGDYRACHGTLIKWIEETTAQQEMMKPGQAEDSRVLSEQLSQQTALFAEIERNQTKLDQCQKFSQQYSTIVKDYELQLMTYKAFVESQQKSPGKRRRMLSSSDAITQEFMDLRTRYTALVTLTTQHVKYISDALRRLEEEEKVVEEEKQEHVEKVKELLGWVSTLARNTQGKATSSETKESTDIEKAILEQQVLSEELTTKKEQVSEAIKTSQIFLAKHGHKLSEKEKKQISEQLNALNKAYHDLCDGSANQLQQLQSQLAHQTEQKECRAVAGVIDLGTVEIFPIFKAMQKGLLDQDTGLVLLESQVIMSGLIAPETGENLSLEEGIARNLINPQMYQQLRELQDALALISRLTESRGPLSVVEAIEKRIISETVGLKILEAHLATGGFSLSPSENCINLEEAFHQGLISAWLHSVLESYLRTSKNLIDPNTAEKIGLLDLMQRCIVHQESGFKLLPVKQLAGGMVSLKSGRKVSIFRAVQEGLIDRQVTVRLLEAQLFAGGIVDPRTGHRLTVEEAVRHNLIDQDMACAILIRQLQTGGIIDTVTGQRLTIDEAVSNDLVAAKIALVILESLWSFMGLLWPESGEILPITDALEQGIVSTELAHKILSNRQHIKALFLPATTEILSWKKAIESGILDRDLANNLKSICIPDVMPHMQLADSAEQNINPGAAVLPCSKSHPKATASQSENLLFQLMTHSYINVQNGQRLLLLDKELMETLTSRDEYQTSPPKVVEIGHQRQKTPEGLQESANVKISGTFSSGWTVRLPEFQFSSQNKEYPDREDCTTEKGKKTTVETEDSSVENPEQDLFVEQKERNPNIDALKVINKVKLEVQRQLIGTQREDQTAVSVRENASRGHLLTIPPAEAEGVPLVVDKDVFSVETPKKEHQPLRNTSFTCQNEQAHTLETEYIHDETGGSHIKPQSKKLQVQVKKTLGIKLELKSETDGNVHPLDKKEMLKKTFLAKDDHKESQEAQNIAGGSMMMSEKTDEEDSGREIFLSCSHPLELLEEATLNVLSAQLLDGGIFHEQTGQKLLLNEAISRGIVPSHTAVKLMEKLNMFQGFFDSQTCESLTTEEVINEGLMDEKLLHNVLMADKAISGVLDPRTQTLCSVKDAVTVGLLDKETATRILERQVVTGGIIDLKRGKKVSVTLASTLGLVDVADQPELINLEKASKGRDAEKTVRERLISLQMETTGLIDPDSKAPLTVVQSIDRGLLEREEAVRLLTKQVVDGGIIHHISGMRLSVDNAFRHGLIGEDLAEKLKRVENLNIHQIFNPETKENISLPKAIKLDLITSDLKREIQEVQAFTGNFVDLISGQRLTLAEAKKEGLLTNEAVLSPGMMHGIVDPENCRIVPYSELVKKCKIDIESGQRYLEVIPFSDIKDGVSDKVLTLSQAIQLGKVDFASTLKVLEAQANTGGIIDTATGKRLTLASALEEKLVDENMVRIIASHQVLNGGIVDIFSDQRVTLVEAIEKRLISPELANMIQIDSSEFSDHRAQIEKQEGIEVCALQNEFLGKDMLIACNQTAEMSCNKVEESERLFQVENQSAQEKVKVRVSDGEQAKKSREISLKEFGCKDQRKPRMSSDAKEFISIINPHNLKGKSLGQVSLTHPYSECDFKLKEVARNNMGNDTNEEQEKAVTKIEIISHMKQSTSCLDSEEIRENQGEVILEVQETYCETSGKLPSEQVLQQPMNARVKSKREKREVIVEESIRTCKPAFLSEEKLYQETAIRDEHDSHIKSQPREMTSSEKGKEADTEMGFSITFKIEESSSQVVPQGISVKHLDALTLFSSKQANEGKVNNLSLCLTLKPEENLSREIACGAQSEPFPCMTPRPEGLHYQESDGKAQVTGPSQISKTDKSFQGTTRQETNYQDSWVTSKTKETKHQISSSNECKEKSYQEVSFDPARGLKLEEITVSRPDSKEVRYLEFSDRKDLHHQGSKSDDKLCGTLKSEIATQELTGEKFLEMANPNVAGLEAGSIEDIVTQRGSRVLGSFLPEKLFKGVSQKENTGQQNAIISPTVLETSEEKTVSLTVCSAVKTEKTPQEKLRESPGSEQTPFMTAPEGKGNGGVNPEPFRATQNVFTRQLCLEHDEKLVSYLSLLRNIEMRTKQIQPLELNLAELQDLLCQAKVLERELKDLTTLVSQELECVNQIIISQPQEVPAQLLKALEKDAKNLQKSLSSVSDTWNSRLLHFQNAVEIEKTKVLNQHTQLEGRLQDLRAWVGNKNLILNSKGSNSEIDVDSLNLCLQQYEDLKQPMAERKAQLDALAFDIQFFISEHAQDLSPQQNRQMLRLLNELQRSFQDILEQTAAQVDALQGHLQQMEQEALVKTLQKQQNTCHQQLEDLCSWVGQAERALAGHQGRTTQQDLSALQKNQSDLKDLQDDIQNRATSFATVVKDIEGFMEENQTKLSPRELTALREKLHQAKEQYEALQEETRVAQKELEEAVTSALQQETEKSKAAKELAENKKKIDALLDWVTSVGSSGGQLLTNLPGMEQLSGASLEKGALDTTDGYMGVNQAPEKLDKQCEMMKARHQELLSQQQNFILATQSAQAFLDQHGHNLTPEEQQMLQQKLGELKEQYSTSLAQSEAELKQVQTLQDELQKFLQDHKEFESWLERSEKELENMHKGGSSPETLPSLLKRQGSFSEDVISHKGDLRFVTISGQKVLDMENSFKEGKEPSEIGNLVKDKLKDATERYTALHSKCTRLGSHLNMLLGQYHQFQNSADSLQAWMQACEANVEKLLSDTVASDPGVLQEQLATTKQLQEELAEHQVPVEKLQKVARDIMEIEGEPAPDHRHVQETTDSILSHFQSLSYSLAERSSLLQKAIAQSQSVQESLESLLQSIGEVEQNLEGKQVSSLSSGVIQEALATNMKLKQDIARQKSSLEATREMVTRFMETADSTTAAVLQGKLAEVSQRFEQLCLQQQEKESSLKKLLPQAEMFEHLSGKLQQFMENKSRMLASGNQPDQDITHFFQQIQELNLEMEDQQENLDTLEHLVTELSSCGFALDLCQHQDRVQNLRKDFTELQKTVKEREKDASSCQEQLDEFRKLVRTFQKWLKETEGSIPPTETSMSAKELEKQIEHLKSLLDDWASKGTLVEEINCKGTSLENLIMEITAPDSQGKTGSILPSVGSSVGSVNGYHTCKDLTEIQCDMSDVNLKYEKLGGVLHERQESLQAILNRMEEVHKEANSVLQWLESKEEVLKSMDAMSSPTKTETVKAQAESNKAFLAELEQNSPKIQKVKEALAGLLVTYPNSQEAENWKKIQEELNSRWERATEVTVARQRQLEESASHLACFQAAESQLRPWLMEKELMMGVLGPLSIDPNMLNAQKQQVQFMLKEFEARRQQHEQLNEAAQGILTGPGDVSLSTSQVQKELQSINQKWVELTDKLNSRSSQIDQAIVKSTQYQELLQDLSEKVRAVGQRLSVQSAISTQPEAVKQQLEETSEIRSDLEQLDHEVKEAQTLCDELSVLIGEQYLKDELKKRLETVALPLQGLEDLAADRINRLQAALASTQQFQQMFDELRTWLDDKQSQQAKNCPISAKLERLQSQLQENEEFQKSLNQHSGSYEVIVAEGESLLLSVPPGEEKRTLQNQLVELKNHWEELSKKTADRQSRLKDCMQKAQKYQWHVEDLVPWIEDCKAKMSELRVTLDPVQLESSLLRSKAMLNEVEKRRSLLEILNSAADILINSSEADEDGIRDEKAGINQNMDAVTEELQAKTGSLEEMTQRLREFQESFKNIEKKVEGAKHQLEIFDALGSQACSNKNLEKLRAQQEVLQALEPQVDYLRNFTQGLVEDAPDGSDASQLLHQAEVAQQEFLEVKQRVNSGCVMMENKLEGIGQFHCRVREMFSQLADLDDELDGMGAIGRDTDSLQSQIEDVRLFLNKIHVLKLDIEASEAECRHMLEEEGTLDLLGLKRELEALNKQCGKLTERGKARQEQLELTLGRVEDFYRKLKGLNDATTAAEEAEALQWVVGTEVEIINQQLADFKMFQKEQVDPLQMKLQQVNGLGQGLIQSAGKDCDVQGLEHDMEEINARWNTLNKKVAQRIAQLQEALLHCGKFQDALEPLLSWLADTEELIANQKPPSAEYKVVKAQIQEQKLLQRLLDDRKATVDMLQAEGGRIAQSAELADREKITGQLESLESRWTELLSKAAARQKQLEDILVLAKQFHETAEPISDFLSVTEKKLANSEPVGTQTAKIQQQIIRHKALNEEIVNRKKNVDQAIKNGQALLKQTTGEEVLLIQEKLDGIKTRYADITVTSSKALRTLEQARQLATKFQSTYEELTGWLREVEEELATSGGQSPTGEQIPQFQQRQKELKKEVMEHRLVLDTVNEVSRALLELVPWRAREGLDKLVSDANEQYKLVSDTIGQRVDEIDAAIQRSQQYEQAADAELAWVAETKRKLMALGPIRLEQDQTTAQLQVQKAFSIDIIRHKDSMDELFSHRSEIFGTCGEEQKTVLQEKTESLIQQYEAISLLNSERYARLERAQVLVNQFWETYEELSPWIEETRALIAQLPSPAIDHEQLRQQQEEMRQLRESIAEHKPHIDKLLKIGPQLKELNPEEGEMVEEKYQKAENMYAQIKEEVRQRALALDEAVSQSTQITEFHDKIEPMLETLENLSSRLRMPPLIPAEVDKIRECISDNKSATVELEKLQPSFEALKRRGEELIGRSQGADKDLAAKEIQDKLDQMVFFWEDIKARAEEREIKFLDVLELAEKFWYDMAALLTTIKDTQDIVHDLESPGIDPSIIKQQVEAAETIKEETDGLHEELEFIRILGADLIFACGETEKPEVRKSIDEMNNAWENLNKTWKERLEKLEDAMQAAVQYQDTLQAMFDWLDNTVIKLCTMPPVGTDLNTVKDQLNEMKEFKVEVYQQQIEMEKLNHQGELMLKKATDETDRDIIREPLTELKHLWENLGEKIAHRQHKLEGALLALGQFQHALEELMSWLTHTEELLDAQRPISGDPKVIEVELAKHHVLKNDVLAHQATVETVNKAGNELLESSAGDDASSLRSRLEAMNQCWESVLQKTEEREQQLQSTLQQAQGFHSEIEDFLLELTRMESQLSASKPTGGLPETAREQLDTHMELYSQLKAKEETYNQLLDKGRLMLLSRDDSGSGSKTEQSVALLEQKWHVVSSKMEERKSKLEEALNLATEFQNSLQEFINWLTLAEQSLNIASPPSLILNTVLSQIEEHKVFANEVNAHRDQIIELDQTGNQLKFLSQKQDVVLIKNLLVSVQSRWEKVVQRSIERGRSLDDARKRAKQFHEAWKKLIDWLEDAESHLDSELEISNDPDKIKLQLSKHKEFQKTLGGKQPVYDTTIRTGRALKEKTLLPEDSQKLDNFLGEVRDKWDTVCGKSVERQHKLEEALLFSGQFMDALQALVDWLYKVEPQLAEDQPVHGDLDLVMNLMDAHKVFQKELGKRTGTVQVLKRSGRELIENSRDDTTWVKGQLQELSTRWDTVCKLSVSKQSRLEQALKQAEVFRDTVHMLLEWLSEAEQTLRFRGALPDDTEALQSLIDTHKEFMKKVEEKRVDVNSAVAMGEVILAVCHPDCITTIKHWITIIRARFEEVLTWAKQHQQRLETALSELVANAELLEELLAWIQWAETTLIQRDQEPIPQNIDRVKALIAEHQTFMEEMTRKQPDVDRVTKTYKRKNIEPTHAPFIEKSRSGGRKSLSQPTPPPMPILSQSEAKNPRINQLSARWQQVWLLALERQRKLNDALDRLEELKEFANFDFDVWRKKYMRWMNHKKSRVMDFFRRIDKDQDGKITRQEFIDGILASKFPTTKLEMTAVADIFDRDGDGYIDYYEFVAALHPNKDAYRPTTDADKIEDEVTRQVAQCKCAKRFQVEQIGENKYRFGDSQQLRLVRILRSTVMVRVGGGWMALDEFLVKNDPCRARGRTNIELREKFILPEGASQGMTPFRSRGRRSKPSSRAASPTRSSSSASQSNHSCTSMPSSPATPASGTKVIPSSGSKLKRPTPTFHSSRTSLAGDTSNSSSPASTGAKTNRADPKKSASRPGSRAGSRAGSRASSRRGSDASDFDLLETQSACSDTSESSAAGGQGNSRRGLNKPSKIPTMSKKTTTASPRTPGPKR

SEQ ID NO: 53554 - protein, 384 aa, Homo sapiens
ITSPWAPRPSCSSPWAMSSSDEETLSERSCRSERSCRSERSYRSERSGSLSPCPPGDTLPWNLPLHEQKKRKSQDSVLDPAERAVVRVADERDRVQKKTFTKWVNKHLMKVRKHINDLYEDLRDGHNLISLLEVLSGIKLPREKGRMRFHRLQNVQIALDFLKQRQVKLVNIRNDDITDGNPKLTLGLIWTIILHFQISDIYISGESGDMSAKEKLLLWTQKVTAGYTGIKCTNFSSCWSDGKMFNALIHRYRPDLVDMERVQIQSNRENLEQAFEVAERLGVTRLLDAEDVDVPSPDEKSVITYVSSIYDAFPKVPEGGEGISATEVDSRWQEYQSRVDSLIPWIKQHTILMSDKTFPQNPVELKALYNQYIHFKETEILAKE

SEQ ID NO: 53555 - protein, 200 aa, Homo sapiens
MPLLDSSYLPPTIFILTHVLGVAGVLYWKRHARGRADERDRVQKKTFTKWVNKHLMKVRKHINDLYEDLRDGHNLISLLEVLSGIKLPREKGRMRFHRLQNVQIALDFLKQRQVKLVNIRNDDITDGNPKLTLGLIWTIILHFQISDIYISGESGDMSAKEKLLLWTQKVTAGYTGIKCTNFSSCWSDGKMFNALIHRYR

SEQ ID NO: 53556 - protein, 5300 aa, Homo sapiens
MSSSDEETLSERSCRSERSCRSERSYRSERSGSLSPCPPGDTLPWNLPLHEQKKRKSQDSVLDPAERAVVRVADERDRVQKKTFTKWVNKHLMKVRKHINDLYEDLRDGHNLISLLEVLSGIKLPREKGRMRFHRLQNVQIALDFLKQRQVKLVNIRNDDITDGNPKLTLGLIWTIILHFQISDIYISGESGDMSAKEKLLLWTQKVTAGYTGIKCTNFSSCWSDGKMFNALIHRYRPDLVDMERVQIQSNRENLEQAFEVAERLGVTRLLDAEDVDVPSPDEKSVITYVSSIYDAFPKVPEGGEGISATEVDSRWQEYQSRVDSLIPWIKQHTILMSDKTFPQNPVELKALYNQYIHFKETEILAKEREKGRIEELYKLLEVWIEFGRIKLPQGYHPNDVEEEWGKLIIEMLEREKSLRPAVERLELLLQIANKIQNGALNCEEKLTLAKNTLQADAAHLESGQPVQCESDVIMYIQECEGLIRQLQVDLQILRDENYYQLEELAFRVMRLQDELVTLRLECTNLYRKGHFTSLELVPPSTLTTTHLKAEPLTKATHSSSTSWFRKPMTRAELVAISSSEDEGNLRFVYELLSWVEEMQMKLERAEWGNDLPSVELQLETQQHIHTSVEELGSSVKEARLYEGKMSQNFHTSYAETLGKLETQYCKLKETSSFRMRHLQSLHKFVSRATAELIWLNEKEEEELAYDWSDNNSNISAKRNYFSELTMELEEKQDVFRSLQDTAELLSLENHPAKQTVEAYSAAVQSQLQWMKQLCLCVEQHVKENTAYFQFFSDARELESFLRNLQDSIKRKYSCDHNTSLSRLEDLLQDSMDEKEQLIQSKSSVASLVGRSKTIVQLKPRSPDHVLKNTISVKAVCDYRQIEITICKNDECVLEDNSQRTKWKVISPTGNEAMVPSVCFLIPPPNKDAIEMASRVEQSYQKVMALWHQLHVNTKSLISWNYLRKDLDLVQTWNLEKLRSSAPGECHQIMKNLQAHYEDFLQDSRDSVLFSVADRLRLEEEVEACKARFQHLMKSMENEDKEETVAKMYISELKNIRLRLEEYEQRVVKRIQSLASSRTDRDAWQDNALRIAEQEHTQEDLQQLRSDLDAVSMKCDSFLHQSPSSSSVPTLRSELNLLVEKMDHVYGLSTVYLNKLKTVDVIVRSIQDAELLVKGYEIKLSQEEVVLADLSALEAHWSTLRHWLSDVKDKNSVFSVLDEEIAKAKVVAEQMSRLTPERNLDLERYQEKGSQLQERWHRVIAQLEIRQSELESIQEVLGDYRACHGTLIKWIEETTAQQEMMKPGQAEDSRVLSEQLSQQTALFAEIERNQTKLDQCQKFSQQYSTIVKDYELQLMTYKAFVESQQKSPGKRRRMLSSSDAITQEFMDLRTRYTALVTLTTQHVKYISDALRRLEEEEKVVEEEKQEHVEKVKELLGWVSTLARNTQGKATSSETKESTDIEKAILEQQVLSEELTTKKEQVSEAIKTSQIFLAKHGHKLSEKEKKQISEQLNALNKAYHDLCDGSANQLQQLQSQLAHQTEQKTLQKQQNTCHQQLEDLCSWVGQAERALAGHQGRTTQQDLSALQKNQSDLKDLQDDIQNRATSFATVVKDIEGFMEENQTKLSPRELTALREKLHQAKEQYEALQEETRVAQKELEEAVTSALQQETEKSKAAKELAENKKKIDALLDWVTSVGSSGGQLLTNLPGMEQLSGASLEKGALDTTDGYMGVNQAPEKLDKQCEMMKARHQELLSQQQNFILATQSAQAFLDQHGHNLTPEEQQMLQQKLGELKEQYSTSLAQSEAELKQVQTLQDELQKFLQDHKEFESWLERSEKELENMHKGGSSPETLPSLLKRQGSFSEDVISHKGDLRFVTISGQKVLDMENSFKEGKEPSEIGNLVKDKLKDATERYTALHSKCTRLGSHLNMLLGQYHQFQNSADSLQAWMQACEANVEKLLSDTVASDPGVLQEQLATTKQLQEELAEHQVPVEKLQKVARDIMEIEGEPAPDHRHVQETTDSILSHFQSLSYSLAERSSLLQKAIAQSQSVQESLESLLQSIGEVEQNLEGKQVSSLSSGVIQEALATNMKLKQDIARQKSSLEATREMVTRFMETADSTTAAVLQGKLAEVSQRFEQLCLQQQEKESSLKKLLPQAEMFEHLSGKLQQFMENKSRMLASGNQPDQDITHFFQQIQELNLEMEDQQENLDTLEHLVTELSSCGFALDLCQHQDRVQNLRKDFTELQKTVKEREKDASSCQEQLDEFRKLVRTFQKWLKETEGSIPPTETSMSAKELEKQIEHLKSLLDDWASKGTLVEEINCKGTSLENLIMEITAPDSQGKTDLTEIQCDMSDVNLKYEKLGGVLHERQESLQAILNRMEEVHKEANSVLQWLESKEEVLKSMDAMSSPTKTETVKAQAESNKAFLAELEQNSPKIQKVKEALAGLLVTYPNSQEAENWKKIQEELNSRWERATEVTVARQRQLEESASHLACFQAAESQLRPWLMEKELMMGVLGPLSIDPNMLNAQKQQVQFMLKEFEARRQQHEQLNEAAQGILTGPGDVSLSTSQVQKELQSINQKWVELTDKLNSRSSQIDQAIVKSTQYQELLQDLSEKVRAVGQRLSVQSAISTQPEAVKQQLEETSEIRSDLEQLDHEVKEAQTLCDELSVLIGEQYLKDELKKRLETVALPLQGLEDLAADRINRLQAALASTQQFQQMFDELRTWLDDKQSQQAKNCPISAKLERLQSQLQENEEFQKSLNQHSGSYEVIVAEGESLLLSVPPGEEKRTLQNQLVELKNHWEELSKKTADRQSRLKDCMQKAQKYQWHVEDLVPWIEDCKAKMSELRVTLDPVQLESSLLRSKAMLNEVEKRRSLLEILNSAADILINSSEADEDGIRDEKAGINQNMDAVTEELQAKTGSLEEMTQRLREFQESFKNIEKKVEGAKHQLEIFDALGSQACSNKNLEKLRAQQEVLQALEPQVDYLRNFTQGLVEDAPDGSDASQLLHQAEVAQQEFLEVKQRVNSGCVMMENKLEGIGQFHCRVREMFSQLADLDDELDGMGAIGRDTDSLQSQIEDVRLFLNKIHVLKLDIEASEAECRHMLEEEGTLDLLGLKRELEALNKQCGKLTERGKARQEQLELTLGRVEDFYRKLKGLNDATTAAEEAEALQWVVGTEVEIINQQLADFKMFQKEQVDPLQMKLQQVNGLGQGLIQSAGKDCDVQGLEHDMEEINARWNTLNKKVAQRIAQLQEALLHCGKFQDALEPLLSWLADTEELIANQKPPSAEYKVVKAQIQEQKLLQRLLDDRKATVDMLQAEGGRIAQSAELADREKITGQLESLESRWTELLSKAAARQKQLEDILVLAKQFHETAEPISDFLSVTEKKLANSEPVGTQTAKIQQQIIRHKALNEEIVNRKKNVDQAIKNGQALLKQTTGEEVLLIQEKLDGIKTRYADITVTSSKALRTLEQARQLATKFQSTYEELTGWLREVEEELATSGGQSPTGEQIPQFQQRQKELKKEVMEHRLVLDTVNEVSRALLELVPWRAREGLDKLVSDANEQYKLVSDTIGQRVDEIDAAIQRSQQYEQAADAELAWVAETKRKLMALGPIRLEQDQTTAQLQVQKAFSIDIIRHKDSMDELFSHRSEIFGTCGEEQKTVLQEKTESLIQQYEAISLLNSERYARLERAQVLVNQFWETYEELSPWIEETRALIAQLPSPAIDHEQLRQQQEEMRQLRESIAEHKPHIDKLLKIGPQLKELNPEEGEMVEEKYQKAENMYAQIKEEVRQRALALDEAVSQSTQVSQFHDKIEPMLETLENLSSRLRMPPLIPAEVDKIRECISDNKSATVELEKLQPSFEALKRRGEELIGRSQGADKDLAAKEIQDKLDQMVFFWEDIKARAEEREIKFLDVLELAEKFWYDMAALLTTIKDTQDIVHDLESPGIDPSIIKQQVEAAETIKEETDGLHEELEFIRILGADLIFACGETEKPEVRKSIDEMNNAWENLNKTWKERLEKLEDAMQAAVQYQDTLQAMFDWLDNTVIKLCTMPPVGTDLNTVKDQLNEMKEFKVEVYQQQIEMEKLNHQGELMLKKATDETDRDIIREPLTELKHLWENLGEKIAHRQHKLEGALLALGQFQHALEELMSWLTHTEELLDAQRPISGDPKVIEVELAKHHVLKNDVLAHQATVETVNKAGNELLESSAGDDASSLRSRLEAMNQCWESVLQKTEEREQQLQSTLQQAQGFHSEIEDFLLELTRMESQLSASKPTGGLPETAREQLDTHMELYSQLKAKEETYNQLLDKGRLMLLSRDDSGSGSKTEQSVALLEQKWHVVSSKMEERKSKLEEALNLATEFQNSLQEFINWLTLAEQSLNIASPPSLILNTVLSQIEEHKVFANEVNAHRDQIIELDQTGNQLKFLSQKQDVVLIKNLLVSVQSRWEKVVQRSIERGRSLDDARKRAKQFHEAWKKLIDWLEDAESHLDSELEISNDPDKIKLQLSKHKEFQKTLGGKQPVYDTTIRTGRALKEKTLLPEDSQKLDNFLGEVRDKWDTVCGKSVERQHKLEEALLFSGQFMDALQALVDWLYKVEPQLAEDQPVHGDLDLVMNLMDAHKVFQKELGKRTGTVQVLKRSGRELIENSRDDTTWVKGQLQELSTRWDTVCKLSVSKQSRLEQALKQAEVFRDTVHMLLEWLSEAEQTLRFRGALPDDTEALQSLIDTHKEFMKKVEEKRVDVNSAVAMGEVILAVCHPDCITTIKHWITIIRARFEEVLTWAKQHQQRLETALSELVANAELLEELLAWIQWAETTLIQRDQEPIPQNIDRVKALIAEHQTFMEEMTRKQPDVDRVTKTYKRKNIEPTHAPFIEKSRSGGRKSLSQPTPPPMPILSQSEAKNPRINQLSARWQQVWLLALERQRKLNDALDRLEELKEFANFDFDVWRKKYMRWMNHKKSRVMDFFRRIDKDQDGKITRQEFIDGILASKFPTTKLEMTAVADIFDRDGDGYIDYYEFVAALHPNKDAYRPTTDADKIEDEVTRQVAQCKCAKRFQVEQIGENKYRFGDSQQLRLVRILRSTVMVRVGGGWMALDEFLVKNDPCRARGRTNIELREKFILPEGASQGMTPFRSRGRRSKPSSRAASPTRSSSSASQSNHSCTSMPSSPATPASGTKVIPSSGSKLKRPTPTFHSSRTSLAGDTSNSSSPASTGAKTNRADPKKSASRPGSRAGSRAGSRASSRRGSDASDFDLLETQSACSDTSESSAAGGQGNSRRGLNKPSKIPTMSKKTTTASPRTPGPKR

SEQ ID NO: 53557 - protein, 344 aa, Homo sapiens
MTAVADIFDRDGDGYIDYYEFVAALHPNKDAYRPTTDADKIEDEVTRQVAQCKCAKRFQVEQIGENKYRFGDSQQLRLVRILRSTVMVRVGGGWMALDEFLVKNDPCRARGRTNIELREKFILPEGASQGMTPFRSRGRRSKPSSRAASPTRSSSSASQSNHSCTSMPSSPATPASGTKTSLQFSRCYDKPWLVNSKAGTPIRDSHSPDLQLPTPEVIPSSGSKLKRPTPTFHSSRTSLAGDTSNSSSPASTGAKTNRADPKKSASRPGSRAGSRAGSRASSRRGSDASDFDLLETQSACSDTSESSAAGGQGNSRRGLNKPSKIPTMSKKTTTASPRTPGPKR

SEQ ID NO: 53558 - protein, 5430 aa, Homo sapiens; identical to SEQ ID NO: 53551

SEQ ID NO: 53559 - protein, 2803 aa, Homo sapiens
MDGVAEFSEYVSETVDVPSPFDLLEPPTSGGFLKLSKPCCYIFPGGRGDSALFAVNGFNILVDGGSDRKSCFWKLVRHLDRIDSVLLTHIGADNLPGINGLLQRKVAELEEEQSQGSSSYSDWVKNLISPELGVVFFNVPEKLRLPDASRKAKRSIEEACLTLQHLNRLGIQAEPLYRVVSNTIEPLTLFHKMGVGRLDMYVLNPVKDSKEMQFLMQKWAGNSKAKTGIVLPNGKEAEISVPYLTSITALVVWLPANPTEKIVRVLFPGNAPQNKILEGLEKLRHLDFLRYPVATQKDLASGAVPTNLKPSKIKQRADSKESLKATTKTAVSKLAKREEVVEEGAKEARSELAKELAKTEKKAKESSEKPPEKPAKPERVKTESSEALKAEKRKLIKDKVGKKHLKEKISKLEEKKDKEKKEIKKERKELKKDEGRKEEKKDAKKEEKRKDTKPELKKISKPDLKPFTPEVRKTLYKAKVPGRVKIDRSRAIRGEKELSSEPQTPPAQKGTVPLPTISGHRELVLSSPEDLTQDFEEMKREERALLAEQRDTGLGDKPFPLDTAEEGPPSTAIQGTPPSVPGLGQEEHVMKEKELVPEVPEEQGSKDRGLDSGAETEEEKDTWEEKKQREAERLPDRTEAREESEPEVKEDVIEKAELEEMEEVHPSDEEEEDATKAEGFYQKHMQEPLKVTPRSREAFGGRELGLQGKAPEKETSLFLSSLTTPAGATEHVSYIQDETIPGYSETEQTISDEEIHDEPEERPAPPRFHTSTYDLPGPEGAGPFEASQPADSAVPATSGKVYGTPETELTYPTNIVAAPLAEEEHVSSATSITECDKLSSFATSVAEDQSVASLTAPQTEETGKSSLLLDTVTSIPSSRTEATQGLDYVPSAGTISPTSSLEEDKGFKSPPCEDFSVTGESEKRGEIIGKGLSGERAVEEEEEETANVEMSEKLCSQYGTPVFSAPGHALHPGEPALGEAEERCLSPDDSTVKMASPPPSGPPSATHTPFHQSPVEEKSEPQDFQEADSWGDTKRTPGVGKEDAAEETVKPGPEEGTLEKEEKVPPPRSPQAQEAPVNIDEGLTGCTIQLLPAQDKAIVFEIMEAGEPTGPILGAEALPGGLRTLPQEPGKPQKDEVLRYPDRSLSPEDAESLSVLSVPSPDTANQEPTPKSPCGLTEQYLHKDRWPEVSPEDTQSLSLSEESPSKETSLDVSSKQLSPESLGTLQFGELNLGKEEMGHLMQAEDTSHHTAPMSVPEPHAATASPPTDGTTRYSAQTDITDDSLDRKSPASSFSHSTPSGNGKYLPGAITSPDEHILTPDSSFSKSPESLPGPALEDIAIKWEDKVPGLKDRTSEQKKEPEPKDEVLQQKDKTLEHKEVVEPKDTAIYQKDEALHVKNEAVKQQDKALEQKGRDLEQKDTALEQKDKALEPKDKDLEEKDKALEQKDKIPEEKDKALEQKDTALEQKDKALEPKDKDLEQKDRVLEQKEKIPEEKDKALDQKVRSVEHKAPEDTVAEMKDRDLEQTDKAPEQKHQAQEQKDKVSEKKDQALEQKYWALGQKDEALEQNIQALEENHQTQEQESLVQEDKTRKPKMLEEKSPEKVKAMEEKLEALLEKTKALGLEESLVQEGRAREQEEKYWRGQDVVQEWQETSPTREEPAGEQKELAPAWEDTSPEQDNRYWRGREDVALEQDTYWRELSCERKVWFPHELDGQGARPHYTEERESTFLDEGPDDEQEVPLREHATRSPWASDFKDFQESSPQKGLEVERWLAESPVGLPPEEEDKLTRSPFEIISPPASPPEMVGQRVPSAPGQESPIPDPKLMPHMKNEPTTPSWLADIPPWVPKDRPLPPAPLSPAPGPPTPAPESHTPAPFSWGTAEYDSVVAAVQEGAAELEGGPYSPLGKDYRKAEGEREEEGRAEAPDKSSHSSKVPEASKSHATTEPEQTEPEQREPTPYPDERSFQYADIYEQMMLTGLGPACPTREPPLGAAGDWPPCLSTKEAAAGRNTSAEKELSSPISPKSLQSDTPTFSYAALAGPTVPPRPEPGPSMEPSLTPPAVPPRAPILSKGPSPPLNGNILSCSPDRRSPSPKESGRSHWDDSTSDSELEKGAREQPEKEAQSPSPPHPIPMGSPTLWPETEAHVSPPLDSHLGPARPSLDFPASAFGFSSLQPAPPQLPSPAEPRSAPCGSLAFSGDRALALAPGPPTRTRHDEYLEVTKAPSLDSSLPQLPSPSSPGAPLLSNLPRPASPALSEGSSSEATTPVISSVAERFSPSLEAAEQESGELDPGMEPAAHSLWDLTPLSPAPPASLDLALAPAPSLPGDMGDGILPCHLECSEAATEKPSPFQVPSEDCAANGPTETSPNPPGPAPAKAENEEAAACPAWERGAWPEGAERSSRPDTLLSPEQPVCPAGGSGGPPSSASPEVEAGPQGCATEPRPHRGELSPSFLNPPLPPSIDDRDLSTEEVRLVGRGGRRRVGGPGTTGGPCPVTDETPPTSASDSGSSQSDSDVPPETEECPSITAEAALDSDEDGDFLPVDKAGGVSGTHHPRPGHDPPPLPQPDPRPSPPRPDVCMADPEGLSSESGRVERLREKEKVQGRVGRRAPGKAKPASPARRLDLRGKRSPTPGKGPADRASRAPPRPRSTTSQVTPAEEKDGHSPMSKGLVNGLKAGPMALSSKGSSGAPVYVDLAYIPNHCSGKTADLDFFRRVRASYYVVSGNDPANGEPSRAVLDALLEGKAQWGENLQVTLIPTHDTEVTREWYQQTHEQQQQLNVLVLASSSTVVMQDESFPACKIEF

SEQ ID NO: 53560 - protein, 3041 aa, Homo sapiens
METEAEPARPHGVAMETTPGLGLRSPGAPLAQNPAELLCEAGAAVAAARWDLQKHSLLIVIGDIGTESQLRAVRAHLEQGILSWNIDLSSFDLNQQLRLFITRHLAHFSSEVKGQRTLCHQSEILETIILVNPSADSISSEVHHLLSSSSAYKLLILSGQSLEPGGDLILQSGTYSYENFAQVLHNPEISQLLSNRDPGIQAFLTVSCLGEGDWSHLGLSSSQETLHLRLNPEPTLPTMDGVAEFSEYVSETVDVPSPFDLLEPPTSGGFLKLSKPCCYIFPGGRGDSALFAVNGFNILVDGGSDRKSCFWKLVRHLDRIDSVLLTHIGADNLPGINGLLQRKVAELEEEQSQGSSSYSDWVKNLISPELGVVFFNVPEKLRLPDASRKAKRSIEEACLTLQHLNRLGIQAEPLYRVVSNTIEPLTLFHKMGVGRLDMYVLNPVKDSKEMQFLMQKWAGNSKAKTGIVLPNGKEAEISVPYLTSITALVVWLPANPTEKIVRVLFPGNAPQNKILEGLEKLRHLDFLRYPVATQKDLASGAVPTNLKPSKIKQRADSKESLKATTKTAVSKLAKREEVVEEGAKEARSELAKELAKTEKKAKESSEKPPEKPAKPERVKTESSEALKAEKRKLIKDKVGKKHLKEKISKLEEKKDKEKKEIKKERKELKKDEGRKEEKKDAKKEEKRKDTKPELKKISKPDLKPFTPEVRKTLYKAKVPGRVKIDRSRAIRGEKELSSEPQTPPAQKGTVPLPTISGHRELVLSSPEDLTQDFEEMKREERALLAEQRDTGLGDKPFPLDTAEEGPPSTAIQGTPPSVPGLGQEEHVMKEKELVPEVPEEQGSKDRGLDSGAETEEEKDTWEEKKQREAERLPDRTEAREESEPEVKEDVIEKAELEEMEEVHPSDEEEEDATKAEGFYQKHMQEPLKVTPRSREAFGGRELGLQGKAPEKETSLFLSSLTTPAGATEHVSYIQDETIPGYSETEQTISDEEIHDEPEERPAPPRFHTSTYDLPGPEGAGPFEASQPADSAVPATSGKVYGTPETELTYPTNIVAAPLAEEEHVSSATSITECDKLSSFATSVAEDQSVASLTAPQTEETGKSSLLLDTVTSIPSSRTEATQGLDYVPSAGTISPTSSLEEDKGFKSPPCEDFSVTGESEKRGEIIGKGLSGERAVEEEEEETANVEMSEKLCSQYGTPVFSAPGHALHPGEPALGEAEERCLSPDDSTVKMASPPPSGPPSATHTPFHQSPVEEKSEPQDFQEADSWGDTKRTPGVGKEDAAEETVKPGPEEGTLEKEEKVPPPRSPQAQEAPVNIDEGLTGCTIQLLPAQDKAIVFEIMEAGEPTGPILGAEALPGGLRTLPQEPGKPQKDEVLRYPDRSLSPEDAESLSVLSVPSPDTANQEPTPKSPCGLTEQYLHKDRWPEVSPEDTQSLSLSEESPSKETSLDVSSKQLSPESLGTLQFGELNLGKEEMGHLMQAEDTSHHTAPMSVPEPHAATASPPTDGTTRYSAQTDITDDSLDRKSPASSFSHSTPSGNGKYLPGAITSPDEHILTPDSSFSKSPESLPGPALEDIAIKWEDKVPGLKDRTSEQKKEPEPKDEVLQQKDKTLEHKEVVEPKDTAIYQKDEALHVKNEAVKQQDKALEQKGRDLEQKDTALEQKDKALEPKDKDLEEKDKALEQKDKIPEEKDKALEQKDTALEQKDKALEPKDKDLEQKDRVLEQKEKIPEEKDKALDQKVRSVEHKAPEDTVAEMKDRDLEQTDKAPEQKHQAQEQKDKVSEKKDQALEQKYWALGQKDEALEQNIQALEENHQTQEQESLVQEDKTRKPKMLEEKSPEKVKAMEEKLEALLEKTKALGLEESLVQEGRAREQEEKYWRGQDVVQEWQETSPTREEPAGEQKELAPAWEDTSPEQDNRYWRGREDVALEQDTYWRELSCERKVWFPHELDGQGARPHYTEERESTFLDEGPDDEQEVPLREHATRSPWASDFKDFQESSPQKGLEVERWLAESPVGLPPEEEDKLTRSPFEIISPPASPPEMVGQRVPSAPGQESPIPDPKLMPHMKNEPTTPSWLADIPPWVPKDRPLPPAPLSPAPGPPTPAPESHTPAPFSWGTAEYDSVVAAVQEGAAELEGGPYSPLGKDYRKAEGEREEEGRAEAPDKSSHSSKVPEASKSHATTEPEQTEPEQREPTPYPDERSFQYADIYEQMMLTGLGPACPTREPPLGAAGDWPPCLSTKEAAAGRNTSAEKELSSPISPKSLQSDTPTFSYAALAGPTVPPRPEPGPSMEPSLTPPAVPPRAPILSKGPSPPLNGNILSCSPDRRSPSPKESGRSHWDDSTSDSELEKGAREQPEKEAQSPSPPHPIPMGSPTLWPETEAHVSPPLDSHLGPARPSLDFPASAFGFSSLQPAPPQLPSPAEPRSAPCGSLAFSGDRALALAPGPPTRTRHDEYLEVTKAPSLDSSLPQLPSPSSPGAPLLSNLPRPASPALSEGSSSEATTPVISSVAERFSPSLEAAEQESGELDPGMEPAAHSLWDLTPLSPAPPASLDLALAPAPSLPGDMGDGILPCHLECSEAATEKPSPFQVPSEDCAANGPTETSPNPPGPAPAKAENEEAAACPAWERGAWPEGAERSSRPDTLLSPEQPVCPAGGSGGPPSSASPEVEAGPQGCATEPRPHRGELSPSFLNPPLPPSIDDRDLSTEEVRLVGRGGRRRVGGPGTTGGPCPVTDETPPTSASDSGSSQSDSDVPPETEECPSITAEAALDSDEDGDFLPVDKAGGVSGTHHPRPGHDPPPLPQPDPRPSPPRPDVCMADPEGLSSESGRVERLREKEKVQGRVGRRAPGKAKPASPARRLDLRGKRSPTPGKGPADRASRAPPRPRSTTSQVTPAEEKDGHSPMSKGLVNGLKAGPMALSSKGSSGAPVYVDLAYIPNHCSGKTADLDFFRRVRASYYVVSGNDPANGEPSRAVLDALLEGKAQWGENLQVTLIPTHDTEVTREWYQQTHEQQQQLNVLVLASSSTVVMQDESFPACKIEF

SEQ ID NO: 53561 - protein, 2805 aa, Homo sapiens
MDGVAEFSEYVSETVDVPSPFDLLEPPTSGGFLKLSKPCCYIFPGGRGDSALFAVNGFNILVDGGSDRKSCFWKLVRHLDRIDSVLLTHIGADNLPGINGLLQRKVAELEEEQSQGSSSYSDWVKNLISPELGVVFFNVPEKLRLPDASRKAKRSIEEACLTLQHLNRLGIQAEPLYRVVSNTIEPLTLFHKMGVGRLDMYVLNPVKDSKEMQFLMQKWAGNSKAKTGIVLPNGKEAEISVPYLTSITALVVWLPANPTEKIVRVLFPGNAPQNKILEGLEKLRHLDFLRYPVATQKDLASGAVPTNLKPSKIKQRADSKESLKATTKTAVSKLAKREEVVEEGAKEARSELAKELAKTEKKAKESSEKPPEKPAKPERVKTESSEALKAEKRKLIKDKVGKKHLKEKISKLEEKKDKEKKEIKKERKELKKDEGRKEEKKDAKKEEKRKDTKPELKKISKPDLKPFTPEVRKTLYKAKVPGRVKIDRSRAIRGEKELSSEPQTPPAQKGTVPLPTISGHRELVLSSPEDLTQDFEEMKREERALLAEQRDTGLGDKPFPLDTAEEGPPSTAIQGTPPSVPGLGQEEHVMKEKELVPEVPEEQGSKDRGLDSGAETEEEKDTWEEKKQREAERLPDRTEAREESEPEVKEDVIEKAELEEMEEVHPSDEEEEDATKAEGFYQKHMQEPLKVTPRSREAFGGRELGLQGKAPEKETSLFLSSLTTPAGATEHVSYIQDETIPGYSETEQTISDEEIHDEPEERPAPPRFHTSTYDLPGPEGAGPFEASQPADSAVPATSGKVYGTPETELTYPTNIVAAPLAEEEHVSSATSITECDKLSSFATSVAEDQSVASLTAPQTEETGKSSLLLDTVTSIPSSRTEATQGLDYVPSAGTISPTSSLEEDKGFKSPPCEDFSVTGESEKRGEIIGKGLSGERAVEEEEEETANVEMSEKLCSQYGTPVFSAPGHALHPGEPALGEAEERCLSPDDSTVKMASPPPSGPPSATHTPFHQSPVEEKSEPQDFQEADSWGDTKRTPGVGKEDAAEETVKPGPEEGTLEKEEKVPPPRSPQAQEAPVNIDEGLTGCTIQLLPAQDKAIVFEIMEAGEPTGPILGAEALPGGLRTLPQEPGKPQKDEVLRYPDRSLSPEDAESLSVLSVPSPDTANQEPTPKSPCGLTEQYLHKDRWPEVSPEDTQSLSLSEESPSKETSLDVSSKQLSPESLGTLQFGELNLGKEEMGHLMQAEDTSHHTAPMSVPEPHAATASPPTDGTTRYSAQTDITDDSLDRKSPASSFSHSTPSGNGKYLPGAITSPDEHILTPDSSFSKSPESLPGPALEDIAIKWEDKVPGLKDRTSEQKKEPEPKDEVLQQKDKTLEHKEVVEPKDTAIYQKDEALHVKNEAVKQQDKALEQKGRDLEQKDTALEQKDKALEPKDKDLEEKDKALEQKDKIPEEKDKALEQKDTALEQKDKALEPKDKDLEQKDRVLEQKEKIPEEKDKALDQKVRSVEHKAPEDTVAEMKDRDLEQTDKAPEQKHQAQEQKDKVSEKKDQALEQKYWALGQKDEALEQNIQALEENHQTQEQESLVQEDKTRKPKMLEEKSPEKVKAMEEKLEALLEKTKALGLEESLVQEGRAREQEEKYWRGQDVVQEWQETSPTREEPAGEQKELAPAWEDTSPEQDNRYWRGREDVALEQDTYWRELSCERKVWFPHELDGQGARPHYTEERESTFLDEGPDDEQEVPLREHATRSPWASDFKDFQESSPQKGLEVERWLAESPVGLPPEEEDKLTRSPFEIISPPASPPEMVGQRVPSAPGQESPIPDPKLMPHMKNEPTTPSWLADIPPWVPKDRPLPPAPLSPAPGPPTPAPESHTPAPFSWGTAEYDSVVAAVQEGAAELEGGPYSPLGKDYRKAEGEREEEGRAEAPDKSSHSSKVPEASKSHATTEPEQTEPEQREPTPYPDERSFQYADIYEQMMLTGLGPACPTREPPLGAAGDWPPCLSTKEAAAGRNTSAEKELSSPISPKSLQSDTPTFSYAALAGPTVPPRPEPGPSMEPSLTPPAVPPRAPILSKGPSPPLNGNILSCSPDRRSPSPKESGRSHWDDSTSDSELEKGAREQPEKEAQSPSPPHPIPMGSPTLWPETEAHVSPPLDSHLGPARPSLDFPASAFGFSSLQPAPPQLPSPAEPRSAPCGSLAFSGDRALALAPGPPTRTRHDEYLEVTKAPSLDSSLPQLPSPSSPGAPLLSNLPRPASPALSEGSSSEATTPVISSVAERFSPSLEAAEQESGELDPGMEPAAHSLWDLTPLSPAPPASLDLALAPAPSLPGDMGDGILPCHLECSEAATEKPSPFQVPSEDCAANGPTETSPNPPGPAPAKAENEEAAACPAWERGAWPEGAERSSRPDTLLSPEQPVCPAGGSGGPPSSASPEVEAGPQGCATEPRPHRGELSPSFLNPPLPPSIDDRDLSTEEVRLVGRGGRRRVGGPGTTGGPCPVTDETPPTSASDSGSSQSDSDVPPETEECPSITAEAALDSDEDGDFLPVDKAGGVSGTHHPRPGHDPPPLPQPDPRPSPPRPDVCMADPEGLSSESGRVERLREKEKVQGRVGRRAPGKAKPASPARRLDLRGKRSPTPGKGPADRASRAPPRPRSTTSQVTPAEEKDGHSPMSKGLVNGLKAGPMALSSKGSSGAPVYVDLAYIPNHCSGKTADLDFFRRVRASYYVVSGNDPANGEPSRAVLDALLEGKAQWGENLQVSVTLIPTHDTEVTREWYQQTHEQQQQLNVLVLASSSTVVMQDESFPACKIEF

SEQ ID NO: 53562 - protein, 627 aa, Homo sapiens
MDGVAEFSEYVSETVDVPSPFDLLEPPTSGGFLKLSKPCCYIFPGGRGDSALFAVNGFNILVDGGSDRKSCFWKLVRHLDRIDSVLLTHIGADNLPGINGLLQRKVAELEEEQSQGSSSYSDWVKNLISPELGVVFFNVPEKLRLPDASRKAKRSIEEACLTLQHLNRLGIQAEPLYRVVSNTIEPLTLFHKMGVGRLDMYVLNPVKDSKEMQFLMQKWAGNSKAKTGIVLPNGKEAEISVPYLTSITALVVWLPANPTEKIVRVLFPGNAPQNKILEGLEKLRHLDFLRYPVATQKDLASGAVPTNLKPSKIKQRADSKESLKATTKTAVSKLAKREEVVEEGAKEARSELAKELAKTEKKAKESSEKPPEKPAKPERVKTESSEALKAEKRKLIKDKVGKKHLKEKISKLEEKKDKEKKEIKKERKELKKDEGRKEEKKDAKKEEKRKDTKPELKKISKPDLKPFTPEVRKTLYKAKVPGRVKIDRSRAIRGEKELSSEPQTPPAQKGTVPLPTISGHRELVLSSPEDLTQDFEEMKREERALLAEQRDTGLGDKPFPLDTAEEGPPSTAIQGTPPSVPGLGQEEHVMKEKELVPEVPEEQGSKDRGLDSGAETEEKKKKKKKKK

SEQ ID NO: 53563 - protein, 559 aa, Homo sapiens
MADERKDEAKAPHWTSAPLTEASAHSHPPEIKDQGGAGEGLVRSANGFPYREDEEGAFGEHGSQGTYSNTKENGINGELTSADRETAEEVSARIVQVVTAEAVAVLKGEQEKEAQHKDQTAALPLAAEETANLPPSPPPSPASEQTVTVEEAAGGESALAPSVFKQAKDKVSNSTLSKIPALQGSTKSPRYSSACPSTTKRATFSDSLLIQPTSAGSTDRLPYSKSGNKDGVTKSPEKRSSLPRPSSILPPRRGVSGDRDENSFSLNSSISSSARRTTRSEPIRRAGKSGTSTPTTPGSTAITPGTPPSYSSRTPGTPGTPSYPRTPHTPGTPKSAILVPSEKKVAIIRTPPKSPATPKQLRLINQPLPDLKNVKSKIGSTDNIKYQPKGGQVRILNKKIDFSKVQSRCGSKDNIKHSAGGGNVQIVTKKIDLSHVTSKCGSLKNIRHRPGGGRVKIESVKLDFKEKAQAKVGSLDNAHHVPGGGNVKIDSQKLNFREHAKARVDHGAEIITQSPGRSSVASPRRLSNVSSSGSINLLESPQLATLAEDVTAALAKQGL

SEQ ID NO: 53564 - protein, 1827 aa, Homo sapiens
MADERKDEAKAPHWTSAPLTEASAHSHPPEIKDQGGAGEGLVRSANGFPYREDEEGAFGEHGSQGTYSNTKENGINGELTSADRETAEEVSARIVQVVTAEAVAVLKGEQEKEAQHKDQTAALPLAAEETANLPPSPPPSPASEQTVTVEEDLLTASKMEFHDQQELTPSTAEPSDQKEKESEKQSKPGEDLKHAALVSQPETTKTYPDKKDMQGTEEEKAPLALFGHTLVASLEDMKQKTEPSLVVPGIDLPKEPPTPKEQKDWFIEMPTEAKKDEWGLVAPISPGPLTPMREKDVFDDIPKWEGKQFDSPMPSPFQGGSFTLPLDVMKNEIVTETSPFAPAFLQPDDKKSLQQTSGPATAKDSFKIEEPHEAKPDKMAEAPPSEAMTLPKDAHIPVVEEHVMGKVLEEEKEAINQETVQQRDTFTPSGQEPILTEKETELKLEEKTTISDKEAVPKESKPPKPADEEIGIIQTSTEHTFSEQKDQEPTTDMLKQDSFPVSLEQAVTDSAMTSKTLEKAMTEPSALIEKSSIQELFEMRVDDKDKIEGVGAATSAELDMPFYEDKSGMSKYFETSALKEEATKSIEPGSDYYELSDTRESVHESIDTMSPMHKNGDKEFQTGKESQPSPPAQEAGYSTLAQSYPSDLPEEPSSPQERMFTIDPKVYGEKRDLHSKNKDDLTLSRSLGLGGRSAIEQRSMSINLPMSCLDSIALGFNFGRGHDLSPLASDILTNTSGSMDEGDDYLPATTPALEKAPCFPVESKEEEQIEKVKATGEESTQAEISCESPFLAKDFYKNGTVMAPDLPEMLDLAGTRSRLASVSADAEVARRKSVPSETVVEDSRTGLPPVTDENHVIVKTDSQLEDLGYCVFNKYTVPLPSPVQDSENLSGESGTFYEGTDDKVRRDLATDLSLIEVKLAAAGRVKDEFSVDKEASAHISGDKSGLSKEFDQEKKANDRLDTVLEKSEEHADSKEHAKKTEEAGDEIETFGLGVTYEQALAKDLSIPTDASSEKAEKGLSSVPEIAEVEPSKKVEQGLDFAVQGQLDVKISDFGQMASGLNIDDRRATELKLEATQDMTPSSKAPQEADAFMGVESGHMKEGTKVSETEVKEKVAKPDLVHQEAVDKEESYESSGEHESLTMESLKADEGKKETSPESSLIQDEIAVKLSVEIPCPPAVSEADLATDERADVQMEFIQGPKEESKETPDISITPSDVAEPLHETIVSEPAEIQSEEEEIEAQGEYDKLLFRSDTLQITDLGVSGAREEFVETCPSEHKGVIESVVTIEDDFITVVQTTTDEGESGSHSVRFAALEQPEVERRPSPHDEEEFEVEEAAEAQAEPKDGSPEAPASPEREEVALSEYKTETYDDYKDETTIDDSIMDADSLWVDTQDDDRSIMTEQLETIPKEEKAEKEARRSSLEKHRKEKPFKTGRGRISTPERKVAKKEPSTVSRDEVRRKKAVYKKAELAKKTEVQAHSPSRKFILKPAIKYTRPTHLSCVKRKTTAAGGESALAPSVFKQAKDKVSDGVTKSPEKRSSLPRPSSILPPRRGVSGDRDENSFSLNSSISSSARRTTRSEPIRRAGKSGTSTPTTPGSTAITPGTPPSYSSRTPGTPGTPSYPRTPHTPGTPKSAILVPSEKKVAIIRTPPKSPATPKQLRLINQPLPDLKNVKSKIGSTDNIKYQPKGGQVQIVTKKIDLSHVTSKCGSLKNIRHRPGGGRVKIESVKLDFKEKAQAKVGSLDNAHHVPGGGNVKIDSQKLNFREHAKARVDHGAEIITQSPGRSSVASPRRLSNVSSSGSINLLESPQLATLAEDVTAALAKQGL

SEQ ID NO: 53565 - protein, 471 aa, Homo sapiens
MADERKDEAKAPHWTSAPLTEASAHSHPPEIKDQGGAGEGLVRSANGFPYREDEEGAFGEHGSQGTYSNTKENGINGELTSADRETAEEVSARIVQVVTAEAVAVLKGEQEKEAQHKDQTAALPLAAEETANLPPSPPPSPASEQTVTVEEAAGGESALAPSVFKQAKDKVSDGVTKSPEKRSSLPRPSSILPPRRGVSGDRDENSFSLNSSISSSARRTTRSEPIRRAGKSGTSTPTTPGSTAITPGTPPSYSSRTPGTPGTPSYPRTPHTPGTPKSAILVPSEKKVAIIRTPPKSPATPKQLRLINQPLPDLKNVKSKIGSTDNIKYQPKGGQVQIVTKKIDLSHVTSKCGSLKNIRHRPGGGRVKIESVKLDFKEKAQAKVGSLDNAHHVPGGGNVKIDSQKLNFREHAKARVDHGAEIITQSPGRSSVASPRRLSNVSSSGSINLLESPQLATLAEDVTAALAKQGL

SEQ ID NO: 53566 - protein, 106 aa, Homo sapiens
MADERKDEAKAPHWTSAPLTEASAHSHPPEIKDQGGAGEGLVRSANGFPYREDEEGAFGEHGSQGTYSNTKENGINGELTSADRETAEEVSARIVQVVTAEAVAVL

SEQ ID NO: 53567 - protein, 471 aa, Homo sapiens; identical to SEQ ID NO: 53565

SEQ ID NO: 53568 - protein, 1823 aa, Homo sapiens
MADERKDEAKAPHWTSAPLTEASAHSHPPEIKDQGGAGEGLVRSANGFPYREDEEGAFGEHGSQGTYSNTKENGINGELTSADRETAEEVSARIVQVVTAEAVAVLKGEQEKEAQHKDQTAALPLAAEETANLPPSPPPSPASEQTVTVEEASKMEFHDQQELTPSTAEPSDQKEKESEKQSKPGEDLKHAALVSQPETTKTYPDKKDMQGTEEEKAPLALFGHTLVASLEDMKQKTEPSLVVPGIDLPKEPPTPKEQKDWFIEMPTEAKKDEWGLVAPISPGPLTPMREKDVFDDIPKWEGKQFDSPMPSPFQGGSFTLPLDVMKNEIVTETSPFAPAFLQPDDKKSLQQTSGPATAKDSFKIEEPHEAKPDKMAEAPPSEAMTLPKDAHIPVVEEHVMGKVLEEEKEAINQETVQQRDTFTPSGQEPILTEKETELKLEEKTTISDKEAVPKESKPPKPADEEIGIIQTSTEHTFSEQKDQEPTTDMLKQDSFPVSLEQAVTDSAMTSKTLEKAMTEPSALIEKSSIQELFEMRVDDKDKIEGVGAATSAELDMPFYEDKSGMSKYFETSALKEEATKSIEPGSDYYELSDTRESVHESIDTMSPMHKNGDKEFQTGKESQPSPPAQEAGYSTLAQSYPSDLPEEPSSPQERMFTIDPKVYGEKRDLHSKNKDDLTLSRSLGLGGRSAIEQRSMSINLPMSCLDSIALGFNFGRGHDLSPLASDILTNTSGSMDEGDDYLPATTPALEKAPCFPVESKEEEQIEKVKATGEESTQAEISCESPFLAKDFYKNGTVMAPDLPEMLDLAGTRSRLASVSADAEVARRKSVPSETVVEDSRTGLPPVTDENHVIVKTDSQLEDLGYCVFNKYTVPLPSPVQDSENLSGESGTFYEGTDDKVRRDLATDLSLIEVKLAAAGRVKDEFSVDKEASAHISGDKSGLSKEFDQEKKANDRLDTVLEKSEEHADSKEHAKKTEEAGDEIETFGLGVTYEQALAKDLSIPTDASSEKAEKGLSSVPEIAEVEPSKKVEQGLDFAVQGQLDVKISDFGQMASGLNIDDRRATELKLEATQDMTPSSKAPQEADAFMGVESGHMKEGTKVSETEVKEKVAKPDLVHQEAVDKEESYESSGEHESLTMESLKADEGKKETSPESSLIQDEIAVKLSVEIPCPPAVSEADLATDERADVQMEFIQGPKEESKETPDISITPSDVAEPLHETIVSEPAEIQSEEEEIEAQGEYDKLLFRSDTLQITDLGVSGAREEFVETCPSEHKGVIESVVTIEDDFITVVQTTTDEGESGSHSVRFAALEQPEVERRPSPHDEEEFEVEEAAEAQAEPKDGSPEAPASPEREEVALSEYKTETYDDYKDETTIDDSIMDADSLWVDTQDDDRSIMTEQLETIPKEEKAEKEARRSSLEKHRKEKPFKTGRGRISTPERKVAKKEPSTVSRDEVRRKKAVYKKAELAKKTEVQAHSPSRKFILKPAIKYTRPTHLSCVKRKTTAAGGESALAPSVFKQAKDKVSDGVTKSPEKRSSLPRPSSILPPRRGVSGDRDENSFSLNSSISSSARRTTRSEPIRRAGKSGTSTPTTPGSTAITPGTPPSYSSRTPGTPGTPSYPRTPHTPGTPKSAILVPSEKKVAIIRTPPKSPATPKQLRLINQPLPDLKNVKSKIGSTDNIKYQPKGGQVQIVTKKIDLSHVTSKCGSLKNIRHRPGGGRVKIESVKLDFKEKAQAKVGSLDNAHHVPGGGNVKIDSQKLNFREHAKARVDHGAEIITQSPGRSSVASPRRLSNVSSSGSINLLESPQLATLAEDVTAALAKQGL

SEQ ID NO: 53569 - protein, 887 aa, Homo sapiens
METTGDQGIEGMAYMDENRNITFTCPRTPSELINKSSPLEVLESAACEKLPTPTPQVVKEGDSFPDTLAKNGQEIAPAQISKSLMVDNYTKDGVPGQERPKGPSAVVPSTSTGGVALPITTAIETVNIHGDHSLKNKAELADSMKNEAGIDEGHVIGESESVHSGASKHSVEKVTELAKGHLLPGVPVEDQSLPGEARALEGYADRGNFPAHPVNEEKETKEGSVAVQIPDLLEDKAQKLSFCEDQNAQDRNSKGSDSLNKKVDLTLLSPKSENDKLKEISLACKITELESVSLPTPEIQSDFLHSKVEAPPSEVADTLVIMTASKGVRLPEPKDKILETPQKMTEKSESKTPGEGKKEDKSRMAEPMKGYMRPTKSRGLTPLLPKSTIQEQERHKQLKSAGIARPEEGRPVVSGTGNDITTPPNKELPPSPEKKTKPLATTQPAKTSTSKAKTQPTSLPKQPAPTTIGGLNKKPMSLASGLVPAAPPKRPAVASARPSILPSKDVKPKPIADAKAPEKRASPSKPASAPASRSGSKSTQTVAKTTTAAAVASTGPSSRSPSTLLPKKPTAIKTEGKPAEVKKMTAKSVPADLSRPKSTSTSSMKKTTTLSGTAPAAGVVPSRVKATPMPSRPSTTPFIDKKPTSAKPSSTTPRLSRLATNTSAPDLKNVRSKVGSTENIKHQPGGGRAKVEKKTEAAATTRKPESNAVTKTAGPIASAQKQPAGKVQIVSKKVSYSHIQSKCGSKDNIKHVPGGGNVQIQNKKVDISKVSSKCGSKANIKHKPGGGDVKIESQKLNFKEKAQAKVGSLDNVGHLPAGGAVKTEGGGSEAPLCPGPPAGEEPAISEAAPEAGAPTSASGLNGHPTLSGGGDQREAQTLDSQIQETSI

SEQ ID NO: 53570 - protein, 463 aa, Homo sapiens
ICEEPVAKKREELAHFSNSSSNSGKKELGTAGLYLHSKLEQIPEGSSKEKGQEDFSETRIDSCSQVCQRGEKQPGQTALAGKKEIEVTATQSTPSFLFEKPPRDGIARPEEGRPVVSGTGNDITTPPNKELPPSPEKKTKPIADAKAPEKRASPSKPASAPASRSGSKSTQTVAKTTTAAAVASTGPSSRSPSTLLPKKPTAIKTEGKPAEVKKMTAKSVPADLSRPKSTSTSSMKKTTTLSGTAPAAGVVPSRVKATPMPSRPSTTPFIDKKPTSAKPSSTTPRLSRLATNTSAPDLKNVRSKVGSTENIKHQPGGGRVQIVSKKVSYSHIQSKCGSKDNIKHVPGGGNVQIQNKKVDISKVSSKCGSKANIKHKPGGGDVKIESQKLNFKEKAQAKVGSLDNVGHLPAGGAVKIETYRLTFRANARARTDHGADIVSRPPHFPGGPNSGSRVLGPLSRAVH

SEQ ID NO: 53571 - protein, 1152 aa, Homo sapiens
MADLSLADALTEPSPDIEGEIKRDFIATLEAEAFDDVVGETVGKTDYIPLLDVDEKTGNSESKKKPCSETSQIEDTPSSKPTLLANGGHGVEGSDTTGSPTEFLEEKMAYQEYPNSQNWPEDTNFCFQPEQVVDPIQTDPFKMYHDDDLADLVFPSSATADTSIFAGQNDPLKDSYGMSPCNTAVVPQGWSVEALNSPHSESFVSPEAVAEPPQPTAVPLELAKEIEMASEERPPAQALEIMMGLKTTDMAPSKETEMALAKDMALATKTEVALAKDMESPTKLDVTLAKDMQPSMESDMALVKDMELPTEKEVALVKDVRWPTETDVSSAKNVVLPTETEVAPAKDVTLLKETERASPIKMDLAPSKDMGPPKENKKETERASPIKMDLAPSKDMGPPKENKIVPAKDLVLLSEIEVAQANDIISSTEISSAEKVALSSETEVALARDMTLPPETNVILTKDKALPLEAEVAPVKDMAQLPETEIAPAKDVAPSTVKEVGLLKDMSPLSETEMALGKDVTPPPETEVVLIKNVCLPPEMEVALTEDQVPALKTEAPLAKDGVLTLANNVTPAKDVPPLSETEATPVPIKDMEIAQTQKGISEDSHLESLQDVGQSAAPTFMISPETVTGTGKKCSLPAEEDSVLEKLGERKPCNSQPSELSSETSGIARPEEGRPVVSGTGNDITTPPNKELPPSPEKKTKPLATTQPAKTSTSKAKTQPTSLPKQPAPTTIGGLNKKPMSLASGLVPAAPPKRPAVASARPSILPSKDVKPKPIADAKAPEKRASPSKPASAPASRSGSKSTQTVAKTTTAAAVASTGPSSRSPSTLLPKKPTAIKTEGKPAEVKKMTAKSVPADLSRPKSTSTSSMKKTTTLSGTAPAAGVVPSRVKATPMPSRPSTTPFIDKKPTSAKPSSTTPRLSRLATNTSAPDLKNVRSKVGSTENIKHQPGGGRAKVEKKTEAAATTRKPESNAVTKTAGPIASAQKQPAGKVQIVSKKVSYSHIQSKCGSKDNIKHVPGGGNVQIQNKKVDISKVSSKCGSKANIKHKPGGGDVKIESQKLNFKEKAQAKVGSLDNVGHLPAGGAVKTEGGGSEAPLCPGPPAGEEPAISEAAPEAGAPTSASGLNGHPTLSGGGDQREAQTLDSQIQETSI

SEQ ID NO: 53572 - protein, 712 aa, Homo sapiens
METTGDQGIEGMAYMDENRNITFTCPRTPSELINKSSPLEVLESAACEKLPTPTPQVVKEGDSFPDTLAKNGQEIAPAQISKSLMVDNYTKDGVPGQERPKGPSAVVPSTSTGGVALPITTAIETVNIHGDHSLKNKAELADSMKNEAGIDEGHVIGESESVHSGASKHSVEKVTELAKGHLLPGVPVEDQSLPGEARALEGYADRGNFPAHPVNEEKETKEGSVAVQIPDLLEDKAQKLSFCEDQNAQDRNSKGSDSLNKKVDLTLLSPKSENDKLKEISLACKITELESVSLPTPEIQSDFLHSKVEAPPSEVADTLVIMTASKGVRLPEPKDKILETPQKMTEKSESKTPGEGKKEDKSRMAEPMKGYMRPTKSRGLTPLLPKSTIQEQERHKQLKSAGIARPEEGRPVVSGTGNDITTPPNKELPPSPEKKTKPLATTQPAKTSTSKAKTQPTSLPKQPAPTTIGGLNKKPMSLASGLVPAAPPKRPAVASARPSILPSKDVKPKPIADAKAPEKRASPSKPASAPASRSGSKSTQTVAKTTTAAAVASTGPSSRSPSTLLPKKPTAIKTEGKPAEVKKMTAKSVPADLSRPKSTSTSSMKKTTTLSGTAPAAGVVPSRVKATPMPSRPSTTPFIDKKPTSAKPSSTTPRLSRLATNTSAPDLKNVRSKAKVEKKTEAAATTRKPESNAVTKTAGPIASAQKQPAGKV

SEQ ID NO: 53573 - protein, 811 aa, Homo sapiens
MADLSLADALTEPSPDIEGEIKRDFIATLEAEAFDDVVGETVGKTDYIPLLDVDEKTGNSESKKKPCSETSQIEDTPSSKPTLLANGGHGVEGSDTTGSPTEFLEEKMAYQEYPNSQNWPEDTNFCFQPEQVVDPIQTDPFKMYHDDDLADLVFPSSATADTSIFAGQNDPLKDSYGMSPCNTAVVPQGWSVEALNSPHSESFVSPEAVAEPPQPTAVPLELAKEIEMASEERPPAQALEIMMGLKTTDMAPSKETEMALAKDMALATKTEVALAKDMESPTKLDVTLAKDMQPSMESDMALVKDMELPTEKEVALVKDGVRLPEPKDKILETPQKMTEKSESKTPGEGKKEDKSRMAEPMKGYMRPTKSRGLTPLLPKSTIQEQERHKQLKSAGIARPEEGRPVVSGTGNDITTPPNKELPPSPEKKTKPLATTQPAKTSTSKAKTQPTSLPKQPAPTTIGGLNKKPMSLASGLVPAAPPKRPAVASARPSILPSKDVKPKPIADAKAPEKRASPSKPASAPASRSGSKSTQTVAKTTTAAAVASTGPSSRSPSTLLPKKPTAIKTEGKPAEVKKMTAKSVPADLSRPKSTSTSSMKKTTTLSGTAPAAGVVPSRVKATPMPSRPSTTPFIDKKPTSAKPSSTTPRLSRLATNTSAPDLKNVRSKVGSTENIKHQPGGGRVQIQNKKVDISKVSSKCGSKANIKHKPGGGDVKIESQKLNFKEKAQAKVGSLDNVGHLPAGGAVKTEGGGSEAPLCPGPPAGEEPAISEAAPEAGAPTSASGLNGHPTLSGGGDQREAQTLDSQIQETSI

SEQ ID NO: 53574 - protein, 1135 aa, Homo sapiens
MADLSLADALTEPSPDIEGEIKRDFIATLEAEAFDDVVGETVGKTDYIPLLDVDEKTGNSESKKKPCSETSQIEDTPSSKPTLLANGGHGVEGSDTTGSPTEFLEEKMAYQEYPNSQNWPEDTNFCFQPEQVVDPIQTDPFKMYHDDDLADLVFPSSATADTSIFAGQNDPLKDSYGMSPCNTAVVPQGWSVEALNSPHSESFVSPEAVAEPPQPTAVPLELAKEIEMASEERPPAQALEIMMGLKTTDMAPSKETEMALAKDMALATKTEVALAKDMESPTKLDVTLAKDMQPSMESDMALVKDMELPTEKEVALVKDVRWPTETDVSSAKNVVLPTETEVAPAKDVTLLKETERASPIKMDLAPSKDMGPPKENKKETERASPIKMDLAPSKDMGPPKENKIVPAKDLVLLSEIEVAQANDIISSTEISSAEKVALSSETEVALARDMTLPPETNVILTKDKALPLEAEVAPVKDMAQLPETEIAPAKDVAPSTVKEVGLLKDMSPLSETEMALGKDVTPPPETEVVLIKNVCLPPEMEVALTEDQVPALKTEAPLAKDGVLTLANNVTPAKDVPPLSETEATPVPIKDMEIAQTQKGISEDSHLESLQDVGQSAAPTFMISPETVTGTGKKCSLPAEEDSVLEKLGERKPCNSQPSELSSETSGIARPEEGRPVVSGTGNDITTPPNKELPPSPEKKTKPLATTQPAKTSTSKAKTQPTSLPKQPAPTTIGGLNKKPMSLASGLVPAAPPKRPAVASARPSILPSKDVKPKPIADAKAPEKRASPSKPASAPASRSGSKSTQTVAKTTTAAAVASTGPSSRSPSTLLPKKPTAIKTEGKPAEVKKMTAKSVPADLSRPKSTSTSSMKKTTTLSGTAPAAGVVPSRVKATPMPSRPSTTPFIDKKPTSAKPSSTTPRLSRLATNTSAPDLKNVRSKVGSTENIKHQPGGGRAKVEKKTEAAATTRKPESNAVTKTAGPIASAQKQPAGKVQIVSKKVSYSHIQSKCGSKDNIKHVPGGGNVQIQNKKVDISKVSSKCGSKANIKHKPGGGDVKIESQKLNFKEKAQAKVGSLDNVGHLPAGGAVKIETYRLTFRANARARTDHGADIVSRPPHFPGGPNSGSRVLGPLSRAVH

SEQ ID NO: 53575 - protein, 828 aa, Homo sapiens
MSLSDKQTASLTAAYGQLSKGKPAECRMDSPKEISQAGFEWQRTEGKLNEIGLNVSMDGQPKDGLVKNASFLEQNKLCFFEGKLDKELSIEMQDKDCQEASGHLESRYVISETCHPLEGNSVHQKTSEFHLGLIEGPDKNKTIPVQGKVAGKNGLETKSQSDLDFPGAADIPTRYVKEQETSVWNPSFHPVAQGSLGSREATPGEMENSITPGCPVIGVVNDNSEQLKCESPLLVSLAHPAPIIEHSPTTIPPITMVFTQEHLNASCHIRDHDKELEKLSSTEEAVLNQAPQQKKAVRRALSECSHLSVPPAVNLADKYPELPAREEPSSGLLPPPSSPMPSPTPGKLGAPAMKRSMTVGEEQTASYKLSPGKLPILSTKEIPPFICEEPVAKKREELAHFSNSSSNSGKKELGTAGLYLHSKLEQIPEGSSKEKGQEDFSETRIDSCSQVCQRGEKQPGQTALAGKKEIEVTATQSTPSFLFEKPPRDGIARPEEGRPVVSGTGNDITTPPNKELPPSPEKKTKPIADAKAPEKRASPSKPASAPASRSGSKSTQTVAKTTTAAAVASTGPSSRSPSTLLPKKPTADLSRPKSTSTSSMKKTTTLSGTAPAAGVVPSRVKATPMPSRPSTTPFIDKKPTSAKPSSTTPRLSRLATNTSAPDLKNVRSKVGSTENIKHQPGGGRVQIVSKKVSYSHIQSKCGSKDNIKHVPGGGNVQIQNKKVDISKVSSKCGSKANIKHKPGGGDVKIESQKLNFKEKAQAKVGSLDNVGHLPAGGAVKIETYRLTFRANARARTDHGADIVSRPPHFPGGPNSGSRVLGPLSRAVH

SEQ ID NO: 53576 - protein, 2297 aa, Homo sapiens
MADLSLADALTEPSPDIEGEIKRDFIATLEAEAFDDVVGETVGKTDYIPLLDVDEKTGNSESKKKPCSETSQIEDLPLPPHPASLSFHLPLDTPSSKPTLLANGGHGVEGSDTTGSPTEFLEEKMAYQEYPNSQNWPEDTNFCFQPEQVVDPIQTDPFKMYHDDDLADLVFPSSATADTSIFAGQNDPLKDSYGMSPCNTAVVPQGWSVEALNSPHSESFVSPEAVAEPPQPTAVPLELAKEIEMASEERPPAQALEIMMGLKTTDMAPSKETEMALAKDMALATKTEVALAKDMESPTKLDVTLAKDMQPSMESDMALVKDMELPTEKEVALVKDVRWPTETDVSSAKNVVLPTETEVAPAKDVTLLKETERASPIKMDLAPSKDMGPPKENKKETERASPIKMDLAPSKDMGPPKENKIVPAKDLVLLSEIEVAQANDIISSTEISSAEKVALSSETEVALARDMTLPPETNVILTKDKALPLEAEVAPVKDMAQLPETEIAPAKDVAPSTVKEVGLLKDMSPLSETEMALGKDVTPPPETEVVLIKNVCLPPEMEVALTEDQVPALKTEAPLAKDGVLTLANNVTPAKDVPPLSETEATPVPIKDMEIAQTQKGISEDSHLESLQDVGQSAAPTFMISPETVTGTGKKCSLPAEEDSVLEKLGERKPCNSQPSELSSETSANFMYCGTPPTQAKQVCRPSDRRSTRPKPARVPPELLGGSPPWKTLDHRLGHCSLSESGWVSGSSSCGGPGNQRKSIHVDSLEPQRDLGREAWDIESTPIMMKKKKKKPKQKRYSQPRAGGPSDDDNADKPKGHPFAADTQKSGVLPSQPTTMGTEYGLVSGENLKRECLVNSSAARLVAENFVSESLRIPLYPSEEAPKTAISSQSKLRVEEESKSNKSVLQNQDKKLLKQHEYKPQPAPHLKTPVDKSQSVGPLNLKGPLAEVSAYNVETPLDIRLKEGCSPFLDQEVMGVVSKPTAAKEIPNLVPTLIASNPLECNLKEGNNESKMTKLQNVKLKEFPEGAEEDKELKKEAFPNERQEISIFTSEQLQGQVLVQVPGVENEPFKRMAGDGKSRKGRGSSGKMRTDSGKVKAKSELPFLLDSQKDGRAVLIPSEPVSKTEGMTTQDKSEELGLNSSKQPGTKADLTEAVVMGEPKEMTQPKVAGTMQALIPLESGSGMTQTSGVSTETGDVVKDMGVNNQSKEGRCPWKDHEAAPWISEKPKKRGNEGKSKKFKNNYSTQPARMERKEEILNPPFEGKDGDTGSIPHKSKEIGFTFPKMHDSSFSHTPDTPTVEAVDRKGGNFQVNFVELGTLGENKISTVKASTVTEPPAKVTDVSCQEQIQGAGFVPSVVSEENKTDAANRYTAVADKPSKRSNDGKSKKVKNSSPEKHILENKIDATKIHVPMETTGDQGIEGMAYMDENRNITFTCPRTPSELINKSSPLEVLESAACEKLPTPTPQVVKEGDSFPDTLAKNGQEIAPAQISKSLMVDNYTKDGVPGQERPKGPSAVVPSTSTGGVALPITTAIETVNIHGDHSLKNKAELADSMKNEAGIDEGHVIGESESVHSGASKHSVEKVTELAKGHLLPGVPVEDQSLPGEARALEGYADRGNFPAHPVNEEKETKEGSVAVQIPDLLEDKAQKLSFCEDQNAQDRNSKGSDSLNKKVDLTLLSPKSENDKLKEISLACKITELESVSLPTPEIQSDFLHSKVEAPPSEVADTLVIMTASKGVRLPEPKDKILETPQKMTEKSESKTPGEGKKEDKSRMAEPMKGYMRPTKSRGLTPLLPKSTIQEQERHKQLKSAGIARPEEGRPVVSGTGNDITTPPNKELPPSPEKKTKPLATTQPAKTSTSKAKTQPTSLPKQPAPTTIGGLNKKPMSLASGLVPAAPPKRPAVASARPSILPSKDVKPKPIADAKAPEKRASPSKPASAPASRSGSKSTQTVAKTTTAAAVASTGPSSRSPSTLLPKKPTAIKTEGKPAEVKKMTAKSVPADLSRPKSTSTSSMKKTTTLSGTAPAAGVVPSRVKATPMPSRPSTTPFIDKKPTSAKPSSTTPRLSRLATNTSAPDLKNVRSKVGSTENIKHQPGGGRAKVEKKTEAAATTRKPESNAVTKTAGPIASAQKQPAGKVQIVSKKVSYSHIQSKCGSKDNIKHVPGGGNVQIQNKKVDISKVSSKCGSKANIKHKPGGGDVKIESQKLNFKEKAQAKVGSLDNVGHLPAGGAVKTEGGGSEAPLCPGPPAGEEPAISEAAPEAGAPTSASGLNGHPTLSGGGDQREAQTLDSQIQETSI

SEQ ID NO: 53577 - protein, 249 aa, Homo sapiens
MTAKSVPADLSRPKSTSTSSMKKTTTLSGTAPAAGVVPSRVKATPMPSRPSTTPFIDKKPTSAKPSSTTPRLSRLATNTSAPDLKNVRSKVGSTENIKHQPGGGRVQIVSKKVSYSHIQSKCGSKDNIKHVPGGGNVQIQNKKVDISKVSSKCGSKANIKHKPGGGDVKIESQKLNFKEKAQAKVGSLDNVGHLPAGGAVKIETYRLTFRANARARTDHGADIVSRPPHFPGGPNSGSRVLGPLSRAVH

SEQ ID NO: 53578 - protein, 99 aa, Homo sapiens
MADLSLADALTEPSPDIEGEIKRDFIATLEAEAFDDVVGETVGKTDYIPLLDVDEKTGNSESKKKPCSETSQIEDTPSSKPTLLANGGHGVEGSDTTEA

SEQ ID NO: 53579 - protein, 758 aa, Homo sapiens
MAEPRQEFEVMEDHAGTYGLGDRKDQGGYTMHQDQEGDTDAGLKESPLQTPTEDGSEEPGSETSDAKSTPTAEDVTAPLVDEGAPGKQAAAQPHTEIPEGTTAEEAGIGDTPSLEDEAAGHVTQEPESGKVVQEGFLREPGPPGLSHQLMSGMPGAPLLPEGPREATRQPSGTGPEDTEGGRHAPELLKHQLLGDLHQEGPPLKGAGGKERPGSKEEVDEDRDVDESSPQDSPPSKASPAQDGRPPQTAAREATSIPGFPAEGAIPLPVDFLSKVSTEIPASEPDGPSVGRAKGQDAPLEFTFHVEITPNVQKEQAHSEEHLGRAAFPGAPGEGPEARGPSLGEDTKEADLPEPSEKQPAAAPRGKPVSRVPQLKARMVSKSKDGTGSDDKKAKTSTRSSAKTLKNRPCLSPKHPTPGSSDPLIQPSSPAVCPEPPSSPKYVSSVTSRTGSSGAKEMKLKGADGKTKIATPRGAAPPGQKGQANATRIPAKTPPAPKTPPSSGEPPKSGDRSGYSSPGSPGTPGSRSRTPSLPTPPTREPKKVAVVRTPPKSPSSAKSRLQTAPVPMPDLKNVKSKIGSTENLKHQPGGGKVQIINKKLDLSNVQSKCGSKDNIKHVPGGGSVQIVYKPVDLSKVTSKCGSLGNIHHKPGGGQVEVKSEKLDFKDRVQSKIGSLDNITHVPGGGNKKIETHKLTFRENAKAKTDHGAEIVYKSPVVSGDTSPRHLSNVSSTGSIDMVDSPQLATLADEVSASLAKQGL

SEQ ID NO: 53580 - protein, 383 aa, Homo sapiens
MAEPRQEFEVMEDHAGTYGLGDRKDQGGYTMHQDQEGDTDAGLKAEEAGIGDTPSLEDEAAGHVTQARMVSKSKDGTGSDDKKAKGADGKTKIATPRGAAPPGQKGQANATRIPAKTPPAPKTPPSSGEPPKSGDRSGYSSPGSPGTPGSRSRTPSLPTPPTREPKKVAVVRTPPKSPSSAKSRLQTAPVPMPDLKNVKSKIGSTENLKHQPGGGKVQIINKKLDLSNVQSKCGSKDNIKHVPGGGSVQIVYKPVDLSKVTSKCGSLGNIHHKPGGGQVEVKSEKLDFKDRVQSKIGSLDNITHVPGGGNKKIETHKLTFRENAKAKTDHGAEIVYKSPVVSGDTSPRHLSNVSSTGSIDMVDSPQLATLADEVSASLAKQGL

SEQ ID NO: 53581 - protein, 412 aa, Homo sapiens
MAEPRQEFEVMEDHAGTYGLGDRKDQGGYTMHQDQEGDTDAGLKESPLQTPTEDGSEEPGSETSDAKSTPTAEAEEAGIGDTPSLEDEAAGHVTQARMVSKSKDGTGSDDKKAKGADGKTKIATPRGAAPPGQKGQANATRIPAKTPPAPKTPPSSGEPPKSGDRSGYSSPGSPGTPGSRSRTPSLPTPPTREPKKVAVVRTPPKSPSSAKSRLQTAPVPMPDLKNVKSKIGSTENLKHQPGGGKVQIINKKLDLSNVQSKCGSKDNIKHVPGGGSVQIVYKPVDLSKVTSKCGSLGNIHHKPGGGQVEVKSEKLDFKDRVQSKIGSLDNITHVPGGGNKKIETHKLTFRENAKAKTDHGAEIVYKSPVVSGDTSPRHLSNVSSTGSIDMVDSPQLATLADEVSASLAKQGL

SEQ ID NO: 53582 - protein, 776 aa, Homo sapiens
MAEPRQEFEVMEDHAGTYGLGDRKDQGGYTMHQDQEGDTDAGLKESPLQTPTEDGSEEPGSETSDAKSTPTAEDVTAPLVDEGAPGKQAAAQPHTEIPEGTTAEEAGIGDTPSLEDEAAGHVTQEPESGKVVQEGFLREPGPPGLSHQLMSGMPGAPLLPEGPREATRQPSGTGPEDTEGGRHAPELLKHQLLGDLHQEGPPLKGAGGKERPGSKEEVDEDRDVDESSPQDSPPSKASPAQDGRPPQTAAREATSIPGFPAEGAIPLPVDFLSKVSTEIPASEPDGPSVGRAKGQDAPLEFTFHVEITPNVQKEQAHSEEHLGRAAFPGAPGEGPEARGPSLGEDTKEADLPEPSEKQPAAAPRGKPVSRVPQLKARMVSKSKDGTGSDDKKAKTSTRSSAKTLKNRPCLSPKHPTPGSSDPLIQPSSPAVCPEPPSSPKYVSSVTSRTGSSGAKEMKLKGADGKTKIATPRGAAPPGQKGQANATRIPAKTPPAPKTPPSSATKQVQRRPPPAGPRSERGEPPKSGDRSGYSSPGSPGTPGSRSRTPSLPTPPTREPKKVAVVRTPPKSPSSAKSRLQTAPVPMPDLKNVKSKIGSTENLKHQPGGGKVQIINKKLDLSNVQSKCGSKDNIKHVPGGGSVQIVYKPVDLSKVTSKCGSLGNIHHKPGGGQVEVKSEKLDFKDRVQSKIGSLDNITHVPGGGNKKIETHKLTFRENAKAKTDHGAEIVYKSPVVSGDTSPRHLSNVSSTGSIDMVDSPQLATLADEVSASLAKQGL

SEQ ID NO: 53583 - protein, 316 aa, Homo sapiens
MLRALQQRKREAGIGDTPSLEDEAAGHVTQARMVSKSKDGTGSDDKKAKGADGKTKIATPRGAAPPGQKGQANATRIPAKTPPAPKTPPSSGEPPKSGDRSGYSSPGSPGTPGSRSRTPSLPTPPTREPKKVAVVRTPPKSPSSAKSRLQTAPVPMPDLKNVKSKIGSTENLKHQPGGGKVQIVYKPVDLSKVTSKCGSLGNIHHKPGGGQVEVKSEKLDFKDRVQSKIGSLDNITHVPGGGNKKIETHKLTFRENAKAKTDHGAEIVYKSPVVSGDTSPRHLSNVSSTGSIDMVDSPQLATLADEVSASLAKQGL

SEQ ID NO: 53584 - protein, 441 aa, Homo sapiens
MAEPRQEFEVMEDHAGTYGLGDRKDQGGYTMHQDQEGDTDAGLKESPLQTPTEDGSEEPGSETSDAKSTPTAEDVTAPLVDEGAPGKQAAAQPHTEIPEGTTAEEAGIGDTPSLEDEAAGHVTQARMVSKSKDGTGSDDKKAKGADGKTKIATPRGAAPPGQKGQANATRIPAKTPPAPKTPPSSGEPPKSGDRSGYSSPGSPGTPGSRSRTPSLPTPPTREPKKVAVVRTPPKSPSSAKSRLQTAPVPMPDLKNVKSKIGSTENLKHQPGGGKVQIINKKLDLSNVQSKCGSKDNIKHVPGGGSVQIVYKPVDLSKVTSKCGSLGNIHHKPGGGQVEVKSEKLDFKDRVQSKIGSLDNITHVPGGGNKKIETHKLTFRENAKAKTDHGAEIVYKSPVVSGDTSPRHLSNVSSTGSIDMVDSPQLATLADEVSASLAKQGL

SEQ ID NO: 53585 - protein, 359 aa, Homo sapiens
MAEPRQEFEVMEDHAGTYGLGDRKDQGGYTMHQDQEGDTDAGLKESPLQTPTEDGSEEPGSETSDAKSTPTAEARMVSKSKDGTGSDDKKAKGADGKTKIATPRGAAPPGQKGQANATRIPAKTPPAPKTPPSSGEPPKSGDRSGYSSPGSPGTPGSRSRTPSLPTPPTREPKKVAVVRTPPKSPSSAKSRLQTAPVPMPDLKNVKSKIGSTENLKHQPGGGKVQIVYKPVDLSKVTSKCGSLGNIHHKPGGGQVEVKSEKLDFKDRVQSKIGSLDNITHVPGGGNKKIETHKLTFRENAKAKTDHGAEIVYKSPVVSGDTSPRHLSNVSSTGSIDMVDSPQLATLADEVSASLAKQGL

SEQ ID NO: 53586 - protein, 776 aa, Homo sapiens; identical to SEQ ID NO: 53582

SEQ ID NO: 53587 - protein, 412 aa, Homo sapiens; identical to SEQ ID NO: 53581

SEQ ID NO: 53588 - protein, 264 aa, Homo sapiens
TREAEGADGKTKIATPKGQANATRIPAKTPPAPKTPPSSGEPPKSGDRSGYSSPGSPGTPGSRSRTPSLPTPPTREPKKVAVVRTPPKSPSSAKSRLQTAPVPMPDLKNVKSKIGSTENLKHQPGGGKVQIVYKPVDLSKVTSKCGSLGNIHHKPGGGQVEVKSEKLDFKDRVQSKIGSLDNITHVPGGGNKKIETHKLTFRENAKAKTDHGAEIVYKSPVVSGDTSPRHLSNVSSTGSIDMVDSPQLATLADEVSASLAKQGL

SEQ ID NO: 53589 - protein, 352 aa, Homo sapiens
MAEPRQEFEVMEDHAGTYGLGDRKDQGGYTMHQDQEGDTDAGLKAEEAGIGDTPSLEDEAAGHVTQARMVSKSKDGTGSDDKKAKGADGKTKIATPRGAAPPGQKGQANATRIPAKTPPAPKTPPSSGEPPKSGDRSGYSSPGSPGTPGSRSRTPSLPTPPTREPKKVAVVRTPPKSPSSAKSRLQTAPVPMPDLKNVKSKIGSTENLKHQPGGGKVQIVYKPVDLSKVTSKCGSLGNIHHKPGGGQVEVKSEKLDFKDRVQSKIGSLDNITHVPGGGNKKIETHKLTFRENAKAKTDHGAEIVYKSPVVSGDTSPRHLSNVSSTGSIDMVDSPQLATLADEVSASLAKQGL

SEQ ID NO: 53590 - protein, 410 aa, Homo sapiens
MAEPRQEFEVMEDHAGTYGLGDRKDQGGYTMHQDQEGDTDAGLKESPLQTPTEDGSEEPGSETSDAKSTPTAEDVTAPLVDEGAPGKQAAAQPHTEIPEGTTAEEAGIGDTPSLEDEAAGHVTQARMVSKSKDGTGSDDKKAKGADGKTKIATPRGAAPPGQKGQANATRIPAKTPPAPKTPPSSGEPPKSGDRSGYSSPGSPGTPGSRSRTPSLPTPPTREPKKVAVVRTPPKSPSSAKSRLQTAPVPMPDLKNVKSKIGSTENLKHQPGGGKVQIVYKPVDLSKVTSKCGSLGNIHHKPGGGQVEVKSEKLDFKDRVQSKIGSLDNITHVPGGGNKKIETHKLTFRENAKAKTDHGAEIVYKSPVVSGDTSPRHLSNVSSTGSIDMVDSPQLATLADEVSASLAKQGL

SEQ ID NO: 53591 - protein, 268 aa, Homo sapiens
MAVNVYSTSVTSDNLSRHDMLAWINESLQLNLTKIEQLCSGAAYCQFMDMLFPGSIALKKVKFQAKLEHEYIQNFKILQAGFKRMGVDKIIPVDKLVKGKFQDNFEFVQWFKKFFDANYDGKDYDPVAARQGQETAVAPSLVAPALNKPKKPLTSSSAAPQRPISTQRTAAAPKAGPGVVRKNPGVGNGDDEAAELMQQVNVLKLTVEDLEKERDFYFGKLRNIELICQENEGENDPVLQRIVDILYATDEGFVIPDEGGPQEEQEEY

SEQ ID NO: 53592 - protein, 327 aa, Homo sapiens
MPGPTQTLSPNGENNNDIIQDNNGTIIPFRKHTVRGERSYSWGMAVNVYSTSITQETMSRHDIIAWVNDIVSLNYTKVEQLCSGAAYCQFMDMLFPGCISLKKVKFQAKLEHEYIHNFKLLQASFKRMNVDKVIPVEKLVKGRFQDNLDFIQWFKKFYDANYDGKEYDPVEARQGQDAIPPPDPGEQIFNLPKKSHHANSPTAGAAKSSPAAKPGSTPSRPSSAKRASSSGSASKSDKDLETQVIQLNEQVHSLKLALEGVEKERDFYFGKLREIELLCQEHGQENDDLVQRLMDILYASEEHEGHTEEPEAEEQAHEQQPPQQEEY

SEQ ID NO: 53593 - protein, 284 aa, Homo sapiens
MAVNVYSTSITQETMSRHDIIAWVNDIVSLNYTKVEQLCSGAAYCQFMDMLFPGCISLKKVKFQAKLEHEYIHNFKLLQASFKRMNVDKVIPVEKLVKGRFQDNLDFIQWFKKFYDANYDGKEYDPVEARQGQDAIPPPDPGEQIFNLPKKSHHANSPTAGAAKSSPAAKPGSTPSRPSSAKRASSSGSASKSDKDLETQVIQLNEQVHSLKLALEGVEKERDFYFGKLREIELLCQEHGQENDDLVQRLMDILYASEEHEGHTEEPEAEEQAHEQQPPQQEEY

SEQ ID NO: 53594 - protein, 315 aa, Homo sapiens
MKQNRDQKCPVSQRNSSFQQPGRKPGCSSWGMAVNVYSTSITQETMSRHDIIAWVNDIVSLNYTKVEQLCSGAAYCQFMDMLFPGCISLKKVKFQAKLEHEYIHNFKLLQASFKRMNVDKVIPVEKLVKGRFQDNLDFIQWFKKFYDANYDGKEYDPVEARQGQDAIPPPDPGEQIFNLPKKSHHANSPTAGAAKSSPAAKPGSTPSRPSSAKRASSSGSASKSDKDLETQVIQLNEQVHSLKLALEGVEKERDFYFGKLREIELLCQEHGQENDDLVQRLMDILYASEEHEGHTEEPEAEEQAHEQQPPQQEEY

SEQ ID NO: 53595 - protein, 274 aa, Homo sapiens
MARTTTTSSRIITGPSFLSGSTQCAGSVPTGAAYCQFMDMLFPGCISLKKVKFQAKLEHEYIHNFKLLQASFKRMNVDKVIPVEKLVKGRFQDNLDFIQWFKKFYDANYDGKEYDPVEARQGQDAIPPPDPGEQIFNLPKKSHHANSPTAGAAKSSPAAKPGSTPSRPSSAKRASSSGSASKSDKDLETQVIQLNEQVHSLKLALEGVEKERDFYFGKLREIELLCQEHGQENDDLVQRLMDILYASEEHEGHTEEPEAEEQAHEQQPPQQEEY

SEQ ID NO: 53596 - protein, 281 aa, Homo sapiens
MAVNVYSTSVTSENLSRHDMLAWVNDSLHLNYTKIEQLCSGAAYCQFMDMLFPGCVHLRKVKFQAKLEHEYIHNFKVLQAAFKKMGVDKIIPVEKLVKGKFQDNFEFIQWFKKFFDANYDGKDYNPLLARQGQDVAPPPNPGDQIFNKSKKLIGTAVPQRTSPTGPKNMQTSGRLSNVAPPCILRKNPPSARNGGHETDAQILELNQQLVDLKLTVDGLEKERDFYFSKLRDIELICQEHESENSPVISGIIGILYATEEGFAPPEDDEIEEHQQEDQDEY

SEQ ID NO: 53597 - protein, 266 aa, Homo sapiens
MAVNVYSTSVTSENLSRHDMLAWVNDSLHLNYTKIEQLCSGAAYCQFMDMLFPGCVHLRKVKFQAKLEHEYIHNFKVLQAAFKKMGVDKIIPVEKLVKGKFQDNFEFIQWFKKFFDANYDGKDYNPLLARQGQDVAPPPNPVPQRTSPTGPKNMQTSGRLSNVAPPCILRKNPPSARNGGHETDAQILELNQQLVDLKLTVDGLEKERDFYFSKLRDIELICQEHESENSPVISGIIGILYATEEGFAPPEDDEIEEHQQEDQDEY

SEQ ID NO: 53598 - protein, 266 aa, Homo sapiens; identical to SEQ ID NO: 53597

SEQ ID NO: 53599 - protein, 218 aa, Homo sapiens
MAVNVYSTSVTSENLSRHDMLAWVNDSLHLNYTKIEQLCSGAAYCQFMDMLFPGCVHLRKVKFQAKLEHEYIHNFKVLQAAFKKMGVDKIIPVEKLVKGKFQDNFEFIQWFKKFFDANYDGKDYNPLLARQGQDVAPPPNPGDQIFNKSKKLIGTAVPQRTSPTGPKNMQTSGRLSNVAPPCILRKNPPSARNGGHETDAQILELNQQLVDLKLTVDG

SEQ ID NO: 53600 - protein, 667 aa, Homo sapiens
METLESELTCPICLELFEDPLLLPCAHSLCFNCAHRILVSHCATNESVESITAFQCPTCRHVITLSQRGLDGLKRNVTLQNIIDRFQKASVSGPNSPSETRRERAFDANTMTSAEKVLCQFCDQDPAQDAVKTCVTCEVSYCDECLKATHPNKKPFTGHRLIEPIPDSHIRGLMCLEHEDEKVNMYCVTDDQLICALCKLVGRHRDHQVAALSERYDKLKQNLESNLTNLIKRNTELETLLAKLIQTCQHVEVNASRQEAKLTEECDLLIEIIQQRRQIIGTKIKEGKVMRLRKLAQQIANCKQCIERSASLISQAEHSLKENDHARFLQTAKNITERVSMATASSQVLIPEINLNDTFDTFALDFSREKKLLECLDYLTAPNPPTIREELCTASYDTITVHWTSDDEFSVVSYELQYTIFTGQANVVSLCNSADSWMIVPNIKQNHYTVHGLQSGTKYIFMVKAINQAGSRSSEPGKLKTNSQPFKLDPKSAHRKLKVSHDNLTVERDESSSKKSHTPERFTSQGSYGVAGNVFIDSGRHYWEVVISGSTWYAIGLAYKSAPKHEWIGKNSASWALCRCNNNWVVRHNSKEIPIEPAPHLRRVGILLDYDNGSIAFYDALNSIHLYTFDVAFAQPVCPTFTVWNKCLTIITGLPIPDHLDCTEQLP

SEQ ID NO: 53601 - protein, 667 aa, Homo sapiens; identical to SEQ ID NO: 53600

SEQ ID NO: 53602 - protein, 667 aa, Homo sapiens; identical to SEQ ID NO: 53600

SEQ ID NO: 53603 - protein, 552 aa, Homo sapiens
METLESELTCPICLELFEDPLLLPCAHSLCFNCAHRILVSHCATNESVESITAFQCPTCRHVITLSQRGLDGLKRNVTLQNIIDRFQKASVSGPNSPSETRRERAFDANTMTSAEKVLCQFCDQDPAQDAVKTCVTCEVSYCDECLKATHPNKKPFTGHRLIEPIPDSHIRGLMCLEHEDEKVNMYCVTDDQLICALCKLVGRHRDHQVAALSERYDKLKQNLESNLTNLIKRNTELETLLAKLIQTCQHVEVNASRQEAKLTEECDLLIEIIQQRRQIIGTKIKEGKVMRLRKLAQQIANCKQCIERSASLISQAEHSLKENDHARFLQTAKNITERVSMATASSQVLIPEINLNDTFDTFALDFSREKKLLECLDYLTAPNPPTIREELCTASYDTITVHWTSDDEFSVVSYELQYTIFTGQANVVSLCNSADSWMIVPNIKQNHYTVHGLQSGTKYIFMVKAINQAGSRSSEPGKLKTNSQPFKLDPKSAHRKLKVSHDNLTVERDESSSKKSHTPERFTSQGSYGVAGNVFIDSGRHYWEVVISGSTW

SEQ ID NO: 53604 - protein, 667 aa, Homo sapiens; identical to SEQ ID NO: 53600

SEQ ID NO: 53605 - protein, 667 aa, Homo sapiens; identical to SEQ ID NO: 53600

SEQ ID NO: 53606 - protein, 483 aa, Homo sapiens
METLESELTCPICLELFEDPLLLPCAHSLCFNCAHRILVSHCATNESVESITAFQCPTCRHVITLSQRGLDGLKRNVTLQNIIDRFQKASVSGPNSPSETRRERAFDANTMTSAEKVLCQFCDQDPAQDAVKTCVTCEVSYCDECLKATHPNKKPFTGHRLIEPIPDSHIRGLMCLEHEDEKVNMYCVTDDQLICALCKLVGRHRDHQVAALSERYDKLKQNLESNLTNLIKRNTELETLLAKLIQTCQHVEVNASRQEAKLTEECDLLIEIIQQRRQIIGTKIKEGKVMRLRKLAQQIANCKQCIERSASLISQAEHSLKENDHARFLQTAKNITERVSMATASSQVLIPEINLNDTFDTFALDFSREKKLLECLDYLTAPNPPTIREELCTASYDTITVHWTSDDEFSVVSYELQYTIFTGQANVVSLCNSADSWMIVPNIKQNHYTVHGLQSGTKYIFMVKAINQAGSRSSEPGKLKTNS

SEQ ID NO: 53607 - protein, 197 aa, Homo sapiens
METLESELTCPICLELFEDPLLLPCAHSLCFNCAHRILVSHCATNESVESITAFQCPTCRHVITLSQRGLDGLKRNVTLQNIIDRFQKASVSGPNSPSETRRERAFDANTMTSAEKVLCQFCDQDPAQDAVKTCVTCEVSYCDECLKATHPNKKPFTGHRLIEPIPDSHIRGLMCLEHEDEKVNMYCVTDDQLICAL

SEQ ID NO: 53608 - protein, 667 aa, Homo sapiens; identical to SEQ ID NO: 53600

SEQ ID NO: 53609 - protein, 617 aa, Homo sapiens
METLESELTCPICLELFEDPLLLPCAHSLCFNCAHRILVSHCATNESVESITAFQCPTCRHVITLSQRGLDGLKRNVTLQNIIDRFQKASVSGPNSPSETSAEKVLCQFCDQDPAQDAVKTCVTCEVSYCDECLKATHPNKKPFTGHRLIEPIPDSHIRGLMCLEHEDEKQNLESNLTNLIKRNTELETLLAKLIQTCQHVEVNASRQEAKLTEECDLLIEIIQQRRQIIGTKIKEGKVMRLRKLAQQIANCKQCIERSASLISQAEHSLKENDHARFLQTAKNITERVSMATASSQVLIPEINLNDTFDTFALDFSREKKLLECLDYLTAPNPPTIREELCTASYDTITVHWTSDDEFSVVSYELQYTIFTGQANVVSLCNSADSWMIVPNIKQNHYTVHGLQSGTKYIFMVKAINQAGSRSSEPGKLKTNSQPFKLDPKSAHRKLKVSHDNLTVERDESSSKKSHTPERFTSQGSYGVAGNVFIDSGRHYWEVVISGSTWYAIGLAYKSAPKHEWIGKNSASWALCRCNNNWVVRHNSKEIPIEPAPHLRRVGILLDYDNGSIAFYDALNSIHLYTFDVAFAQPVCPTFTVWNKCLTIITGLPIPDHLDCTEQLP

SEQ ID NO: 53610 - protein, 735 aa, Homo sapiens
MGESPASVVLNASGGLFSLKMETLESELTCPICLELFEDPLLLPCAHSLCFSCAHRILVSSCSSGESIEPITAFQCPTCRYVISLNHRGLDGLKRNVTLQNIIDRFQKASVSGPNSPSESRRERTYRPTTAMSSERIACQFCEQDPPRDAVKTCITCEVSYCDRCLRATHPNKKPFTSHRLVEPVPDTHLRGITCLDHENEKVNMYCVSDDQLICALCKLVGRHRDHQVASLNDRFEKLKQTLEMNLTNLVKRNSELENQMAKLIQICQQVEVNTAMHEAKLMEECDELVEIIQQRKQMIAVKIKETKVMKLRKLAQQVANCRQCLERSTVLINQAEHILKENDQARFLQSAKNIAERVAMATASSQVLIPDINFNDAFENFALDFSREKKLLEGLDYLTAPNPPSIREELCTASHDTITVHWISDDEFSISSYELQYTIFTGQANFISKSWCSWGLWPEIRKCKEAVSCSRLAGAPRGLYNSVDSWMIVPNIKQNHYTVHGLQSGTRYIFIVKAINQAGSRNSEPTRLKTNSQPFKLDPKMTHKKLKISNDGLQMEKDESSLKKSHTPERFSGTGCYGAAGNIFIDSGCHYWEVVMGSSTWYAIGIAYKSAPKNEWIGKNASSWVFSRCNSNFVVRHNNKEMLVDVPPHLKRLGVLLDYDNNMLSFYDPANSLHLHTFDVTFILPVCPTFTIWNKSLMILSGLPAPDFIDYPERQECNCRPQESPYVSGMKTCH

SEQ ID NO: 53611 - protein, 705 aa, Homo sapiens
MGESPASVVLNASGGLFSLKMETLESELTCPICLELFEDPLLLPCAHSLCFSCAHRILVSSCSSGESIEPITAFQCPTCRYVISLNHRGLDGLKRNVTLQNIIDRFQKASVSGPNSPSESRRERTYRPTTAMSSERIACQFCEQDPPRDAVKTCITCEVSYCDRCLRATHPNKKPFTSHRLVEPVPDTHLRGITCLDHENEKVNMYCVSDDQLICALCKLVGRHRDHQVASLNDRFEKLKQTLEMNLTNLVKRNSELENQMAKLIQICQQVEVNTAMHEAKLMEECDELVEIIQQRKQMIAVKIKETKVMKLRKLAQQVANCRQCLERSTVLINQAEHILKENDQARFLQSAKNIAERVAMATASSQVLIPDINFNDAFENFALDFSREKKLLEGLDYLTAPNPPSIREELCTASHDTITVHWISDDEFSISSYELQYTIFTGQANFISLYNSVDSWMIVPNIKQNHYTVHGLQSGTRYIFIVKAINQAGSRNSEPTRLKTNSQPFKLDPKMTHKKLKISNDGLQMEKDESSLKKSHTPERFSGTGCYGAAGNIFIDSGCHYWEVVMGSSTWYAIGIAYKSAPKNEWIGKNASSWVFSRCNSNFVVRHNNKEMLVDVPPHLKRLGVLLDYDNNMLSFYDPANSLHLHTFDVTFILPVCPTFTIWNKSLMILSGLPAPDFIDYPERQECNCRPQESPYVSGMKTCH

SEQ ID NO: 53612 - protein, 219 aa, Homo sapiens
METLESELTCPICLELFEDPLLLPCAHSLCFSCAHRILVSSCSSGESIEPITAFQCPTCRYVISLNHRGLDGLKRNVTLQNIIDRFQKASVSGPNSPSESRRERTYRPTTAMSSERIACQFCEQDPPRDAVKTCITCEVSYCDRCLRATHPNKKPFTSHRLVEPVPDTHLRGITCLDHENEKVNMYCVSDDQLICALCKLVGRHRDHQVASLNDRFEKL

SEQ ID NO: 53613 - protein, 468 aa, Homo sapiens
MEPQPGGARSCRRGAPGGACELGPAAEAAPMSLAIHSTTGTRYDLAVPPDETVEGLRKRLSQRLKVPKERLALLHKDTRLSSGKLQEFGVGDGSKLTLVPTVEAGLMSQASRPEQSVMQALESLTETQVSDFLSGRSPLTLALRVGDHMMFVQLQLAAQHAPLQHRHVLAAAAAAAAARGDPSIASPVSSPCRPVSSAARVPPVPTSPSPASPSPITAGSFRSHAASTTCPEQMDCSPTASSSASPGASTTSTPGASPAPRSRKPGAVIESFVNHAPGVFSGTFSGTLHPNCQDSSGRPRRDIGTILQILNDLLSATRHYQGMPPSLAQLRCHAQCSPASPAPDLAPRTTSCEKLTAAPSASLLQGQSQIRMCKPPGDRLRQTENRATRCKVERLQLLLQQKRLRRKARRDARGPYHWSPSRKAGRSDSSSSGGGGSPSEASGLGLDFEDSVWKPEVNPDIKSEFVVA

SEQ ID NO: 53614 - protein, 256 aa, Homo sapiens
MGEPSREEYKIQSFDAETQQLLKTALKVACFETEDGEYSVCQRSYSNCSRLMPSRCNTQYRDPGAVDLEKVANVIVDHSLQDCVFSKEAGRMCYAIIQAESKQAGQSVFRRGLLNRLQQEYQAREQLRARSLQGWVCYVTFICNIFDYLRVNNMPMMALVNPVYDCLFRLAQPDSLSKEEEVDCLVLQLHRVGEQLEKMNGQRMDELFVLIRDGFLLPTGLSSLAQLLLLEIIEFRAAGWKTTPAAHKYYYSEVSD

SEQ ID NO: 53615 - protein, 222 aa, Homo sapiens
MGEPSREEYKIQSFDAETQQLLKTALKDPGAVDLEKVANVIVDHSLQDCVFSKEAGRMCYAIIQAESKQAGQSVFRRGLLNRLQQEYQAREQLRARSLQGWVCYVTFICNIFDYLRVNNMPMMALVNPVYDCLFRLAQPDSLSKEEEVDCLVLQLHRVGEQLEKMNGQRMDELFVLIRDGFLLPTGLSSLAQLLLLEIIEFRAAGWKTTPAAHKYYYSEVSD

SEQ ID NO: 53616 - protein, 263 aa, Homo sapiens
MGEPSREEYKIQSFDAETQQLLKTALKAPSLECTVACFETEDGEYSVCQRSYSNCSRLMPSRCNTQYRDPGAVDLEKVANVIVDHSLQDCVFSKEAGRMCYAIIQAESKQAGQSVFRRGLLNRLQQEYQAREQLRARSLQGWVCYVTFICNIFDYLRVNNMPMMALVNPVYDCLFRLAQPDSLSKEEEVDCLVLQLHRVGEQLEKMNGQRMDELFVLIRDGFLLPTGLSSLAQLLLLEIIEFRAAGWKTTPAAHKYYYSEVSD

SEQ ID NO: 53617 - protein, 387 aa, Homo sapiens
MPRPRLLAALCGALLCAPSLLVALDICSKNPCHNGGLCEEISQEVRGDVFPSYTCTCLKGYAGNHCETKCVEPLGLENGNIANSQIAASSVRVTFLGLQHWVPELARLNRAGMVNAWTPSSNDDNPWIQVNLLRRMWVTGVVTQGASRLASHEYLKAFKVAYSLNGHEFDFIHDVNKKHKEFVGNWNKNAVHVNLFETPVEAQYVRLYPTSCHTACTLRFELLGCELNGCANPLGLKNNSIPDKQITASSSYKTWGLHLFSWNPSYARLDKQGNFNAWVAGSYGNDQWLQVDLGSSKEVTGIITQGARNFGSVQFVASYKVAYSNDSANWTEYQDPRTGSSKIFPGNWDNHSHKKNLFETPILARYVRILPVAWHNRIALRLELLGC

SEQ ID NO: 53618 - protein, 379 aa, Homo sapiens
MWPFPEGGNTIPILHTDICSKNPCHNGGLCEEISQEVRGDVFPSYTCTCLKGYAGNHCETKCVEPLGLENGNIANSQIAASSVRVTFLGLQHWVPELARLNRAGMVNAWTPSSNDDNPWIQVNLLRRMWVTGVVTQGASRLASHEYLKAFKVAYSLNGHEFDFIHDVNKKHKEFVGNWNKNAVHVNLFETPVEAQYVRLYPTSCHTACTLRFELLGCELNGCANPLGLKNNSIPDKQITASSSYKTWGLHLFSWNPSYARLDKQGNFNAWVAGSYGNDQWLQVDLGSSKEVTGIITQGARNFGSVQFVASYKVAYSNDSANWTEYQDPRTGSSKIFPGNWDNHSHKKNLFETPILARYVRILPVAWHNRIALRLELLGC

SEQ ID NO: 53619 - protein, 335 aa, Homo sapiens
MPRPRLLAALCGALLCAPSLLVALDICSKNPCHNGGLCEEISQEVRGDVFPSYTCTCLKGYAGNHCETKCVEPLGLENGNIANSQIAASSVRVTFLGLQHWVPELARLNRAGMVNAWTPSSNDDNPWIQVNLLRRMWVTGVVTQGASRLASHEYLKAFKVAYSLNGHEFDFIHDVNKKHKEFVGNWNKNAVHVNLFETPVEAQYVRLYPTSCHTACTLRFELLGCELNGCANPLGLKNNSIPDKQITASSSYKTWGLHLFSWNPSYARLDKQGNFNAWVAGSYGNDQWLQIFPGNWDNHSHKKNLFETPILARYVRILPVAWHNRIALRLELLGC

SEQ ID NO: 53620 - protein, 642 aa, Homo sapiens
MPCGEDWLSHPLGIVQGFFAQNGVNPDWEKKVIEYFKEKLKENNAPKWVPSLNEVPLHYLKPNSFVKFRCMIQDMFDPEFYMGVYETVNQNTKAHVLHFGKYRDVAECGPQQELDLNSPRNTTLERQTFYCVPVPGESTWVKEAYVNANQARVSPSTSYTPSRHKRSYEDDDDMDLQPNKQKDQHAGARQAGSVGGLQWCGEPKRLETEASTGQQLNSLNLSSPFDLNFPLPGEKGPACLVKVYEDWDCFKVNDILELYGILSVDPVLSILNNDERDASALLDPMECTDTAEEQRVHSPPASLVPRIHVILAQKLQHINPLLPACLNKEESKTCKFVSSFMSELSPVRAELLGFLTHALLGDSLAAEYLILHLISTVYTRRDVLPLGKFTVNLSGCPRNSTFTEHLYRIIQHLVPASFRLQMTIENMNHLKFIPHKDYTANRLVSGLLQLPSNTSLVIDETLLEQGQLDTPGVHNVTALSNLITWQKVDYDFSYHQMEFPCNINVFITSEGRSLLPADCQIHLQPQLIPPNMEEYMNSLLSAVLPSVLNKFRIYLTLLRFLEYSISDEITKAVEDDFVEMRKNDPQSITADDLHQLLVVARCLSLSAGQTTLSRERWLRAKQLESLRRTRLQQQKCVNGNEL

SEQ ID NO: 53621 - protein, 640 aa, Homo sapiens
MPCGEDWLSHPLGIVQGFFAQNGVNPDWEKKVIEYFKEKLKENNAPKWVPSLNEVPLHYLKPNSFVKFRCMIQDMFDPEFYMGVYETVNQNTKAHVLHFGKYRDVAECGPQQELDLNSPRNTTLERQTFYCVPVPGESTWVKEAYVNANQARVSPSTSYTPSRHKRSYEDDDDMDLQPNKQKDQHAGARQAGSVGGLQWCGEPKRLETEASTGQQLNSLNLSSPFDLNFPLPGEKGPACLVKVYEDWDCFKVNDILELYGILSVDPVLSILNNDERDASALLDPMECTDTAEEQRVHSPPASLVPRIHVILAQKLQHINPLLPACLNKEESKTFVSSFMSELSPVRAELLGFLTHALLGDSLAAEYLILHLISTVYTRRDVLPLGKFTVNLSGCPRNSTFTEHLYRIIQHLVPASFRLQMTIENMNHLKFIPHKDYTANRLVSGLLQLPSNTSLVIDETLLEQGQLDTPGVHNVTALSNLITWQKVDYDFSYHQMEFPCNINVFITSEGRSLLPADCQIHLQPQLIPPNMEEYMNSLLSAVLPSVLNKFRIYLTLLRFLEYSISDEITKAVEDDFVEMRKNDPQSITADDLHQLLVVARCLSLSAGQTTLSRERWLRAKQLESLRRTRLQQQKCVNGNEL

SEQ ID NO: 53622 - protein, 875 aa, Homo sapiens
MDEEEDNLSLLTALLEENESALDCNSEENNFLTRENGEPDAFDELFDADGDGESYTEEADDGETGETRDEKENLATLFGDMEDLTDEEEVPASQSTENRVLPAPAPRREKTNEELQEELRNLQEQMKALQEQLKVTTIKQTASPARLQKSPVEKSPRPPLKERRVQRIQESTCFSAELDVPALPRTKRVARTPKASPPDPKSSSSRMTSAPSQPLQTISRNKPSGITRGQIVGTPGSSGETTQPICVEAFSGLRLRRPRVSSTEMNKKMTGRKLIRLSQIKEKMAREKLEEIDWVTFGVILKKVTPQSVNSGKTFSIWKLNDLRDLTQCVSLFLFGEVHKALWKTEQGTVVGILNANPMKPKDGSEEVCLSIDHPQKVLIMGEALDLGTCKAKKKNGEPCTQTVNLRDCEYCQYHVQAQYKKLSAKRADLQSTFSGGRIPKKFARRGTSLKERLCQDGFYYGGVSSASYAASIAAAVAPKKKIQTTLSNLVVKGTNLIIQETRQKLGIPQKSLSCSEEFKELMDLPTCGARNLKQHLAKATASGIMGSPKPAIKSISASALLKQQKQRMLEMRRRKSEEIQKRFLQSSSEVESPAVPSSSRQPPAQPPRTGSEFPRLEGAPATMTPKLGRGVLEGDDVLFYDESPPPRPKLSALAEAKKLAAITKLRAKGQVLTKTNPNSIKKKQKDPQDILEVKERVEKNTMFSSQAEDELEPARKKRREQLAYLESEEFQKILKAKSKHTGILKEAEAEMQERYFEPLVKKEQMEEKMRNIREVKCRVVTCKTCAYTHFKLLETCVSEQHEYHWHDGVKRFFKCPCGNRSISLDRLPNKHCSNCGLYKWERDGMLKEKTGPKIGGETLLPRGEEHAKFLNSLK

SEQ ID NO: 53623 - protein, 855 aa, Homo sapiens
MDEEEDNLSLLTALLEENESALDCNSEENNFLTRENGEPDAFDELFDADGDGESYTEEADDGETGETRDEKENLATLFGDMEDLTDEEEVPASQSTENRVLPAPAPRREKTNEELQEELRNLQEQMKALQEQLKVTTIKQTASPARLQKSPEKSPRPPLKERRVQRIQESTCFSAELDVPALPRTKRVARTPKASPPDPKSSSSRMTSAPSQPLQTISRNKPSGITRGQIVGTPGSSGETTQPICVEAFSGLRLRRPRVSSTEMNKKMTGRKLIRLSQIKEKMAREKLEEIDWVTFGVILKKVTPQSVNSGKTFSIWKLNDLRDLTQCVSLFLFGEVHKALWKTEQGTVVGILNANPMKPKDGSEEVCLSIDHPQKVLIMGEALDLGTCKAKKKNGEPCTQTVNLRDCEYCQYHVQAQYKKLSAKRADLQSTFSGGRIPKKFARRGTSLKERLCQDGFYYGGVSSASYAASIAAAVAPKKKIQTTLSNLVVKGTNLIIQETRQKLGIPQKSLSCSEEFKELMDLPTCGARNLKQHLAKATASGIMGSPKPAIKSISASALLKQQKQRMLEMRRRKSEEIQKRFLQSSSEVESPAVPSSSRQPPAQPPRTGSEFPRLEGAPATMTPKLGRGVLEGDDVLFYDESPPPRPKLSALAEAKKLAAITKLRAKGQVLTKTNPNSIKKKQKDPQDILEVKERVEKNTMFSSQAEDELEPARKKRREQLAYLESEEFQKILKAKSKHTGILKEAEAEMQERYFEPLVKKEQMEEKMRNIREVKCRVVTCKTCAYTHFKLLETCVSEQHEYHWHDGVKRFFKCPCGNRSISLDRLPNKHCSNCGLYKWERDGMLKVCHLRTNF

SEQ ID NO: 53624 - protein, 874 aa, Homo sapiens
MDEEEDNLSLLTALLEENESALDCNSEENNFLTRENGEPDAFDELFDADGDGESYTEEADDGETGETRDEKENLATLFGDMEDLTDEEEVPASQSTENRVLPAPAPRREKTNEELQEELRNLQEQMKALQEQLKVTTIKQTASPARLQKSPEKSPRPPLKERRVQRIQESTCFSAELDVPALPRTKRVARTPKASPPDPKSSSSRMTSAPSQPLQTISRNKPSGITRGQIVGTPGSSGETTQPICVEAFSGLRLRRPRVSSTEMNKKMTGRKLIRLSQIKEKMAREKLEEIDWVTFGVILKKVTPQSVNSGKTFSIWKLNDLRDLTQCVSLFLFGEVHKALWKTEQGTVVGILNANPMKPKDGSEEVCLSIDHPQKVLIMGEALDLGTCKAKKKNGEPCTQTVNLRDCEYCQYHVQAQYKKLSAKRADLQSTFSGGRIPKKFARRGTSLKERLCQDGFYYGGVSSASYAASIAAAVAPKKKIQTTLSNLVVKGTNLIIQETRQKLGIPQKSLSCSEEFKELMDLPTCGARNLKQHLAKATASGIMGSPKPAIKSISASALLKQQKQRMLEMRRRKSEEIQKRFLQSSSEVESPAVPSSSRQPPAQPPRTGSEFPRLEGAPATMTPKLGRGVLEGDDVLFYDESPPPRPKLSALAEAKKLAAITKLRAKGQVLTKTNPNSIKKKQKDPQDILEVKERVEKNTMFSSQAEDELEPARKKRREQLAYLESEEFQKILKAKSKHTGILKEAEAEMQERYFEPLVKKEQMEEKMRNIREVKCRVVTCKTCAYTHFKLLETCVSEQHEYHWHDGVKRFFKCPCGNRSISLDRLPNKHCSNCGLYKWERDGMLKEKTGPKIGGETLLPRGEEHAKFLNSLK

SEQ ID NO: 53625 - protein, 875 aa, Homo sapiens; identical to SEQ ID NO: 53622

SEQ ID NO: 53626 - protein, 821 aa, Homo sapiens
MDLAAAAEPGAGSQHLEVRDEVAEKCQKLFLDFLEEFQSSDGEIKYLQLAEELIRPERNTLVVSFVDLEQFNQQLSTTIQEEFYRVYPYLCRALKTFVKDRKEIPLAKDFYVAFQDLPTRHKIRELTSSRIGLLTRISGQVVRTHPVHPELVSGTFLCLDCQTVIRDVEQQFKYTQPNICRNPVCANRRRFLLDTNKSRFVDFQKVRIQETQAELPRGSIPRSLEVILRAEAVESAQAGDKCDFTGTLIVVPDVSKLSTPGARAETNSRVSGVDGYETEGIRGLRALGVRDLSYRLVFLACCVAPTNPRFGGKELRDEEQTAESIKNQMTVKEWEKVFEMSQDKNLYHNLCTSLFPTIHGNDEVKRGVLLMLFGGVPKTTGEGTSLRGDINVCIVGDPSTAKSQFLKHVEEFSPRAVYTSGKASSAAGLTAAVVRDEESHEFVIEAGALMLADNGVCCIDEFDKMDVRDQVAIHEAMEQQTISITKAGVKATLNARTSILAAANPISGHYDRSKSLKQNINLSAPIMSRFDLFFILVDECNEVTDYAIARRIVDLHSRIEESIDRVYSLDDIRRYLLFARQFKPKISKESEDFIVEQYKHLRQRDGSGVTKSSWRITVRQLESMIRLSEAMARMHCCDEVQPKHVKEAFRLLNKSIIRVETPDVNLDQEEEIQMEVDEGAGGINGHADSPAPVNGINGYNEDINQESAPKASLRLGFSEYCRISNLIVLHLRKVEEEEDESALKRSELVNWYLKEIESEIDSEEELINKKRIIEKVIHRLTHYDHVLIELTQAGLKGSTEGSESYEEDPYLVVNPNYLLED

SEQ ID NO: 53627 - protein, 719 aa, Homo sapiens
MALKDYALEKEKVKKFLQEFYQDDELGKKQFKYGNQLVRLAHREQVALYVDLDDVAEDDPELVDSICENARRYAKLFADAVQELLPQYKEREVVNKDVLDVYIEHRLMMEQRSRDPGMVRSPQNQYPAELMRRFELYFQGPSSNKPRVIREVRADSVGKLVTVRGIVTRVSEVKPKMVVATYTCDQCGAETYQPIQSPTFMPLIMCPSQECQTNRSGGRLYLQTRGSRFIKFQEMKMQEHSDQVPVGNIPRSITVLVEGENTRIAQPGDHVSVTGIFLPILRTGFRQVVQGLLSETYLEAHRIVKMNKSEDDESGAGELTREELRQIAEEDFYEKLAASIAPEIYGHEDVKKALLLLLVGGVDQSPRGMKIRGNINICLMGDPGVAKSQLLSYIDRLAPRSQYTTGRGSSGVGLTAAVLRDSVSGELTLEGGALVLADQGVCCIDEFDKMAEADRTAIHEVMEQQTISIAKAGILTTLNARCSILAAANPAYGRYNPRRSLEQNIQLPAALLSRFDLLWLIQDRPDRDNDLRLAQHITYVHQHSRQPPSQFEPLDMKLMRRYIAMCREKQPMVPESLADYITAAYVEMRREAWASKDATYTSARTLLAILRLSTALARLRMVDVVEKEDVNEAIRLMEMSKDSLLGDKGQTARTQRPADVIFATVRELVSGGRSVRFSEAEQRCVSRGFTPAQFQAALDEYEELNVWQVNASRTRITFV

SEQ ID NO: 53628 - protein, 389 aa, Homo sapiens
MALKDYALEKEKVKKFLQEFYQDDELGKKQFKYGNQLVRLAHREQVALYVDLDDVAEDDPELVDSICENARRYAKLFADAVQELLPQYKEREVVNKDVLDVYIEHRLMMEQRSRDPGMVRSPQNQYPAELMRRFELYFQGPSSNKPRVIREVRADSVGKLVTVRGIVTRVSEVKPKMVVATYTCDQCGAETYQPIQSPTFMPLIMCPSQECQTNRSGGRLYLQTRGSRFIKFQEMKMQEHSDQVPVGNIPRSITVLVEGENTRIAQPGDHVSVTGIFLPILRTGFRQVVQGLLSETYLEAHRIVKMNKSEDDESGAGELTREELRQIADVIFATVRELVSGGRSVRFSEAEQRCVSRGFTPAQFQAALDEYEELNVWQVNASRTRITFV

SEQ ID NO: 53629 - protein, 543 aa, Homo sapiens
MVVATYTCDQCGAETYQPIQSPTFMPLIMCPSQECQTNRSGGRLYLQTRGSRFIKFQEMKMQEHSDQVPVGNIPRSITVLVEGENTRIAQPGDHVSVTGIFLPILRTGFRQVVQGLLSETYLEAHRIVKMNKSEDDESGAGELTREELRQIAEEDFYEKLAASIAPEIYGHEDVKKALLLLLVGGVDQSPRGMKIRGNINICLMGDPGVAKSQLLSYIDRLAPRSQYTTGRGSSGVGLTAAVLRDSVSGELTLEGGALVLADQGVCCIDEFDKMAEADRTAIHEVMEQQTISIAKAGILTTLNARCSILAAANPAYGRYNPRRSLEQNIQLPAALLSRFDLLWLIQDRPDRDNDLRLAQHITYVHQHSRQPPSQFEPLDMKLMRRYIAMCREKQPMVPESLADYITAAYVEMRREAWASKDATYTSARTLLAILRLSTALARLRMVDVVEKEDVNEAIRLMEMSKDSLLGDKGQTARTQRPADVIFATVRELVSGGRSVRFSEAEQRCVSRGFTPAQFQAALDEYEELNVWQVNASRTRITFV

SEQ ID NO: 53630 - protein, 612 aa, Homo sapiens
MMEQRSRDPGMVRSPQNQYPAELMRRFELYFQGPSSNKPRVIREVRADSVGKLVTVRGIVTRVSEVKPKMVVATYTCDQCGAETYQPIQSPTFMPLIMCPSQECQTNRSGGRLYLQTRGSRFIKFQEMKMQEHSDQVPVGNIPRSITVLVEGENTRIAQPGDHVSVTGIFLPILRTGFRQVVQGLLSETYLEAHRIVKMNKSEDDESGAGELTREELRQIAEEDFYEKLAASIAPEIYGHEDVKKALLLLLVGGVDQSPRGMKIRGNINICLMGDPGVAKSQLLSYIDRLAPRSQYTTGRGSSGVGLTAAVLRDSVSGELTLEGGALVLADQGVCCIDEFDKMAEADRTAIHEVMEQQTISIAKAGILTTLNARCSILAAANPAYGRYNPRRSLEQNIQLPAALLSRFDLLWLIQDRPDRDNDLRLAQHITYVHQHSRQPPSQFEPLDMKLMRRYIAMCREKQPMVPESLADYITAAYVEMRREAWASKDATYTSARTLLAILRLSTALARLRMVDVVEKEDVNEAIRLMEMSKDSLLGDKGQTARTQRPADVIFATVRELVSGGRSVRFSEAEQRCVSRGFTPAQFQAALDEYEELNVWQVNASRTRITFV

SEQ ID NO: 53631 - protein, 656 aa, Homo sapiens
MTPSWWTQFVRMPGATRSSLLMPYYKEREVVNKDVLDVYIEHRLMMEQRSRDPGMVRSPQNQYPAELMRRFELYFQGPSSNKPRVIREVRADSVGKLVTVRGIVTRVSEVKPKMVVATYTCDQCGAETYQPIQSPTFMPLIMCPSQECQTNRSGGRLYLQTRGSRFIKFQEMKMQEHSDQVPVGNIPRSITVLVEGENTRIAQPGDHVSVTGIFLPILRTGFRQVVQGLLSETYLEAHRIVKMNKSEDDESGAGELTREELRQIAEEDFYEKLAASIAPEIYGHEDVKKALLLLLVGGVDQSPRGMKIRGNINICLMGDPGVAKSQLLSYIDRLAPRSQYTTGRGSSGVGLTAAVLRDSVSGELTLEGGALVLADQGVCCIDEFDKMAEADRTAIHEVMEQQTISIAKAGILTTLNARCSILAAANPAYGRYNPRRSLEQNIQLPAALLSRFDLLWLIQDRPDRDNDLRLAQHITYVHQHSRQPPSQFEPLDMKLMRRYIAMCREKQPMVPESLADYITAAYVEMRREAWASKDATYTSARTLLAILRLSTALARLRMVDVVEKEDVNEAIRLMEMSKDSLLGDKGQTARTQRPADVIFATVRELVSGGRSVRFSEAEQRCVSRGFTPAQFQAALDEYEELNVWQVNASRTRITFV

SEQ ID NO: 53632 - protein, 824 aa, Homo sapiens
MNGEYRGRGFGRGRFQSWKRGRGGGNFSGKWREREHRPDLSKTTGKRTSEQTPQFLLSTKTPQSMQSTLDRFIPYKGWKLYFSEVYSDSSPLIEKIQAFEKFFTRHIDLYDKDEIERKGSILVDFKELTEGGEVTNLIPDIATELRDAPEKTLACMGLAIHQVLTKDLERHAAELQAQEGLSNDGETMVNVPHIHARVYNYEPLTQLKNVRANYYGKYIALRGTVVRVSNIKPLCTKMAFLCAACGEIQSFPLPDGKYSLPTKCPVPVCRGRSFTALRSSPLTVTMDWQSIKIQELMSDDQREAGRIPRTIECELVHDLVDSCVPGDTVTITGIVKVSNAEEANSISNSKGQKTKSSEDGCKHGMLMEFSLKDLYAIQEIQAEENLFKLIVNSLCPVIFGHELVKAGLALALFGGSQKYADDKNRIPIRGDPHILVVGDPGLGKSQMLQAACNVAPRGVYVCGNTTTTSGLTVTLSKDSSSGDFALEAGALVLGDQGICGIDEFDKMGNQHQALLEAMEQQSISLAKAGVVCSLPARTSIIAAANPVGGHYNKAKTVSENLKMGSALLSRFDLVFILLDTPNEHHDHLLSEHVIAIRAGKQRTISSATVARMNSQDSNTSVLEVVSEKPLSERLKVVPGETIDPIPHQLLRKYIGYARQYVYPRLSTEAARVLQDFYLELRKQSQRLNSSPITTRQLESLIRLTEARARLELREEATKEDAEDIVEIMKYSMLGTYSDEFGNLDFERSQHGSGMSNRSTAKRFISALNNVAERTYNNIFQFHQLRQIAKELNIQVADFENFIGSLNDQGYLLKKGPKVYQLQTM

SEQ ID NO: 53633 - protein, 793 aa, Homo sapiens
MNGEYRGRGFGRGRFQSWKRGRGGGNFSGKWREREHRPDLSKTTGKRTSEQTPQFLLSTKTPQSMQSTLDRFIPYKGWKLYFSEVYSDSSPLIEKIQAFEKFFTRHIDLYDKDEIERKGSILVDFKELTEGGEVTNLIPDIATELRDAPEKTLACMGLAIHQVLTKDLERHAAELQAQEGLSNDGETMVNVPHIHARVYNYEPLTQLKNVRANYYGKYIALRGTVVRVSNIKPLCTKMAFLCAACGEIQSFPLPDGKYSLPTKCPVPVCRGRSFTALRSSPLTVTMDWQSIKIQELMSDDQREAGRIPRTIECELVHDLVDSCVPGDTVTITGIVKVSNAEEGSRNKNDKCMFLLYIEANSISNSKGQKTKSSEDGCKHGMLMEFSLKDLYAIQEIQAEENLFKLIVNSLCPVIFGHEAACNVAPRGVYVCGNTTTTSGLTVTLSKDSSSGDFALEAGALVLGDQGICGIDEFDKMGNQHQALLEAMEQQSISLAKAGVVCSLPARTSIIAAANPVGGHYNKAKTVSENLKMGSALLSRFDLVFILLDTPNEHHDHLLSEHVIAIRAGKQRTISSATVARMNSQDSNTSVLEVVSEKPLSERLKVVPGETIDPIPHQLLRKYIGYARQYVYPRLSTEAARVLQDFYLELRKQSQRLNSSPITTRQLESLIRLTEARARLELREEATKEDAEDIVEIMKYSMLGTYSDEFGNLDFERSQHGSGMSNRSTAKRFISALNNVAERTYNNIFQFHQLRQIAKELNIQVADFENFIGSLNDQGYLLKKGPKVYQLQTM

SEQ ID NO: 53634 - protein, 880 aa, Homo sapiens
MNGEYRGRGFGRGRFQSWKRGRGGGNFSGKWREREHRPDLSKTTGKRTSEQTPQFLLSTKTPQSMQSTLDRFIPYKGWKLYFSEVYSDSSPLIEKIQAFEKFFTRHIDLYDKDEIERKGSILVDFKELTEGGEVTNLIPDIATELRDAPEKTLACMGLAIHQVLTKDLERHAAELQAQEGLSNDGETMVNVPHIHARVYNYEPLTQLKNVRANYYGKYIALRGTVVRVSNIKPLCTKMAFLCAACGEIQSFPLPDGKYSLPTKCPVPVCRGRSFTALRSSPLTVTMDWQSIKIQELMSDDQREAGRIPRTIECELVHDLVDSCVPGDTVTITGIVKVSNAEEGSRNKNDKCMFLLYIEANSISNSKGQKTKSSEDGCKHGMLMEFSLKDLYAIQEIQAEENLFKLIVKWSLALSPRLEYSGAISAHCNLHLPSSNSSPTSACRVAGTTGMRHQTQLLLLVKAGLALALFGGSQKYADDKNRIPIRGDPHILVVGDPGLGKSQMLQAACNVAPRGVYVCGNTTTTSGLTVTLSKDSSSGDFALEAGALVLGDQGICGIDEFDKMGNQHQALLEAMEQQSISLAKAGVVCSLPARTSIIAAANPVGGHYNKAKTVSENLKMGSALLSRFDLVFILLDTPNEHHDHLLSEHVIAIRAGKQRTISSATVARMNSQDSNTSVLEVVSEKPLSERLKVVPGETIDPIPHQLLRKYIGYARQYVYPRLSTEAARVLQDFYLELRKQSQRLNSSPITTRQLESLIRLTEARARLELREEATKEDAEDIVEIMKYSMLGTYSDEFGNLDFERSQHGSGMSNRSTAKRFISALNNVAERTYNNIFQFHQLRQIAKELNIQVADFENFIGSLNDQGYLLKKGPKVYQLQTM

SEQ ID NO: 53635 - protein, 840 aa, Homo sapiens
MNGEYRGRGFGRGRFQSWKRGRGGGNFSGKWREREHRPDLSKTTGKRTSEQTPQFLLSTKTPQSMQSTLDRFIPYKGWKLYFSEVYSDSSPLIEKIQAFEKFFTRHIDLYDKDEIERKGSILVDFKELTEGGEVTNLIPDIATELRDAPEKTLACMGLAIHQVLTKDLERHAAELQAQEGLSNDGETMVNVPHIHARVYNYEPLTQLKNVRANYYGKYIALRGTVVRVSNIKPLCTKMAFLCAACGEIQSFPLPDGKYSLPTKCPVPVCRGRSFTALRSSPLTVTMDWQSIKIQELMSDDQREAGRIPRTIECELVHDLVDSCVPGDTVTITGIVKVSNAEEGSRNKNDKCMFLLYIEANSISNSKGQKTKSSEDGCKHGMLMEFSLKDLYAIQEIQAEENLFKLIVNSLCPVIFGHELVKAGLALALFGGSQKYADDKNRIPIRGDPHILVVGDPGLGKSQMLQAACNVAPRGVYVCGNTTTTSGLTVTLSKDSSSGDFALEAGALVLGDQGICGIDEFDKMGNQHQALLEAMEQQSISLAKAGVVCSLPARTSIIAAANPVGGHYNKAKTVSENLKMGSALLSRFDLVFILLDTPNEHHDHLLSEHVIAIRAGKQRTISSATVARMNSQDSNTSVLEVVSEKPLSERLKVVPGETIDPIPHQLLRKYIGYARQYVYPRLSTEAARVLQDFYLELRKQSQRLNSSPITTRQLESLIRLTEARARLELREEATKEDAEDIVEIMKYSMLGTYSDEFGNLDFERSQHGSGMSNRSTAKRFISALNNVAERTYNNIFQFHQLRQIAKELNIQVADFENFIGSLNDQGYLLKKGPKVYQLQTM

SEQ ID NO: 53636 - protein, 203 aa, Homo sapiens
MNGEYRGRGFGRGRFQSWKRGRGGGNFSGKWREREHRPDLSKTTGKRTSEQTPQFLLSTKTPQSMQSTLDRFIPYKGWKLYFSEVYSDSSPLIEKIQAFEKFFTRHIDLYDKDEIERKGSILVDFKELTEGGEVTNLIPDIATELRDAPEKTLACMGLAIHQVLTKDLERHAAELQAQEGLSNDGETMVNVPHIHFLKKKKKI

SEQ ID NO: 53637 - protein, 442 aa, Homo sapiens
MENWSKDITHSYLEQETTGINKSTQPDEQLTMNSEKSMHRKSTELVNEITCENTEWPGQRSTNFQIISSYPDDESVYCTTEKYNVMEHRHNDMHYECMTPCQVTSDSDKEKTIAFLLKELDILRTSNKKLQQKLAKEDKEQRKLKFKLELQEKETEAKIAEKTAALVEEVYFAQKERDEAVMSRLQLAIEERDEAIARAKHMEMSLKVLENINPEENDMTLQELLNRINNADTGIAIQKNGAIIVDRIYKTKECKMRITAEEMSALIEERDAALSKCKRLEQELHHVKEQNQTSANNMRHLTAENNQERALKAKLLSMQQARETAVQQYKKLEEEIQTLRVYYSLHKSLSQEENLKDQFNYTLSTYEEALKNRENIVSITQQQNEELATQLQQALTERANMELQLQHAREASQVANEKVQKLERLVDVLRKKVGTGTMRTVI

SEQ ID NO: 53638 - protein, 442 aa, Homo sapiens; identical to SEQ ID NO: 53637

SEQ ID NO: 53639 - protein, 261 aa, Homo sapiens
MSRLQLAIEERDEAIARAKHMEMSLKVLENINPEENDMTLQELLNRINNADTGIAIQKNGAIIVDRIYKTKECKMRITAEEMSALIEERDAALSKCKRLEQELHHVKEQNQTSANNMRHLTAENNQERALKAKLLSMQQARETAVQQYKKLEEEIQTLRVYYSLHKSLSQEENLKDQFNYTLSTYEEALKNRENIVSITQQQNEELATQLQQALTERANMELQLQHAREASQVANEKVQKLERLVDVLRKKVGTGTMRTVI

SEQ ID NO: 53640 - protein, 442 aa, Homo sapiens; identical to SEQ ID NO: 53637

SEQ ID NO: 53641 - protein, 424 aa, Homo sapiens
MNSEKSMHRKSTELVNEITCENTEWPGQRSTNFQIISSYPDDESVYCTTEKYNVMEHRHNDMHYECMTPCQVTSDSDKEKTIAFLLKELDILRTSNKKLQQKLAKEDKEQRKLKFKLELQEKETEAKIAEKTAALVEEVYFAQKERDEAVMSRLQLAIEERDEAIARAKHMEMSLKVLENINPEENDMTLQELLNRINNADTGIAIQKNGAIIVDRIYKTKECKMRITAEEMSALIEERDAALSKCKRLEQELHHVKEQNQTSANNMRHLTAENNQERALKAKLLSMQQARETAVQQYKKLEEEIQTLRVYYSLHKSLSQEENLKDQFNYTLSTYEEALKNRENIVSITQQQNEELATQLQQALTERANMELQLQHAREASQVANEKVQKSQIQIYFIPNKKDEREKFLMDKRRKIVAHSKQNS

SEQ ID NO: 53642 - protein, 104 aa, Homo sapiens
MENWSKDITHSYLEQETTGINKSTQPDEQLTMNSEKSMHRKSTELVNEITCENTEWPGQRSTNFQIISSYPDDESVYCTTEKYNVMEHRHNDMHYECMTPCQVT

SEQ ID NO: 53643 - protein, 128 aa, Homo sapiens
MENWSKDITHSYLEQETTGINKSTQPDEQLTMNSEKSMHRKSTELVNEITCENTEWPGQRSTNFQIISSYPDDESVYCTTEKYNVMEHRHNDMHYECMTPCQVTSDSDKEKTIAFLLKELDILRTSNK

SEQ ID NO: 53644 - protein, 1303 aa, Homo sapiens
MGDPAPARSLDDIDLSALRDPAGIFELVEVVGNGTYGQVYKGRHVKTGQLAAIKVMDVTEDEEEEIKQEINMLKKYSHHRNIATYYGAFIKKSPPGNDDQLWLVMEFCGAGSVTDLVKNTKGNALKEDCIAYICREILRGLAHLHAHKVIHRDIKGQNVLLTENAEVKLVDFGVSAQLDRTVGRRNTFIGTPYWMAPEVIACDENPDATYDYRSDIWSLGITAIEMAEGAPPLCDMHPMRALFLIPRNPPPRLKSKKWSKKFIDFIDTCLIKTYLSRPPTEQLLKFPFIRDQPTERQVRIQLKDHIDRSRKKRGEKEETEYEYSGSEEEDDSHGEEGEPSSIMNVPGESTLRREFLRLQQENKSNSEALKQQQQLQQQQQRDPEAHIKHLLHQRQRRIEEQKEERRRVEEQQRREREQRKLQEKEQQRRLEDMQALRREEERRQAEREQEYKRKQLEEQRQSERLQRQLQQEHAYLKSLQQQQQQQQLQKQQQQQLLPGDRKPLYHYGRGMNPADKPAWAREVEERTRMNKQQNSPLAKSKPGSTGPEPPIPQASPGPPGPLSQTPPMQRPVEPQEGPHKSLVAHRVPLKPYAAPVPRSQSLQDQPTRNLAAFPASHDPDPAIPAPTATPSARGAVIRQNSDPTSEGPGPSPNPPAWVRPDNEAPPKVPQRTSSIATALNTSGAGGSRPAQAVRASNPDLRRSDPGWERSDSVLPASHGHLPQAGSLERNRVGVSSKPDSSPVLSPGNKAKPDDHRSRPGRPASYKRAIGEDFVLLKERTLDEAPRPPKKAMDYSSSSEEVESSEDDEEEGEGGPAEGSRDTPGGRSDGDTDSVSTMVVHDVEEITGTQPPYGGGTMVVQRTPEEERNLLHADSNGYTNLPDVVQPSHSPTENSKGQSPPSKDGSGDYQSRGLVKAPGKSSFTMFVDLGIYQPGGSGDSIPITALVGGEGTRLDQLQYDVRKGSVVNVNPTNTRAHSETPEIRKYKKRFNSEILCAALWGVNLLVGTENGLMLLDRSGQGKVYGLIGRRRFQQMDVLEGLNLLITISGKRNKLRVYYLSWLRNKILHNDPEVEKKQGWTTVGDMEGCGHYRVVKYERIKFLVIALKSSVEVYAWAPKPYHKFMAFKSFADLPHRPLLVDLTVEEGQRLKVIYGSSAGFHAVDVDSGNSYDIYIPVHIQSQITPHAIIFLPNTDGMEMLLCYEDEGVYVNTYGRIIKDVVLQWGEMPTSVAYICSNQIMGWGEKAIEIRSVETGHLDGVFMHKRAQRLKFLCERNDKVFFASVRSGGSSQVYFMTLNRNCIMNW

SEQ ID NO: 53645 - protein, 1332 aa, Homo sapiens
MGDPAPARSLDDIDLSALRDPAGIFELVEVVGNGTYGQVYKGRHVKTGQLAAIKVMDVTEDEEEEIKQEINMLKKYSHHRNIATYYGAFIKKSPPGNDDQLWLVMEFCGAGSVTDLVKNTKGNALKEDCIAYICREILRGLAHLHAHKVIHRDIKGQNVLLTENAEVKLVDFGVSAQLDRTVGRRNTFIGTPYWMAPEVIACDENPDATYDYRSDIWSLGITAIEMAEGAPPLCDMHPMRALFLIPRNPPPRLKSKKWSKKFIDFIDTCLIKTYLSRPPTEQLLKFPFIRDQPTERQVRIQLKDHIDRSRKKRGEKEETEYEYSGSEEEDDSHGEEGEPSSIMNVPGESTLRREFLRLQQENKSNSEALKQQQQLQQQQQRDPEAHIKHLLHQRQRRIEEQKEERRRVEEQQRREREQRKLQEKEQQRRLEDMQALRREEERRQAEREQEYKRKQLEEQRQSERLQRQLQQEHAYLKSLQQQQQQQQLQKQQQQQLLPGDRKPLYHYGRGMNPADKPAWAREVEERTRMNKQQNSPLAKSKPGSTGPEPPIPQASPGPPGPLSQTPPMQRPVEPQEGPHKSLVAHRVPLKPYAAPVPRSQSLQDQPTRNLAAFPASHDPDPAIPAPTATPSARGAVIRQNSDPTSEGPGPSPNPPAWVRPDNEAPPKVPQRTSSIATALNTSGAGGSRPAQAVRARPRSNSAWQIYLQRRAERGTPKPPGPPAQPPGPPNASSNPDLRRSDPGWERSDSVLPASHGHLPQAGSLERNRVGVSSKPDSSPVLSPGNKAKPDDHRSRPGRPADFVLLKERTLDEAPRPPKKAMDYSSSSEEVESSEDDEEEGEGGPAEGSRDTPGGRSDGDTDSVSTMVVHDVEEITGTQPPYGGGTMVVQRTPEEERNLLHADSNGYTNLPDVVQPSHSPTENSKGQSPPSKDGSGDYQSRGLVKAPGKSSFTMFVDLGIYQPGGSGDSIPITALVGGEGTRLDQLQYDVRKGSVVNVNPTNTRAHSETPEIRKYKKRFNSEILCAALWGVNLLVGTENGLMLLDRSGQGKVYGLIGRRRFQQMDVLEGLNLLITISGKRNKLRVYYLSWLRNKILHNDPEVEKKQGWTTVGDMEGCGHYRVVKYERIKFLVIALKSSVEVYAWAPKPYHKFMAFKSFADLPHRPLLVDLTVEEGQRLKVIYGSSAGFHAVDVDSGNSYDIYIPVHIQSQITPHAIIFLPNTDGMEMLLCYEDEGVYVNTYGRIIKDVVLQWGEMPTSVAYICSNQIMGWGEKAIEIRSVETGHLDGVFMHKRAQRLKFLCERNDKVFFASVRSGGSSQVYFMTLNRNCIMNW

SEQ ID NO: 53646 - protein, 1312 aa, Homo sapiens
MGDPAPARSLDDIDLSALRDPAGIFELVEVVGNGTYGQVYKGRHVKTGQLAAIKVMDVTEDEEEEIKQEINMLKKYSHHRNIATYYGAFIKKSPPGNDDQLWLVMEFCGAGSVTDLVKNTKGNALKEDCIAYICREILRGLAHLHAHKVIHRDIKGQNVLLTENAEVKLVDFGVSAQLDRTVGRRNTFIGTPYWMAPEVIACDENPDATYDYRSDIWSLGITAIEMAEGAPPLCDMHPMRALFLIPRNPPPRLKSKKWSKKFIDFIDTCLIKTYLSRPPTEQLLKFPFIRDQPTERQVRIQLKDHIDRSRKKRGEKEETEYEYSGSEEEDDSHGEEGEPSSIMNVPGESTLRREFLRLQQENKSNSEALKQQQQLQQQQQRDPEAHIKHLLHQRQRRIEEQKEERRRVEEQQRREREQRKLQEKEQQRRLEDMQALRREEERRQAEREQEYKRKQLEEQRQSERLQRQLQQEHAYLKSLQQQQQQQQLQKQQQQQLLPGDRKPLYHYGRGMNPADKPAWAREVEERTRMNKQQNSPLAKSKPGSTGPEPPIPQASPGPPGPLSQTPPMQRPVEPQEGPHKSLQDQPTRNLAAFPASHDPDPAIPAPTATPSARGAVIRQNSDPTSEGPGPSPNPPAWVRPDNEAPPKVPQRTSSIATALNTSGAGGSRPAQAVRARPRSNSAWQIYLQRRAERGTPKPPGPPAQPPGPPNASSNPDLRRSDPGWERSDSVLPASHGHLPQAGSLERNRVGVSSKPDSSPVLSPGNKAKPDDHRSRPGRPADFVLLKERTLDEAPRPPKKAMDYSSSSEEVESSEDDEEEGEGGPAEGSRDTPGGRSDGDTDSVSTMVVHDVEEITGTQPPYGGGTMVVQRTPEEERNLLHADSNGYTNLPDVVQPSHSPTENSKGQSPPSKDGSGDYQSRGLVKAPGKSSFTMFVDLGIYQPGGSGDSIPITALVGGEGTRLDQLQYDVRKGSVVNVNPTNTRAHSETPEIRKYKKRFNSEILCAALWGVNLLVGTENGLMLLDRSGQGKVYGLIGRRRFQQMDVLEGLNLLITISGKRNKLRVYYLSWLRNKILHNDPEVEKKQGWTTVGDMEGCGHYRVVKYERIKFLVIALKSSVEVYAWAPKPYHKFMAFKSFADLPHRPLLVDLTVEEGQRLKVIYGSSAGFHAVDVDSGNSYDIYIPVHIQSQITPHAIIFLPNTDGMEMLLCYEDEGVYVNTYGRIIKDVVLQWGEMPTSVAYICSNQIMGWGEKAIEIRSVETGHLDGVFMHKRAQRLKFLCERNDKVFFASVRSGGSSQVYFMTLNRNCIMNW

SEQ ID NO: 53647 - protein, 292 aa, Homo sapiens
MLLDRSGQGKVYGLIGRRRFQQMDVLEGLNLLITISGKRNKLRVYYLSWLRNKILHNDPEVEKKQGWTTVGDMEGCGHYRVVKYERIKFLVIALKSSVEVYAWAPKPYHKFMAFKSFADLPHRPLLVDLTVEEGQRLKVIYGSSAGFHAVDVDSGNSYDIYIPVHIQSQITPHAIIFLPNTDGMEMLLCYEDEGVYVNTYGRIIKDVVLQWGEMPTSVAYICSNQIMGWGEKAIEIRSVETGHLDGVFMHKRAQRLKFLCERNDKVFFASVRSGGSSQVYFMTLNRNCIMNW

SEQ ID NO: 53648 - protein, 111 aa, Homo sapiens
MGDPAPARSLDDIDLSALRALWFQFFYHSGSSLESPGMLNGPFQHRNSRIMTHRSAEKTLLGSLSLWRWSAMEPTDRCTRVGMSRRGSWLPSRSWMSRRTRRKRSNRRSTC

SEQ ID NO: 53649 - protein, 337 aa, Homo sapiens
MGAAGSSALARFVLLAQSRPGWLGVAALGLTAVALGAVAWRRAWPTRRRRLLQQVGTVAQLWIYPVKSCKGVPVSEAECTAMGLRSGNLRDRFWLVINQEGNMVTARQEPRLVLISLTCDGDTLTLSAAYTKDLLLPIKTPTTNAVHKCRVHGLEIEGRDCGEATAQWITSFLKSQPYRLVHFEPHMRPRRPHQIADLFRPKDQIAYSDTSPFLILSEASLADLNSRLEKKVKATNFRPNIVISGCDVYAEDSWDELLIGDVELKRVMACSRCILTTVDPDTGVMSRKEPLETLKSYRQCDPSERKLYGKSPLFGQYFVLENPGTIKVGDPVYLLGQ

SEQ ID NO: 53650 - protein, 257 aa, Homo sapiens
MGASSSSALARLGLPARPWPRWLGVAALGLAAVALGTVAWRRAWPRRRRRLQQVGTVAKLWIYPVKSCKGVPVSEAECTAMGLRSGNLRDRFWLVIKEDGHMVTARQEPRLVLISIIYENNCLIFRAPDMDQLVLPSKQPSSNKLHNCRIFGLDIKGRDCGNEAAKWFTNFLKTEAYRLVQFETNMKGRTSRKLLPTLDQNFQVAYPDYCPLLIMTDASLVDLNTRMEKKMKMENFRPNIVVTGCDAFEEASATRRD

SEQ ID NO: 53651 - protein, 335 aa, Homo sapiens
MGASSSSALARLGLPARPWPRWLGVAALGLAAVALGTVAWRRAWPRRRRRLQQVGTVAKLWIYPVKSCKGVPVSEAECTAMGLRSGNLRDRFWLVIKEDGHMVTARQEPRLVLISIIYENNCLIFRAPDMDQLVLPSKQPSSNKLHNCRIFGLDIKGRDCGNEAAKWFTNFLKTEAYRLVQFETNMKGRTSRKLLPTLDQNFQVAYPDYCPLLIMTDASLVDLNTRMEKKMKMENFRPNIVVTGCDAFEEDTWDELLIGSVEVKKVMACPRCILTTVDPDTGVIDRKQPLDTLKSYRLCDPSERELYKLSPLFGIYYSVEKIGSLRVGDPVYRMV

SEQ ID NO: 53652 - protein, 172 aa, Homo sapiens
GHMVTARQEPRLVLISIIYENNCLIFRAPDMDQLVLPSKQPSSNKLHNCRIFGLDIKGRDCGNEAAKWFTNFLKTEAYRLVQFETNMKGRTSRKLLPTLDQNFQVAYPDYCPLLIMTDASLVDLNTRMEKKMKMENFRPNIVVTGCDAFEEDTWDELLIGSVEVKKVMACPR

SEQ ID NO: 53653 - protein, 148 aa, Homo sapiens
MPFAEDKTYKYICRNFSNFCNVDVVEILPYLPCLTARDQDRLRATCTLSGNRDTLWHLFNTLQLPTWAGEETPGGQSSGRGLDFSSLTSGAVWLWQMSDFWSCFSTWTVSIWLILHWVLLRLNLQVFAKCLAQSKWPLLLPSLSCPTW

SEQ ID NO: 53654 - protein, 124 aa, Homo sapiens
MPFAEDKTYKYICRNFSNFCNVDVVEILPYLPCLTARDQDRLRATCTLSGNRDTLWHLFNTLQRRPGWVEYFIAALRGCELVDLADEVASVYQSYQPQFRASPADAQPQSHPKESRWWPPGVLL

SEQ ID NO: 53655 - protein, 399 aa, Homo sapiens
MPVQETQAPESPGENSEQALQTLSPRAIPRNPDGGPLESSSDLAALSPLTSSGHQEQDTELGSTHTAGATSSLTPSRGPVSPSVSFQPLARSTPRASRLPGPTGSVVSTGTSFSSSSPGLASAGAAEGKQGAESDQAEPIICSSGAEAPANSLPSKVPTTLMPVNTVALKVPANPASVSTVPSKLPTSSKPPGAVPSNALTNPAPSKLPINSTRAGMVPSKVPTSMVLTKVSASTVPTDGSSRNEETPAAPTPAGATGGSSAWLDSSSENRGLGSELSKPGVLASQVDSPFSGCFEDLAISASTSLGMGPCHGPEENEYKSEGTFGIHVAENPSIQLLEGNPGPPADPDGGPRPQADRKFQEREVPCHRPSPGALWLQVAVTGVLVVTLLVVLYRRRLH

SEQ ID NO: 53656 - protein, 540 aa, Homo sapiens
MPFAEDKTYKYICRNFSNFCNVDVVEILPYLPCLTARDQDRLRATCTLSGNRDTLWHLFNTLQRRPGWVEYFIAALRGCELVDLADEVASVYQSYQPRTSDRPPDPLEPPSLPAERPGPPTPAAAHSIPYNSCREKEPSYPMPVQETQAPESPGENSEQALQTLSPRAIPRNPDGGPLESSSDLAALSPLTSSGHQEQDTELGSTHTAGATSSLTPSRGPVSPSVSFQPLARSTPRASRLPGPTGSVVSTGTSFSSSSPGLASAGAAEGKQGAESDQAEPIICSSGAEAPANSLPSKVPTTLMPVNTVALKVPANPASVSTVPSKLPTSSKPPGAVPSNALTNPAPSKLPINSTRAGMVPSKVPTSMVLTKVSASTVPTDGSSRNEETPAAPTPAGATGGSSAWLDSSSENRGLGSELSKPGVLASQVDSPFSGCFEDLAISASTSLGMGPCHGPEENEYKSEGTFGIHVAENPSIQLLEGNPGPPADPDGGPRPQADRKFQEREVPCHRPSPGALWLQVAVTGVLVVTLLVVLYRRRLH

SEQ ID NO: 53657 - protein, 330 aa, Homo sapiens
MAAAAGRSLLLLLSSRGGGGGGAGGCGALTAGCFPGLGVSRHRQQQHHRTVHQRIASWQNLGAVYCSTVVPSDDVTVVYQNGLPVISVRLPSRRERCQFTLKPISDSVGVFLRQLQEEDRGIDRVAIYSPDGVRVAASTGIDLLLLDDFKLVINDLTYHVRPPKRVEMGFCHVGQNGFELLTSSYLPASASQSAEIIAVRIEISRKAEKRTTLVLWGGLAYMATQFGILARLTWWEYSWDIMEPVTYFITYGSAMAMYAYFVMTRQEYVYPEARDRQYLLFFHKGAKKSRFDLEKYNQLKDAIAQAEMDLKRLRDPLQVHLPLRQIGEKD

SEQ ID NO: 53658 - protein, 351 aa, Homo sapiens
MAAAAGRSLLLLLSSRGGGGGGAGGCGALTAGCFPGLGVSRHRQQQHHRTVHQRIASWQNLGAVYCSTVVPSDDVTVVYQNGLPVISVRLPSRRERCQFTLKPISDSVGVFLRQLQEEDRGIDRVAIYSPDGVRVAASTGIDLLLLDDFKLVINDLTYHVRPPKRDLLSHENAATLNDVKTLVQQLYTTLCIEQHQLNKERELIERLEDLKEQLAPLEKVRIEISRKAEKRTTLVLWGGLAYMATQFGILARLTWWEYSWDIMEPVTYFITYGSAMAMYAYFVMTRQEYVYPEARDRQYLLFFHKGAKKSRFDLEKYNQLKDAIAQAEMDLKRLRDPLQVHLPLRQIGEKD

SEQ ID NO: 53659 - protein, 302 aa, Homo sapiens
MVHQRIASWQNLGAVYCSTVVPSDDVTVVYQNGLPVISVRLPSRRERCQFTLKPISDSVGVFLRQLQEEDRGIDRVAIYSPDGVRVAASTGIDLLLLDDFKLVINDLTYHVRPPKRDLLSHENAATLNDVKTLVQQLYTTLCIEQHQLNKERELIERLEDLKEQLAPLEKVRIEISRKAEKRTTLVLWGGLAYMATQFGILARLTWWEYSWDIMEPVTYFITYGSAMAMYAYFVMTRQEYVYPEARDRQYLLFFHKGAKKSRFDLEKYNQLKDAIAQAEMDLKRLRDPLQVHLPLRQIGEKD

SEQ ID NO: 53660 - protein, 303 aa, Homo sapiens
MADAASQVLLGSGLTILSQPLMYVKVLIQVGYEPLPPTIGRNIFGRQVCQLPGLFSYAQHIASIDGRRGLFTGLTPRLCSGVLGTVVHGKVLQHYQESDKGEELGPGNVQKEVSSSFDHVIKETTREMIARSAATLITHPFHVITLRSMVQFIGRESKYCGLCDSIITIYREEGILGFFAGLVPRLLGDILSLWLCNSLAYLVNTYALDSGVSTMNEMKSYSQAVTGFFASMLTYPFVLVSNLMAVNNCGLAGGCPPYSPIYTSWIDCWCMLQKEGNMSRGNSLFFRKVPFGKTYCCDLKMLI

SEQ ID NO: 53661 - protein, 155 aa, Homo sapiens
MVQFIGRESKYCGLCDSIITIYREEGILGFFAGLVPRLLGDILSLWLCNSLAYLVNTYALDSGVSTMNEMKSYSQAVTGFFASMLTYPFVLVSNLMAVNNCGLAGGCPPYSPIYTSWIDCWCMLQKEGNMSRGNSLFFRKVPFGKTYCCDLKMLI

SEQ ID NO: 53662 - protein, 119 aa, Homo sapiens
MVLPLPWLSRYHFLRLLLPSWSLAPQGSHGCCSQNPKASMEEQTSSRGNGKMTSPPRGPGTHRTAELARAEELLEQQLELYQALLEGQEGAWEAQALVLKIQKLKEQMRRHQESLGGGA

SEQ ID NO: 53663 - protein, 119 aa, Homo sapiens
MVLPLPWLSRYHFLRLLLPSWSLAPQGSHGCCSQNPKASMEEQTNSRGNGKMTSPPRGPGTHRTAELARAEELLEQQLELYQALLEGQEGAWEAQALVLKIQKLKEQMRRHQESLGGGA

SEQ ID NO: 53664 - protein, 119 aa, Homo sapiens; identical to SEQ ID NO: 53663

SEQ ID NO: 53665 - protein, 119 aa, Homo sapiens; identical to SEQ ID NO: 53662

SEQ ID NO: 53666 - protein, 119 aa, Homo sapiens; identical to SEQ ID NO: 53662

SEQ ID NO: 53667 - protein, 119 aa, Homo sapiens [sequence omitted]

SEQ ID NO: 53668 - protein, 119 aa, Homo sapiens; identical to SEQ ID NO: 53663

SEQ ID NO: 53669 - protein, 119 aa, Homo sapiens; identical to SEQ ID NO: 53663

SEQ ID NO: 53670 - protein, 352 aa, Homo sapiens
MESGGRPSLCQFILLGTTSVVTAALYSVYRQKARVSQELKGAKKVHLGEDLKSILSEAPGKCVPYAVIEGAVRSVKETLNSQFVENCKGVIQRLTLQEHKMVWNRTTHLWNDCSKIIHQRTNTVPFDLVPHEDGVDVAVRVLKPLDSVDLGLETVYEKFHPSIQSFTDVIGHYISGERPKGIQETEEMLKVGATLTGVGELVLDNNSVRLQPPKQGMQYYLSSQDFDSLLQRQESSVRLWKVLALVFGFATCATLFFILRKQYLQRQERLRLKQMQEEFQEHEAQLLSRAKPEDRESLKSACVVCLSSFKSCVFLECGHVCSCTECYRALPEPKKCPICRQAITRVIPLYNS

SEQ ID NO: 53671 - protein, 713 aa, Homo sapiens
MLCVGRLGGLGARAAALPPRRAGRGSLEAGIRARRVSTSWSPVGAAFNVKPQGSRLDLFGERRGLFGVPELSAPEGFHIAQEKALRKTELLVDRACSTPPGPQTVLIFDELSDSLCRVADLADFVKIAHPEPAFREAAEEACRSIGTMVEKLNTNVDLYQSLQKLLADKKLVDSLDPETRRVAELFMFDFEISGIHLDKEKRKRAVDLNVKILDLSSTFLMGTNFPNKIEKHLLPEHIRRNFTSAGDHIIIDGLHAESPDDLVREAAYKIFLYPNAGQLKCLEELLSSRDLLAKLVGYSTFSHRALQGTIAKNPETVMQFLEKLSDKLSERTLKDFEMIRGMKMKLNPQNSEVMPWDPPYYSGVIRAERYNIEPSLYCPFFSLGACMEGLNILLNRLLGISLYAEQPAKGEVWSEDVRKLAVVHESEGLLGYIYCDFFQRADKPHQDCHFTIRGGRLKEDGDYQLPVVVLMLNLPRSSRSSPTLLTPSMMENLFHEMGHAMHSMLGRTRYQHVTGTRCPTDFAEVPSILMEYFANDYRVVNQFARHYQTGQPLPKNMVSRLCESKKVCAAADMQLQVFYATLDQIYHGKHPLRNSTTDILKETQEKFYGLPYVPNTAWQLRFSHLVGYGARYYSYLMSRAVASMVWKECFLQDPFNRAAGERYRREMLAHGGGREPMLMVEGMLQKCPSVDDFVSALVSDLDLDFETFLMDSE

SEQ ID NO: 53672 - protein, 389 aa, Homo sapiens
MRVLVRRCWGPPLAHGARRGRPSPQWRALARLGWEDCRDSRVREKPPWRVLFFGTDQFAREALRALHAARENKEEELIDKLEVVTMPSPSPKGLPVKQYAVQSQLPVYEWPDVGSGEYDVGVVASFGRLLNEALILKFPYGILNVHPSCLPRWRGPAPVIHTVLHGDTVTGVTIMQIRPKRFDVGPILKQETVPVPPKSTAKELEAVLSRLGANMLISVLKNLPESLSNGRQQPMEGATYAPKISAGTSCIKWEEQTSEQIFRLYRAIGNIIPLQTLWMANTIKLLDLVEVNSSVLADPKLTGQALIPGSVIYHKQSQILLVYCKDGWIGVRSVMLKKSLTATDFYNGYLHPWYQKNSQAQPSQCRFQTLRLPTKKKQKKTVAMQQCIE

SEQ ID NO: 53673 - protein, 389 aa, Homo sapiens; identical to SEQ ID NO: 53672

SEQ ID NO: 53674 - protein, 582 aa, Homo sapiens
MAVPGVGLLTRLNLCARRRTRVQRPIVRLLSCPGTVAKDLRRDEQPSGSVETGFEDKIPKRRFSEMQNERREQAQRTVLIHCPEKISENKFLKYLSQFGPINNHFFYESFGLYAVVEFCQKESIGSLQNGTHTPSTAMETAIPFRSRFFNLKLKNQTSERSRVRSSNQLPRSNKQLFELLCYAESIDDQLNTLLKEFQLTEENTKLRYLTCSLIEDMAAAYFPDCIVRPFGSSVNTFGKLGCDLDMFLDLDETRNLSAHKISGNFLMEFQVKNVPSERIATQKILSVLGECLDHFGPGCVGVQKILNARCPLVRFSHQASGFQCDLTTNNRIALTSSELLYIYGALDSRVRALVFSVRCWARAHSLTSSIPGAWITNFSLTMMVIFFLQRRSPPILPTLDSLKTLADAEDKCVIEGNNCTFVRDLSRIKPSQNTETLELLLKEFFEYFGNFAFDKNSINIRQGREQNKPDSSPLYIQNPFETSLNISKNVSQSQLQKFVDLARESAWILQQEDTDRPSISSNRPWGLVSLLLPSAPNRKSFTKKKSNKFAIETVKNLLESLKGNRTENFTKTSGKRTISTQT

SEQ ID NO: 53675 - protein, 712 aa, Homo sapiens
MAWAKKVGGRAGQGRSLSRCDPIILDPEWLYGPPEGEGGPEGVGGETRASIHPPLRTGRHHQKVNHNIRGPEGSAKDAAPGGGGHHQAGPGQRGDEDGALQHLCGGGGGVGVSVGRGTGTSVAAEHPSLQVKLLELQELVLRLAGDHNEGHGKFLAAAQNPADDPAPGAPAPQELGAADKQGGFEDKIPKRRFSEMQNERREQAQRTVLIHCPEKISENKFLKYLSQFGPINNHFFYESFGLYAVVEFCQKESIGSLQNGTHTPSTAMETAIPFRSRFFNLKLKNQTSERSRVRSSNQLPRSNKQLFELLCYAESIDDQLNTLLKEFQLTEENTKLRYLTCSLIEDMAAAYFPDCIVRPFGSSVNTFGKLGCDLDMFLDLDETRNLSAHKISGNFLMEFQVKNVPSERIATQKILSVLGECLDHFGPGCVGVQKILNARCPLVRFSHQASGFQCDLTTNNRIALTSSELLYIYGALDSRVRALVFSVRCWARAHSLTSSIPGAWITNFSLTMMVIFFLQRRSPPILPTLDSLKTLADAEDKCVIEGNNCTFVRDLSRIKPSQNTETLELLLKEFFEYFGNFAFDKNSINIRQGREQNKPDSSPLYIQNPFETSLNISKNVSQSQLQKFVDLARESAWILQQEDTDRPSISSNRPWGLVSLLLPSAPNRKSFTKKKSNKFAIETVKNLLESLKGNRTENFTKTSGKRTISTQT

SEQ ID NO: 53676 - protein, 219 aa, Homo sapiens
MQNERREQAQRTVLIHCPEKISENKFLKYLSQFGPINNHFFYESFGLYAVVEFCQKESIGSLQNGTHTPSTAMETAIPFRSRFFNLKLKNQTSERSRVRSSNQLPRSNKQLFELLCYAESIDDQLNTLLKEFQLTEENTKLRYLTCSLIEDMAAAYFPDCIVRPFGSSVNTFGKLGCDLDMFLDLDETRNLSAHKISGNFLMEFQVKNVPSERIATQKI

SEQ ID NO: 53677 - protein, 150 aa, Homo sapiens
DLRRDEQPSGSVETGFEDKIPKRRFSEMQNERREQAQRTVLIHCPEKISENKFLKYLSQFGPINNHFFYESFGLYAVVEFCQKESIGSLQNGTHTPSTAMETAIPFRSRFFNLKLKNQTSERSRVRSSNQLPRSNKQLFELLCYAESVSF

SEQ ID NO: 53678 - protein, 102 aa, Homo sapiens
MFLTALLWRGRIPGRQWIGKHRRPRFVSLRAKQNMIRRLEIEAENHYWLSMPYMTREQERGHAAVRRREAFEAIKAAATSKFPPHRFIADQLDHLNVTKKWS

SEQ ID NO: 53679 - protein, 325 aa, Homo sapiens
MAAAVRCMGRALIHHQRHSLSKMVYQTSLCSCSVNIRVPNRHFAAATKSAKKTKKGAKEKTPDEKKDEIEKIKAYPYMEGEPEDDVYLKRLYPRQIYEVEKAVHLLKKFQILDFTSPKQSVYLDLTLDMALGKKKNVEPFTSVLSLPYPFASEINKVAVFTENASEVKIAEENGAAFAGGTSLIQKIWDDEIVADFYVAVPEIMPELNRLRKKLNKKYPKLSRNSIGRDIPKMLELFKNGHEIKVDEERENFLQTKIATLDMSSDQIAANLQAVINEVCRHRPLNLGPFVVRAFLRSSTSEGLLLKIDPLLPKEVKNEESEKEDA

SEQ ID NO: 53680 - protein, 302 aa, Homo sapiens
MVYQTSLCSCSVNIRVPNRHFAAATKSAKKTKKGAKEKTPDEKKDEIEKIKAYPYMEGEPEDDVYLKRLYPRQIYEVEKAVHLLKKFQILDFTSPKQSVYLDLTLDMALGKKKNVEPFTSVLSLPYPFASEINKVAVFTENASEVKIAEENGAAFAGGTSLIQKIWDDEIVADFYVAVPEIMPELNRLRKKLNKKYPKLSRNSIGRDIPKMLELFKNGHEIKVDEERENFLQTKIATLDMSSDQIAANLQAVINEVCRHRPLNLGPFVVRAFLRSSTSEGLLLKIDPLLPKEIKSQPKKKKN

SEQ ID NO: 53681 - protein, 271 aa, Homo sapiens
MISAHCNLHLPGSSDSPASASQVAGITGRLPTLQTVRYGSKAVTRHRRVMHFQRQKLMAVTEYIPPKPAIHPSCLPSPPSPPQEEIGLIRLLRREIAAVFQDNRMIAVCQNVALSAEDKLLMRHQLRKHKILMKVFPNQVLKPFLEDSKYQNLLPLFVGHNMLLVSEEPKVKEMVRILRTVPFLPLLGGCIDDTILSRQGFINYSKLPSLPLVQGELVGGLTCLTAQTHSLLQHQPLQLTTLLDQYIREQREKDSVMSANGKPDPDTVPDS

SEQ ID NO: 53682 - protein, 261 aa, Homo sapiens [sequence omitted]

SEQ ID NO: 53683 - protein, 271 aa, Homo sapiens; identical to SEQ ID NO: 53681

SEQ ID NO: 53684 - protein, 192 aa, Homo sapiens [sequence omitted]

SEQ ID NO: 53685 - protein, 181 aa, Homo sapiens
MSKLGRAARGLRKPEVGGVIRAIVRAGLAMPGPPLGPVLGQRGVSINQFCKEFNERTKDIKEGIPLPTKILVKPDRTFEIKIGQPTVSYFLKAAAGIEKGARQTGKEVAGLVTLKHVYEIARIKAQDEAFALQDVPLSSVVRSIIGSARSLGIRVVKERCSANVLRNGKISMKDPSGRSSV

SEQ ID NO: 53686 - protein, 166 aa, Homo sapiens
MSKLGRAARGLRKPERGVSINQFCKEFNERTKDIKEGIPLPTKILVKPDRTFEIKIGQPTVSYFLKAAAGIEKGARQTGKEVAGLVTLKHVYEIARIKAQDEAFALQDVPLSSVVRSIIGSARSLGIRVVKDLSSEELAAFQKERAIFLAAQKEADLAAQEEAAKK

SEQ ID NO: 53687 - protein, 296 aa, Homo sapiens
MAAEARVSRWYFGGLASCGAACCTHPLDLLKVHLQTQQEVKLRMTGMALRVVRTDGILALYSGLSASLCRQMTYSLTRFAIYETVRDRVAKGSQGPLPFHEKVLLGSVSGLAGGFVGTPADLVNVRMQNDVKLPQGQRRNYAHALDGLYRVAREEGLRRLFSGATMASSRGALVTVGQLSCYDQAKQLVLSTGYLSDNIFTHFVASFIAAAGDEPPPQGGCATFLCQPLDVLKTRLMNSKGEYQGVFHCAVETAKLGPLAFYKGLVPAGIRLIPHTVLTFVFLEQLRKNFGIKVPS

SEQ ID NO: 53688 - protein, 178 aa, Homo sapiens
MLPAAARPLWGPCLGLRAAAFRLARRQVPCVCAVRHMRSSGHQRCEALAGAPLDNAPKEYPPKIQQLVQDIASLTLLEISDLNELLKKTLKIQDVGLVPMGGVMSGAVPAAAAQEAVEEDIPIAKERTHFTVRLTEAKPVDKVKLIKEIKNYIKASTSSRQRSWWSPCPGNQSQCRQS

SEQ ID NO: 53689 - protein, 198 aa, Homo sapiens [sequence omitted]

SEQ ID NO: 53690 - protein, 287 aa, Homo sapiens
MAAEARVSRWYFGGLASCGAACCTHPLDLLKVHLQTQQEVKLRMTGMALRVVRTDGILALYSGLSASLCRQMTYSLTRFAIYETVRDRVAKGSQGPLPFHEKVLLGSVSGLAGGFVGTPADLVNVRMQNDVKLPQGQRRNYAHALDGLYRVAREEGLRRLFSGATMASSRGALVTVGQLSCYDQAKQLVLSTGYLSDNIFTHFVASFIAGGCATFLCQPLDVLKTRLMNSKGEYQGVFHCAVETAKLGPLAFYKGLVPAGIRLIPHTVLTFVFLEQLRKNFGIKVPS

SEQ ID NO: 53691 - protein, 442 aa, Homo sapiens
MLPAAARPLWGPCLGLRAAAFRLARRQVPCVCAVRHMRSSGHQRCEALAGAPLDNAPKEYPPKIQQLVQDIASLTLLEISDLNELLKKTLKIQDVGLVPMGGVMSGAVPAAAAQEAVEEDIPIAKERTHFTVRLTEAKPVDKVKLIKEIKNYIQGINLVQAKKLVESLPQEIKANVAKAEAEKIKAALEATQQEVKLRMTGMALRVVRTDGILALYSGLSASLCRQMTYSLTRFAIYETVRDRVAKGSQGPLPFHEKVLLGSVSGLAGGFVGTPADLVNVRMQNDVKLPQGQRRNYAHALDGLYRVAREEGLRRLFSGATMASSRGALVTVGQLSCYDQAKQLVLSTGYLSDNIFTHFVASFIAGGCATFLCQPLDVLKTRLMNSKGEYQGVFHCAVETAKLGPLAFYKGLVPAGIRLIPHTVLTFVFLEQLRKNFGIKVPS

SEQ ID NO: 53692 - protein, 244 aa, Homo sapiens
MTGMALRVVRTDGILALYSGLSASLCRQMTYSLTRFAIYETVRDRVAKGSQGPLPFHEKVLLGSVSGLAGGFVGTPADLVNVRMQNDVKLPQGQRRNYAHALDGLYRVAREEGLRRLFSGATMASSRGALVTVGQLSCYDQAKQLVLSTGYLSDNIFTHFVASFIAGGCATFLCQPLDVLKTRLMNSKGEYQGVFHCAVETAKLGPLAFYKGLVPAGIRLIPHTVLTFVFLEQLRKNFGIKVPS

SEQ ID NO: 53693 - protein, 145 aa, Homo sapiens [sequence omitted]

SEQ ID NO: 53694 - protein, 296 aa, Homo sapiens [sequence omitted]

SEQ ID NO: 53695 - protein, 251 aa, Homo sapiens [sequence omitted]

SEQ ID NO: 53696 - protein, 175 aa, Homo sapiens [sequence omitted]

SEQ ID NO: 53697 - protein, 180 aa, Homo sapiens [sequence omitted]

SEQ ID NO: 53698 - protein, 292 aa, Homo sapiens [sequence omitted]

SEQ ID NO: 53699 - protein, 292 aa, Homo sapiens [sequence omitted]

SEQ ID NO: 53700 - protein, 79 aa, Homo sapiens
KVPVNELKVKMKPKPWSKRWERPNFNIKGIRFDLCLTEQQMKEAQKWNQPWLEFDMMREYDTSKIEAAIWKEIEASKRS

SEQ ID NO: 53701 - protein, 305 aa, Homo sapiens [sequence omitted]

SEQ ID NO: 53702 - protein, 149 aa, Homo sapiens
MVFLTAQLWLRNRVTDRYFRIQEVLKHARHFRGRKNRCYRLAVRTVIRAFVKCTKARYLKKKNMRTLWINRITAASQEHGLKYPALIGNLVKCQVELNRKVLADLAIYEPKTFKSLAALASRRRHEGFAAALGDGKEPEGIFSRVVQYH

SEQ ID NO: 53703 - protein, 205 aa, Homo sapiens
MAASSLTVTLGRLASACSHSILRPSGPGAASLWSASRRFNSQSTSYLPGYVPKTSLSSPPWPEVVLPDPVEETRHHAEVVKKVNEMIVTGQYGRLFAVVHFASRQWKVTSEDLILIGNELDLACGERIRLEKVLLVGADNFTLLGKPLLGKDLVRVEATVIEKTESWPRIIMRFRKRKNFKKKRIVTTPQTVLRINSIEIAPCLL

SEQ ID NO: 53704 - protein, 280 aa, Homo sapiens
MAASSLTVTLGRLASACSHSILRPSGPGAASLWSASRRFNSQSTSYLPGYVPKTSLSSPPWPEVVLPDPVEETRHHAEVVKKVNEMIVTGQYGRLFAVVHFASRQWKVTSEDLILIGNELDLACGERIRLEKVLLVGADNFTLLGKPLLGKDLVRVEATVIEKTESWPRIIMRFRKRKNFKKKRSKLEKVPLGPVARCWLPRRMRTEGVGHVGLGTGSPGRSQPGCHCPLATLILEGAPRGSSLAPLLLHAPRVTPPRSPSPPRSARDPTSLPFSSTLRA

SEQ ID NO: 53705 - protein, 120 aa, Homo sapiens
MIVTGQYGRLFAVVHFASRQWKVTSEDLILIGNELDLACGERIRLEKVLLVGADNFTLLGKPLLGKDLVRVEATVIEKTESWPRIIMRFRKRKNFKKKRIVTTPQTVLRINSIEIAPCLL

SEQ ID NO: 53706 - protein, 126 aa, Homo sapiens
MWYLAKLIRGMSIDQALAQLEFNDKKGAKIIKEVLLEAQDMAVRDHNVEFRSNLYIAESTSGRGQCLKRIRYHGRGRFGIMEKVYCHYFVKLVEGPPPPPEPPKTAVAHAKEYIQQLRSRTIVHTL

SEQ ID NO: 53707 - protein, 232 aa, Homo sapiens
MAAAVLGQLGKDFLVVKRQKGVEMESELTACVDVAGALWIHNLRSRGKLALGVLPQSYIHTSASLDISRKWEKKNKIVYPPQLPGEPRRPAEIYHCRRQIKYSKDKMWYLAKLIRGMSIDQALAQLEFNDKKGAKIIKEVLLEAQDMAVRDHNVEFRSNLYIAESTSGRGQCLKRIRYHGRGRFGIMEKVYCHYFVKLVEGPPPPPEPPKTAVAHAKEYIQQLRSRTIVHTL

SEQ ID NO: 53708 - protein, 212 aa, Homo sapiens
MAAAVLGQLGALWIHNLRSRGKLALGLLSFHSVLPQSYIHTSASLDISRKWEKKNKIVYPPQLPGEPRRPAEIYHCRRQIKYSKDKMWYLAKLIRGMSIDQALAQLEFNDKKGAKIIKEVLLEAQDMAVRDHNVEFRSNLYIAESTSGRGQCLKRIRYHGRGRFGIMEKVYCHYFVKLVEGPPPPPEPPKTAVAHAKEYIQQLRSRTIVHTL

SEQ ID NO: 53709 - protein, 206 aa, Homo sapiens
MAAAVLGQLGALWIHNLRSRGKLALGVLPQSYIHTSASLDISRKWEKKNKIVYPPQLPGEPRRPAEIYHCRRQIKYSKDKMWYLAKLIRGMSIDQALAQLEFNDKKGAKIIKEVLLEAQDMAVRDHNVEFRSNLYIAESTSGRGQCLKRIRYHGRGRFGIMEKVYCHYFVKLVEGPPPPPEPPKTAVAHAKEYIQQLRSRTIVHTL

SEQ ID NO: 53710 - protein, 153 aa, Homo sapiens
MARNVVYPLYRLGGPQLRVFRTNFFIQLVRPGVAQPEDTVQFRIPMEMTRVDLRNYLEGIYNVPVAAVRTRVQHGSNKRRDHRNVRIKKPDYKVAYVQLAHGQTFTFPDLFPEKDESPEGSAADDLYSMLEEERQQRQSSDPRRGGVPSWFGL

SEQ ID NO: 53711 - protein, 153 aa, Homo sapiens; identical to SEQ ID NO: 53710

SEQ ID NO: 53712 - protein, 216 aa, Homo sapiens
MRLSALLALASKVTLPPHYRYGMSPPGSVADKRKNPPWIRRRPVVVEPISDEDWYLFCGDTVEILEGKDAGKQGKVVQVIRQRNWVVVGGLNTHYRYIGKTMDYRGTMIPSEAPLLHRQVKLVDPMDRKPTEIEWRFTEAGERVRVSTRSGRIIPKPEFPRADGIVPETWIDGPKDTSVEDALERTYVPCLKTLQEEVMEAMGIKETRKYKKVYWY

SEQ ID NO: 53713 - protein, 216 aa, Homo sapiens; identical to SEQ ID NO: 53712

SEQ ID NO: 53714 - protein, 99 aa, Homo sapiens
MRLSALLALASKVTLPPHYRYGMSPPGSVADKRKNPPWIRRRPVVVEPISDEDWYLFCGDTVEILEGKDAGKQGKVVQVIRQRNWVVVGGLNTHYRYIG

SEQ ID NO: 53715 - protein, 68 aa, Homo sapiens
MRLSALLALASKVTLPPHYRYGMSPPGSVADKRKNPPWIRRRPVVVEPISDEDWYLFCGDTVEILEGK

SEQ ID NO: 53716 - protein, 173 aa, Homo sapiens
MRLSALLALASKVTLPPHYRYGMSPPGSVADKRKNPPWIRRRPVVVEPISDEDWYLFCGDTVEILEGKDAGKQGKVVQVIRQRNWVVVGGLNTHYRYIGKTMDYRGTMIPSEAPLLHRQVKLVDPMDRKPTEIEWRFTEAGERVRVSTRSGRIIPKPEFPRADGIVPETWIDG

SEQ ID NO: 53717 - protein, 148 aa, Homo sapiens
MASVVLALRTRTAVTSLLSPTPATALAVRYASKKSGGSSKNLGGKSSGRRQGIKKMEGHYVHAGNIIATQRHFRWHPGAHVGVGKNKCLYALEEGIVRYTKEVYVPHPRNTEAVDLITRLPKGAVLYKTFVHVVPAKPEGTFKLVAML

SEQ ID NO: 53718 - protein, 94 aa, Homo sapiens
MASVVLALRTRTAVTSLLSPTPATALAVRYASKKSGGSSKNLGGKSSGRRQGIKKMEGHYVHAGNIIATQRHFRWHPGAHVSCSVAAPLFPFLG

SEQ ID NO: 53719 - protein, 93 aa, Homo sapiens
MEGHYVHAGNIIATQRHFRWHPGAHVGVGKNKCLYALEEGIVRYTKEVYVPHPRNTEAVDLITRLPKGAVLYKTFVHVVPAKPEGTFKLVAML

SEQ ID NO: 53720 - protein, 93 aa, Homo sapiens; identical to SEQ ID NO: 53719

SEQ ID NO: 53721 - protein, 256 aa, Homo sapiens
MPLHKYPVWLWKRLQLREGICSRLPGHYLRSLEEERTPTPVHYRPHGAKFKINPKNGQRERVEDVPIPIYFPPESQRGLWGGEGWILGQIYANNDKLSKRLKKVWKPQLFEREFYSEILDKKFTVTVTMRTLDLIDEAYGLDFYILKTPKEDLCSKFGMDLKRGMLLRLARQDPQLHPEDPERRAAIYDKYKEFAIPEEEAEWVGLTLEEAIEKQRLLEEKDPVPLFKIYVAELIQQLQQQALSEPAVVQKRASGQ

SEQ ID NO: 53722 - protein, 256 aa, Homo sapiens; identical to SEQ ID NO: 53721

SEQ ID NO: 53723 - protein, 256 aa, Homo sapiens
MPLHKYPVWLWKRLQLREGICSRLPGHYLRSLEEERTPTPVHYRPHGAKFKINPKNGQRERVEDVPIPIYFPPESQRGLWGGEGWILGQIYANNDKLSKRLKKVWKPQLFEREFYSEILDKKFTVTVTMRTLDLIDEAYGLDFYILKASGEDLCSKFGMDLKRGMLLRLARQDPQLHPEDPERRAAIYDKYKEFAIPEEEAEWVGLTLEEAIEKQRLLEEKDPVPLFKIYVAELIQQLQQQALSEPAVVQKRASGQ

SEQ ID NO: 53724 - protein, 256 aa, Homo sapiens; identical to SEQ ID NO: 53723

SEQ ID NO: 53725 - protein, 48 aa, Homo sapiens
MSRAGGRGEQSRWGRRAELRGLGRPEAPLRLGPDVCGSVPCARGAGSE

SEQ ID NO: 53726 - protein, 240 aa, Homo sapiens
MPLHKYPVWLWKRLQLREGICSRLPGHYLRSLEEERTPTPVHYRPHGAKFKINPKNGQRERVEDVPIPIYFPPESQRGLWGGEGWILGQIYANNDKLSKRLKKVWKPQLFEREFYSEILDKKFTVTVTMRTLDLIDEAYGLDFYILKTPKEDLCSKFGMDLKRGMLLRLARQDPQLHPEDPERRAAIYDKYKEFAIPEEEAEWVGLTLEEAIEKQRLLEEKDPVPLFKIYVAELIQQLQQ

SEQ ID NO: 53727 - protein, 218 aa, Homo sapiens
MPLHKYPVWLWKRLQLREGICSRLPGHYLRSLEEERTPTPVHYRPHGAKFKINPKNGQRERVEDVPIPIYFPPESQRGLWGGEGWILGQIYANNDKLSKRLKKVWKPQLFEREFYSEILDKKFTVTVTMRTLDLIDEAYGLDFYILKTPKEDLCSKFGMDLKRGMLLRLARQDPQLHPEDPERRAAIYDKYKEFAIPEEEAEWVGLTLEEAIEKQRLL

SEQ ID NO: 53728 - protein, 194 aa, Homo sapiens
MPLHKYPVWLWKRLQLREGICSRLPGHYLRSLEEERTPTPVHYRPHGAKFKINPKNGQRERVEDVPIPIYFPPESQRGLWGGEGWILGQIYANNDKLSKRLKKVWKPQLFEREFYSEILDKKFTVTVTMRTLDLIDEAYGLDFYILKTPKEDLCSKFGMDLKRGMLLRLARQDPQLHPEDPERRAAIYDKYKEF

SEQ ID NO: 53729 - protein, 348 aa, Homo sapiens [sequence omitted]

SEQ ID NO: 53730 - protein, 375 aa, Homo sapiens
MPGWRLLTQVGAQVLGRLGDGLGAALGPGNRVTTNSLNVSLIRRNVGSEEKVGDLKKRTHIWLFVRGLHGKSGTWWDEHLSEENVPFIKQLVSDEDKAQLASKLCPLKDEPWPIHPWEPGSFRVGLIALKLGMMPLWTKDGQKHVVTLLQVQDCHVLKYTSKENCNGKMATLSVGGKTVSRFRKATSILEFYRELGLPPKQTVKIFNITDNAAIKPGTPLYAAHFRPGQYVDVTAKTIGKGFQGVMKRWGFKGQPATHGQTKTHRRPGAVATGDIGRVWPGTKMPGKMGNIYRTEYGLKVWRINTKHNIIYVNGSVPGHKNCLVKVKDSKLPAYKDLGKNLPFPTYFPDGDEEELPEDLYDENVCQPGAPSITFA

SEQ ID NO: 53731 - protein, 363 aa, Homo sapiens
  VARIANT 1: note = MOD_RES - Any amino acid
XFFPSQRASAGDRSGGHCENFPTATASTWRWRGDSLKAERQGARKSTHIWLFVRGLHGKSGTWWDEHLSEENVPFIKQLVSDEDKAQLASKLCPLKDEPWPIHPWEPGSFRVGLIALKLGMMPLWTKDGQKHVVTLLQVQDCHVLKYTSKENCNGKMATLSVGGKTVSRFRKATSILEFYRELGLPPKQTVKIFNITDNAAIKPGTPLYAAHFRPGQYVDVTAKTIGKGFQGVMKRWGFKGQPATHGQTKTHRRPGAVATGDIGRVWPGTKMPGKMGNIYRTEYGLKVWRINTKHNIIYVNGSVPGHKNCLVKVKDSKLPAYKDLGKNLPFPTYFPDGDEEELPEDLYDENVCQPGAPSITFA

SEQ ID NO: 53732 - protein, 161 aa, Homo sapiens
MAGILRLVVQWPPGRLQTVTKGVESLICTDWIRHKFTRSRIPEKVFQASPEDHEKYGGDPQNPHKLHIVTRIKSTRRRPYWEKDIIKMLGLEKAHTPQVHKNIPSVNAKLKVVKHLIRIKPLKLPQGLPAEENMSNTCLKSTGELVVQWHLKPVEQKAHES

SEQ ID NO: 53733 - protein, 161 aa, Homo sapiens; identical to SEQ ID NO: 53732

SEQ ID NO: 53734 - protein, 188 aa, Homo sapiens [sequence omitted]

SEQ ID NO: 53735 - protein, 107 aa, Homo sapiens
MALAMLVLVVSPWSAARGVLRNYWERLLRKLPQSRPGFPSPPWGPALAVQGPAMFTEPANDTSGSKENSSLLDSIFWMAAPKNRRTIEVNRCRRRNPQKLIKVKVMH

SEQ ID NO: 53736 - protein, 92 aa, Homo sapiens [sequence omitted]

SEQ ID NO: 53737 - protein, 170 aa, Homo sapiens
MAASAFAGAVRAASGILRPLNILASSTYRNCVKNASLISALSTGRFSHIQTPVVSSTPRLTTSERNLTCGHTSVILNRMAPVLPSVLKLPVRSLTYFSARKGKRKTVKAVIDRFLRLHCGLWVRRKAGYKKKLWKKTPARKKRLREFVFCNKTQSKLLDKMTTSFWKRRN

SEQ ID NO: 53738 - protein, 188 aa, Homo sapiens [sequence omitted]

SEQ ID NO: 53739 - protein, 103 aa, Homo sapiens [sequence omitted]

SEQ ID NO: 53740 - protein, 103 aa, Homo sapiens [sequence omitted]

SEQ ID NO: 53741 - protein, 103 aa, Homo sapiens [sequence omitted]

SEQ ID NO: 53742 - protein, 103 aa, Homo sapiens [sequence omitted]

SEQ ID NO: 53743 - protein, 416 aa, Homo sapiens
MHFVPWLARPIFPPWDRGYKDPRFYRSPPLHEHPLYKDQACYIFHHRCRLLEGVKQALWLTKTKLIEGLPEKVLSLVDDPRNHIENQDECVLNVISHARLWQTTEEIPKRETYCPVIVDNLIQLCKSQILKHPSLARRICVQNSTFSATWNRESLLLQVRGSGGARLSTKDPLPTIASREEIEATKNHVLETFYPISPIIDLHECNIYDVKNDTGFQEGYPYPYPHTLYLLDKANLRPHRLQPDQLRAKMILFAFGSALAQARLLYGNDAKVLEQPVVVQSVGTDGRVFHFLVFQLNTTDLDCNEGVKNLAWVDSDQLLYQHFWCLPVIKKRVVVTGPCFSKSQMSTSFVLTPSFNAGEEVMQRNLRASASLPPSTGSPASELVKEQEHAAGRVLRRVMLDSETPREELPAADFWK

SEQ ID NO: 53744 - protein, 292 aa, Homo sapiens
MSGACAPRGSRSLLPWIGCTRSLDWSPSPLRGRCTSCPGWRGRSFRPGTAATRTQGSTARPLFTSIRCTKTRPAISFTTVAAFSRSLLLQVRGSGGARLSTKDPLPTIASREEIEATKNHVLETFYPISPIIDLHECNIYDVKNDTGFQEGYPYPYPHTLYLLDKANLRPHRLQPDQLRAKMILFAFGSALAQARLLYGNDAKVLEQPVVVQSVGTDGRVFHFLVFQLNTTDLDCNEGVKNLAWVDSDQLLYQHFWCLPVIKKRVVVEPVGPVGFKPETFRKFLALYLHGAA

SEQ ID NO: 53745 - protein, 423 aa, Homo sapiens [sequence omitted]

SEQ ID NO: 53746 - protein, 264 aa, Homo sapiens
  VARIANT 1: note = MOD_RES - Any amino acid
XSLLLQVRGSGGARLSTKDPLPTIASREEIEATKNHVLETFYPISPIIDLHECNIYDVKNDTGFQEGYPYPYPHTLYLLDKANLRPHRLQPDQLRAKMILFAFGSALAQARLLYGNDAKVLEQPVVVQSVGTDGRVFHFLVFQLNTTDLDCNEGVKNLAWVDSDQLLYQHFWCLPVIKKRVVVTGPCFSKSQMSTSFVLTPSFNAGEEVMQRNLRASASLPPSTGSPASELVKEQEHAAGRVLRRVMLDSETPREELPAADFWK

SEQ ID NO: 53747 - protein, 380 aa, Homo sapiens [sequence omitted]

SEQ ID NO: 53748 - protein, 196 aa, Homo sapiens
MPVYCGNEVTPTEAAQAPEVTYEAEEGSLWTLLLTSLDGHLLEPDAEYLHWLLTNIPGNRVAEGQVTCPYLPPFPARGSGIHRLAFLLFKQDQPIDFSEDARPSPCYQLAQRTFRTFDFYKKHQETMTPAGLSFFQCRWDDSVTYIFHQLLDMREPVFEFVRPPPYHPKQKRFPHRQPLRYLDRYRDSHEPTYGIY

SEQ ID NO: 53749 - protein, 353 aa, Homo sapiens
MEALAMGSRALRLWLVAPGGGIKWRFIATSSASQLSPTELTEMRNDLFNKEKARQLSLTPRTEKIEVKHVGKTDPGTVFVMNKNISTPYSCAMHLSEWYCRKSILALVDGQPWDMYKPLTKSCEIKFLTFKDCDPGEVNKAYWRSCAMMMGCVIERAFKDEYMVNLVRAPEVPVISGAFCYDVVLDSKLDEWMPTKENLRSFTKDAHALIYKDLPFETLEVEAKVALEIFQHSKYKVDFIEEKASQNPERIVKLHRIGDFIDVSEGPLIPRTSICFQYEVSAVHNLQPTQPSLIRRFQGVSLPVHLRAHFTIWDKLLERSRKMTPFPILLLFTTQSFFTTSPESYLLHGTVSE

SEQ ID NO: 53750 - protein, 338 aa, Homo sapiens [sequence omitted]

SEQ ID NO: 53751 - protein, 311 aa, Homo sapiens [sequence omitted]

SEQ ID NO: 53752 - protein, 311 aa, Homo sapiens [sequence omitted]

SEQ ID NO: 53753 - protein, 263 aa, Homo sapiens
MLQFVRAGARAWLRPTGSQGLSSLAEEAARATENPEQVASEGLPEPVLRKVELPVPTHRRPVQAWVESLRGFEQERVGLADLHPDVFATAPRLDILHQVAMWQKNFKRISYAKTKTRAEVRGGGRKPWPQKGTGRARHGSIRSPLWRGGGVAHGPRGPTSYYYMLPMKVRALGLKVALTVKLAQDDLHIMDSLELPTGDPQYLTELAHYRRWGDSVLLVDLTHEEMPQSIVEATSRLKTFNLIPAVGEQRAQAPRVRMCRLRC

SEQ ID NO: 53754 - protein, 263 aa, Homo sapiens; identical to SEQ ID NO: 53753

SEQ ID NO: 53755 - protein, 137 aa, Homo sapiens [sequence omitted]

SEQ ID NO: 53756 - protein, 142 aa, Homo sapiens
MGDVKENYLETFISSPKFGRTCADGALYCVCHKSTYSPLPDDYNCNVELALTSDGRTIVCYHPSVDIPYEHTKPIPRPDPVHNNEETHDQVLKTRLEEKVEHLEEGPMIEQLSKMFFTTKHRWYPHGRYHRCRKNLNPPKDR

SEQ ID NO: 53757 - protein, 142 aa, Homo sapiens
MAVAAVKWVMSKRTILKHLFPVQNGALYCVCHKSTYSPLPDDYNCNVELALTSDGRTIVCYHPSVDIPYEHTKPIPRPDPVHNNEETHDQVLKTRLEEKVEHLEEGPMIEQLSKMFFTTKHRWYPHGRYHRCRKNLNPPKDR

SEQ ID NO: 53758 - protein, 142 aa, Homo sapiens; identical to SEQ ID NO: 53757

SEQ ID NO: 53759 - protein, 142 aa, Homo sapiens; identical to SEQ ID NO: 53757

SEQ ID NO: 53760 - protein, 202 aa, Homo sapiens
MTARGTPSRFLASVLHNGLGRYVQQLQRLSFSVSRDGASSRGAREFVEREVIDFARRNPGVVIYVNSRPCCVPRVVAEYLNGAVREESIHCKSVEEISTLVQKLADQSGLDVIRIRKPFHTDNPSIQGQWHPFTNKPTTFRGLRPREVQDPAPAQDTGLRLSAVAPQILLPGWPDPISVQSSDLPWGNTHYRPEPLSSTTWL

SEQ ID NO: 53761 - protein, 215 aa, Homo sapiens
MTARGTPSRFLASVLHNGLGRYVQQLQRLSFSVSRDGASSRGAREFVEREVIDFARRNPGVVIYVNSRPCCVPRVVAEYLNGAVREESIHCKSVEEISTLVQKLADQSGLDVIRIRKPFHTDNPSIQGQWHPFTNKPTTFRGLRPREVQDPAPAQDTGLRLSAVAPQILLPGWPDPPDLPTVDPISSSLTSAPAPMLSAVSCLPIVPALTTVCSA

SEQ ID NO: 53762 - protein, 159 aa, Homo sapiens
MTARGTPSRFLASVLHNGLGRYVQQLQRLSFSVSRDGASSRGAREFVEREVIDFARRNPGVVIYVNSRPCCVPRVVAEYLNGAVREESIHCKSVEEISTLVQKLADQSGLDVIRIRKPFHTDNPSIQGQWHPFTNKPTTFRGLRPREVQDPAPAQVQAQ

SEQ ID NO: 53763 - protein, 235 aa, Homo sapiens
MTARGTPSRFLASVLHNGLGRYVQQLQRLSFSVSRDGASSRGAREFVEREVIDFARRNPGVVIYVNSRPCCVPRVVAEYLNGAVREESIHCKSVEEISTLVQKLADQSGLDVIRIRKPFHTDNPSIQGQWHPFTNKPTTFRGLRPREVQDPAPAQDAAEFLGEGAGPCWYSIVALPQKHIAIAIHPPQPAGQCHQAIGHWPETVCSCTADPPARLARPNISSVIRSSLGKYPLPS

SEQ ID NO: 53764 - protein, 164 aa, Homo sapiens
MTARGTPSRFLASVLHNGLGRYVQQLQRLSFSVSRDGASSRGAREFVEREVIDFARRNPGVVIYVNSRPCCVPRVVAEYLNGAVREESIHCKSVEEISTLVQKLADQSGLDVIRIRKPFHTDNPSIQGQWHPFTNKPTTFRGLRPREVQDPAPAQCLLLGAVTL

SEQ ID NO: 53765 - protein, 159 aa, Homo sapiens; identical to SEQ ID NO: 53762

SEQ ID NO: 53766 - protein, 184 aa, Homo sapiens
MTARGTPSRFLASVLHNGLGRYVQQLQRLSFSVSRDGASSRGAREFVEREVIDFARRNPGVVIYVNSRPCCVPRVVAEYLNGAVREESIHCKSVEEISTLVQKLADQSGLDVIRIRKPFHTDNPSIQGQWHPFTNKPTTFRGLRPREVQDPAPAQDTGLRLSAVAPQILLPGWPDPTRATRATR

SEQ ID NO: 53767 - protein, 261 aa, Homo sapiens
MTARGTPSRFLASVLHNGLGRYVQQLQRLSFSVSRDGASSRGAREFVEREVIDFARRNPGVVIYVNSRPCCVPRVVAEYLNGAVREESIHCKSVEEISTLVQKLADQSGLDVIRIRKPFHTDNPSIQGQWHPFTNKPTTFRGLRPREVQDPAPAQDAAEFLGEGAGPCWYSIVALPQKHIAIAIHPPQPAGQCHQAIGHWPETVCSCTADPPARLARPTRPPHSGSYLILIDLCSSPYAVRSFLPPDCPCTDHCVLSVKAA

SEQ ID NO: 53768 - protein, 169 aa, Homo sapiens
  VARIANT 1: note = MOD_RES - Any amino acid
XGTPSRFLASVLHNGLGRYVQQLQRLSFSVSRDGASSRGAREFVEREVIDFARRNPGVVIYVNSRPCCVPRVVAEYLNGAVREESIHCKSVEEISTLVQKLADQSGLDVIRIRKPFHTDNPSIQGQWHPFTNKPTTFRGLRPREVQDPAPAQDAAEFLGEGAGPCWTLA

SEQ ID NO: 53769 - protein, 332 aa, Homo sapiens
MASGLVRLLQQGHRCLLAPVAPKLVPPVRGVKKGFRAAFRFQKELERQRLLRCPPPPVRRSEKPNWDYHAEIQAFGHRLQENFSLDLLKTAFVNSCYIKSEEAKRQQLGIEKEAVLLNLKSNQELSEQGTSFSQTCLTQFLEDEYPDMPTEGIKNLVDFLTGEEVVCHVARNLAVEQLTLSEEFPVPPAVLQQTFFAVIGALLQSSGPERTALFIRDFLITQMTGKELFEMWKIINPMGLLVEELKKRNVSAPESRLTRQSGGTTALPLYFVGLYCDKKLIAEGPGETVLVAEEEAARVALRKLYGFTENRRPWNYSKPKETLRAEKSITAS

SEQ ID NO: 53770 - protein, 306 aa, Homo sapiens [sequence omitted]

SEQ ID NO: 53771 - protein, 230 aa, Homo sapiens
MAAAGLALLCRRVSSALKSSRSLITPQVPACTGLLHTTLSRKGLEEFFDDPKNWGQEKVKSGAAWTCQQLRNKSNEDLHKLWYVLLKERNMLLTLEQEAKRQRLPMPSPERLDKVVDSMDALDKVVQEREDALRLLQTGQERARPGAWRRDIFGRIIWHKFKQWVIPWHLNKRYNRKRFFALPYVDHFLRLEREKRARIKARKENLERKKAKILLKKFPHLAEAQKSSLV

SEQ ID NO: 53772 - protein, 140 aa, Homo sapiens
MLLTLEQEAKRQRLPMPSPERLDKVVDSMDALDKVVQEREDALRLLQTGQERARPGAWRRDIFGRIIWHKFKQWVIPWHLNKRYNRKRFFALPYVDHFLRLEREKRARIKARKENLERKKAKILLKKFPHLAEAQKSSLV

SEQ ID NO: 53773 - protein, 250 aa, Homo sapiens
MAAAGLALLCRRVSSALKSSRSLITPQVPACTGFFLSLLPKSTPNVTSFHQYRLLHTTLSRKGLEEFFDDPKNWGQEKVKSGAAWTCQQLRNKSNEDLHKLWYVLLKERNMLLTLEQEAKRQRLPMPSPERLDKVVDSMDALDKVVQEREDALRLLQTGQERARPGAWRRDIFGRIIWHKFKQWVIPWHLNKRYNRKRFFALPYVDHFLRLEREKRARIKARKENLERKKAKILLKKFPHLAEAQKSSLV

SEQ ID NO: 53774 - protein, 212 aa, Homo sapiens [sequence omitted]

SEQ ID NO: 53775 - protein, 194 aa, Homo sapiens
MGLSSCRKTSSGLPLILHYGGILLSISRPYKTKPTHGIGKYKHLIKAEEPKKKKGKVEVRAINLGTDYEYGVLNIHLTAYDMTLAESYAQYVHNLCNSLSIKVEESYAMPTKTIEVLQLQDQGSKMLLDSVLTTHERVVQISGLSATFAEIFLEIIQSSLPEGVRLSVKEHTEEDFKGRFKARPELEELLAKLK

SEQ ID NO: 53776 - protein, 166 aa, Homo sapiens
MAATMFRATLRGWRTGVQRGCGLRLLSQTQGPPDYPRFVESVDEYQFVERLLPATRIPDPPKHEHYPTPSGWQPPRDPPPNLPYFVRRSRMHNIPVYKDITHGNRQMTVIRKVEGDIWALQKDVEDFLSPLLGKTPVTQVNEVTGTLRIKGYFDQELKAWLLEKGF

SEQ ID NO: 53777 - protein, 166 aa, Homo sapiens; identical to SEQ ID NO: 53776

SEQ ID NO: 53778 - protein, 158 aa, Homo sapiens
MAARSVSGITRRVFMWTVSGTPCREFWSRFRKEKEPVVVETVEEKKEPILVCPPLRSRAYTPPEDLQSRLESYVKEVFGSSLPSNWQDISLEDSRLKFNLLAHLADDLGHVVPNSRLHQMCRVRDVLDFYNVPIQDRSKFDELSASNLPPNLKITWSY

SEQ ID NO: 53779 - protein, 135 aa, Homo sapiens
MAARSVSGITRRVFMWTVSGTPCREFWSRFRKEKEPVVVETVEEKKEPILVCPPLRSRAYTPPEDLQSRLESYVKEVFGSSLPSNWQDISLEDSRLKFNLLAHLADDLGHVVPNSRLHQMCRGYSFEEGKIQLGI

SEQ ID NO: 53780 - protein, 128 aa, Homo sapiens
MAGNLLSGAGRRLWDWVPLACRSFSLGVPRLIGIRLTLPPPKVVDRWNEKRAMFGVYDNIGILGNFEKHPKELIRGPIWLRGWKGNELQRCIRKRKMVGSRMFADDLHNLNKRIRYLYKHFNRHGKFR

SEQ ID NO: 53781 - protein, 123 aa, Homo sapiens
MAALGTVLFTGVRRLHCSVAAWAGGQWRLQQGLAANPSGYGPLTELPDWSYADGRPAPPMKGQLRRKAERETFARRVVLLSQEMDAGLQAWQLRQQKLQEEQRKQENALKPKGASLKSPLPSQ

SEQ ID NO: 53782 - protein, 122 aa, Homo sapiens
MAALGTVLFSVRRLHCSVAAWAGGQWRLQQGLAANPSGYGPLTELPDWSYADGRPAPPMKGQLRRKAERETFARRVVLLSQEMDAGLQAWQLRQQKLQEEQRKQENALKPKGASLKSPLPSQ

SEQ ID NO: 53783 - protein, 87 aa, Homo sapiens
MAALGTVLFTGVRRLHCSVAAWAGGQWRLQQGLAANPSGYGPLTELPDWSYAETSCTAVTGNGRWITSMAAQAAEVAGRTKEAGKCS

SEQ ID NO: 53784 - protein, 64 aa, Homo sapiens
MKGQLRRKAERETFARRVVLLSQEMDAGLQAWQLRQQKLQEEQRKQENALKPKGASLKSPLPSQ

SEQ ID NO: 53785 - protein, 64 aa, Homo sapiens; identical to SEQ ID NO: 53784

SEQ ID NO: 53786 - protein, 64 aa, Homo sapiens; identical to SEQ ID NO: 53784

SEQ ID NO: 53787 - protein, 112 aa, Homo sapiens
MAAALARLGLRPVKQVRVQFCPFEKNVESTRTFLQTVSSEKVRSTNLNCSVIADVRHDGSEPCVDVLFGDGHRLIMRGAHLTALEMLTAFASHIRARDAAGSGDKPGADTGR

SEQ ID NO: 53788 - protein, 138 aa, Homo sapiens
MATKRLFGATRTWAGWGAWELLNPATSGRLLARDYAKKPVMKGAKSGKGAVTSEALKDPDVCTDPVQLTTYAMGVNIYKEGQDVPLKPDAEYPEWLFEMNLGPPKTLEELDPESREYWRRLRKQNIWRHNRLSKNKRL

SEQ ID NO: 53789 - protein, 128 aa, Homo sapiens
MAAVGSLLGRLRQSTVKATGPALRRLHTSSWRADSSRASLTRVHRQAYARLYPVLLVKQDGSTIHIRYREPRRMLAMPIDLDTLSPEERRARLRKREAQLQSRKEYEQELSDDLHVERYRQFWTRTKK

SEQ ID NO: 53790 - protein, 128 aa, Homo sapiens; identical to SEQ ID NO: 53789

SEQ ID NO: 53791 - protein, 128 aa, Homo sapiens; identical to SEQ ID NO: 53789

SEQ ID NO: 53792 - protein, 128 aa, Homo sapiens; identical to SEQ ID NO: 53789

SEQ ID NO: 53793 - protein, 164 aa, Homo sapiens
MAAVGSLLGLAASSWLGGQNASDHSLWLLRKPRGSSCPGTGHQLCRLRQSTVKATGPALRRLHTSSWRADSSRASLTRVHRQAYARLYPVLLVKQDGSTIHIRYREPRRMLAMPIDLDTLSPEERRARLRKREAQLQSRKEYEQELSDDLHVERYRQFWTRTKK

SEQ ID NO: 53794 - protein, 125 aa, Homo sapiens
MAAVGSLLGQSTVKATGPALRRLHTSSWRADSSRASLTRVHRQAYARLYPVLLVKQDGSTIHIRYREPRRMLAMPIDLDTLSPEERRARLRKREAQLQSRKEYEQELSDDLHVERYRQFWTRTKK

SEQ ID NO: 53795 - protein, 128 aa, Homo sapiens; identical to SEQ ID NO: 53789

SEQ ID NO: 53796 - protein, 128 aa, Homo sapiens; identical to SEQ ID NO: 53789

SEQ ID NO: 53797 - protein, 128 aa, Homo sapiens; identical to SEQ ID NO: 53789

SEQ ID NO: 53798 - protein, 128 aa, Homo sapiens; identical to SEQ ID NO: 53789

SEQ ID NO: 53799 - protein, 164 aa, Homo sapiens; identical to SEQ ID NO: 53793

SEQ ID NO: 53800 - protein, 128 aa, Homo sapiens; identical to SEQ ID NO: 53789

SEQ ID NO: 53801 - protein, 128 aa, Homo sapiens; identical to SEQ ID NO: 53789

SEQ ID NO: 53802 - protein, 128 aa, Homo sapiens; identical to SEQ ID NO: 53789

SEQ ID NO: 53803 - protein, 128 aa, Homo sapiens; identical to SEQ ID NO: 53789

SEQ ID NO: 53804 - protein, 128 aa, Homo sapiens; identical to SEQ ID NO: 53789

SEQ ID NO: 53805 - protein, 128 aa, Homo sapiens; identical to SEQ ID NO: 53789

SEQ ID NO: 53806 - protein, 128 aa, Homo sapiens; identical to SEQ ID NO: 53789

SEQ ID NO: 53807 - protein, 128 aa, Homo sapiens; identical to SEQ ID NO: 53789

SEQ ID NO: 53808 - protein, 128 aa, Homo sapiens; identical to SEQ ID NO: 53789

SEQ ID NO: 53809 - protein, 164 aa, Homo sapiens; identical to SEQ ID NO: 53793

SEQ ID NO: 53810 - protein, 76 aa, Homo sapiens
MAAVGSLLGRLRQSTVKATGPALRRLHTSSWRADSSRASLTRVHRQAYARLYPVLLVKQDGSTIHIRYREPRRMLA

SEQ ID NO: 53811 - protein, 233 aa, Homo sapiens
MAAPVVTAPGRALLRAGAGRLLRGGVQELLRPRHEGNAPDLACNFSLSQNRGTVIVERWWKVPLAGEGRKPRLHRRHRVYKLVEDTKHRPKENLELILTQSVENVGVRGDLVSVKKSLGRNRLLPQGLAVYASPENKKLFEEEKLLRQEGKLEKIQTKAGEALGVVVAPHTLKLPEEPITRWGEYWCEVTVNGLDTVRVPMSVVNFEKPKTKRYKYWLAQQAAKAMAPTSPQI

SEQ ID NO: 53812 - protein, 267 aa, Homo sapiens [sequence omitted]

SEQ ID NO: 53813 - protein, 201 aa, Homo sapiens
MAARTAFGAVCRRLWQGLGNFSVNTSKGNTAKNGGLLLSTNMKWVQFSNLHVDVPKDLTKPVVTISDEPDILYKRLSVLVKGHDKAVLDSYEYFAVLAAKELGISIKVHEPPRKIERFTLLQSVHIYKKHRVQYEMRTLYRCLELEHLTGSTADVYLEYIQRNLPEGVAMEVTKTQLEQLPEHIKEPIWETLSEEKEESKS

SEQ ID NO: 53814 - protein, 194 aa, Homo sapiens
MQAVRNAGSRFLRSWTWPQTAGRVVARTPAGTICTGARQLQDAAAKQKVEQNAAPSHTKFSIYPPIPGEESSLRWAGKKFEEIPIAHIKASHNNTQIQVVSASNEPLAFASCGTEGFRNAKKGTGIAAQTAGIAAAARAKQKGVIHIRVVVKGLGPGRLSAMHGLIMGGLEVISITDNTPIPHNGCRPRKARKL

SEQ ID NO: 53815 - protein, 161 aa, Homo sapiens
MQAVRNAGSRFLRSWTWPQTAGRVVARTPAGTICTGARQLQDAAAKQKVEQNAAPSHTKFSTQIQVVSASNEPLAFASCGTEGFRNAKKGTGIAAQTAGIAAAARAKQKGVIHIRVVVKGLGPGRLSAMHGLIMGGLEVISITDNTPIPHNGCRPRKARKL

SEQ ID NO: 53816 - protein, 138 aa, Homo sapiens
MSWSGLLHGLNTSLTCGPALVPRLWATCSMATLNQMHRLGPPKRPPRKLGPTEGRPQLKGVVLCTFTRKPKKPNSANRKCCRVRLSTGREAVCFIPGEGHTLQEHQIVLVEGGRTQDLPGVKLTVVRGKYDCGHVQKK

SEQ ID NO: 53817 - protein, 138 aa, Homo sapiens; identical to SEQ ID NO: 53816

SEQ ID NO: 53818 - protein, 138 aa, Homo sapiens; identical to SEQ ID NO: 53816

SEQ ID NO: 53819 - protein, 128 aa, Homo sapiens
MAAFMLGSLLRTFKQMVPSSASGQVRSHYVDWRMWRDVKRRKMAYEYADERLRINSLRKNTILPKILQDVADEEIAALPRDSCPVRIRNRCVMTSRPRGVKRRWRLSRIVFRHLADHGQLSGIQRATW

SEQ ID NO: 53820 - protein, 257 aa, Homo sapiens
MLRVAWRTLSLIRTRAVTQVLVPGLPGGGSAKFPFNQWGLQPRSLLLQAARGYVVRKPAQSRLDDDPPPSTLLKDYQNVPGIEKVDDVVKRLLSLEMANKKEMLKIKQEQFMKKIVANPEDTRSLEARIIALSVKIRSYEEHLEKHRKDKAHKRYLLMSIDQRKKMLKNLRNTNYDVFEKICWGLGIEYTFPPLYYRRAHRRFVTKKALCIRVFQETQKLKKRRRALKAAAAAQKQAKRRNPDSPAKAIPKTLKDSQ

SEQ ID NO: 53821 - protein, 99 aa, Homo sapiens
MVHLTTLLCKAYRGGHLTIRLALGGCTNRPFYRIVAAHNKCPRDGRFVEQLGSYDPLPNSHGEKLVALNLDRIRHWIGCGAHLSKPMEKLLGLKYSHVF

SEQ ID NO: 53822 - protein, 137 aa, Homo sapiens
MVHLTTLLCKAYRGGHLTIRLALGGCTNRPFYRIVAAHNKCPRDGRFVEQLGSYDPLPNSHGEKLVALNLDRIRHWIGCGAHLSKPMEKLLGLAGFFPLHPMMITNAERLRRKRAREVLLASQKTDAEATDTEATET

SEQ ID NO: 53823 - protein, 123 aa, Homo sapiens
MVHLTTLLCKAYRGGHLTIRLALGGCTNRPFYRIVAAHNKCPRDGRFVEQLGSYDPLPNSHGEKLVALNLDRIRHWIGCGAHLSKPMEKLLGKTDARFPEQGEERPEQHHFPEDLAPARGRGL

SEQ ID NO: 53824 - protein, 130 aa, Homo sapiens
MSVVRSSVHARWIVGKVIGTKMQKTAKVRVTRLVLDPYLLKYFNKRKTYFAHDALQQCTVGDIVLLRALPVPRAKHVKHELAEIVFKVGKVIDPVTGKPCAGTTYLESPLSSETTQLSKNLEELNISSAQ

SEQ ID NO: 53825 - protein, 129 aa, Homo sapiens
MSVVRSSVHARWIVGKVIGTKMQKTAKVRVTRLVLDPYLLKYFNKRKTYFAHDALQQCTVGDIVLLRALPVPRAKHVKHELAEIVFKVGKVIDPVTGKPCAGTTYLESPLSSETTQLSKNLEELNISSA

SEQ ID NO: 53826 - protein, 127 aa, Homo sapiens
MAALKALVSGCGRLLRGLLAGPAATSWSRLPARGFREVVETQEGKTTIIEGRITATPKESPNPPNPSGQCPICRWNLKHKYNYDDVLLLSQFIRPHGGMLPRKITGLCQEEHRKIEECVKMAHRAGT

SEQ ID NO: 53827 - protein, 270 aa, Homo sapiens
MAALKALVSGCGRLLRGLLAGPAATSWSRLPARGFREVVETQEGKTTIIEGRITATPKESPNPPNPSGQCPICRWNLKHKYNYDDVLLLSQFIRPHGGMLPRKITGLCQEEHRKIEECVKMAHRAGRRPWGPRGAEGCRHSLPTQLPHVSAPPGRKVDIRSVNYTHHPMPTFPLPWAFPLAPSELQRELQRLSPLPRHSGLLPNHRPRLPEGVVPKSKPQLNRYLTRWAPGSVKPIYKKGPRWNRVRMPVGSPLLRDNVCYSRTPWKLYH

SEQ ID NO: 53828 - protein, 196 aa, Homo sapiens
MAALKALVSGCGRLLRGLLAGPAATSWSRLPARGFREVVETQEGKTTIIEGRITATPKESPNPPNPSGQCPICRWNLKHKYNYDDVLLLSQFIRPHGGMLPRKITGLCQEEHRKIEECVKMAHRAGLLPNHRPRLPEGVVPKSKPQLNRYLTRWAPGSVKPIYKKGPRWNRVRMPVGSPLLRDNVCYSRTPWKLYH

SEQ ID NO: 53829 - protein, 264 aa, Homo sapiens
MAALKALVSGCGRLLRGLLAGPAATSWSRLPARGFREVVETQEGKTTIIEGRITATPKESPNPPNPSGQCPICRWNLKHKYNYDDVLLLSQFIRPHGGMLPRKITGLCQEEHRKIEECVKMAHRAGRRPWGPRGAEGCRHSLPTQLPHVSAPPGRKVDIRSVNYTHHPMPTFPLPWAFPLAPSELQRELQRLSPLPRHSGLLPNHRPRLPEGVVPKSKPQLNRYLTRWAPGSVKPIYKKGPRWNRVRMPVGSPLLRDNVCYSRT

SEQ ID NO: 53830 - protein, 258 aa, Homo sapiens
MAASVLNTVLRRLPMLSLFRGSHRVQVPLQTLCTKAPSEEDSLSSVPISPYKDEPWKYLESEEYQERYGSRPVWADYRRNHKGGVPPQRTRKTCIRRNKVVGNPCPICRDHKLHVDFRNVKLLEQFVCAHTGIIFYAPYTGVCVKQHKRLTQAIQKARDHGLLIYHIPQVEPRDLDFSTSHGAVSATPPAPTLVSGDPWYPWYNWKQPPERELSRLRRLYQGHLQEESGPPPESMPKMPPRTPAEASSTGQTGPQSAL

SEQ ID NO: 53831 - protein, 258 aa, Homo sapiens; identical to SEQ ID NO: 53830

SEQ ID NO: 53832 - protein, 215 aa, Homo sapiens
MAASVLNTVLRRLPMLSLFRGSHRVQVPLQTLCTKAPSEEDSLSSVPISPYKDEPWKYLESEEYQERYGSRPVWADYRRNHKGGVPPQRTRKTCINVKLLEQFVCAHTGIIFYAPYTGLLIYHIPQVEPRDLDFSTSHGAVSATPPAPTLVSGDPWYPWYNWKQPPERELSRLRRLYQGHLQEESGPPPESMPKMPPRTPAEASSTGQTGPQSAL

SEQ ID NO: 53833 - protein, 215 aa, Homo sapiens; identical to SEQ ID NO: 53832

SEQ ID NO: 53834 - protein, 258 aa, Homo sapiens; identical to SEQ ID NO: 53830

SEQ ID NO: 53835 - protein, 215 aa, Homo sapiens; identical to SEQ ID NO: 53832

SEQ ID NO: 53836 - protein, 215 aa, Homo sapiens; identical to SEQ ID NO: 53832

SEQ ID NO: 53837 - protein, 258 aa, Homo sapiens; identical to SEQ ID NO: 53830

SEQ ID NO: 53838 - protein, 215 aa, Homo sapiens; identical to SEQ ID NO: 53832

SEQ ID NO: 53839 - protein, 258 aa, Homo sapiens; identical to SEQ ID NO: 53830

SEQ ID NO: 53840 - protein, 215 aa, Homo sapiens; identical to SEQ ID NO: 53832

SEQ ID NO: 53841 - protein, 215 aa, Homo sapiens; identical to SEQ ID NO: 53832

SEQ ID NO: 53842 - protein, 258 aa, Homo sapiens; identical to SEQ ID NO: 53830

SEQ ID NO: 53843 - protein, 258 aa, Homo sapiens; identical to SEQ ID NO: 53830

SEQ ID NO: 53844 - protein, 121 aa, Homo sapiens
MAASVLNTVLRRLPMLSLFRGSHRVQVPLQTLCTKAPSEEDSLSSVPISPYKDEPWKYLESEEYQERYGSRPVWADYRRNHKGGVPPQRTRKTCIRRNKVVGNPCPICRDHKLHVDFRESV

SEQ ID NO: 53845 - protein, 121 aa, Homo sapiens; identical to SEQ ID NO: 53844

SEQ ID NO: 53846 - protein, 121 aa, Homo sapiens; identical to SEQ ID NO: 53844

SEQ ID NO: 53847 - protein, 121 aa, Homo sapiens; identical to SEQ ID NO: 53844

SEQ ID NO: 53848 - protein, 121 aa, Homo sapiens; identical to SEQ ID NO: 53844

SEQ ID NO: 53849 - protein, 121 aa, Homo sapiens; identical to SEQ ID NO: 53844

SEQ ID NO: 53850 - protein, 121 aa, Homo sapiens; identical to SEQ ID NO: 53844

SEQ ID NO: 53851 - protein, 142 aa, Homo sapiens
MAAVVAVCGGLGRKKLTHLVTAAVSLTHPGTHTVLWRRGCSQQVSSNEDLPISMENPYKEPLKKCILCGKHVDYKNVQLLSQFVSPFTGCIYGRHITGLCGKKQKEITKAIKRAQIMGFMPVTYKDPAYLKDPKVCNIRYRE

SEQ ID NO: 53852 - protein, 114 aa, Homo sapiens
MAAVVAVCGGLGRKKLTHLVTAAVSLTHPGTHTVLWRRGCSQQVSSNEDLLLSQFVSPFTGCIYGRHITGLCGKKQKEITKAIKRAQIMGFMPVTYKDPAYLKDPKVCNIRYRE

SEQ ID NO: 53853 - protein, 296 aa, Homo sapiens
MATSSAALPRILGAGARAPSRWLGFLGKATPRPARPSRRTLGSATALMIRESEDSTDFNDKILNEPLKHSDFFNVKELFSVRSLFDARVHLGHKAGCRHRFMEPYIFGSRLDHDIIDLEQTATHLQLALNFTAHMAYRKGIILFISRNRQFSYLIENMARDCGEYAHTRYFRGGMLTNARLLFGPTVRLPDLIIFLHTLNNIFEPHVAVRDAAKMNIPTVGIVDTNCNPCLITYPVPGNDDSPLAVHLYCRLFQTAITRAKEKRQQVEALYRLQGQKEPGDQGPAHPPGADMSHSL

SEQ ID NO: 53854 - protein, 296 aa, Homo sapiens; identical to SEQ ID NO: 53853

SEQ ID NO: 53855 - protein, 270 aa, Homo sapiens
RRGPLGMRWGAGVVHSGLGARTSIYFPPGARAPSRWLGFLGKATPRPARPSRRTLGSATALMIRESEDSTDFNDKILNEPLKHSDFFNVKELFSVRSLFDARVHLGHKAGCRHRFMEPYIFGSRLDHDIIDLEQTATHLQLALNFTAHMAYRKGIILFISRNRQFSYLIENMARDCGEYAHTRYFRGGMLTNARLLFGPTVRLPDLIIFLHTLNNIFEPHVAVRDAAKMNIPTVGIVDTNCNPCLITYPVPGNDDSPLAVHLYCRLFQTA

SEQ ID NO: 53856 - protein, 87 aa, Homo sapiens
MAKHLKFIARTVMVQEGNVESAYRTLNRILTMDGLIEDIKHRRYYEKPCRRRQRESYERCRRIYNMEMARKINFLMRKNRADPWQGC

SEQ ID NO: 53857 - protein, 87 aa, Homo sapiens; identical to SEQ ID NO: 53856

SEQ ID NO: 53858 - protein, 360 aa, Homo sapiens
MAPLGTTVLLWSLLRSSPGVERVCFRARIQPWHGGLLQPLPCSFEMGLPRRRFSSEAAESGSPETKKPTFMDEEVQSILTKMTGLNLQKTFKPAIQELKPPTYKLMTQAQLEEATRQAVEAAKVRLKMPPVLEERVPINDVLAEDKILEGTETTKYVFTDISYSIPHRERFIVVREPSGTLRKASWEERDRMIQVYFPKEGRKILTPIIFKEENLRTMYSQDRHVDVLNLCFAQFEPDSTEYIKVHHKTYEDIDKRGKYDLLRSTRYFGGMVWYFVNNKKIDGLLIDQIQRDLIDDATNLVQLYHVLHPDGQSAQGAKDQAAEGINLIKVFAKTEAQKGAYIELTLQTYQEALSRHSAAS

SEQ ID NO: 53859 - protein, 359 aa, Homo sapiens
MAPLGTTVLLWSLLRSSPGVERVCFRARIQPWHGGLLQPLPCSFEMGLPRRRFSSEAESGSPETKKPTFMDEEVQSILTKMTGLNLQKTFKPAIQELKPPTYKLMTQAQLEEATRQAVEAAKVRLKMPPVLEERVPINDVLAEDKILEGTETTKYVFTDISYSIPHRERFIVVREPSGTLRKASWEERDRMIQVYFPKEGRKILTPIIFKEENLRTMYSQDRHVDVLNLCFAQFEPDSTEYIKVHHKTYEDIDKRGKYDLLRSTRYFGGMVWYFVNNKKIDGLLIDQIQRDLIDDATNLVQLYHVLHPDGQSAQGAKDQAAEGINLIKVFAKTEAQKGAYIELTLQTYQEALSRHSAAS

SEQ ID NO: 53860 - protein, 319 aa, Homo sapiens
MSRNETEHRYLGTHFGAESGSPETKKPTFMDEEVQSILTKMTGLNLQKTFKPAIQELKPPTYKLMTQAQLEEATRQAVEAAKVRLKMPPVLEERVPINDVLAEDKILEGTETTKYVFTDISYSIPHRERFIVVREPSGTLRKASWEERDRMIQVYFPKEGRKILTPIIFKEENLRTMYSQDRHVDVLNLCFAQFEPDSTEYIKVHHKTYEDIDKRGKYDLLRSTRYFGGMVWYFVNNKKIDGLLIDQIQRDLIDDATNLVQLYHVLHPDGQSAQGAKDQAAEGINLIKVFAKTEAQKGAYIELTLQTYQEALSRHSAAS

SEQ ID NO: 53861 - protein, 360 aa, Homo sapiens; identical to SEQ ID NO: 53858

SEQ ID NO: 53862 - protein, 168 aa, Homo sapiens
MAPLGTTVLLWSLLRSSPGVERVCFRARIQPWHGGLLQPLPCSFEMGLPRRRFSSEAESGSPETKKPTFMDEEVQSILTKMTGLNLQKTFKPAIQELKPPTYKLMTQAQLEEATRQAVEAAKVRLKMPPVLEERVPINDVLAEDKILEGTETTKYVFTDISYSIPHRC

SEQ ID NO: 53863 - protein, 190 aa, Homo sapiens
MAGSRLETVGSIFSRTRDLVRAGVLKEKPLWFDVYDAFPPLREPVFQRPRVRYGKAKAPIQDIWYHEDRIRAKFYSVYGSGQRAFDLFNPNFKSTCQRFVEKYTELQKLGETDEEKLFVETGKALLAEGVILRRVGEARTQHGGSHVSRKSEHLSVRPQTALEENETQKEVPQDQHLEAPADQSKGLLPP

SEQ ID NO: 53864 - protein, 167 aa, Homo sapiens
MAASVCSGLLGPRVLSWSRELPCAWRALHTSPVCAKNRAARVRVSKGDKPVTYEEAHAPHYIAHRKGWLSLHTGNLDGEDHAAERTVEDVFLRKFMWGTFPGCLADQLVLKRRGNQLEICAVVLRQLSPHKYYFLVGYSETLLSYFYKCPVRLHLQTVPSKVVYKYL

SEQ ID NO: 53865 - protein, 173 aa, Homo sapiens
MPMKGRFPIRRTLQYLSQGNVVFKDSVKVMTVNYNTHGELGEGARKFVFFNIPQIQYKNPWVQIMMFKNMTPSPFLRFYLDSGEQVLVDVETKSNKEIMEHIRKILGKNEETLREEEEEKKQLSHPANFGPRKYCLRECICEVEGQVPCPSLVPLPKEMRGKYKAALKADAQD

SEQ ID NO: 53866 - protein, 110 aa, Homo sapiens
MPMKGRFPIRRTLQYLSQGNVVFKDSVKVMTVNYNTHGELGEGARKFVFFNIPQIQYKNPWVQIMMFKNMTPSPFLRFYLDSGEQVLVDVETKSNKEIMEHIRKILGKNE

SEQ ID NO: 53867 - protein, 129 aa, Homo sapiens
MPMKGRFPIRRTLQYLSQGNVVFKDSVKVMTVNYNTHGELGEGARKFVFFNIPQIQYKNPWVQIMMFKNMTPSPFLRFYLGKPSGKRRRRKSSFLTQPTSALESTACGSASVKWKGRCPAPAWCHYPRR

SEQ ID NO: 53868 - protein, 110 aa, Homo sapiens; identical to SEQ ID NO: 53866

SEQ ID NO: 53869 - protein, 145 aa, Homo sapiens
MPMKGRFPIRRTLQYLSQGNVVFKDSVKVMTVNYNTHGELGEGARKFVFFNIPQIQYKNPWVQIMMFKNMTPSPFLRFYLDSGEQVLVDVETKSNKEIMEHIRKILGKNEHYLAAPSKPVSSAVVPVTQEAEAGGSLEPRRLRLE

SEQ ID NO: 53870 - protein, 205 aa, Homo sapiens
MLRALSRLGAGTPCRPRAPLVLPARGRKTRHDPLAKSKIERVNMPPAVDPAEFFVLMERYQHYRQTVRALRMEFVSEVQRKVHEARAGVLAERKALKDAAEHRELMAWNQAENRRLHELRIARLRQEEREQEQRQALEQARKAEEVQAWAQRKEREVLQLQEEVKNFITRENLEARVEAALDSRKNYNWAITREGLVVRPQRRDS

SEQ ID NO: 53871 - protein, 414 aa, Homo sapiens
MAASIVRRGMLLARQVVLPQLSPAGKRYLLSSAYVDSHKWEAREKEHYCLADLASLMDKTFERKLPVSSLTISRLIDNISSREEIDHAEYYLYKFRHSPNCWYLRNWTIHTWIRQCLKYDAQDKALYTLVNKVQYGIFPDNFTFNLLMDSFIKKENYKDALSVVFEVMMQEAFEVPSTQLLSLYVLFHCLAKKTDFSWEEERNFGASLLLPGLKQKNSVGFSSQLYGYALLGKVELQQGLRAVYHNMPLIWKPGYLDRALQVMEKVAASPEDIKLCREALDVLGAVLKALTSADGASEEQSQNDEDNQGSEKLVEQLDIEETEQSKLPQYLERFKALHSKLQALGKIESEGLLSLTTQLVKEKLSTCEAEDIATYEQNLQQWHLDLVQLIQREQQQREQAKQEYQAQKAAKASA

SEQ ID NO: 53872 - protein, 358 aa, Homo sapiens
MDKTFERKLPVSSLTISRLIDNISSREEIDHAEYYLYKFRHSPNCWYLRNWTIHTWIRQCLKYDAQDKALYTLVNKVQYGIFPDNFTFNLLMDSFIKKENYKDALSVVFEVMMQEAFEVPSTQLLSLYVLFHCLAKKTDFSWEEERNFGASLLLPGLKQKNSVGFSSQLYGYALLGKVELQQGLRAVYHNMPLIWKPGYLDRALQVMEKVAASPEDIKLCREALDVLGAVLKALTSADGASEEQSQNDEDNQGSEKLVEQLDIEETEQSKLPQYLERFKALHSKLQALGKIESEGLLSLTTQLVKEKLSTCEAEDIATYEQNLQQWHLDLVQLIQREQQQREQAKQEYQAQKAAKASA

SEQ ID NO: 53873 - protein, 428 aa, Homo sapiens
MAASIVRRGMLLARQVVLPQLSPAGKRYLLSSAYVDSHKWEAREKEHYCLADLASLMDKTFERKLPVSSLTISRLIDNISSREEIDHAEYYLYKKGECSSSNPQNYSRFRHSPNCWYLRNWTIHTWIRQCLKYDAQDKALYTLVNKVQYGIFPDNFTFNLLMDSFIKKENYKDALSVVFEVMMQEAFEVPSTQLLSLYVLFHCLAKKTDFSWEEERNFGASLLLPGLKQKNSVGFSSQLYGYALLGKVELQQGLRAVYHNMPLIWKPGYLDRALQVMEKVAASPEDIKLCREALDVLGAVLKALTSADGASEEQSQNDEDNQGSEKLVEQLDIEETEQSKLPQYLERFKALHSKLQALGKIESEGLLSLTTQLVKEKLSTCEAEDIATYEQNLQQWHLDLVQLIQREQQQREQAKQEYQAQKAAKASA

SEQ ID NO: 53874 - protein, 187 aa, Homo sapiens
MAALCRTRAVAAESHFLRVFLFFRPFRGVGTESGSESGSSNAKEPKTRAGGFASALERHSELLQKVEPLQKGSPKNVESFASMLRHSPLTQMGPAKDKLVIGRIFHIVENDLYIDFGGKFHCVCRRPEVDGEKYQKGTRVRLRLLDLELTSRFLGATTDTTVLEANAVLLGIQESKDSRSKEEHHEK

SEQ ID NO: 53875 - protein, 439 aa, Homo sapiens
MAAARCWRPLLRGPRLSLHTAANAAATATETTCQDVAATPVARYPPIVASMTADSKAARLRRIERWQATVHAAESVDEKLRILTKMQFMKYMVYPQTFALNADRWYQYFTKTVFLSGLPPPPAEPEPEPEPEPEPALDLAALRAVACDCLLQEHFYLRRRRRVHRYEESEVISLPFLDQLVSTLVGLLSPHNPALAAAALDYRCPVHFYWVRGEEIIPRGHRRGRIDDLRYQIDDKPNNQIRISKQLAEFVPLDYSVPIEIPTIKCKPDKLPLFKRQYENHIFVGSKTADPCCYGHTQFHLLPDKLRRERLLRQNCADQIEVVFRANAIASLFAWTGAQAMYQGFWSEADVTRPFVSQAVITDGKYFSFFCYQLNTLALTTQADQNNPRKNICWGTQSKPLYETIEDNDVKGFNDDVLLQIVHFLLNRPKEEKSQLLEN

SEQ ID NO: 53876 - protein, 395 aa, Homo sapiens
MFPRVSTFLPLRPLSRHPLSSGSPETSAAAIMLLTVRHGTVRYRSSALLARTKNNIQRYFGTNSVICSKKDKQSVRTEETSKETSESQDSEKENTKKDLLGIIKGMKVELSTVNVRTTKPPKRRPLKSLEATLGRLRRATEYAPKKRIEPLSPELVAAASAVADSLPFDKQTTKSELLSQLQQHEEESRAQRDAKRPKISFSNIISDMKVARSATARVRSRPELRIQFDEGYDNYPGQEKTDDLKKRKNIFTGKRLNIFDMMAVTKEAPETDTSPSLWDVEFAKQLATVNEQPLQNGFEELIQWTKEGKLWEFPINNEAGFDDDGSEFHEHIFLEKHLESFPKQGPIRHFMELVTCGLSKNPYLSVKQKVEHIEWFRNYFNEKKDILKESNIQFN

SEQ ID NO: 53877 - protein, 106 aa, Homo sapiens
MSSLSEYAFRMSRLSARLFGEVTRPTNSKSMKVVKLFSELPLAKKKETYDWYPNHHTYAELMQTLRFLGLYRDEHQDFMDEQKRLKKLRGKEKPKKGEGKRAAKRK

SEQ ID NO: 53878 - protein, 106 aa, Homo sapiens; identical to SEQ ID NO: 53877

SEQ ID NO: 53879 - protein, 106 aa, Homo sapiens; identical to SEQ ID NO: 53877

SEQ ID NO: 53880 - protein, 106 aa, Homo sapiens; identical to SEQ ID NO: 53877

SEQ ID NO: 53881 - protein, 112 aa, Homo sapiens
MSSLSEYAFRMSRLSARLFGEVTRPTNSKSMKVVKLFSELPLAKKKETYDWYPNHHTYAELMQTLRFLGLYRDEHQDFMDEQKRLKKLRGKEKPKKGEGKRAAKRKKKKKKR

SEQ ID NO: 53882 - protein, 225 aa, Homo sapiens
MARKKVRPRLIAELARRVRALREQLNRPRDSQLYAVDYETLTRPFSGRRLPVRAWADVRRESRLLQLLGRLPLFGLGRLVTRKSWLWQHDEPCYWRLTRVRPDYTAQNLDHGKAWGILTFKDASFSSSGKTESEAREIEHVMYHDWRLVPKHEEEAFTAFTPAPEDSLASVPYPPLLRAMIIAERQKNGDTSTEEPMLNVQRIRMEPWDYPAKQEDKGRAKGTPV

SEQ ID NO: 53883 - protein, 218 aa, Homo sapiens
MARKKVRPRLIAELARRVRALREQLNRPRDSQLYAVDYETLTRPFSGRRLPVRAWADVRRESRLLQLLGRLPLFGLGRLVTRKSWLWQHDEPCYWRLTRVRPDYTAQNLDHGKAWGILTFKGKTESEAREIEHVMYHDWRLVPKHEEEAFTAFTPAPEDSLASVPYPPLLRAMIIAERQKNGDTSTEEPMLNVQRIRMEPWDYPAKQEDKGRAKGTPV

SEQ ID NO: 53884 - protein, 323 aa, Homo sapiens
MAAAALPAWLSLQSRARTLRAFSTAVYSATPVPTPSLPERTPGNERPPRRKALPPRTEKMAVDQDWPSVYPVAAPFKPSAVPLPVRMGYPVKKGVPMAKEGNLELLKIPNFLHLTPVAIKKHCEALKDFCTEWPAALDSDEKCEKHFPIEIDSTDYVSSGPSVRNPRARVVVLRVKLSSLNLDDHAKKKLIKLVGERYCKTTDVLTIKTDRCPLRRQNYDYAVYLLTVLYHESWNTEEWEKSKTEADMEEYIWENSSSERNILETLLQMKAAEKNMEINKEELLGTKEIEEYKKSVVSLKNEEENENSISQYKESVKRLLNVT

SEQ ID NO: 53885 - protein, 287 aa, Homo sapiens
MAAAALPAWLSLQSRARTLRAFSTAVYSATPVPTPSLPERTPGNERPPRRKALPPRTEKMAVDQDWPSVYPVAAPFKPSAVPLPVRMGYPVKKGVPMAKEGNLELLKIPNFLHLTPVAIKKHCEALKDFCTEWPAALDSDEKCEKHFPIEIDSTDYVSSGPSVRNPRARVVVLRRCPLRRQNYDYAVYLLTVLYHESWNTEEWEKSKTEADMEEYIWENSSSERNILETLLQMKAAEKNMEINKEELLGTKEIEEYKKSVVSLKNEEENENSISQYKESVKRLLNVT

SEQ ID NO: 53886 - protein, 194 aa, Homo sapiens
MAAAALPAWLSLQSRARTLRAFSTAVYSATPVPTPSLPERTPGNERPPRRKALPPRTEKMAVDQDWPSVYPVAAPFKPSAVPLPVRMGYPVKKGVPMAKEGNLELLKIPNFLHLTPVAIKKHCEALKDFCTEWPAALDSDEKCEKHFPIEIDSTDYVSSGPSVRNPRARVVVLRVPFKEAELRLCSVSTNSVIP

SEQ ID NO: 53887 - protein, 103 aa, Homo sapiens
MMGSKMASASRVVQVVKPHTPLIRFPDRRDNPKPNVSEALRSAGLPSHSSVISQHSKGSKSPDLLMYQGPPDTAEIIKTLPQKYRRKLVSQEEMEFIQRGGPE

SEQ ID NO: 53888 - protein, 430 aa, Homo sapiens
MATAVRAVGCLPVLCSGTAGHLLGRQCSLNTLPAASILAWKSVLGNGHLSSLGTRDTHPYASLSRALQTQCCISSPSHLMSQQYRPYSFFTKLTADELWKGALAETGAGAKKGRGKRTKKKKRKDLNRGQIIGEGRYGFLWPGLNVPLMKNGAVQTIAQRSKEEQEKVEADMIQQREEWDRKKKMKVKRERGWSGNSWGGISLGPPDPGPCGETYEDFDTRILEVRNVFTMTAKEGRKKSIRVLVAVGNGKGAAGFSIGKATDRMDAFRKAKNRAVHHLHYIERYEDHTIFHDISLRFKRTHIKMKKQPKGYGLRCHRAIITICRLIGIKDMYAKVSGSINMLSLTQGLFRGLSRQETHQQLADKKGLHVVEIREECGPLPIVVASPRGPLRKDPEPEDEVPDVKLDWEDVKTAQGMKRSVWSNLKRAAT

SEQ ID NO: 53889 - protein, 125 aa, Homo sapiens
MPRYELALILKAMQRPETAATLKRTIEALMDRGAIVRDLENLGERALPYRISAHSQQHNRGGYFLVDFYAPTAAVESMVEHLSRDIDVIRGNIVKHPLTQELKECEGIVPVPLAEKLYSTKKRKK

SEQ ID NO: 53890 - protein, 242 aa, Homo sapiens
MAAPAVKVARGWSGLALGVRRAVLQLPGLTQVRWSRYSPEFKDPLIDKEYYRKPVEELTEEEKYVRELKKTQLIKAAPAGKTSSVFEDPVISKFTNMMMIGGNKVLARSLMIQTLEAVKRKQFEKYHAASAEEQATIERNPYTIFHQALKNCEPMIGLVPILKGGRFYQVPVPLPDRRRRFLAMKWMITECRDKKHQRTLMPEKLSHKLLEAFHNQGPVIKRKHDLHKMAEANRALAHYRWW

SEQ ID NO: 53891 - protein, 396 aa, Homo sapiens
MAAPCVSYGGAVSYRLLLWGRGSLARKQGLWKTAAPELQTNVRSQILRLRHTAFVIPKKNVPTSKRETYTEDFIKKQIEEFNIGKRHLANMMGEDPETFTQEDIDRAIAYLFPSGLFEKRARPVMKHPEQIFPRQRAIQWGEDGRPFHYLFYTGKQSYYSLMHDVYGMLLNLEKHQSHLQAKSLLPEKTVTRDVIGSRWLIKEELEEMLVEKLSDLDYMQFIRLLEKLLTSQCGAAEEEFVQRFRRSVTLESKKQLIEPVQYDEQGMAFSKSEGKRKTAKAEAIVYKHGSGRIKVNGIDYQLYFPITQDREQLMFPFHFVDRLGKHDVTCTVSGGGRSAQAGAIRLAMAKALCSFVTEDEVEWMRQAGLLTTDPRVRERKKPGQEGARRKFTWKKR

SEQ ID NO: 53892 - protein, 373 aa, Homo sapiens
MWVCSTLWRVRTPARQWRGLLPASGCHGPAASSYSASAEPARVRALVYGHHGDPAKVVELKNLELAAVRGSDVRVKMLAAPINPSDINMIQGNYGFLPELPAVGGNEGVAQVVAVGSNVTGLKPGDWVIPANAGLGTWRTEAVFSEEALIQVPSDIPLQSAATLGVNPCTAYRMLMDFEQLQPGDSVIQNASNSGVGQAVIQIAAALGLRTINVVRDRPDIQKLSDRLKSLGAEHVITEEELRRPEMKNFFKDMPQPRLALNCVGGKSSTELLRQLARGGTMVTYGGMAKQPVVASVSLLIFKDLKLRGFWLSQWKKDHSPDQFKELILTLCDLIRRGQLTAPACSQVPLQDYQSALEASMKPFISSKQILTM

SEQ ID NO: 53893 - protein, 297 aa, Homo sapiens
MLAAPINPSDINMIQGNYGFLPELPAVGGNEGVAQVVAVGSNVTGLKPGDWVIPANAGLGTWRTEAVFSEEALIQVPSDIPLQSAATLGVNPCTAYRMLMDFEQLQPGDSVIQNASNSGVGQAVIQIAAALGLRTINVVRDRPDIQKLSDRLKSLGAEHVITEEELRRPEMKNFFKDMPQPRLALNCVGGKSSTELLRQLARGGTMVTYGGMAKQPVVASVSLLIFKDLKLRGFWLSQWKKDHSPDQFKELILTLCDLIRRGQLTAPACSQVPLQDYQSALEASMKPFISSKQILTM

SEQ ID NO: 53894 - protein, 262 aa, Homo sapiens
MIQGNYGFLPELPAVGGNEGVAQVVAVGSNVTGLKPGDWVIPANAGLGTWRTEAVFSEEALIQVPSDIPLQSAATLGVNPCTAYRMLMDFEQLQPGDSVIQNASNSGVGQAVIQIAAALGLRTINVVRDRPDIQKLSDRLKSLGAEHVITEEELRRPEMKNFFKIRKLRLRKEEMLNQNHIVYKGSRESELASVSPNSKPLNLPEPPPHNMPRHAPATACSQLCWWEKLHRAAAAVSAWRNHGNLWGDGQAARRSLCEPAHF

SEQ ID NO: 53895 - protein, 189 aa, Homo sapiens
ATLGVNPCTAYRMLMDFEQLQPGDSVIQNASNSGVGQAVIQIAAALGLRTINVVRDRPDIQKLSDRLKSLGAEHVITEEELRRPEMKNFFKIRKLRLRKEEMLNQNHIVYKGSRESELASVSPNSKPLNLPEPPPHNMPRHAPATACSQLCWWEKLHRAAAAVSAWRNHGNLWGDGQAARRSLCEPAHF

SEQ ID NO: 53896 - protein, 399 aa, Homo sapiens
MQSLSLGQTSISKGLNYLTIMAPGNLWHMRNNFLFGSRCWMTRFSAENIFKSVSFRLFGVKCHNTDSEPLKNEDLLKNLLTMGVDIDMARKRQPGVFHRMITNEQDLKMFLLSKGASKEVIASIISRYPRAITRTPENLSKRWDLWRKIVTSDLEIVNILERSPESFFRSNNNLNLENNIKFLYSVGLTRKCLCRLLTNAPRTFSNSLDLNKQMVEFLQAAGLSLGHNDPADFVRKIIFKNPFILIQSTKRVKANIEFLRSTFNLNSEELLVLICGPGAEILDLSNDYARRSYANIKEKLFSLGCTEEEVQKFVLSYPDVIFLAEKKFNDKIDCLMEENISISQIIENPRVLDSSISTLKSRIKELVNAGCNLSTLNITLLSWSKKRYEAKLKKLSRFA

SEQ ID NO: 53897 - protein, 158 aa, Homo sapiens
MQSLSLGQTSISKGLNYLTIMAPGNLWHMRNNFLFGSRCWMTRFSAENIFKSVSFRLFGVKCHNTDSEPLKNEDLLKNLLTMGVDIDMARKRQPGVFHRMITNEQDLKMFLLSKGASKEVIASIISRYPRAITRTPENLSKRWDLWRKIVTSDLEIVN

SEQ ID NO: 53898 - protein, 727 aa, Homo sapiens
MNQKLLKLENLLRFHTIYRQLHSLCQRRALRQWRHGFSSAYPVWTAQLCAWPWPTDVLTGAALSQYRLLVTKKEEGPWKSQLSSTKSKKVVEVWIGMTIEELARAMEKNTDYVYEALLNTDIDIDSLEADSHLDEVWIKEVITKAGMKLKWSKLKQDKVRKNKDAVRRPQADPALLTPRSPVVTIMGHVDHGKTTLLDKFRKTQVAAVETGGITQHIGAFLVSLPSGEKITFLDTPGHAAFSAMRARGAQVTDIVVLVVAADDGVMKQTVESIQHAKDAQVPIILAVNKCDKAEADPEKVKKELLAYDVVCEDYGGDVQAVPVSALTGDNLMALAEATVALAEMLELKADPNGPVEGTVIESFTDKGRGLVTTAIIQRGTLRKGSVLVAGKCWAKVRLMFDENGKTIDEAYPSMPVGITGWRDLPSAGEEILEVESEPRAREVVDWRKYEQEQEKGQEDLKIIEEKRKEHKEAHQKAREKYGHLLWKKRSILRFLERKEQIPLKPKEKRERDSNVLSVIIKGDVDGSVEAILNIIDTYDASHECELELVHFGVGDVSANDVNLAETFDGVIYGFNVNAGNVIQQSAAKKGVKIKLHKIIYRLVEDLQEELSSRLPCAVEEHPVGEASILATFSVTEGKKKVPVAGCRVQKGQLEKQKKFKLTRNGHVIWKGSLTSLKHHKDDISIVKTGMDCGLSLDEDNMEFQVGDRIVCYEEKQIQAKTSWDPGF

SEQ ID NO: 53899 - protein, 72 aa, Homo sapiens
MNQKLLKLENLLRFHTIYRQLHSLCQRRALRQWRHGFSSAYPVWTAQLCAWPWPTDVLTGAALSQYRLLVTK

SEQ ID NO: 53900 - protein, 727 aa, Homo sapiens; identical to SEQ ID NO: 53898

SEQ ID NO: 53901 - protein, 727 aa, Homo sapiens; identical to SEQ ID NO: 53898

SEQ ID NO: 53902 - protein, 70 aa, Homo sapiens
MNQKLLKLENLLRFHTIYRQLHSLCQRRALRQWRHGFSSAYPVWTAQLCAWPWPTDVLTGAALSQYRLLV

SEQ ID NO: 53903 - protein, 7 aa, Homo sapiens
MNQKLLK

SEQ ID NO: 53904 - protein, 10 aa, Homo sapiens
MNQKLLKLEN

SEQ ID NO: 53905 - protein, 26 aa, Homo sapiens
MNQKLLKLENLLRFHTIYRQLHSLCQ

SEQ ID NO: 53906 - protein, 71 aa, Homo sapiens
MNQKLLKLENLLRFHTIYRQLHSLCQRRALRQWRHGFSSAYPVWTAQLCAWPWPTDVLTGAALSQYRLLVT

SEQ ID NO: 53907 - protein, 465 aa, Homo sapiens
MNQKLLKLENLLRFHTIYRQLHSLCQRRALRQWRHGFSSAYPVWTAQLCAWPWPTDVLTGAALSQYRLLVTKKEEGPWKSQLSSTKSKKVVEVWIGMTIEELARAMEKNTDYVYEALLNTDIDIDSLEADSHLDEVWIKEVITKAGMKLKWSKLKQDKVRKNKDAVRRPQADPALLTPRSPVVTIMGHVDHGKTTLLDKFRKTQVAAVETGGITQHIGAFLVSLPSGEKITFLDTPGHAAFSAMRARGAQVTDIVVLVVAADDGVMKQTVESIQHAKDAQVPIILAVNKCDKAEADPEKVKKELLAYDVVCEDYGGDVQAVPVSALTGDNLMALAEATVALAEMLELKADPNGPVEGTVIESFTDKGRGLVTTAIIQRGTLRKGSVLVAGKCWAKVRLMFDENGKTIDEAYPSMPVGITGWRDLPSAGEEILEVESEPRAREVVDWRKYEQEQEKGQEDLKKEKN

SEQ ID NO: 53908 - protein, 151 aa, Homo sapiens
MNRHLCVWLFRHPSLNGYLQCHIQLHSHQFRQIHLDTRLQVFRQNRNCILHLLSKNWSRRYCHQDTKMLWKHKALQKYMENLSKEYQTLEQCLQHIPVNEENRRSLNRRHAELAPLAAIYQEIQETEQAIEELESMCKKTESCSVAQAGMQ

SEQ ID NO: 53909 - protein, 445 aa, Homo sapiens
MNRHLCVWLFRHPSLNGYLQCHIQLHSHQFRQIHLDTRLQVFRQNRNCILHLLSKNWSRRYCHQDTKMLWKHKALQKYMENLSKEYQTLEQCLQHIPVNEENRRSLNRRHAELAPLAAIYQEIQETEQAIEELESMCKSLNKQDEKQLQELALEERQTIDQKINMLYNELFQSLVPKEKYDKNDVILEVTAGRTTGGDICQQFTREIFDMYQNYSCYKHWQFELLNYTPADYGGLHHAAARISGDGVYKHLKYEGGIHRVQRIPEVGLSSRMQRIHTGTMSVIVLPQPDEVDVKLDPKDLRIDTFRAKGAGGQHVNKTDSAVRLVHIPTGLVVECQQERSQIKNKEIAFRVLRARLYQQIIEKDKRQQQSARKLQVGTRAQSERIRTYNFTQDRVSDHRIAYEVRDIKEFLCGGKGLDQLIQRLLQSADEEAIAELLDEHLKSAK

SEQ ID NO: 53910 - protein, 445 aa, Homo sapiens; identical to SEQ ID NO: 53909

SEQ ID NO: 53911 - protein, 468 aa, Homo sapiens
MGNGEVVLFSDAEMNRHLCVWLFRHPSLNGYLQCHIQLHSHQFRQIHLDTRLQVFRQNRNCILHLLSKNWSRRYCHQDTKMLWKHKALQKYMENLSKEYQTLEQCLQHIPVNEENRRSLNRRHAELAPLAAIYQEIQETEQAIEELESMCKSLNKQDEKQLQELALEERQTIDQKINMLYNELFQSLVPKEKYDKNDVILEVTAGRTTGGDICQQFTREIFDMYQNYSCYKHWQFELLNYTPADYGGLHHAAARISGDGVYKHLKYEGGIHRVQRIPEVGLSSRMQRIHTGTMSVIVLPQPDEVDVKLDPKDLRIDTFRAKGAGGQHVNKTDSAVRLVHIPTGLVVECQQERSQIKNKEIAFRVLRARLYQQIIEKDKRQQQSARKLQVGTRAQSERIRTYNFTQDRVSDHRIAYEVRDIKAQSHSTGGSRDPAHSTFLSLDSVRSPGILIMTSSVRNFYVVGRAWIS

SEQ ID NO: 53912 - protein, 757 aa, Homo sapiens
MSLLFSRCNSIVTVKKNKRHMAEVNASPLKHFVTAKKKINGIFEQLGAYIQESATFLEDTYRNAELDPVTTEEQVLDVKGYLSKVRGISEVLARRHMKVAFFGRTSNGKSTVINAMLWDKVLPSGIGHTTNCFLRVEGTDGHEAFLLTEGSEEKRSAKTVNQLAHALHQDKQLHAGSLVSVMWPNSKCPLLKDDLVLMDSPGIDVTTELDSWIDKFCLDADVFVLVANSESTLMQTEKHFFHKVSERLSRPNIFILNNRWDASASEPEYMEEVRRQHMERCTSFLVDELGVVDRSQAGDRIFFVSAKEVLNARIQKAQGMPEGGGALAEGFQVRMFEFQNFERRFEECISQSAVKTKFEQHTVRAKQIAEAVRLIMDSLHMAAREQQVYCEEMREERQDRLKFIDKQLELLAQDYKLRIKQITEEVERQVSTAMAEEIRRLSVLVDDYQMDFHPSPVVLKVYKNELHRHIEEGLGRNMSDRCSTAITNSLQTMQQDMIDGLKPLLPVSVRSQIDMLVPRQCFSLNYDLNCDKLCADFQEDIEFHFSLGWTMLVNRFLGPKNSRRALMGYNDQVQRPIPLTPANPSMPPLPQGSLTQEEFMVSMVTGLASLTSRTSMGILVVGGVVWKAVGWRLIALSFGLYGLLYVYERLTWTTKAKERAFKRQFVEHASEKLQLVISYTGSNCSHQVQQELSGTFAHLCQQVDVTRENLEQEIAAMNKKIEVLDSLQSKAKLLRNKAGWLDSELNMFTHQYLQPSR

SEQ ID NO: 53913 - protein, 436 aa, Homo sapiens
MHPHLSTLSLPRRRSMAFLSSWGALAEGFQVRMFEFQNFERRFEECISQSAVKTKFEQHTVRAKQIAEAVRLIMDSLHMAAREQQVYCEEMREERQDRLKFIDKQLELLAQDYKLRIKQITEEVERQVSTAMAEEIRRLSVLVDDYQMDFHPSPVVLKVYKNELHRHIEEGLGRNMSDRCSTAITNSLQTMQQDMIDGLKPLLPVSVRSQIDMLVPRQCFSLNYDLNCDKLCADFQEDIEFHFSLGWTMLVNRFLGPKNSRRALMGYNDQVQRPIPLTPANPSMPPLPQGSLTQEEFMVSMVTGLASLTSRTSMGILVVGGVVWKAVGWRLIALSFGLYGLLYVYERLTWTTKAKERAFKRQFVEHASEKLQLVISYTGSNCSHQVQQELSGTFAHLCQQVDGETLSERSMAKSTLMLLTLLFLCSFAGAQDVLTQ

SEQ ID NO: 53914 - protein, 98 aa, Homo sapiens
MSLLFSRCNSIVTVKKNKRHMAEVNASPLKHFVTAKKKINGIFEQLGAYIQESATFLEDTYRNAELDPVTTEEQVLDVKGYLSKVRGISEVLARRHMK

SEQ ID NO: 53915 - protein, 757 aa, Homo sapiens; identical to SEQ ID NO: 53912

SEQ ID NO: 53916 - protein, 464 aa, Homo sapiens
MSLHFLYYCSEPTLDVKIAFCQGFDKQVDVSYIAKHYNMSKSKVDNQFYSVEVGDSTFTVLKRYQNLKPIGSGAQGIVCAAYDAVLDRNVAIKKLSRPFQNQTHAKRAYRELVLMKCVNHKNIISLLNVFTPQKTLEEFQDVYLVMELMDANLCQVIQMELDHERMSYLLYQMLCGIKHLHSAGIIHRDLKPSNIVVKSDCTLKILDFGLARTAGTSFMMTPYVVTRYYRAPEVILGMGYKENVDIWSVGCIMGEMVRHKILFPGRDYIDQWNKVIEQLGTPCPEFMKKLQPTVRNYVENRPKYAGLTFPKLFPDSLFPADSEHNKLKASQARDLLSKMLVIDPAKRISVDDALQHPYINVWYDPAEVEAPPPQIYDKQLDEREHTIEEWKELIYKEVMNSEEKTKNGVVKGQPSPSGAAVNSSESLPPSSSVNDISSMSTDQTLASDTDSSLEASAGPLGCCR

SEQ ID NO: 53917 - protein, 422 aa, Homo sapiens
MSLHFLYYCSEPTLDVKIAFCQGFDKQVDVSYIAKHYNMSKSKVDNQFYSVEVGDSTFTVLKRYQNLKPIGSGAQGIVCAAYDAVLDRNVAIKKLSRPFQNQTHAKRAYRELVLMKCVNHKNIISLLNVFTPQKTLEEFQDVYLVMELMDANLCQVIQMELDHERMSYLLYQMLCGIKHLHSAGIIHRDLKPSNIVVKSDCTLKILDFGLARTAGTSFMMTPYVVTRYYRAPEVILGMGYKENVDIWSVGCIMGEMVRHKILFPGRDYIDQWNKVIEQLGTPCPEFMKKLQPTVRNYVENRPKYAGLTFPKLFPDSLFPADSEHNKLKASQARDLLSKMLVIDPAKRISVDDALQHPYINVWYDPAEVEAPPPQIYDKQLDEREHTIEEWKELIYKEVMNSEEKTKNGVVKGQPSPSAQVQQ

SEQ ID NO: 53918 - protein, 319 aa, Homo sapiens
MELMDANLCQVIQMELDHERMSYLLYQMLCGIKHLHSAGIIHRDLKPSNIVVKSDCTLKILDFGLARTAGTSFMMTPYVVTRYYRAPEVILGMGYKENVDIWSVGCIMGEMVRHKILFPGRDYIDQWNKVIEQLGTPCPEFMKKLQPTVRNYVENRPKYAGLTFPKLFPDSLFPADSEHNKLKASQARDLLSKMLVIDPAKRISVDDALQHPYINVWYDPAEVEAPPPQIYDKQLDEREHTIEEWKELIYKEVMNSEEKTKNGVVKGQPSPSGAAVNSSESLPPSSSVNDISSMSTDQTLASDTDSSLEASAGPLGCCR

SEQ ID NO: 53919 - protein, 277 aa, Homo sapiens
MELMDANLCQVIQMELDHERMSYLLYQMLCGIKHLHSAGIIHRDLKPSNIVVKSDCTLKILDFGLARTAGTSFMMTPYVVTRYYRAPEVILGMGYKENVDIWSVGCIMGEMVRHKILFPGRDYIDQWNKVIEQLGTPCPEFMKKLQPTVRNYVENRPKYAGLTFPKLFPDSLFPADSEHNKLKASQARDLLSKMLVIDPAKRISVDDALQHPYINVWYDPAEVEAPPPQIYDKQLDEREHTIEEWKELIYKEVMNSEEKTKNGVVKGQPSPSAQVQQ

SEQ ID NO: 53920 - protein, 422 aa, Homo sapiens; identical to SEQ ID NO: 53917

SEQ ID NO: 53921 - protein, 426 aa, Homo sapiens
MSKSKVDNQFYSVEVGDSTFTVLKRYQNLKPIGSGAQGIVCAAYDAVLDRNVAIKKLSRPFQNQTHAKRAYRELVLMKCVNHKNIISLLNVFTPQKTLEEFQDVYLVMELMDANLCQVIQMELDHERMSYLLYQMLCGIKHLHSAGIIHRDLKPSNIVVKSDCTLKILDFGLARTAGTSFMMTPYVVTRYYRAPEVILGMGYKENVDIWSVGCIMGEMVRHKILFPGRDYIDQWNKVIEQLGTPCPEFMKKLQPTVRNYVENRPKYAGLTFPKLFPDSLFPADSEHNKLKASQARDLLSKMLVIDPAKRISVDDALQHPYINVWYDPAEVEAPPPQIYDKQLDEREHTIEEWKELIYKEVMNSEEKTKNGVVKGQPSPSGAAVNSSESLPPSSSVNDISSMSTDQTLASDTDSSLEASAGPLGCCR

SEQ ID NO: 53922 - protein, 426 aa, Homo sapiens; identical to SEQ ID NO: 53921

SEQ ID NO: 53923 - protein, 319 aa, Homo sapiens
MELMDANLCQVIQMELDHERMSYLLYQMLCGIKHLHSAGIIHRDLKPSNIVVKSDCTLKILDFGLARTAGTSFMMTPYVVTRYYRAPEVILGMGYKENVDMWSVGCIMGEMIKGAVLFPGTDHIDQWNKVIEQLGTPCPEFMKKLQPTVRNYVENRPKYAGLTFPKLFPDSLFPADSEHNKLKASQARDLLSKMLVIDPAKRISVDDALQHPYINVWYDPAEVEAPPPQIYDKQLDEREHTIEEWKELIYKEVMNSEEKTKNGVVKGQPSPSGAAVNSSESLPPSSSVNDISSMSTDQTLASDTDSSLEASAGPLGCCR

SEQ ID NO: 53924 - protein, 33 aa, Homo sapiens
MSKSKVDNQFYSVEVGDSTFTVLKRYQNLKPIG

SEQ ID NO: 53925 - protein, 51 aa, Homo sapiens
MSLHFLYYCSEPTLDVKIAFCQGFDKQVDVSYIAKHYNMSKSKVDNQFYSV

SEQ ID NO: 53926 - protein, 91 aa, Homo sapiens
MSLHFLYYCSEPTLDVKIAFCQGFDKQVDVSYIAKHYNMSKSKVDNQFYSVEVGDSTFTVLKRYQNLKPIGSGAQGIVCAAYDAVLDRNVA

SEQ ID NO: 53927 - protein, 74 aa, Homo sapiens
MSKSKVDNQFYSVEVGDSTFTVLKRYQNLKPIGSGAQGIVCAAYDAVLDRNVAIKKLSRPFQNQTHAKRAYREL

SEQ ID NO: 53928 - protein, 121 aa, Homo sapiens
MSLHFLYYCSEPTLDVKIAFCQGFDKQVDVSYIAKHYNMSKSKVDNQFYSVEVGDSTFTVLKRYQNLKPIGSGAQGIVCAAYDAVLDRNVAIKKLSRPFQNQTHAKRAYRELVLMKCVNHK

SEQ ID NO: 53929 - protein, 117 aa, Homo sapiens
MSLHFLYYCSEPTLDVKIAFCQGFDKQVDVSYIAKHYNMSKSKVDNQFYSVEVGDSTFTVLKRYQNLKPIGSGAQGIVCAAYDAVLDRNVAIKKLSRPFQNQTHAKRAYRELVLMKC

SEQ ID NO: 53930 - protein, 141 aa, Homo sapiens
MSLHFLYYCSEPTLDVKIAFCQGFDKQVDVSYIAKHYNMSKSKVDNQFYSVEVGDSTFTVLKRYQNLKPIGSGAQGIVCAAYDAVLDRNVAIKKLSRPFQNQTHAKRAYRELVLMKCVNHKNIISLLNVFTPQKTLEEFQD

SEQ ID NO: 53931 - protein, 84 aa, Homo sapiens
MSKSKVDNQFYSVEVGDSTFTVLKRYQNLKPIGSGAQGIVCAAYDAVLDRNVAIKKLSRPFQNQTHAKRAYRELVLMKCVNHKN

SEQ ID NO: 53932 - protein, 52 aa, Homo sapiens
MSKSKVDNQFYSVEVGDSTFTVLKRYQNLKPIGSGAQGIVCAAYDAVLDRNV

SEQ ID NO: 53933 - protein, 48 aa, Homo sapiens
MSLHFLYYCSEPTLDVKIAFCQGFDKQVDVSYIAKHYNMSKSKVDNQF

SEQ ID NO: 53934 - protein, 335 aa, Homo sapiens
  VARIANT 1: note = MOD_RES - Any amino acid
XNVAIKKLSRPFQNQTHAKRAYRELVLMKCVNHKNIISLLNVFTPQKTLEEFQDVYLVMELMDANLCQVIQMELDHERMSYLLYQMLCGIKHLHSAGIIHRDLKPSNIVVKSDCTLKILDFGLARTAGTSFMMTPYVVTRYYRAPEVILGMGYKENVDMWSVGCIMGEMIKGAVLFPGTDHIDQWNKVIEQLGTPCPEFMKKLQPTVRNYVENRPKYAGLTFPKLFPDSLFPADSEHNKLKASQARDLLSKMLVIDPAKRISVDDALQHPYINVWYDPAEVEAPPPQIYDKQLDEREHTIEEWKELIYKEVMNSEEKTKNGVVKGQPSPSAQVQQ

SEQ ID NO: 53935 - protein, 587 aa, Homo sapiens
MAEKGDCIASVYGYDLGGRFVDFQPLGFGVNGLVLSAVDSRACRKVAVKKIALSDARSMKHALREIKIIRRLDHDNIVKVYEVLGPKGTDLQGELFKFSVAYIVQEYMETDLARLLEQGTLAEEHAKLFMYQLLRGLKYIHSANVLHRDLKPANIFISTEDLVLKIGDFGLARIVDQHYSHKGYLSEGLVTKWYRSPRLLLSPNNYTKAIDMWAAGCILAEMLTGRMLFAGAHELEQMQLILETIPVIREEDKDELLRVMPSFVSSTWEVKRPLRKLLPEVNSEAIDFLEKILTFNPMDRLTAEMGLQHPYMSPYSCPEDEPTSQHPFRIEDEIDDIVLMAANQSQLSNWDTCSSRYPVSLSSDLEWRPDRCQDASEVQRDPRAGSAPLAEDVQVDPRKDSHSSSERFLEQSHSSMERAFEADYGRSCDYKVGSPSYLDKLLWRDNKPHHYSEPKLILDLSHWKQAAGAPPTATGLADTGAREDEPASLFLEIAQWVKSTQGGPEHASPPADDPERRLSASPPGRPAPVDGGASPQFDLDVFISRALKLCTKPEDLPDNKLGDLNGACIPEHPGDLVQTEAFSKERW

SEQ ID NO: 53936 - protein, 376 aa, Homo sapiens
MWAAGCILAEMLTGRMLFAGAHELEQMQLILETIPVIREEDKDELLRVMPSFVSSTWEVKRPLRKLLPEVNSEAIDFLEKILTFNPMDRLTAEMGLQHPYMSPYSCPEDEPTSQHPFRIEDEIDDIVLMAANQSQLSNWDTCSSRYPVSLSSDLEWRPDRCQDASEVQRDPRAGSAPLAEDVQVDPRKDSHSSSERFLEQSHSSMERAFEADYGRSCDYKVGSPSYLDKLLWRDNKPHHYSEPKLILDLSHWKQAAGAPPTATGLADTGAREDEPASLFLEIAQWVKSTQGGPEHASPPADDPERRLSASPPGRPAPVDGGASPQFDLDVFISRALKLCTKPEDLPDNKLGDLNGACIPEHPGDLVQTEAFSKERW

SEQ ID NO: 53937 - protein, 677 aa, Homo sapiens
MESDLHQIIHSSQPLTLEHVRYFLYQLLRGLKYMHSAQVIHRDLKPSNLLVNENCELKIGDFGMARGLCTSPAEHQYFMTEYVATRWYRAPELMLSLHEYTQAIDLWSVGCIFGEMLARRQLFPGKNYVHQLQLIMMVLGTPSPAVIQAVGAERVRAYIQSLPPRQPVPWETVYPGADRQALSLLGRMLRFEPSARISAAAALRHPFLAKYHDPDDEPDCAPPFDFAFDREALTRERIKEAIVAEIEDFHARREGIRQQIRFQPSLQPVASEPGCPDVEMPSPWAPSGDCAMESPPPAPPPCPGPAPDTIDLTLQPPPPVSEPAPPKKDGAISDNTKAALKAALLKSLRSRLRDGPSAPLEAPEPRKPVTAQERQREREEKRRRRQERAKEREKRRQERERKERGAGASGGPSTDPLAGLVLSDNDRSLLERWTRMARPAAPALTSVPAPAPAPTPTPTPVQPTSPPPGPVAQPTGPQPQSAGSTSGPVPQPACPPPGPAPHPTGPPGPIPVPAPPQIATSTSLLAAQSLVPPPGLPGSSTPGVLPYFPPGLPPPDAGGAPQSSMSESPDVNLVTQQLSKSQVEDPLPPVFSGTPKGSGAGYGVGFDLEEFLNQSFDMGVADGPQDGQADSASLSASLLADWLEGHGMNPADIESLQREIQMDSPMLLADLPDLQDP

SEQ ID NO: 53938 - protein, 816 aa, Homo sapiens
MAEPLKEEDGEDGSAEPPGPVKAEPAHTAASVAAKNLALLKARSFDVTFDVGDEYEIIETIGNGAYGVVSSARRRLTGQQVAIKKIPNAFDVVTNAKRTLRELKILKHFKHDNIIAIKDILRPTVPYGEFKSVYVVLDLMESDLHQIIHSSQPLTLEHVRYFLYQLLRGLKYMHSAQVIHRDLKPSNLLVNENCELKIGDFGMARGLCTSPAEHQYFMTEYVATRWYRAPELMLSLHEYTQAIDLWSVGCIFGEMLARRQLFPGKNYVHQLQLIMMVLGTPSPAVIQAVGAERVRAYIQSLPPRQPVPWETVYPGADRQALSLLGRMLRFEPSARISAAAALRHPFLAKYHDPDDEPDCAPPFDFAFDREALTRERIKEAIVAEIEDFHARREGIRQQIRFQPSLQPVASEPGCPDVEMPSPWAPSGDCAMESPPPAPPPCPGPAPDTIDLTLQPPPPVSEPAPPKKDGAISDNTKAALKAALLKSLRSRLRDGPSAPLEAPEPRKPVTAQERQREREEKRRRRQERAKEREKRRQERERKERGAGASGGPSTDPLAGLVLSDNDRSLLERWTRMARPAAPALTSVPAPAPAPTPTPTPVQPTSPPPGPVAQPTGPQPQSAGSTSGPVPQPACPPPGPAPHPTGPPGPIPVPAPPQIATSTSLLAAQSLVPPPGLPGSSTPGVLPYFPPGLPPPDAGGAPQSSMSESPDVNLVTQQLSKSQVEDPLPPVFSGTPKGSGAGYGVGFDLEEFLNQSFDMGVADGPQDGQADSASLSASLLADWLEGHGMNPADIESLQREIQMDSPMLLADLPDLQDP

SEQ ID NO: 53939 - protein, 816 aa, Homo sapiens; identical to SEQ ID NO: 53938

SEQ ID NO: 53940 - protein, 816 aa, Homo sapiens; identical to SEQ ID NO: 53938

SEQ ID NO: 53941 - protein, 241 aa, Homo sapiens
MAEPLKEEDGEDGSAEPPGPVKAEPAHTAASVAAKNLALLKARSFDVTFDVGDEYEIIETIGNGAYGVVSSARRRLTGQQVAIKKIPNAFDVVTNAKRTLRELKILKHFKHDNIIAIKDILRPTVPYGEFKSVYVVLDLMESDLHQIIHSSQPLTLEHVRYFLYQLLRGLKYMHSAQVIHRDLKPSNLLVNENCELKIGDFGMARGLCTSPAEHQYFMTEYVATRWYRAPELMLSLHEYTQ

SEQ ID NO: 53942 - protein, 711 aa, Homo sapiens
MAERESGGLGGGAASPPAASPFLGLHIASPPNFRLTHDISLEEFEDEDLSEITDECGISLQCKDTLSLRPPRAGLLSAGGGGAGSRLQAEMLQMDLIDATGDTPGAEDDEEDDDEERAARRPGAGPPKAESGQEPASRGQGQSQGQSQGPGSGDTYRPKRPTTLNLFPQVPRSQDTLNNNSLGKKHSWQDRVSRSSSPLKTGEQTPPHEHICLSDELPPQSGPAPTTDRGTSTDSPCRRSTATQMAPPGGPPAAPPGGRGHSHRDRIHYQADVRLEATEEIYLTPVQRPPDAAEPTSAFLPPTESRMSVSSDPDPAAYPSTAGRPHPSISEEEEGFDCLSSPERAEPPGGGWRGSLGEPPPPPRASLSSDTSALSYDSVKYTLVVDEHAQLELVSLRPCFGDYSDESDSATVYDNCASVSSPYESAIGEEYEEAPRPQPPACLSEDSTPDEPDVHFSKKFLNVFMSGRSRSSSAESFGLFSCIINGEEQEQTHRAIFRFVPRHEDELELEVDDPLLVELQAEDYWYEAYNMRTGARGVFPAYYAIEVTKEPEHMAALAKNSDWVDQFRVKFLGSVQVPYHKGNDVLCAAMQKIATTRRLTVHFNPPSSCVLEISVRGVKIGVKADDSQEAKGNKCSHFFQLKNISFCGYHPKNNKYFGFITKHPADHRFACHVFVSEDSTKALAESVGRAFQQFYKQFVEYTCPTEDIYLE

SEQ ID NO: 53943 - protein, 598 aa, Homo sapiens
MLPDFPSPSTWAPGLLLPSGPALLSPSVLQDSLSLGRSEQPHPICSFQDDFQEFEMIDDNEEEDDEDEEEEEEEEEGDGEGQEGGDPGSEAPAPGPLIPSPSVEEPHKHRPTTLRLTTLGAQDSQDPEAAAGPGGVELVDMETLNPTRDTITPLWAAPGRAARPGRACSAACSEEEDEEDDEEEEDAEDSAGSPGGRGTGPSAPRDASLVYDAVKYTLVVDEHTQLELVSLRRCAGLGHDSEEDSGGEASEEEAGAALLGGGQVSGDTSPDSPDLTFSKKFLNVFVNSTSRSSSTESFGLFSCLVNGEEREQTHRAVFRFIPRHPDELELDVDDPVLVEAEEDDFWFRGFNMRTGERGVFPAFYAHAVPGPAKDLLGSKRSPCWVERFDVQFLGSVEVPCHQGNGILCAAMQKIATARKLTVHLRPPASCDLEISLRGVKLSLSGGGPEFQRCSHFFQMKNISFCGCHPRNSCEAPQGAAFQWERGVDRKRVLQTRGNVQPHLGAGQGAALNRATEGSSTGSEKGEWTPLVIMELTQSVNSCYFGFITKHPLLSRFACHVFVSQESMRPVAQSVGRAFLEYYQEHLAYACPTEDIYLE

SEQ ID NO: 53944 - protein, 823 aa, Homo sapiens
MADRAEMFSLSTFHSLSPPGCRPPQDISLEEFDDEDLSEITDDCGLGLSYDSDHCEKDSLSLGRSEQPHPICSFQDDFQEFEMIDDNEEEDDEDEEEEEEEEEGDGEGQEGGDPGSEAPAPGPLIPSPSVEEPHKHRPTTLRLTTLGAQDSLNNNGGFDLVRPASWQETALCSPAPEALRELPGPLPATDTGPGGAQSPVRPGCDCEGNRPAEPPAPGGTSPSSDPGIEADLRSRSSGGRGGRRSSQELSSPGSDSEDAGGRLGRMISSISETELELSSDGGSSSSGRSSHLTNSIEEASSPASEPEPPREPPRRPAFLPVGPDDTNSEYESGSESEPDLSEDADSPWLLSNLVSRMISEGSSPIRCPGQCLSPAPRPPGEPVSPAGGAAQDSQDPEAAAGPGGVELVDMETLCAPPPPAPAAPRPGPAQPGPCLFLSNPTRDTITPLWAAPGRAARPGRACSAACSEEEDEEDDEEEEDAEDSAGSPGGRGTGPSAPRDASLVYDAVKYTLVVDEHTQLELVSLRRCAGLGHDSEEDSGGEASEEEAGAALLGGGQVSGDTSPDSPDLTFSKKFLNVFVNSTSRSSSTESFGLFSCLVNGEEREQTHRAVFRFIPRHPDELELDVDDPVLVEAEEDDFWFRGFNMRTGERGVFPAFYAHAVPGPAKDLLGSKRSPCWVERFDVQFLGSVEVPCHQGNGILCAAMQKIATARKLTVHLRPPASCDLEISLRGVKLSLSGGGPEFQRCSHFFQMKNISFCGCHPRNSCYFGFITKHPLLSRFACHVFVSQESMRPVAQSVGRAFLEYYQEHLAYACPTEDIYLE

SEQ ID NO: 53945 - protein, 444 aa, Homo sapiens
MADRAEMFSLSTFHSLSPPGCRPPQDISLEEFDDEDLSEITDDCGLGLSYDSDHCEKDSLSLGRSEQPHPICSFQDDFQEFEMIDDNEEEEDEEDDEEEEDAEDSAGSPGGRGTGPSAPRDASLVYDAVKYTLVVDEHTQLELVSLRRCAGLGHDSEEDSGGEASEEEAGAALLGGGQVSGDTSPDSPDLTFSKKFLNVFVNSTSRSSSTESFGLFSCLVNGEEREQTHRAVFRFIPRHPDELELDVDDPVLVEAEEDDFWFRGFNMRTGERGVFPAFYAHAVPGPAKDLLGSKRSPCWVERFDVQFLGSVEVPCHQGNGILCAAMQKIATARKLTVHLRPPASCDLEISLRGVKLSLSGGGPEFQRCSHFFQMKNISFCGCHPRNSCYFGFITKHPLLSRFACHVFVSQESMRPVAQSVGRAFLEYYQEHLAYACPTEDIYLE

SEQ ID NO: 53946 - protein, 558 aa, Homo sapiens
MISSISETELELSSDGGSSSSGRSSHLTNSIEEASSPASEPEPPREPPRRPAFLPVGPDDTNSEYESGSESEPDLSEDADSPWLLSNLVSRMISEGSSPIRCPGQCLSPAPRPPGEPVSPAGGAAQDSQDPEAAAGPGGVELVDMETLCAPPPPAPAAPRPGPAQPGPCLFLSNPTRDTITPLWAAPGRAARPGRACSAACSEEEDEEDDEEEEDAEDSAGSPGGRGTGPSAPRDASLVYDAVKYTLVVDEHTQLELVSLRRCAGLGHDSEEDSGGEASEEEAGAALLGGGQVSGDTSPDSPDLTFSKKFLNVFVNSTSRSSSTESFGLFSCLVNGEEREQTHRAVFRFIPRHPDELELDVDDPVLVEAEEDDFWFRGFNMRTGERGVFPAFYAHAVPGPAKDLLGSKRSPCWVERFDVQFLGSVEVPCHQGNGILCAAMQKIATARKLTVHLRPPASCDLEISLRGVKLSLSGGGPEFQRCSHFFQMKNISFCGCHPRNSCYFGFITKHPLLSRFACHVFVSQESMRPVAQSVGRAFLEYYQEHLAYACPTEDIYLE

SEQ ID NO: 53947 - protein, 558 aa, Homo sapiens; identical to SEQ ID NO: 53946

SEQ ID NO: 53948 - protein, 546 aa, Homo sapiens
MADRAEMFSLSTFHSLSPPGCRPPQDISLEEFDDEDLSEITDDCGLGLSYDSDHCEKDSLSLGRSEQPHPICSFQDDFQEFEMIDDNEEEDDEDEEEEEEEEEGDGEGQEGGDPGSEAPAPGPLIPSPSVEEPHKHRPTTLRLTTLGAQDSLNNNGGFDLVRPASWQETALCSPAPEALRELPGPLPATDTGPGGAQSPVRPGCDCEGNRPAEPPAPGGTSPSSDPGIEADLRSRSSGGRGGRRSSQELSSPGSDSEDAGGRLGRMISSISETELELSSDGGSSSSGRSSHLTFSKKFLNVFVNSTSRSSSTESFGLFSCLVNGEEREQTHRAVFRFIPRHPDELELDVDDPVLVEAEEDDFWFRGFNMRTGERGVFPAFYAHAVPGPAKDLLGSKRSPCWVERFDVQFLGSVEVPCHQGNGILCAAMQKIATARKLTVHLRPPASCDLEISLRGVKLSLSGGGPEFQRCSHFFQMKNISFCGCHPRNSCYFGFITKHPLLSRFACHVFVSQESMRPVAQSVGRAFLEYYQEHLAYACPTEDIYLE

SEQ ID NO: 53949 - protein, 382 aa, Homo sapiens
MSDSKCDSQFYSVQVADSTFTVLKRYQQLKPIGSGAQGIVCAAFDTVLGINVAVKKLSRPFQNQTHAKRAYRELVLLKCVNHKNIISLLNVFTPQKTLEEFQDVYLVMELMDANLCQVIHMELDHERMSYLLYQMLCGIKHLHSAGIIHRDLKPSNIVVKSDCTLKILDFGLARTACTNFMMTPYVVTRYYRAPEVILGMGYKENVDIWSVGCIMAEMVLHKVLFPGRDYIDQWNKVIEQLGTPSAEFMKKLQPTVRNYVENRPKYPGIKFEELFPDWIFPSESERDKIKTSQARDLLSKMLVIDPDKRISVDEALRHPYITVWYDPAEAEAPPPQIYDAQLEEREHAIEEWKELIYKEVMDWEERSKNGVVKDQPSAQMQQ

SEQ ID NO: 53950 - protein, 382 aa, Homo sapiens
MSDSKCDSQFYSVQVADSTFTVLKRYQQLKPIGSGAQGIVCAAFDTVLGINVAVKKLSRPFQNQTHAKRAYRELVLLKCVNHKNIISLLNVFTPQKTLEEFQDVYLVMELMDANLCQVIHMELDHERMSYLLYQMLCGIKHLHSAGIIHRDLKPSNIVVKSDCTLKILDFGLARTACTNFMMTPYVVTRYYRAPEVILGMGYKENVDIWSVGCIMGELVKGCVIFQGTDHIDQWNKVIEQLGTPSAEFMKKLQPTVRNYVENRPKYPGIKFEELFPDWIFPSESERDKIKTSQARDLLSKMLVIDPDKRISVDEALRHPYITVWYDPAEAEAPPPQIYDAQLEEREHAIEEWKELIYKEVMDWEERSKNGVVKDQPSAQMQQ

SEQ ID NO: 53951 - protein, 124 aa, Homo sapiens
MSDSKCDSQFYSVQVADSTFTVLKRYQQLKPIGSGAQGIVWRHHCSALPFIGRMRPVSVIVTPWINQEGMLCEGLGWPSLPWCLTSTVCPAQNVRIVSLTLNVSLLHGKTVSRRSITGQLKCCI

SEQ ID NO: 53952 - protein, 242 aa, Homo sapiens
MSDSKCDSQFYSVQVADSTFTVLKRYQQLKPIGSGAQGIVCAAFDTVLGINVAVKKLSRPFQNQTHAKRAYRELVLLKCVNHKNIISLLNVFTPQKTLEEFQDVYLVMELMDANLCQVIHMELDHERMSYLLYQMLCGIKHLHSAGIIHRDLKPSNIVVKSDCTLKILDFGLARTACTNFMMTPYVVTRYYRAPEVILGMGYKENVDIWSVGCIMGELVKGCVIFQGTDRILPRDLGPAMLS

SEQ ID NO: 53953 - protein, 424 aa, Homo sapiens
MSDSKCDSQFYSVQVADSTFTVLKRYQQLKPIGSGAQGIVCAAFDTVLGINVAVKKLSRPFQNQTHAKRAYRELVLLKCVNHKNIISLLNVFTPQKTLEEFQDVYLVMELMDANLCQVIHMELDHERMSYLLYQMLCGIKHLHSAGIIHRDLKPSNIVVKSDCTLKILDFGLARTACTNFMMTPYVVTRYYRAPEVILGMGYKENVDIWSVGCIMGELVKGCVIFQGTDHIDQWNKVIEQLGTPSAEFMKKLQPTVRNYVENRPKYPGIKFEELFPDWIFPSESERDKIKTSQARDLLSKMLVIDPDKRISVDEALRHPYITVWYDPAEAEAPPPQIYDAQLEEREHAIEEWKELIYKEVMDWEERSKNGVVKDQPSDAAVSSNATPSQSSSINDISSMSTEQTLASDTDSSLDASTGPLEGCR

SEQ ID NO: 53954 - protein, 424 aa, Homo sapiens
MSDSKCDSQFYSVQVADSTFTVLKRYQQLKPIGSGAQGIVCAAFDTVLGINVAVKKLSRPFQNQTHAKRAYRELVLLKCVNHKNIISLLNVFTPQKTLEEFQDVYLVMELMDANLCQVIHMELDHERMSYLLYQMLCGIKHLHSAGIIHRDLKPSNIVVKSDCTLKILDFGLARTACTNFMMTPYVVTRYYRAPEVILGMGYKENVDIWSVGCIMAEMVLHKVLFPGRDYIDQWNKVIEQLGTPSAEFMKKLQPTVRNYVENRPKYPGIKFEELFPDWIFPSESERDKIKTSQARDLLSKMLVIDPDKRISVDEALRHPYITVWYDPAEAEAPPPQIYDAQLEEREHAIEEWKELIYKEVMDWEERSKNGVVKDQPSDAAVSSNATPSQSSSINDISSMSTEQTLASDTDSSLDASTGPLEGCR

SEQ ID NO: 53955 - protein, 104 aa, Homo sapiens
MSDSKCDSQFYSVQVADSTFTVLKRYQQLKPIGSGAQGIVCAAFDTVLGINVAVKKLSRPFQNQTHAKRAYRELVLLKCVNHKNIISLLNVFTPQKTLEEFQDV

SEQ ID NO: 53956 - protein, 214 aa, Homo sapiens
MSDSKCDSQFYSVQVADSTFTVLKRYQQLKPIGSGAQGIVCAAFDTVLGINVAVKKLSRPFQNQTHAKRAYRELVLLKCVNHKNIISLLNVFTPQKTLEEFQDVYLVMELMDANLCQVIHMELDHERMSYLLYQMLCGIKHLHSAGIIHRDLKPSNIVVKSDCTLKILDFGLARTACTNFMMTPYVVTRYYRAPEVILGMGYKENAIKYWTLWH

SEQ ID NO: 53957 - protein, 448 aa, Homo sapiens
MLWLALGPFPAMENQVLVIRIKIPNSGAVDWTVHSGPQLLFRDVLDVIGQVLPEATTTAFEYEDEDGDRITVRSDEEMKAMLSYYYSTVMEQQVNGQLIEPLQIFPRACKPPGERNIHGLKVNTRAGPSQHSSPAVSDSLPSNSLKKSSAELKKILANGQMNEQDIRYRDTLGHGNGGTVYKAYHVPSGKILAVKVILLDITLELQKQIMSELEILYKCDSSYIIGFYGAFFVENRISICTEFMDGGSLDVYRKMPEHVLGRIAVAVVKGLTYLWSLKILHRDVKPSNMLVNTRGQVKLCDFGVSTQLVNSIAKTYVGTNAYMAPERISGEQYGIHSDVWSLGISFMELALGRFPYPQIQKNQGSLMPLQLLQCIVDEDSPVLPVGEFSEPFVHFITQCMRKQPKERPAPEELMGHPFIVQFNDGNAAVVSMWVCRALEERRSQQGPP

SEQ ID NO: 53958 - protein, 438 aa, Homo sapiens
MLWLALGPFPAMENQVLVIRIKIPNSGAVDWTVHSGPQLLFRDVLDVIGQVLPEATTTAFEYEDEDGDRITVRSDEEMKAMLSYYYSTVMEQQVNGQLIEPLQIFPRACKPPGERNIHGLKVNTRAGPSQHSSPAVSDSLPSNSLKKSSAELKKILANGQMNEQDIRYRDTLGHGNGGTVYKAYHVPSGKILAVKVILLDITLELQKQIMSELEILYKCDSSYIIGFYGAFFVENRISICTEFMDGGSLDVYRKMPEHVLGRIAVAVVKGLTYLWSLKILHRDVKPSNMLVNTRGQVKLCDFGVSTQLVNSIAKTYVGTNAYMAPERISGEQYGIHSDVWSLGISFMEIQKNQGSLMPLQLLQCIVDEDSPVLPVGEFSEPFVHFITQCMRKQPKERPAPEELMGHPFIVQFNDGNAAVVSMWVCRALEERRSQQGPP

SEQ ID NO: 53959 - protein, 444 aa, Homo sapiens
MLWLALGPFPAMENQVLVIRIKIPNSGAVDWTVHSGPQLLFRDVLDVIGQVLPEATTTAFEYEDEDGDRITVRSDEEMKAMLSYYYSTVMEQQVNGQLIEPLQIFPRACKPPGERNIHGLKVNTRAGPSQHSSPAVSDSLPSNSLKKSSAELKKILANGQMNEQDIRYRDTLGHGNGGTVYKAYHVPSGKILAVKVILLDITLELQKQIMSELEILYKCDSSYIIGFYGAFFVENRISICTEFMDGGSLDVYRKMPEHVLGRIAVAVVKGLTYLWSLKILHRDVKPSNMLVNTRGQVKLCDFGVSTQLVNSIAKTYVGTNAYMAPERISGEQYGIHSDVWSLGISFMEIQKNQGSLMPLQLLQCIVDEDSPVLPVGEFSEPFVHFITQCMRKQPKERPAPEELMGHPFIVQFNDGNAAVVSMWVCRALEERRSPASLPSPSSSI

SEQ ID NO: 53960 - protein, 412 aa, Homo sapiens
MMEGHFPQSDVIGQVLPEATTTAFEYEDEDGDRITVRSDEEMKAMLSYYYSTVMEQQVNGQLIEPLQIFPRACKPPGERNIHGLKVNTRAGPSQHSSPAVSDSLPSNSLKKSSAELKKILANGQMNEQDIRYRDTLGHGNGGTVYKAYHVPSGKILAVKVILLDITLELQKQIMSELEILYKCDSSYIIGFYGAFFVENRISICTEFMDGGSLDVYRKMPEHVLGRIAVAVVKGLTYLWSLKILHRDVKPSNMLVNTRGQVKLCDFGVSTQLVNSIAKTYVGTNAYMAPERISGEQYGIHSDVWSLGISFMELALGRFPYPQIQKNQGSLMPLQLLQCIVDEDSPVLPVGEFSEPFVHFITQCMRKQPKERPAPEELMGHPFIVQFNDGNAAVVSMWVCRALEERRSQQGPP

SEQ ID NO: 53961 - protein, 334 aa, Homo sapiens
MSQSKGKKRNPGLKIPKEAFEQPQTSSTPPRDLDSKACISIGNQNFEVKADDLEPIMELGRGAYGVVEKMRHVPSGQIMAVKRIRATVNSQEQKRLLMDLDISMRTVDCPFTVTFYGALFREGDVWICMELMDTSLDKFYKQVIDKGQTIPEDILGKIAVSIVKALEHLHSKLSVIHRDVKPSNVLINALGQVKMCDFGISGYLVDSVAKTIDAGCKPYMAPERINPELNQKGYSVKSDIWSLGITMIELAILRFPYDSWGTPFQQLKQVVEEPSPQLPADKFSAEFVDFTSQCLKKNSKERPTYPELMQHPFFTLHESKGTDVASFVKLILGD

SEQ ID NO: 53962 - protein, 334 aa, Homo sapiens; identical to SEQ ID NO: 53961

SEQ ID NO: 53963 - protein, 954 aa, Homo sapiens
MEEEEGAVAKEWGTTPAGPVWTAVFDYEAAGDEELTLRRGDRVQVLSQDCAVSGDEGWWTGQLPSGRVGVFPSNYVAPGAPAAPAGLQLPQEIPFHELQLEEIIGVGGFGKVYRALWRGEEVAVKAARLDPEKDPAVTAEQVCQEARLFGALQHPNIIALRGACLNPPHLCLVMEYARGGALSRVLAGRRVPPHVLVNWAVQVARGMNYLHNDAPVPIIHRDLKSINILILEAIENHNLADTVLKITDFGLAREWHKTTKMSAAGTYAWMAPEVIRLSLFSKSSDVWSFGVLLWELLTGEVPYREIDALAVAYGVAMNKLTLPIPSTCPEPFARLLEECWDPDPHGRPDFGSILKRLEVIEQSALFQMPLESFHSLQEDWKLEIQHMFDDLRTKEKELRSREEELLRAAQEQRFQEEQLRRREQELAEREMDIVERELHLLMCQLSQEKPRVRKRKGNFKRSRLLKLREGGSHISLPSGFEHKITVQASPTLDKRKGSDGASPPASPSIIPRLRAIRLTPVDCGGSSSGSSSGGSGTWSRGGPPKKEELVGGKKKGRTWGPSSTLQKERVGGEERLKGLGEGSKQWSSSAPNLGKSPKHTPIAPGFASLNEMEEFAEAEDGGSSVPPSPYSTPSYLSVPLPAEPSPGARAPWEPTPSAPPARWGHGARRRCDLALLGCATLLGAVGLGADVAEARAADGEEQRRWLDGLFFPRAGRFPRGLSPPARPHGRREDVGPGLGLAPSATLVSLSSVSDCNSTRSLLRSDSDEAAPAAPSPPPSPPAPTPTPSPSTNPLVDLELESFKKDPRQSLTPTHVTAACAVSRGHRRTPSDGALGQRGPPEPAGHGPGPRDLLDFPRLPDPQALFPARRRPPEFPGRPTTLTFAPRPRPAASRPRLDPWKLVSFGRTLTISPPSRPDTPESPGPPSVQPTLLDMDMEGQNQDSTVPLCGAHGSH

SEQ ID NO: 53964 - protein, 847 aa, Homo sapiens
MEPLKSLFLKSPLGSWNGSGSGGGGGGGGGRPEGSPKAAGYANPVWTALFDYEPSGQDELALRKGDRVEVLSRDAAISGDEGWWAGQVGGQVGIFPSNYVSRGGGPPPCEVASFQELRLEEVIGIGGFGKVYRGSWRGELVAVKAARQDPDEDISVTAESVRQEARLFAMLAHPNIIALKAVCLEEPNLCLVMEYAAGGPLSRALAGRRVPPHVLVNWAVQIARGMHYLHCEALVPVIHRDLKSNNILLLQPIESDDMEHKTLKITDFGLAREWHKTTQMSAAGTYAWMAPEVIKASTFSKGSDVWSFGVLLWELLTGEVPYRGIDCLAVAYGVAVNKLTLPIPSTCPEPFAQLMADCWAQDPHRRPDFASILQQLEALEAQVLREMPRDSFHSMQEGWKREIQGLFDELRAKEKELLSREEELTRAAREQRSQAEQLRRREHLLAQWELEVFERELTLLLQQVDRERPHVRRRRGTFKRSKLRARDGGERISMPLDFKHRITVQASPGLDRRRNVFEVGPGDSPTFPRFRAIQLEPAEPGQAWGRQSPRRLEDSSNGERRACWAWGPSSPKPGEAQNGRRRSRMDEATWYLDSDDSSPLGSPSTPPALNGNPPRPSLEPEEPKRPVPAERGSSSGTPKLIQRALLRGTALLASLGLGRDLQPPGGPGRERGESPTTPPTPTPAPCPTEPPPSPLICFSLKTPDSPPTPAPLLLDLGIPVGQRSAKSPRREEEPRGGTVSPPPGTSRSAPGTPGTPRSPPLGLISRPRPSPLRSRIDPWSFVSAGPRPSPLPSPQPAPRRAPWTLFPDSDPFWDSPPANPFQGGPQDCRAQTKDMGAQAPWVPEAGP

SEQ ID NO: 53965 - protein, 590 aa, Homo sapiens
MEHKTLKITDFGLAREWHKTTQMSAAGTYAWMAPEVIKASTFSKGSDVWSFGVLLWELLTGEVPYRGIDCLAVAYGVAVNKLTLPIPSTCPEPFAQLMADCWAQDPHRRPDFASILQQLEALEAQVLREMPRDSFHSMQEGWKREIQGLFDELRAKEKELLSREEELTRAAREQRSQAEQLRRREHLLAQWELEVFERELTLLLQQVDRERPHVRRRRGTFKRSKLRARDGGERISMPLDFKHRITVQASPGLDRRRNVFEVGPGDSPTFPRFRAIQLEPAEPGQAWGRQSPRRLEDSSNGERRACWAWGPSSPKPGEAQNGRRRSRMDEATWYLDSDDSSPLGSPSTPPALNGNPPRPSLEPEEPKRPVPAERGSSSGTPKLIQRALLRGTALLASLGLGRDLQPPGGPGRERGESPTTPPTPTPAPCPTEPPPSPLICFSLKTPDSPPTPAPLLLDLGIPVGQRSAKSPRREEEPRGGTVSPPPGTSRSAPGTPGTPRSPPLGLISRPRPSPLRSRIDPWSFVSAGPRPSPLPSPQPAPRRAPWTLFPDSDPFWDSPPANPFQGGPQDCRAQTKDMGAQAPWVPEAGP

SEQ ID NO: 53966 - protein, 859 aa, Homo sapiens
MACLHETRTPSPSFGGFVSTLSEASMRKLDPDTSDCTPEKDLTPTHVLQLHEQDAGGPGGAAGSPESRASRVRADEVRLQCQSGSGFLEGLFGCLRPVWTMIGKAYSTEHKQQQEDLWEVPFEEILDLQWVGSGAQGAVFLGRFHGEEVAVKKVRDLKETDIKHLRKLKHPNIITFKGVCTQAPCYCILMEFCAQGQLYEVLRAGRPVTPSLLVDWSMGIAGGMNYLHLHKIIHRDLKSPNMLITYDDVVKISDFGTSKELSDKSTKMSFAGTVAWMAPEVIRNEPVSEKVDIWSFGVVLWELLTGEIPYKDVDSSAIIWGVGSNSLHLPVPSSCPDGFKILLRQCWNSKPRNRPSFRQILLHLDIASADVLSTPQETYFKSQAEWREEVKLHFEKIKSEGTCLHRLEEELVMRRREELRHALDIREHYERKLERANNLYMELNALMLQLELKERELLRREQALERRCPGLLKPHPSRGLLHGNTMEKLIKKRNVPQKLSPHSKRPDILKTESLLPKLDAALSGVGLPGCPKGPPSPGRSRRGKTRHRKASAKGSCGDLPGLRTAVPPHEPGGPGSPGGLGGGPSAWEACPPALRGLHHDLLLRKMSSSSPDLLSAALGSRGRGATGGAGDPGSPPPARGDTPPSEGSAPGSTSPDSPGGAKGEPPPPVGPGEGVGLLGTGREGTSGRGGSRAGSQHLTPAALLYRAAVTRSQKRGISSEEEEGEVDSEVELTSSQRWPQSLNMRQSLSTFSSENPSDGEEGTASEPSPSGTPEVGSTNTDERPDERSDDMCSQGSEIPLDPPPSEVIPGPEPSSLPIPHQELLRERGPPNSEDSDCDSTELDNSNSVDALRPPASLPP

SEQ ID NO: 53967 - protein, 966 aa, Homo sapiens
MANFQEHLSCSSSPHLPFSESKTFNGLQDELTAMGNHPSPKLLEDQQEKGMVRTELIESVHSPVTTTVLTSVSEDSRDQFENSVLQLREHDESETAVSQGNSNTVDGESTSGTEDIKIQFSRSGSGSGGFLEGLFGCLRPVWNIIGKAYSTDYKLQQQDTWEVPFEEISELQWLGSGAQGAVFLGKFRAEEVAIKKVREQNETDIKHLRKLKHPNIIAFKGVCTQAPCYCIIMEYCAHGQLYEVLRAGRKITPRLLVDWSTGIASGMNYLHLHKIIHRDLKSPNVLVTHTDAVKISDFGTSKELSDKSTKMSFAGTVAWMAPEVIRNEPVSEKVDIWSFGVVLWELLTGEIPYKDVDSSAIIWGVGSNSLHLPVPSTCPDGFKILMKQTWQSKPRNRPSFRQTLMHLDIASADVLATPQETYFKSQAEWREEVKKHFEKIKSEGTCIHRLDEELIRRRREELRHALDIREHYERKLERANNLYMELSAIMLQLEMREKELIKREQAVEKKYPGTYKRHPVRPIIHPNAMEKLMKRKGVPHKSGMQTKRPDLLRSEGIPTTEVAPTASPLSGSPKMSTSSSKSRYRSKPRHRRGNSRGSHSDFAAILKNQPAQENSPHPTYLHQAQSQYPSLHHHNSLQQQYQQPPPAMSQSHHPRLNMHGQDIATCANNLRYFGPAAALRSPLSNHAQRQLPGSSPDLISTAMAADCWRSSEPDKGQAGPWGCCQADAYDPCLQCRPEQYGSLDIPSAEPVGRSPDLSKSPAHNPLLENAQSSEKTEENEFSGCRSESSLGTSHLGTPPALPRKTRPLQKSGDDSSEEEEGEVDSEVEFPRRQRPHRCISSCQSYSTFSSENFSVSDGEEGNTSDHSNSPDELADKLEDRLAEKLDDLLSQTPEIPIDISSHSDGLSDKECAVRRVKTQMSLGKLCVEERGYENPMQFEESDCDSSDGECSDATVRTNKHYSSATW

SEQ ID NO: 53968 - protein, 966 aa, Homo sapiens; identical to SEQ ID NO: 53967

SEQ ID NO: 53969 - protein, 137 aa, Homo sapiens
MANFQEHLSCSSSPHLPFSESKTFNGLQDELTAMGNHPSPKLLEDQQEKGMVRTELIESVHSPVTTTVLTSVSEDSRDQFENSVLQLREHDESETAVSQGNSNTVDGESTSGTEDIKIQFSRSGSGSGGFLEGLFGC

SEQ ID NO: 53970 - protein, 113 aa, Homo sapiens
MANFQEHLSCSSSPHLPFSESKTFNGLQDELTAMGNHPSPKLLEDQQEKGMVRTELIESVHSPVTTTVLTSVSEDSRDQFENSVLQLREHDESETAVSQGNSNTVDGESTSGT

SEQ ID NO: 53971 - protein, 822 aa, Homo sapiens
MSYVECKCLQLENKNTWEVPFEEISELQWLGSGAQGAVFLGKFRAEEVAIKKVREQNETDIKHLRKLKHPNIIAFKGVCTQAPCYCIIMEYCAHGQLYEVLRAGRKITPRLLVDWSTGIASGMNYLHLHKIIHRDLKSPNVLVTHTDAVKISDFGTSKELSDKSTKMSFAGTVAWMAPEVIRNEPVSEKVDIWSFGVVLWELLTGEIPYKDVDSSAIIWGVGSNSLHLPVPSTCPDGFKILMKQTWQSKPRNRPSFRQTLMHLDIASADVLATPQETYFKSQAEWREEVKKHFEKIKSEGTCIHRLDEELIRRRREELRHALDIREHYERKLERANNLYMELSAIMLQLEMREKELIKREQAVEKKYPGTYKRHPVRPIIHPNAMEKLMKRKGVPHKSGMQTKRPDLLRSEGIPTTEVAPTASPLSGSPKMSTSSSKSRYRSKPRHRRGNSRGSHSDFAAILKNQPAQENSPHPTYLHQAQSQYPSLHHHNSLQQQYQQPPPAMSQSHHPRLNMHGQDIATCANNLRYFGPAAALRSPLSNHAQRQLPGSSPDLISTAMAADCWRSSEPDKGQAGPWGCCQADAYDPCLQCRPEQYGSLDIPSAEPVGRSPDLSKSPAHNPLLENAQSSEKTEENEFSGCRSESSLGTSHLGTPPALPRKTRPLQKSGDDSSEEEEGEVDSEVEFPRRQRPHRCISSCQSYSTFSSENFSVSDGEEGNTSDHSNSPDELADKLEDRLAEKLDDLLSQTPEIPIDISSHSDGLSDKECAVRRVKTQMSLGKLCVEERGYENPMQFEESDCDSSDGECSDATVRTNKHYSSATW

SEQ ID NO: 53972 - protein, 759 aa, Homo sapiens
MYCGIQILALWERGVCTQAPCYCIIMEYCAHGQLYEVLRAGRKITPRLLVDWSTGIASGMNYLHLHKIIHRDLKSPNVLVTHTDAVKISDFGTSKELSDKSTKMSFAGTVAWMAPEVIRNEPVSEKVDIWSFGVVLWELLTGEIPYKDVDSSAIIWGVGSNSLHLPVPSTCPDGFKILMKQTWQSKPRNRPSFRQTLMHLDIASADVLATPQETYFKSQAEWREEVKKHFEKIKSEGTCIHRLDEELIRRRREELRHALDIREHYERKLERANNLYMELSAIMLQLEMREKELIKREQAVEKKYPGTYKRHPVRPIIHPNAMEKLMKRKGVPHKSGMQTKRPDLLRSEGIPTTEVAPTASPLSGSPKMSTSSSKSRYRSKPRHRRGNSRGSHSDFAAILKNQPAQENSPHPTYLHQAQSQYPSLHHHNSLQQQYQQPPPAMSQSHHPRLNMHGQDIATCANNLRYFGPAAALRSPLSNHAQRQLPGSSPDLISTAMAADCWRSSEPDKGQAGPWGCCQADAYDPCLQCRPEQYGSLDIPSAEPVGRSPDLSKSPAHNPLLENAQSSEKTEENEFSGCRSESSLGTSHLGTPPALPRKTRPLQKSGDDSSEEEEGEVDSEVEFPRRQRPHRCISSCQSYSTFSSENFSVSDGEEGNTSDHSNSPDELADKLEDRLAEKLDDLLSQTPEIPIDISSHSDGLSDKECAVRRVKTQMSLGKLCVEERGYENPMQFEESDCDSSDGECSDATVRTNKHYSSATW

SEQ ID NO: 53973 - protein, 946 aa, Homo sapiens
MAVMEMACPGAPGSAVGQQKELPKAKEKTPPLGKKQSSVYKLEAVEKSPVFCGKWEILNDVITKGTAKEGSEAGPAAISIIAQAECENSQEFSPTFSERIFIAGSKQYSQSESLDQIPNNVAHATEGKMARVCWKGKRRSKARKKRKKKSSKSLAHAGVALAKPLPRTPEQESCTIPVQEDESPLGAPYVRNTPQFTKPLKEPGLGQLCFKQLGEGLRALPRSELHKLISPLQCLNHVWKLHHPQDGGPLPLPTHPFPYSRLPHPFPFHPLQPWKPHPLESFLGKLACVDSQKPLPDPHLSKLACVDSPKPLPGPHLEPSCLSRGAHEKFSVEEYLVHALQGSVSSGQAHSLTSLAKTWAARGSRSREPSPKTEDNEGVLLTEKLKPVDYEYREEVHWATHQLRLGRGSFGEVHRMEDKQTGFQCAVKKVRLEVFRAEELMACAGLTSPRIVPLYGAVREGPWVNIFMELLEGGSLGQLVKEQGCLPEDRALYYLGQALEGLEYLHSRRILHGDVKADNVLLSSDGSHAALCDFGHAVCLQPDGLGKSLLTGDYIPGTETHMAPEVVLGRSCDAKVDVWSSCCMMLHMLNGCHPWTQFFRGPLCLKIASEPPPVREIPPSCAPLTAQAIQEGLRKEPIHRVSAAELGGKVNRALQQVGGLKSPWRGEYKEPRHPPPNQANYHQTLHAQPRELSPRAPGPRPAEETTGRAPKLQPPLPPEPPEPNKSPPLTLSKEESGMWEPLPLSSLEPAPARNPSSPERKATVPEQELQQLEIELFLNSLSQPFSLEEQEQILSCLSIDSLSLSDDSEKNPSKASQSSRDTLSSGVHSWSSQAEARSSSWNMVLARGRPTDTPSYFNGVKVQIQSLNGEHLHIREFHRVKVGDIATGISSQIPAAAFSLVTKDGQPVRYDMEVPDSGIDLQCTLAPDGSFAWSWRVKHGQLENRP

SEQ ID NO: 53974 - protein, 433 aa, Homo sapiens
CFKQLGEGLRALPRSELHKLISPLQCLNHVWKLHHPQDGGPLPLPTHHPFPFHPLQPWKPHPLESFLGKLACVDSQKPLPDPHLSKLACVDSPKPLPGPHLEPSCLSRGAHEKFSVEEYLVHALQGSVSSGQAHSLTSLAKTWAARGSRSREPSPKTEDNEGVLLTEKLKPVDYEYREEVHWATHQLRLGRGSFGEVHRMEDKQTGFQCAVKKVRLEVFRAEELMACAGLTSPRIVPLYGAVREGPWVNIFMELLEGGSLGQLVKEQGCLPEDRALYYLGQALEGLEYLHSRRILHGDVKADNVLLSSDGSHAALCDFGHAVCLQPDGLGKSLLTGDYIPGTETHMAPEVVLGRSCDAKVDVWSSCCMMLHMLNGCHPWTQFFRGPLCLKVGDGTQHGQQGELQGPGAQAAGWRGCSAVADGARGGLVIHVGS

SEQ ID NO: 53975 - protein, 1313 aa, Homo sapiens
MESGGGNAPAGALGAASESPQCPPPPGVEGAAGPAEPDGAAEGAAGGSGEGESGGGPRRALRAVYVRSESSQGGAAGGPEAGARQCLLRACEAEGAHLTSVPFGELDFGETAVLDAFYDADVAVVDMSDVSRQPSLFYHLGVRESFDMANNVILYHDTDADTALSLKDMVTQKNTASSGNYYFIPYIVTPCADYFCCESDAQRRASEYMQPNWDNILGPLCMPLVDRFISLLKDIHVTSCVYYKETLLNDIRKAREKYQGEELAKELARIKLRMDNTEVLTSDIIINLLLSYRDIQDYDAMVKLVETLEMLPTCDLADQHNIKFHYAFALNRRNSTGDREKALQIMLQVLQSCDHPGPDMFCLCGRIYKDIFLDSDCKDDTSRDSAIEWYRKGFELQSSLYSGINLAVLLIVAGQQFETSLELRKIGVRLNSLLGRKGSLEKMNNYWDVGQFFSVSMLAHDVGKAVQAAERLFKLKPPVWYLRSLVQNLLLIRRFKKTIIEHSPRQERLNFWLDIIFEATNEVTNGLRFPVLVIEPTKVYQPSYVSINNEAEERTVSLWHVSPTEMKQMHEWNFTASSIKGISLSKFDERCCFLYVHDNSDDFQIYFSTEEQCSRFFSLVKEMITNTAGSTVELEGETDGDTLEYEYDHDANGERVVLGKGTYGIVYAGRDLSNQVRIAIKEIPERDSRYSQPLHEEIALHKYLKHRNIVQYLGSVSENGYIKIFMEQVPGGSLSALLRSKWGPMKEPTIKFYTKQILEGLKYLHENQIVHRDIKGDNVLVNTYSGVVKISDFGTSKRLAGVNPCTETFTGTLQYMAPEIIDQGPRGYGAPADIWSLGCTIIEMATSKPPFHELGEPQAAMFKVGMFKIHPEIPEALSAEARAFILSCFEPDPHKRATTAELLREGFLRQVNKGKKNRIAFKPSEGPRGVVLALPTQGEPMATSSSEHGSVSPDSDAQPDALFERTRAPRHHLGHLLSVPDESSALEDRGLASSPEDRDQGLFLLRKDSERRAILYKILWEEQNQVASNLQECVAQSSEELHLSVGHIKQIIGILRDFIRSPEHRVMATTISKLKVDLDFDSSSISQIHLVLFGFQDAVNKILRNHLIRPHWMFAMDNIIRRAVQAAVTILIPELRAHFEPTCETEGVDKDMDEAEEGYPPATGPGQEAQPHQQHLSLQLGELRQETNRLLEHLVEKEREYQNLLRQTLEQKTQELYHLQLKLKSNCITENPAGPYGQRTDKELIDWLRLQGADAKTIEKIVEEGYTLSDILNEITKEDLRYLRLRGGLLCRLWSAVSQYRRAQEASETKDKA

SEQ ID NO: 53976 - protein, 1558 aa, Homo sapiens
MREAAAALVPPPAFAVTPAAAMEEPPPPPPPPPPPPEPETESEPECCLAARQEGTLGDSACKSPESDLEDFSDETNTENLYGTSPPSTPRQMKRMSTKHQRNNVGRPASRSNLKEKMNAPNQPPHKDTGKTVENVEEYSYKQEKKIRAALRTTERDRKKNVQCSFMLDSVGGSLPKKSIPDVDLNKPYLSLGCSNAKLPVSVPMPIARPARQTSRTDCPADRLKFFETLRLLLKLTSVSKKKDREQRGQENTSGFWLNRSNELIWLELQAWHAGRTINDQDFFLYTARQAIPDIINEILTFKVDYGSFAFVRDRAGFNGTSVEGQCKATPGTKIVGYSTHHEHLQRQRVSFEQVKRIMELLEYIEALYPSLQALQKDYEKYAAKDFQDRVQALCLWLNITKDLNQKLRIMGTVLGIKNLSDIGWPVFEIPSPRPSKGNEPEYEGDDTEGELKELESSTDESEEEQISDPRVPEIRQPIDNSFDIQSRDCISKKLERLESEDDSLGWGAPDWSTEAGFSRHCLTSIYRPFVDKALKQMGLRKLILRLHKLMDGSLQRARIALVKNDRPVEFSEFPDPMWGSDYVQLSRTPPSSEEKCSAVSWEELKAMDLPSFEPAFLVLCRVLLNVIHECLKLRLEQRPAGEPSLLSIKQLVRECKEVLKGGLLMKQYYQFMLQEVLEDLEKPDCNIDAFEEDLHKMLMVYFDYMRSWIQMLQQLPQASHSLKNLLEEEWNFTKEITHYIRGGEAQAGKLFCDIAGMLLKSTGSFLEFGLQESCAEFWTSADDSSASDEIRRSVIEISRALKELFHEARERASKALGFAKMLRKDLEIAAEFRLSAPVRDLLDVLKSKQYVKVQIPGLENLQMFVPDTLAEEKSIILQLLNAAAGKDCSKDSDDVLIDAYLLLTKHGDRARDSEDSWGTWEAQPVKVVPQVETVDTLRSMQVDNLLLVVMQSAHLTIQRKAFQQSIEGLMTLCQEQTSSQPVIAKALQQLKNDALELCNRISNAIDRVDHMFTSEFDAEVDESESVTLQQYYREAMIQGYNFGFEYHKEVVRLMSGEFRQKIGDKYISFARKWMNYVLTKCESGRGTRPRWATQGFDFLQAIEPAFISALPEDDFLSLQALMNECIGHVIGKPHSPVTGLYLAIHRNSPRPMKVPRCHSDPPNPHLIIPTPEGFRGSSVPENDRLASIAAELQFRSLSRHSSPTEERDEPAYPRGDSSGSTRRSWELRTLISQSKDTASKLGPIEAIQKSVRLFEEKRYREMRRKNIIGQVCDTPKSYDNVMHVGLRKVTFKWQRGNKIGEGQYGKVYTCISVDTGELMAMKEIRFQPNDHKTIKETADELKIFEGIKHPNLVRYFGVELHREEMYIFMEYCDEGTLEEVSRLGLQEHVIRLYSKQITIAINVLHEHGIVHRDIKGANIFLTSSGLIKLGDFGCSVKLKNNAQTMPGEVNSTLGTAAYMAPEVITRAKGEGHGRAADIWSLGCVVIEMVTGKRPWHEYEHNFQIMYKVGMGHKPPIPERLSPEGKDFLSHCLESDPKMRWTASQLLDHSFVKVCTDEE

SEQ ID NO: 53977 - protein, 1608 aa, Homo sapiens
MREAAAALVPPPAFAVTPAAAMEEPPPPPPPPPPPPEPETESEPECCLAARQEGTLGDSACKSPESDLEDFSDETNTENLYGTSPPSTPRQMKRMSTKHQRNNVGRPASRSNLKEKMNAPNQPPHKDTGKTVENVEEYSYKQEKKIRAALRTTERDRKKNVQCSFMLDSVGGSLPKKSIPDVDLNKPYLSLGCSNAKLPVSVPMPIARPARQTSRTDCPADRLKFFETLRLLLKLTSVSKKKDREQRGQENTSGFWLNRSNELIWLELQAWHAGRTINDQDFFLYTARQAIPDIINEILTFKVDYGSFAFVRDRAGFNGTSVEGQCKATPGTKIVGYSTHHEHLQRQRVSFEQVKRIMELLEYIEALYPSLQALQKDYEKYAAKDFQDRVQALCLWLNITKDLNQKLRIMGTVLGIKNLSDIGWPVFEIPSPRPSKGNEPEYEGDDTEGELKELESSTDESEEEQISDPRVPEIRQPIDNSFDIQSRDCISKKLERLESEDDSLGWGAPDWSTEAGFSRHCLTSIYRPFVDKALKQMGLRKLILRLHKLMDGSLQRARIALVKNDRPVEFSEFPDPMWGSDYVQLSRTPPSSEEKCSAVSWEELKAMDLPSFEPAFLVLCRVLLNVIHECLKLRLEQRPAGEPSLLSIKQLVRECKEVLKGGLLMKQYYQFMLQEVLEDLEKPDCNIDAFEEDLHKMLMVYFDYMRSWIQMLQQLPQASHSLKNLLEEEWNFTKEITHYIRGGEAQAGKLFCDIAGMLLKSTGSFLEFGLQESCAEFWTSADDSSASDEIRRSVIEISRALKELFHEARERASKALGFAKMLRKDLEIAAEFRLSAPVRDLLDVLKSKQYVKVQIPGLENLQMFVPDTLAEEKSIILQLLNAAAGKDCSKDSDDVLIDAYLLLTKHGDRARDSEDSWGTWEAQPVKVVPQVETVDTLRSMQVDNLLLVVMQSAHLTIQRKAFQQSIEGLMTLCQEQTSSQPVIAKALQQLKNDALELCNRISNAIDRVDHMFTSEFDAEVDESESVTLQQYYREAMIQGYNFGFEYHKEVVRLMSGEFRQKIGDKYISFARKWMNYVLTKCESGRGTRPRWATQGFDFLQAIEPAFISALPEDDFLSLQALMNECIGHVIGKPHSPVTGLYLAIHRNSPRPMKVPRCHSDPPNPHLIIPTPEGFSTRSMPSDARSHGSPAAAAAAAAAAVAASRPSPSGGDSVLPKSISSAHDTRGSSVPENDRLASIAAELQFRSLSRHSSPTEERDEPAYPRGDSSGSTRRSWELRTLISQSKDTASKLGPIEAIQKSVRLFEEKRYREMRRKNIIGQVCDTPKSYDNVMHVGLRKVTFKWQRGNKIGEGQYGKVYTCISVDTGELMAMKEIRFQPNDHKTIKETADELKIFEGIKHPNLVRYFGVELHREEMYIFMEYCDEGTLEEVSRLGLQEHVIRLYSKQITIAINVLHEHGIVHRDIKGANIFLTSSGLIKLGDFGCSVKLKNNAQTMPGEVNSTLGTAAYMAPEVITRAKGEGHGRAADIWSLGCVVIEMVTGKRPWHEYEHNFQIMYKVGMGHKPPIPERLSPEGKDFLSHCLESDPKMRWTASQLLDHSFVKVCTDEE

SEQ ID NO: 53978 - protein, 1498 aa, Homo sapiens
MREAAAALVPPPAFAVTPAAAMEEPPPPPPPPPPPPEPETESEPECCLAARQEGTLGDSACKSPESDLEDFSDETNTENLYGTSPPSTPRQMKRMSTKHQRNNVGRPASRSNLKEKMNAPNQPPHKDTGKTVENVEEYSYKQEKKIRAALRTTERDRKKNVQCSFMLDSVGGSLPKKSIPDVDLNKPYLSLGCSNAKLPVSVPMPIARPARQTSRTDCPADRLKFFETLRLLLKLTSVSKKKDREQRGQENTSGFWLNRSNELIWLELQAWHAGRTINDQDFFLYTARQAIPDIINEILTFKVDYGSFAFVRDRAGFNGTSVEGQCKATPGTKIVGYSTHHEHLQRQRVSFEQVKRIMELLEYIEALYPSLQALQKDYEKYAAKDFQDRVQALCLWLNITKDLNQKLRIMGTVLGIKNLSDIGWPVFEIPSPRPSKGNEPEYEGDDTEGELKELESSTDESEEEQISDPRVPEIRQPIDNSFDIQSRDCISKKLERLESEDDSLGWGAPDWSTEAGFSRHCLTSIYRPFVDKALKQMGLRKLILRLHKLMDGSLQRARIALVKNDRPVEFSEFPDPMWGSDYVQLSRTPPSSEEKCSAVSWEELKAMDLPSFEPAFLVLCRVLLNVIHECLKLRLEQRPAGEPSLLSIKQLVRECKEVLKGGLLMKQYYQFMLQEVLEDLEKPDCNIDAFEEDLHKMLMVYFDYMRSWIQMLQQLPQASHSLKNLLEEEWNFTKEITHYIRGGEAQAGKLFCDIAGMLLKSTGSFLEFGLQESCAEFWTSADDSSASDEIRRSVIEISRALKELFHEARERASKALGFAKMLRKDLEIAAEFRLSAPVRDLLDVLKSKQYVKVQIPGLENLQMFVPDTLAEEKSIILQLLNAAAGKDCSKDSDDVLIDAYLLLTKHGDRARDSEDSWGTWEAQPVKVVPQVETVDTLRSMQVDNLLLVVMQSAHLTIQRKAFQQSIEGLMTLCQEQTSSQPVIAKALQQLKNDALELCNRISNAIDRVDHMFTSEFDAEVDESESVTLQQYYREAMIQGYNFGFEYHKEVVRLMSGEFRQKIGDKYISFARKWMNYVLTKCESGRGTRPRWATQGFDFLQAIEPAFISALPEDDFLSLQALMNECIGHVIGKPHSPVTGLYLAIHRNSPRPMKVPRCHSDPPNPHLIIPTPEGFRGSSVPENDRLASIAAELQFRSLSRHSSPTEERDEPAYPRGDSSGSTRRSWELRTLISQSKDTASKLGPIEAIQKSVRLFEEKRYREMRRKNIIGQVCDTPKSYDNVMHVGLRKVTFKWQRGNKIGEGQYGKVYTCISVDTGELMAMKEIRFQPNDHKTIKETADELKIFEGIKHPNLVRYFGVELHREEMYIFMEYCDEGTLEEVSRLGLQEHVIRLYSKQITIAINVLHEHGIVHRDIKGANIFLTSSGLIKLGDFGCSVKLKNNAQTMPGEVNSTLGTAAYMAPEVITRAKGEGHGRAADIWSLGCVVIEMVTGKICKDTE

SEQ ID NO: 53979 - protein, 107 aa, Homo sapiens
MEEPPPPPPPPPPPPEPETESEPECCLAARQEGTLGDSACKSPESDLEDFSDETNTENLYGTSPPSTPRQMKRMSTKHQRNNVGRPASRSNLKGVRQISHAVSSSLN

SEQ ID NO: 53980 - protein, 621 aa, Homo sapiens
MEQVPGGSLSALLRSKWGPLKDNEQTIGFYTKQILEGLKYLHDNQIVHRDIKGDNVLINTYSGVLKISDFGTSKRLAGINPCTETFTGTLQYMAPEIIDKGPRGYGKAADIWSLGCTIIEMATGKPPFYELGEPQAAMFKVGMFKVHPEIPESMSAEAKAFILKCFEPDPDKRACANDLLVDEFLKVSSKKKKTQPKLSALSAGSNEYLRSISLPVPVLVEDTSSSSEYGSVSPDTELKVDPFSFKTRAKSCGERDVKGIRTLFLGIPDENFEDHSAPPSPEEKDSGFFMLRKDSERRATLHRILTEDQDKIVRNLMESLAQGAEEPKLKWEHITTLIASLREFVRSTDRKIIATTLSKLKLELDFDSHGISQVQVVLFGFQDAVNKVLRNHNIKPHWMFALDSIIRKAVQTAITILVPELRPHFSLASESDTADQEDLDVEDDHEEQPSNQTVRRPQAVIEDAVATSGVSTLSSTVSHDSQSAHRSLNVQLGRMKIETNRLLEELVRKEKELQALLHRAIEEKDQEIKHLKLKSQPIEIPELPVFHLNSSGTNTEDSELTDWLRVNGADEDTISRFLAEDYTLLDVLYYVTRDDLKCLRLRGGMLCTLWKAIIDFRNKQT

SEQ ID NO: 53981 - protein, 1374 aa, Homo sapiens
MSTEADEGITFSVPPFAPSGFCTIPEGGICRRGGAAAVGEGEEHQLPPPPPGSFWNVESAAAPGIGCPAATSSSSATRGRGSSVGGGSRRTTVAYVINEASQGQLVVAESEALQSLREACETVGATLETLHFGKLDFGETTVLDRFYNADIAVVEMSDAFRQPSLFYHLGVRESFSMANNIILYCDTNSDSLQSLKEIICQKNTMCTGNYTFVPYMITPHNKVYCCDSSFMKGLTELMQPNFELLLGPICLPLVDRFIQLLKVAQASSSQYFRESILNDIRKARNLYTGKELAAELARIRQRVDNIEVLTADIVINLLLSYRDIQDYDSIVKLVETLEKLPTFDLASHHHVKFHYAFALNRRNLPGDRAKALDIMIPMVQSEGQVASDMYCLVGRIYKDMFLDSNFTDTESRDHGASWFKKAFESEPTLQSGINYAVLLLAAGHQFESSFELRKVGVKLSSLLGKKGNLEKLQSYWEVGFFLGASVLANDHMRVIQASEKLFKLKTPAWYLKSIVETILIYKHFVKLTTEQPVAKQELVDFWMDFLVEATKTDVTVVRFPVLILEPTKIYQPSYLSINNEVEEKTISIWHVLPDDKKGIHEWNFSASSVRGVSISKFEERCCFLYVLHNSDDFQIYFCTELHCKKFFEMVNTITEEKGRSTEEGDCESDLLEYDYEYDENGDRVVLGKGTYGIVYAGRDLSNQVRIAIKEIPERDSRYSQPLHEEIALHKHLKHKNIVQYLGSFSENGFIKIFMEQVPGGSLSALLRSKWGPLKDNEQTIGFYTKQILEGLKYLHDNQIVHRDIKGDNVLINTYSGVLKISDFGTSKRLAGINPCTETFTGTLQYMAPEIIDKGPRGYGKAADIWSLGCTIIEMATGKPPFYELGEPQAAMFKVGMFKVHPEIPESMSAEAKAFILKCFEPDPDKRACANDLLVDEFLKVSSKKKKTQPKLSALSAGSNEYLRSISLPVPVLVEDTSSSSEYGSVSPDTELKVDPFSFKTRAKSCGERDVKGIRTLFLGIPDENFEDHSAPPSPEEKDSGFFMLRKDSERRATLHRILTEDQDKIVRNLMESLAQGAEEPKLKWEHITTLIASLREFVRSTDRKIIATTLSKLKLELDFDSHGISQVQVVLFGFQDAVNKVLRNHNIKPHWMFALDSIIRKAVQTAITILVPELRPHFSLASESDTADQEDLDVEDDHEEQPSNQTVRRPQAVIEDAVATSGVSTLSSTVSHDSQSAHRSLNVQLGRMKIETNRLLEELVRKEKELQALLHRAIEEKDQEIKHLKLKSQPIEIPELPVFHLNSSGTNTEDSELTDWLRVNGADEDTISRFLAEDYTLLDVLYYVTRDDLKCLRLRGGMLCTLWKAIIDFRNKQT

SEQ ID NO: 53982 - protein, 1256 aa, Homo sapiens
TLQRASGAATEAPRRSEPPPGSGVPSGERAPERRRRRGGEGAARDGSCLARRARSSPELWLARRCGWAGDAAAVAARPGEMSTEADEGITFSVPPFAPSGFCTIPEGGICRRGGAAAVGEGEEHQLPPPPPGSFWNVESAAAPGIGCPAATSSSSATRGRGSSVGGGSRRTTVAYVINEASQGQLVVAESEALQSLREACETVGATLETLHFGKLDFGETTVLDRFYNADIAVVEMSDAFRQPSLFYHLGVRESFSMANNIILYCDTNSDSLQSLKEIICQKNTMCTGNYTFVPYMITPHNKVYCCDSSFMKGLTELMQPNFELLLGPICLPLVDRFIQLLKVAQASSSQYFRESILNDIRKARNLYTGKELAAELARIRQRVDNIEVLTADIVINLLLSYRDIQDYDSIVKLVETLEKLPTFDLASHHHVKFHYAFALNRRNLPGDRAKALDIMIPMVQSEGQVASDMYCLVGRIYKDMFLDSNFTDTESRDHGASWFKKAFESEPTLQSGINYAVLLLAAGHQFESSFELRKVGVKLSSLLGKKGNLEKLQSYWEVGFFLGASVLANDHMRVIQASEKLFKLKTPAWYLKSIVETILIYKHFVKLTTEQPVAKQELVDFWMDFLVEATKTDVTVVRFPVLILEPTKIYQPSYLSINNEVEEKTISIWHVLPDDKKGIHEWNFSASSVRGVSISKFEERCCFLYVLHNSDDFQIYFCTELHCKKFFEMVNTITEEKGRSTEEGDCESDLLEYDYEYDENGDRVVLGKGTYGIVYAGRDLSNQVRIAIKEIPERDSRYSQPLHEEIALHKHLKHKNIVQYLGSFSENGFIKIFMEQVPGGSLSALLRSKWGPLKDNEQTIGFYTKQILEGLKYLHDNQIVHRDIKGDNVLINTYSGVLKISDFGTSKRLAGINPCTETFTGTLQYMAPEIIDKGPRGYGKAADIWSLGCTIIEMATGKPPFYELGEPQAAMFKVGMFKVHPEIPESMSAEAKAFILKCFEPDPDKRACANDLLVDEFLKVSSKKKKTQPKLSDLSIAQAEYLRSISLPVPVLVEDTSSSSEYGSVSPDTELKVDPFSFKTRAKSCGERDVKGIRTLFLGIPDENFEDHSAPPSPEEKDSGFFMLRKDSERRATLHRILTEDQDKIVRNLMESLAQGAEEPKLKWEHITTLIASLREFVRSTDRKIIATTLSKLKLELDFDSHGISQVQVVLFGFQDAVNKVLRNHNIKPHWMFALDSIIRKAVQTAITILVPGIKP

SEQ ID NO: 53983 - protein, 1288 aa, Homo sapiens
MAGPCPRSGAERAGSCWQDPLAVALSRGRQLAAPPGRGCARSRPLSVVYVLTREPQPGLEPREGTEAEPLPLRCLREACAQVPRPRPPPQLRSLPFGTLELGDTAALDAFYNADVVVLEVSSSLVQPSLFYHLGVRESFSMTNNVLLCSQADLPDLQALREDVFQKNSDCVGSYTLIPYVVTATGRVLCGDAGLLRGLADGLVQAGVGTEALLTPLVGRLARLLEATPTDSCGYFRETIRRDIRQARERFSGPQLRQELARLQRRLDSVELLSPDIIMNLLLSYRDVQDYSAIIELVETLQALPTCDVAEQHNVCFHYTFALNRRNRPGDRAKALSVLLPLVQLEGSVAPDLYCMCGRIYKDMFFSSGFQDAGHREQAYHWYRKAFDVEPSLHSGINAAVLLIAAGQHFEDSKELRLIGMKLGCLLARKGCVEKMQYYWDVGFYLGAQILANDPTQVVLAAEQLYKLNAPIWYLVSVMETFLLYQHFRPTPEPPGGPPRRAHFWLHFLLQSCQPFKTACAQGDQCLVLVLEMNKVLLPAKLEVRGTDPVSTVTLSLLEPETQDIPSSWTFPVASICGVSASKRDERCCFLYALPPAQDVQLCFPSVGHCQWFCGLIQAWVTNPDSTAPAEEAEGAGEMLEFDYEYTETGERLVLGKGTYGVVYAGRDRHTRVRIAIKEIPERDSRFSQPLHEEIALHRRLRHKNIVRYLGSASQGGYLKIFMEEVPGGSLSSLLRSVWGPLKDNESTISFYTRQILQGLGYLHDNHIVHRDIKGDNVLINTFSGLLKISDFGTSKRLAGITPCTETFTGTLQYMAPEIIDQGPRGYGKAADIWSLGCTVIEMATGRPPFHELGSPQAAMFQVGMYKVHPPMPSSLSAEAQAFLLRTFEPDPRLRASAQTLLGDPFLQPGKRSRSPSSPRHAPRPSDAPSASPTPSANSTTQSQTFPCPQAPSQHPPSPPKRCLSYGGTSQLRVPEEPAAEEPASPEESSGLSLLHQESKRRAMLAAVLEQELPALAENLHQEQKQEQGARLGRNHVEELLRCLGAHIHTPNRRQLAQELRALQGRLRAQGLGPALLHRPLFAFPDAVKQILRKRQIRPHWMFVLDSLLSRAVRAALGVLGPEVEKEAVSPRSEELSNEGDSQQSPGQQSPLPVEPEQGPAPLMVQLSLLRAETDRLREILAGKEREYQALVQRALQRLNEEARTYVLAPEPPTALSTDQGLVQWLQELNVDSGTIQMLLNHSFTLHTLLTYATRDDLIYTRIRGGMVCRIWRAILAQRAGSTPVTSGP

SEQ ID NO: 53984 - protein, 104 aa, Homo sapiens
MVQLSLLRAETDRLREILAGKEREYQALVQRALQRLNEEARTYVLAPEPPTALSTDQGLVQWLQELNVDSGTIQMGRDGMPHLEGHLGTASRIHTSHLWTLRAE

SEQ ID NO: 53985 - protein, 1280 aa, Homo sapiens
MAGPCPRSGAERAGSCWQDPLAVALSRGRQLAAPPGRGCARSRPLSVVYVLTREPQPGLEPREGTEAEPLPLRCLREACAQVPRPRPPPQLRSLPFGTLELGDTAALDAFYNADVVVLEVSSSLVQPSLFYHLGVRESFSMTNNVLLCSQADLPDLQALRDCVGSYTLIPYVVTATGRVLCGDAGLLRGLADGLVQAGVGTEALLTPLVGRLARLLEATPTDSCGYFRETIRRDIRQARERFSGPQLRQELARLQRRLDSVELLSPDIIMNLLLSYRDVQDYSAIIELVETLQALPTCDVAEQHNVCFHYTFALNRRNRPGDRAKALSVLLPLVQLEGSVAPDLYCMCGRIYKDMFFSSGFQDAGHREQAYHWYRKAFDVEPSLHSGINAAVLLIAAGQHFEDSKELRLIGMKLGCLLARKGCVEKMQYYWDVGFYLGAQILANDPTQVVLAAEQLYKLNAPIWYLVSVMETFLLYQHFRPTPEPPGGPPRRAHFWLHFLLQSCQPFKTACAQGDQCLVLVLEMNKVLLPAKLEVRGTDPVSTVTLSLLEPETQDIPSSWTFPVASICGVSASKRDERCCFLYALPPAQDVQLCFPSVGHCQWFCGLIQAWVTNPDSTAPAEEAEGAGEMLEFDYEYTETGERLVLGKGTYGVVYAGRDRHTRVRIAIKEIPERDSRFSQPLHEEIALHRRLRHKNIVRYLGSASQGGYLKIFMEEVPGGSLSSLLRSVWGPLKDNESTISFYTRQILQGLGYLHDNHIVHRDIKGDNVLINTFSGLLKISDFGTSKRLAGITPCTETFTGTLQYMAPEIIDQGPRGYGKAADIWSLGCTVIEMATGRPPFHELGSPQAAMFQVGMYKVHPPMPSSLSAEAQAFLLRTFEPDPRLRASAQTLLGDPFLQPGKRSRSPSSPRHAPRPSDAPSASPTPSANSTTQSQTFPCPQAPSQHPPSPPKRCLSYGGTSQLRVPEEPAAEEPASPEESSGLSLLHQESKRRAMLAAVLEQELPALAENLHQEQKQEQGARLGRNHVEELLRCLGAHIHTPNRRQLAQELRALQGRLRAQGLGPALLHRPLFAFPDAVKQILRKRQIRPHWMFVLDSLLSRAVRAALGVLGPEVEKEAVSPRSEELSNEGDSQQSPGQQSPLPVEPEQGPAPLMVQLSLLRAETDRLREILAGKEREYQALVQRALQRLNEEARTYVLAPEPPTALSTDQGLVQWLQELNVDSGTIQMLLNHSFTLHTLLTYATRDDLIYTRIRGGMVCRIWRAILAQRAGSTPVTSGP

SEQ ID NO: 53986 - protein, 798 aa, Homo sapiens
  VARIANT 1: note = MOD_RES - Any amino acid
XMNLLLSYRDVQDYSAIIELVETLQALPTCDVAEQHNVCFHYTFALNRRNRPGDRAKALSVLLPLVQLEGSVAPDLYCMCGRIYKDMFFSSGFQDAGHREQAYHWYRKAFDVEPSLHSGINAAVLLIAAGQHFEDSKELRLIGMKLGCLLARKGCVEKMQYYWDVGFYLGAQILANDPTQVVLAAEQLYKLNAPIWYLVSVMETFLLYQHFRPTPEPPGGPPRRAHFWLHFLLQSCQPFKTACAQGDQCLVLVLEMNKVLLPAKLEVRGTDPVSTVTLSLLEPETQDIPSSWTFPVASICGVSASKRDERCCFLYALPPAQDVQLCFPSVGHCQWFCGLIQAWVTNPDSTAPAEEAEGAGEMLEFDYEYTETGERLVLGKGTYGVVYAGRDRHTRVRIAIKEIPERDSRFSQPLHEEIALHRRLRHKNIVRYLGSASQGGYLKIFMEEVPGGSLSSLLRSVWGPLKDNESTISFYTRQILQGLGYLHDNHIVHRDIKGDNVLINTFSGLLKISDFGTSKRLAGITPCTETFTGTLQYMAPEIIDQGPRGYGKAADIWSLGCTVIEMATGRPPFHELGSPQAAMFQVGMYKVHPPMPSSLSAEAQAFLLRTFEPDPRLRASAQTLLGDPFLQPGKRSRSPSSPRHAPRPSDAPSASPTPSANSTTQSQTFPCPQAPSQHPPSPPKRCLSYGGTSQLRVPEEPAAEEPASPEESSGLSLLHQESKRRAMLAAVLEQELPALAENLHQEQKQEQGARLGRNHVEELLRCLGAHIHTPNRRQLAQELRALQGWMNGEDKGSF

SEQ ID NO: 53987 - protein, 82 aa, Homo sapiens
  VARIANT 1: note = MOD_RES - Any amino acid
XEYQALVQRALQRLNEEARTYVLAPEPPTALSTDQGLVQWLQELNVDSGTIQMGRDGMPHLEGHLGTASRIHTSHLWTLRAE

SEQ ID NO: 53988 - protein, 1288 aa, Homo sapiens; identical to SEQ ID NO: 53983

SEQ ID NO: 53989 - protein, 797 aa, Homo sapiens
MNLLLSYRDVQDYSAIIELVETLQALPTCDVAEQHNVCFHYTFALNRRNRPGDRAKALSVLLPLVQLEGSVAPDLYCMCGRIYKDMFFSSGFQDAGHREQAYHWYRKAFDVEPSLHSGINAAVLLIAAGQHFEDSKELRLIGMKLGCLLARKGCVEKMQYYWDVGFYLGAQILANDPTQVVLAAEQLYKLNAPIWYLVSVMETFLLYQHFRPTPEPPGGPPRRAHFWLHFLLQSCQPFKTACAQGDQCLVLVLEMNKVLLPAKLEVRGTDPVSTVTLSLLEPETQDIPSSWTFPVASICGVSASKRDERCCFLYALPPAQDVQLCFPSVGHCQWFCGLIQAWVTNPDSTAPAEEAEGAGEMLEFDYEYTETGERLVLGKGTYGVVYAGRDRHTRVRIAIKEIPERDSRFSQPLHEEIALHRRLRHKNIVRYLGSASQGGYLKIFMEEVPGGSLSSLLRSVWGPLKDNESTISFYTRQILQGLGYLHDNHIVHRDIKGDNVLINTFSGLLKISDFGTSKRLAGITPCTETFTGTLQYMAPEIIDQGPRGYGKAADIWSLGCTVIEMATGRPPFHELGSPQAAMFQVGMYKVHPPMPSSLSAEAQAFLLRTFEPDPRLRASAQTLLGDPFLQPGKRSRSPSSPRHAPRPSDAPSASPTPSANSTTQSQTFPCPQAPSQHPPSPPKRCLSYGGTSQLRVPEEPAAEEPASPEESSGLSLLHQESKRRAMLAAVLEQELPALAENLHQEQKQEQGARLGRNHVEELLRCLGAHIHTPNRRQLAQELRALQGWMNGEDKGSF

SEQ ID NO: 53990 - protein, 260 aa, Homo sapiens
MDIASTNTSNKSDTNMEQVPATNDTIKRLESKLLKNQAKQQSESGRLSLGASRGSSVESLPPTSEGKRMSADMSEIEARIAATTGNGQPRRRSIQDLTVTGTEPGQVSSRSSSPSVRMITTSGPTSEKPTRSHPWTPDDSTDTNGSDNSIPMAYLTLDHQLQPLAPCPNSKESMAVFEQHCKMAQEYMKVQTEIALLLQRKQELVAELDQDEKDQQNTSRLVQEHKKLLDENKSLSTYYQQCKKQLEVIRSQQQKRQGTS

SEQ ID NO: 53991 - protein, 518 aa, Homo sapiens
MSTASAASSSSSSSAGEMIEAPSQVLNFEEIDYKEIEVEEVVGRGAFGVVCKAKWRAKDVAIKQIESESERKAFIVELRQLSRVNHPNIVKLYGACLNPVCLVMEYAEGGSLYNVLHGAEPLPYYTAAHAMSWCLQCSQGVAYLHSMQPKALIHRDLKPPNLLLVAGGTVLKICDFGTACDIQTHMTNNKGSAAWMAPEVFEGSNYSEKCDVFSWGIILWEVITRRKPFDEIGGPAFRIMWAVHNGTRPPLIKNLPKPIESLMTRCWSKDPSQRPSMEEIVKIMTHLMRYFPGADEPLQYPCQYSDEGQSNSATSTGSFMDIASTNTSNKSDTNMEQVPATNDTIKRLESKLLKNQAKQQSESGRLSLGASRGSSVESLPPTSEGKRMSADMSEIEARIAATTAYSKPKRGHRKTASFGNILDVPEIVISGNGQPRRRSIQDLTVTGTEPGQVSSRSSSPSVRMITTSGPTSEKPTRSHPWTPDDSTDTNGSDNSIPMAYLTLDHQLQARTSCRTGPG

SEQ ID NO: 53992 - protein, 491 aa, Homo sapiens
MSTASAASSSSSSSAGEMIEAPSQVLNFEEIDYKEIEVEEVVGRGAFGVVCKAKWRAKDVAIKQIESESERKAFIVELRQLSRVNHPNIVKLYGACLNPVCLVMEYAEGGSLYNVLHGAEPLPYYTAAHAMSWCLQCSQGVAYLHSMQPKALIHRDLKPPNLLLVAGGTVLKICDFGTACDIQTHMTNNKGSAAWMAPEVFEGSNYSEKCDVFSWGIILWEVITRRKPFDEIGGPAFRIMWAVHNGTRPPLIKNLPKPIESLMTRCWSKDPSQRPSMEEIVKIMTHLMRYFPGADEPLQYPCQYSDEGQSNSATSTGSFMDIASTNTSNKSDTNMEQVPATNDTIKRLESKLLKNQAKQQSESGRLSLGASRGSSVESLPPTSEGKRMSADMSEIEARIAATTGNGQPRRRSIQDLTVTGTEPGQVSSRSSSPSVRMITTSGPTSEKPTRSHPWTPDDSTDTNGSDNSIPMAYLTLDHQLQARTSCRTGPG

SEQ ID NO: 53993 - protein, 606 aa, Homo sapiens
MSTASAASSSSSSSAGEMIEAPSQVLNFEEIDYKEIEVEEVVGRGAFGVVCKAKWRAKDVAIKQIESESERKAFIVELRQLSRVNHPNIVKLYGACLNPVCLVMEYAEGGSLYNVLHGAEPLPYYTAAHAMSWCLQCSQGVAYLHSMQPKALIHRDLKPPNLLLVAGGTVLKICDFGTACDIQTHMTNNKGSAAWMAPEVFEGSNYSEKCDVFSWGIILWEVITRRKPFDEIGGPAFRIMWAVHNGTRPPLIKNLPKPIESLMTRCWSKDPSQRPSMEEIVKIMTHLMRYFPGADEPLQYPCQYSDEGQSNSATSTGSFMDIASTNTSNKSDTNMEQVPATNDTIKRLESKLLKNQAKQQSESGRLSLGASRGSSVESLPPTSEGKRMSADMSEIEARIAATTAYSKPKRGHRKTASFGNILDVPEIVISGNGQPRRRSIQDLTVTGTEPGQVSSRSSSPSVRMITTSGPTSEKPTRSHPWTPDDSTDTNGSDNSIPMAYLTLDHQLQPLAPCPNSKESMAVFEQHCKMAQEYMKVQTEIALLLQRKQELVAELDQDEKDQQNTSRLVQEHKKLLDENKSLSTYYQQCKKQLEVIRSQQQKRQGTS

SEQ ID NO: 53994 - protein, 579 aa, Homo sapiens
MSTASAASSSSSSSAGEMIEAPSQVLNFEEIDYKEIEVEEVVGRGAFGVVCKAKWRAKDVAIKQIESESERKAFIVELRQLSRVNHPNIVKLYGACLNPVCLVMEYAEGGSLYNVLHGAEPLPYYTAAHAMSWCLQCSQGVAYLHSMQPKALIHRDLKPPNLLLVAGGTVLKICDFGTACDIQTHMTNNKGSAAWMAPEVFEGSNYSEKCDVFSWGIILWEVITRRKPFDEIGGPAFRIMWAVHNGTRPPLIKNLPKPIESLMTRCWSKDPSQRPSMEEIVKIMTHLMRYFPGADEPLQYPCQYSDEGQSNSATSTGSFMDIASTNTSNKSDTNMEQVPATNDTIKRLESKLLKNQAKQQSESGRLSLGASRGSSVESLPPTSEGKRMSADMSEIEARIAATTGNGQPRRRSIQDLTVTGTEPGQVSSRSSSPSVRMITTSGPTSEKPTRSHPWTPDDSTDTNGSDNSIPMAYLTLDHQLQPLAPCPNSKESMAVFEQHCKMAQEYMKVQTEIALLLQRKQELVAELDQDEKDQQNTSRLVQEHKKLLDENKSLSTYYQQCKKQLEVIRSQQQKRQGTS

SEQ ID NO: 53995 - protein, 418 aa, Homo sapiens
MSTASAASSSSSSSAGEMIEAPSQVLNFEEIDYKEIEVEEVVGRGAFGVVCKAKWRAKDVAIKQIESESERKAFIVELRQLSRVNHPNLLLVAGGTVLKICDFGTACDIQTHMTNNKGSAAWMAPEVFEGSNYSEKCDVFSWGIILWEVITRRKPFDEIGGPAFRIMWAVHNGTRPPLIKNLPKPIESLMTRCWSKDPSQRPSMEEIVKIMTHLMRYFPGADEPLQYPCQYSDEGQSNSATSTGSFMDIASTNTSNKSDTNMEQVPATNDTIKRLESKLLKNQAKQQSESGRLSLGASRGSSVESLPPTSEGKRMSADMSEIEARIAATTGNGQPRRRSIQDLTVTGTEPGQVSSRSSSPSVRMITTSGPTSEKPTRSHPWTPDDSTDTNGSDNSIPMAYLTLDHQLQARTSCRTGPG

SEQ ID NO: 53996 - protein, 467 aa, Homo sapiens
MEYMSTGSDNKEEIDLLIKHLNVSDVIDIMENLYASEEPAVYEPSLMTMCQDSNQNDERSKSLLLSGQEVPWLSSVRYGTVEDLLAFANHISNTAKHFYGQRPQESGILLNMVITPQNGRYQIDSDVLLIPWKLTYRNIGSDFIPRGAFGKVYLAQDIKTKKRMACKLIPVDQFKPSDVEIQACFRHENIAELYGAVLWGETVHLFMEAGEGGSVLEKLESCGPMREFEIIWVTKHVLKGLDFLHSKKVIHHDIKPSNIVFMSTKAVLVDFGLSVQMTEDVYFPKDLRGTEIYMSPEVILCRGHSTKADIYSLGATLIHMQTGTPPWVKRYPRSAYPSYLYIIHKQAPPLEDIADDCSPGMRELIEASLERNPNHRPRAADLLKHEALNPPREDQPRCQSLDSALLERKRLLSRKELELPENIADSSCTGSTEESEMLKRQRSLYIDLGALAGYFNLVRGPPTLEYG

SEQ ID NO: 53997 - protein, 467 aa, Homo sapiens; identical to SEQ ID NO: 53996

SEQ ID NO: 53998 - protein, 132 aa, Homo sapiens
MEYMSTGSDNKEEIDLLIKHLNVSDVIDIMENLYASEEPAVYEPSLMTMCQDSNQNDERSKSLLLSGQEVPWLSSVRYGTVEDLLAFANHISNTAKHFYGQRPQESGILLNMVRFFPISWVLCAQLSYCSFI

SEQ ID NO: 53999 - protein, 467 aa, Homo sapiens; identical to SEQ ID NO: 53996

SEQ ID NO: 54000 - protein, 223 aa, Homo sapiens
MEYMSTGSDNKEEIDLLIKHLNVSDVIDIMENLYASEEPAVYEPSLMTMCQDSNQNDERSKSLLLSGQEVPWLSSVRYGTVEDLLAFANHISNTAKHFYGQRPQESGILLNMVITPQNGRYQIDSDVLLIPWKLTYRNIGSDFIPRGAFGKVYLAQDIKTKKRMACKLIPVDQFKPSDVEIQACFRHENIAELYGAVLWGETVHLFMEAGEGGSVLEKLESCG

SEQ ID NO: 54001 - protein, 255 aa, Homo sapiens
MEYMSTGSDNKEEIDLLIKHLNVSDVIDIMENLYASEEPAVYEPSLMTMCQDSNQNDERSKSLLLSGQEVPWLSSVRYGTVEDLLAFANHISNTAKHFYGQRPQESGILLNMVITPQNGRYQIDSDVLLIPWKLTYRNIGSDFIPRGAFGKVYLAQDIKTKKRMACKLIPVDQFKPSDVEIQACFRHENIAELYGAVLWGETVHLFMEAGEGGSVLEKLESCGPMREFEIIWVTKHVLKGLDFLHSKKVIHHDIK

SEQ ID NO: 54002 - protein, 190 aa, Homo sapiens
  VARIANT 1: note = MOD_RES - Any amino acid
XVEDLLAFANHISNTAKHFYGQRPQESGILLNMVITPQNGRYQIDSDVLLIPWKLTYRNIGSDFIPRGAFGKVYLAQDIKTKKRMACKLIPVDQFKPSDVEIQACFRHENIAELYGAVLWGETVHLFMEAGEGGSVLEKLESCGPMREFEIIWVTKHVLKGLDFLHSKKVIHHDIKRKYLWTYTFLAQRD

SEQ ID NO: 54003 - protein, 467 aa, Homo sapiens; identical to SEQ ID NO: 53996

SEQ ID NO: 54004 - protein, 1118 aa, Homo sapiens
MEPSRALLGCLASAAAAAPPGEDGAGAGAEEEEEEEEEAAAAVGPGELGCDAPLPYWTAVFEYEAAGEDELTLRLGDVVEVLSKDSQVSGDEGWWTGQLNQRVGIFPSNYVTPRSAFSSRCQPGGEDPSCYPPIQLLEIDFAELTLEEIIGIGGFGKVYRAFWIGDEVAVKAARHDPDEDISQTIENVRQEAKLFAMLKHPNIIALRGVCLKEPNLCLVMEFARGGPLNRVLSGKRIPPDILVNWAVQIARGMNYLHDEAIVPIIHRDLKSSNILILQKVENGDLSNKILKITDFGLAREWHRTTKMSAAGTYAWMAPEVIRASMFSKGSDVWSYGVLLWELLTGEVPFRGIDGLAVAYGVAMNKLALPIPSTCPEPFAKLMEDCWNPDPHSRPSFTNILDQLTTIEESGFFEMPKDSFHCLQDNWKHEIQEMFDQLRAKEKELRTWEEELTRAALQQKNQEELLRRREQELAEREIDILERELNIIIHQLCQEKPRVKKRKGKFRKSRLKLKDGNRISLPSDFQHKFTVQASPTMDKRKSLINSRSSPPASPTIIPRLRAIQLTPGESSKTWGRSSVVPKEEGEEEEKRAPKKKGRTWGPGTLGQKELASGDEGSPQRREKANGLSTPSESPHFHLGLKSLVDGYKQWSSSAPNLVKGPRSSPALPGFTSLMEMALLAASWVVPIDIEEDEDSEGPGSGESRLQHSPSQSYLCIPFPRGEDGDGPSSDGIHEEPTPVNSATSTPQLTPTNSLKRGGAHHRRCEVALLGCGAVLAATGLGFDLLEAGKCQLLPLEEPEPPAREEKKRREGLFQRSSRPRRSTSPPSRKLFKKEEPMLLLGDPSASLTLLSLSSISECNSTRSLLRSDSDEIVVYEMPVSPVEAPPLSPCTHNPLVNVRVERFKRDPNQSLTPTHVTLTTPSQPSSHRRTPSDGALKPETLLASRSPSSNGLSPSPGAGMLKTPSPSRDPGEFPRLPDPNVVFPPTPRRWNTQQDSTLERPKTLEFLPRPRPSANRQRLDPWWFVSPSHARSTSPANSSSTETPSNLDSCFASSSSTVEERPGLPALLPFQAGPLPPTERTLLDLDAEGQSQDSTVPLCRAELNTHRPAPYEIQQEFWS

SEQ ID NO: 54005 - protein, 820 aa, Homo sapiens
LVLILQKVENGDLSNKILKITDFGLAREWHRTTKMSAAGTYAWMAPEVIRASMFSKGSDVWSYGVLLWELLTGEVPFRGIDGLAVAYGVAMNKLALPIPSTCPEPFAKLMEDCWNPDPHSRPSFTNILDQLTTIEESGFFEMPKDSFHCLQDNWKHEIQEMFDQLRAKEKELRTWEEELTRAALQQKNQEELLRRREQELAEREIDILERELNIIIHQLCQEKPRVKKRKGKFRKSRLKLKDGNRISLPSDFQHKFTVQASPTMDKRKSLINSRSSPPASPTIIPRLRAIQLTPGESSKTWGRSSVVPKEEGEEEEKRAPKKKGRTWGPGTLGQKELASGDEGLKSLVDGYKQWSSSAPNLVKGPRSSPALPGFTSLMEMACFSSTLVIFTEDEDSEGPGSGESRLQHSPSQSYLCIPFPRGEDGDGPSSDGIHEEPTPVNSATSTPQLTPTNSLKRGGAHHRRCEVALLGCGAVLAATGLGFDLLEAGKCQLLPLEEPEPPAREEKKRREGLFQRSSRPRRSTSPPSRKLFKKEEPMLLLGDPSASLTLLSLSSISECNSTRSLLRSDSDEIVVYEMPVSPVEAPPLSPCTHNPLVNVRVERFKRDPNQSLTPTHVTLTTPSQPSSHRRTPSDGALKPETLLASRSPSSNGLSPSPGAGMLKTPSPSRDPGEFPRLPDPNVVFPPTPRRWNTQQDSTLERPKTLEFLPRPRPSANRQRLDPWWFVSPSHARSTSPANSSSTETPSNLDSCFASSSSTVEERPGLPALLPFQAGPLPPTERTLLDLDAEGQSQDSTVPLCRAELNTHRPAPYEIQQEFWS

SEQ ID NO: 54006 - protein, 1104 aa, Homo sapiens
MEPSRALLGCLASAAAAAPPGEDGAGAGAEEEEEEEEEAAAAVGPGELGCDAPLPYWTAVFEYEAAGEDELTLRLGDVVEVLSKDSQVSGDEGWWTGQLNQRVGIFPSNYVTPRSAFSSRCQPGGEDPSCYPPIQLLEIDFAELTLEEIIGIGGFGKVYRAFWIGDEVAVKAARHDPDEDISQTIENVRQEAKLFAMLKHPNIIALRGVCLKEPNLCLVMEFARGGPLNRVLSGKRIPPDILVNWAVQIARGMNYLHDEAIVPIIHRDLKSSNILILQKVENGDLSNKILKITDFGLAREWHRTTKMSAAGTYAWMAPEVIRASMFSKGSDVWSYGVLLWELLTGEVPFRGIDGLAVAYGVAMNKLALPIPSTCPEPFAKLMEDCWNPDPHSRPSFTNILDQLTTIEESGFFEMPKDSFHCLQDNWKHEIQEMFDQLRAKEKELRTWEEELTRAALQQKNQEELLRRREQELAEREIDILERELNIIIHQLCQEKPRVKKRKGKFRKSRLKLKDGNRISLPSDFQHKFTVQASPTMDKRKSLINSRSSPPASPTIIPRLRAIQLTPGESSKTWGRSSVVPKEEGEEEEKRAPKKKGRTWGPGTLGQKELASGDEGSPQRREKANGLSTPSESPHFHLGLKSLVDGYKQWSSSAPNLVKGPRSSPALPGFTSLMEMEDEDSEGPGSGESRLQHSPSQSYLCIPFPRGEDGDGPSSDGIHEEPTPVNSATSTPQLTPTNSLKRGGAHHRRCEVALLGCGAVLAATGLGFDLLEAGKCQLLPLEEPEPPAREEKKRREGLFQRSSRPRRSTSPPSRKLFKKEEPMLLLGDPSASLTLLSLSSISECNSTRSLLRSDSDEIVVYEMPVSPVEAPPLSPCTHNPLVNVRVERFKRDPNQSLTPTHVTLTTPSQPSSHRRTPSDGALKPETLLASRSPSSNGLSPSPGAGMLKTPSPSRDPGEFPRLPDPNVVFPPTPRRWNTQQDSTLERPKTLEFLPRPRPSANRQRLDPWWFVSPSHARSTSPANSSSTETPSNLDSCFASSSSTVEERPGLPALLPFQAGPLPPTERTLLDLDAEGQSQDSTVPLCRAELNTHRPAPYEIQQEFWS

SEQ ID NO: 54007 - protein, 833 aa, Homo sapiens
MDVVDPDIFNRDPRDHYDLLQRLGGGTYGEVFKARDKVSGDLVALKMVKMEPDDDVSTLQKEILILKTCRHANIVAYHGSYLWLQKLWICMEFCGAGSLQDIYQVTGSLSELQISYVCREVLQGLAYLHSQKKIHRDIKGANILINDAGEVRLADFGISAQIGATLARRLSFIGTPYWMAPEVAAVALKGGYNELCDIWSLGITAIELAELQPPLFDVHPLRVLFLMTKSGYQPPRLKEKGKWSAAFHNFIKVTLTKSPKKRPSATKMLSHQLVSQPGLNRGLILDLLDKLKNPGKGPSIGDIEDEEPELPPAIPRRIRSTHRSSSLGIPDADCCRRHMEFRKLRGMETRPPANTARLQPPRDLRSSSPRKQLSESSDDDYDDVDIPTPAEDTPPPLPPKPKFRSPSDEGPGSMGDDGQLSPGVLVRCASGPPPNSPRPGPPPSTSSPHLTAHSEPSLWNPPSRELDKPPLLPPKKEKMKRKGCALLVKLFNGCPLRIHSTAAWTHPSTKDQHLLLGAEEGIFILNRNDQEATLEMLFPSRTTWVYSINNVLMSLSGKTPHLYSHSILGLLERKETRAGNPIAHISPHRLLARKNMVSTKIQDTKGCRACCVAEGASSGGPFLCGALETSVVLLQWYQPMNKFLLVRQVLFPLPTPLSVFALLTGPGSELPAVCIGVSPGRPGKSVLFHTVRFGALSCWLGEMSTEHRGPVQVTQVEEDMVMVLMDGSVKLVTPEGSPVRGLRTPEIPMTEAVEAVAMVGGQLQAFWKHGVQVWALGSDQLLQELRDPTLTFRLLGSPRLECSGTISPHCNLLLPGSSNSPASASRVAGITGL

SEQ ID NO: 54008 - protein, 821 aa, Homo sapiens
MDVVDPDIFNRDPRDHYDLLQRLGGGTYGEVFKARDKVSGDLVALKMVKMEPDDDVSTLQKEILILKTCRHANIVAYHGSYLWLQKLWICMEFCGAGSLQDIYQVTGSLSELQISYVCREVLQGLAYLHSQKKIHRDIKGANILINDAGEVRLADFGISAQIGATLARRLSFIGTPYWMAPEVAAVALKGGYNELCDIWSLGITAIELAELQPPLFDVHPLRVLFLMTKSGYQPPRLKEKGKWSAAFHNFIKVTLTKSPKKRPSATKMLSHQLVSQPGLNRGLILDLLDKLKNPGKGPSIGDIEDEEPELPPAIPRRIRSTHRSSSLGIPDADCCRRHMEFRKLRGMETRPPANTARLQPPRDLRSSSPRKQLSESSDDDYDDVDIPTPAEDTPPPLPPKPKFRSPSDEGPGSMGDDGQLSPGVLVRCASGPPPNSPRPGPPPSTSSPHLTAHSEPSLWNPPSRELDKPPLLPPKKEKMKRKGCALLVKLFNGCPLRIHSTAAWTHPSTKDQHLLLGAEEGIFILNRNDQEATLEMLFPSRTTWVYSINNVLMSLSGKTPHLYSHSILGLLERKETRAGNPIAHISPHRLLARKNMVSTKIQDTKGCRACCVAEGASSGGPFLCGALETSVVLLQWYQPMNKFLLVRQVLFPLPTPLSVFALLTGPGSELPAVCIGVSPGRPGKSVLFHTVRFGALSCWLGEMSTEHRGPVQVTQVEEDMVMVLMDGSVKLVTPEGSPVRGLRTPEIPMTEAVEAVAMVGGQLQAFWKHGVQVWALGSDQLLQELRDPTLTFRLLGSPRPVVVETRPVDDPTAPSNLYIQE

SEQ ID NO: 54009 - protein, 239 aa, Homo sapiens
MEFRKLRGMETRPPANTARLQPPRDLRSSSPRKQLSESSDDDYDDVDIPTPAEDTPPPLPPKPKFRSPSDEGPGSMGDDGQLSPGVLVRCASGPPPNSPRPGPPPSTSSPHLTAHSEPSLWNPPSRELDKPPLLPPKKEKMKRKGCALLVKLFNGCPLRIHSTAAWTHPSTKDQHLLLGAEEGIFILNRNDQEATLEMERPPTCILIASLACWNGKRPEQETPSLTLAPTAYWQGTSSQ

SEQ ID NO: 54010 - protein, 833 aa, Homo sapiens; identical to SEQ ID NO: 54007

SEQ ID NO: 54011 - protein, 820 aa, Homo sapiens
MALLRDVSLQDPRDRFELLQRVGAGTYGDVYKARDTVTSELAAVKIVKLDPGDDISSLQQEITILRECRHPNVVAYIGSYLRNDRLWICMEFCGGGSLQEIYHATGPLEERQIAYVCREALKGLHHLHSQGKIHRDIKGANLLLTLQGDVKLADFGVSGELTASVAKRRSFIGTPYWMAPEVAAVERKGGYNELCDVWALGITAIELGELQPPLFHLHPMRALMLMSKSSFQPPKLRDKTRWTQNFHHFLKLALTKNPKKRPTAEKLLQHPFTTQQLPRALLTQLLDKASDPHLGTPSPEDCELETYDMFPDTIHSRGQHGPAERTPSEIQFHQVKFGAPRRKETDPLNEPWEEEWTLLGKEELSGSLLQSVQEALEERSLTIRSASEFQELDSPDDTMGTIKRAPFLGPLPTDPPAEEPLSSPPGTLPPPPSGPNSSPLLPTAWATMKQREDPERSSCHGLPPTPKVHMGACFSKVFNGCPLRIHAAVTWIHPVTRDQFLVVGAEEGIYTLNLHELHEDTLEKLISHRCSWLYCVNNVLLSLSGKSTHIWAHDLPGLFEQRRLQQQVPLSIPTNRLTQRIIPRRFALSTKIPDTKGCLQCRVVRNPYTGATFLLAALPTSLLLLQWYEPLQKFLLLKNFSSPLPSPAGMLEPLVLDGKELPQVCVGAEGPEGPGCRVLFHVLPLEAGLTPDILIPPEGIPGSAQQVIQVDRDTILVSFERCVRIVNMQGEPTATLAPELTFDFPIETVVCLQDSVLAFWSHGMQGRSLDTNEVTQEITDETRIFRVLGAHRDIILESIPTDNPEAHSNLYILTGHQSTY

SEQ ID NO: 54012 - protein, 846 aa, Homo sapiens
MEAPLRPAADILRRNPQQDYELVQRVGSGTYGDVYKARNVHTGELAAVKIIKLEPGDDFSLIQQEIFMVKECKHCNIVAYFGSYLSREKLWICMEYCGGGSLQDIYHVTGPLSELQIAYVCRETLQGLAYLHTKGKMHRDIKGANILLTDHGDVKLADFGVAAKITATIAKRKSFIGTPYWMAPEVAAVEKNGGYNQLCDIWAVGITAIELGELQPPMFDLHPMRALFLMSKSNFQPPKLKDKTKWSSTFHNFVKIALTKNPKKRPTAERLLTHTFVAQPGLSRALAVELLDKVNNPDNHAHYTEADDDDFEPHAIIRHTIRSTNRNARAERTASEINFDKLQFEPPLRKETEARDEMGLSSDPNFMLQWNPFVDGANTGKSTSKRAIPPPLPPKPRISSYPEDNFPDEEKASTIKHCPDSESRAPQILRRQSSPSCGPVAETSSIGNGDGISKLMSENTEGSAQAPQLPRKKDKRDFPKPAINGLPPTPKVLMGACFSKVFDGCPLKINCATSWIHPDTKDQYIIFGTEDGIYTLNLNELHEATMEQLFPRKCTWLYVINNTLMSLSVGKTFQLYSHNLIALFEHAKKPGLAAHIQTHRFPDRILPRKFALTTKIPDTKGCHKCCIVRNPYTGHKYLCGALQSGIVLLQWYEPMQKFMLIKHFDFPLPSPLNVFEMLVIPEQEYPMVCVAISKGTESNQVVQFETINLNSASSWFTEIGAGSQQLDSIHVTQLERDTVLVCLDKFVKIVNLQGKLKSSKKLASELSFDFRIESVVCLQDSVLAFWKHGMQGKSFKSDEVTQEISDETRVFRLLGSDRVVVLESRPTENPTAHSNLYILAGHENSY

SEQ ID NO: 54013 - protein, 232 aa, Homo sapiens
MATAESRALQFAEGAAFPAYRAPHAGGALLPPPSPAAALLPAPPAGPGPATFAGFLGRDPGPAPPPPASLGSPAPPKGAAAPSASQRRKRTSFSAEQLQLLELVFRRTRYPDIHLRERLAALTLLPESRIQVWFQNRRAKSRRQSGKSFQPLARPEIILNHCAPGTETKCLKPQLPLEVDVNCLPEPNGVGGGISDSSSQGQNFETCSPLSEDIGSKLDSWEEHIFSAFGNF

SEQ ID NO: 54014 - protein, 240 aa, Homo sapiens
MATAESRALQFAEGAAFPAYRAPHAGGALLPPPSPAAALLPAPPAGPGPATFAGFLGRDPGPAPPPPASLGSPAPPKGAAAPSASQRRKRTSFSAEQLQLLELVFRRTRYPDIHLRERLAALTLLPESRIQLLFSPLFQVWFQNRRAKSRRQSGKSFQPLARPEIILNHCAPGTETKCLKPQLPLEVDVNCLPEPNGVGGGISDSSSQGQNFETCSPLSEDIGSKLDSWEEHIFSAFGNF

SEQ ID NO: 54015 - protein, 293 aa, Homo sapiens
MATFSGPAGPILSLNPQEDVEFQKEVAQVRKRITQRKKQEQLTPGVVYVRHLPNLLDETQIFSYFSQFGTVTRFRLSRSKRTGNSKGYAFVEFESEDVAKIVAETMNNYLFGERLLECHFMPPEKVHKELFKDWNIPFKQPSYPSVKRYNRNRTLTQKLRMEERFKKKERLLRKKLAKKGIDYDFPSLILQKTESISKTNRQTSTKGQVLRKKKKKVSGTLDTPEKTVDSQGPTPVCTPTFLERRKSQVAELNDDDKDDEIVFKQPISCVKEEIQETQTPTHSRKKRRRSSNQ

SEQ ID NO: 54016 - protein, 418 aa, Homo sapiens
MAPRGRRRPRPHRSEGARRSKNTLERTHSMKDKAGQKCKPIDVFDFPDNSDVSSIGRLGENEKDEETYETFDPPLHSTAIYADEEEFSKHCGLSLSSTPPGKEAKRSSDTSGNEASEIESVKISAKKPGRKLRPISDDSESIEESDTRRKVKSAEKISTQRHEVIRTTASSELSEKPAESVTSKKTGPLSAQPSVEKENLAIESQSKTQKKGKISHDKRKKSRSKAIGSDTSDIVHIWCPEGMKTSDIKELNIVLPEFEKTHLEHQQRIESKVCKAAIATFYVNVKEQFIKMLKESQMLTNLKRKNAKMISDIEKKRQRMIEVQDELLRLEPQLKQLQTKYDELKERKSSLRNAAYFLSNLKQLYQDYSDVQAQEPNVKETYDSSSLPALLFKARTLLGAESHLRNINHQLEKLLDQG

SEQ ID NO: 54017 - protein, 320 aa, Homo sapiens
MAPRGRRRPRPHRSEGARRSKNTLERTHSMKDKAGQKCKPIDVFDFPDNSDVSSIGRLGENEKDEETYETFDPPLHSTAIYADEEEFSKHCGLSLSSTPPGKEAKRSSDTSGNEASEIESVKISAKKPGRKLRPISDDSESIEESDTRRKVKSAEKISTQRHEVIRTTASSELSEKPAESVTSKKTGPLSAQPSVEKENLAIESQSKTQKKGKISHDKRKKSRSKAIGSDTSDIVHIWCPEGMKTSDIKELNIVLPEFEKTHLEHQQRIESKVCKAAIATFYVNVKEQFIKMLKESQMLTNLKRKNAKVRATAETTTNKI

SEQ ID NO: 54018 - protein, 320 aa, Homo sapiens [sequence omitted]

SEQ ID NO: 54019 - protein, 337 aa, Homo sapiens
MAPRGRRRPRPHRSEGARRSKNTLERTHSMKDKAGQKCKPIDVFDFPDNSDVSSIGRLGENEKDEETYETFDPPLHSTAIYADEEEFSKHCGLSLSSTPPGKEAKRSSDTSGNEASEIESVKISAKKPGRKLRPISDDSESIEESDTRRKVKSAEKISTQRHEVIRTTASSELSEKPAESVTSKKTGPLSAQPSVEKENLAIESQSKTQKKGKISHDKRKKSRSKAIGSDTSDIVHIWCPEGMKTSDIKELNIVLPEFEKTHLEHQQRIESKVCKAAIATFYVNVKEQFIKMLKESQMLTNLKRKNAKMISDIEKKRQRMIEVQDELLRLWTGAGLW

SEQ ID NO: 54020 - protein, 919 aa, Homo sapiens
MAADVFMCSPRRPRSRGRQVLLKPQVSEDDDDSDTDEPSPPPASGAATPARAHASAAPPPPRAGPGREEPPRRQQIIHSGHFMVSSPHREHPPKKGYDFDTVNKQTCQTYSFGKTSSCHLSIDASLTKLFECMTLAYSGKLVSPKWKNFKGLKLQWRDKIRLNNAIWRAWYMQYLEKRKNPVCHFVTPLDGSVDVDEHRRPEAITTEGKYWKSRIEIVIREYHKWRTYFKKRLQQHKDEDLSSLVQDDDMLYWHKHGDGWKTPVPMEEDPLLDTDMLMSEFSDTLFSTLSSHQPVAWPNPREIAHLGNADMIQPGLIPLQPNLDFMDTFEPFQDLFSSSRSIFGSMLPASASAPVPDPNNPPAQESILPTTALPTVSLPDSLIAPPTAPSLAHMDEQGCEHTSRTEDPFIQPTDFGPSEPPLSVPQPFLPVFTMPLLSPSPAPPPISPVLPLVPPPATALNPPAPPTFHQPQKFAGVNKAPSVITHTASATLTHDAPATTFSQSQGLVITTHHPAPSAAPCGLALSPVTRPPQPRLTFVHPKPVSLTGGRPKQPHKIVPAPKPEPVSLVLKNARIAPAAFSGQPQAVIMTSGPLKREGMLASTVSQSNVVIAPAAIARAPGVPEFHSSILVTDLGHGTSSPPAPVSRLFPSTAQDPLGKGEQVPLHGGSPQVTVTGPSRDCPNSGQASPCASEQSPSPQSPQNNCSGKSDPKNVAALKNRQMKHISAEQKRRFNIKMCFDMLNSLISNNSKLTSHAITLQKTVEYITKLQQERGQMQEEARRLREEIEELNATIISCQQLLPATGVPVTRRQFDHMKDMFDEYVKTRTLQNWKFWIFSIIIKPLFESFKGMVSTSSLEELHRTALSWLDQHCSLPILRPMVLSTLRQLSTSTSILTDPAQLPEQASKAVTRIGKRLGES

SEQ ID NO: 54021 - protein, 218 aa, Homo sapiens
MDEQGCEHTSRTEDPFIQPTDFGPSEPPLSVPPPPISPVLPLVPPPATALNPPAPPTFHQPQKFAGVNKAPSVITHTASATLTHDAPATTFSQSQGLVITTHHPAPSAAPCGLALSPVTRPPQPRLTFVHPKPVSLTGGRPKQPHKIVPAPKPEPVSLVLKNARIAPGEPGGETQCGAPPDPEGCFPIPKAFKLVTTTTTLVCTCMRTHIHLNETKVS

SEQ ID NO: 54022 - protein, 526 aa, Homo sapiens
MDEQGCEHTSRTEDPFIQPTDFGPSEPPLSVPQPFLPVFTMPLLSPSPAPPPISPVLPLVPPPATALNPPAPPTFHQPQKFAGVNKAPSVITHTASATLTHDAPATTFSQSQGLVITTHHPAPSAAPCGLALSPVTRPPQPRLTFVHPKPVSLTGGRPKQPHKIVPAPKPEPVSLVLKNARIAPAAFSGQPQAVIMTSGPLKREGMLASTVSQSNVVIAPAAIARAPGVPEFHSSILVTDLGHGTSSPPAPVSRLFPSTAQDPLGKGEQVPLHGGSPQVTVTGPSRDCPNSGQASPCASEQSPSPQSPQNNCSGKSDPKNVAALKNRQMKHISAEQKRRFNIKMCFDMLNSLISNNSKLTSHAITLQKTVEYITKLQQERGQMQEEARRLREEIEELNATIISCQQLLPATGVPVTRRQFDHMKDMFDEYVKTRTLQNWKFWIFSIIIKPLFESFKGMVSTSSLEELHRTALSWLDQHCSLPILRPMVLSTLRQLSTSTSILTDPAQLPEQASKAVTRIGKRLGES

SEQ ID NO: 54023 - protein, 852 aa, Homo sapiens
MAGALAGLAAGLQVPRVAPSPDSDSDTDSEDPSLRRSAGGLLRSQVIHSGHFMVSSPHSDSLPRRRDQEGSVGPSDFGPRSIDPTLTRLFECLSLAYSGKLVSPKWKNFKGLKLLCRDKIRLNNAIWRAWYIQYVKRRKSPVCGFVTPLQGPEADAHRKPEAVVLEGNYWKRRIEVVMREYHKWRIYYKKRLRKPSREDDLLAPKQAEGRWPPPEQWCKQLFSSVVPVLLGDPEEEPGGRQLLDLNCFLSDISDTLFTMTQSGPSPLQLPPEDAYVGNADMIQPDLTPLQPSLDDFMDISDFFTNSRLPQPPMPSNFPEPPSFSPVVDSLFSSGTLGPEVPPASSAMTHLSGHSRLQARNSCPGPLDSSAFLSSDFLLPEDPKPRLPPPPVPPPLLHYPPPAKVPGLEPCPPPPFPPMAPPTALLQEEPLFSPRFPFPTVPPAPGVSPLPAPAAFPPTPQSVPSPAPTPFPIELLPLGYSEPAFGPCFSMPRGKPPAPSPRGQKASPPTLAPATASPPTTAGSNNPCLTQLLTAAKPEQALEPPLVSSTLLRSPGSPQETVPEFPCTFLPPTPAPTPPRPPPGPATLAPSRPLLVPKAERLSPPAPSGSERRLSGDLSSMPGPGTLSVRVSPPQPILSRGRPDSNKTENRRITHISAEQKRRFNIKLGFDTLHGLVSTLSAQPSLKVSKATTLQKTAEYILMLQQERAGLQEEAQQLRDEIEELNAAINLCQQQLPATGVPITHQRFDQMRDMFDDYVRTRTLHNWKFWVFSILIRPLFESFNGMVSTASVHTLRQTSLAWLDQYCSLPALRPTVLNSLRQLGTSTSILTDPGRIPEQATRAVTEGTLGKPL

SEQ ID NO: 54024 - protein, 831 aa, Homo sapiens
MAGALAGLAAGLQVPRVAPSPDSDSDTDSEDPSLRRSAGGLLRSQVIHSGHFMVSSPHSDSLPRRRDQEGSVGPSDFGPRSIDPTLTRLFECLSLAYSGKLVSPKWKNFKGLKLLCRDKIRLNNAIWRAWYIQYVKRRKSPVCGFVTPLQGPEADAHRKPEAVVLEGNYWKRRIEVVMREYHKWRIYYKKRLRKPSREDDLLAPKQAEGRWPPPEQWCKQLFSSVVPVLLGDPEEEPGGRQLLDLNCFLSDISDTLFTMTQSGPSPLQLPPEDAYVGNADMIQPDLTPLQPSLDDFMDISDFFTNSRLPQPPMPSNFPEPPSFSPVVDSLFSSGTLGPEVPPASSAMTHLSGHSRLQARNSCPGPLDSSAFLSSDFLLPEDPKPRLPPPPVPPPLLHYPPPAKVPGLEPCPPPPFPPMAPPTALLQEEPLFSPRFPFPTVPPAPGVSPLPAPAAFPPTPQSVPSPAPTPFPIELLPLGYSEPAFGPCFSMPRGKPPAPSPRGQKASPPTLAPATASPPTTAGSNNPCLTQLLTAAKPEQALEPPLVSSTLLRSPGSPQETVPEFPCTFLPPTPAPTPPRPPPGPATLAPSRPLLVPKAERLSPPAPSGSERRLSGDLSSMPGPGTLSVRVSPPQPILSRGRPDSNKNRRITHISAEQKRRFNIKLGFDTLHGLVSTLSAQPSLKERAGLQEEAQQLRDEIEELNAAINLCQQQLPATGVPITHQRFDQMRDMFDDYVRTRTLHNWKFWVFSILIRPLFESFNGMVSTASVHTLRQTSLAWLDQYCSLPALRPTVLNSLRQLGTSTSILTDPGRIPEQATRAVTEGTLGKPL

SEQ ID NO: 54025 - protein, 759 aa, Homo sapiens
MAGALAGLAAGLQVPRVAPSPDSDSDTDSEDPSLRRSAGGLLRSQVIHSGHFMVSSPHSDSLPRRRDQEGSVGPSDFGPRSIDPTLTRLFECLSLAYSGKLVSPKWKNFKGLKLLCRDKIRLNNAIWRAWYIQYVKRRKSPVCGFVTPLQGPEADAHRKPEAVVLEGNYWKRRIELPPEDAYVGNADMIQPDLTPLQPSLDDFMDISDFFTNSRLPQPPMPSNFPEPPSFSPVVDSLFSSGTLGPEVPPASSAMTHLSGHSRLQARNSCPGPLDSSAFLSSDFLLPEDPKPRLPPPPVPPPLLHYPPPAKVPGLEPCPPPPFPPMAPPTALLQEEPLFSPRFPFPTVPPAPGVSPLPAPAAFPPTPQSVPSPAPTPFPIELLPLGYSEPAFGPCFSMPRGKPPAPSPRGQKASPPTLAPATASPPTTAGSNNPCLTQLLTAAKPEQALEPPLVSSTLLRSPGSPQETVPEFPCTFLPPTPAPTPPRPPPGPATLAPSRPLLVPKAERLSPPAPSGSERRLSGDLSSMPGPGTLSVRVSPPQPILSRGRPDSNKTENRRITHISAEQKRRFNIKLGFDTLHGLVSTLSAQPSLKVSKATTLQKTAEYILMLQQERAGLQEEAQQLRDEIEELNAAINLCQQQLPATGVPITHQRFDQMRDMFDDYVRTRTLHNWKFWVFSILIRPLFESFNGMVSTASVHTLRQTSLAWLDQYCSLPALRPTVLNSLRQLGTSTSILTDPGRIPEQATRAVTEGTLGKPL

SEQ ID NO: 54026 - protein, 850 aa, Homo sapiens
MAGALAGLAAGLQVPRVAPSPDSDSDTDSEDPSLRRSAGGLLRSQVIHSGHFMVSSPHSDSLPRRRDQEGSVGPSDFGPRSIDPTLTRLFECLSLAYSGKLVSPKWKNFKGLKLLCRDKIRLNNAIWRAWYIQYVKRRKSPVCGFVTPLQGPEADAHRKPEAVVLEGNYWKRRIEVVMREYHKWRIYYKKRLRKPSREDDLLAPKQAEGRWPPPEQWCKQLFSSVVPVLLGDPEEEPGGRQLLDLNCFLSDISDTLFTMTQSGPSPLQLPPEDAYVGNADMIQPDLTPLQPSLDDFMDISDFFTNSRLPQPPMPSNFPEPPSFSPVVDSLFSSGTLGPEVPPASSAMTHLSGHSRLQARNSCPGPLDSSAFLSSDFLLPEDPKPRLPPPPVPPPLLHYPPPAKVPGLEPCPPPPFPPMAPPTALLQEEPLFSPRFPFPTVPPAPGVSPLPAPAAFPPTPQSVPSPAPTPFPIELLPLGYSEPAFGPCFSMPRGKPPAPSPRGQKASPPTLAPATASPPTTAGSNNPCLTQLLTAAKPEQALEPPLVSSTLLRSPGSPQETVPEFPCTFLPPTPAPTPPRPPPGPATLAPSRPLLVPKAERLSPPAPSGSERRLSGDLSSMPGPGTLSVRVSPPQPILSRGRPDSNKNRRITHISAEQKRRFNIKLGFDTLHGLVSTLSAQPSLKVSKATTLQKTAEYILMLQQERAGLQEEAQQLRDEIEELNAAINLCQQQLPATGVPITHQRFDQMRDMFDDYVRTRTLHNWKFWVFSILIRPLFESFNGMVSTASVHTLRQTSLAWLDQYCSLPALRPTVLNSLRQLGTSTSILTDPGRIPEQATRAVTEGTLGKPL

SEQ ID NO: 54027 - protein, 833 aa, Homo sapiens
MAGALAGLAAGLQVPRVAPSPDSDSDTDSEDPSLRRSAGGLLRSQVIHSGHFMVSSPHSDSLPRRRDQEGSVGPSDFGPRSIDPTLTRLFECLSLAYSGKLVSPKWKNFKGLKLLCRDKIRLNNAIWRAWYIQYVKRRKSPVCGFVTPLQGPEADAHRKPEAVVLEGNYWKRRIEVVMREYHKWRIYYKKRLRKPSREDDLLAPKQAEGRWPPPEQWCKQLFSSVVPVLLGDPEEEPGGRQLLDLNCFLSDISDTLFTMTQSGPSPLQLPPEDAYVGNADMIQPDLTPLQPSLDDFMDISDFFTNSRLPQPPMPSNFPEPPSFSPVVDSLFSSGTLGPEVPPASSAMTHLSGHSRLQARNSCPGPLDSSAFLSSDFLLPEDPKPRLPPPPVPPPLLHYPPPAKVPGLEPCPPPPFPPMAPPTALLQEEPLFSPRFPFPTVPPAPGVSPLPAPAAFPPTPQSVPSPAPTPFPIELLPLGYSEPAFGPCFSMPRGKPPAPSPRGQKASPPTLAPATASPPTTAGSNNPCLTQLLTAAKPEQALEPPLVSSTLLRSPGSPQETVPEFPCTFLPPTPAPTPPRPPPGPATLAPSRPLLVPKAERLSPPAPSGSERRLSGDLSSMPGPGTLSVRVSPPQPILSRGRPDSNKTENRRITHISAEQKRRFNIKLGFDTLHGLVSTLSAQPSLKERAGLQEEAQQLRDEIEELNAAINLCQQQLPATGVPITHQRFDQMRDMFDDYVRTRTLHNWKFWVFSILIRPLFESFNGMVSTASVHTLRQTSLAWLDQYCSLPALRPTVLNSLRQLGTSTSILTDPGRIPEQATRAVTEGTLGKPL

SEQ ID NO: 54028 - protein, 352 aa, Homo sapiens
MNTIVFNKLSGAVLFEDGGASERERGGRPYSGVLDSPHARPEVGIPDGPPLKDNLGLRHRRTGARQNGGKVRHKRQALQDMARPLKQWLYKHRDNPYPTKTEKILLALGSQMTLVQVSNWFANARRRLKNTVRQPDLSWALRIKLYNKYVQGNAERLSVSSDDSCSEDGENPPRTHMNEGGYNTPVHHPVIKSENSVIKAGVRPESRASEDYVAPPKYKSSLLNRYLNDSLRHVMATNTTMMGKTRQRNHSGSFSSNEFEEELVSPSSSETEGNFVYRTDTLENGSNKGESAANRKGPSKDDTYWKEINAAMALTNLAQGKDKLQGTTSCIIQKSSHIAEVKTVKVPLVQQF

SEQ ID NO: 54029 - protein, 352 aa, Homo sapiens; identical to SEQ ID NO: 54028

SEQ ID NO: 54030 - protein, 58 aa, Homo sapiens
MNTIVFNKLSGAVLFEDGGASERERGGRPYSGVLDSPHARPEVGIPDGPPLKDNLGLR

SEQ ID NO: 54031 - protein, 95 aa, Homo sapiens
MNFDFPFKKGSGIPLLTTNLSPQCLSLLHAMVAYDPDERIAAHQALQHPYFQEQRTQNGSEDEASAVLLPIQTRSSLNPLLSTCMLPGRSVTLLV

SEQ ID NO: 54032 - protein, 419 aa, Homo sapiens
MKNYKAIGKIGEGTFSEVMKMQSLRDGNYYACKQMKQRFESIEQVNNLREIQALRRLNPHPNILMLHEVVFDRKSGSLALICELMDMNIYELIRGRRYPLSEKKIMHYMYQLCKSLDHIHRNGIFHRDVKPENILIKQDVLKLGDFGSCRSVYSKQPYTEYISTRWYRAPECLLTDGFYTYKMDLWSAGCVFYEIASLQPLFPGVNELDQISKIHDVIGTPAQKILTKFKQSRAMNFDFPFKKGSGIPLLTTNLSPQCLSLLHAMVAYDPDERIAAHQALQHPYFQEQRKTEKRALGSHRKAGFPEHPVAPEPLSNSCQISKEGRKQKQSLKQEEDRPKRRGPAYVMELPKLKLSGVVRLSSYSSPTLQSVLGSGTNGRVPVLRPLKCIPASKKTDPQKDLKPAPQQCRLPTIVRKGGR

SEQ ID NO: 54033 - protein, 888 aa, Homo sapiens
MAGAAAESGRELWTFAGSRDPSAPRLAYGYGPGSLRELRAREFSRLAGTVYLDHAGATLFSQSQLESFTSDLMENTYGNPHSQNISSKLTHDTVEQVRYRILAHFHTTAEDYTVIFTAGSTAALKLVAEAFPWVSQGPESSGSRFCYLTDSHTSVVGMRNVTMAINVISTPVRPEDLWSAEERSASASNPDCQLPHLFCYPAQSNFSGVRYPLSWIEEVKSGRLHPVSTPGKWFVLLDAASYVSTSPLDLSAHQADFVPISFYKIFGFPTGLGALLVHNRAAPLLRKTYFGGGTASAYLAGEDFYIPRQSVAQRFEDGTISFLDVIALKHGFDTLERLTGGMENIKQHTFTLAQYTYVALSSLQYPNGAPVVRIYSDSEFSSPEVQGPIINFNVLDDKGNIIGYSQVDKMASLYNIHLRTGCFCNTGACQRHLGISNEMVRKHFQAGHVCGDNMDLIDGQPTGSVRISFGYMSTLDDVQAFLRFIIDTRLHSSGDWPVPQAHADTGETGAPSADSQADVIPAVMGRRSLSPQEDALTGSRVWNNSSTVNAVPVAPPVCDVARTQPTPSEKAAGVLEGALGPHVVTNLYLYPIKSCAAFEVTRWPVGNQGLLYDRSWMVVNHNGVCLSQKQEPRLCLIQPFIDLRQRIMVIKAKGMEPIEVPLEENSERTQIRQSRVCADRVSTYDCGEKISSWLSTFFGRPCHLIKQSSNSQRNAKKKHGKDQLPGTMATLSLVNEAQYLLINTSSILELHRQLNTSDENGKEELFSLKDLSLRFRANIIINGKRAFEEEKWDEISIGSLRFQVLGPCHRCQMICIDQQTGQRNQHVFQKLSESRETKVNFGMYLMHASLDLSSPCFLSVGSQVLPVLKENVEGHDLPASEKHQDVTS

SEQ ID NO: 54034 - protein, 620 aa, Homo sapiens
MAARPLSRMLRRLLRSSARSCSSGAPVTQPCPGESARAASEEVSRRRQFLREHAAPFSAFLTDSFGRQHSYLRISLTEKCNLRCQYCMPEEGVPLTPKANLLTTEEILTLARLFVKEGIDKIRLTGGEPLIRPDVVDIVAQLQRLEGLRTIGVTTNGINLARLLPQLQKAGLSAINISLDTLVPAKFEFIVRRKGFHKVMEGIHKAIELGYNPVKVNCVVMRGLNEDELLDFAALTEGLPLDVRFIEYMPFDGNKWNFKKMVSYKEMLDTVRQQWPELEKVPEEESSTAKAFKIPGFQGQISFITSMSEHFCGTCNRLRITADGNLKVCLFGNSEVSLRDHLRAGASEQELLRIIGAAVGRKKRQHAELFLMFPNSPPANPSIFSWDPLHVQGLRPRMSFSSQVATLWKGCRVPQTPPLAQQRLGSGSFQRHYTSRADSDANSKCLSPGSWASAAPSGPQLTSEQLTHVDSEGRAAMVDVGRKPDTERVAVASAVVLLGPVAFKLVQQNQLKKGDALVVAQLAGVQAAKVTSQLIPLCHHVALSHIQVQLELDSTRHAVKIQASCRARGPTGVEMEALTSAAVAALTLYDMCKAVSRDIVLEEIKLISKTGGQRGDFHRA

SEQ ID NO: 54035 - protein, 636 aa, Homo sapiens
MAARPLSRMLRRLLRSSARSCSSGAPVTQPCPGESARAASEEVSRRRQFLREHAAPFSAFLTDSFGRQHSYLRISLTEKCNLRCQYCMPEEGVPLTPKANLLTTEEILTLARLFVKEGIDKIRLTGGEPLIRPDVVDIVAQLQRLEGLRTIGVTTNGINLARLLPQLQKAGLSAINISLDTLVPAKFEFIVRRKGFHKVMEGIHKAIELGYNPVKVNCVVMRGLNEDELLDFAALTEGLPLDVRFIEYMPFDGNKWNFKKMVSYKEMLDTVRQQWPELEKVPEEESSTAKAFKIPGFQGQISFITSMSEHFCGTCNRLRITADGNLKVCLFGNSEVSLRDHLRAGASEQELLRIIGAAVGRKKRQHAGMFSISQMKNRPMILIELFLMFPNSPPANPSIFSWDPLHVQGLRPRMSFSSQVATLWKGCRVPQTPPLAQQRLGSGSFQRHYTSRADSDANSKCLSPGSWASAAPSGPQLTSEQLTHVDSEGRAAMVDVGRKPDTERVAVASAVVLLGPVAFKLVQQNQLKKGDALVVAQLAGVQAAKVTSQLIPLCHHVALSHIQVQLELDSTRHAVKIQASCRARGPTGVEMEALTSAAVAALTLYDMCKAVSRDIVLEEIKLISKTGGQRGDFHRA

SEQ ID NO: 54036 - protein, 151 aa, Homo sapiens
MPFDGNKWNFKKMVSYKEMLDTVRQQWPELEKVPEEESSTAKAFKIPGFQGQISFITSILTVARSCWPLFLWPPSSETGCAHMGHSPKDSCQTTQPTPGPVHGCSTHPSLFWSISGKEKLMIDCLHPHSAQIKLRCQLCRCKNEDTVWVGH

SEQ ID NO: 54037 - protein, 356 aa, Homo sapiens
MWKSWKLRTDVREVSRRRQFLREHAAPFSAFLTDSFGRQHSYLRISLTEKCNLRCQYCMPEEGVPLTPKANLLTTEEILTLARLFVKEGIDKIRLTGGEPLIRPDVVDIVAQLQRLEGLRTIGVTTNGINLARLLPQLQKAGLSAINISLDTLVPAKFEFIVRRKGFHKVMEGIHKAIELGYNPVKVNCVVMRGLNEDELLDFAALTEGLPLDVRFIEYMPFDGNKWNFKKMVSYKEMLDTVRQQWPELEKVPEEESSTAKAFKIPGFQGQISFITSMSEHFCGTCNRLRITADGNLKVCLFGNSEVSLRDHLRAGASEQELLRIIGAAVGRKKRQHAGMFSISQMKNRPMILIGG

SEQ ID NO: 54038 - protein, 385 aa, Homo sapiens
MWKSWKLRTDVRVREGAGGSPCASSQPGSRGPCFLPGLSSQEVSRRRQFLREHAAPFSAFLTDSFGRQHSYLRISLTEKCNLRCQYCMPEEGVPLTPKANLLTTEEILTLARLFVKEGIDKIRLTGGEPLIRPDVVDIVAQLQRLEGLRTIGVTTNGINLARLLPQLQKAGLSAINISLDTLVPAKFEFIVRRKGFHKVMEGIHKAIELGYNPVKVNCVVMRGLNEDELLDFAALTEGLPLDVRFIEYMPFDGNKWNFKKMVSYKEMLDTVRQQWPELEKVPEEESSTAKAFKIPGFQGQISFITSMSEHFCGTCNRLRITADGNLKVCLFGNSEVSLRDHLRAGASEQELLRIIGAAVGRKKRQHAGMFSISQMKNRPMILIGG

SEQ ID NO: 54039 - protein, 385 aa, Homo sapiens
MAARPLSRMLRRLLRSSARSCSSGAPVTQPCPGESARAASEEVSRRRQFLREHAAPFSAFLTDSFGRQHSYLRISLTEKCNLRCQYCMPEEGVPLTPKANLLTTEEILTLARLFVKEGIDKIRLTGGEPLIRPDVVDIVAQLQRLEGLRTIGVTTNGINLARLLPQLQKAGLSAINISLDTLVPAKFEFIVRRKGFHKVMEGIHKAIELGYNPVKVNCVVMRGLNEDELLDFAALTEGLPLDVRFIEYMPFDGNKWNFKKMVSYKEMLDTVRQQWPELEKVPEEESSTAKAFKIPGFQGQISFITSMSEHFCGTCNRLRITADGNLKVCLFGNSEVSLRDHLRAGASEQELLRIIGAAVGRKKRQHAGMFSISQMKNRPMILIGG

SEQ ID NO: 54040 - protein, 533 aa, Homo sapiens
MPEEGVPLTPKANLLTTEEILTLARLFVKEGIDKIRLTGGEPLIRPDVVDIVAQLQRLEGLRTIGVTTNGINLARLLPQLQKAGLSAINISLDTLVPAKFEFIVRRKGFHKVMEGIHKAIELGYNPVKVNCVVMRGLNEDELLDFAALTEGLPLDVRFIEYMPFDGNKWNFKKMVSYKEMLDTVRQQWPELEKVPEEESSTAKAFKIPGFQGQISFITSMSEHFCGTCNRLRITADGNLKVCLFGNSEVSLRDHLRAGASEQELLRIIGAAVGRKKRQHAELFLMFPNSPPANPSIFSWDPLHVQGLRPRMSFSSQVATLWKGCRVPQTPPLAQQRLGSGSFQRHYTSRADSDANSKCLSPGSWASAAPSGPQLTSEQLTHVDSEGRAAMVDVGRKPDTERVAVASAVVLLGPVAFKLVQQNQLKKGDALVVAQLAGVQAAKVTSQLIPLCHHVALSHIQVQLELDSTRHAVKIQASCRARGPTGVEMEALTSAAVAALTLYDMCKAVSRDIVLEEIKLISKTGGQRGDFHRA

SEQ ID NO: 54041 - protein, 636 aa, Homo sapiens
MWKSWKLRTDVRVREGAGGSPCASSQPGSRGPCFLPGLSSQEVSRRRQFLREHAAPFSAFLTDSFGRQHSYLRISLTEKCNLRCQYCMPEEGVPLTPKANLLTTEEILTLARLFVKEGIDKIRLTGGEPLIRPDVVDIVAQLQRLEGLRTIGVTTNGINLARLLPQLQKAGLSAINISLDTLVPAKFEFIVRRKGFHKVMEGIHKAIELGYNPVKVNCVVMRGLNEDELLDFAALTEGLPLDVRFIEYMPFDGNKWNFKKMVSYKEMLDTVRQQWPELEKVPEEESSTAKAFKIPGFQGQISFITSMSEHFCGTCNRLRITADGNLKVCLFGNSEVSLRDHLRAGASEQELLRIIGAAVGRKKRQHAGMFSISQMKNRPMILIELFLMFPNSPPANPSIFSWDPLHVQGLRPRMSFSSQVATLWKGCRVPQTPPLAQQRLGSGSFQRHYTSRADSDANSKCLSPGSWASAAPSGPQLTSEQLTHVDSEGRAAMVDVGRKPDTERVAVASAVVLLGPVAFKLVQQNQLKKGDALVVAQLAGVQAAKVTSQLIPLCHHVALSHIQVQLELDSTRHAVKIQASCRARGPTGVEMEALTSAAVAALTLYDMCKAVSRDIVLEEIKLISKTGGQRGDFHRA

SEQ ID NO: 54042 - protein, 356 aa, Homo sapiens; identical to SEQ ID NO: 54037

SEQ ID NO: 54043 - protein, 88 aa, Homo sapiens
MVPLCQVEVLYFAKSAEITGVRSETISVPQEIKALQLWKEIETRHPGLADVRNQIIFAVRQEYVELGDQLLVLQPGDEIAVIPPISGG

SEQ ID NO: 54044 - protein, 188 aa, Homo sapiens
MSSLEISSSCFSLETKLPLSPPLVEDSAFEPSRKDMDEVEEKSKDVINFTAEKLSVDEVSQLVISPLCGAISLFVGTTRNNFEGKKVISLEYEAYLPMAENEVRKICSDIRQKWPVKHIAVFHRLGLVPVSEASIIIAVSSAHRAASLEAVSYAIDTLKAKVPIWKKEIYEESSTWKGNKECFWASNS

SEQ ID NO: 54045 - protein, 88 aa, Homo sapiens; identical to SEQ ID NO: 54043

SEQ ID NO: 54046 - protein, 88 aa, Homo sapiens; identical to SEQ ID NO: 54043

SEQ ID NO: 54047 - protein, 88 aa, Homo sapiens; identical to SEQ ID NO: 54043

SEQ ID NO: 54048 - protein, 153 aa, Homo sapiens
MSSLEISSSCFSLETKLPLSPPLVEDSAFEPSRKDMDEVEEKSKDVINFTAEKLSVDEVSQLVISPLCGAISLFVGTTRNNFEGKKVISLEYEAYLPMAENEVRKICSDIRQKWPVKHIAVFHRLGLVPVSEASIIIAVSSAHRAASLEAVSY

SEQ ID NO: 54049 - protein, 547 aa, Homo sapiens
MEVGGDTAAPAPGGAEDLEDTQFPSEEAREGGGVHAVPPDPEDEGLEETGSKDKDQPPSPSPPPQSEALSSTSRLWSPAAPENSPTCSPESSSGGQGGDPSDEEWRSQRKHVFVLSEAGKPIYSRYGSVEALSATMGVMTALVSFVQSAGDAIRAIYAEDHKLVFLQQGPLLLVAMSRTSQSAAQLRGELLAVHAQIVSTLTRASVARIFAHKQNYDLRRLLAGSERTLDRLLDSMEQDPGALLLGAVRCVPLARPLRDALGALLRRCTAPGLALSVLAVGGRLITAAQERNVLAECRLDPADLQLLLDWVGAPAFAAGEAWAPVCLPRFNPDGFFYAYVARLDAMPVCLLLLGTQREAFHAMAACRRLVEDGMHALGAMRALGEAASFSNASSASAPAYSVQAVGAPGLRHFLYKPLDIPDHHRQLPQFTSPELEAPYSREEERQRLSDLYHRLHARLHSTSRPLRLIYHVAEKETLLAWVTSKFELYTCLSPLVTKAGAILVVTKLLRWVKKEEDRLFIRYPPKYSTPPATSTDQAAHNGLFTGL

SEQ ID NO: 54050 - protein, 145 aa, Homo sapiens
MEVGGDTAAPAPGGAEDLEDTQFPSEEAREGGGVHAVPPDPEDEGLEETGSKDKDQPPSPSPPPQSEALSSTSRLWSPAAPENSPTCSPESSSGGQGGDPSDEEWRSQRNGCRTCTTACMLVSTAPPDPCASFTTWLRRRHYWPG

SEQ ID NO: 54051 - protein, 438 aa, Homo sapiens
MEVGGDTAAPAPGGAEDLEDTQFPSEEAREGGGVHAVPPDPEDEGLEETEDHKLVFLQQGPLLLVAMSRTSQSAAQLRGELLAVHAQIVSTLTRASVARIFAHKQNYDLRRLLAGSERTLDRLLDSMEQDPGALLLGAVRCVPLARPLRDALGALLRRCTAPGLALSVLAVGGRLITAAQERNVLAECRLDPADLQLLLDWVGAPAFAAGEAWAPVCLPRFNPDGFFYAYVARLDAMPVCLLLLGTQREAFHAMAACRRLVEDGMHALGAMRALGEAASFSNASSASAPAYSVQAVGAPGLRHFLYKPLDIPDHHRQLPQFTSPELEAPYSREEERQRLSDLYHRLHARLHSTSRPLRLIYHVAEKETLLAWVTSKFELYTCLSPLVTKAGAILVVTKLLRWVKKEEDRLFIRYPPKYSTPPATSTDQAAHNGLFTGL

SEQ ID NO: 54052 - protein, 401 aa, Homo sapiens
MVSGQLRFGVKTEDHKLVFLQQGPLLLVAMSRTSQSAAQLRGELLAVHAQIVSTLTRASVARIFAHKQNYDLRRLLAGSERTLDRLLDSMEQDPGALLLGAVRCVPLARPLRDALGALLRRCTAPGLALSVLAVGGRLITAAQERNVLAECRLDPADLQLLLDWVGAPAFAAGEAWAPVCLPRFNPDGFFYAYVARLDAMPVCLLLLGTQREAFHAMAACRRLVEDGMHALGAMRALGEAASFSNASSASAPAYSVQAVGAPGLRHFLYKPLDIPDHHRQLPQFTSPELEAPYSREEERQRLSDLYHRLHARLHSTSRPLRLIYHVAEKETLLAWVTSKFELYTCLSPLVTKAGAILVVTKLLRWVKKEEDRLFIRYPPKYSTPPATSTDQAAHNGLFTGL

SEQ ID NO: 54053 - protein, 527 aa, Homo sapiens
MENQEKASIAGHMFDVVVIGGGISGLSAAKLLTEYGVSVLVLEARDRVGGRTYTIRNEHVDYVDVGGAYVGPTQNRILRLSKELGIETYKVNVSERLVQYVKGKTYPFRGAFPPVWNPIAYLDYNNLWRTIDNMGKEIPTDAPWEAQHADKWDKMTMKELIDKICWTKTARRFAYLFVNINVTSEPHEVSALWFLWYVKQCGGTTRIFSVTNGGQERKFVGGSGQVSERIMDLLGDQVKLNHPVTHVDQSSDNIIIETLNHEHYECKYVINAIPPTLTAKIHFRPELPAERNQLIQRLPMGAVIKCMMYYKEAFWKKKDYCGCMIIEDEDAPISITLDDTKPDGSLPAIMGFILARKADRLAKLHKEIRKKKICELYAKVLGSQEALHPVHYEEKNWCEEQYSGGCYTAYFPPGIMTQYGRVIRQPVGRIFFAGTETATKWSGYMEGAVEAGERAAREVLNGLGKVTEKDIWVQEPESKDVPAVEITHTFWERNLPSVSGLLKIIGFSTSVTALGFVLYKYKLLPRS

SEQ ID NO: 54054 - protein, 394 aa, Homo sapiens
MGKEIPTDAPWEAQHADKWDKMTMKELIDKICWTKTARRFAYLFVNINVTSEPHEVSALWFLWYVKQCGGTTRIFSVTNGGQERKFVGGSGQVSERIMDLLGDQVKLNHPVTHVDQSSDNIIIETLNHEHYECKYVINAIPPTLTAKIHFRPELPAERNQLIQRLPMGAVIKCMMYYKEAFWKKKDYCGCMIIEDEDAPISITLDDTKPDGSLPAIMGFILARKADRLAKLHKEIRKKKICELYAKVLGSQEALHPVHYEEKNWCEEQYSGGCYTAYFPPGIMTQYGRVIRQPVGRIFFAGTETATKWSGYMEGAVEAGERAAREVLNGLGKVTEKDIWVQEPESKDVPAVEITHTFWERNLPSVSGLLKIIGFSTSVTALGFVLYKYKLLPRS

SEQ ID NO: 54055 - protein, 520 aa, Homo sapiens
MSNKCDVVVVGGGISGMAAAKLLHDSGLNVVVLEARDRVGGRTYTLRNQKVKYVDLGGSYVGPTQNRILRLAKELGLETYKVNEVERLIHHVKGKSYPFRGPFPPVWNPITYLDHNNFWRTMDDMGREIPSDAPWKAPLAEEWDNMTMKELLDKLCWTESAKQLATLFVNLCVTAETHEVSALWFLWYVKQCGGTTRIISTTNGGQERKFVGGSGQVSERIMDLLGDRVKLERPVIYIDQTRENVLVETLNHEMYEAKYVISAIPPTLGMKIHFNPPLPMMRNQMITRVPLGSVIKCIVYYKEPFWRKKDYCGTMIIDGEEAPVAYTLDDTKPEGNYAAIMGFILAHKARKLARLTKEERLKKLCELYAKVLGSLEALEPVHYEEKNWCEEQYSGGCYTTYFPPGILTQYGRVLRQPVDRIYFAGTETATHWSGYMEGAVEAGERAAREILHAMGKIPEDEIWQSEPESVDVPAQPITTTFLERHLPSVPGLLRLIGLTTIFSATALGFLAHKRGLLVRV

SEQ ID NO: 54056 - protein, 504 aa, Homo sapiens
MAAAKLLHDSGLNVVVLEARDRVGGRTYTLRNQKVKYVDLGGSYVGPTQNRILRLAKELGLETYKVNEVERLIHHVKGKSYPFRGPFPPVWNPITYLDHNNFWRTMDDMGREIPSDAPWKAPLAEEWDNMTMKELLDKLCWTESAKQLATLFVNLCVTAETHEVSALWFLWYVKQCGGTTRIISTTNGGQERKFVGGSGQVSERIMDLLGDRVKLERPVIYIDQTRENVLVETLNHEMYEAKYVISAIPPTLGMKIHFNPPLPMMRNQMITRVPLGSVIKCIVYYKEPFWRKKDYCGTMIIDGEEAPVAYTLDDTKPEGNYAAIMGFILAHKARKLARLTKEERLKKLCELYAKVLGSLEALEPVHYEEKNWCEEQYSGGCYTTYFPPGILTQYGRVLRQPVDRIYFAGTETATHWSGYMEGAVEAGERAAREILHAMGKIPEDEIWQSEPESVDVPAQPITTTFLERHLPSVPGLLRLIGLTTIFSATALGFLAHKRGLLVRV

SEQ ID NO: 54057 - protein, 411 aa, Homo sapiens
MAAAKLLHDSGLNVVVLEARDRVGGRTYTLRNQKVKYVDLGGSYVGPTQNRILRLAKELGLETYKVNEVERLIHHVKGKSYPFRGPFPPVWNPITYLDHNNFWRTMDDMGREIPSDAPWKAPLAEEWDNMTMKELLDKLCWTESAKQLATLFVNLCVTAETHEVSALWFLWYVKQCGGTTRIISTTNGGQERKFVGGSGQVSERIMDLLGDRVKLERPVIYIDQTRENVLVETLNHEMYEAKYVISAIPPTLGMKIHFNPPLPMMRNQMITRVPLGSVIKCIVYYKEPFWRKKDYCGTMIIDGEEAPVAYTLDDTKPEGNYAAIMGFILAHKARKLARLTKEERLKKLCELYAKVLGSLEALEGSTPASGQDLLCRHRDCHTLERLHGGGCRGRGESSPRDPACHGEDSRG

SEQ ID NO: 54058 - protein, 246 aa, Homo sapiens
MFAPRLLDFQKTKYARFMNHRVPAHKRYQPTEYEHAANCATHAFWIIPSILGSSNLYFLSDDDWETISAWIYGLGLCGLFVVSTVFHTISWKKSHLRMVEHCLHMFDRMVIYFFIAASYAPWLNLRELGPWASHMRWLVWIMASVGTIYVFFFHERYKLVELLCYVVMGFFPALVILSMPNTEGIWELVTGGVFYCLGMVFFKSDGRIPFAHAIWHLFVAFGAGTHYYAIWRYLYLPSTLQTKVSK

SEQ ID NO: 54059 - protein, 270 aa, Homo sapiens
MFAPRLLDFQKTKYARFMNHRVPAHKRYQPTEYEHAANCATHAFWIIPSILGSSNLYFLSDDDWETISAWIYGLGLCGLFVVSTVFHTISWKKSHLRMVEHCLHMFDRMVIYFFIAASYAPWLNLRELGPWASHMRWLVWIMASVGTIYVFFFHERTGSCVQFLRGEACPKAGTACLPARYKLVELLCYVVMGFFPALVILSMPNTEGIWELVTGGVFYCLGMVFFKSDGRIPFAHAIWHLFVAFGAGTHYYAIWRYLYLPSTLQTKVSK

SEQ ID NO: 54060 - protein, 193 aa, Homo sapiens
MFAPRLLDFQKTKYARFMNHRVPAHKRYQPTEYEHAANCATHAFWIIPSILGSSNLYFLSDDDWETISAWIYGLGLCGLFVVSTVFHTISWKKSHLRMVEHCLHMFDRMVIYFFIAASYAPWLNLRELGPWASHMRWLVWIMASVGTIYVFFFHERYKLVELLCYVVMGFFPALVILSMAGKLRPGMTCLKRQ

SEQ ID NO: 54061 - protein, 313 aa, Homo sapiens
METGPEDPSSMPEESSPRRTPQSIPYQDLPHLVNADGQYLFCRYWKPTGTPKALIFVSHGAGEHSGRYEELARMLMGLDLLVFAHDHVGHGQSEGERMVVSDFHVFVRDVLQHVDSMQKDYPGLPVFLLGHSMGGAIAILTAAERPGHFAGMVLISPLVLANPESATTFKVLAAKVLNLVLPNLSLGPIDSSVLSRNKTEVDIYNSDPLICRAGLKVCFGIQLLNAVSRVERALPKLTVPFLLLQGSADRLCDSKGAYLLMELAKSQDKTLKIYEGAYHVLHKELPEVTNSVFHEINMWVSQRTATAGTASPP

SEQ ID NO: 54062 - protein, 303 aa, Homo sapiens
MPEESSPRRTPQSIPYQDLPHLVNADGQYLFCRYWKPTGTPKALIFVSHGAGEHSGRYEELARMLMGLDLLVFAHDHVGHGQSEGERMVVSDFHVFVRDVLQHVDSMQKDYPGLPVFLLGHSMGGAIAILTAAERPGHFAGMVLISPLVLANPESATTFKVLAAKVLNLVLPNLSLGPIDSSVLSRNKTEVDIYNSDPLICRAGLKVCFGIQLLNAVSRVERALPKLTVPFLLLQGSADRLCDSKGAYLLMELAKSQDKTLKIYEGAYHVLHKELPEVTNSVFHEINMWVSQRTATAGTASPP

SEQ ID NO: 54063 - protein, 303 aa, Homo sapiens; identical to SEQ ID NO: 54062

SEQ ID NO: 54064 - protein, 283 aa, Homo sapiens
METGPEDPSSMPEESSPRRTPQSIPYQDLPHLVNADGQYLFCRYWKPTGTPKALIFVSHGAGEHSGRYEELARMLMGLDLLVFAHDHVGHGQSEGERMVVSDFHVFVRDVLQHVDSMQKDYPGLPVFLLGHSMGGAIAILTAAERPGHFAGMVLISPLVLANPESATTFKVDIYNSDPLICRAGLKVCFGIQLLNAVSRVERALPKLTVPFLLLQGSADRLCDSKGAYLLMELAKSQDKTLKIYEGAYHVLHKELPEVTNSVFHEINMWVSQRTATAGTASPP

SEQ ID NO: 54065 - protein, 77 aa, Homo sapiens
MPEESSPRRTPQSIPYQDLPHLVNADGQYLFCRYWKPTGTPKALIFVSHGAGEHSGRYEELARMLMGLDLLVFAHDH

SEQ ID NO: 54066 - protein, 313 aa, Homo sapiens
MKTRPEDPSSMPEESSPRRTPQSIPYQDLPHLVNADGQYLFCRYWKPTGTPKALIFVSHGAGEHSGRYEELARMLMGLDLLVFAHDHVGHGQSEGERMVVSDFHVFVRDVLQHVDSMQKDYPGLPVFLLGHSMGGAIAILTAAERPGHFAGMVLISPLVLANPESATTFKVLAAKVLNLVLPNLSLGPIDSSVLSRNKTEVDIYNSDPLICRAGLKVCFGIQLLNAVSRVERALPKLTVPFLLLQGSADRLCDSKGAYLLMELAKSQDKTLKIYEGAYHVLHKELPEVTNSVFHEINMWVSQRTATAGTASPP

SEQ ID NO: 54067 - protein, 613 aa, Homo sapiens
MCCWPLLLLWGLLPGTAAGGSGRTYPHRTLLDSEGKYWLGWSQRGSQIAFRLQVRTAGYVGFGFSPTGAMASADIVVGGVAHGRPYLQDYFTNANRELKKDAQQDYHLEYAMENSTHTIIEFTRELHTCDINDKSITDSTVRVIWAYHHEDAGEAGPKYHDSNRGTKSLRLLNPEKTSVLSTALPYFDLVNQDVPIPNKDTTYWCQMFKIPVFQEKHHVIKVEPVIQRGHESLVHHILLYQCSNNFNDSVLESGHECYHPNMPDAFLTCETVIFAWAIGGEGFSYPPHVGLSLGTPLDPHYVLLEVHYDNPTYEEGLIDNSGLRLFYTMDIRKYDAGVIEAGLWVSLFHTIPPGMPEFQSEGHCTLECLEEALEAEKPSGIHVFAVLLHAHLAGRGIRLRHFRKGKEMKLLAYDDDFDFNFQEFQYLKEEQTILPGDNLITECRYNTKDRAEMTWGGLSTRSEMCLSYLLYYPRINLTRCASIPDIMEQLQFIGVKEIYRPVTTWPFIIKSPKQYKNLSFMDAMNKFKWTKKEGLSFNKLVLSLPVNVRCSKTDNAEWSIQGMTALPPDIERPYKAEPLVCGTSSSSSLHRDFSINLLVCLLLLSCTLSTKSL

SEQ ID NO: 54068 - protein, 984 aa, Homo sapiens
MDDRYPALQRAQLRLDFIHANSTTHSFLFGALAELLDNARDAGAERLDVFSVDNEKLQGGFMLCFLDDGCGMSPEEASDIIYFGRSKKRLSTLKFIGQYGNGLKSGSMRIGKDFILFTKKEETMTCVFFSQTFCEEESLSEVVVPMPSWLIRTRESVTDDPQKFAMELSIIYKYSPFKTEAELMQQFDVIYGKCGTLLVIYNLKLLLNGEPELDVKTDKEDILMAGALEDFPARWSFRAYTSVLYFNPWMRIFIQAKRVKTKHLCYCLYRPRKYLYVTSSFKGAFKDEVKKAEEAVKIAESILKEAQIKVNQCDRTSLSSAKDVLQRALEDVEAKQKNLKEKQRELKTARTLSLFYGVNVENRSQAGMFIYSNNRLIKMHEKVGSQLKLKSLLGAGVVGIVNIPLEVMEPSHNKQEFLNVQEYNHLLKVMGQYLVQYCKDTGINNRNLTLFCNEFGYQNDIDVEKPLNSFQYQRRQAMGIPFIIQCDLCLKWRVLPSSTNYQEKEFFDIWICANNPNRLENSCHQVECLPSIPLGTMSTISPSKNEKEKQLRESVIKYQNRLAEQQPQPQFIPVDEITVTSTCLTSAHKENTKTQKIRLLGDDLKHESLSSFELSASRRGQKRNIEETDSDVEYISETKIMKKSMEEKMNSQQQRIPVALPENVKLAERSQRSQIANITTVWRAQPTEGCLKNAQAASWEMKRKQSLNFVEECKVLTEDENTSDSDIILVSDKSNTDVSLKQEKKEIPLLNQEKQELCNDVLAMKRSSSLPSWKSLLNVPMEDVNLSSGHIARVSVSGSCKVASSPASSQSTPVKETVRKLKSKLREILLYFFPEHQLPSELEEPALSCELEQCPEQMNKKLKMCFNQIQNTYMVQYEKKIKRKLQSIIYDSNTRGIHNEISLGQCENKRKISEDKLKNLRIKLALLLQKLQLGGPEGDLEQTDTYLEALLKEDNLLFQNNLNKVTIDARHRLPLEKNEKTSEN

SEQ ID NO: 54069 - protein, 362 aa, Homo sapiens
MAPKQDPKPKFQEGERVLCFHGPLLYEAKCVKVAIKDKQVKYFIHYSGWNKKSAVRPRRSEKSLKTHEDIVALFPVPEGAPSVHHPLLTSSWDEWVPESRVLKYVDTNLQKQRELQKANQEQYAEGKMRGAAPGKKTSGLQQKNVEVKTKKNKQKTPGNGDGGSTSETPQPPRKKRARVDPTVENEETFMNRVEVKVKIPEELKPWLVDDWDLITRQKQLFYLPAKKNVDSILEDYANYKKSRGNTDNKEYAVNEVVAGIKEYFNVMLGTQLLYKFERPQYAEILADHPDAPMSQVYGAPHLLRLFVRIGAMLAYTPLDEKSLALLLNYLHDFLKYLAKNSATLFSASDYEVAPPEYHRKAV

SEQ ID NO: 54070 - protein, 348 aa, Homo sapiens
MIPFPHPQVTDALGRYSNYILSSTVESPSLRSMNFEKQGERVLCFHGPLLYEAKCVKVAIKDKQVKYFIHYSGWNKNWDEWVPESRVLKYVDTNLQKQRELQKANQEQYAEGKMRGAAPGKKTSGLQQKNVEVKTKKNKQKTPGNGDGGSTSETPQPPRKKRARVDPTVENEETFMNRVEVKVKIPEELKPWLVDDWDLITRQKQLFYLPAKKNVDSILEDYANYKKSRGNTDNKEYAVNEVVAGIKEYFNVMLGTQLLYKFERPQYAEILADHPDAPMSQVYGAPHLLRLFVRIGAMLAYTPLDEKSLALLLNYLHDFLKYLAKNSATLFSASDYEVAPPEYHRKAV

SEQ ID NO: 54071 - protein, 323 aa, Homo sapiens
MAPKQDPKPKFQEGERVLCFHGPLLYEAKCVKVAIKDKQVKYFIHYSGWNKNWDEWVPESRVLKYVDTNLQKQRELQKANQEQYAEGKMRGAAPGKKTSGLQQKNVEVKTKKNKQKTPGNGDGGSTSETPQPPRKKRARVDPTVENEETFMNRVEVKVKIPEELKPWLVDDWDLITRQKQLFYLPAKKNVDSILEDYANYKKSRGNTDNKEYAVNEVVAGIKEYFNVMLGTQLLYKFERPQYAEILADHPDAPMSQVYGAPHLLRLFVRIGAMLAYTPLDEKSLALLLNYLHDFLKYLAKNSATLFSASDYEVAPPEYHRKAV

SEQ ID NO: 54072 - protein, 235 aa, Homo sapiens
MRGAAPGKKTSGLQQKNVEVKTKKNKQKTPGNGDGGSTSETPQPPRKKRARVDPTVENEETFMNRVEVKVKIPEELKPWLVDDWDLITRQKQLFYLPAKKNVDSILEDYANYKKSRGNTDNKEYAVNEVVAGIKEYFNVMLGTQLLYKFERPQYAEILADHPDAPMSQVYGAPHLLRLFVRIGAMLAYTPLDEKSLALLLNYLHDFLKYLAKNSATLFSASDYEVAPPEYHRKAV

SEQ ID NO: 54073 - protein, 235 aa, Homo sapiens; identical to SEQ ID NO: 54072

SEQ ID NO: 54074 - protein, 114 aa, Homo sapiens
MVSRKAVAALLVVHVAAMLASQTEAFVPIFTYGELQRMQEKERNKGQKKSLSVWQRSGEEGPVDPAEPIREEENEMIKLTAPLEIGMRMNSRQLEKYPATLEGLLSEMLPQHAK

SEQ ID NO: 54075 - protein, 115 aa, Homo sapiens
MVSRKAVAALLVVHVAAMLASQTEAFVPIFTYGELQRMQEKERNKGQKKSLSVWQRSGEEGPVDPAEPIREEENEMIKLTAPLEIGMRMNSRQLEKYPATLEGLLSEMLPQHAAK

SEQ ID NO: 54076 - protein, 108 aa, Homo sapiens
MVSRKAVAALLVVHVAAMLASQTEAFVPIFTYGELQRMQEKERNKGQKKSLSVWQRSGEEGPVDPAEPIREEENEMIKLTAPLEIGMRMNSRQLEKYPATLEGLLTAK

SEQ ID NO: 54077 - protein, 412 aa, Homo sapiens
MGSPWNGSDGPEGAREPPWPALPPCDERRCSPFPLGALVPVTAVCLCLFVVGVSGNVVTVMLIGRYRDMRTTTNLYLGSMAVSDLLILLGLPFDLYRLWRSRPWVFGPLLCRLSLYVGEGCTYATLLHMTALSVERYLAICRPLRARVLVTRRRVRALIAVLWAVALLSAGPFLFLVGVEQDPGISVVPGLNGTARIASSPLASSPPLWLSRAPPPSPPSGPETAEAAALFSRECRPSPAQLGALRVMLWVTTAYFFLPFLCLSILYGLIGRELWSSRRPLRGPAASGRERGHRQTVRVLLVVVLAFIICWLPFHVGRIIYINTEDSRMMYFSQYFNIVALQLFYLSASINPILYNLISKKYRAAAFKLLLARKSRPRGFHRSRDTAGEVAGDTGGDTVGYTETSANVKTMG

SEQ ID NO: 54078 - protein, 386 aa, Homo sapiens
MGSPWNGSDGPEGAREPPWPALPPCDERRCSPFPLGALVPVTAVCLCLFVVGVSGNVVTVMLIGRYRDMRTTTNLYLGSMAVSDLLILLGLPFDLYRLWRSRPWVFGPLLCRLSLYVGEGCTYATLLHMTALSVERYLAICRPLRARVLVTRRRVRALIAVLWAVALLSAGPFLFLVGVEQDPGISVVPGLNGTARIASSPLASSPPLWLSRAPPPSPPSGPETAEAAALFSRECRPSPAQLGALRVMLWVTTAYFFLPFLCLSILYGLIGRELWSSRRPLRGPAASGRERGHRQTVRVLRKWSRRGSKDACLQSAPPGTAQTLGPLPLLAQLWAPLPAPFPISIPASTRRGGGSGIYNLLVALPRWQNHLHKHGRFADDVLLSVL

SEQ ID NO: 54079 - protein, 401 aa, Homo sapiens
MEKSKNFRIDALLAVDPPRAASAQSAPLALVTSLAAAASGTGGGGGGGGASGGTSGSCSPASSEPPAAPADRLRAESPSPPRLLAAHCALLPKPGFLGAGGGGGGTGGGHGGPHHHAHPGAAAAAAAAAAAAAAGGLALGLHPGGAQGGAGLPAQAALYGHPVYGYSAAAAAAALAGQHPALSYSYPQVQGAHPAHPADPIKLGAGTFQLDQWLRASTAGMILPKMPDFNSQAQSNLLGKCRRPRTAFTSQQLLELEHQFKLNKYLSRPKRFEVATSLMLTETQVKIWFQNRRMKWKRSKKAKEQAAQEAEKQKGGGGGAGKGGAEEPGAEELLGPPAPGDKGSGRRLRDLRDSDPEEDEDEDDEDHFPYSNGASVHAASSDCSSEDDSPPPRPSHQPAPQ

SEQ ID NO: 54080 - protein, 231 aa, Homo sapiens
AAAALAGQHPALSYSYPQVQGAHPAHPADPIKLGAGTFQLDQWLRASTAGMILPKMPDFNSQAQSNLLGKCRRPRTAFTSQQLLELEHQFKLNKYLSRPKRFEVATSLMLTETQVKIWFQNRRMKWKRSKKAKEQAAQEAEKQKGGGGGAGKGGAEEPGAEELLGPPAPGDKGSGRRLRDLRDSDPEEDEDEDDEDHFPYSNGASVHAASSDCSSEDDSPPPRPSHQPAPQ

SEQ ID NO: 54081 - protein, 189 aa, Homo sapiens
MGGLSTVGACPGILGAQQAQAQSNLLGKCRRPRTAFTSQQLLELEHQFKLNKYLSRPKRFEVATSLMLTETQVKIWFQNRRMKWKRSKKAKEQAAQEAEKQKGGGGGAGKGGAEEPGAEELLGPPAPGDKGSGRRLRDLRDSDPEEDEDEDDEDHFPYSNGASVHAASSDCSSEDDSPPPRPSHQPAPQ

SEQ ID NO: 54082 - protein, 563 aa, Homo sapiens
MPSKFSCRQLREAGQCFESFLVVRGLDMETDRERLRTIYNRDFKISFGTPAPGFSSMLYGMKIANLAYVTKTRVRFFRLDRWADVRFPEKRRMKLGSDISKHHKSLLAKIFYDRAEYLHGKHGVDVEVQGPHEARDGQLLIRLDLNRKEVLTLRLRNGGTQSVTLTHLFPLCRTPQFAFYNEDQELPCPLGPGECYELHVHCKTSFVGYFPATVLWELLGPGESGSEGAGTFYIARFLAAVAHSPLAAQLKPMTPFKRTRITGNPVVTNRIEEGERPDRAKGYDLELSMALGTYYPPPRLRQLLPMLLQGTSIFTAPKEIAEIKAQLETALKWRNYEVKLRLLLHLEELQMEHDIRHYDLESVPMTWDPVDQNPRLLTLEVPGVTESRPSVLRGDHLFALLSSETHQEDPITYKGFVHKVELDRVKLSFSMSLLSRFVDGLTFKVNFTFNRQPLRVQHRALELTGRWLLWPMLFPVAPRDVPLLPSDVKLKLYDRSLESNPEQLQAMRHIVTGTTRPALTACLTLNQNPAELPLQGTGRLGEGVYNPSHSTPSPAGENDTSSC

SEQ ID NO: 54083 - protein, 1003 aa, Homo sapiens
MPSKFSCRQLREAGQCFESFLVVRGLDMETDRERLRTIYNRDFKISFGTPAPGFSSMLYGMKIANLAYVTKTRVRFFRLDRWADVRFPEKRRMKLGSDISKHHKSLLAKIFYDRAEYLHGKHGVDVEVQGPHEARDGQLLIRLDLNRKEVLTLRLRNGGTQSVTLTHLFPLCRTPQFAFYNEDQELPCPLGPGECYELHVHCKTSFVGYFPATVLWELLGPGESGSEGAGTFYIARFLAAVAHSPLAAQLKPMTPFKRTRITGNPVVTNRIEEGERPDRAKGYDLELSMALGTYYPPPRLRQLLPMLLQGTSIFTAPKEIAEIKAQLETALKWRNYEVKLRLLLHLEELQMEHDIRHYDLESVPMTWDPVDQNPRLLTLEVPGVTESRPSVLRGDHLFALLSSETHQEDPITYKGFVHKVELDRVKLSFSMSLLSRFVDGLTFKVNFTFNRQPLRVQHRALELTGRWLLWPMLFPVAPRDVPLLPSDVKLKLYDRSLESNPEQLQAMRHIVTGTTRPAPYIIFGPPGTGKTVTLVEAIKQVVKHLPKAHILACAPSNSGADLLCQRLRVHLPSSIYRLLAPSRDIRMVPEDIKPCCNWDAKKGEYVFPAKKKLQEYRVLITTLITAGRLVSAQFPIDHFTHIFIDEAGHCMEPESLVAIAGLMEVKETGDPGGQLVLAGDPRQLGPVLRSPLTQKHGLGYSLLERLLTYNSLYKKGPDGYDPQFITKLLRNYRSHPTILDIPNQLYYEGELQACADVVDRERFCRWAGLPRQGFPIIFHGVMGKDEREGNSPSFFNPEEAATVTSYLKLLLAPSSKKGKARLSPRSVGVISPYRKQVEKIRYCITKLDRELRGLDDIKDLKVGSVEEFQGQERSVILISTVRSSQSFVQLDLDFNLGFLKNPKRFNVAVTRAKALLIIVGNPLLLGHDPDWKVFLEFCKENGGYTGCPFPAKLDLQQGQNLLQGLSKLSPSTSGPHSHDYLPQEREGEGGLSLQVEPEWRNEL

SEQ ID NO: 54084 - protein, 947 aa, Homo sapiens
MLYGMKIANLAYVTKTRVRFFRLDRWADVRFPEKRRMKLGSDISKHHKSLLAKIFYDRAEYLHGKHGVDVEVQGPHEARDGQLLIRLDLNRKEVLTLRLRNGGTQSVTLTHLFPLCRTPQFAFYNEDQELPCPLGPGECYELHVHCKTSFVGYFPATVLWELLGPGESGSEGAGTFYIARFLAAVAHSPLAAQLKPMTPFKRTRITGNPVVTNRIEEGERPDRAKGYDLELSMALGTYYPPPRLRQLLPMLLQGTSIFTAPKEIAEIKAQLETALKWRNYEVKLRLLLHLEELQMEHDIRHYDLESVPMTWDPVDQNPRLLTLEVPGVTESRPSVLRGDHLFALLSSETHQEDPITYKGFVHKVELDRVKLSFSMSLLSRFVDGLTFKVNFTFNRQPLRVQHRALELTGRWLLWPMLFPVAPRDVPLLPSDVKLKLYDRSLESNPEQLQAMRHIVTGTTRPAPYIIFGPPGTGKTVTLVEAIKQVVKHLPKAHILACAPSNSGADLLCQRLRVHLPSSIYRLLAPSRDIRMVPEDIKPCCNWDAKKGEYVFPAKKKLQEYRVLITTLITAGRLVSAQFPIDHFTHIFIDEAGHCMEPESLVAIAGLMEVKETGDPGGQLVLAGDPRQLGPVLRSPLTQKHGLGYSLLERLLTYNSLYKKGPDGYDPQFITKLLRNYRSHPTILDIPNQLYYEGELQACADVVDRERFCRWAGLPRQGFPIIFHGVMGKDEREGNSPSFFNPEEAATVTSYLKLLLAPSSKKGKARLSPRSVGVISPYRKQVEKIRYCITKLDRELRGLDDIKDLKVGSVEEFQGQERSVILISTVRSSQSFVQLDLDFNLGFLKNPKRFNVAVTRAKALLIIVGNPLLLGHDPDWKVFLEFCKENGGYTGCPFPAKLDLQQGQNLLQGLSKLSPSTSGPHSHDYLPQEREGEGGLSLQVEPEWRNEL

SEQ ID NO: 54085 - protein, 1003 aa, Homo sapiens; identical to SEQ ID NO: 54083

SEQ ID NO: 54086 - protein, 941 aa, Homo sapiens
METDRERLRTIYNRDFKISFGTPAPGFSSMLYGMKIANLAYVTKTRVRFFRLDRWADVRFPEKRRMKLGSDISKHHKSLLAKIFYDRAEYLHGKHGGTQSVTLTHLFPLCRTPQFAFYNEDQELPCPLGPGECYELHVHCKTSFVGYFPATVLWELLGPGESGSEGAGTFYIARFLAAVAHSPLAAQLKPMTPFKRTRITGNPVVTNRIEEGERPDRAKGYDLELSMALGTYYPPPRLRQLLPMLLQGTSIFTAPKEIAEIKAQLETALKWRNYEVKLRLLLHLEELQMEHDIRHYDLESVPMTWDPVDQNPRLLTLEVPGVTESRPSVLRGDHLFALLSSETHQEDPITYKGFVHKVELDRVKLSFSMSLLSRFVDGLTFKVNFTFNRQPLRVQHRALELTGRWLLWPMLFPVAPRDVPLLPSDVKLKLYDRSLESNPEQLQAMRHIVTGTTRPAPYIIFGPPGTGKTVTLVEAIKQVVKHLPKAHILACAPSNSGADLLCQRLRVHLPSSIYRLLAPSRDIRMVPEDIKPCCNWDAKKGEYVFPAKKKLQEYRVLITTLITAGRLVSAQFPIDHFTHIFIDEAGHCMEPESLVAIAGLMEVKETGDPGGQLVLAGDPRQLGPVLRSPLTQKHGLGYSLLERLLTYNSLYKKGPDGYDPQFITKLLRNYRSHPTILDIPNQLYYEGELQACADVVDRERFCRWAGLPRQGFPIIFHGVMGKDEREGNSPSFFNPEEAATVTSYLKLLLAPSSKKGKARLSPRSVGVISPYRKQVEKIRYCITKLDRELRGLDDIKDLKVGSVEEFQGQERSVILISTVRSSQSFVQLDLDFNLGFLKNPKRFNVAVTRAKALLIIVGNPLLLGHDPDWKVFLEFCKENGGYTGCPFPAKLDLQQGQNLLQGLSKLSPSTSGPHSHDYLPQEREGEGGLSLQVEPEWRNEL

SEQ ID NO: 54087 - protein, 1003 aa, Homo sapiens; identical to SEQ ID NO: 54083

SEQ ID NO: 54088 - protein, 56 aa, Homo sapiens
MPSKFSCRQLREAGQCFESFLVVRGLDMETDRERLRTIYNRDFKISLASSKSILQS

SEQ ID NO: 54089 - protein, 1211 aa, Homo sapiens
MLSLAAKLVAFFWRTADTPREEAGQLEPELAEGDTKLKTVRGVVTRYCSDYGMIDDMIYFSSDAVTSRVLLNVGQEVIAVVEENKVSNGLKAIRVEAVSDKWEDDSRNHGSPSDCGPRVLIGCVTSLVEGAGCISQTTYFSLESVCEGFEPCKGDWVEAEYRIRPGTWSSEATSVKPLRYKRVDKVCISSLCGRNGVLEESIFFTLDSLKLPDGYTPRRGDVVNAVVVESSQSCYVWRALCMTLVKRRDAAPVHEATHFYGTILLKNKGDIEVTQVTHFGTLKEGRSKTMVIWIENKGDIPQNLVSCKLAGWDKSKQFRFQMLDKDQMCPVVSFVSVPEKENSSDENINSLNSHTKNKTSQMSESSLVNNRGISPGDCTCKGENGEKDNILSRKQMTEPEPGGLVPPGGKTFIVVICDGKNPGRCKELLLLCFSDFLIGRYLEVNVISGEESLIAAREPFSWKKLKSSQALTSAKTTVVVTAQKRNSRRQLPSFLPQYPIPDRLRKCVEQKIDILTFQPLLAELLNMSNYKEKFSTLLWLEEIYAEMELKEYNMSGIILRRNGDLLVLEVPGLAEGRPSLYAGDKLILKTQEYNGHAIEYISYVTEIHEEDVTLKINPEFEQAYNFEPMDVEFTYNRTTSRRCHFALEHVIHLGVKVLFPEEIILQSPQVTGNWNHAQDTKSSGQSTSKKNRKTMTDQAEHGTEERRVGDKDLPVLAPFTAEMSDWVDEIQTPKARKMEFFNPVLNENQKLAVKRILSGDCRPLPYILFGPPGTGKTVTIIEAVLQVHFALPDSRILVCAPSNSAADLVCLRLHESKVLQPATMVRVNATCRFEEIVIDAVKPYCRDGEDIWKASRFRIIITTCSSSGLFYQIGVRVGHFTHVFVDEAGQASEPECLIPLGLMSDISGQIVLAGDPMQLGPVIKSRLAMAYGLNVSFLERLMSRPAYQRDENAFGACGAHNPLLVTKLVKNYRSHEALLMLPSRLFYHRELEVCADPTVVTSLLGWEKLPKKGFPLIFHGVRGSEAREGKSPSWFNPAEAVQVLRYCCLLAHSISSQVSASDIGVITPYRKQVEKIRILLRNVDLMDIKVGSVEEFQGQEYLVIIISTVRSNEDRFEDDRYFLGFLSNSKRFNVAITRPKALLIVLGNPHVLVRDPCFGALLEYSITNGVYMGCDLPPALQSLQNCGEGVADPSYPVVPESTGPEKHQEPS

SEQ ID NO: 54090 - protein, 125 aa, Homo sapiens
MSDISGQVTKLVKNYRSHEALLMLPSRLFYHRELEVCADPTVVTSLLGWEKLPKKGFPLIFHGVRGSEAREGKSPSWFNPAEAVQVLRYCCLLAHSISSQVSASDIGVITPYRKQVRPAQARLVL

SEQ ID NO: 54091 - protein, 125 aa, Homo sapiens; identical to SEQ ID NO: 54090

SEQ ID NO: 54092 - protein, 338 aa, Homo sapiens
MFRVGHFTHVFVDEAGQASEPECLIPLGLMSDISGQIVLAGDPMQLGPVIKSRLAMAYGLNVSFLERLMSRPAYQRDENAFGACGAHNPLLVTKLVKNYRSHEALLMLPSRLFYHRELEVCADPTVVTSLLGWEKLPKKGFPLIFHGVRGSEAREGKSPSWFNPAEAVQVLRYCCLLAHSISSQVSASDIGVITPYRKQVEKIRILLRNVDLMDIKVGSVEEFQGQEYLVIIISTVRSNEDRFEDDRYFLGFLSNSKRFNVAITRPKALLIVLGNPHVLVRDPCFGALLEYSITNGVYMGCDLPPALQSLQNCGEGVADPSYPVVPESTGPEKHQEPS

SEQ ID NO: 54093 - protein, 1165 aa, Homo sapiens
MLSLAAKLVAFFWRTADTPREEAGQLEPELAEGDTKLKTVRGVVTRYCSDYGMIDDMIYFSSDAVTSRVLLNVGQEVIAVVEENKVSNGLKAIRVEAVSDKWEDDSRNHGSPSDCGPRVLIGCVTSLVEGAGCISQTTYFSLESVCEGFEPCKGDWVEAEYRIRPGTWSSEATSVKPLRYKRVDKVCISSLCGRNGVLEESIFFTLDSLKLPDGYTPRRGDVVNAVVVESSQSCYVWRALCMTLVKRRDAAPVHEATHFYGTILLKNKGDIEVTQVTHFGTLKEGRSKTMVIWIENKGDIPQNLVSCKLAGWDKSKQFRFQMLDKDQMCPVVSFVSVPEKENSSDENINSLNSHTKNKTSQMSESSLVNNRGISPGDCTCKGENGEKDNILSRKQMTEPEPGGLVPPGGKTFIVVICDGKNPGRCKELLLLCFSDFLIGRYLEVNVISGEESLIAAREPFSWKKLKSSQALTSAKTTVVVTAQKRNSRRQLPSFLPQYPIPDRLRKCVEQKIDILTFQPLLAELLNMSNYKEKFSTLLWLEEIYAEMELKEYNMSGIILRRNGDLLVLEVPGLAEGRPSLYAGDKLILKTQEYNGHAIEYISYVTEIHEEDVTLKINPEFEQAYNFEPMDVEFTYNRTTSRRCHFALEHVIHLGVKVLFPEEIILQSPQVTGNWNHAQDTKSSGQSTSKKNRKTMTDQAEHGTEERRVGDKDLPVLAPFTAEMSDWVDEIQTPKARKMEFFNPVLNENQKLAVKRILSGDCRPLPYILFGPPGTGKTVTIIEAVLQVHFALPDSRILVCAPSNSAADLVCLRLHESKVLQPATMVRVNATCRFEEIVIDAVKPYCRDGEDIWKASRFRIIITTCSSSGLFYQIGVRVGHFTHVFVDEAGQASEPECLIPLGLMSDISGQIVLAGDPMQLGPVIKSRLAMAYGLNVSFLERLMSRPAYQRDENAFGACGAHNPLLVTKLVKNYRSHEALLMLPSRLFYHRELEVCADPTVVTSLLGWEKLPKKGFPLIFHGVRGSEAREGKSPSWFNPAEAVQVLRYCCLLAHSISSQVSASDIGVITPYRKQVEKIRILLRNVDLMDIKVGSVEEFQGQEYLVIIISTDPCFGALLEYSITNGVYMGCDLPPALQSLQNCGEGVADPSYPVVPESTGPEKHQEPS

SEQ ID NO: 54094 - protein, 211 aa, Homo sapiens
MSFLPVRSVIGGGDTKLKTVRGVVTRYCSDYGMIDDMIYFSSDAVTSRVLLNVGQEVIAVVEENKVSNGLKAIRVEAVSDKWEDDSRNHGSPSDCGPRVLIGCVTSLVEGAGCISQTTYFSLESVCEGFEPCKGDWVEAEYRIRPGTWSSEATSVKPLRYKRVDKVACRLVAPLCASGRPAIRGNLHGPGFSCMCWKPGKIKLCHGQREKK

SEQ ID NO: 54095 - protein, 1165 aa, Homo sapiens
MSFLPVRSVIGGGDTKLKTVRGVVTRYCSDYGMIDDMIYFSSDAVTSRVLLNVGQEVIAVVEENKVSNGLKAIRVEAVSDKWEDDSRNHGSPSDCGPRVLIGCVTSLVEGAGCISQTTYFSLESVCEGFEPCKGDWVEAEYRIRPGTWSSEATSVKPLRYKRVDKVCISSLCGRNGVLEESIFFTLDSLKLPDGYTPRRGDVVNAVVVESSQSCYVWRALCMTLVKRRDAAPVHEATHFYGTILLKNKGDIEVTQVTHFGTLKEGRSKTMVIWIENKGDIPQNLVSCKLAGWDKSKQFRFQMLDKDQMCPVVSFVSVPEKENSSDENINSLNSHTKNKTSQMSESSLVNNRGISPGDCTCKGENGEKDNILSRKQMTEPEPGGLVPPGGKTFIVVICDGKNPGRCKELLLLCFSDFLIGRYLEVNVISGEESLIAAREPFSWKKLKSSQALTSAKTTVVVTAQKRNSRRQLPSFLPQYPIPDRLRKCVEQKIDILTFQPLLAELLNMSNYKEKFSTLLWLEEIYAEMELKEYNMSGIILRRNGDLLVLEVPGLAEGRPSLYAGDKLILKTQEYNGHAIEYISYVTEIHEEDVTLKINPEFEQAYNFEPMDVEFTYNRTTSRRCHFALEHVIHLGVKVLFPEEIILQSPQVTGNWNHAQDTKSSGQSTSKKNRKTMTDQAEHGTEERRVGDKDLPVLAPFTAEMSDWVDEIQTPKARKMEFFNPVLNENQKLAVKRILSGDCRPLPYILFGPPGTGKTVTIIEAVLQVHFALPDSRILVCAPSNSAADLVCLRLHESKVLQPATMVRVNATCRFEEIVIDAVKPYCRDGEDIWKASRFRIIITTCSSSGLFYQIGVRVGHFTHVFVDEAGQASEPECLIPLGLMSDISGQIVLAGDPMQLGPVIKSRLAMAYGLNVSFLERLMSRPAYQRDENAFGACGAHNPLLVTKLVKNYRSHEALLMLPSRLFYHRELEVCADPTVVTSLLGWEKLPKKGFPLIFHGVRGSEAREGKSPSWFNPAEAVQVLRYCCLLAHSISSQVSASDIGVITPYRKQVEKIRILLRNVDLMDIKVGSVEEFQGQEYLVIIISTVRSNEDRFEDDRYFLGFLSNSKRFNVAITRPKALLIVLGNPHVLVRLWRGGGRPLLPSGARIHRTREASGAQLICSG

SEQ ID NO: 54096 - protein, 1211 aa, Homo sapiens; identical to SEQ ID NO: 54089

SEQ ID NO: 54097 - protein, 160 aa, Homo sapiens
MAAERKTRLSKNLLRMKFMQRGLDSETKKQLEEEEKKIISEEHWYLDLPELKEKESFIIEEQSFLLCEDLLYGRMSFRGFNPEVEKLMLQMNAKHKAEEVEDETVELDVSDEEMARRYETLVGTIGKKFARKRDHANYEEDENGDITPIKAKKMFLKPQD

SEQ ID NO: 54098 - protein, 208 aa, Homo sapiens
MKACKRGNSDIVRLVIECGADCNILSKHQNSALHFAKQSNNVLVYDLLKNHLETLSRVAEETIKDYFEARLALLEPVFPIACHRLCEGPDFSTDFNYKPPQNIPEGSGILLFIFHANFLGKEVIARLCGPCSVQAVVLNDKFQLPVFLTGSRSVVQAGVQWRGLQLTGVLTSQAQAILPPQPPNYLGLKMTVILFTHSALLQVPINSS

SEQ ID NO: 54099 - protein, 860 aa, Homo sapiens
MEQVAEGARVTAVPVSAADSTEELAEVEEGVGVVGEDNDAAARGAEAFGDSEEDGEDVFEVEKILDMKTEGGKVLYKVRWKGYTSDDDTWEPEIHLEDCKEVLLEFRKKIAENKAKAVRKDIQRLSLNNDIFEANSDSDQQSETKEDTSPKKKKKKLRQREEKSPDDLKKKKAKAGKLKDKSKPDLESSLESLVFDLRTKKRISEAKEELKESKKPKKDEVKETKELKKVKKGEIRDLKTKTREDPKENRKTKKEKFVESQVESESSVLNDSPFPEDDSEGLHSDSREEKQNTKSARERAGQDMGLEHGFEKPLDSAMSAEEDTDVRGRRKKKTPRKAEDTRENRKLENKNAFLEKKTVPKKQRNQDRSKSAAELEKLMPVSAQTPKGRRLSGEERGLWSTDSAEEDKETKRNESKEKYQKRHDSDKEEKGRKEPKGLKTLKEIRNAFDLFKLTPEEKNDVSENNRKREEIPLDFKTIDDHKTKENKQSLKERRNTRDETDTWAYIAAEGDQEVLDSVCQADENSDGRQQILSLGMDLQLEWMKLEDFQKHLDGKDENFAATDAIPSNVLRDAVKNGDYITVKVALNSNEEYNLDQEDSSGMTLVMLAAAGGQDDLLRLLITKGAKVNGRQKNGTTALIHAAEKNFLTTVAILLEAGAFVNVQQSNGETALMKACKRGNSDIVRLVIECGADCNILSKHQNSALHFAKQSNNVLVYDLLKNHLETLSRVAEETIKDYFEARLALLEPVFPIACHRLCEGPDFSTDFNYKPPQNIPEGSGILLFIFHANFLGKEVIARLCGPCSVQAVVLNDKFQLPVFLDSHFVYSFSPVAGPNKLFIRLTEAPSAKVKLLIGAYRVQLQ

SEQ ID NO: 54100 - protein, 867 aa, Homo sapiens
MEQVAEGARVTAVPVSAADSTEELAEVEEGVGVVGEDNDAAARGAEAFGDSEEDGEDVFEVEKILDMKTEGGKVLYKVRWKGYTSDDDTWEPEIHLEDCKEVLLEFRKKIAENKAKAVRKDIQRLSLNNDIFEANSDSDQQSETKEDTSPKKKKKKLRQREEKSPDDLKKKKAKAGKLKDKSKPDLESSLESLVFDLRTKKRISEAKEELKESKKPKKDEVKETKELKKVKKGEIRDLKTKTREDPKENRKTKKEKFVESQVESESSVLNDSPFPEDDSEGLHSDSREEKQNTKSARERAGQDMGLEHGFEKPLDSAMSAEEDTDVRGRRKKKTPRKAEDTRENRKLENKNAFLEKKTVPKKQRNQDRSKSAAELEKLMPVSAQTPKGRRLSGEERGLWSTDSAEEDKETKRNESKEKYQKRHDSDKEEKGRKEPKGLKTLKEIRNAFDLFKLTPEEKNDVSENNRKREEIPLDFKTIDDHKTKENKQSLKERRNTRDETDTWAYIAAEGDQEVLDSVCQADENSDGRQQILSLGMDLQLEWMKLEDFQKHLDGKDENFAATDAIPSNVLRDAVKNGDYITVKVALNSNEEYNLDQEDSSGMTLVMLAAAGGQDDLLRLLITKGAKVNGRQKNGTTALIHAAEKNFLTTVAILLEAGAFVNVQQSNGETALMKACKRGNSDIVRLVIECGADCNILSKHQNSALHFAKQSNNVLVYDLLKNHLETLSRVAEETIKDYFEARLALLEPVFPIACHRLCEGPDFSTDFNYKPPQNIPEGSGILLFIFHANFLGKEVIARLCGPCSVQAVVLNDKFQLPVFLTGSRSVVQAGVQWRGLQLTGVLTSQAQAILPPQPPNYLGLKMHATTSG

SEQ ID NO: 54101 - protein, 603 aa, Homo sapiens
MEQVAEGARVTAVPVSAADSTEELAEVEEGVGVVGEDNDAAARGAEAFGDSEEDGEDVFEVEKILDMKTEGGKVLYKVRWKGYTSDDDTWEPEIHLEDCKEVLLEFRKKIAENKAKAVRKDIQRLSLNNDIFEANSDSDQQSETKEDTSPKKKKKKLRQREEKSPDDLKKKKAKAGKLKDKSKPDLESSLESLVFDLRTKKRISEAKEELKESKKPKKDEVKETKELKKVKKGEIRDLKTKTREDPKENRKTKKEKFVESQVESESSVLNDSPFPEDDSEGLHSDSREEKQNTKSARERAGQDMGLEHGFEKPLDSAMSAEEDTDVRGRRKKKTPRKAEDTRENRKLENKNAFLEKKTVPKKQRNQDRSKSAAELEKLMPVSAQTPKGRRLSGEERGLWSTDSAEEDKETKRNESKEKYQKRHDSDKEEKGRKEPKGLKTLKEIRNAFDLFKLTPEEKNDVSENNRKREEIPLDFKTIDDHKTKENKQSLKERRNTRDETDTWAYIAAEGDQEVLDSVCQADENSDGRQQILSLGMDLQLEWMKLEDFQKHLDGKDENFAATDAIPSNVLRDAVKKKKKKKFLGTYTFFLFFFFEKPDLVPLF

SEQ ID NO: 54102 - protein, 1028 aa, Homo sapiens
MGFFSLSSERNESVIHYPESTEPEIQQEMSTSQPDCNVDSCSVSSGYGTFCISELNLYKSKDPKEFMEHIDVPKGQYVAPAVPAESLVDGVKNENFYIQTPEECHVSLKEDVSISPGEFEHNFLGENKVSEVYSGKTNSNAITSWAQKLKQNQPKRAHVEDGGSRSKQGNEQSKKTPIEKSDFAAATHPRAFYLSKPDETPNAWMSDSGTGLTYWKLEEKDMHHSLPETLEKTFISLSSTDVSPNQSNTSNEMKLPSLKDIYYKKQRENKQLPERNLTSASNPNHPPEVLTLDPTLHMKPKQQISGIQPHGLPNALDDRISFSPDSVLEPSMSSPSDIDSFSQASNVTSQLPGFPKYPSHTKASPVDSWKNQTFQNESRTSSTFPSVYTITSNDISVNTVDEENTVMVASASVSQSQLPGTANSVPECISLTSLEDPVILSKIRQNLKEKHARHIADLRAYYESEINSLKQKLEAKEISGVEDWKITNQILVDRCGQLDSALHEATSRVRTLENKNNLLEIEVNDLRERFSAASSASKILQERIEEMRTSSKEKDNTIIRLKSRLQDLEEAFENAYKLSDDKEAQLKQENKMFQDLLGEYESLGKEHRRVKDALNTTENKLLDAYTQISDLKRMISKLEAQVKQVEHENMLSLRHNSRIHVRPSRANTLATSDVSRRKWLIPGAEYSIFTGQPLDTQDSNVDNQLEETCSLGHRSPLEKDSSPGSSSTSLLIKKQRETSDTPIMRALKELDEGKIFKNWGTQTEKEDTSNINPRQTETSVNASRSPEKCAQQRQKRLNSASQRSSSLPPSNRKSSTPTKREIMLTPVTVAYSPKRSPKENLSPGFSHLLSKNESSPIRFDILLDDLDTVPVSTLQRTNPRKQLQFLPLDDSEEKTYSEKATDNHVNHSSCPEPVPNGVKKVSVRTAWEKNKSVSYEQCKPVSVTPQGNDFEYTAKIRTLAETERFFDELTKEKDQIEAALSRMPSPGGRITLQTRLNQTPQICEESSHKCAFAGHYVPCHLYDYRFQG

SEQ ID NO: 54103 - protein, 1031 aa, Homo sapiens
MGFFSLSSERNESVIHYPESTEPEIQQEMSTSQPDCNVDSCSVSSGYGTFCISELNLYKSKDPKEFMEHIDVPKGQYVAPAVPAESLVDGVKNENFYIQTPEECHVSLKEDVSISPGEFEHNFLGENKVSEVYSGKTNSNAITSWAQKLKQNQPKRAHVEDGGSRSKQGNEQSKKTPIEKSDFAAATHPRAFYLSKPDETPNAWMSDSGTGLTYWKLEEKDMHHSLPETLEKTFISLSSTDVSPNQSNTSNEMKLPSLKDIYYKKQRENKQLPERNLTSASNPNHPPEVLTLDPTLHMKPKQQISGIQPHGLPNALDDRISFSPDSVLEPSMSSPSDIDSFSQASNVTSQLPGFPKYPSHTKASPVDSWKNQTFQNESRTSSTFPSVYTITSNDISVNTVDEENTVMVASASVSQSQLPGTANSVPECISLTSLEDPVILSKIRQNLKEKHARHIADLRAYYESEINSLKQKLEAKEISGVEDWKITNQILVDRCGQLDSALHEATSRVRTLENKNNLLEIEVNDLRERFSAASSASKILQERIEEMRTSSKEKDNTIIRLKSRLQDLEEAFENAYKLSDDKEAQLKQENKMFQDLLGEYESLGKEHRRVKDALNTTENKLLDAYTQISDLKRMISKLEAQVKQVEHENMLSLRHNSRIHVRPSRANTLATSDVSRRKWLIPGAEYSIFTGQPLDTQDSNVDNQLEETCSLGHRSPLEKDSSPGSSSTSLLIKKQRETSDTPIMRALKELDEGKIFKNWGTQTEKEDTSNINPRQTETSVNASRSPEKCAQQRQKRLNSASQRSSSLPPSNRKSSTPTKREIMLTPVTVAYSPKRSPKENLSPGFSHLLSKNESSPIRFDILLDDLDTVPVSTLQRTNPRKQLQFLPLDDSEEKTYSEKATDNHVNHSSCPEPVPNGVKKVSVRTAWEKNKSVSYEQCKPVSVTPQGNDFEYTAKIRTLAETERFFDELTKEKDQIEAALSRMPSPGGRITLQTRLNQEALEDRLERINRELGSVRMTLKKFHVLRTSANL

SEQ ID NO: 54104 - protein, 176 aa, Homo sapiens
MALWRAYQRALAAHPWKVQVLTAGSLMGLGDIISQQLVERRGLQEHQRGRTLTMVSLGCGFVGPVVGGWYKVLDRFIPGTTKVDALKKMLLDQGGFAPCFLGCFLPLVGALNGLSAQDNWAKLQRDYPDALITNYYLWPAVQLANFYLVPLHYRLAVVQCVAVIWNSYLSWKAHRL

SEQ ID NO: 54105 - protein, 120 aa, Homo sapiens
MCHLYEGPVVGGWYKVLDRFIPGTTKVDALKKMLLDQGGFAPCFLGCFLPLVGALNGLSAQDNWAKLQRDYPDALITNYYLWPAVQLANFYLVPLHYRLAVVQCVAVIWNSYLSWKAHRL

SEQ ID NO: 54106 - protein, 176 aa, Homo sapiens; identical to SEQ ID NO: 54104

SEQ ID NO: 54107 - protein, 170 aa, Homo sapiens
MALWRAYQRALAAHPWKVQVLTAGSLMGLGDIISQQLVERRGLQEHQRGRTLTMVSLGCGFVGPVVGGWYKVLDRFIPGTTKVDALKKMLLDQGGFAPCFLGCFLPLVGALNGLSAQDNWAKLQRDYPDALITNYYVGRCPMCCCYLELLPVLEGTSALSLPHSIVSTLQ

SEQ ID NO: 54108 - protein, 113 aa, Homo sapiens
MALWRAYQRALAAHPWKVQVLTAGSLMGLGDIISQQLVERRGLQEHQRGRTLTMVSLGCGFVDYPDALITNYYLWPAVQLANFYLVPLHYRLAVVQCVAVIWNSYLSWKAHRL

SEQ ID NO: 54109 - protein, 191 aa, Homo sapiens
MALWRAYQRALAAHPWKVQVLTAAHPRRCPDNTCVPCIGSLMGLGDIISQQLVERRGLQEHQRGRTLTMVSLGCGFVGPVVGGWYKVLDRFIPGTTKVDALKKMLLDQGGFAPCFLGCFLPLVGALNGLSAQDNWAKLQRDYPDALITNYYLWPAVQLANFYLVPLHYRLAVVQCVAVIWNSYLSWKAHRL

SEQ ID NO: 54110 - protein, 115 aa, Homo sapiens
MGLGDIISQQLVERRGLQEHQRGRTLTMVSLGCGFVGPVVGGWYKVLDRFIPGTTKVDALKKMLLDQGGFAPCFLGCFLPLVGALNGLSAQDNWAKLQRDYPDALITNYYLWPAV

SEQ ID NO: 54111 - protein, 121 aa, Homo sapiens
  VARIANT 1: note = MOD_RES - Any amino acid
XSLMGLGDIISQQLVERRGLQEHQRGRTLTMVSLGCGFVGPVVGGWYKVLDRFIPGTTKVDALKKMLLDQDYPDALITNYYLWPAVQLANFYLVPLHYRLAVVQCVAVIWNSYLSWKAHRL

SEQ ID NO: 54112 - protein, 67 aa, Homo sapiens
  VARIANT 1: note = MOD_RES - Any amino acid
XDSQGKKTGFTGIKKGDYPDALITNYYLWPAVQLANFYLVPLHYRLAVVQCVAVIWNSYLSWKAHRL

SEQ ID NO: 54113 - protein, 303 aa, Homo sapiens
MAPAADMTSLPLGVKVEDSAFGKPAGGGAGQAPSAAAATAAAMGADEEGAKPKVSPSLLPFSVEALMADHRKPGAKESALAPSEGVQAAGGSAQPLGVPPGSLGAPDAPSSPRPLGHFSVGGLLKLPEDALVKAESPEKPERTPWMQSPRFSPPPARRLSPPACTLRKHKTNRKPRTPFTTAQLLALERKFRQKQYLSIAERAEFSSSLSLTETQVKIWFQNRRAKAKRLQEAELEKLKMAAKPMLPPAAFGLSFPLGGPAAVAAAAGASLYGASGPFQRAALPVAPVGLYTAHVGYSMYHLT

SEQ ID NO: 54114 - protein, 267 aa, Homo sapiens
MASPSKGNDLFSPDEEGPAVVAGPGPGPGGAEGAAEERRVKVSSLPFSVEALMSDKKPPKEASPLPAESASAGATLRPLLLSGHGAREAHSPGPLVKPFETASVKSENSEDGAAWMQEPGRYSPPPRHMSPTTCTLRKHKTNRKPRTPFTTSQLLALERKFRQKQYLSIAERAEFSSSLNLTETQVKIWFQNRRAKAKRLQEAELEKLKMAAKPMLPSSFSLPFPISSPLQAASIYGASYPFHRPVLPIPPVGLYATPVGYGMYHLS

SEQ ID NO: 54115 - protein, 326 aa, Homo sapiens
MNTSPGTVGSDPVILATAGYDHTVRFWQAHSGICTRTVQHQDSQVNALEVTPDRSMIAAAGYQHIRMYDLNSNNPNPIISYDGVNKNIASVGFHEDGRWMYTGGEDCTARIWDLRSRNLQCQRIFQVNAPINCVCLHPNQAELIVGDQSGAIHIWDLKTDHNEQLIPEPEVSITSAHIDPDASYMAAVNSTGNCYVWNLTGGIGDEVTQLIPKTKIPAHTRYALQCRFSPDSTLLATCSADQTCKIWRTSNFSLMTELSIKSGNPGESSRGWMWGCAFSGDSQYIVTASSDNLARLWCVETGEIKREYGGHQKAVVCLAFNDSVLG

SEQ ID NO: 54116 - protein, 326 aa, Homo sapiens; identical to SEQ ID NO: 54115

SEQ ID NO: 54117 - protein, 327 aa, Homo sapiens
MNTSPGTVGSDPVILATAGYDHTVRFWQAHSGICTRTVQHQDSQVNALEVTPDRSMIAAAGYQHIRMYDLNSNNPNPIISYDGVNKNIASVGFHEDGRWMYTGGEDCTARIWDLRSRNLQCQRIFQVNAPINCVCLHPNQAELIVGDQSGAIHIWDLKTDHNEQLIPEPEVSITSAHIDPDASYMAAVNSTGNCYVWNLTGGIGDEVTQLIPKTKIPAHTRYALQCRFSPDSTLLATCSADQTCKIWRTSNFSLMTELSIKSGNPGESSRGWMWGCAFSGDSQYIVTGEPRPGLPHPWPPALASRASPPRLQLPLCWGRLLGLHLRS

SEQ ID NO: 54118 - protein, 217 aa, Homo sapiens
MEHAPWSPGASSRARAGHTMNTSPGTVGSDPVILATAGYDHTVRFWQAHSGICTRTVQHQDSQVNALEVTPDRSMIAAAGYQHIRMYDLNSNNPNPIISYDGVNKNIASVGFHEDGRWMYTGGEDCTARIWDLRSRNLQCQRIFQVNAPINCVCLHPNQAELIVGDQSGAIHIWDLKTDHNEQLIPEPEVSITSAHIDPDASYMAAVNSTAPRHLLG

SEQ ID NO: 54119 - protein, 326 aa, Homo sapiens; identical to SEQ ID NO: 54115

SEQ ID NO: 54120 - protein, 326 aa, Homo sapiens; identical to SEQ ID NO: 54115

SEQ ID NO: 54121 - protein, 490 aa, Homo sapiens
MAQRAVWLISHEPGTPLCGTVRFSRRYPTVEKRARVFNGASYVPVPEDGPFLKALLFELRLLDDDKDFVESRDSCSRINKTSIYGLLIGGEELWPVVAFLKNDMIYACVPLVEQTLSPRPPLISVSGVSQGFEFLFGIQDFLYSGQKNDSELNTKLSQLPDLLLQACPFGTLLDANLQNSLDNTNFASVTQPQKQPAWKTGTYKGKPQVSISITEKVKSMQYDKQGIADTWQVVGTVTCKCDLEGIMPNVTISLSLPTNGSPLQDILVHPCVTSLDSAILTSSSIDAMDDSAFSGPYKFPFTPPLESFNLCFYTSQVPVPPILGFYQMKEEEVQLRITINLKLHESVKNNFEFCEAHIPFYNRGPITHLEYKTSFGQLEVFREKSLLIWIIGQKFPKSMEISLSGTVTFGAKSHEKQPFDPICTGETAYLKLHFRILDYTLTGCYADQHSVQVFASGKPKISAHRKLISSDYYIWNSKAPAPVTYGSLLL

SEQ ID NO: 54122 - protein, 5478 aa, Homo sapiens
MLVIWILTLALRLCASVTTVTPEGSAVHKAISQQGTLWTGEVLEKQTVEQGKSTLRRQKNHFHRSAGELRCRNALKDEGASAGWSVMFAGESVVVLVHLWMTGARVKNLGLVEFASPGDDGDGRAEGFSLGLPLSEQARAAGAREKERQETVINHSTFSGFSQITGSTVNTSIGGNTTSASTPSSSDPFTTFSDYGVSVTFITGSTATKHFLDSSTNSGHSEESTVSHSGPGATGTTLFPSHSATSVFVGEPKTSPITSASMETTALPGSTTTAGLSEKSTTFYSSPRSPDRTLSPARTTSSGVSEKSTTSHSRPGPTHTIAFPDSTTMPGVSQESTASHSIPGSTDTTLSPGTTTPSSLGPESTTFHSSPGYTKTTRLPDNTTTSGLLEASTPVHSSTGSPHTTLSPSSSTTHEGEPTTFQSWPSSKDTSPAPSGTTSAFVKLSTTYHSSPSSTPTTHFSASSTTLGHSEESTPVHSSPVATATTPPPARSATSGHVEESTAYHRSPGSTQTMHFPESSTTSGHSEESATFHGSTTHTKSSTPSTTAALAHTSYHSSLGSTETTHFRDSSTISGRSEESKASHSSPDAMATTVLPAGSTPSVLVGDSTPSPISSGSMETTALPGSTTKPGLSEKSTTFYSSPRSPDTTHLPASMTSSGVSEESTTSHSRPGSTHTTAFPGSTTMPGLSQESTASHSSPGPTDTTLSPGSTTASSLGPEYTTFHSRPGSTETTLLPDNTTASGLLEASMPVHSSTRSPHTTLSPAGSTTRQGESTTFHSWPSSKDTRPAPPTTTSAFVEPSTTSHGSPSSIPTTHISARSTTSGLVEESTTYHSSPGSTQTMHFPESDTTSGRGEESTTSHSSTTHTISSAPSTTSALVEEPTSYHSSPGSTATTHFPDSSTTSGRSEESTASHSSQDATGTIVLPARSTTSVLLGESTTSPISSGSMETTALPGSTTTPGLSERSTTFHSSPRSPATTLSPASTTSSGVSEESTTSRSRPGSTHTTAFPDSTTTPGLSRHSTTSHSSPGSTDTTLLPASTTTSGPSQESTTSHSSSGSTDTALSPGSTTALSFGQESTTFHSNPGSTHTTLFPDSTTSSGIVEASTRVHSSTGSPRTTLSPASSTSPGLQGESTAFQTHPASTHTTPSPPSTATAPVEESTTYHRSPGSTPTTHFPASSTTSGHSEKSTIFHSSPDASGTTPSSAHSTTSGRGESTTSRISPGSTEITTLPGSTTTPGLSEASTTFYSSPRSPTTTLSPASMTSLGVGEESTTSRSQPGSTHSTVSPASTTTPGLSEESTTVYSSSRGSTETTVFPHSTTTSVHGEEPTTFHSRPASTHTTLFTEDSTTSGLTEESTAFPGSPASTQTGLPATLTTADLGEESTTFPSSSGSTGTKLSPARSTTSGLVGESTPSRLSPSSTETTTLPGSPTTPSLSEKSTTFYTSPRSPDATLSPATTTSSGVSEESSTSHSQPGSTHTTAFPDSTTTSDLSQEPTTSHSSQGSTEATLSPGSTTASSLGQQSTTFHSSPGDTETTLLPDDTITSGLVEASTPTHSSTGSLHTTLTPASSTSAGLQEESTTFQSWPSSSDTTPSPPGTTAAPVEVSTTYHSRPSSTPTTHFSASSTTLGRSEESTTVHSSPGATGTALFPTRSATSVLVGEPTTSPISSGSTETTALPGSTTTAGLSEKSTTFYSSPRSPDTTLSPASTTSSGVSEESTTSHSRPGSTHTTAFPGSTTMPGVSQESTASHSSPGSTDTTLSPGSTTASSLGPESTTFHSSPGSTETTLLPDNTTASGLLEASTPVHSSTGSPHTTLSPAGSTTRQGESTTFQSWPSSKDTMPAPPTTTSAFVELSTTSHGSPSSTPTTHFSASSTTLGRSEESTTVHSSPVATATTPSPARSTTSGLVEESTAYHSSPGSTQTMHFPESSTASGRSEESRTSHSSTTHTISSPPSTTSALVEEPTSYHSSPGSTATTHFPDSSTTSGRSEESTASHSSQDATGTIVLPARSTTSVLLGESTTSPISSGSMETTALPGSTTTPGLSEKSTTFHSSPRSPATTLSPASTTSSGVSEESTTSHSRPGSTHTTAFPDSTTTPGLSRHSTTSHSSPGSTDTTLLPASTTTSGPSQESTTSHSSPGSTDTALSPGSTTALSFGQESTTFHSSPGSTHTTLFPDSTTSSGIVEASTRVHSSTGSPRTTLSPASSTSPGLQGESTAFQTHPASTHTTPSPPSTATAPVEESTTYHRSPGSTPTTHFPASSTTSGHSEKSTIFHSSPDASGTTPSSAHSTTSGRGESTTSRISPGSTEITTLPGSTTTPGLSEASTTFYSSPRSPTTTLSPASMTSLGVGEESTTSRSQPGSTHSTVSPASTTTPGLSEESTTVYSSSPGSTETTVFPRTPTTSVRGEEPTTFHSRPASTHTTLFTEDSTTSGLTEESTAFPGSPASTQTGLPATLTTADLGEESTTFPSSSGSTGTTLSPARSTTSGLVGESTPSRLSPSSTETTTLPGSPTTPSLSEKSTTFYTSPRSPDATLSPATTTSSGVSEESSTSHSQPGSTHTTAFPDSTTTPGLSRHSTTSHSSPGSTDTTLLPASTTTSGPSQESTTSHSSPGSTDTALSPGSTTALSFGQESTTFHSSPGSTHTTLFPDSTTSSGIVEASTRVHSSTGSPRTTLSPASSTSPGLQGESTTFQTHPASTHTTPSPPSTATAPVEESTTYHRSPGSTPTTHFPASSTTSGHSEKSTIFHSSPDASGTTPSSAHSTTSGRGESTTSRISPGSTEITTLPGSTTTPGLSEASTTFYSSPRSPTTTLSPASMTSLGVGEESTTSRSQPGSTHSTVSPASTTTPGLSEESTTVYSSSPGSTETTVFPRSTTTSVRGEEPTTFHSRPASTHTTLFTEDSTTSGLTEESTAFPGSPASTQTGLPATLTTADLGEESTTFPSSSGSTGTTLSPARSTTSGLVGESTPSRLSPSSTETTTLPGSPTTPSLSEKSTTFYTSPRSPDATLSPATTTSSGVSEESSTSHSQPGSTHTTAFPDSTTTSGLSQEPTASHSSQGSTEATLSPGSTTASSLGQQSTTFHSSPGDTETTLLPDDTITSGLVEASTPTHSSTGSLHTTLTPASSTSAGLQEESTTFQSWPSSSDTTPSPPGTTAAPVEVSTTYHSRPSSTPTTHFSASSTTLGRSEESTTVHSSPGATGTALFPTRSATSVLVGEPTTSPISSGSTETTALPGSTTTAGLSEKSTTFYSSPRSPDTTLSPASTTSSGVSEESTTSHSRPGSTHTTAFPGSTTMPGVSQESTASHSSPGSTDTTLSPGSTTASSLGPESTTFHSGPGSTETTLLPDNTTASGLLEASTPVHSSTGSPHTTLSPAGSTTRQGESTTFQSWPNSKDTTPAPPTTTSAFVELSTTSHGSPSSTPTTHFSASSTTLGRSEESTTVHSSPVATATTPSPARSTTSGLVEESTTYHSSPGSTQTMHFPESDTTSGRGEESTTSHSSTTHTISSAPSTTSALVEEPTSYHSSPGSTATTHFPDSSTTSGRSEESTASHSSQDATGTIVLPARSTTSVLLGESTTSPISSGSMETTALPGSTTTPGLSEKSTTFHSSPRSPATTLSPASTTSSGVSEESTTSHSRPGSTHTTAFPDSTTTPGLSRHSTTSHSSPGSTDTTLLPASTTTSGSSQESTTSHSSSGSTDTALSPGSTTALSFGQESTTFHSSPGSTHTTLFPDSTTSSGIVEASTRVHSSTGSPRTTLSPASSTSPGLQGESTAFQTHPASTHTTPSPPSTATAPVEESTTYHRSPGSTPTTHFPASSTTSGHSEKSTIFHSSPDASGTTPSSAHSTTSGRGESTTSRISPGSTEITTLPGSTTTPGLSEASTTFYSSPRSPTTTLSPASMTSLGVGEESTTSRSQPGSTHSTVSPASTTTPGLSEESTTVYSSSPGSTETTVFPRSTTTSVRREEPTTFHSRPASTHTTLFTEDSTTSGLTEESTAFPGSPASTQTGLPATLTTADLGEESTTFPSSSGSTGTKLSPARSTTSGLVGESTPSRLSPSSTETTTLPGSPTTPSLSEKSTTFYTSPRSPDATLSPATTTSSGVSEESSTSHSQPGSTHTTAFPDSTTTSGLSQEPTTSHSSQGSTEATLSPGSTTASSLGQQSTTFHSSPGDTETTLLPDDTITSGLVEASTPTHSSTGSLHTTLTPASSTSTGLQEESTTFQSWPSSSDTTPSPPSTTAVPVEVSTTYHSRPSSTPTTHFSASSTTLGRSEESTTVHSSPGATGTALFPTRSATSVLVGEPTTSPISSGSTETTALPGSTTTAGLSEKSTTFYSSPRSPDTTLSPASTTSSGVSEESTTSHSRPGSMHTTAFPSSTTMPGVSQESTASHSSPGSTDTTLSPGSTTASSLGPESTTFHSSPGSTETTLLPDNTTASGLLEASTPVHSSTGSPHTTLSPAGSTTRQGESTTFQSWPNSKDTTPAPPTTTSAFVELSTTSHGSPSSTPTTHFSASSTTLGRSEESTTVHSSPVATATTPSPARSTTSGLVEESTTYHSSPGSTQTMHFPESNTTSGRGEESTTSHSSTTHTISSAPSTTSALVEEPTSYHSSPGSTATTHFPDSSTTSGRSEESTASHSSQDATGTIVLPARSTTSVLLGESTTSPISSGSMETTALPGSTTTPGLSEKSTTFHSSPSSTPTTHFSASSTTLGRSEESTTVHSSPVATATTPSPARSTTSGLVEESTAYHSSPGSTQTMHFPESSTASGRSEESRTSHSSTTHTISSPPSTTSALVEEPTSYHSSPGSIATTHFPESSTTSGRSEESTASHSSPDTNGITPLPAHFTTSGRIAESTTFYISPGSMETTLASTATTPGLSAKSTILYSSSRSPDQTLSPASMTSSSISGEPTSLYSQAESTHTTAFPASTTTSGLSQESTTFHSKPGSTETTLSPGSITTSSFAQEFTTPHSQPGSALSTVSPASTTVPGLSEESTTFYSSPGSTETTAFSHSNTMSIHSQQSTPFPDSPGFTHTVLPATLTTTDIGQESTAFHSSSDATGTTPLPARSTASDLVGEPTTFYISPSPTYTTLFPASSSTSGLTEESTTFHTSPSFTSTIVSTESLETLAPGLCQEGQIWNGKQCVCPQGYVGYQCLSPLESFPVETPEKLNATLGMTVKVTYRNFTEKMNDASSQEYQNFSTLFKNRMDVVLKGDNLPQYRGVNIRRLLNGSIVVKNDVILEADYTLEYEELFENLAEIVKAKIMNETRTTLLDPDSCRKAILCYSEEDTFVDSSVTPGFDFQEQCTQKAAEGYTQFYYVDVLDGKLACVNKCTKGTKSQMNCNLGTCQLQRSGPRCLCPNTNTHWYWGETCEFNIAKSLVYGIVGAVMAVLLLALIILIILFSLSQRKRHREQYDVPQEWRKEGTPGIFQKTAIWEDQNLRESRFGLENAYNNFRPTLETVDSGTELHIQRPEMVASTV

SEQ ID NO: 54123 - protein, 5335 aa, Homo sapiens
MLVIWILTLALRLCASVTTVTPGSTVNTSIGGNTTSASTPSSSDPFTTFSDYGVSVTFITGSTATKHFLDSSTNSGHSEESTVSHSGPGATGTTLFPSHSATSVFVGEPKTSPITSASMETTALPGSTTTAGLSEKSTTFYSSPRSPDRTLSPARTTSSGVSEKSTTSHSRPGPTHTIAFPDSTTMPGVSQESTASHSIPGSTDTTLSPGTTTPSSLGPESTTFHSSPGYTKTTRLPDNTTTSGLLEASTPVHSSTGSPHTTLSPSSSTTHEGEPTTFQSWPSSKDTSPAPSGTTSAFVKLSTTYHSSPSSTPTTHFSASSTTLGHSEESTPVHSSPVATATTPPPARSATSGHVEESTAYHRSPGSTQTMHFPESSTTSGHSEESATFHGSTTHTKSSTPSTTAALAHTSYHSSLGSTETTHFRDSSTISGRSEESKASHSSPDAMATTVLPAGSTPSVLVGDSTPSPISSGSMETTALPGSTTKPGLSEKSTTFYSSPRSPDTTHLPASMTSSGVSEESTTSHSRPGSTHTTAFPGSTTMPGLSQESTASHSSPGPTDTTLSPGSTTASSLGPEYTTFHSRPGSTETTLLPDNTTASGLLEASMPVHSSTRSPHTTLSPAGSTTRQGESTTFHSWPSSKDTRPAPPTTTSAFVEPSTTSHGSPSSIPTTHISARSTTSGLVEESTTYHSSPGSTQTMHFPESDTTSGRGEESTTSHSSTTHTISSAPSTTSALVEEPTSYHSSPGSTATTHFPDSSTTSGRSEESTASHSSQDATGTIVLPARSTTSVLLGESTTSPISSGSMETTALPGSTTTPGLSERSTTFHSSPRSPATTLSPASTTSSGVSEESTTSRSRPGSTHTTAFPDSTTTPGLSRHSTTSHSSPGSTDTTLLPASTTTSGPSQESTTSHSSSGSTDTALSPGSTTALSFGQESTTFHSNPGSTHTTLFPDSTTSSGIVEASTRVHSSTGSPRTTLSPASSTSPGLQGESTAFQTHPASTHTTPSPPSTATAPVEESTTYHRSPGSTPTTHFPASSTTSGHSEKSTIFHSSPDASGTTPSSAHSTTSGRGESTTSRISPGSTEITTLPGSTTTPGLSEASTTFYSSPRSPTTTLSPASMTSLGVGEESTTSRSQPGSTHSTVSPASTTTPGLSEESTTVYSSSRGSTETTVFPHSTTTSVHGEEPTTFHSRPASTHTTLFTEDSTTSGLTEESTAFPGSPASTQTGLPATLTTADLGEESTTFPSSSGSTGTKLSPARSTTSGLVGESTPSRLSPSSTETTTLPGSPTTPSLSEKSTTFYTSPRSPDATLSPATTTSSGVSEESSTSHSQPGSTHTTAFPDSTTTSDLSQEPTTSHSSQGSTEATLSPGSTTASSLGQQSTTFHSSPGDTETTLLPDDTITSGLVEASTPTHSSTGSLHTTLTPASSTSAGLQEESTTFQSWPSSSDTTPSPPGTTAAPVEVSTTYHSRPSSTPTTHFSASSTTLGRSEESTTVHSSPGATGTALFPTRSATSVLVGEPTTSPISSGSTETTALPGSTTTAGLSEKSTTFYSSPRSPDTTLSPASTTSSGVSEESTTSHSRPGSTHTTAFPGSTTMPGVSQESTASHSSPGSTDTTLSPGSTTASSLGPESTTFHSSPGSTETTLLPDNTTASGLLEASTPVHSSTGSPHTTLSPAGSTTRQGESTTFQSWPSSKDTMPAPPTTTSAFVELSTTSHGSPSSTPTTHFSASSTTLGRSEESTTVHSSPVATATTPSPARSTTSGLVEESTAYHSSPGSTQTMHFPESSTASGRSEESRTSHSSTTHTISSPPSTTSALVEEPTSYHSSPGSTATTHFPDSSTTSGRSEESTASHSSQDATGTIVLPARSTTSVLLGESTTSPISSGSMETTALPGSTTTPGLSEKSTTFHSSPRSPATTLSPASTTSSGVSEESTTSHSRPGSTHTTAFPDSTTTPGLSRHSTTSHSSPGSTDTTLLPASTTTSGPSQESTTSHSSPGSTDTALSPGSTTALSFGQESTTFHSSPGSTHTTLFPDSTTSSGIVEASTRVHSSTGSPRTTLSPASSTSPGLQGESTAFQTHPASTHTTPSPPSTATAPVEESTTYHRSPGSTPTTHFPASSTTSGHSEKSTIFHSSPDASGTTPSSAHSTTSGRGESTTSRISPGSTEITTLPGSTTTPGLSEASTTFYSSPRSPTTTLSPASMTSLGVGEESTTSRSQPGSTHSTVSPASTTTPGLSEESTTVYSSSPGSTETTVFPRTPTTSVRGEEPTTFHSRPASTHTTLFTEDSTTSGLTEESTAFPGSPASTQTGLPATLTTADLGEESTTFPSSSGSTGTTLSPARSTTSGLVGESTPSRLSPSSTETTTLPGSPTTPSLSEKSTTFYTSPRSPDATLSPATTTSSGVSEESSTSHSQPGSTHTTAFPDSTTTPGLSRHSTTSHSSPGSTDTTLLPASTTTSGPSQESTTSHSSPGSTDTALSPGSTTALSFGQESTTFHSSPGSTHTTLFPDSTTSSGIVEASTRVHSSTGSPRTTLSPASSTSPGLQGESTTFQTHPASTHTTPSPPSTATAPVEESTTYHRSPGSTPTTHFPASSTTSGHSEKSTIFHSSPDASGTTPSSAHSTTSGRGESTTSRISPGSTEITTLPGSTTTPGLSEASTTFYSSPRSPTTTLSPASMTSLGVGEESTTSRSQPGSTHSTVSPASTTTPGLSEESTTVYSSSPGSTETTVFPRSTTTSVRGEEPTTFHSRPASTHTTLFTEDSTTSGLTEESTAFPGSPASTQTGLPATLTTADLGEESTTFPSSSGSTGTTLSPARSTTSGLVGESTPSRLSPSSTETTTLPGSPTTPSLSEKSTTFYTSPRSPDATLSPATTTSSGVSEESSTSHSQPGSTHTTAFPDSTTTSGLSQEPTASHSSQGSTEATLSPGSTTASSLGQQSTTFHSSPGDTETTLLPDDTITSGLVEASTPTHSSTGSLHTTLTPASSTSAGLQEESTTFQSWPSSSDTTPSPPGTTAAPVEVSTTYHSRPSSTPTTHFSASSTTLGRSEESTTVHSSPGATGTALFPTRSATSVLVGEPTTSPISSGSTETTALPGSTTTAGLSEKSTTFYSSPRSPDTTLSPASTTSSGVSEESTTSHSRPGSTHTTAFPGSTTMPGVSQESTASHSSPGSTDTTLSPGSTTASSLGPESTTFHSGPGSTETTLLPDNTTASGLLEASTPVHSSTGSPHTTLSPAGSTTRQGESTTFQSWPNSKDTTPAPPTTTSAFVELSTTSHGSPSSTPTTHFSASSTTLGRSEESTTVHSSPVATATTPSPARSTTSGLVEESTTYHSSPGSTQTMHFPESDTTSGRGEESTTSHSSTTHTISSAPSTTSALVEEPTSYHSSPGSTATTHFPDSSTTSGRSEESTASHSSQDATGTIVLPARSTTSVLLGESTTSPISSGSMETTALPGSTTTPGLSEKSTTFHSSPRSPATTLSPASTTSSGVSEESTTSHSRPGSTHTTAFPDSTTTPGLSRHSTTSHSSPGSTDTTLLPASTTTSGSSQESTTSHSSSGSTDTALSPGSTTALSFGQESTTFHSSPGSTHTTLFPDSTTSSGIVEASTRVHSSTGSPRTTLSPASSTSPGLQGESTAFQTHPASTHTTPSPPSTATAPVEESTTYHRSPGSTPTTHFPASSTTSGHSEKSTIFHSSPDASGTTPSSAHSTTSGRGESTTSRISPGSTEITTLPGSTTTPGLSEASTTFYSSPRSPTTTLSPASMTSLGVGEESTTSRSQPGSTHSTVSPASTTTPGLSEESTTVYSSSPGSTETTVFPRSTTTSVRREEPTTFHSRPASTHTTLFTEDSTTSGLTEESTAFPGSPASTQTGLPATLTTADLGEESTTFPSSSGSTGTKLSPARSTTSGLVGESTPSRLSPSSTETTTLPGSPTTPSLSEKSTTFYTSPRSPDATLSPATTTSSGVSEESSTSHSQPGSTHTTAFPDSTTTSGLSQEPTTSHSSQGSTEATLSPGSTTASSLGQQSTTFHSSPGDTETTLLPDDTITSGLVEASTPTHSSTGSLHTTLTPASSTSTGLQEESTTFQSWPSSSDTTPSPPSTTAVPVEVSTTYHSRPSSTPTTHFSASSTTLGRSEESTTVHSSPGATGTALFPTRSATSVLVGEPTTSPISSGSTETTALPGSTTTAGLSEKSTTFYSSPRSPDTTLSPASTTSSGVSEESTTSHSRPGSMHTTAFPSSTTMPGVSQESTASHSSPGSTDTTLSPGSTTASSLGPESTTFHSSPGSTETTLLPDNTTASGLLEASTPVHSSTGSPHTTLSPAGSTTRQGESTTFQSWPNSKDTTPAPPTTTSAFVELSTTSHGSPSSTPTTHFSASSTTLGRSEESTTVHSSPVATATTPSPARSTTSGLVEESTTYHSSPGSTQTMHFPESNTTSGRGEESTTSHSSTTHTISSAPSTTSALVEEPTSYHSSPGSTATTHFPDSSTTSGRSEESTASHSSQDATGTIVLPARSTTSVLLGESTTSPISSGSMETTALPGSTTTPGLSEKSTTFHSSPSSTPTTHFSASSTTLGRSEESTTVHSSPVATATTPSPARSTTSGLVEESTAYHSSPGSTQTMHFPESSTASGRSEESRTSHSSTTHTISSPPSTTSALVEEPTSYHSSPGSIATTHFPESSTTSGRSEESTASHSSPDTNGITPLPAHFTTSGRIAESTTFYISPGSMETTLASTATTPGLSAKSTILYSSSRSPDQTLSPASMTSSSISGEPTSLYSQAESTHTTAFPASTTTSGLSQESTTFHSKPGSTETTLSPGSITTSSFAQEFTTPHSQPGSALSTVSPASTTVPGLSEESTTFYSSPGSTETTAFSHSNTMSIHSQQSTPFPDSPGFTHTVLPATLTTTDIGQESTAFHSSSDATGTTPLPARSTASDLVGEPTTFYISPSPTYTTLFPASSSTSGLTEESTTFHTSPSFTSTIVSTESLETLAPGLCQEGQIWNGKQCVCPQGYVGYQCLSPLESFPVETPEKLNATLGMTVKVTYRNFTEKMNDASSQEYQNFSTLFKNRMDVVLKGDNLPQYRGVNIRRLLNGSIVVKNDVILEADYTLEYEELFENLAEIVKAKIMNETRTTLLDPDSCRKAILCYSEEDTFVDSSVTPGFDFQEQCTQKAAEGYTQFYYVDVLDGKLACVNKCTKGTKSQMNCNLGTCQLQRSGPRCLCPNTNTHWYWGETCEFNIAKSLVYGIVGAVMAVLLLALIILIILFSLSQRKRHREQYDVPQEWRKEGTPGIFQKTAIWEDQNLRESRFGLENAYNNFRPTLETVDSGTELHIQRPEMVASTV

SEQ ID NO: 54124 - protein, 511 aa, Homo sapiens
MKAIIHLTLLALLSVNTATNQGNSADAVTTTETATSGPTVAAADTTETNFPETASTTANTPFPTATSPAPPIISTHSSSTIPTPAPPIISTHSSSTIPIPTAADSESTTNVNSLATSDIITASSPNDGLITMVPSETQSNNEMSPTTEDNQSSGPPTGTALLETSTLNSTGPSNPCQDDPCADNSLCVKLHNTSFCLCLEGYYYNSSTCKKGKVFPGKISVTVSETFDPEEKHSMAYQDLHSEITSLFKDVFGTSVYGQTVILTVSTSLSPRSEMRADDKFVNVTIVTILAETTSDNEKTVTEKINKAIRSSSSNFLNYDLTLRCDYYGCNQTADDCLNGLACDCKSDLQRPNPQSPFCVASSLKCPDACNAQHKQCLIKKSGGAPECACVPGYQEDANGNCQKCAFGYSGLDCKDKFQLILTIVGTIAGIVILSMIIALIVTARSNNKTKHIEEENLIDEDFQNLKLRSTGFTNLGAEGSVFPKVRITASRDSQMQNPYSRHSSMPRPDY

SEQ ID NO: 54125 - protein, 4493 aa, Homo sapiens
MPRPGTMALCLLTLVLSLLPPQAAAEQDLSVNRAVWDGGGCISQGDVLNRQCQQLSQHVRTGSAANTATGTTSTNVVEPRMYLSCSTNPEMTSIESSVTSDTPGVSSTRMTPTESRTTSESTSDSTTLFPSSTEDTSSPTTPEGTDVPMSTPSEESISSTMAFVSTAPLPSFEAYTSLTYKVDMSTPLTTSTQASSSPTTPESTTIPKSTNSEGSTPLTSMPASTMKVASSEAITLLTTPVEISTPVTISAQASSSPTTAEGPSLSNSAPSGGSTPLTRMPLSVMLVVSSEASTLSTTPAATNIPVITSTEASSSPTTAEGTSIPTSTYTEGSTPLTSTPASTMPVATSEMSTLSITPVDTSTLVTTSTEPSSLPTTAEATSMLTSTLSEGSTPLTNMPVSTILVASSEASTTSTIPVDSKTFVTTASEASSSPTTAEDTSIATSTPSEGSTPLTSMPVSTTPVASSEASNLSTTPVDSKTQVTTSTEASSSPPTAEVNSMPTSTPSEGSTPLTSMSVSTMPVASSEASTLSTTPVDTSTPVTTSSEASSSSTTPEGTSIPTSTPSEGSTPLTNMPVSTRLVVSSEASTTSTTPADSNTFVTTSSEASSSSTTAEGTSMPTSTYSERGTTITSMSVSTTLVASSEASTLSTTPVDSNTPVTTSTEATSSSTTAEGTSMPTSTYTEGSTPLTSMPVNTTLVASSEASTLSTTPVDTSTPVTTSTEASSSPTTADGASMPTSTPSEGSTPLTSMPVSKTLLTSSEASTLSTTPLDTSTHITTSTEASCSPTTTEGTSMPISTPSEGSPLLTSIPVSITPVTSPEASTLSTTPVDSNSPVTTSTEVSSSPTPAEGTSMPTSTYSEGRTPLTSMPVSTTLVATSAISTLSTTPVDTSTPVTNSTEARSSPTTSEGTSMPTSTPGEGSTPLTSMPDSTTPVVSSEARTLSATPVDTSTPVTTSTEATSSPTTAEGTSIPTSTPSEGTTPLTSTPVSHTLVANSEASTLSTTPVDSNTPLTTSTEASSPPPTAEGTSMPTSTPSEGSTPLTRMPVSTTMVASSETSTLSTTPADTSTPVTTYSQASSSSTTADGTSMPTSTYSEGSTPLTSVPVSTRLVVSSEASTLSTTPVDTSIPVTTSTEASSSPTTAEGTSIPTSPPSEGTTPLASMPVSTTLVVSSEANTLSTTPVDSKTQVATSTEASSPPPTAEVTSMPTSTPGERSTPLTSMPVRHTPVASSEASTLSTSPVDTSTPVTTSAETSSSPTTAEGTSLPTSTTSEGSTLLTSIPVSTTLVTSPEASTLLTTPVDTKGPVVTSNEVSSSPTPAEGTSMPTSTYSEGRTPLTSIPVNTTLVASSAISILSTTPVDNSTPVTTSTEACSSPTTSEGTSMPNSNPSEGTTPLTSIPVSTTPVVSSEASTLSATPVDTSTPGTTSAEATSSPTTAEGISIPTSTPSEGKTPLKSIPVSNTPVANSEASTLSTTPVDSNSPVVTSTAVSSSPTPAEGTSIAISTPSEGSTALTSIPVSTTTVASSEINSLSTTPAVTSTPVTTYSQASSSPTTADGTSMQTSTYSEGSTPLTSLPVSTMLVVSSEANTLSTTPIDSKTQVTASTEASSSTTAEGSSMTISTPSEGSPLLTSIPVSTTPVASPEASTLSTTPVDSNSPVITSTEVSSSPTPAEGTSMPTSTYTEGRTPLTSITVRTTPVASSAISTLSTTPVDNSTPVTTSTEARSSPTTSEGTSMPNSTPSEGTTPLTSIPVSTTPVLSSEASTLSATPIDTSTPVTTSTEATSSPTTAEGTSIPTSTLSEGMTPLTSTPVSHTLVANSEASTLSTTPVDSNSPVVTSTAVSSSPTPAEGTSIATSTPSEGSTALTSIPVSTTTVASSETNTLSTTPAVTSTPVTTYAQVSSSPTTADGSSMPTSTPREGRPPLTSIPVSTTTVASSEINTLSTTLADTRTPVTTYSQASSSPTTADGTSMPTPAYSEGSTPLTSMPLSTTLVVSSEASTLSTTPVDTSTPATTSTEGSSSPTTAGGTSIQTSTPSERTTPLAGMPVSTTLVVSSEGNTLSTTPVDSKTQVTNSTEASSSATAEGSSMTISAPSEGSPLLTSIPLSTTPVASPEASTLSTTPVDSNSPVITSTEVSSSPIPTEGTSMQTSTYSDRRTPLTSMPVSTTVVASSAISTLSTTPVDTSTPVTNSTEARSSPTTSEGTSMPTSTPSEGSTPFTSMPVSTMPVVTSEASTLSATPVDTSTPVTTSTEATSSPTTAEGTSIPTSTLSEGTTPLTSIPVSHTLVANSEVSTLSTTPVDSNTPFTTSTEASSPPPTAEGTSMPTSTSSEGNTPLTRMPVSTTMVASFETSTLSTTPADTSTPVTTYSQAGSSPTTADDTSMPTSTYSEGSTPLTSVPVSTMPVVSSEASTHSTTPVDTSTPVTTSTEASSSPTTAEGTSIPTSPPSEGTTPLASMPVSTTPVVSSEAGTLSTTPVDTSTPMTTSTEASSSPTTAEDIVVPISTASEGSTLLTSIPVSTTPVASPEASTLSTTPVDSNSPVVTSTEISSSATSAEGTSMPTSTYSEGSTPLRSMPVSTKPLASSEASTLSTTPVDTSIPVTTSTETSSSPTTAKDTSMPISTPSEVSTSLTSILVSTMPVASSEASTLSTTPVDTRTLVTTSTGTSSSPTTAEGSSMPTSTPGERSTPLTNILVSTTLLANSEASTLSTTPVDTSTPVTTSAEASSSPTTAEGTSMRISTPSDGSTPLTSILVSTLPVASSEASTVSTTAVDTSIPVTTSTEASSSPTTAEVTSMPTSTPSETSTPLTSMPVNHTPVASSEAGTLSTTPVDTSTPVTTSTKASSSPTTAEGIVVPISTASEGSTLLTSIPVSTTPVASSEASTLSTTPVDTSIPVTTSTEGSSSPTTAEGTSMPISTPSEVSTPLTSILVSTVPVAGSEASTLSTTPVDTRTPVTTSAEASSSPTTAEGTSMPISTPGERRTPLTSMSVSTMPVASSEASTLSRTPADTSTPVTTSTEASSSPTTAEGTGIPISTPSEGSTPLTSIPVSTTPVAIPEASTLSTTPVDSNSPVVTSTEVSSSPTPAEGTSMPISTYSEGSTPLTGVPVSTTPVTSSAISTLSTTPVDTSTPVTTSTEAHSSPTTSEGTSMPTSTPSEGSTPLTYMPVSTMLVVSSEDSTLSATPVDTSTPVTTSTEATSSTTAEGTSIPTSTPSEGMTPLTSVPVSNTPVASSEASILSTTPVDSNTPLTTSTEASSSPPTAEGTSMPTSTPSEGSTPLTSMPVSTTTVASSETSTLSTTPADTSTPVTTYSQASSSPPIADGTSMPTSTYSEGSTPLTNMSFSTTPVVSSEASTLSTTPVDTSTPVTTSTEASLSPTTAEGTSIPTSSPSEGTTPLASMPVSTTPVVSSEVNTLSTTPVDSNTLVTTSTEASSSPTIAEGTSLPTSTTSEGSTPLSIMPLSTTPVASSEASTLSTTPVDTSTPVTTSSPTNSSPTTAEVTSMPTSTAGEGSTPLTNMPVSTTPVASSEASTLSTTPVDSNTFVTSSSQASSSPATLQVTTMRMSTPSEGSSSLTTMLLSSTYVTSSEASTPSTPSVDRSTPVTTSTQSNSTPTPPEVITLPMSTPSEVSTPLTIMPVSTTSVTISEAGTASTLPVDTSTPVITSTQVSSSPVTPEGTTMPIWTPSEGSTPLTTMPVSTTRVTSSEGSTLSTPSVVTSTPVTTSTEAISSSATLDSTTMSVSMPMEISTLGTTILVSTTPVTRFPESSTPSIPSVYTSMSMTTASEGSSSPTTLEGTTTMPMSTTSERSTLLTTVLISPISVMSPSEASTLSTPPGDTSTPLLTSTKAGSFSIPAEVTTIRISITSERSTPLTTLLVSTTLPTSFPGASIASTPPLDTSTTFTPSTDTASTPTIPVATTISVSVITEGSTPGTTIFIPSTPVTSSTADVFPATTGAVSTPVITSTELNTPSTSSSSTTTSFSTTKEFTTPAMTTAAPLTYVTMSTAPSTPRTTSRGCTTSASTLSATSTPHTSTSVTTRPVTPSSESSRPSTITSHTIPPTFPPAHSSTPPTTSASSTTVNPEAVTTMTTRTKPSTRTTSFPTVTTTAVPTNTTIKSNPTSTPTVPRTTTCFGDGCQNTASRCKNGGTWDGLKCQCPNLYYGELCEEVVSSIDIGPPETISAQMELTVTVTSVKFTEELKNHSSQEFQEFKQTFTEQMNIVYSGIPEYVGVNITKLRLGSVVVEHDVLLRTKYTPEYKTVLDNATEVVKEKITKVTTQQIMINDICSDMMCFNTTGTQVQNITVTQYDPEEDCRKMAKEYGDYFVVEYRDQKPYCISPCEPGFSVSKNCNLGKCQMSLSGPQCLCVTTETHWYSGETCNQGTQKSLVYGLVGAGVVLMLIILVALLMLVFRSKREVKRQKYRLSQLYKWQEEDSGPAPGTFQNIGFDICQDDDSIHLESIYSNFQPSLRHIDPETKIRIQRPQVMTTSF

SEQ ID NO: 54126 - protein, 280 aa, Homo sapiens
MTTALGSQLSSSQTVIPGSSGTISHTTVAPGSSVTGTTTGASDDQVTGSKTGTTGVALSTTVAPGSSSTEATTSTGVHRTTVVGQKTGATTRGSAKQGTRSTIEATTSFRGTGTTGSGMNTGTTGVVSGNTISPSSFNTEATSGTSERPNPGSEIGTTGIVSGTTVAPGSSNTEATTSLGNGGTTEAGSKIVTTGITTGTTIVPGSFNTKATTSTDVGVATGVGMATGITNIISGRSQPTGSKTGYTVTGSGTTALPGGFRTDSPSFPLFLICSYRGHNF

SEQ ID NO: 54127 - protein, 278 aa, Homo sapiens
PTGTQTPTPTPISTTTTVTPTPTPTGTQTPTTTPITTTTTVTPTPTPTGTQTPTTVLITTTTTMTPTPTPTSTKSTTVTPITTTTTVTATPTPTGTQTPTMIPISTTTTVTPTPTPTTGSTGPPTHTSTAPIAELTTSNPPPESSTPQTSRSTSSPLTESTTLLSTLPPAIEMTSTAPPSTPTAPTTTSGGHTLSPPPSTTTSPPGTPTRGTTTGSSSAPTPSTVQTTTTSAWTPTPTPLSTPSIIRTTGLRPYPSSVLICCVLNDTYYAPGEEVYNG

SEQ ID NO: 54128 - protein, 1780 aa, Homo sapiens
MGLPLARLAAVCLALSLAGGSELQTEGRTRNHGHNVCSTWGNFHYKTFDGDVFRFPGLCDYNFASDCRGSYKEFAVHLKRGPGQAEAPAGVESILLTIKDDTIYLTRHLAVLNGAVVSTPHYSPGLLIEKSDAYTKVYSRAGLTLMWNREDALMLELDTKFRNHTCGLCGDYNGLQSYSEFLSDGVLFSPLEFGNMQKINQPDVVCEDPEEEVAPASCSEHRAECERLLTAEAFADCQDLVPLEPYLRACQQDRCRCPGGDTCVCSTVAEFSRQCSHAGGRPGNWRTATLCPKTCPGNLVYLESGSPCMDTCSHLEVSSLCEEHRMDGCFCPEGTVYDDIGDSGCVPVSQCHCRLHGHLYTPGQEITNDCEQCVCNAGRWVCKDLPCPGTCALEGGSHITTFDGKTYTFHGDCYYVLAKGDHNDSYALLGELAPCGSTDKQTCLKTVVLLADKKKNVVVFKSDGSVLLNELQVNLPHVTASFSVFRPSSYHIMVSMAIGVRLQVQLAPVMQLFVTLDQASQGQVQGLCGNFNGLEGDDFKTASGLVEATGAGFANTWKAQSSCHDKLDWLDDPCSLNIESANYAEHWCSLLKKTETPFGRCHSAVDPAEYYKRCKYDTCNCQNNEDCLCAALSSYARACTAKGVMLWGWREHVCNKDVGSCPNSQVFLYNLTTCQQTCRSLSEADSHCLEGFAPVDGCGCPDHTFLDEKGRCVPLAKCSCYHRGLYLEAGDVVVRQEERCVCRDGRLHCRQIRLIGQSCTAPKIHMDCSNLTALATSKPRALSCQTLAAGYYHTECVSGCVCPDGLMDDGRGGCVVEKECPCVHNNDLYSSGAKIKVDCNTCTCKRGRWVCTQAVCHGTCSIYGSGHYITFDGKYYDFDGHCSYVAVQDYCGQNSSLGSFSIITENVPCGTTGVTCSKAIKIFMGRTELKLEDKHRVVIQRDEGHHVAYTTREVGQYLVVESSTGIIVIWDKRTTVFIKLAPSYKGTVCGLCGNFDHRSNNDFTTRDHMVVSSELDFGNSWKEAPTCPDVSTNPEPCSLNPHRRSWAEKQCSILKSSVFSICHSKVDPKPFYEACVHDSCSCDTGGDCECFCSAVASYAQECTKEGACVFWRTPDLCPIFCDYYNPPHECEWHYEPCGNRSFETCRTINGIHSNISVSYLEGCYPRCPKDRPIYEEDLKKCVTADKCGCYVEDTHYPPGASVPTEETCKSWCTCTQTHTAYHVHTHGKILNQTQDGAFCYWEICGPNGTVEKHFNICSITTRPSTLTTFTTITLPTTPTTFTTTTTTTTPTSSTVLSTTPKLCCLWSDWINEDHPSSGSDDGDRETFDGVCGAPEDIECRSVKDPHLSLEQLGQKVQCDVSVGFICKNEDQFGNGPFGLCYDYKIRVNCCWPMDKCITTPSPPTTTPSPPPTSTTTLPPTTTPSPPTTTTTTPPPTTTPSPPITTTTTPPPTTTPSPPISTTTTPPPTTTPSPPTTTPSPPTTTPSPPTTTTTTPPPTTTPSPPTTTPITPPASTTTLPPTTTPSPPTTTTTTPPPTTTPITTTTTVTPTPTPTGTQTPTTTPITTTTTVTPTPTPTGTQTPTSTPITTTTTTPTPTAITTTTTVTPTPTPTGTQTPTTTPITTTTTVTPTPTPTGTQSPTPTAITTTTTVTPTPTPTGTQTPTSTPITTTTTVTPTPTPTGTQTPTPTPISTTTTVTPTPTPTGTQTPTTTPITTTTTVTPTPTPTGTQTPTTTPTPTSTKSTTVTPITTTTTVTATPTPTGTQTPTMIPISTTTTVTP

SEQ ID NO: 54129 - protein, 409 aa, Homo sapiens
DIECRSVKDPHLSLEQLGQKVQCDVSVGFICKNEDQFGNGPFGLCYDYKIRVNCCCTPTRGTTTGSSSAPTPSTVQTTTTSAWTPTPTPLSTPSIIRTTGLRPYPSSVLICCVLNDTYYAPGEEVYNGTYGDTCYFVNCSLSCTLEFYNWSCPSTPSPTPTPSKSTPTPSKPSSTPSKPTPGTKPPECPDFDPPRQENETWWLCDCFMATCKYNNTVEIVKVECEPPPMPTCSNGLQPVRVEDPDGCCWHWECDCYCTGWGDPHYVTFDGLYYSYQGNCTYVLVEEISPSVDNFGVYIDNYHCDPNDKVSCPRTLIVRHETQEVLIKTVHMMPMQVQVQVNRQAVALPYKKYGLEVYQSGINYVVDIPELGVLVSYNGLSFSVRLPYHRFGNNTKGQCGTCTNTTSDDC

SEQ ID NO: 54130 - protein, 2817 aa, Homo sapiens
MGLPLARLAAVCLALSLAGGSELQTEGRTRNHGHNVCSTWGNFHYKTFDGDVFRFPGLCDYNFASDCRGSYKEFAVHLKRGPGQAEAPAGVESILLTIKDDTIYLTRHLAVLNGAVVSTPHYSPGLLIEKSDAYTKVYSRAGLTLMWNREDALMLELDTKFRNHTCGLCGDYNGLQSYSEFLSDGVLFSPLEFGNMQKINQPDVVCEDPEEEVAPASCSEHRAECERLLTAEAFADCQDLVPLEPYLRACQQDRCRCPGGDTCVCSTVAEFSRQCSHAGGRPGNWRTATLCPKTCPGNLVYLESGSPCMDTCSHLEVSSLCEEHRMDGCFCPEGTVYDDIGDSGCVPVSQCHCRLHGHLYTPGQEITNDCEQCVCNAGRWVCKDLPCPGTCALEGGSHITTFDGKTYTFHGDCYYVLAKGDHNDSYALLGELAPCGSTDKQTCLKTVVLLADKKKNVVVFKSDGSVLLNELQVNLPHVTASFSVFRPSSYHIMVSMAIGVRLQVQLAPVMQLFVTLDQASQGQVQGLCGNFNGLEGDDFKTASGLVEATGAGFANTWKAQSSCHDKLDWLDDPCSLNIESANYAEHWCSLLKKTETPFGRCHSAVDPAEYYKRCKYDTCNCQNNEDCLCAALSSYARACTAKGVMLWGWREHVCNKDVGSCPNSQVFLYNLTTCQQTCRSLSEADSHCLEGFAPVDGCGCPDHTFLDEKGRCVPLAKCSCYHRGLYLEAGDVVVRQEERCVCRDGRLHCRQIRLIGQSCTAPKIHMDCSNLTALATSKPRALSCQTLAAGYYHTECVSGCVCPDGLMDDGRGGCVVEKECPCVHNNDLYSSGAKIKVDCNTCTCKRGRWVCTQAVCHGTCSIYGSGHYITFDGKYYDFDGHCSYVAVQDYCGQNSSLGSFSIITENVPCGTTGVTCSKAIKIFMGRTELKLEDKHRVVIQRDEGHHVAYTTREVGQYLVVESSTGIIVIWDKRTTVFIKLAPSYKGTVCGLCGNFDHRSNNDFTTRDHMVVSSELDFGNSWKEAPTCPDVSTNPEPCSLNPHRRSWAEKQCSILKSSVFSICHSKVDPKPFYEACVHDSCSCDTGGDCECFCSAVASYAQECTKEGACVFWRTPDLCPIFCDYYNPPHECEWHYEPCGNRSFETCRTINGIHSNISVSYLEGCYPRCPKDRPIYEEDLKKCVTADKCGCYVEDTHYPPGASVPTEETCKSCVCTNSSQVVCRPEEGKILNQTQDGAFCYWEICGPNGTVEKHFNICSITTRPSTLTTFTTITLPTTPTTFTTTTTTTTPTSSTVLSTTPKLCCLWSDWINEDHPSSGSDDGDRETFDGVCGAPEDIECRSVKDPHLSLEQLGQKVQCDVSVGFICKNEDQFGNGPFGLCYDYKIRVNCCWPMDKCITTPSPPTTTPSPPPTSTTTLPPTTTPSPPTTTTTTPPPTTTPSPPITTTTTPPPTTTPSPPISTTTTPPPTTTPSPPTTTPSPPTTTPSPPTTTTTTPPPTTTPSPPTTTPITPPASTTTLPPTTTPSPPTTTTTTPPPTTTPITTTTTVTPTPTPTGTQTPTTTPITTTTTVTPTPTPTGTQTPTSTPITTTTTVTPTPTPTGTQTPTTTPITTTTTVTPTPTPTGTQTPTPTAITTTTTVTPTPTPTGTQTPTTTPITTTTTVTPTPTPTGTQSPTPTAITTTTTVTPTPTPTGTQTPTSTPITTTTTVTPTPTPTGTQTPTPTPISTTTTVTPTPTPTGTQTPTTTPITTTTTVTPTPTPTGTQTPTTVLITTTTTMTPTPTPTSTKSTTVTPITTTTTVTATPTPTGTQTPTMIPISTTTTVTPTPTPTTGSTGPPTHTSTAPIAELTTSNPPPESSTPQTSRSTSSPLTESTTLLSTLPPAIEMTSTAPPSTPTAPTTTSGGHTLSPPPSTTTSPPGTPTRGTTTGSSSAPTPSTVQTTTTSAWTPTPTPLSTPSIIRTTGLRPYPSSVLICCVLNDTYYAPGEEVYNGTYGDTCYFVNCSLSCTLEFYNWSCPSTPSPTPTPSKSTPTPSKPSSTPSKPTPGTKPPECPDFDPPRQENETWWLCDCFMATCKYNNTVEIVKVECEPPPMPTCSNGLQPVRVEDPDGCCWHWECDCYCTGWGDPHYVTFDGLYYSYQGNCTYVLVEEISPSVDNFGVYIDNYHCDPNDKVSCPRTLIVRHETQEVLIKTVHMMPMQVQVQVNRQAVALPYKKYGLEVYQSGINYVVDIPELGVLVSYNGLSFSVRLPYHRFGNNTKGQCGTCTNTTSDDCILPSGEIVSNCEAAADQWLVNDPSKPHCPHSSSTTKRPAVTVPGGGKTTPHKDCTPSPLCQLIKDSLFAQCHALVPPQHYYDACVFDSCFMPGSSLECASLQAYAALCAQQNICLDWRNHTHGACLVECPSHREYQACGPAEEPTCKSSSSQQNNTVLVEGCFCPEGTMNYAPGFDVCVKTCGCVGPDNVPREFGEHFEFDCKNCVCLEGGSGIICQPKRCSQKPVTHCVEDGTYLATEVNPADTCCNITVCKCNTSLCKEKPSVCPLGFEVKSKMVPGRCCPFYWCESKGVCVHGNAEYQPGSPVYSSKCQDCVCTDKVDNNTLLNVIACTHVPCNTSCSPGFELMEAPGECCKKCEQTHCIIKRPDNQHVILKPGDFKSDPKNNCTFFSCVKIHNQLISSVSNITCPNFDASICIPGSITFMPNGCCKTCTPRNETRVPCSTVPVTTEVSYAGCTKTVLMNHCSGSCGTFVMYSAKAQALDHSCSCCKEEKTSQREVVLSCPNGGSLTHTYTHIESCQCQDTVCGLPTGTSRRARRSPRHLGSG

SEQ ID NO: 54131 - protein, 876 aa, Homo sapiens
IYSTVSTSTTAITSHFTTSETAVTPTPVTPSSLSTDIPTTSLRTLTPSSVGTSTSLTTTTDFPSIPTDISTLPTRTHIISSSPSIQSTETSSLVGTTSPTMSTVRMTLRITENTPISSFSTSIVVIPETPTQTPPVLTSATGTQTSPAPTTVTFGSTDSSTSTLHTLTPSTALSTIVSTSQVPIPSTHSSTLQTTPSTPSLQTSLTSTSEFTTESFTRGSTSTNAILTSFSTIIWSSTPTIIMSSSPSSASITPVFSTTIHSVPSSPYIFSTENVGSASITGFPSLSSSATTSTSSTSSSLTTALTEITPFSYISLPSTTPCPGTITITIVPASPTDPCVEMDPSTEATSPPTTPLTVFPFTTEMVTCPTSISIQTTLTTYMDTSSMMPESESSISPNASSSTGTGTVPTNTVFTSTRLPTSETWLSNSSVIPLPLPGVSTIPLTMKPSSSLPTILRTSSKSTHPSPPTTRTSETPVATTQTPTTLTSRRTTRITSQMTTQSTLTTTAGTCDNGGTWEQGQCACLPGFSGDRCQLQTRCQNGGQWDGLKCQCPSTFYGSSCEFAVEQVDLDVVETEVGMEVSVDQQFSPDLNDNTSQAYRDFNKTFWNQMQKIFADMQGFTFKGVEILSLRNGSIVVDYLVLLEMPFSPQLESEYEQVKTTLKEGLQNASQDANSCQDSQTLCFKPDSIKVNNNSKTELTPEAICRRAAPTGYEEFYFPLVEATRLRCVTKCTSGVDNAIDCHQGQCVLETSGPACRCYSTDTHWFSGPRCEVAVHWRALVGGLTAGAALLVLLLLALGVRAVRSGWWGGQRRGRSWDQDRKWFETWDEEVVGTFSNWGFEDDGTDKDTNFHVALENVDTTMKVHIKRPEMTSSSV

SEQ ID NO: 54132 - protein, 308 aa, Homo sapiens
CDNGGTWEQGQCACLPGFSGDRCQLQTRCQNGGQWDGLKCQCPSTFYGSSCEFAVEQVDLDVVETEVGMEVSVDQQFSPDLNDNTSQAYRDFNKTFWNQMQKIFADMQGFTFKGVEILSLRNGSIVVDYLVLLEMPFSPQLESEYEQVKTTLKEGLQNASQDANSCQDSQTLCFKPDSIKVNNNSKTELTPEAICRRAAPTGYEEFYFPLVEATRLRCVTKCTSGVDNAIDCHQGQCVLETSGPACRSWDQDRKWFETWDEEVVGTFSNWGFEDDGTDKDTNFHVALENVDTTMKVHIKRPEMTSSSV

SEQ ID NO: 54133 - protein, 1176 aa, Homo sapiens
MKGARWRRVPWVSLSCLCLCLLPHVVPGMTTPSLKTDGGRRTATSPPPTTSQTIISTIPSTAMHTRSTAAPIPILPERGVSLFPYGAGAGDLEFVRRTVDFTSPLFKPATGFPLGSSLRDSLYFTDNGQIIFPESDYQIFSYPNPLPTGFTGRDPVALVAPFWDDADFSTGRGTTFYQEYETFYGEHSLLVQQAESWIRKMTNNGGYKARWALKVTWVNAHAYPAQWTLGSNTYQAILSTDGSRSYALFLYQSGGMQWDVAQRSGNPVLMGFSSGDGYFENSPLMSQPVWERYRPDRFLNSNSGLQGLQFYRLHREERPNYRLECLQWLKSQPRWPSWGWNQVSCPCSWQQGRRDLRFQPVSIGRWGLGSRQLCSFTSWRGGVCCSYGPWGEFREGWHVQRPWQLAQELEPQSWCCRWNDKPYLCALYQQRRPHVGCATYRPPQPAWMFGDPHITTLDGVSYTFNGLGDFLLVGAQDGNSSFLLQGRTAQTGSAQATNFIAFAAQYRSSSLGPVTVQWLLEPHDAIRVLLDNQTVTFQPDHEDGGGQETFNATGVLLSRNGSEVSASFDGWATVSVIALSNILHASASLPPEYQNRTEGLLGVWNNNPEDDFRMPNGSTIPPGSPEEMLFHFGMTWQINGTGLLGKRNDQLPSNFTPVFYSQLQKNSSWAEHLISNCDGDSSCIYDTLALRNASIGLHTREVSKNYEQANATLNQYPPSINGGRVIEAYKGQTTLIQYTSNAEDANFTLRDSCTDLELFENGTLLWTPKSLEPFTLEILARSAKIGLASALQPRTVVCHCNAESQCLYNQTSRVGNSSLEVAGCKCDGGTFGRYCEGSEDACEEPCFPSVHCVPGKGCEACPPNLTGDGRHCAALGSSFLCQNQSCPVNYCYNQGHCYISQTLGCQPMCTCPPAFTDSRCFLAGNNFSPTVNLELPLRVIQLLLSEEENASMAEVNASVAYRLGTLDMRAFLRNSQVERIDSAAPASGSPIQHWMVISEFQYRPRGPVIDFLNNQLLAAVVEAFLYHVPRRSEEPRNDVVFQPISGEDVRDVTALNVSTLKAYFRCDGYKGYDLVYSPQSGFTCVSPCSRGYCDHGGQCQHLPSGPRCSCVSFSIYTAWGEHCEHLSMKLDAFFGIFFGALGGLLLLGVGTFVVLRFWGCSGARFSYFLNSAEALP

SEQ ID NO: 54134 - protein, 1125 aa, Homo sapiens
MKGARWRRVPWVSLSCLCLCLLPHVVPGVSLFPYGAGAGDLEFVRRTVDFTSPLFKPATGFPLGSSLRDSLYFTDNGQIIFPESDYQIFSYPNPLPTGFTGRDPVALVAPFWDDADFSTGRGTTFYQEYETFYGEHSLLVQQAESWIRKMTNNGGYKARWALKVTWVNAHAYPAQWTLGSNTYQAILSTDGSRSYALFLYQSGGMQWDVAQRSGNPVLMGFSSGDGYFENSPLMSQPVWERYRPDRFLNSNSGLQGLQFYRLHREERPNYRLECLQWLKSQPRWPSWGWNQVSCPCSWQQGRRDLRFQPVSIGRWGLGSRQLCSFTSWRGGVCCSYGPWGEFREGWHVQRPWQLAQELEPQSWCCRWNDKPYLCALYQQRRPHVGCATYRPPQPAWMFGDPHITTLDGVSYTFNGLGDFLLVGAQDGNSSFLLQGRTAQTGSAQATNFIAFAAQYRSSSLGPVTVQWLLEPHDAIRVLLDNQTVTFQPDHEDGGGQETFNATGVLLSRNGSEVSASFDGWATVSVIALSNILHASASLPPEYQNRTEGLLGVWNNNPEDDFRMPNGSTIPPGSPEEMLFHFGMTWQINGTGLLGKRNDQLPSNFTPVFYSQLQKNSSWAEHLISNCDGDSSCIYDTLALRNASIGLHTREVSKNYEQANATLNQYPPSINGGRVIEAYKGQTTLIQYTSNAEDANFTLRDSCTDLELFENGTLLWTPKSLEPFTLEILARSAKIGLASALQPRTVVCHCNAESQCLYNQTSRVGNSSLEVAGCKCDGGTFGRYCEGSEDACEEPCFPSVHCVPGKGCEACPPNLTGDGRHCAALGSSFLCQNQSCPVNYCYNQGHCYISQTLGCQPMCTCPPAFTDSRCFLAGNNFSPTVNLELPLRVIQLLLSEEENASMAEVNASVAYRLGTLDMRAFLRNSQVERIDSAAPASGSPIQHWMVISEFQYRPRGPVIDFLNNQLLAAVVEAFLYHVPRRSEEPRNDVVFQPISGEDVRDVTALNVSTLKAYFRCDGYKGYDLVYSPQSGFTCVSPCSRGYCDHGGQCQHLPSGPRCSCVSFSIYTAWGEHCEHLSMKLDAFFGIFFGALGGLLLLGVGTFVVLRFWGCSGARFSYFLNSAEALP

SEQ ID NO: 54135 - protein, 1912 aa, Homo sapiens
PGTTEDTLITGSKTAAPVTSTGSTTATLEGQSTAASSRTSNQDISASSQNHQTKSTETTSKAQTDTLTQMMTSTLFSSPSVHNVMETAPPDEMTTSFPSSVTNTLMMTSKTITMTTSTDSTLGNTEETSTAGTESSTPVTSAVSITAGQEGQSRTTSWRTSIQDTSASSQNHWTRSTQTTRESQTSTLTHRTTSTPSFSPSVHNVTGTVSQKTSPSGETATSSLCSVTNTSMMTSEKITVTTSTGSTLGNPGETSSVPVTGSLMPVTSAALVTFDPEGQSPATFSRTSTQDTTAFSKNHQTQSVETTRVSQINTLNTLTPVTTSTVLSSPSGFNPSGTVSQETFPSGETTTSSPSSVSNTFLVTSKVFRMPTSRDSTLGNTEETSLSVSGTISAITSKVSTIWWSDTLSTALSPSSLPPKISTAFHTQQSEGAETTGRPHERSSFSPGVSQEIFTLHETTTWPSSFSSKGHTTWSQTELPSTSTGAATRLVTGNPSTGTAGTIPRVPSKVSAIGEPGEPTTYSSHSTTLPKTTGAGAQTQWTQETGTTGEALLSSPSYSVTQMIKTATSPSSSPMLDRHTSQQITTAPSTNHSTIHSTSTSPQESPAVSQRGHTQAPQTTQESQTTRSVSPMTDTKTVTTPGSSFTASGHSPSEIVPQDAPTISAATTFAPAPTGDGHTTQAPTTALQAAPSSHDATLGPSGGTSLSKTGALTLANSVVSTPGGPEGQWTSASASTSPDTAAAMTHTHQAESTEASGQTQTSEPASSGSRTTSAGTATPSSSGASGTTPSGSEGISTSGETTRFSSNPSRDSHTTQSTTELLSASASHGAIPVSTGMASSIVPGTFHPTLSEASTAGRPTGQSSPTSPSASPQETAAISRMAQTQRTRTSRGSDTISLASQATDTFSTVPPTPPSITSTGLTSPQTETHTLSPSGSGKTFTTALISNATPLPVTYASSASTGHATPLAVSSATSASTVSSDSPLKMETPGMTTPSLKTDGGRRTATSPPPTTSQTIISTIPSTAMHTRSTAAPIPILPERGVSLFPYGAGAGDLEFVRRTVDFTSPLFKPATGFPLGSSLRDSLYFTDNGQIIFPESDYQIFSYPNPLPTGFTGRDPVALVAPFWDDADFSTGRGTTFYQEYETFYGEHSLLVQQAESWIRKMTNNGGYKARWALKVTWVNAHAYPAQWTLGSNTYQAILSTDGSRSYALFLYQSGGMQWDVAQRSGNPVLMGFSSGDGYFENSPLMSQPVWERYRPDRFLNSNSGLQGLQFYRLHREERPNYRLECLQWLKSQPRWPSWGWNQVSCPCSWQQGRRDLRFQPASLPPEYQNRTEGLLGVWNNNPEDDFRMPNGSTIPPGSPEEMLFHFGMTWQINGTGLLGKRNDQLPSNFTPVFYSQLQKNSSWAEHLISNCDGDSSCIYDTLALRNASIGLHTREVSKNYEQANATLNQYPPSINGGRVIEAYKGQTTLIQYTSNAEDANFTLRDSCTDLELFENGTLLWTPKSLEPFTLEILARSAKIGLASALQPRTVVCHCNAESQCLYNQTSRVGNSSLEVAGCKCDGGTFGRYCEGSEDACEEPCFPSVHCVPGKGCEACPPNLTGDGRHCAALGSSFLCQNQSCPVNYCYNQGHCYISQTLGCQPMCTCPPAFTDSRCFLAGNNFSPTVNLELPLRVIQLLLSEEENASMAEVNASVAYRLGTLDMRAFLRNSQVERIDSAAPASGSPIQHWMVISEFQYRPRGPVIDFLNNQLLAAVVEAFLYHVPRRSEEPRNDVVFQPISGEDVRDVTALNVSTLKAYFRCDGYKGYDLVYSPQSGFTCVSPCSRGYCDHGGQCQHLPSGPRCSCVSFSIYTAWGEHCEHLSMKLDAFFGIFFGALGGLLLLGVGTFVVLRFWGCSGARFSYFLNSAEALP

SEQ ID NO: 54136 - protein, 5412 aa, Homo sapiens
MKGARWRRVPWVSLSCLCLCLLPHVVPGTTEDTLITGSKTAAPVTSTGSTTATLEGQSTAASSRTSNQDISASSQNHQTKSTETTSKAQTDTLTQMMTSTLFSSPSVHNVMETAPPDEMTTSFPSSVTNTLMMTSKTITMTTSTDSTLGNTEETSTAGTESSTPVTSAVSITAGQEGQSRTTSWRTSIQDTSASSQNHWTRSTQTTRESQTSTLTHRTTSTPSFSPSVHNVTGTVSQKTSPSGETATSSLCSVTNTSMMTSEKITVTTSTGSTLGNPGETSSVPVTGSLMPVTSAALVTFDPEGQSPATFSRTSTQDTTAFSKNHQTQSVETTRVSQINTLNTLTPVTTSTVLSSPSGFNPSGTVSQETFPSGETTTSSPSSVSNTFLVTSKVFRMPTSRDSTLGNTEETSLSVSGTISAITSKVSTIWWSDTLSTALSPSSLPPKISTAFHTQQSEGAETTGRPHERSSFSPGVSQEIFTLHETTTWPSSFSSKGHTTWSQTELPSTSTGAATRLVTGNPSTGTAGTIPRVPSKVSAIGEPGEPTTYSSHSTTLPKTTGAGAQTQWTQETGTTGEALLSSPSYSVTQMIKTATSPSSSPMLDRHTSQQITTAPSTNHSTIHSTSTSPQESPAVSQRGHTQAPQTTQESQTTRSVSPMTDTKTVTTPGSSFTASGHSPSEIVPQDAPTISAATTFAPAPTGDGHTTQAPTTALQAAPSSHDATLGPSGGTSLSKTGALTLANSVVSTPGGPEGQWTSASASTSPDTAAAMTHTHQAESTEASGQTQTSEPASSGSRTTSAGTATPSSSGASGTTPSGSEGISTSGETTRFSSNPSRDSHTTQSTTELLSASASHGAIPVSTGMASSIVPGTFHPTLSEASTAGRPTGQSSPTSPSASPQETAAISRMAQTQRTRTSRGSDTISLASQATDTFSTVPPTPPSITSTGLTSPQTETHTLSPSGSGKTFTTALISNATPLPVTYASSASTGHTTPLHVTDASSVSTGHATPLPVTSPSSVSTGHTTPLPVTDTSSESTGHVTPLPVTSFSSASTGDSTPLPVTDTSSASTGHVTPLPVTSLSSASTGDTTPLPVTDTSSASTGHATSLPVTDTSSVSTGHTTPLPVTDTSSASTGHATSLPVTDTSSVSTGHTTPLHVTDASSASTGQATPLPVTSLSSVSTGDTTPLPVTSPSSASTGHATPLLVTDTSSASTGHATPLPVTDASSVSTDHATSLPVTIPSAASTGHTTPLPVTDTSSASTGQATSLLVTDTSSVSTGDTTPLPVTSTSSASTGHVTPLHVTSPSSASTGHATPLPVTSLSSASTGDTMPLPVTSPSSASTGDTTPLPVTDASSVSTGHTTPLHVTDASSASTGQATPLPVTSLSSVSTGDTTPLPVTSPSSASTGHATPLLVTDTSSASTGHATPLPVTDASSVSTDHATSLPVTIPSAASTGHTTPLPVTDTSSASTGQATSLLVTDTSSVSTGDTTPLPVTSTSSASTGHVTPLHVTSPSSASTGHATPLPVTSLSSASTGDTMPLPVTSPSSASTGDTTPLPVTDASSVSTGHTTPLPVTSPSSASTGHTTPLPVTDTSSASKGDTTPLPVTSPSSASTGHTTPLPVTDTSSASTGDTTPLPVTNASSLSTGHATPLHVTSPSSASTGHATPLPVTSTSSASTGHATPLPVTGLSSATTDDTTRLPVTDVSSASTGQATPLPVTSLSSVSTGDTTPLPVTSPSSASTGHASPLLVTDASSASTGQATPLPVTDTSSVSTAHATPLPVTGLSSASTDDTTRLPVTDVSSASTGQAIPLPVTSPSSASTGDTTPLPVTDASSASTGDTTSLPVTIPSSASSGHTTSLPVTDASSVSTGHATSLLVTDASSVSTGDTTPLPVTDTNSASTGDTTPLHVTDASSVSTGHATSLPVTSLSSASTGDTTPLPVTSPSSASSGHTTPLPVTDASSVPTGHATSLPVTDASSVSTGHATPLPVTDASSVSTGHATPLPVTDTSSVSTGQATPLPVTSLSSASTGDTTPLPVTDTSSASTGQDTPLPVTSLSSVSTGDTTPLPVTNPSSASTGHATPLLVTDASSISTGHATSLLVTDASSVSTGHATALHDTDASSLSTGDTTPLPVTSPSSTSTGDTTPLPVTETSSVSTGHATSLPVTDTSSASTGHATSLPVTDTSSASTGHATPLPVTDTSSASTGQATPLPVTSPSSASTGHAIPLLVTDTSSASTGQATPLPVTSLSSASTGDTTPLPVTDASSVSTGHATSLPVTSLSSVSTGDTTPLPVTSPSSASTGHATPLHVTDASSASTGHATPLPVTSLSSASTGDTTPLPVTSPSSASTGHATPLHVTDASSVSTGDTTPLPVTSSSSASSGHTTPLPVTDASSASTGDTTPLPVTDTSSASTGHATHLPVTGLSSASTGDTTRLPVTNVSSASTGHATPLPVTSTSSASTGDTTPLPGTDTSSVSTGHTTPLLVTDASSVSTGDTTRLPVTSPSSASTGHTTPLPVTDTPSASTGDTTPLPVTNASSLSTRHATSLHVTSPSSASTGHATSLPVTDTSAASTGHATPLPVTSTSSASTGDTTPLPVTDTYSASTGQATPLPVTSLSSVSTGDTTPLPVTSPSSASTGHATPLLVTDASSASTGQATPLPVTSLSSVSTGDTTPLPVTSPSSASTGHATSLPVTDTSSASTGDTTSLPVTDTSSAYTGDTTSLPVTDTSSSSTGDTTPLLVTETSSVSTGDTTPLPVTDTSSASTGHATPLPVTNTSSVSTGHATPLHVTSPSSASTGHTTPLPVTDASSVSTGHATSLPVTDASSVFTGHATSLPVTIPSSASSGHTTPLPVTDASSVSTGHATSLPVTDASSVSTGHATPLPVTDASSVSTGHATPLPLTSLSSVSTGDTTPLPVTDTSSASTGQATPLPVTSLSSVSTGDTTPLPVTDTSSASTGHATSLPVTDTSSASTGHATPLPDTDTSSASTGHATLLPVTDTSSASIGHATSLPVTDTSSISTGHATPLHVTSPSSASTGHATPLPVTDTSSASTGHANPLHVTSPSSASTGHATPLPVTDTSSASTGHATPLPVTSLSSVSTGDTTPLPVTSPSSASTGHTTPLPVTDTSSASTGQATALPVTSTSSASTGDTTPLPVTDTSSASTGQATPLPVTSLSSVSTGDTTPLPVTSPSSASTGHATPLLVTDASSASTGQATPLPVTSLSSVSTGDTTPLPVTSPSSASTGHATSLPVTDTSSASTGDTTSLPVTDTSSAYTGDTTSLPVTDTSSSSTGDTTPLLVTETSSVSTGHATPLLVTDASSASTGHATPLHVTSPSSASTGDTTPVPVTDTSSVSTGHATPLPVTGLSSASTGDTTRLPVTDISSASTGQATPLPVTNTSSVSTGDTMPLPVTSPSSASTGHATPLPVTSTSSASTGHATPVPVTSTSSASTGHTTPLPVTDTSSASTGDTTPLPVTSPSSASTGHTTPLHVTIPSSASTGDTSTLPVTGASSASTGHATPLPVTDTSSVSTGHATPLPVTSLSSVSTGDTTPLPVTDASSASTGQATPLPVTSLSSVSTGDTTPLLVTDASSVSTGHATPLPVTDTSSASTGDTTRLPVTDTSSASTGQATPLPVTSLSSVSTGDTTPLLVTDASSVSTGHATPLPVTDTSSASTGDTTRLPVTDTSSASTGQATPLPVTIPSSSSSGHTTPLPVTSTSSVSTGHVTPLHVTSPSSASTGHVTPLPVTSTSSASTGHATPLLVTDASSVSTGHATPLPVTDASSASTGDTTPLPVTDTSSASTGQATPLPVTSLSSVSTGDTTPLPVTDASSASTGHATPLPVTIPSSVSTGDTMPLPVTSPSSASTGHATPLPVTGLSSASTGDTTPLPVTDTSSASTRHATPLPVTDTSSASTDDTTRLPVTDVSSASTGHATPLPVTSTSSASTGDTTPLPVTDTSSVSTGHATSLPVTSRSSASTGHATPLPVTDTSSVSTGHATPLPVTSTSSVSTGHATPLPVTSPSSASTGHATPVPVTSTSSASTGDTTPLPVTNASSLSTGHATPLHVTSPSSASRGDTSTLPVTDASSASTGHATPLPLTSLSSVSTGDTTPLPVTDTSSASTGQATPLPVTSLSSVSTGDTTPLPVTIPSSASSGHTTSLPVTDASSVSTGHGTPLPVTSTSSASTGDTTPLPVTDTSSASTGHATPLPVTDTSSASTGHATPLPVTSLSSVSTGHATPLAVSSATSASTVSSDSPLKMETPGMTTPSLKTDGGRRTATSPPPTTSQTIISTIPSTAMHTRSTAAPIPILPERGVSLFPYGAGAGDLEFVRRTVDFTSPLFKPATGFPLGSSLRDSLYFTDNGQIIFPESDYQIFSYPNPLPTGFTGRDPVALVAPFWDDADFSTGRGTTFYQEYETFYGEHSLLVQQAESWIRKMTNNGGYKARWALKVTWVNAHAYPAQWTLGSNTYQAILSTDGSRSYALFLYQSGGMQWDVAQRSGNPVLMGFSSGDGYFENSPLMSQPVWERYRPDRFLNSNSGLQGLQFYRLHREERPNYRLECLQWLKSQPRWPSWGWNQVSCPCSWQQGRRDLRFQPVSIGRWGLGSRQLCSFTSWRGGVCCSYGPWGEFREGWHVQRPWQLAQELEPQSWCCRWNDKPYLCALYQQRRPHVGCATYRPPQPAWMFGDPHITTLDGVSYTFNGLGDFLLVGAQDGNSSFLLQGRTAQTGSAQATNFIAFAAQYRSSSLGPVTVQWLLEPHDAIRVLLDNQTVTFQPDHEDGGGQETFNATGVLLSRNGSEVSASFDGWATVSVIALSNILHASASLPPEYQNRTEGLLGVWNNNPEDDFRMPNGSTIPPGSPEEMLFHFGMTWQINGTGLLGKRNDQLPSNFTPVFYSQLQKNSSWAEHLISNCDGDSSCIYDTLALRNASIGLHTREVSKNYEQANATLNQYPPSINGGRVIEAYKGQTTLIQYTSNAEDANFTLRDSCTDLELFENGTLLWTPKSLEPFTLEILARSAKIGLASALQPRTVVCHCNAESQCLYNQTSRVGNSSLEVAGCKCDGGTFGRYCEGSEDACEEPCFPSVHCVPGKGCEACPPNLTGDGRHCAALGSSFLCQNQSCPVNYCYNQGHCYISQTLGCQPMCTCPPAFTDSRCFLAGNNFSPTVNLELPLRVIQLLLSEEENASMAEVNASVAYRLGTLDMRAFLRNSQVERIDSAAPASGSPIQHWMVISEFQYRPRGPVIDFLNNQLLAAVVEAFLYHVPRRSEEPRNDVVFQPISGEDVRDVTALNVSTLKAYFRCDGYKGYDLVYSPQSGFTCVSPCSRGYCDHGGQCQHLPSGPRCSCVSFSIYTAWGEHCEHLSMKLDAFFGIFFGALGGLLLLGVGTFVVLRFWGCSGARFSYFLNSAEALP

SEQ ID NO: 54137 - protein, 5360 aa, Homo sapiens
MKGARWRRVPWVSLSCLCLCLLPHVVPGTTEDTLITGSKTAAPVTSTGSTTATLEGQSTAASSRTSNQDISASSQNHQTKSTETTSKAQTDTLTQMMTSTLFSSPSVHNVMETAPPDEMTTSFPSSVTNTLMMTSKTITMTTSTDSTLGNTEETSTAGTESSTPVTSAVSITAGQEGQSRTTSWRTSIQDTSASSQNHWTRSTQTTRESQTSTLTHRTTSTPSFSPSVHNVTGTVSQKTSPSGETATSSLCSVTNTSMMTSEKITVTTSTGSTLGNPGETSSVPVTGSLMPVTSAALVTFDPEGQSPATFSRTSTQDTTAFSKNHQTQSVETTRVSQINTLNTLTPVTTSTVLSSPSGFNPSGTVSQETFPSGETTTSSPSSVSNTFLVTSKVFRMPTSRDSTLGNTEETSLSVSGTISAITSKVSTIWWSDTLSTALSPSSLPPKISTAFHTQQSEGAETTGRPHERSSFSPGVSQEIFTLHETTTWPSSFSSKGHTTWSQTELPSTSTGAATRLVTGNPSTGTAGTIPRVPSKVSAIGEPGEPTTYSSHSTTLPKTTGAGAQTQWTQETGTTGEALLSSPSYSVTQMIKTATSPSSSPMLDRHTSQQITTAPSTNHSTIHSTSTSPQESPAVSQRGHTQAPQTTQESQTTRSVSPMTDTKTVTTPGSSFTASGHSPSEIVPQDAPTISAATTFAPAPTGDGHTTQAPTTALQAAPSSHDATLGPSGGTSLSKTGALTLANSVVSTPGGPEGQWTSASASTSPDTAAAMTHTHQAESTEASGQTQTSEPASSGSRTTSAGTATPSSSGASGTTPSGSEGISTSGETTRFSSNPSRDSHTTQSTTELLSASASHGAIPVSTGMASSIVPGTFHPTLSEASTAGRPTGQSSPTSPSASPQETAAISRMAQTQRTRTSRGSDTISLASQATDTFSTVPPTPPSITSTGLTSPQTETHTLSPSGSGKTFTTALISNATPLPVTYASSASTGHTTPLHVTDASSVSTGHATPLPVTSPSSVSTGHTTPLPVTDTSSESTGHVTPLPVTSFSSASTGDSTPLPVTDTSSASTGHVTPLPVTSLSSASTGDTTPLPVTDTSSASTGHATSLPVTDTSSVSTGHTTPLPVTDTSSASTGHATSLPVTDTSSVSTGHTTPLHVTDASSASTGQATPLPVTSLSSVSTGDTTPLPVTSPSSASTGHATPLLVTDTSSASTGHATPLPVTDASSVSTDHATSLPVTIPSAASTGHTTPLPVTDTSSASTGQATSLLVTDTSSVSTGDTTPLPVTSTSSASTGHVTPLHVTSPSSASTGHATPLPVTSLSSASTGDTMPLPVTSPSSASTGDTTPLPVTDASSVSTGHTTPLHVTDASSASTGQATPLPVTSLSSVSTGDTTPLPVTSPSSASTGHATPLLVTDTSSASTGHATPLPVTDASSVSTDHATSLPVTIPSAASTGHTTPLPVTDTSSASTGQATSLLVTDTSSVSTGDTTPLPVTSTSSASTGHVTPLHVTSPSSASTGHATPLPVTSLSSASTGDTMPLPVTSPSSASTGDTTPLPVTDASSVSTGHTTPLPVTSPSSASTGHTTPLPVTDTSSASKGDTTPLPVTSPSSASTGHTTPLPVTDTSSASTGDTTPLPVTNASSLSTGHATPLHVTSPSSASTGHATPLPVTSTSSASTGHATPLPVTGLSSATTDDTTRLPVTDVSSASTGQATPLPVTSLSSVSTGDTTPLPVTSPSSASTGHASPLLVTDASSASTGQATPLPVTDTSSVSTAHATPLPVTGLSSASTDDTTRLPVTDVSSASTGQAIPLPVTSPSSASTGDTTPLPVTDASSASTGDTTSLPVTIPSSASSGHTTSLPVTDASSVSTGHATSLLVTDASSVSTGDTTPLPVTDTNSASTGDTTPLHVTDASSVSTGHATSLPVTSLSSASTGDTTPLPVTSPSSASSGHTTPLPVTDASSVPTGHATSLPVTDASSVSTGHATPLPVTDASSVSTGHATPLPVTDTSSVSTGQATPLPVTSLSSASTGDTTPLPVTDTSSASTGQDTPLPVTSLSSVSTGDTTPLPVTNPSSASTGHATPLLVTDASSISTGHATSLLVTDASSVSTGHATALHDTDASSLSTGDTTPLPVTSPSSTSTGDTTPLPVTETSSVSTGHATSLPVTDTSSASTGHATSLPVTDTSSASTGHATPLPVTDTSSASTGQATPLPVTSPSSASTGHAIPLLVTDTSSASTGQATPLPVTSLSSASTGDTTPLPVTDASSVSTGHATSLPVTSLSSVSTGDTTPLPVTSPSSASTGHATPLHVTDASSASTGHATPLPVTSLSSASTGDTTPLPVTSPSSASTGHATPLHVTDASSVSTGDTTPLPVTSSSSASSGHTTPLPVTDASSASTGDTTPLPVTDTSSASTGHATHLPVTGLSSASTGDTTRLPVTNVSSASTGHATPLPVTSTSSASTGDTTPLPGTDTSSVSTGHTTPLLVTDASSVSTGDTTRLPVTSPSSASTGHTTPLPVTDTPSASTGDTTPLPVTNASSLSTRHATSLHVTSPSSASTGHATSLPVTDTSAASTGHATPLPVTSTSSASTGDTTPLPVTDTYSASTGQATPLPVTSLSSVSTGDTTPLPVTSPSSASTGHATPLLVTDASSASTGQATPLPVTSLSSVSTGDTTPLPVTSPSSASTGHATSLPVTDTSSASTGDTTSLPVTDTSSAYTGDTTSLPVTDTSSSSTGDTTPLLVTETSSVSTGDTTPLPVTDTSSASTGHATPLPVTNTSSVSTGHATPLHVTSPSSASTGHTTPLPVTDASSVSTGHATSLPVTDASSVFTGHATSLPVTIPSSASSGHTTPLPVTDASSVSTGHATSLPVTDASSVSTGHATPLPVTDASSVSTGHATPLPLTSLSSVSTGDTTPLPVTDTSSASTGQATPLPVTSLSSVSTGDTTPLPVTDTSSASTGHATSLPVTDTSSASTGHATPLPDTDTSSASTGHATLLPVTDTSSASIGHATSLPVTDTSSISTGHATPLHVTSPSSASTGHATPLPVTDTSSASTGHANPLHVTSPSSASTGHATPLPVTDTSSASTGHATPLPVTSLSSVSTGDTTPLPVTSPSSASTGHTTPLPVTDTSSASTGQATALPVTSTSSASTGDTTPLPVTDTSSASTGQATPLPVTSLSSVSTGDTTPLPVTSPSSASTGHATPLLVTDASSASTGQATPLPVTSLSSVSTGDTTPLPVTSPSSASTGHATSLPVTDTSSASTGDTTSLPVTDTSSAYTGDTTSLPVTDTSSSSTGDTTPLLVTETSSVSTGHATPLLVTDASSASTGHATPLHVTSPSSASTGDTTPVPVTDTSSVSTGHATPLPVTGLSSASTGDTTRLPVTDISSASTGQATPLPVTNTSSVSTGDTMPLPVTSPSSASTGHATPLPVTSTSSASTGHATPVPVTSTSSASTGHTTPLPVTDTSSASTGDTTPLPVTSPSSASTGHTTPLHVTIPSSASTGDTSTLPVTGASSASTGHATPLPVTDTSSVSTGHATPLPVTSLSSVSTGDTTPLPVTDASSASTGQATPLPVTSLSSVSTGDTTPLLVTDASSVSTGHATPLPVTDTSSASTGDTTRLPVTDTSSASTGQATPLPVTSLSSVSTGDTTPLLVTDASSVSTGHATPLPVTDTSSASTGDTTRLPVTDTSSASTGQATPLPVTIPSSSSSGHTTPLPVTSTSSVSTGHVTPLHVTSPSSASTGHVTPLPVTSTSSASTGHATPLLVTDASSVSTGHATPLPVTDASSASTGDTTPLPVTDTSSASTGQATPLPVTSLSSVSTGDTTPLPVTDASSASTGHATPLPVTIPSSVSTGDTMPLPVTSPSSASTGHATPLPVTGLSSASTGDTTPLPVTDTSSASTRHATPLPVTDTSSASTDDTTRLPVTDVSSASTGHATPLPVTSTSSASTGDTTPLPVTDTSSVSTGHATSLPVTSRSSASTGHATPLPVTDTSSVSTGHATPLPVTSTSSVSTGHATPLPVTSPSSASTGHATPVPVTSTSSASTGDTTPLPVTNASSLSTGHATPLHVTSPSSASRGDTSTLPVTDASSASTGHATPLPLTSLSSVSTGDTTPLPVTDTSSASTGQATPLPVTSLSSVSTGDTTPLPVTIPSSASSGHTTSLPVTDASSVSTGHGTPLPVTSTSSASTGDTTPLPVTDTSSASTGHATPLPVTDTSSASTGHATPLPVTSLSSVSTGHATPLAVSSATSASTVSSDSPLKMETPGMTTPSLKTDGGRRTATSPPPTTSQTIISTIPSTAMHTRSTAAPIPILPERGVSLFPYGAGAGDLEFVRRTVDFTSPLFKPATGFPLGSSLRDSLYFTDNGQIIFPESDYQIFSYPNPLPTGFTGRDPVALVAPFWDDADFSTGRGTTFYQSNTYQAILSTDGSRSYALFLYQSGGMQWDVAQRSGNPVLMGFSSGDGYFENSPLMSQPVWERYRPDRFLNSNSGLQGLQFYRLHREERPNYRLECLQWLKSQPRWPSWGWNQVSCPCSWQQGRRDLRFQPVSIGRWGLGSRQLCSFTSWRGGVCCSYGPWGEFREGWHVQRPWQLAQELEPQSWCCRWNDKPYLCALYQQRRPHVGCATYRPPQPAWMFGDPHITTLDGVSYTFNGLGDFLLVGAQDGNSSFLLQGRTAQTGSAQATNFIAFAAQYRSSSLGPVTVQWLLEPHDAIRVLLDNQTVTFQPDHEDGGGQETFNATGVLLSRNGSEVSASFDGWATVSVIALSNILHASASLPPEYQNRTEGLLGVWNNNPEDDFRMPNGSTIPPGSPEEMLFHFGMTWQINGTGLLGKRNDQLPSNFTPVFYSQLQKNSSWAEHLISNCDGDSSCIYDTLALRNASIGLHTREVSKNYEQANATLNQYPPSINGGRVIEAYKGQTTLIQYTSNAEDANFTLRDSCTDLELFENGTLLWTPKSLEPFTLEILARSAKIGLASALQPRTVVCHCNAESQCLYNQTSRVGNSSLEVAGCKCDGGTFGRYCEGSEDACEEPCFPSVHCVPGKGCEACPPNLTGDGRHCAALGSSFLCQNQSCPVNYCYNQGHCYISQTLGCQPMCTCPPAFTDSRCFLAGNNFSPTVNLELPLRVIQLLLSEEENASMAEVNASVAYRLGTLDMRAFLRNSQVERIDSAAPASGSPIQHWMVISEFQYRPRGPVIDFLNNQLLAAVVEAFLYHVPRRSEEPRNDVVFQPISGEDVRDVTALNVSTLKAYFRCDGYKGYDLVYSPQSGFTCVSPCSRGYCDHGGQCQHLPSGPRCSCVSFSIYTAWGEHCEHLSMKLDAFFGIFFGALGGLLLLGVGTFVVLRFWGCSGARFSYFLNSAEALP

SEQ ID NO: 54138 - protein, 620 aa, Homo sapiens
MSVGRRKLALLWALALALACTRHTGHAQDGSSESSYKHHPALSPIARGPSGVPLRGATVFPSLRTIPVVRASNPAHNGRVCSTWGSFHYKTFDGDVFRFPGLCNYVFSEHCGAAYEDFNPATPQPGVSGPHAEQGPHEGGWRGHPADQGLRPGQRPPGPAALQPVWGPHSRAAATPRWRPGWALSSCGTTMTACCWLDTKYANKLWALWGLQRDARGQRAPLPQHQADTHGIREPARWTTPRSSVRTLSLNPRGTAPLALGICEELLHGQLFSGCVALVDVGSYLEACRQDLCFCEDTDLLSCVCHTLAEYSRQCTHAGGLPQDWRGPDFCPQKCPNNMQYHECRSPCADTCSNQEHSRACEDHCVAGCFCPEGTVLDDIGQTGCVPVSKCACVYNGAAYAPGATYSTDCTNCTCSGGRWSCQEVPCPGTCSVLGGAHFSTFDGKQYTVHGDCSYVLTKPCDSSAFTVLAELRRCGLTDSETCLKSVTLSLDGVQTVVVIKASGEVFLNQIYTQLPISAANVTIFRPSTFFIIAQTSLGLQLNLQLVPTMQLFMQLAPKLRGQTCGLCGNFNSIQADDFRTLSGVVEATAAAFFNTFKTQAACPNIRNSFEDPCSLSVEN

SEQ ID NO: 54139 - protein, 623 aa, Homo sapiens
MSVGRRKLALLWALALALACTRHTGHAQDGSSESSYKHHPALSPIARGPSGVPLRGATVFPSLRTIPVVRASNPAHNGRVCSTWGSFHYKTFDGDVFRFPGLCNYVFSEHCGAAYEDFNIQLRRSQESAAPTLSRVLMKVDGVVIQLTKGSVLVNGHPVLLPFSQSGVLIQQSSSYTKVEARLGLVLMWNHDDSLLLELDTKYANKTCGLCGDFNGMPVVSELLSHNTKLTPMEFGNLQKMDDPTEQCQDPVPEPPRNCSTGFGICEELLHGQLFSGCVALVDVGSYLEACRQDLCFCEDTDLLSCVCHTLAEYSRQCTHAGGLPQDWRGPDFCPQKCPNNMQYHECRSPCADTCSNQEHSRACEDHCVAGCFCPEGTVLDDIGQTGCVPVSKCACVYNGAAYAPGATYSTDCTNCTCSGGRWSCQEVPCPGTCSVLGGAHFSTFDGKQYTVHGDCSYVLTKPCDSSAFTVLAELRRCGLTDSETCLKSVTLSLDGVQTVVVIKASGEVFLNQIYTQLPISAANVTIFRPSTFFIIAQTSLGLQLNLQLVPTMQLFMQLAPKLRGQTCGLCGNFNSIQADDFRTLSGVVEATAAAFFNTFKTQAACPNIRNSFEDPCSLSVEN

SEQ ID NO: 54140 - protein, 5706 aa, Homo sapiens
MGAPSACRTLVLALAAMLVVPQAETQGPVEPSWENAGHTMDGGAPTSSPTRRVSFVPPVTVFPSLSPLNPAHNGRVCSTWGDFHYKTFDGDVFRFPGLCNYVFSEHCRAAYEDFNVQLRRGLVGSRPVVTRVVIKAQGLVLEASNGSVLINGQREELPYSRTGLLVEQSGDYIKVSIRLVLTFLWNGEDSALLELDPKYANQTCGLCGDFNGLPAFNEFYAHNARLTPLQFGNLQKLDGPTEQCPDPLPLPAGNCTDEEGICHRTLLGPAFAECHALVDSTAYLAACAQDLCRCPTCPCATFVEYSRQCAHAGGQPRNWRCPELCPRTCPLNMQHQECGSPCTDTCSNPQRAQLCEDHCVDGCFCPPGSTVLDDITHSGCLPLGQCPCTHGGRTYSPGTSFNTTCSSCTCSGGLWQCQDLPCPGTCSVQGGAHISTYDEKLYDLHGDCSYVLSKKCADSSFTVLAELRKCGLTDNENCLKAVTLSLDGGDTAIRVQADGGVFLNSIYTQLPLSAANITLFTPSSFFIVVQTGLGLQLLVQLVPLMQVFVRLDPAHQGQMCGLCGNFNQNQADDFTALSGVVEATGAAFANTWKAQAACANARNSFEDPCSLSVENENYARHWCSRLTDPNSAFSRCHSIINPKPFHSNCMFDTCNCERSEDCLCAALSSYVHACAAKGVQLSDWRDGVCTKYMQNCPKSQRYAYVVDACQPTCRGLSEADVTCSVSFVPVDGCTCPAGTFLNDAGACVPAQECPCYAHGTVLAPGEVVHDEGAVCSCTGGKLSCLGASLQKSTGCAAPMVYLDCSNSSAGTPGAECLRSCHTLDVGCFSTHCVSGCVCPPGLVSDGSGGCIAEEDCPCVHNEATYKPGETIRVDCNTCTCRNRRWECSHRLCLGTCVAYGDGHFITFDGDRYSFEGSCEYILAQDYCGDNTTHGTFRIVTENIPCGTTGTTCSKAIKLFVESYELILQEGTFKAVARGPGGDPPYKIRYMGIFLVIETHGMAVSWDRKTSVFIRLHQDYKGRVCGLCGNFDDNAINDFATRSRSVVGDALEFGNSWKLSPSCPDALAPKDPCTANPFRKSWAQKQCSILHGPTFAACRSQVDSTKYYEACVNDACACDSGGDCECFCTAVAAYAQACHDAGLCVSWRTPDTCPLFCDFYNPHGGCEWHYQPCGAPCLKTCRNPSGHCLVDLPGLEGCYPKCPPSQPFFNEDQMKCVAQCGCYDKDGNYYDVGARVPTAENCQSCNCTPSGIQCAHSLEACTCTYEDRTYSYQDVIYNTTDGLGACLIAICGSNGTIIRKAVACPGTPATTPFTFTTAWVPHSTTSPALPVSTVCVREVCRWSSWYNGHRPEPGLGGGDFETFENLRQRGYQVCPVLADIECRAAQLPDMPLEELGQQVDCDRMRGLMCANSQQSPPLCHDYELRVLCCEYVPCGPSPAPGTSPQPSLSASTEPAVPTPTQTTATEKTTLWVTPSIRSTAALTSQTGSSSGPVTVTPSAPGTTTCQPRCQWTEWFDEDYPKSEQLGGDVESYDKIRAAGGHLCQQPKDIECQAESFPNWTLAQVGQKVHCDVHFGLVCRNWEQEGVFKMCYNYRIRVLCCSDDHCRGRATTPPPTTELETATTTTTQALFSTPQPTSSPGLTRAPPASTTAVPTLSEGLTSPRYTSTLGTATTGGPTTPAGSTEPTVPGVATSTLPTRSALPGTTGSLGTWRPSQPPTLAPTTMATSRARPTGTASTASKEPLTTSLAPTLTSELSTSQAETSTPRTETTMSPLTNTTTSQGTTRCQPKCEWTEWFDVDFPTSGVAGGDMETFENIRAAGGKMCWAPKSIECRAENYPEVSIDQVGQVLTCSLETGLTCKNEDQTGRFNMCFNYNVRVLCCDDYSHCPSTPATSSTATPSSTPGTTWILTKPTTTATTTASTGSTATPTSTLRTAPPPKVLTTTATTPTVTSSKATPSSSPGTATALPALRSTATTPTATSVTPIPSSSLGTTWTRLSQTTTPTATMSTATPSSTPETAHTSTVLTATATTTGATGSVATPSSTPGTAHTTKVPTTTTTGFTATPSSSPGTALTPPVWISTTTTPTTRGSTVTPSSIPGTTHTATVLTTTTTTVATGSMATPSSSTQTSGTPPSLTTTATTITATGSTTNPSSTPGTTPIPPVLTTTATTPAATSNTVTPSSALGTTHTPPVPNTMATTHGRSLPPSSPHTVRTAWTSATSGILGTTHITEPSTVTSHTLAATTGTTQHSTPALSSPHPSSRTTESPPSPGTTTPGHTTATSRTTATATPSKTRTSTLLPSSPTSAPITTVVTMGCEPQCAWSEWLDYSYPMPGPSGGDFDTYSNIRAAGGAVCEQPLGLECRAQAQPGVPLRELGQVVECSLDFGLVCRNREQVGKFKMCFNYEIRVFCCNYGHCPSTPATSSTAMPSSTPGTTWILTELTTTATTTESTGSTATPSSTPATAGTPHVSTTATTPTVTSSKATPFSSPGTATALPALRSTATTPTATSFTAIPSSSLGTTWTRLSQTTTPTATMSTATPSSTPETVHTSTVLTTTATTTGATGSVATPSSTPGTAHTTKVLTTTTTGFTATPSSSPGTARTLPVWISTTTTPTTRGSTVTPSSIPGTTHTPTVLTTTTTTVATGSMATPSSSTQTSGTPPSLTTTATTITATGSTTNPSSTPGTTPIPPVLTTTATTPAATSSTVTPSSALGTTHTPPVPNTTATTHGRSLSPSSPHTVRTAWTSATSGTLGTTHITEPSTGTSHTPAATTGTTQHSTPALSSPHPSSRTTESPPSPGTTTPGHTRATSRTTATATPSKTRTSTLLPSSPTSAPITTVVTMGCEPQCAWSEWLDYSYPMPGPSGGDFDTYSNIRAAGGAVCEQPLGLECRAQAQPGVPLRELGQVVECSLDFGLVCRNREQVGKFKMCFNYEIRVFCCNYGHCPSTPATSSTATPSSTPGTTWILTEQTTAATTTATTGSTAIPSSTPGTAPPPKVLTSTATTPTATSSKATSSSSPRTATTLPVLTSTATKSTATSFTPIPSFTLGTTGTLPEQTTTPMATMSTIHPSSTPETTHTSTVLTTKATTTRATSSMSTPSSTPGTTWILTELTTAATTTAATGPTATPSSTPGTTWILTEPSTTATVTVPTGSTATASSTRATAGTLKVLTSTATTPTVISSRATPSSSPGTATALPALRSTATTPTATSVTAIPSSSLGTAWTRLSQTTTPTATMSTATPSSTPETVHTSTVLTTTTTTTRATGSVATPSSTPGTAHTTKVPTTTTTGFTATPSSSPGTALTPPVWISTTTTPTTRGSTVTPSSIPGTTHTATVLTTTTTTVATGSMATPSSSTQTSGTPPSLTTTATTITATGSTTNPSSTPGTTPIPPVLTTTATTPAATSSTVTPSSALGTTHTPPVPNTTATTHGRSLPPSSPHTVRTAWTSATSGILGTTHITEPSTVTSHTPAATTSTTQHSTPALSSPHPSSRTTESPPSPGTTTPGHTRGTSRTTATATPSKTRTSTLLPSSPTSAPITTVVTTGCEPQCAWSEWLDYSYPMPGPSGGDFDTYSNIRAAGGAVCEQPLGLECRAQAQPGVPLRELGQVVECSLDFGLVCRNREQVGKFKMCFNYEIRVFCCNYGHCPSTPATSSTATPSSTPGTTWILTKLTTTATTTESTGSTATPSSTPGATAGTPHVSTTATTPTVTSSKATPFSSPGTATALPALRSTATTPTATSFTAIPSSSLGTTWTRLSQTTTPTATMSTATPSSTPETAHTSTVLTTTATTTRATGSVATPSSTPGTAHTTKVPTTTTTGFTVTPSSSPGTARTPPVWISTTTTPTTSGSTVTPSSVPGTTHTPTVLTTTTTTVATGSMATPSSSTQTSGTPPSLITTATTITATGSTTNPSSTPGTTPIPPVLTTTATTPAATSSTVTPSSALGTTHTPPVPNTTATTHGRSLSPSSPHTVRTAWTSATSGTLGTTHITEPSTGTSHTPAATTGTTQHSTPALSSPHPSSRTTESPPSPGTTTPGHTTATSRTTATATPSKTRTSTLLPSSPTSAPITTVVTTGCEPQCAWSEWLDYSYPMPGPSGGDFDTYSNIRAAGGAVCEQPLGLECRAQAQPGVPLGELGQVVECSLDFGLVCRNREQVGKFKMCFNYEIRVFCCNYGHCPSTPATSSTAMPSSTPGTTWILTELTTTATTTASTGSTATPSSTPGTAPPPKVLTSPATTPTATSSKATSSSSPRTATTLPVLTSTATKSTATSVTPIPSSTLGTTGTLPEQTTTPVATMSTIHPSSTPETTHTSTVLTTKATTTRATSSTSTPSSTPGTTWILTELTTAATTTAATGPTATPSSTPGTTWILTELTTTATTTASTGSTATPSSTPGTTWILTEPSTTATVTVPTGSTATASSTQATAGTPHVSTTATTPTVTSSKATPSSSPGTATALPALRSTATTPTATSFTAIPSSSLGTTWTRLSQTTTPTATMSTATPSSTPETVHTSTVLTATATTTGATGSVATPSSTPGTAHTTKVPTTTTTGFTATPSSSPGTALTPPVWISTTTTPTTTTPTTSGSTVTPSSIPGTTHTARVLTTTTTTVATGSMATPSSSTQTSGTPPSLTTTATTITATGSTTNPSSTPGTTPITPVLTSTATTPAATSSKATSSSSPRTATTLPVLTSTATKSTATSFTPIPSSTLWTTWTVPAQTTTPMSTMSTIHTSSTPETTHTSTVLTTTATMTRATNSTATPSSTLGTTRILTELTTTATTTAATGSTATLSSTPGTTWILTEPSTIATVMVPTGSTATASSTLGTAHTPKVVTTMATMPTATASTVPSSSTVGTTRTPAVLPSSLPTFSVSTVSSSVLTTLRPTGFPSSHFSTPCFCRAFGQFFSPGEVIYNKTDRAGCHFYAVCNQHCDIDRFQGACPTSPPPVSSAPLSSPSPAPGCDNAIPLRQVNETWTLENCTVARCVGDNRVVLLDPKPVANVTCVNKHLPIKVSDPSQPCDFHYECECICSMWGGSHYSTFDGTSYTFRGNCTYVLMREIHARFGNLSLYLDNHYCTASATAAAARCPRALSIHYKSMDIVLTVTMVHGKEEGLILFDQIPVSSGFSKNGVLVSVLGTTTMRVDIPALGVSVTFNGQVFQARLPYSLFHNNTEGQCGTCTNNQRDDCLQRDGTTAASCKDMAKTWLVPDSRKDGCWAPTGTPPTASPAAPVSSTPTPTPCPPQPLCDLMLSQVFAECHNLVPPGPFFNACISDHCRGRLEVPCQSLEAYAELCRARGVCSDWRGATGGLCDLTCPPTKVYKPCGPIQPATCNSRNQSPQLEGMAEGCFCPEDQILFNAHMGICVQACPCVGPDGFPKFPGERWVSNCQSCVCDEGSVSVQCKPLPCDAQGQPPPCNRPGFVTVTRPRAENPCCPETVCVCNTTTCPQSLPVCPPGQESICTQEEGDCCPTFRCRPQLCSYNGTFYGVGATFPGALPCHMCTCLSGDTQDPTVQCQEDACNNTTCPQGFEYKRVAGQCCGECVQTACLTPDGQPVQLNETWVNSHVDNCTVYLCEAEGGVHLLTPQPASCPDVSSCRGSLRKTGCCYSCEEDSCQVRINTTILWHQGCETEVNITFCEGSCPGASKYSAEAQAMQHQCTCCQERRVHEETVPLHCPNGSAILHTYTHVDECGCTPFCVPAPMAPPHTRGFPAQEATAV

SEQ ID NO: 54141 - protein, 5528 aa, Homo sapiens
APRMGAPSACRTLVLALAAMLVVPQAGKSPPLRPLSRNSGAGLDGGAPTSSPTRRVSFVPPVTVFPSLSRKQMLPLPAGKGVFASPKGGGPDLGVQLPPALNPAHNGRVCSTWGDFHYKTFDGDVFRFPGLCNYVFSEHCRAAYEDFNVQLRRGLVGSRPVVTRVVIKAQGLVLEASNGSVLINGQREELPYSRTGLLVEQSGDYIKVSIRLVLTFLWNGEDSALLELDPKYANQTCGLCGDFNGLPAFNEFYAHNARLTPLQFGNLQKLDGPTEQCPDPLPLPAGNCTDEEGICHRTLLGPAFAECHALVDSTAYLAACAQDLCRCPTCPCATFVEYSRQCAHAGGQPRNWRCPELCPRTCPLNMQHQECGSPCTDTCSNPQRAQLCEDHCVDGCFCPPGRSCTVLDDITHSGCLPLGQCPCTHGGRTYSPGTSFNTTCSSCTCSGGLWQCQDLPCPGTCSVQGGAHISTYDEKLYDLHGDCSYVLSKKCADSSFTVLAELRKCGLTDNENCLKAVTLSLDGGDTAIRVQADGGVFLNSIYTQLPLSAANITLFTPSSFFIVVQTGLGLQLLVQLVPLMQVFVRLDPAHQGQMCGLCGNFNQNQADDFTALSGVVEATGAAFANTWKAQAACANARNSFEDPCSLSVENENYARHWCSRLTDPNSAFSRCHSIINPKPFHSNCMFDTCNCERSEDCLCAALSSYVHACAAKGVQLSDWRDGVCTKYMQNCPKSQRYAYVVDACQPTCRGLSEADVTCSVSFVPVDGCTCPAGTFLNDAGACVPAQECPCYAHGTVLAPGEVVHDEGAVCSCTGGKLSCLGASLQKSTGCAAPMVYLDCSNSSAGTPGAECLRSCHTLDVGCFSTHCVSGCVCPPGLVSDGSGGCIAEEDCPCVHNEATYKPGETIRVDCNTCTCRNRRWECSHRLCLGTCVAYGDGHFITFDGDRYSFEGSCEYILAQDYCGDNTTHGTFRIVTENIPCGTTGTTCSKAIKLFVEVRTAPAVSTPDPAANEPAPREASVGFRQRLPPLQSYELILQEGTFKAVARGPGGDPPYKIRYMGIFLVIETHGMAVSWDRKTSVFIRLHQDYKGRVCGLCGNFDDNAINDFATRSRSVVGDALEFGNSWKLSPSCPDALAPKDPCTANPFRKSWAQKQCSILHGPTFAACRSQVDSTKYYEACVNDACACDSGGDCECFCTAVAAYAQACHDAGLCVSWRTPDTCPLFCDFYNPHGGCEWHYQPCGAPCLKTCRNPSGHCLVDLPGLEGCYPKCPPSQPFFNEDQMKCVAQCGCYDKDGNYYDVGARVPTAENCQSCNCTPSGIQCAHSLEACTCTYEDRTYSYQDVIYNTTDGLGACLIAICGSNGTIIRKAVACPGTPATTPFTFTTAWVPHSTTSPALPVSTVCVREVCRWSSWYNGHRPEPGLGGGDFETFENLRQRGYQVCPVLADIECRAAQLPDMPLEELGQQVDCDRMRGLMCANSQQSPPLCHDYELRVLCCEYVPCGPSPAPGTSPQPSLSASTEPAVPTPTQTTATEKTTLWVTPSIRSTAALTSQTGSSSGPVTVTPSAPGTTTCQPRCQWTEWFDEDYPKSEQLGGDVESYDKIRAAGGHLCQQPKDIECQAESFPNWTLAQVGQKVHCDVHFGLVCRNWEQEGVFKMCYNYRIRVLCCSDDHCRGRATTPPPTTELETATTTTTQALFSTPQPTSSPGLTRAPPASTTAVPTLSEGLTSPRYTSTLGTATTGGPTTPAGSTEPTVPGVATSTLPTRSALPGTTGSLGTWRPSQPPTLAPTTMATSRARPTGTASTASKEPLTTSLAPTLTSELSTSQAETSTPRTETTMSPLTNTTTSQGTTRCQPKCEWTEWFDVDFPTSGVAGGDMETFENIRAAGGKMCWAPKSIECRAENYPEVSIDQVGQVLTCSLETGLTCKNEDQTGRFNMCFNYNVRVLCCDDYSHCPSTPATSSTATPSSTPGTTWILTKPTTTATTTASTGSTATPTSTLRTAPPPKVLTTTATTPTVTSSKATPSSSPGTATALPALRSTATTPTATSVTPIPSSSLGTTWTRLSQTTTPTATMSTATPSSTPETAHTSTVLTATATTTGATGSVATPSSTPGTAHTTKVPTTTTTGFTATPSSSPGTALTPPVWISTTTTPTTRGSTVTPSSIPGTTHTATVLTTTTTTVATGSMATPSSSTQTSGTTHTPPVPNTMATTHGRSLPPSSPHTVRTAWTSATSGILGTTHITEPSTVTSHTLAATTGTTQHSTPALSSPHPSSRTTESPPSPGTTTPGHTTATSRTTATATPSKTRTSTLLPSSPTSAPITTVVTMGCEPQCAWSEWLDYSYPMPGPSGGDFDTYSNIRAAGGAVCEQPLGLECRAQAQPGVPLRELGQVVECSLDFGLVCRNREQVGKFKMCFNYEIRVFCCNYGHCPSTPATSSTAMPSSTPGTTWILTELTTTATTTESTGSTATPSSTPGTTWILTEPSTTATVTVPTGSTATASSTQATAGTPHVSTTATTPTVTSSKATPFSSPGTATALPALRSTATTPTATSFTAIPSSSLGTTWTRLSQTTTPTATMSTATPSSTPETVHTSTVLTTTATTTGATGSVATPSSTPGTAHTTKVLTTTTTGFTATPSSSPGTARTLPVWISTTTTPTTRGSTVTPSSIPGTTHTPTVLTTTTTTVATGSMATPSSSTQTSGTTHTPPVPNTTATTHGRSLSPSSPHTVRTAWTSATSGTLGTTHITEPSTGTSHTPAATTGTTQHSTPALSSPHPSSRTTESPPSPGTTTPGHTRATSRTTATATPSKTRTSTLLPSSPTSAPITTVVTMGCEPQCAWSEWLDYSYPMPGPSGGDFDTYSNIRAAGGAVCEQPLGLECRAQAQPGVPLRELGQVVECSLDFGLVCRNREQVGKFKMCFNYEIRVFCCNYGHCPSTPATSSTATPSSTPGTTWILTEQTTAATTTATTGSTAIPSSTPGTAPPPKVLTSTATTPTATSSKATSSSSPRTATTLPVLTSTATKSTATSFTPIPSFTLGTTGTLPEQTTTPMATMSTIHPSSTPETTHTSTVLTTKATTTRATSSMSTPSSTPGTTWILTELTTAATTTAATGPTATPSSTPGTTWILTEPSTTATVTVPTGSTATASSTRATAGTLKVLTSTATTPTVISSRATPSSSPGTATALPALRSTATTPTATSVTAIPSSSLGTAWTRLSQTTTPTATMSTATPSSTPETVHTSTVLTTTTTTTRATGSVATPSSTPGTAHTTKVPTTTTTGFTATPSSSPGTALTPPVWISTTTTPTTRGSTVTPSSIPGTTHTATVLTTTTTTVATGSMATPSSSTQTSGTTHTPPVPNTTATTHGRSLPPSSPHTVRTAWTSATSGILGTTHITEPSTVTSHTPAATTSTTQHSTPALSSPHPSSRTTESPPSPGTTTPGHTRGTSRTTATATPSKTRTSTLLPSSPTSAPITTVVTTGCEPQCAWSEWLDYSYPMPGPSGGDFDTYSNIRAAGGAVCEQPLGLECRAQAQPGVPLRELGQVVECSLDFGLVCRNREQVGKFKMCFNYEIRVFCCNYGHCPSTPATSSTATPSSTPGTTWILTKLTTTATTTESTGSTATPSSTPGTTWILTEPSTTATVTVPTGSTATASSTQATAGTPHVSTTATTPTVTSSKATPFSSPGTATALPALRSTATTPTATSFTAIPSSSLGTTWTRLSQTTTPTATMSTATPSSTPETAHTSTVLTTTATTTRATGSVATPSSTPGTAHTTKVPTTTTTGFTVTPSSSPGTARTPPVWISTTTTPTTSGSTVTPSSVPGTTHTPTVLTTTTTTVATGSMATPSSSTQTSGTTHTPPVPNTTATTHGRSLSPSSPHTVRTAWTSATSGTLGTTHITEPSTGTSHTPAATTGTTQHSTPALSSPHPSSRTTESPPSPGTTTPGHTTATSRTTATATPSKTRTSTLLPSSPTSAPITTVVTTGCEPQCAWSEWLDYSYPMPGPSGGDFDTYSNIRAAGGAVCEQPLGLECRAQAQPGVPLGELGQVVECSLDFGLVCRNREQVGKFKMCFNYEIRVFCCNYGHCPSTPATSSTAMPSSTPGTTWILTELTTTATTTASTGSTATPSSTPGTAPPPKVLTSPATTPTATSSKATSSSSPRTATTLPVLTSTATKSTATSVTPIPSSTLGTTGTLPEQTTTPVATMSTIHPSSTPETTHTSTVLTTKATTTRATSSTSTPSSTPGTTWILTELTTAATTTAATGPTATPSSTPGTTWILTELTTTATTTASTGSTATPSSTPGTTWILTEPSTTATVTVPTGSTATASSTQATAGTPHVSTTATTPTVTSSKATPSSSPGTATALPALRSTATTPTATSFTAIPSSSLGTTWTRLSQTTTPTATMSTATPSSTPETVHTSTVLTATATTTGATGSVATPSSTPGTAHTTKVPTTTTTGFTATPSSSPGTALTPPTTTPMSTMSTIHTSSTPETTHTSTVLTTTATMTRATNSTATPSSTLGTTRILTELTTTATTTAATGSTATLSSTPGTTWILTEPSTIATVMVPTGSTATASSTLGTAHTPKVVTTMATMPTATASTVPSSSTVGTTRTPAVLPSSLPTFSVSTVSSSVLTTLRPTGFPSSHFSTPCFCRAFGQFFSPGEVIYNKTDRAGCHFYAVCNQHCDIDRFQGACPTSPPPVSSAPLSSPSPAPGCDNAIPLRQVNETWTLENCTVARCVGDNRVVLLDPKPVANVTCVNKHLPIKVSDPSQPCDFHYECECECVGGRGITPGAGICSMWGGSHYSTFDGTSYTFRGNCTYVLMREIHARFGNLSLYLDNHYCTASATAAAARCPRALSIHYKSMDIVLTVTMVHGKEEGLILFDQIPVSSGFSKNGVLVSVLGTTTMRVDIPALGVSVTFNGQVFQARLPYSLFHNNTEGQCGTCTNNQRDDCLQRDGTTAASCKDMAKTWLVPDSRKDGCWAPTGTPPTASPAAPVSSTPTPTPCPPQPLCDLMLSQVFAECHNLVPPGPFFNACISDHCRGRLEVPCQSLEAYAELCRARGVCSDWRGATGGLCDLTCPPTKVYKPCGPIQPATCNSRNQSPQLEGMAEGCFCPEDQILFNAHMGICVQACPCVGPDGFPKFPGERWVSNCQSCVCDEGSVSVQCKPLPCDAQGQPPPCNRPGFVTVTRPRAENPCCPETVCVCNTTTCPQSLPVCPPGQESICTQEEGDCCPTFRCRPQLCSYNGTFYGVGATFPGALPCHMCTCLSGDTQDPTVQCQEDACNNTTCPQGFEYKRVAGQCCGECVQTACLTPDGQPVQLNETWVNSHVDNCTVYLCEAEGGVHLLTPQPASCPDVSSCRGSLRKTGCCYSCEEDSCQVRINTTILWHQGCETEVNITFCEGSCPGASKYSAEAQAMQHQCTCCQERRVHEETVPLHCPNGSAILHTYTHAVQVLCGLLAWGLQAGGHIRGAVQDPQQPLKDQEASGKARQGGGYRQTVAWGDKSNARAWLQKPVVWVQSGAFPTPGPASALCPW

SEQ ID NO: 54142 - protein, 5765 aa, Homo sapiens
MGAPSACRTLVLALAAMLVVPQAETQGPVEPSWENAGHTMDGGAPTSSPTRRVSFVPPVTVFPSLSPLNPAHNGRVCSTWGDFHYKTFDGDVFRFPGLCNYVFSEHCRAAYEDFNVQLRRGLVGSRPVVTRVVIKAQGLVLEASNGSVLINGQREELPYSRTGLLVEQSGDYIKVSIRLVLTFLWNGEDSALLELDPKYANQTCGLCGDFNGLPAFNEFYAHNARLTPLQFGNLQKLDGPTEQCPDPLPLPAGNCTDEEGICHRTLLGPAFAECHALVDSTAYLAACAQDLCRCPTCPCATFVEYSRQCAHAGGQPRNWRCPELCPRTCPLNMQHQECGSPCTDTCSNPQRAQLCEDHCVDGCFCPPGRSCTVLDDITHSGCLPLGQCPCTHGGRTYSPGTSFNTTCSSCTCSGGLWQCQDLPCPGTCSVQGGAHISTYDEKLYDLHGDCSYVLSKKCADSSFTVLAELRKCGLTDNENCLKAVTLSLDGGDTAIRVQADGGVFLNSIYTQLPLSAANITLFTPSSFFIVVQTGLGLQLLVQLVPLMQVFVRLDPAHQGQMCGLCGNFNQNQADDFTALSGVVEATGAAFANTWKAQAACANARNSFEDPCSLSVENENYARHWCSRLTDPNSAFSRCHSIINPKPFHSNCMFDTCNCERSEDCLCAALSSYVHACAAKGVQLSDWRDGVCTKYMQNCPKSQRYAYVVDACQPTCRGLSEADVTCSVSFVPVDGCTCPAGTFLNDAGACVPAQECPCYAHGTVLAPGEVVHDEGAVCSCTGGKLSCLGASLQKSTGCAAPMVYLDCSNSSAGTPGAECLRSCHTLDVGCFSTHCVSGCVCPPGLVSDGSGGCIAEEDCPCVHNEATYKPGETIRVDCNTCTCRNRRWECSHRLCLGTCVAYGDGHFITFDGDRYSFEGSCEYILAQDYCGDNTTHGTFRIVTENIPCGTTGTTCSKAIKLFVESYELILQEGTFKAVARGPGGDPPYKIRYMGIFLVIETHGMAVSWDRKTSVFIRLHQDYKGRVCGLCGNFDDNAINDFATRSRSVVGDALEFGNSWKLSPSCPDALAPKDPCTANPFRKSWAQKQCSILHGPTFAACRSQVDSTKYYEACVNDACACDSGGDCECFCTAVAAYAQACHDAGLCVSWRTPDTCPLFCDFYNPHGGCEWHYQPCGAPCLKTCRNPSGHCLVDLPGLEGCYPKCPPSQPFFNEDQMKCVAQCGCYDKDGNYYDVGARVPTAENCQSCNCTPSGIQCAHSLEACTCTYEDRTYSYQDVIYNTTDGLGACLIAICGSNGTIIRKAVACPGTPATTPFTFTTAWVPHSTTSPALPVSTVCVREVCRWSSWYNGHRPEPGLGGGDFETFENLRQRGYQVCPVLADIECRAAQLPDMPLEELGQQVDCDRMRGLMCANSQQSPPLCHDYELRVLCCEYVPCGPSPAPGTSPQPSLSASTEPAVPTPTQTTATEKTTLWVTPSIRSTAALTSQTGSSSGPVTVTPSAPGTTTCQPRCQWTEWFDEDYPKSEQLGGDVESYDKIRAAGGHLCQQPKDIECQAESFPNWTLAQVGQKVHCDVHFGLVCRNWEQEGVFKMCYNYRIRVLCCSDDHCRGRATTPPPTTELETATTTTTQALFSTPQPTSSPGLTRAPPASTTAVPTLSEGLTSPRYTSTLGTATTGGPTTPAGSTEPTVPGVATSTLPTRSALPGTTGSLGTWRPSQPPTLAPTTMATSRARPTGTASTASKEPLTTSLAPTLTSELSTSQAETSTPRTETTMSPLTNTTTSQGTTRCQPKCEWTEWFDVDFPTSGVAGGDMETFENIRAAGGKMCWAPKSIECRAENYPEVSIDQVGQVLTCSLETGLTCKNEDQTGRFNMCFNYNVRVLCCDDYSHCPSTPATSSTATPSSTPGTTWILTKPTTTATTTASTGSTATPTSTLRTAPPPKVLTTTATTPTVTSSKATPSSSPGTATALPALRSTATTPTATSVTPIPSSSLGTTWTRLSQTTTPTATMSTATPSSTPETAHTSTVLTATATTTGATGSVATPSSTPGTAHTTKVPTTTTTGFTATPSSSPGTALTPPVWISTTTTPTTRGSTVTPSSIPGTTHTATVLTTTTTTVATGSMATPSSSTQTSGTPPSLTTTATTITATGSTTNPSSTPGTTPIPPVLTTTATTPAATSNTVTPSSALGTTHTPPVPNTMATTHGRSLPPSSPHTVRTAWTSATSGILGTTHITEPSTVTSHTLAATTGTTQHSTPALSSPHPSSRTTESPPSPGTTTPGHTTATSRTTATATPSKTRTSTLLPSSPTSAPITTVVTMGCEPQCAWSEWLDYSYPMPGPSGGDFDTYSNIRAAGGAVCEQPLGLECRAQAQPGVPLRELGQVVECSLDFGLVCRNREQVGKFKMCFNYEIRVFCCNYGHCPSTPATSSTAMPSSTPGTTWILTELTTTATTTESTGSTATPSSTPGTTWILTEPSTTATVTVPTGSTATASSTQATAGTPHVSTTATTPTVTSSKATPFSSPGTATALPALRSTATTPTATSFTAIPSSSLGTTWTRLSQTTTPTATMSTATPSSTPETVHTSTVLTTTATTTGATGSVATPSSTPGTAHTTKVLTTTTTGFTATPSSSPGTARTLPVWISTTTTPTTRGSTVTPSSIPGTTHTPTVLTTTTTTVATGSMATPSSSTQTSGTPPSLTTTATTITATGSTTNPSSTPGTTPIPPVLTTTATTPAATSSTVTPSSALGTTHTPPVPNTTATTHGRSLSPSSPHTVRTAWTSATSGTLGTTHITEPSTGTSHTPAATTGTTQHSTPALSSPHPSSRTTESPPSPGTTTPGHTRATSRTTATATPSKTRTSTLLPSSPTSAPITTVVTMGCEPQCAWSEWLDYSYPMPGPSGGDFDTYSNIRAAGGAVCEQPLGLECRAQAQPGVPLRELGQVVECSLDFGLVCRNREQVGKFKMCFNYEIRVFCCNYGHCPSTPATSSTATPSSTPGTTWILTEQTTAATTTATTGSTAIPSSTPGTAPPPKVLTSTATTPTATSSKATSSSSPRTATTLPVLTSTATKSTATSFTPIPSFTLGTTGTLPEQTTTPMATMSTIHPSSTPETTHTSTVLTTKATTTRATSSMSTPSSTPGTTWILTELTTAATTTAATGPTATPSSTPGTTWILTEPSTTATVTVPTGSTATASSTRATAGTLKVLTSTATTPTVISSRATPSSSPGTATALPALRSTATTPTATSVTAIPSSSLGTAWTRLSQTTTPTATMSTATPSSTPETVHTSTVLTTTTTTTRATGSVATPSSTPGTAHTTKVPTTTTTGFTATPSSSPGTALTPPVWISTTTTPTTRGSTVTPSSIPGTTHTATVLTTTTTTVATGSMATPSSSTQTSGTPPSLTTTATTITATGSTTNPSSTPGTTPIPPVLTTTATTPAATSSTVTPSSALGTTHTPPVPNTTATTHGRSLPPSSPHTVRTAWTSATSGILGTTHITEPSTVTSHTPAATTSTTQHSTPALSSPHPSSRTTESPPSPGTTTPGHTRGTSRTTATATPSKTRTSTLLPSSPTSAPITTVVTTGCEPQCAWSEWLDYSYPMPGPSGGDFDTYSNIRAAGGAVCEQPLGLECRAQAQPGVPLRELGQVVECSLDFGLVCRNREQVGKFKMCFNYEIRVFCCNYGHCPSTPATSSTATPSSTPGTTWILTKLTTTATTTESTGSTATPSSTPGTTWILTEPSTTATVTVPTGSTATASSTQATAGTPHVSTTATTPTVTSSKATPFSSPGTATALPALRSTATTPTATSFTAIPSSSLGTTWTRLSQTTTPTATMSTATPSSTPETAHTSTVLTTTATTTRATGSVATPSSTPGTAHTTKVPTTTTTGFTVTPSSSPGTARTPPVWISTTTTPTTSGSTVTPSSVPGTTHTPTVLTTTTTTVATGSMATPSSSTQTSGTPPSLITTATTITATGSTTNPSSTPGTTPIPPVLTTTATTPAATSSTVTPSSALGTTHTPPVPNTTATTHGRSLSPSSPHTVRTAWTSATSGTLGTTHITEPSTGTSHTPAATTGTTQHSTPALSSPHPSSRTTESPPSPGTTTPGHTTATSRTTATATPSKTRTSTLLPSSPTSAPITTVVTTGCEPQCAWSEWLDYSYPMPGPSGGDFDTYSNIRAAGGAVCEQPLGLECRAQAQPGVPLGELGQVVECSLDFGLVCRNREQVGKFKMCFNYEIRVFCCNYGHCPSTPATSSTAMPSSTPGTTWILTELTTTATTTASTGSTATPSSTPGTAPPPKVLTSPATTPTATSSKATSSSSPRTATTLPVLTSTATKSTATSVTPIPSSTLGTTGTLPEQTTTPVATMSTIHPSSTPETTHTSTVLTTKATTTRATSSTSTPSSTPGTTWILTELTTAATTTAATGPTATPSSTPGTTWILTELTTTATTTASTGSTATPSSTPGTTWILTEPSTTATVTVPTGSTATASSTQATAGTPHVSTTATTPTVTSSKATPSSSPGTATALPALRSTATTPTATSFTAIPSSSLGTTWTRLSQTTTPTATMSTATPSSTPETVHTSTVLTATATTTGATGSVATPSSTPGTAHTTKVPTTTTTGFTATPSSSPGTALTPPVWISTTTTPTTTTPTTSGSTVTPSSIPGTTHTARVLTTTTTTVATGSMATPSSSTQTSGTPPSLTTTATTITATGSTTNPSSTPGTTPITPVLTSTATTPAATSSKATSSSSPRTATTLPVLTSTATKSTATSFTPIPSSTLWTTWTVPAQTTTPMSTMSTIHTSSTPETTHTSTVLTTTATMTRATNSTATPSSTLGTTRILTELTTTATTTAATGSTATLSSTPGTTWILTEPSTIATVMVPTGSTATASSTLGTAHTPKVVTTMATMPTATASTVPSSSTVGTTRTPAVLPSSLPTFSVSTVSSSVLTTLRPTGFPSSHFSTPCFCRAFGQFFSPGEVIYNKTDRAGCHFYAVCNQHCDIDRFQGACPTSPPPVSSAPLSSPSPAPGCDNAIPLRQVNETWTLENCTVARCVGDNRVVLLDPKPVANVTCVNKHLPIKVSDPSQPCDFHYECECICSMWGGSHYSTFDGTSYTFRGNCTYVLMREIHARFGNLSLYLDNHYCTASATAAAARCPRALSIHYKSMDIVLTVTMVHGKEEGLILFDQIPVSSGFSKNGVLVSVLGTTTMRVDIPALGVSVTFNGQVFQARLPYSLFHNNTEGQCGTCTNNQRDDCLQRDGTTAASCKDMAKTWLVPDSRKDGCWAPTGTPPTASPAAPVSSTPTPTPCPPQPLCDLMLSQVFAECHNLVPPGPFFNACISDHCRGRLEVPCQSLEAYAELCRARGVCSDWRGATGGLCDLTCPPTKVYKPCGPIQPATCNSRNQSPQLEGMAEGCFCPEDQILFNAHMGICVQACPCVGPDGFPKFPGERWVSNCQSCVCDEGSVSVQCKPLPCDAQGQPPPCNRPGFVTVTRPRAENPCCPETVCVCNTTTCPQSLPVCPPGQESICTQEEGDCCPTFRCRPQLCSYNGTFYGVGATFPGALPCHMCTCLSGDTQDPTVQCQEDACNNTTCPQGFEYKRVAGQCCGECVQTACLTPDGQPVQLNETWVNSHVDNCTVYLCEAEGGVHLLTPQPASCPDVSSCRGSLRKTGCCYSCEEDSCQVRINTTILWHQGCETEVNITFCEGSCPGASKYSAEAQAMQHQCTCCQERRVHEETVPLHCPNGSAILHTYTHVDECGCTPFCVPAPMAPPHTRGFPAQEATAV

SEQ ID NO: 54143 - protein, 5762 aa, Homo sapiens
MGAPSACRTLVLALAAMLVVPQAETQGPVEPSWENAGHTMDGGAPTSSPTRRVSFVPPVTVFPSLSPLNPAHNGRVCSTWGDFHYKTFDGDVFRFPGLCNYVFSEHCRAAYEDFNVQLRRGLVGSRPVVTRVVIKAQGLVLEASNGSVLINGQREELPYSRTGLLVEQSGDYIKVSIRLVLTFLWNGEDSALLELDPKYANQTCGLCGDFNGLPAFNEFYAHNARLTPLQFGNLQKLDGPTEQCPDPLPLPAGNCTDEEGICHRTLLGPAFAECHALVDSTAYLAACAQDLCRCPTCPCATFVEYSRQCAHAGGQPRNWRCPELCPRTCPLNMQHQECGSPCTDTCSNPQRAQLCEDHCVDGCFCPPGTVLDDITHSGCLPLGQCPCTHGGRTYSPGTSFNTTCSSCTCSGGLWQCQDLPCPGTCSVQGGAHISTYDEKLYDLHGDCSYVLSKKCADSSFTVLAELRKCGLTDNENCLKAVTLSLDGGDTAIRVQADGGVFLNSIYTQLPLSAANITLFTPSSFFIVVQTGLGLQLLVQLVPLMQVFVRLDPAHQGQMCGLCGNFNQNQADDFTALSGVVEATGAAFANTWKAQAACANARNSFEDPCSLSVENENYARHWCSRLTDPNSAFSRCHSIINPKPFHSNCMFDTCNCERSEDCLCAALSSYVHACAAKGVQLSDWRDGVCTKYMQNCPKSQRYAYVVDACQPTCRGLSEADVTCSVSFVPVDGCTCPAGTFLNDAGACVPAQECPCYAHGTVLAPGEVVHDEGAVCSCTGGKLSCLGASLQKSTGCAAPMVYLDCSNSSAGTPGAECLRSCHTLDVGCFSTHCVSGCVCPPGLVSDGSGGCIAEEDCPCVHNEATYKPGETIRVDCNTCTCRNRRWECSHRLCLGTCVAYGDGHFITFDGDRYSFEGSCEYILAQDYCGDNTTHGTFRIVTENIPCGTTGTTCSKAIKLFVESYELILQEGTFKAVARGPGGDPPYKIRYMGIFLVIETHGMAVSWDRKTSVFIRLHQDYKGRVCGLCGNFDDNAINDFATRSRSVVGDALEFGNSWKLSPSCPDALAPKDPCTANPFRKSWAQKQCSILHGPTFAACRSQVDSTKYYEACVNDACACDSGGDCECFCTAVAAYAQACHDAGLCVSWRTPDTCPLFCDFYNPHGGCEWHYQPCGAPCLKTCRNPSGHCLVDLPGLEGCYPKCPPSQPFFNEDQMKCVAQCGCYDKDGNYYDVGARVPTAENCQSCNCTPSGIQCAHSLEACTCTYEDRTYSYQDVIYNTTDGLGACLIAICGSNGTIIRKAVACPGTPATTPFTFTTAWVPHSTTSPALPVSTVCVREVCRWSSWYNGHRPEPGLGGGDFETFENLRQRGYQVCPVLADIECRAAQLPDMPLEELGQQVDCDRMRGLMCANSQQSPPLCHDYELRVLCCEYVPCGPSPAPGTSPQPSLSASTEPAVPTPTQTTATEKTTLWVTPSIRSTAALTSQTGSSSGPVTVTPSAPGTTTCQPRCQWTEWFDEDYPKSEQLGGDVESYDKIRAAGGHLCQQPKDIECQAESFPNWTLAQVGQKVHCDVHFGLVCRNWEQEGVFKMCYNYRIRVLCCSDDHCRGRATTPPPTTELETATTTTTQALFSTPQPTSSPGLTRAPPASTTAVPTLSEGLTSPRYTSTLGTATTGGPTTPAGSTEPTVPGVATSTLPTRSALPGTTGSLGTWRPSQPPTLAPTTMATSRARPTGTASTASKEPLTTSLAPTLTSELSTSQAETSTPRTETTMSPLTNTTTSQGTTRCQPKCEWTEWFDVDFPTSGVAGGDMETFENIRAAGGKMCWAPKSIECRAENYPEVSIDQVGQVLTCSLETGLTCKNEDQTGRFNMCFNYNVRVLCCDDYSHCPSTPATSSTATPSSTPGTTWILTKPTTTATTTASTGSTATPTSTLRTAPPPKVLTTTATTPTVTSSKATPSSSPGTATALPALRSTATTPTATSVTPIPSSSLGTTWTRLSQTTTPTATMSTATPSSTPETAHTSTVLTATATTTGATGSVATPSSTPGTAHTTKVPTTTTTGFTATPSSSPGTALTPPVWISTTTTPTTRGSTVTPSSIPGTTHTATVLTTTTTTVATGSMATPSSSTQTSGTPPSLTTTATTITATGSTTNPSSTPGTTPIPPVLTTTATTPAATSNTVTPSSALGTTHTPPVPNTMATTHGRSLPPSSPHTVRTAWTSATSGILGTTHITEPSTVTSHTLAATTGTTQHSTPALSSPHPSSRTTESPPSPGTTTPGHTTATSRTTATATPSKTRTSTLLPSSPTSAPITTVVTMGCEPQCAWSEWLDYSYPMPGPSGGDFDTYSNIRAAGGAVCEQPLGLECRAQAQPGVPLRELGQVVECSLDFGLVCRNREQVGKFKMCFNYEIRVFCCNYGHCPSTPATSSTAMPSSTPGTTWILTELTTTATTTESTGSTATPSSTPGTTWILTEPSTTATVTVPTGSTATASSTQATAGTPHVSTTATTPTVTSSKATPFSSPGTATALPALRSTATTPTATSFTAIPSSSLGTTWTRLSQTTTPTATMSTATPSSTPETVHTSTVLTTTATTTGATGSVATPSSTPGTAHTTKVLTTTTTGFTATPSSSPGTARTLPVWISTTTTPTTRGSTVTPSSIPGTTHTPTVLTTTTTTVATGSMATPSSSTQTSGTPPSLTTTATTITATGSTTNPSSTPGTTPIPPVLTTTATTPAATSSTVTPSSALGTTHTPPVPNTTATTHGRSLSPSSPHTVRTAWTSATSGTLGTTHITEPSTGTSHTPAATTGTTQHSTPALSSPHPSSRTTESPPSPGTTTPGHTRATSRTTATATPSKTRTSTLLPSSPTSAPITTVVTMGCEPQCAWSEWLDYSYPMPGPSGGDFDTYSNIRAAGGAVCEQPLGLECRAQAQPGVPLRELGQVVECSLDFGLVCRNREQVGKFKMCFNYEIRVFCCNYGHCPSTPATSSTATPSSTPGTTWILTEQTTAATTTATTGSTAIPSSTPGTAPPPKVLTSTATTPTATSSKATSSSSPRTATTLPVLTSTATKSTATSFTPIPSFTLGTTGTLPEQTTTPMATMSTIHPSSTPETTHTSTVLTTKATTTRATSSMSTPSSTPGTTWILTELTTAATTTAATGPTATPSSTPGTTWILTEPSTTATVTVPTGSTATASSTRATAGTLKVLTSTATTPTVISSRATPSSSPGTATALPALRSTATTPTATSVTAIPSSSLGTAWTRLSQTTTPTATMSTATPSSTPETVHTSTVLTTTTTTTRATGSVATPSSTPGTAHTTKVPTTTTTGFTATPSSSPGTALTPPVWISTTTTPTTRGSTVTPSSIPGTTHTATVLTTTTTTVATGSMATPSSSTQTSGTPPSLTTTATTITATGSTTNPSSTPGTTPIPPVLTTTATTPAATSSTVTPSSALGTTHTPPVPNTTATTHGRSLPPSSPHTVRTAWTSATSGILGTTHITEPSTVTSHTPAATTSTTQHSTPALSSPHPSSRTTESPPSPGTTTPGHTRGTSRTTATATPSKTRTSTLLPSSPTSAPITTVVTTGCEPQCAWSEWLDYSYPMPGPSGGDFDTYSNIRAAGGAVCEQPLGLECRAQAQPGVPLRELGQVVECSLDFGLVCRNREQVGKFKMCFNYEIRVFCCNYGHCPSTPATSSTATPSSTPGTTWILTKLTTTATTTESTGSTATPSSTPGTTWILTEPSTTATVTVPTGSTATASSTQATAGTPHVSTTATTPTVTSSKATPFSSPGTATALPALRSTATTPTATSFTAIPSSSLGTTWTRLSQTTTPTATMSTATPSSTPETAHTSTVLTTTATTTRATGSVATPSSTPGTAHTTKVPTTTTTGFTVTPSSSPGTARTPPVWISTTTTPTTSGSTVTPSSVPGTTHTPTVLTTTTTTVATGSMATPSSSTQTSGTPPSLITTATTITATGSTTNPSSTPGTTPIPPVLTTTATTPAATSSTVTPSSALGTTHTPPVPNTTATTHGRSLSPSSPHTVRTAWTSATSGTLGTTHITEPSTGTSHTPAATTGTTQHSTPALSSPHPSSRTTESPPSPGTTTPGHTTATSRTTATATPSKTRTSTLLPSSPTSAPITTVVTTGCEPQCAWSEWLDYSYPMPGPSGGDFDTYSNIRAAGGAVCEQPLGLECRAQAQPGVPLGELGQVVECSLDFGLVCRNREQVGKFKMCFNYEIRVFCCNYGHCPSTPATSSTAMPSSTPGTTWILTELTTTATTTASTGSTATPSSTPGTAPPPKVLTSPATTPTATSSKATSSSSPRTATTLPVLTSTATKSTATSVTPIPSSTLGTTGTLPEQTTTPVATMSTIHPSSTPETTHTSTVLTTKATTTRATSSTSTPSSTPGTTWILTELTTAATTTAATGPTATPSSTPGTTWILTELTTTATTTASTGSTATPSSTPGTTWILTEPSTTATVTVPTGSTATASSTQATAGTPHVSTTATTPTVTSSKATPSSSPGTATALPALRSTATTPTATSFTAIPSSSLGTTWTRLSQTTTPTATMSTATPSSTPETVHTSTVLTATATTTGATGSVATPSSTPGTAHTTKVPTTTTTGFTATPSSSPGTALTPPVWISTTTTPTTTTPTTSGSTVTPSSIPGTTHTARVLTTTTTTVATGSMATPSSSTQTSGTPPSLTTTATTITATGSTTNPSSTPGTTPITPVLTSTATTPAATSSKATSSSSPRTATTLPVLTSTATKSTATSFTPIPSSTLWTTWTVPAQTTTPMSTMSTIHTSSTPETTHTSTVLTTTATMTRATNSTATPSSTLGTTRILTELTTTATTTAATGSTATLSSTPGTTWILTEPSTIATVMVPTGSTATASSTLGTAHTPKVVTTMATMPTATASTVPSSSTVGTTRTPAVLPSSLPTFSVSTVSSSVLTTLRPTGFPSSHFSTPCFCRAFGQFFSPGEVIYNKTDRAGCHFYAVCNQHCDIDRFQGACPTSPPPVSSAPLSSPSPAPGCDNAIPLRQVNETWTLENCTVARCVGDNRVVLLDPKPVANVTCVNKHLPIKVSDPSQPCDFHYECECICSMWGGSHYSTFDGTSYTFRGNCTYVLMREIHARFGNLSLYLDNHYCTASATAAAARCPRALSIHYKSMDIVLTVTMVHGKEEGLILFDQIPVSSGFSKNGVLVSVLGTTTMRVDIPALGVSVTFNGQVFQARLPYSLFHNNTEGQCGTCTNNQRDDCLQRDGTTAASCKDMAKTWLVPDSRKDGCWAPTGTPPTASPAAPVSSTPTPTPCPPQPLCDLMLSQVFAECHNLVPPGPFFNACISDHCRGRLEVPCQSLEAYAELCRARGVCSDWRGATGGLCDLTCPPTKVYKPCGPIQPATCNSRNQSPQLEGMAEGCFCPEDQILFNAHMGICVQACPCVGPDGFPKFPGERWVSNCQSCVCDEGSVSVQCKPLPCDAQGQPPPCNRPGFVTVTRPRAENPCCPETVCVCNTTTCPQSLPVCPPGQESICTQEEGDCCPTFRCRPQLCSYNGTFYGVGATFPGALPCHMCTCLSGDTQDPTVQCQEDACNNTTCPQGFEYKRVAGQCCGECVQTACLTPDGQPVQLNETWVNSHVDNCTVYLCEAEGGVHLLTPQPASCPDVSSCRGSLRKTGCCYSCEEDSCQVRINTTILWHQGCETEVNITFCEGSCPGASKYSAEAQAMQHQCTCCQERRVHEETVPLHCPNGSAILHTYTHVDECGCTPFCVPAPMAPPHTRGFPAQEATAV

SEQ ID NO: 54144 - protein, 536 aa, Homo sapiens
VFCCNYGHCPPRPPALRPCPPPLRGRPGSTELTTTATTTASTGSTATPSSTPGTAPPPKVLTSPATTPTATSSKATSSSSPRTATTLPVLTSTATKSTATSVTPIPSSTLGTTGTLPEQTTTPVATMSTIHPSSTPETTHTSTVLTTKATTTRATSSTSTPSSTPGTTWILTELTTAATTTAATGPTATPSSTPGTTWILTELTTTATTTASTGSTATPSSTPGTTWILTEPSTTATVTVPTGSTATASSTQATAGTPHVSTTATTPTVTSSKATPSSSPGTATALPALRSTATTHSYQLYSHPLLLPTTWTRLSQTTTPTATMSTATPSSTPETVHTSTVLTATATTTGPALWPPPPPPQEQLTLPKCRLPQPRHSHPLLQPRDGTHASSVDQHNHHTHNHHTHNQWLHGDPLLHPGDHPHRQSADHHHHNCTGSMATPSSSTQTSGTPPSLTTTATTITATGSTTNPSSTPGTTPITPVLTSTATTPAATSSKATSSSSPRTATTLPVLTSTATKSTATSFTPIPSPCGPRGPS

SEQ ID NO: 54145 - protein, 186 aa, Homo sapiens
SSTPGTTWILTEPSTTATVTVPTGSTATASSTQATAGTPHVSTTATTPTVTSSKATPFSSPGTATALPALRSTATTPTATSFTAIPSSWAPPGPAYHRPPHPRPPCPQPHPPPLQRLSTPPQCLPPRPPRGHRLCGHPLLHPRNSSHYQSADYHNHFTATPSSSPGTARTLPVWISTTTTPTTRGS

SEQ ID NO: 54146 - protein, 319 aa, Homo sapiens
TKATTTRATSSMSTPSSTPGTTWILTELTTAATTTAATPHGHPVLHPRDHLDPHRAQHYTVTVPTGSTATASSTRATAGTLKVLTSHHTHSHQLQSHSLLQSRDCNRPSSTEKHSHHTHSYQRYSHPLFLPTAWTRLSQTTTPTATMSTATPSSTPETVHTSTVLTTTTTTTRATLWPPPPPPQEQLTLPKCRLPQPRHSHPLLQPRDGTHASSVDQHNHHTHNQRLHGDPLLHPTTHTATVLTTTTTTPLVLWQHPPLAHRPVVPPSLTTTATTITATGSTTNPSSTPGTTPIPPVLTTTAHTCSHQQHSDSLLCPRD

SEQ ID NO: 54147 - protein, 668 aa, Homo sapiens
MREIHARFGNLSLYLDNHYCTASATAAAARCPRALSIHYKSMDIVLTVTMVHGKEEGLILFDQIPVSSGFSKNGVLVSVLGTTTMRVDIPALGVSVTFNGQVFQARLPYSLFHNNTEGQCGTCTNNQRDDCLQRDGTTAASCKDMAKTWLVPDSRKDGCWAPTGTPPTASPAAPVSSTPTPTPCPPQPLCDLMLSQVFAECHNLVPPGPFFNACISDHCRGRLEVPCQSLEAYAELCRARGVCSDWRGATGGLCDLTCPPTKVYKPCGPIQPATCNSRNQSPQLEGMAEGCFCPEDQILFNAHMGICVQACPCVGPDGFPKFPGERWVSNCQSCVCDEGSVSVQCKPLPCDAQGQPPPCNRPGFVTVTRPRAENPCCPETVCVCNTTTCPQSLPVCPPGQESICTQEEGDCCPTFRCRPQLCSYNGTFYGVGATFPGALPCHMCTCLSGDTQDPTVQCQEDACNNTTCPQGFEYKRVAGQCCGECVQTACLTPDGQPVQLNETWVNSHVDNCTVYLCEAEGGVHLLTPQPASCPDVSSCRGSLRKTGCCYSCEEDSCQVRINTTILWHQGCETEVNITFCEGSCPGASKYSAEAQAMQHQCTCCQERRVHEETVPLHCPNGSAILHTYTHVDECGCTPFCVPAPMSPPACVWHPALRAPAAHLGLAPP

SEQ ID NO: 54148 - protein, 2439 aa, Homo sapiens
MVQRWLLLSCCGALLSAGLANTSYTSPGLQRLKDSPQTAPDKGQCSTWGAGHFSTFDHHVYDFSGTCNYIFAATCKDAFPTFSVQLRRGPDGSISRIIVELGASVVTVSEAIISVKDIGVISLPYTSNGLQITPFGQSVRLVAKQLELELEVVWGPDSHLMVLVERKYMGQMCGLCGNFDGKVTNEFVSEEGKFLEPHKFAALQKLDDPGEICTFQDIPSTHVRQAQHARICTQLLTLVAPECSVSKEPFVLSCQADVAAAPQPGPQNSSCATLSEYSRQCSMVGQPVRRWRSPGLCSVGQCPANQVYQECGSACVKTCSNPQHSCSSSCTFGCFCPEGTVLNDLSNNHTCVPVTQCPCVLHGAMYAPGEVTIAACQTCRCTLGRWVCTERPCPGHCSLEGGSFVTTFDARPYRFHGTCTYILLQSPQLPEDGALMAVYDKSGVSHSETSLVAVVYLSRQDKIVISQDEVVTNNGEAKWLPYKTRNITVFRQTSTHLQMATSFGLELVVQLRPIFQAYVTVGPQFRGQTRGLCGNFNGDTTDDFTTSMGIAEGTASLFVDSWRAGNCPAALERETDPCSMSQLNKVCAETHCSMLLRTGTVFERCHATVNPAPFYKRCVYQACNYEETFPHICAALGDYVHACSLRGVLLWGWRSSVDNCTIPCTGNTTFSYNSQACERTCLSLSDRATECHHSAVPVDGCNCPDGTYLNQKGECVRKAQCPCILEGYKFILAEQSTVINGITCHCINGRLSCPQRPQMFLASCQAPKTFKSCSQSSENKFGAACAPTCQMLATGVACVPTKCEPGCVCAEGLYENADGQCVPPEECPCEFSGVSYPGGAELHTDCRTCSCSRGRWACQQGTHCPSTCTLYGEGHVITFDGQRFVFDGNCEYILATDVCGVNDSQPTFKILTENVICGNSGVTCSRAIKIFLGGLSVVLADRNYTVTGEEPHVQLGVTPGALSLVVDISIPGRYNLTLIWNRHMTILIRIARASQDPLCGLCGNFNGNMKDDFETRSRYVASSELELVNSWKESPLCGDVSFVTDPCSLNAFRRSWAERKCSVINSQTFATCHSKVYHLPYYEACVRDACGCDSGGDCECLCDAVAAYAQACLDKGVCVDWRTPAFCPIYCGFYNTHTQDGHGEYQYTQEANCTWHYQPCLCPSQPQSVPGSNIEGCYNCSQDEYFDHEEGVCVPCMPPTTPQPPTTPQLPTTGSRPTQVWPMTGTSTTIGLLSSTGPSPSSNHTPASPTQTPLLPATLTSSKPTASSGEPPRPTTAVTPQATSGLPPTATLRSTATKPTVTQATTRATASTASPATTSTAQSTTRTTMTLPTPATSGTSPTLPKSTNQELPGTTATQTTGPRPTPASTTGPTTPQPGQPTRPTATETTQTRTTTEYTTPQTPHTTHSPPTAGSPVPSTGPVTATSFHATTTYPTPSHPETTLPTHVPPFSTSLVTPSTHTVITPTHAQMATSASNHSAPTGTIPPPTTLKATGSTHTAPPITPTTSGTSQAHSSFSTNKTPTSLHSHTSSTHHPEVTPTSTTTITPNPTSTRTRTPVAHTNSATSSRPPPPFTTHSPPTGSSPFSSTGPMTATSFKTTTTYPTPSHPQTTLPTHVPPFSTSLVTPSTHTVITPTHAQMATSASIHSMPTGTIPPPTTLKATGSTHTAPTMTLTTSGTSQALSSLNTAKTSTSLHSHTSSTHHAEATSTSTTNITPNPTSTGTPPMTVTTSGTSQSRSSFSTAKTSTSLHSHTSSTHHPEVTSTSTTSITPNHTSTGTRTPVAHTTSATSSRLPTPFTTHSPPTGTTPISSTGPVTATSFQTTTTYPTPSHPHTTLPTHVPSFSTSLVTPSTHTVIIPTHTQMATSASIHSMPTGTIPPPTTIKATGSTHTAPPMTPTTSGTSQSPSSFSTAKTSTSLPYHTSSTHHPEVTPTSTTNITPKHTSTGTRTPVAHTTSASSSRLPTPFTTHSPPTGSSPFSSTGPMTATSFQTTTTYPTPSHPQTTLPTHVPPFSTSLVTPSTHTVIITTHTQMATSASIHSTPTGTVPPPTTLKATGSTHTAPPMTVTTSGTSQTHSSFSTATASSSFISSSSWLPQNSSSRPPSSPITTQLPHLSSATTPVSTTNQLSSSFSPSPSAPSTVSSYVPSSHSSPQTSSPSVGTSSSFVSAPVHSTTLSSGSHSSLSTHPTTASVSASPLFPSSPAASTTIRATLPHTISSPFTLSALLPISTVTVSPTPSSHLASSTIAFPSTPRTTASTHTAPAFSSQSTTSRSTSLTTRVPTSGFVSLTSGVTGIPTSPVTNLTTRHPGPTLSPTTRFLTSSLTAHGSTPASAPVSSLGTPTPTSPGVCSVREQQEEITFKGCMANVTVTRCEGACISAASFNIITQQVDARCSCCRPLHSYEQQLELPCPDPSTPGRRLVLTLQVFSHCVCSSVACGD

SEQ ID NO: 54149 - protein, 377 aa, Homo sapiens
MKTLPLFVCICALSACFSFSEGRERDHELRHRRHHHQSPKSHFELPHYPGLLAHQKPFIRKSYKCLHKRCRPKLPPSPNNPPKFPNPHQPPKHPDKNSSVVNPTLVATTQIPSVTFPSASTKITTLPNVTFLPQNATTISSRENVNTSSSVATLAPVNSPAPQDTTAAPPTPSATTPAPPSSSAPPETTAAPPTPSATTQAPPSSSAPPETTAAPPTPPATTPAPPSSSAPPETTAAPPTPSATTPAPLSSSAPPETTAVPPTPSATTLDPSSASAPPETTAAPPTPSATTPAPPSSPAPQETTAAPITTPNSSPTTLAPDTSETSAAPTHQTTTSVTTQTTTTKQPTSAPGQNKISRFLLYMKNLLNRIIDDMVEQ

SEQ ID NO: 54150 - protein, 377 aa, Homo sapiens; identical to SEQ ID NO: 54149

SEQ ID NO: 54151 - protein, 377 aa, Homo sapiens; identical to SEQ ID NO: 54149

SEQ ID NO: 54152 - protein, 136 aa, Homo sapiens
MKTLPLFVCICALSACFSFSEGRERDHELRHRRHHHQSPKSHFELPHYPGLLAHQKPFIRKSYKCLHKRCRPKLPPSPNNPPKFPNPHQPPKHPDKNSSVVNPTLVATTQIPSVTFPSASTKITTLPNVTFLPQNA

SEQ ID NO: 54153 - protein, 580 aa, Homo sapiens
MTAPAGPRGSETERLLTPNPGYGTQAGPSPAPPTPPEEEDLRRRLKYFFMSPCDKFRAKGRKPCKLMLQVVKILVVTVQLILFGLSNQLAVTFREENTIAFRHLFLLGYSDGADDTFAAYTREQLYQAIFHAVDQYLALPDVSLGRYAYVRGGGDPWTNGSGLALCQRYYHRGHVDPANDTFDIDPMVVTDCIQVDPPERPPPPPSDDLTLLESSSSYKNLTLKFHKLVNVTIHFRLKTINLQSLINNEIPDCYTFSVLITFDNKAHSGRIPISLETQAHIQECKHPSVFQHGDNSFRLLFDVVVILTCSLSFLLCARSLLRGFLLQNEFVGFMWRQRGRVISLWERLEFVNGWYILLVTSDVLTISGTIMKIGIEAKNLASYDVCSILLGTSTLLVWVGVIRYLTFFHNYNILIATLRVALPSVMRFCCCVAVIYLGYCFCGWIVLGPYHVKFRSLSMVSECLFSLINGDDMFVTFAAMQAQQGRSSLVWLFSQLYLYSFISLFIYMVLSLFIALITGAYDTIKHPGGAGAEESELQAYIAQCQDSPTSGKFRRGSGSACSLLCCCGRDPSEEHSLLVN

SEQ ID NO: 54154 - protein, 545 aa, Homo sapiens
MTPSQPTRGSSCTRPSSMLWTSTWRCLTCHWAGMRMSVVGVTLGPMAQGLLSASGTTTEATWTRPTTHLTLIRWWLLTASRWIPPSGPLRPPATISPSWKAAPVTRTSRSNSTSTACSLEGGPGWGRQHTRHSHPSNYFPKVGTGPPRPRWCLLGEHFPCQLQSQHVAGDAGTWGRKGPEDAPDPHPSLLPRLVNVTIHFRLKTINLQSLINNEIPDCYTFSVLITFDNKAHSGRIPISLETQAHIQECKHPSVFQHGDNSFRLLFDVVVILTCSLSFLLCARSLLRGFLLQNEFVGFMWRQRGRVISLWERLEFVNGWYILLVTSDVLTISGTIMKIGIEAKNLASYDVCSILLGTSTLLVWVGVIRYLTFFHNYNILIATLRVALPSVMRFCCCVAVIYLGYCFCGWIVLGPYHVKFRSLSMVSECLFSLINGDDMFVTFAAMQAQQGRSSLVWLFSQLYLYSFISLFIYMVLSLFIALITGAYDTIKHPGGAGAEESELQAYIAQCQDSPTSGKFRRGSGSACSLLCCCGRDPSEEHSLLVN

SEQ ID NO: 54155 - protein, 566 aa, Homo sapiens
MARQPYRFPQARIPERGSGVFRLTVRNAMAHRDSEMKEECLREDLKFYFMSPCEKYRARRQIPWKLGLQILKIVMVTTQLVRFGLSNQLVVAFKEDNTVAFKHLFLKGYSGTDEDDYSCSVYTQEDAYESIFFAINQYHQLKDITLGTLGYGENEDNRIGLKVCKQHYKKGTMFPSNETLNIDNDVELDCVQLDLQDLSKKPPDWKNSSFFRLEFYRLLQVEISFHLKGIDLQTIHSRELPDCYVFQNTIIFDNKAHSGKIKIYFDSDAKIEECKDLNIFGSTQKNAQYVLVFDAFVIVICLASLILCTRSIVLALRLRKRFLNFFLEKYKRPVCDTDQWEFINGWYVLVIISDLMTIIGSILKMEIKAKNLTNYDLCSIFLGTSTLLVWVGVIRYLGYFQAYNVLILTMQASLPKVLRFCACAGMIYLGYTFCGWIVLGPYHDKFENLNTVAECLFSLVNGDDMFATFAQIQQKSILVWLFSRLYLYSFISLFIYMILSLFIALITDSYDTIKKFQQNGFPETDLQEFLKECSSKEEYQKESSAFLSCICCRRRKRSDDHLIPIS

SEQ ID NO: 54156 - protein, 553 aa, Homo sapiens
MADPEVVVSSCSSHEEENRCNFNQQTSPSEELLLEDQMRRKLKFFFMNPCEKFWARGRKPWKLAIQILKIAMVTIQLVLFGLSNQMVVAFKEENTIAFKHLFLKGYMDRMDDTYAVYTQSDVYDQLIFAVNQYLQLYNVSVGNHAYENKGTKQSAMAICQHFYKRGNIYPGNDTFDIDPEIETECFFVEPDEPFHIGTPAENKLNLTLDFHRLLTVELQFKLKAINLQTVRHQELPDCYDFTLTITFDNKAHSGRIKISLDNDISIRECKDWHVSGSIQKNTHYMMIFDAFVILTCLVSLILCIRSVIRGLQLQQEFVNFFLLHYKKEVSVSDQMEFVNGWYIMIIISDILTIIGSILKMEIQAKSLTSYDVCSILLGTSTMLVWLGVIRYLGFFAKYNLLILTLQAALPNVIRFCCCAAMIYLGYCFCGWIVLGPYHDKFRSLNMVSECLFSLINGDDMFATFAKMQQKSYLVWLFSRIYLYSFISLFIYMILSLFIALITDTYETIKQYQQDGFPETELRTFISECKDLPNSGKYRLEDDPPVSLFCCCKK

SEQ ID NO: 54157 - protein, 497 aa, Homo sapiens
MADPEVVVSSCSSHEEENRCNFNQQTSPSEELLLEDQMRRKLKFFFMNPCEKFWARGRKPWKLAIQILKIAMVTIQYLQLYNVSVGNHAYENKGTKQSAMAICQHFYKRGNIYPGNDTFDIDPEIETECFFVEPDEPFHIGTPAENKLNLTLDFHRLLTVELQFKLKAINLQTVRHQELPDCYDFTLTITFDNKAHSGRIKISLDNDISIRECKDWHVSGSIQKNTHYMMIFDAFVILTCLVSLILCIRSVIRGLQLQQEFVNFFLLHYKKEVSVSDQMEFVNGWYIMIIISDILTIIGSILKMEIQAKSLTSYDVCSILLGTSTMLVWLGVIRYLGFFAKYNLLILTLQAALPNVIRFCCCAAMIYLGYCFCGWIVLGPYHDKFRSLNMVSECLFSLINGDDMFATFAKMQQKSYLVWLFSRIYLYSFISLFIYMILSLFIALITDTYETIKQYQQDGFPETELRTFISECKDLPNSGKYRLEDDPPVSLFCCCKK

SEQ ID NO: 54158 - protein, 321 aa, Homo sapiens
MADPEVVVSSCSSHEEENRCNFNQQTSPSEELLLEDQMRRKLKFFFMNPCEKFWARGRKPWKLAIQILKIAMVTIQLVLFGLSNQMVVAFKEENTIAFKHLFLKGYMDRMDDTYAVYTQSDVYDQLIFAVNQYLQLYNVSVGNHAYENKGTKQSAMAICQHFYKRGNIYPGNDTFDIDPEIETECFFVEPDEPFHIGTPAENKLNLTLDFHRLLTVELQFKLKAINLQTVRHQELPDCYDFTLTITFDNKAHSGRIKISLDNDISIRECKDWHVSGSIQKNTHYMMIFDAFVILTCLVSLILCIRSVIRGLQLQQVGNVAF

SEQ ID NO: 54159 - protein, 497 aa, Homo sapiens; identical to SEQ ID NO: 54157

SEQ ID NO: 54160 - protein, 553 aa, Homo sapiens; identical to SEQ ID NO: 54156

SEQ ID NO: 54161 - protein, 813 aa, Homo sapiens
MSLLGDPLQALPPSAAPTGPLLAPPAGATLNRLREPLLRRLSELLDQAPEGRGWRRLAELAGSRGRLRLSCLDLEQCSLKVLEPEGSPSLCLLKLMGEKGCTVTELSDFLQAMEHTEVLQLLSPPGIKITVNPESKAVLAGQFVKLCCRATGHPFVQYQWFKMNKEIPNGNTSELIFNAVHVKDAGFYVCRVNNNFTFEFSQWSQLDVCDIPESFQRSVDGVSESKLQICVEPTSQKLMPGSTLVLQCVAVGSPIPHYQWFKNELPLTHETKKLYMVPYVDLEHQGTYWCHVYNDRDSQDSKKVEIIIDELNNLGHPDNKEQTTDQPLAKDKVALLIGNMNYREHPKLKAPLVDVYELTNLLRQLDFKVVSLLDLTEYEMRNAVDEFLLLLDKGVYGLLYYAGHGYENFGNSFMVPVDAPNPYRSENCLCVQNILKLMQEKETGLNVFLLDMCRKRNDYDDTIPILDALKVTANIVFGYATCQGAEAFEIQHSGLANGIFMKFLKDRLLEDKKITVLLDEVAEDMGKCHLTKGKQALEIRSSLSEKRALTDPIQGTEYSAESLVRNLQWAKAHELPESMCLKFDCGVQIQLGFAAEFSNVMIIYTSIVYKPPEIIMCDAYVTDFPLDLDIDPKDANKGTPEETGSYLVSKDLPKHCLYTRLSSLQKLKEHLVFTVCLSYQYSGLEDTVEDKQEVNVGKPLIAKLDMHRGLGRKTCFQTCLMSNGPYQSSAATSGGAGHYHSLQDPFHGVYHSHPGNPSNVTPADSCHCSRTPDAFISSFAHHASCHFSRSNVPVETTDEIPFSFSDRLRISEK

SEQ ID NO: 54162 - protein, 824 aa, Homo sapiens
MSLLGDPLQALPPSAAPTGPLLAPPAGATLNRLREPLLRRLSELLDQAPEGRGWRRLAELAGSRGRLRLSCLDLEQCSLKVLEPEGSPSLCLLKLMGEKGCTVTELSDFLQAMEHTEVLQLLSPPGIKITVNPESKAVLAGQFVKLCCRATGHPFVQYQWFKMNKEIPNGNTSELIFNAVHVKDAGFYVCRVNNNFTFEFSQWSQLDVCDIPESFQRSVDGVSESKLQICVEPTSQKLMPGSTLVLQCVAVGSPIPHYQWFKNELPLTHETKKLYMVPYVDLEHQGTYWCHVYNDRDSQDSKKVEIIIGRTDEAVECTEDELNNLGHPDNKEQTTDQPLAKDKVALLIGNMNYREHPKLKAPLVDVYELTNLLRQLDFKVVSLLDLTEYEMRNAVDEFLLLLDKGVYGLLYYAGHGYENFGNSFMVPVDAPNPYRSENCLCVQNILKLMQEKETGLNVFLLDMCRKRNDYDDTIPILDALKVTANIVFGYATCQGAEAFEIQHSGLANGIFMKFLKDRLLEDKKITVLLDEVAEDMGKCHLTKGKQALEIRSSLSEKRALTDPIQGTEYSAESLVRNLQWAKAHELPESMCLKFDCGVQIQLGFAAEFSNVMIIYTSIVYKPPEIIMCDAYVTDFPLDLDIDPKDANKGTPEETGSYLVSKDLPKHCLYTRLSSLQKLKEHLVFTVCLSYQYSGLEDTVEDKQEVNVGKPLIAKLDMHRGLGRKTCFQTCLMSNGPYQSSAATSGGAGHYHSLQDPFHGVYHSHPGNPSNVTPADSCHCSRTPDAFISSFAHHASCHFSRSNVPVETTDEIPFSFSDRLRISEK

SEQ ID NO: 54163 - protein, 146 aa, Homo sapiens
MTMRSLLRTPFLCGLLWAFCAPGARAEEPAASFSQPGSMGLDKNTVHDQEHIMEHLEGVINKPEAEMSPQELQLHYFKMHDYDGNNLLDGLELSTAITHVHKEEGSEQAPLMSEDELINIIDGVLRDDDKNNDGYIDYAEFAKSLQ

SEQ ID NO: 54164 - protein, 146 aa, Homo sapiens; identical to SEQ ID NO: 54163

SEQ ID NO: 54165 - protein, 94 aa, Homo sapiens
MEHLEGVINKPEAEMSPQELQLHYFKMHDYDGNNLLDGLELSTAITHVHKEEGSEQAPLMSEDELINIIDGVLRDDDKNNDGYIDYAEFAKSLQ

SEQ ID NO: 54166 - protein, 146 aa, Homo sapiens; identical to SEQ ID NO: 54163

SEQ ID NO: 54167 - protein, 146 aa, Homo sapiens; identical to SEQ ID NO: 54163

SEQ ID NO: 54168 - protein, 94 aa, Homo sapiens; identical to SEQ ID NO: 54165

SEQ ID NO: 54169 - protein, 94 aa, Homo sapiens; identical to SEQ ID NO: 54165

SEQ ID NO: 54170 - protein, 146 aa, Homo sapiens; identical to SEQ ID NO: 54163

SEQ ID NO: 54171 - protein, 146 aa, Homo sapiens; identical to SEQ ID NO: 54163

SEQ ID NO: 54172 - protein, 61 aa, Homo sapiens
MTMRSLLRTPFLCGLLWAFCAPGARAEEPAASFSQPGSMGLDKNTVHDQEHIMEHLEGVIN

SEQ ID NO: 54173 - protein, 127 aa, Homo sapiens
MLSVCSCRTSSGMRSQWPSARQRSSSLSTFRHIMEHLEGVINKPEAEMSPQELQLHYFKMHDYDGNNLLDGLELSTAITHVHKEEGSEQAPLMSEDELINIIDGVLRDDDKNNDGYIDYAEFAKSLQ

SEQ ID NO: 54174 - protein, 1140 aa, Homo sapiens
MVISLNSCLSFICLLLCHWIGTASPLNLEDPNVCSHWESYSVTVQESYPHPFDQIYYTSCTDILNWFKCTRHRVSYRTAYRHGEKTMYRRKSQCCPGFYESGEMCVPHCADKCVHGRCIAPNTCQCEPGWGGTNCSSACDGDHWGPHCTSRCQCKNGALCNPITGACHCAAGFRGWRCEDRCEQGTYGNDCHQRCQCQNGATCDHVTGECRCPPGYTGAFCEDLCPPGKHGPQCEQRCPCQNGGVCHHVTGECSCPSGWMGTVCGQPCPEGRFGKNCSQECQCHNGGTCDAATGQCHCSPGYTGERCQDECPVGTYGVLCAETCQCVNGGKCYHVSGACLCEAGFAGERCEARLCPEGLYGIKCDKRCPCHLENTHSCHPMSGECACKPGWSGLYCNETCSPGFYGEACQQICSCQNGADCDSVTGKCTCAPGFKGIDCSTPCPLGTYGINCSSRCGCKNDAVCSPVDGSCTCKAGWHGVDCSIRCPSGTWGFGCNLTCQCLNGGACNTLDGTCTCAPGWRGEKCELPCQDGTYGLNCAERCDCSHADGCHPTTGHCRCLPGWSGVHCDSVCAEGRWGPNCSLPCYCKNGASCSPDDGICECAPGFRGTTCQRICSPGFYGHRCSQTCPQCVHSSGPCHHITGLCDCLPGFTGALCNEVCPSGRFGKNCAGICTCTNNGTCNPIDRSCQCYPGWIGSDCSQPCPPAHWGPNCIHTCNCHNGAFCSAYDGECKCTPGWTGLYCTQRCPLGFYGKDCALICQCQNGADCDHISGQCTCRTGFMGRHCEQKCPSGTYGYGCRQICDCLNNSTCDHITGTCYCSPGWKGARCDQAGVIIVGNLNSLSRTSTALPADSYQIGAIAGIIILVLVVLFLLALFIIYRHKQKGKESSMPAVTYTPAMRVVNADYTISGTLPHSNGGNANSHYFTNPSYHTLTQCATSPHVNNRDRMTVTKSKNNQLFVNLKNVNPGKRGPVGDCTGTLPADWKHGGYLNELGAFGLDRSYMGKSLKDLGKNSEYNSSNCSLSSSENPYATIKDPPVLIPKSSECGYVEMKSPARRDSPYAEINNSTSANRNVYEVEPTVSVVQGVFSNNGRLSQDPYDLPKNSHIPCHYDLLPVRDSSSSPKQEDSGGSSSNSSSSSE

SEQ ID NO: 54175 - protein, 567 aa, Homo sapiens
MVISLNSCLSFICLLLCHWIGTASPLNLEDPNVCSHWESYSVTVQESYPHPFDQIYYTSCTDILNWFKCTRHRVSYRTAYRHGEKTMYRRKSQCCPGFYESGEMCVPHCADKCVHGRCIAPNTCQCEPGWGGTNCSSACDGDHWGPHCTSRCQCKNGALCNPITGACHCAAGFRGWRCEDRCEQGTYGNDCHQRCQCQNGATCDHVTGECRCPPGYTGAFCEDLCPPGKHGPQCEQRCPCQNGGVCHHVTGECSCPSGWMGTVCGQPCPEGRFGKNCSQECQCHNGGTCDAATGQCHCSPGYTGERCQDECPVGTYGVLCAETCQCVNGGKCYHVSGACLCEAGFAGERCEARLCPEGLYGIKCDKRCPCHLENTHSCHPMSGECACKPGWSGLYCNETCSPGFYGEACQQICSCQNGADCDSVTGKCTCAPGFKGIDCSTPCPLGTYGINCSSRCGCKNDAVCSPVDGSCTCKAGWHGVDCSIRCPSGTWGFGCNLTCQCLNGGACNTLDGTCTCAPGWRGEKCELPCQDGTYGLNCAERCDCSHADGCHPTTGHCRCLPGWSGLF

SEQ ID NO: 54176 - protein, 1140 aa, Homo sapiens; identical to SEQ ID NO: 54174

SEQ ID NO: 54177 - protein, 969 aa, Homo sapiens
MHTPSIRSITHDAQTSSTGSSAPGTALCTEECVHGRCVSPDTCHCEPGWGGPDCSSGCDSDHWGPHCSNRCQCQNGALCNPITGACVCAAGFRGWRCEELCAPGTHGKGCQLPCQCRHGASCDPRAGECLCAPGYTGVYCEELCPPGSHGAHCELRCPCQNGGTCHHITGECACPPGWTGAVCAQPCPPGTFGQNCSQDCPCHHGGQCDHVTGQCHCTAGYMGDRCQEECPFGSFGFQCSQHCDCHNGGQCSPTTGACECEPGYKGPRCQERLCPEGLHGPGCTLPCPCDADNTISCHPVTGACTCQPGWSGHHCNESCPVGYYGDGCQLPCTCQNGADCHSITGGCTCAPGFMGEVCAVSCAAGTYGPNCSSICSCNNGGTCSPVDGSCTCKEGWQGLDCTLPCPSGTWGLNCNESCTCANGAACSPIDGSCSCTPGWLGDTCELPCPDGTFGLNCSEHCDCSHADGCDPVTGHCCCLAGWTGIRCDSTCPPGRWGPNCSVSCSCENGGSCSPEDGSCECAPGFRGPLCQRICPPGFYGHGCAQPCPLCVHSSRPCHHISGICECLPGFSGALCNQVCAGGYFGQDCAQLCSCANNGTCSPIDGSCQCFPGWIGKDCSQACPPGFWGPACFHACSCHNGASCSAEDGACHCTPGWTGLFCTQRCPAAFFGKDCGRVCQCQNGASCDHISGKCTCRTGFTGQHCEQRCAPGTFGYGCQQLCECMNNSTCDHVTGTCYCSPGFKGIRCDQAALMMEELNPYTKISPALGAERHSVGAVTGIMLLLFLIVVLLGLFAWHRRRQKEKGRDLAPRVSYTPAMRMTSTDYSLSGACGMDRRQNTYIMDKGFKDYMKESVCSSSTCSLNSSENPYATIKDPPILTCKLPESSYVEMKSPVHMGSPYTDVPSLSTSNKNIYEVEPTVSVVQEGCGHNSSYIQNAYDLPRNSHIPGHYDLLPVRQSPANGPSQDKQS

SEQ ID NO: 54178 - protein, 875 aa, Homo sapiens
MVLSLTGLIAFSFLQATLALNPEDPNVCSHWESYAVTVQESYAHPFDQIYYTRCTDILNWFKCTRHRISYKTAYRRGLRTMYRRRSQCCPGYYESGDFCIPLCTEECVHGRCVSPDTCHCEPGWGGPDCSSGCDSDHWGPHCSNRCQCQNGALCNPITGACVCAAGFRGWRCEELCAPGTHGKGCQLPCQCRHGASCDPRAGECLCAPGYTGVYCEELCPPGSHGAHCELRCPCQNGGTCHHITGECACPPGWTGAVCAQPCPPGTFGQNCSQDCPCHHGGQCDHVTGQCHCTAGYMGDRCQEECPFGSFGFQCSQHCDCHNGGQCSPTTGACECEPGYKGPRCQERLCPEGLHGPGCTLPCPCDADNTISCHPVTGACTCQPGWSGHHCNESCPVGYYGDGCQLPCTCQNGADCHSITGGCTCAPGFMGEVCAVSCAAGTYGPNCSSICSCNNGGTCSPVDGSCTCKEGWQGLDCTLPCPSGTWGLNCNESCTCANGAACSPIDGSCSCTPGWLGDTCELPCPDGTFGLNCSEHCDCSHADGCDPVTGHCCCLAGWTGIRCDSTCPPGRWGPNCSVSCSCENGGSCSPEDGSCECAPGFRGPLCQRICPPGFYGHGCAQPCPLCVHSSRPCHHISGICECLPGFSGALCNQVCAGGYFGQDCAQLCSCANNGTCSPIDGSCQCFPGWIGKDCSQACPPGFWGPACFHACSCHNGASCSAEDGACHCTPGWTGLFCTQRKPHLLASQPLRIPCCGLLATVGIVQTSREGGMQAAPGLVVPDSCPTRTEELCRGSSRPDWIQGIDKPKVLEGQGCKAAQQHFLGRTVGAYASVRMAPAVTTSVASAPAAQASPGNTVSRDVPQEPLAMGVSSYVSA

SEQ ID NO: 54179 - protein, 137 aa, Homo sapiens
MMEELNPYTKISPALGAERHSVGAVTGIMLLLFLIVVLLGLFAWHRRRQKEKGRDLAPRVSYTPAMRMTSTDYSLSASTTPWWPVMEHLARPFSQRPRTQLSNKSLDRDTAGWTPYSYVNVLDQCPGGQVPARGLLH

SEQ ID NO: 54180 - protein, 969 aa, Homo sapiens; identical to SEQ ID NO: 54177

SEQ ID NO: 54181 - protein, 1044 aa, Homo sapiens
MVLSLTGLIAFSFLQATLALNPEDPNVCSHWESYAVTVQESYAHPFDQIYYTRCTDILNWFKCTRHRISYKTAYRRGLRTMYRRRSQCCPGYYESGDFCIPLCTEECVHGRCVSPDTCHCEPGWGGPDCSSGCDSDHWGPHCSNRCQCQNGALCNPITGACVCAAGFRGWRCEELCAPGTHGKGCQLPCQCRHGASCDPRAGECLCAPGYTGVYCEELCPPGSHGAHCELRCPCQNGGTCHHITGECACPPGWTGAVCAQPCPPGTFGQNCSQDCPCHHGGQCDHVTGQCHCTAGYMGDRCQEECPFGSFGFQCSQHCDCHNGGQCSPTTGACECEPGYKGPRCQERLCPEGLHGPGCTLPCPCDADNTISCHPVTGACTCQPGWSGHHCNESCPVGYYGDGCQLPCTCQNGADCHSITGGCTCAPGFMGEVCAVSCAAGTYGPNCSSICSCNNGGTCSPVDGSCTCKEGWQGLDCTLPCPSGTWGLNCNESCTCANGAACSPIDGSCSCTPGWLGDTCELPCPDGTFGLNCSEHCDCSHADGCDPVTGHCCCLAGWTGIRCDSTCPPGRWGPNCSVSCSCENGGSCSPEDGSCECAPGFRGPLCQRICPPGFYGHGCAQPCPLCVHSSRPCHHISGICECLPGFSGALCNQVCAGGYFGQDCAQLCSCANNGTCSPIDGSCQCFPGWIGKDCSQACPPGFWGPACFHACSCHNGASCSAEDGACHCTPGWTGLFCTQRCPAAFFGKDCGRVCQCQNGASCDHISGKCTCRTGFTGQHCEQRCAPGTFGYGCQQLCECMNNSTCDHVTGTCYCSPGFKGIRCDQAALMMEELNPYTKISPALGAERHSVGAVTGIMLLLFLIVVLLGLFAWHRRRQKEKGRDLAPRVSYTPAMRMTSTDYSLSGACGMDRRQNTYIMDKGFKDYMKESVCSSSTCSLNSSENPYATIKDPPILTCKLPESSYVEMKSPVHMGSPYTDVPSLSTSNKNIYEVEPTVSVVQEGCGHNSSYIQNAYDLPRNSHIPGHYDLLPVRQSPANGPSQDKQS

SEQ ID NO: 54182 - protein, 1044 aa, Homo sapiens; identical to SEQ ID NO: 54181

SEQ ID NO: 54183 - protein, 1229 aa, Homo sapiens
MGASRDRGLAALWCLGLLGGLARVAGTHYRYLWRGCYPCHLGQAGYPVSAGDQRPDVDECRTHNGGCQHRCVNTPGSYLCECKPGFRLHTDSRTCLAINSCALGNGGCQHHCVQLTITRHRCQCRPGFQLQEDGRHCVRRSPCANRNGSCMHRCQVVRGLARCECHVGYQLAADGKACEDVDECAAGLAQCAHGCLNTQGSFKCVCHAGYELGADGRQCYRIEMEIVNSCEANNGGCSHGCSHTSAGPLCTCPRGYELDTDQRTCIDVDDCADSPCCQQVCTNNPGGYECGCYAGYRLSADGCGCEDVDECASSRGGCEHHCTNLAGSFQCSCEAGYRLHEDRRGCSPLEEPMVDLDGELPFVRPLPHIAVLQDELPQLFQDDDVGADEEEAELRGEHTLTEKFVCLDDSFGHDCSLTCDDCRNGGTCLLGLDGCDCPEGWTGLICNETCPPDTFGKNCSFSCSCQNGGTCDSVTGACRCPPGVSGTNCEDGCPKGYYGKHCRKKCNCANRGRCHRLYGACLCDPGLYGRFCHLTCPPWAFGPGCSEECQCVQPHTQSCDKRDGSCSCKAGFRGERCQAECELGYFGPGCWQACTCPVGVACDSVSGECGKRCPAGFQGEDCGQECPVGTFGVNCSSSCSCGGAPCHGVTGQCRCPPGRTGEDCEADCPEGRWGLGCQEICPACQHAARCDPETGACLCLPGFVGSRCQDVCPAGWYGPSCQTRCSCANDGHCHPATGHCSCAPGWTGFSCQRACDTGHWGPDCSHPCNCSAGHGSCDAISGLCLCEAGYVGPRCEQQCPQGHFGPGCEQRCQCQHGAACDHVSGACTCPAGWRGTFCEHACPAGFFGLDCRSACNCTAGAACDAVNGSCLCPAGRRGPRCAEKCLPRDVRAGCRHSGGCLNGGLCDPHTGRCLCPAGWTGDKCQSPCLRGWFGEACAQRCSCPPGAACHHVTGACRCPPGFTGSGCEQGCPPGRYGPGCEQLCGCLNGGSCDAATGACRCPTGFLGTDCNLTCPQGRFGPNCTHVCGCGQGAACDPVTGTCLCPPGRAGVRCERGCPQNRFGVGCEHTCSCRNGGLCHASNGSCSCGLGWTGRHCELACPPGRYGAACHLECSCHNNSTCEPATGTCRCGPGFYGQACEHRRSGATCNLDCRRGQFGPSCTLHCDCGGGADCDPVSGQCHCVDGYMGPTCREGGPLRLPENPSLAQGSAGTLPASSRPTSRSGGPARH

SEQ ID NO: 54184 - protein, 1541 aa, Homo sapiens
MSFLEEARAAGRAVVLALVLLLLPAVPVGASVPPRPLLPLQPGMPHVCAEQELTLVGRRQPCVQALSHTVPVWKAGCGWQAWCVGHERRTVYYMGYRQVYTTEARTVLRCCRGWMQQPDEEGCLSAECSASLCFHGGRCVPGSAQPCHCPPGFQGPRCQYDVDECRTHNGGCQHRCVNTPGSYLCECKPGFRLHTDSRTCLAINSCALGNGGCQHHCVQLTITRHRCQCRPGFQLQEDGRHCVRRSPCANRNGSCMHRCQVVRGLARCECHVGYQLAADGKACEDVDECAAGLAQCAHGCLNTQGSFKCVCHAGYELGADGRQCYRIEMEIVNSCEANNGGCSHGCSHTSAGPLCTCPRGYELDTDQRTCIDVDDCADSPCCQQVCTNNPGGYECGCYAGYRLSADGCGCEDVDECASSRGGCEHHCTNLAGSFQCSCEAGYRLHEDRRGCSPLEEPMVDLDGELPFVRPLPHIAVLQDELPQLFQDDDVGADEEEAELRGEHTLTEKFVCLDDSFGHDCSLTCDDCRNGGTCLLGLDGCDCPEGWTGLICNETCPPDTFGKNCSFSCSCQNGGTCDSVTGACRCPPGVSGTNCEDGCPKGYYGKHCRKKCNCANRGRCHRLYGACLCDPGLYGRFCHLTCPPWAFGPGCSEECQCVQPHTQSCDKRDGSCSCKAGFRGERCQAECELGYFGPGCWQACTCPVGVACDSVSGECGKRCPAGFQGEDCGQECPVGTFGVNCSSSCSCGGAPCHGVTGQCRCPPGRTGEDCEADCPEGRWGLGCQEICPACQHAARCDPETGACLCLPGFVGSRCQDVCPAGWYGPSCQTRCSCANDGHCHPATGHCSCAPGWTGFSCQRACDTGHWGPDCSHPCNCSAGHGSCDAISGLCLCEAGYVGPRCEQQCPQGHFGPGCEQRCQCQHGAACDHVSGACTCPAGWRGTFCEHACPAGFFGLDCRSACNCTAGAACDAVNGSCLCPAGRRGPRCAETCPAHTYGHNCSQACACFNGASCDPVHGQCHCAPGWMGPSCLQACPAGLYGDNCRHSCLCQNGGTCDPVSGHCACPEGWAGLACEKECLPRDVRAGCRHSGGCLNGGLCDPHTGRCLCPAGWTGDKCQSPCLRGWFGEACAQRCSCPPGAACHHVTGACRCPPGFTGSGCEQACPPGSFGEDCAQMCQCPGENPACHPATGTCSCAAGYHGPSCQQRCPPGRYGPGCEQLCGCLNGGSCDAATGACRCPTGFLGTDCNLTCPQGRFGPNCTHVCGCGQGAACDPVTGTCLCPPGRAGVRCERGCPQNRFGVGCEHTCSCRNGGLCHASNGSCSCGLGWTGRHCELACPPGRYGAACHLECSCHNNSTCEPATGTCRCGPGFYGQACEHPCPPGFHGAGCQGLCWCQHGAPCDPISGRCLCPAGFHGHFCERGCEPGSFGEGCHQRCDCDGGAPCDPVTGLCLCPPGRSGATCNLDCRRGQFGPSCTLHCDCGGGADCDPVSGQCHCVDGYMGPTCREGGPLRLPENPSLAQGSAGTLPASSRPTSRSGGPARH

SEQ ID NO: 54185 - protein, 2845 aa, Homo sapiens
MALGKVLAMALVLALAVLGSLSPGARAGDCKGQRQVLREAPGFVTDGAGNYSVNGNCEWLIEAPSPQHRILLDFLFLDTECTYDYLFVYDGDSPRGPLLASLSGSTRPPPIEASSGKMLLHLFSDANYNLLGFNASFRFSLCPGGCQSHGQCQPPGVCACEPGWGGPDCGLQECSAYCGSHGTCASPLGPCRCEPGFLGRACDLHLWENQGAGWWHNVSARDPAFSARIGAAGAFLSPPGLLAVFGGQDLNNALGDLVLYNFSANTWESWDLSPAPAARHSHVAVAWAGSLVLMGGELADGSLTNDVWAFSPLGRGHWELLAPPASSSSGPPGLAGHAAALVDDVWLYVSGGRTPHDLFSSGLFRFRLDSTSGGYWEQVIPAGGRPPAATGHSMVFHAPSRALLVHGGHRPSTARFSVRVNSTELFHVDRHVWTTLKGRDGLQGPRERAFHTASVLGNYMVVYGGNVHTHYQEEKCYEDGIFFYHLGCHQWVSGAELAPPGTPEGRAAPPSGRYSHVAAVLGGSVLLVAGGYSGRPRGDLMAYKVPPFVFQAPAPDYHLDYCSMYTDHSVCSRDPECSWCQGACQAAPPPGTPLGACPAASCLGLGRLLGDCQACLAFSSPTAPPRGPGTLGWCVHNESCLPRPEQARCRGEQISGTVGWWGPAPVFVTSLEACVTQSFLPGLHLLTFQQPPNTSQPDKVSIVRSTTITLTPSAETDVSLVYRGFIYPMLPGGPGGPGAEDVAVWTRAQRLHVLARMARGPDTENMEEVGRWVAHQEKETRRLQRPGSARLFPLPGRDHKYAVEIQGQLNGSAGPGHSELTLLWDRTGVPGGSEISFFFLEPYRSSSCTSYSSCLGCLADQGCGWCLTSATCHLRQGGAHCGDDGAGGSLLVLVPTLCPLCEEHRDCHACTQDPFCEWHQSTSRKGDAACSRRGRGRGALKSPEECPPLCSQRLTCEDCLANSSQCAWCQSTHTCFLFAAYLARYPHGGCRGWDDSVHSEPRCRSCDGFLTCHECLQSHECGWCGNEDNPTLGRCLQGDFSGPLGGGNCSLWVGEGLGLPVALPARWAYARCPDVDECRLGLARCHPRATCLNTPLSYECHCQRGYQGDGISHCNRTCLEDCGHGVCSGPPDFTCVCDLGWTSDLPPPTPAPGPPAPRCSRDCGCSFHSHCRKRGPGFCDECQDWTWGEHCERCRPGSFGNATGSRGCRPCQCNGHGDPRRGHCDNLSGLCFCQDHTEGAHCQLCSPGYYGDPRAGGSCFRECGGRALLTNVSSVALGSRRVGGLLPPGGGAARAGPGLSYCVWVVSATEELQPCAPGTLCPPLTLTFSPDSSTPCTLSYVLAFDGFPRFLDTGVVQSDRSLIAAFCGQRRDRPLTVQALSGLLVLHWEANGSSSWGFNASVGSARCGSGGPGSCPVPQECVPQDGAAGAGLCRCPQGWAGPHCRMALCPENCNAHTGAGTCNQSLGVCICAEGFGGPDCATKLDGGQLVWETLMDSRLSADTASRFLHRLGHTMVDGPDATLWMFGGLGLPQGLLGNLYRYSVSERRWTQMLAGAEDGGPGPSPRSFHAAAYVPAGRGAMYLLGGLTAGGVTRDFWVLNLTTLQWRQEKAPQTVELPAVAGHTLTARRGLSLLLVGGYSPENGFNQQLLEYQLATGTWVSGAQSGTPPTGLYGHSAVYHEATDSLYVFGGFRFHVELAAPSPELYSLHCPDRTWSLLAPSQGAKRDRMRNVRGSSRGLGQVPGEQPGSWGFREVRKKMALWAALAGTGGFLEEISPHLKEPRPRLFHASALLGDTMVVLGGRSDPDEFSSDVLLYQVNCNAWLLPDLTRSASVGPPMEESVAHAVAAVGSRLYISGGFGGVALGRLLALTLPPDPCRLLSSPEACNQSGACTWCHGACLSGDQAHRLGCGGSPCSPMPRSPEECRRLRTCSECLARHPRTLQPGDGEASTPRCKWCTNCPEGACIGRNGSCTSENDCRINQREVFWAGNCSEAACGAADCEQCTREGKCMWTRQFKRTGETRRILSVQPTYDWTCFSHSLLNVSPMPVESSPPLPCPTPCHLLPNCTSCLDSKGADGGWQHCVWSSSLQQCLSPSYLPLRCMAGGCGRLLRGPESCSLGCAQATQCALCLRRPHCGWCAWGGQDGGGRCMEGGLSGPRDGLTCGRPGASWAFLSCPPEDECANGHHDCNETQNCHDQPHGYECSCKTGYTMDNMTGLCRPVCAQGCVNGSCVEPDHCRCHFGFVGRNCSTECRCNRHSECAGVGARDHCLLCRNHTKGSHCEQCLPLFVGSAVGGGTCRPCHAFCRGNSHICISRKELQMSKGEPKKYSLDPEEIENWVTEGPSEDEAVCVNCQNNSYGEKCESCLQGYFLLDGKCTKCQCNGHADTCNEQDGTGCPCQNNTETGTCQGSSPSDRRDCYKYQCAKCRESFHGSPLGGQQCYRLISVEQECCLDPTSQTNCFHEPKRRALGPGRTVLFGVQPKFTNVDIRLTLDVTFGAVDLYVSTSYDTFVVRVAPDTGVHTVHIQPPPAPPPPPPPADGGPRGAGDPGGAGASSGPGAPAEPRVREVWPRGLITYVTVTEPSAVLVVRGVRDRLVITYPHEHHALKSSRFYLLLLGVGDPSGPGANGSADSQGLLFFRQDQAHIDLFVFFSVFFSCFFLFLSLCVLLWKAKQALDQRQEQRRHLQEMTKMASRPFAKVTVCFPPDPTAPASAWKPAGLPPPAFRRSEPFLAPLLLTGAGGPWGPMGGGCCPPAIPATTAGLRAGPITLEPTEDGMAGVATLLLQLPGGPHAPNGACLGSALVTLRHRLHEYCGGGGGAGGSGHGTGAGRKGLLSQDNLTSMSL

SEQ ID NO: 54186 - protein, 2778 aa, Homo sapiens
MALGKVLAMALVLALAVLGSLSPGARAGDCKGQRQVLREAPGFVTDGAGNYSVNGNCEWLIEAPSPQHRILLDFLFLDTECTYDYLFVYDGDSPRGPLLASLSGSTRPPPIEASSGKMLLHLFSDANYNLLGFNASFRFSLCPGGCQSHGQCQPPGVCACEPGWGGPDCGLQECSAYCGSHGTCASPLGPCRCEPGFLGRACDLHLWENQGAGWWHNVSARDPAFSARIGAAGAFLSPPGLLAVFGGQDLNNALGDLVLYNFSANTWESWDLSPAPAARHSHVAVAWAGSLVLMGGELADGSLTNDVWAFSPLGRGHWELLAPPASSSSGPPGLAGHAAALVDDVWLYVSGGRTPHDLFSSGLFRFRLDSTSGGYWEQVIPAGGRPPAATGHSMVFHAPSRALLVHGGHRPSTARFSVRVNSTELFHVDRHVWTTLKGRDGLQGPRERAFHTASVLGNYMVVYGGNVHTHYQEEKCYEDGIFFYHLGCHQWVSGAELAPPGTPEGRAAPPSGRYSHVAAVLGGSVLLVAGGYSGRPRGDLMAYKVPPFVFQAPAPDYHLDYCSMYTDHSVCSRDPECSWCQGACQAAPPPGTPLGACPAASCLGLGRLLGDCQACLAFSSPTAPPRGPGTLGWCVHNESCLPRPEQARCRGEQISGTVGWWGPAPVFVTSLEACVTQSFLPGLHLLTFQQPPNTSQPDKEEVGRWVAHQEKETRRLQRPGSARLFPLPGRDHKYAVEIQGQLNGSAGPGHSELTLLWDRTGVPGGSEISFFFLEPYRSSSCTSYSSCLGCLADQGCGWCLTSATCHLRQGGAHCGDDGAGGSLLVLVPTLCPLCEEHRDCHACTQDPFCEWHQSTSRKGDAACSRRGRGRGALKSPEECPPLCSQRLTCEDCLANSSQCAWCQSTHTCFLFAAYLARYPHGGCRGWDDSVHSEPRCRSCDGFLTCHECLQSHECGWCGNEDNPTLGRCLQGDFSGPLGGGNCSLWVGEGLGLPVALPARWAYARCPDVDECRLGLARCHPRATCLNTPLSYECHCQRGYQGDGISHCNRTCLEDCGHGVCSGPPDFTCVCDLGWTSDLPPPTPAPGPPAPRCSRDCGCSFHSHCRKRGPGFCDECQDWTWGEHCERCRPGSFGNATGSRGCRPCQCNGHGDPRRGHCDNLSGLCFCQDHTEGAHCQLCSPGYYGDPRAGGSCFRECGGRALLTNVSSVALGSRRVGGLLPPGGGAARAGPGLSYCVWVVSATEELQPCAPGTLCPPLTLTFSPDSSTPCTLSYVLAFDGFPRFLDTGVVQSDRSLIAAFCGQRRDRPLTVQALSGLLVLHWEANGSSSWGFNASVGSARCGSGGPGSCPVPQECVPQDGAAGAGLCRCPQGWAGPHCRMALCPENCNAHTGAGTCNQSLGVCICAEGFGGPDCATKLDGGQLVWETLMDSRLSADTASRFLHRLGHTMVDGPDATLWMFGGLGLPQGLLGNLYRYSVSERRWTQMLAGAEDGGPGPSPRSFHAAAYVPAGRGAMYLLGGLTAGGVTRDFWVLNLTTLQWRQEKAPQTVELPAVAGHTLTARRGLSLLLVGGYSPENGFNQQLLEYQLATGTWVSGAQSGTPPTGLYGHSAVYHEATDSLYVFGGFRFHVELAAPSPELYSLHCPDRTWSLLAPSQGAKRDRMRNVRGSSRGLGQVPGEQPGSWGFREVRKKMALWAALAGTGGFLEEISPHLKEPRPRLFHASALLGDTMVVLGGRSDPDEFSSDVLLYQVNCNAWLLPDLTRSASVGPPMEESVAHAVAAVGSRLYISGGFGGVALGRLLALTLPPDPCRLLSSPEACNQSGACTWCHGACLSGDQAHRLGCGGSPCSPMPRSPEECRRLRTCSECLARHPRTLQPGDGEASTPRCKWCTNCPEGACIGRNGSCTSENDCRINQREVFWAGNCSEAACGAADCEQCTREGKCMWTRQFKRTGETRRILSVQPTYDWTCFSHSLLNVSPMPVESSPPLPCPTPCHLLPNCTSCLDSKGADGGWQHCVWSSSLQQCLSPSYLPLRCMAGGCGRLLRGPESCSLGCAQATQCALCLRRPHCGWCAWGGQDGGGRCMEGGLSGPRDGLTCGRPGASWAFLSCPPEDECANGHHDCNETQNCHDQPHGYECSCKTGYTMDNMTGLCRPVCAQGCVNGSCVEPDHCRCHFGFVGRNCSTECRCNRHSECAGVGARDHCLLCRNHTKGSHCEQCLPLFVGSAVGGGTCRPCHAFCRGNSHICISRKELQMSKGEPKKYSLDPEEIENWVTEGPSEDEAVCVNCQNNSYGEKCESCLQGYFLLDGKCTKCQCNGHADTCNEQDGTGCPCQNNTETGTCQGSSPSDRRDCYKYQCAKCRESFHGSPLGGQQCYRLISVEQECCLDPTSQTNCFHEPKRRALGPGRTVLFGVQPKFTNVDIRLTLDVTFGAVDLYVSTSYDTFVVRVAPDTGVHTVHIQPPPAPPPPPPPADGGPRGAGDPGGAGASSGPGAPAEPRVREVWPRGLITYVTVTEPSAVLVVRGVRDRLVITYPHEHHALKSSRFYLLLLGVGDPSGPGANGSADSQGLLFFRQDQAHIDLFVFFSVFFSCFFLFLSLCVLLWKAKQALDQRQEQRRHLQEMTKMASRPFAKVTVCFPPDPTAPASAWKPAGLPPPAFRRSEPFLAPLLLTGAGGPWGPMGGGCCPPAIPATTAGLRAGPITLEPTEDGMAGVATLLLQLPGGPHAPNGACLGSALVTLRHRLHEYCGGGGGAGGSGHGTGAGRKGLLSQDNLTSMSL

SEQ ID NO: 54187 - protein, 439 aa, Homo sapiens
MRELPAGLLPPGREVHQCAKCRESFHGSPLGGQQCYRLISVEQECCLDPTSQTNCFHEPKRRALGPGRTVLFGVQPKFTNVDIRLTLDVTFGAVDLYVSTSYDTFVVRVAPDTGVHTVHIQPPPAPPPPPPPADGGPRGAGDPGGAGASSGPGAPAEPRVREVWPRGLITYVTVTEPSAVLVVRGVRDRLVITYPHEHHALKSSRFYLLLLGVGDPSGPGANGSADSQGLLFFRQDQAHIDLFVFFSVFFSCFFLFLSLCVLLWKAKQALDQRQEQRRHLQEMTKMASRPFAKVTVCFPPDPTAPASAWKPAGLPPPAFRRSEPFLAPLLLTGAGGPWGPMGGGCCPPAIPATTAGLRAGPITLEPTEDGMAGVATLLLQLPGGPHAPNGACLGSALVTLRHRLHEYCGGGGGAGGSGHGTGAGRKGLLSQDNLTSMSL

SEQ ID NO: 54188 - protein, 602 aa, Homo sapiens
MNGGAERAMRSLPSLGGLALLCCAAAAAAAAVASAASAGNVTGGGGAAGQVDASPGPGLRGEPSHPFPRATAPTAQAPRTGPPRATVHRPLAATSPAQSPETTPLWATAGPSSTTFQAPLGPSPTTPPAAERTSTTSQAPTRPAPTTLSTTTGPAPTTPVATTVPAPTTPRTPTPDLPSSSNSSVLPTPPATEAPSSPPPEYVCNCSVVGSLNVNRCNQTTGQCECRPGYQGLHCETCKEGFYLNYTSGLCQPCDCSPHGALSIPCNSSGKCQCKVGVIGSICDRCQDGYYGFSKNGCLPCQCNNRSASCDALTGACLNCQENSKGNHCEECKEGFYQSPDATKECLRCPCSAVTSTGSCSIKSSELEPECDQCKDGYIGPNCNKCENGYYNFDSICRKCQCHGHVDPVKTPKICKPESGECINCLHNTTGFWCENCLEGYVHDLEGNCIKKEVILPTPEGSTILVSNASLTTSVPTPVINSTFTPTTLQTIFSVSTSENSTSALADVSWTQFNIIILTVIIIVVVLLMGFVGAVYMYREYQNRKLNAPFWTIELKEDNISFSSYHDSIPNADVSGLLEDDGNEVAPNGQLTLTTPIHNYKA

SEQ ID NO: 54189 - protein, 639 aa, Homo sapiens
MRSLPSLGGLALLCCAAAAAAAAVASAASAGNVTGGGGAAGQVDASPGPGLRGEPSHPFPRATAPTAQAPRTGPPRATVHRPLAATSPAQSPETTPLWATAGPSSTTFQAPLGPSPTTPPAAERTSTTSQAPTRPAPTTLSTTTGPAPTTPVATTVPAPTTPRTPTPDLPSSSNSSVLPTPPATEAPSSPPPGHQWPVAKMPQKYLGKYACESNLKSKYLPLTQPVMNLRVSEAVKTEYVCNCSVVGSLNVNRCNQTTGQCECRPGYQGLHCETCKEGFYLNYTSGLCQPCDCSPHGALSIPCNSSGKCQCKVGVIGSICDRCQDGYYGFSKNGCLPCQCNNRSASCDALTGACLNCQENSKGNHCEECKEGFYQSPDATKECLRCPCSAVTSTGSCSIKSSELEPECDQCKDGYIGPNCNKCENGYYNFDSICRKCQCHGHVDPVKTPKICKPESGECINCLHNTTGFWCENCLEGYVHDLEGNCIKKEVILPTPEGSTILVSNASLTTSVPTPVINSTFTPTTLQTIFSVSTSENSTSALADVSWTQFNIIILTVIIIVVVLLMGFVGAVYMYREYQNRKLNAPFWTIELKEDNISFSSYHDSIPNADVSGLLEDDGNEVAPNGQLTLTTPIHNYKA

SEQ ID NO: 54190 - protein, 312 aa, Homo sapiens
MLRAPGCLLRTSVAPAAALAAALLSSLARCSLLEPRDPVASSLSPYFGTKTRYEDVNPVLLSGPEAPWRDPELLEGTCTPVQLVALIRHGTRYPTVKQIRKLRQLHGLLQARGSRDGGASSTGSRDLGAALADWPLWYADWMDGQLVEKGRQDMRQLALRLASLFPALFSRENYGRLRLITSSKHRCMDSSAAFLQGLWQHYHPGLPPPDVADMEFGPPTVNDKLMRFFDHCEKFLTEVEKNATALYHVEAFKTGPEMQNILKKVAATLQVPVNDLNAGLSQFLLQSSSSLVMQRLFFHCFLSWATSKTRNP

SEQ ID NO: 54191 - protein, 487 aa, Homo sapiens
MLRAPGCLLRTSVAPAAALAAALLSSLARCSLLEPRDPVASSLSPYFGTKTRYEDVNPVLLSGPEAPWRDPELLEGTCTPVQLVALIRHGTRYPTVKQIRKLRQLHGLLQARGSRDGGASSTGSRDLGAALADWPLWYADWMDGQLVEKGRQDMRQLALRLASLFPALFSRENYGRLRLITSSKHRCMDSSAAFLQGLWQHYHPGLPPPDVADMEFGPPTVNDKLMRFFDHCEKFLTEVEKNATALYHVEAFKTGPEMQNILKKVAATLQVPVNDLNADLIQVAFFTCSFDLAIKGVKSPWCDVFDIDDAKVLEYLNDLKQYWKRGYGYTINSRSSCTLFQDIFQHLDKAVEQKQRSQPISSPVILQFGHAETLLPLLSLMGYFKDKEPLTAYNYKKQMHRKFRSGLIVPYASNLIFVLYHCENAKTPKEQFRVQMLLNEKVLPLAYSQETVSFYEDLKNHYKDILQSCQTSEECELARANSTSDEL

SEQ ID NO: 54192 - protein, 286 aa, Homo sapiens
MCLFQLCGLVRYMEFGPPTVNDKLMRFFDHCEKFLTEVEKNATALYHVEAFKTGPEMQNILKKVAATLQVPVNDLNADLIQVAFFTCSFDLAIKGVKSPWCDVFDIDDAKVLEYLNDLKQYWKRGYGYTINSRSSCTLFQDIFQHLDKAVEQKQRSQPISSPVILQFGHAETLLPLLSLMGYFKDKEPLTAYNYKKQMHRKFRSGLIVPYASNLIFVLYHCENAKTPKEQFRVQMLLNEKVLPLAYSQETVSFYEDLKNHYKDILQSCQTSEECELARANSTSDEL

SEQ ID NO: 54193 - protein, 346 aa, Homo sapiens
MDGQLVEKGRQDMRQLALRLASLFPALFSRENYGRLRLITSSKHRCMDSSAAFLQGLWQHYHPGLPPPDVADMEFGPPTVNDKLMRFFDHCEKFLTEVEKNATALYHVEAFKTGPEMQNILKKVAATLQVPVNDLNADLIQVAFFTCSFDLAIKGVKSPWCDVFDIDDAKVLEYLNDLKQYWKRGYGYTINSRSSCTLFQDIFQHLDKAVEQKQRSQPISSPVILQFGHAETLLPLLSLMGYFKDKEPLTAYNYKKQMHRKFRSGLIVPYASNLIFVLYHCENAKTPKEQFRVQMLLNEKVLPLAYSQETVSFYEDLKNHYKDILQSCQTSEECELARANSTSDEL

SEQ ID NO: 54194 - protein, 2070 aa, Homo sapiens
MLEAIDKNRALHAAERLQTKLRERGDVANEDKLSLLKSVLQSPLFSQILSLQTSVQQLKDQVNIATSATSNIEYAHVPHLSPAVIPTLQNESFLLSPNNGNLEALTGPGIPHINGKPACDEFDQLIKNMAQGRHVEVFELLKPPSGGLGFSVVGLRSENRGELGIFVQEIQEGSVAHRDGRLKETDQILAINGQALDQTITHQQAISILQKAKDTVQLVIARGSLPQLVSPIVSRSPSAASTISAHSNPVHWQHMETIELVNDGSGLGFGIIGGKATGVIVKTILPGGVADQHGRLCSGDHILKIGDTDLAGMSSEQVAQVLRQCGNRVKLMIARGAIEERTAPTALGITLSSSPTSTPELRVDASTQKGEESETFDVELTKNVQGLGITIAGYIGDKKLEPSGIFVKSITKSSAVEHDGRIQIGDQIIAVDGTNLQGFTNQQAVEVLRHTGQTVLLTLMRRGMKQEAELMSREDVTKDADLSPVNASIIKENYEKDEDFLSSTRNTNILPTEEEGYPLLSAEIEEIEDAQKQEAALLTKWQRIMGINYEIVVAHVSKFSENSGLGISLEATVGHHFIRSVLPEGPVGHSGKLFSGDELLEVNGITLLGENHQDVVNILKELPIEVTMVCCRRTVPPTTQSELDSLDLCDIELTEKPHVDLGEFIGSSETEDPVLAMTDAGQSTEEVQAPLAMWEAGIQHIELEKGSKGLGFSILDYQDPIDPASTVIIIRSLVPGGIAEKDGRLLPGDRLMFVNDVNLENSSLEEAVEALKGAPSGTVRIGVAKPLPLSPEEGYVSAKEDSFLYPPHSCEEAGLADKPLFRADLALVGTNDADLVDESTFESPYSPENDSIYSTQASILSLHGSSCGDGLNYGSSLPSSPPKDVIENSCDPVLDLHMSLEELYTQNLLQRQDENTPSVDISMGPASGFTINDYTPANAIEQQYECENTIVWTESHLPSEVISSAELPSVLPDSAGKGSEYLLEQSSLACNAECVMLQNVSKESFERTINIAKGNSSLGMTVSANKDGLGMIVRSIIHGGAISRDGRIAIGDCILSINEESTISVTNAQARAMLRRHSLIGPDIKITYVPAEHLEEFKISLGQQSGRVMALDIFSSYTGRDIPELPEREEGEGEESELQNTAYSNWNQPRRVELWREPSKSLGISIVGGRGMGSRLSNGEVMRGIFIKHVLEDSPAGKNGTLKPGDRIVEVDGMDLRDASHEQAVEAIRKAGNPVVFMVQSIINRPRKSPLPSLLHNLYPKYNFSSTNPFADSLQINADKAPSQSESEPEKAPLCSVPPPPPSAFAEMGSDHTQSSASKISQDVDKEDEFGYSWKNIRERYGTLTGELHMIELEKGHSGLGLSLAGNKDRSRMSVFIVGIDPNGAAGKDGRLQIADELLEINGQILYGRSHQNASSIIKCAPSKVKIIFIRNKDAVNQMAVCPGNAVEPLPSNSENLQNKETEPTVTTSDAAVDLSSFKNVQHLELPKDQGGLGIAISEEDTLSGVIIKSLTEHGVAATDGRLKVGDQILAVDDEIVVGYPIEKFISLLKTAKMTVKLTIHAENPDSQAVPSAAGAASGEKKNSSQSLMVPQSGSPEPESIRNTSRSSTPAIFASDPATCPIIPGCETTIEISKGRTGLGLSIVGGSDTLLGAIIIHEVYEEGAACKDGRLWAGDQILEVNGIDLRKATHDEAINVLRQTPQRVRLTLYRDEAPYKEEEVCDTLTIELQKKPGKGLGLSIVGKRNDTGVFVSDIVKGGIADADGRLMQGDQILMVNGEDVRNATQEAVAALLKCSLGTVTLEVGRIKAGPFHSERRPSQSSQVSEGSLSSFTFPLSGSSTSESLESSSKKNALASEIQGLRTVEMKKGPTDSLGISIAGGVGSPLGDVPIFIAMMHPTGVAAQTQKLRVGDRIVTICGTSTEGMTHTQAVNLLKNASGSIEMQVVAGGDVSVVTGHQQEPASSSLSFTGLTSSSIFQDDLGPPQCKSITLERGPDGLGFSIVGGYGSPHGDLPIYVKTVFAKGAASEDGRLKRGDQIIAVNGQSLEGVTHEEAVAILKRTKGTVTLMVLS

SEQ ID NO: 54195 - protein, 2070 aa, Homo sapiens; identical to SEQ ID NO: 54194

SEQ ID NO: 54196 - protein, 2041 aa, Homo sapiens
MLEAIDKNRALHAAERLQTKLRERGDVANEDKLSLLKSVLQSPLFSQILSLQTSVQQLKDQVNIATSATSNIEYAHVPHLSPAVIPTLQNESFLLSPNNGNLEALTGPGIPHINGKPACDEFDQLIKNMAQGRHVEVFELLKPPSGGLGFSVVGLRSENRGELGIFVQEIQEGSVAHRDGRLKETDQILAINGQALDQTITHQQAISILQKAKDTVQLVIARGSLPQLVSPIVSRSPSAASTISAHSNPVHWQHMETIELVNDGSGLGFGIIGGKATGVIVKTILPGGVADQHGRLCSGDHILKIGDTDLAGMSSEQVAQVLRQCGNRVKLMIARGAIEERTAPTALGITLSSSPTSTPELRVDASTQKGEESETFDVELTKNVQGLGITIAGYIGDKKLEPSGIFVKSITKSSAVEHDGRIQIGDQIIAVDGTNLQGFTNQQAVEVLRHTGQTVLLTLMRRGMKQEAELMSREDVTKDADLSPVNASIIKENYEKDEDFLSSTRNTNILPTEEEGYPLLSAEIEEIEDAQKQEAALLTKWQRIMGINYEIVVAHVSKFSENSGLGISLEATVGHHFIRSVLPEGPVGHSGKLFSGDELLEVNGITLLGENHQDVVNILKELPIEVTMVCCRRTVPPTTQSELDSLDLCDIELTEKPHVDLGEFIGSSETEDPVLAMTDAGQSTEEVQAPLAMWEAGIQHIELEKGSKGLGFSILDYQDPIDPASTVIIIRSLVPGGIAEKDGRLLPGDRLMFVNDVNLENSSLEEAVEALKGAPSGTVRIGVAKPLPLSPEEGYVSAKEDSFLYPPHSCEEAGLADKPLFRADLALVGTNDADLVDESTFESPYSPENDSIYSTQASILSLHGSSCGDGLNYGSSLPSSPPKDVIENSCDPVLDLHMSLEELYTQNLLQRQDENTPSVDISMGPASGFTINDYTPANAIEQQYECENTIVWTESHLPSEVISSAELPSVLPDSAGKGSEYLLEQSSLACNAECVMLQNVSKESFERTINIAKGNSSLGMTVSANKDGLGMIVRSIIHGGAISRDGRIAIGDCILSINEESTISVTNAQARAMLRRHSLIGPDIKITYVPAEHLEEFKISLGQQSGRVMALDIFSSYTGRDIPELPEREEGEGEESELQNTAYSNWNQPRRVELWREPSKSLGISIVGGRGMGSRLSNGEVMRGIFIKHVLEDSPAGKNGTLKPGDRIVEVDGMDLRDASHEQAVEAIRKAGNPVVFMVQSIINRPRKSPLPSLLHNLYPKYNFSSTNPFADSLQINADKAPSQSESEPEKAPLCSVPPPPPSAFAEMGSDHTQSSASKISQDVDKEDEFGYSWKNIRERYGTLTGELHMIELEKGHSGLGLSLAGNKDRSRMSVFIVGIDPNGAAGKDGRLQIADELLEINGQILYGRSHQNASSIIKCAPSKVKIIFIRNKDAVNQMAVCPGNAVEPLPSNSENLQNKETEPTVTTSDAAVDLSSFKNVQHLELPKDQGGLGIAISEEDTLSGVIIKSLTEHGVAATDGRLKVGDQILAVDDEIVVGYPIEKFISLLKTAKMTVKLTIHAENPDSQAVPSAAGAASGEKKNSSQSLMVPQSGSPEPESIRNTSRSSTPAIFASDPATCPIIPGCETTIEISKGRTGLGLSIVGGSDTLLGAIIIHEVYEEGAACKDGRLWAGDQILEVNGIDLRKATHDEAINVLRQTPQRVRLTLYRDEAPYKEEEVCDTLTIELQKKPGKGLGLSIVGKRNDTGVFVSDIVKGGIADADGRLMQGDQILMVNGEDVRNATQEAVAALLKVSEGSLSSFTFPLSGSSTSESLESSSKKNALASEIQGLRTVEMKKGPTDSLGISIAGGVGSPLGDVPIFIAMMHPTGVAAQTQKLRVGDRIVTICGTSTEGMTHTQAVNLLKNASGSIEMQVVAGGDVSVVTGHQQEPASSSLSFTGLTSSSIFQDDLGPPQCKSITLERGPDGLGFSIVGGYGSPHGDLPIYVKTVFAKGAASEDGRLKRGDQIIAVNGQSLEGVTHEEAVAILKRTKGTVTLMVLS

SEQ ID NO: 54197 - protein, 1950 aa, Homo sapiens
MLEAIDKNRALHAAERLQTKLRERGDVANEDKLSLLKSVLQSPLFSQILSLQTSVQQLKDQVNIATSATSNIEYAHVPHLSPAVIPTLQNESFLLSPNNGNLEALTGPGIPHINGKPACDEFDQLIKNMAQGRHVEVFELLKPPSGGLGFSVVGLRSENRGELGIFVQEIQEGSVAHRDGRLKETDQILAINGQALDQTITHQQAISILQKAKDTVQLVIARGSLPQLVSPIVSRSPSAASTISAHSNPVHWQHMETIELVNDGSGLGFGIIGGKATGVIVKTILPGGVADQHGRLCSGDHILKIGDTDLAGMSSEQVAQVLRQCGNRVKLMIARGAIEERTAPTALGITLSSSPTSTPELRVDASTQKGEESETFDVELTKNVQGLGITIAGYIGDKKLEPSGIFVKSITKSSAVEHDGRIQIGDQIIAVDGTNLQGFTNQQAVEVLRHTGQTVLLTLMRRGMKQEAELMSREDVTKDADLSPVNASIIKENYEKDEDFLSSTRNTNILPTEEEGYPLLSAEIEEIEDAQKQEAALLTKWQRIMGINYEIVVAHVSKFSENSGLGISLEATVGHHFIRSVLPEGPVGHSGKLFSGDELLEVNGITLLGENHQDVVNILKELPIEVTMVCCRRTVPPTTQSELDSLGIQHIELEKGSKGLGFSILDYQDPIDPASTVIIIRSLVPGGIAEKDGRLLPGDRLMFVNDVNLENSSLEEAVEALKGAPSGTVRIGVAKPLPLSPEEGYVSAKEDSFLYPPHSCEEAGLADKPLFRADLALVGTNDADLVDESTFESPYSPENDSIYSTQASILSLHGSSCGDGLNYGSSLPSSPPKDVIENSCDPVLDLHMSLEELYTQNLLQRQDENTPSVDISMGPASGFTINDYTPANAIEQQYECENTIVWTESHLPSEVISSAELPSVLPDSAGKGSEYLLEQSSLACNAECVMLQNVSKESFERTINIAKGNSSLGMTVSANKDGLGMIVRSIIHGGAISRDGRIAIGDCILSINEESTISVTNAQARAMLRRHSLIGPDIKITYVPAEHLEEFKISLGQQSGRVMALDIFSSYTGRDIPELPEREEGEGEESELQNTAYSNWNQPRRVELWREPSKSLGISIVGGRGMGSRLSNGEVMRGIFIKHVLEDSPAGKNGTLKPGDRIVEAPSQSESEPEKAPLCSVPPPPPSAFAEMGSDHTQSSASKISQDVDKEDEFGYSWKNIRERYGTLTGELHMIELEKGHSGLGLSLAGNKDRSRMSVFIVGIDPNGAAGKDGRLQIADELLEINGQILYGRSHQNASSIIKCAPSKVKIIFIRNKDAVNQMAVCPGNAVEPLPSNSENLQNKETEPTVTTSDAAVDLSSFKNVQHLELPKDQGGLGIAISEEDTLSGVIIKSLTEHGVAATDGRLKVGDQILAVDDEIVVGYPIEKFISLLKTAKMTVKLTIHAENPDSQAVPSAAGAASGEKKNSSQSLMVPQSGSPEPESIRNTSRSSTPAIFASDPATCPIIPGCETTIEISKGRTGLGLSIVGGSDTLLGAIIIHEVYEEGAACKDGRLWAGDQILEVNGIDLRKATHDEAINVLRQTPQRVRLTLYRDEAPYKEEEVCDTLTIELQKKPGKGLGLSIVGKRNDTGVFVSDIVKGGIADADGRLMQGDQILMVNGEDVRNATQEAVAALLKCSLGTVTLEVGRIKAGPFHSERRPSQSSQVSEGSLSSFTFPLSGSSTSESLESSSKKNALASEIQGLRTVEMKKGPTDSLGISIAGGVGSPLGDVPIFIAMMHPTGVAAQTQKLRVGDRIVTICGTSTEGMTHTQAVNLLKNASGSIEMQVVAGGDVSVVTGHQQEPASSSLSFTGLTSSSIFQDDLGPPQCKSITLERGPDGLGFSIVGGYGSPHGDLPIYVKTVFAKGAASEDGRLKRGDQIIAVNGQSLEGVTHEEAVAILKRTKGTVTLMVLS

SEQ ID NO: 54198 - protein, 304 aa, Homo sapiens
MQGDQILMVNGEDVRNATQEAVAALLKCSLGTVTLEVGRIKAGPFHSERRPSQSSQVSEGSLSSFTFPLSGSSTSESLESSSKKNALASEIQGLRTVEMKKGPTDSLGISIAGGVGSPLGDVPIFIAMMHPTGVAAQTQKLRVGDRIVTICGTSTEGMTHTQAVNLLKNASGSIEMQVVAGGDVSVVTGHQQEPASSSLSFTGLTSSSIFQDDLGPPQCKSITLERGPDGLGFSIVGGYGSPHGDLPIYVKTVFAKGAASEDGRLKRGDQIIAVNGQSLEGVTHEEAVAILKRTKGTVTLMVLS

SEQ ID NO: 54199 - protein, 2041 aa, Homo sapiens; identical to SEQ ID NO: 54196

SEQ ID NO: 54200 - protein, 2037 aa, Homo sapiens
MLEAIDKNRALHAAERLQTKLRERGDVANEDKLSLLKSVLQSPLFSQILSLQTSVQQLKDQVNIATSATSNIEYAHVPHLSPAVIPTLQNESFLLSPNNGNLEALTGPGIPHINGKPACDEFDQLIKNMAQGRHVEVFELLKPPSGGLGFSVVGLRSENRGELGIFVQEIQEGSVAHRDGRLKETDQILAINGQALDQTITHQQAISILQKAKDTVQLVIARGSLPQLVSPIVSRSPSAASTISAHSNPVHWQHMETIELVNDGSGLGFGIIGGKATGVIVKTILPGGVADQHGRLCSGDHILKIGDTDLAGMSSEQVAQVLRQCGNRVKLMIARGAIEERTAPTALGITLSSSPTSTPELRVDASTQKGEESETFDVELTKNVQGLGITIAGYIGDKKLEPSGIFVKSITKSSAVEHDGRIQIGDQIIAVDGTNLQGFTNQQAVEVLRHTGQTVLLTLMRRGMKQEAELMSREDVTKDADLSPVNASIIKENYEKDEDFLSSTRNTNILPTEEEGYPLLSAEIEEIEDAQKQEAALLTKWQRIMGINYEIVVAHVSKFSENSGLGISLEATVGHHFIRSVLPEGPVGHSGKLFSGDELLEVNGITLLGENHQDVVNILKELPIEVTMVCCRRTVPPTTQSELDSLDLCDIELTEKPHVDLGEFIGSSETEDPVLAMTDAGQSTEEVQAPLAMWEAGIQHIELEKGSKGLGFSILDYQDPIDPASTVIIIRSLVPGGIAEKDGRLLPGDRLMFVNDVNLENSSLEEAVEALKGAPSGTVRIGVAKPLPLSPEEGYVSAKEDSFLYPPHSCEEAGLADKPLFRADLALVGTNDADLVDESTFESPYSPENDSIYSTQASILSLHGSSCGDGLNYGSSLPSSPPKDVIENSCDPVLDLHMSLEELYTQNLLQRQDENTPSVDISMGPASGFTINDYTPANAIEQQYECENTIVWTESHLPSEVISSAELPSVLPDSAGKGSEYLLEQSSLACNAECVMLQNVSKESFERTINIAKGNSSLGMTVSANKDGLGMIVRSIIHGGAISRDGRIAIGDCILSINEESTISVTNAQARAMLRRHSLIGPDIKITYVPAEHLEEFKISLGQQSGRVMALDIFSSYTGRDIPELPEREEGEGEESELQNTAYSNWNQPRRVELWREPSKSLGISIVGGRGMGSRLSNGEVMRGIFIKHVLEDSPAGKNGTLKPGDRIVEVDGMDLRDASHEQAVEAIRKAGNPVVFMVQSIINRPRAPSQSESEPEKAPLCSVPPPPPSAFAEMGSDHTQSSASKISQDVDKEDEFGYSWKNIRERYGTLTGELHMIELEKGHSGLGLSLAGNKDRSRMSVFIVGIDPNGAAGKDGRLQIADELLEINGQILYGRSHQNASSIIKCAPSKVKIIFIRNKDAVNQMAVCPGNAVEPLPSNSENLQNKETEPTVTTSDAAVDLSSFKNVQHLELPKDQGGLGIAISEEDTLSGVIIKSLTEHGVAATDGRLKVGDQILAVDDEIVVGYPIEKFISLLKTAKMTVKLTIHAENPDSQAVPSAAGAASGEKKNSSQSLMVPQSGSPEPESIRNTSRSSTPAIFASDPATCPIIPGCETTIEISKGRTGLGLSIVGGSDTLLGAIIIHEVYEEGAACKDGRLWAGDQILEVNGIDLRKATHDEAINVLRQTPQRVRLTLYRDEAPYKEEEVCDTLTIELQKKPGKGLGLSIVGKRNDTGVFVSDIVKGGIADADGRLMQGDQILMVNGEDVRNATQEAVAALLKCSLGTVTLEVGRIKAGPFHSERRPSQSSQVSEGSLSSFTFPLSGSSTSESLESSSKKNALASEIQGLRTVEMKKGPTDSLGISIAGGVGSPLGDVPIFIAMMHPTGVAAQTQKLRVGDRIVTICGTSTEGMTHTQAVNLLKNASGSIEMQVVAGGDVSVVTGHQQEPASSSLSFTGLTSSSIFQDDLGPPQCKSITLERGPDGLGFSIVGGYGSPHGDLPIYVKTVFAKGAASEDGRLKRGDQIIAVNGQSLEGVTHEEAVAILKRTKGTVTLMVLS

SEQ ID NO: 54201 - protein, 2008 aa, Homo sapiens
MLEAIDKNRALHAAERLQTKLRERGDVANEDKLSLLKSVLQSPLFSQILSLQTSVQQLKDQVNIATSATSNIEYAHVPHLSPAVIPTLQNESFLLSPNNGNLEALTGPGIPHINGKPACDEFDQLIKNMAQGRHVEVFELLKPPSGGLGFSVVGLRSENRGELGIFVQEIQEGSVAHRDGRLKETDQILAINGQALDQTITHQQAISILQKAKDTVQLVIARGSLPQLVSPIVSRSPSAASTISAHSNPVHWQHMETIELVNDGSGLGFGIIGGKATGVIVKTILPGGVADQHGRLCSGDHILKIGDTDLAGMSSEQVAQVLRQCGNRVKLMIARGAIEERTAPTALGITLSSSPTSTPELRVDASTQKGEESETFDVELTKNVQGLGITIAGYIGDKKLEPSGIFVKSITKSSAVEHDGRIQIGDQIIAVDGTNLQGFTNQQAVEVLRHTGQTVLLTLMRRGMKQEAELMSREDVTKDADLSPVNASIIKENYEKDEDFLSSTRNTNILPTEEEGYPLLSAEIEEIEDAQKQEAALLTKWQRIMGINYEIVVAHVSKFSENSGLGISLEATVGHHFIRSVLPEGPVGHSGKLFSGDELLEVNGITLLGENHQDVVNILKELPIEVTMVCCRRTVPPTTQSELDSLDLCDIELTEKPHVDLGEFIGSSETEDPVLAMTDAGQSTEEVQAPLAMWEAGIQHIELEKGSKGLGFSILDYQDPIDPASTVIIIRSLVPGGIAEKDGRLLPGDRLMFVNDVNLENSSLEEAVEALKGAPSGTVRIGVAKPLPLSPEEGYVSAKEDSFLYPPHSCEEAGLADKPLFRADLALVGTNDADLVDESTFESPYSPENDSIYSTQASILSLHGSSCGDGLNYGSSLPSSPPKDVIENSCDPVLDLHMSLEELYTQNLLQRQDENTPSVDISMGPASGFTINDYTPANAIEQQYECENTIVWTESHLPSEVISSAELPSVLPDSAGKGSEYLLEQSSLACNAECVMLQNVSKESFERTINIAKGNSSLGMTVSANKDGLGMIVRSIIHGGAISRDGRIAIGDCILSINEESTISVTNAQARAMLRRHSLIGPDIKITYVPAEHLEEFKISLGQQSGRVMALDIFSSYTGRDIPELPEREEGEGEESELQNTAYSNWNQPRRVELWREPSKSLGISIVGGRGMGSRLSNGEVMRGIFIKHVLEDSPAGKNGTLKPGDRIVEVDGMDLRDASHEQAVEAIRKAGNPVVFMVQSIINRPRAPSQSESEPEKAPLCSVPPPPPSAFAEMGSDHTQSSASKISQDVDKEDEFGYSWKNIRERYGTLTGELHMIELEKGHSGLGLSLAGNKDRSRMSVFIVGIDPNGAAGKDGRLQIADELLEINGQILYGRSHQNASSIIKCAPSKVKIIFIRNKDAVNQMAVCPGNAVEPLPSNSENLQNKETEPTVTTSDAAVDLSSFKNVQHLELPKDQGGLGIAISEEDTLSGVIIKSLTEHGVAATDGRLKVGDQILAVDDEIVVGYPIEKFISLLKTAKMTVKLTIHAENPDSQAVPSAAGAASGEKKNSSQSLMVPQSGSPEPESIRNTSRSSTPAIFASDPATCPIIPGCETTIEISKGRTGLGLSIVGGSDTLLGAIIIHEVYEEGAACKDGRLWAGDQILEVNGIDLRKATHDEAINVLRQTPQRVRLTLYRDEAPYKEEEVCDTLTIELQKKPGKGLGLSIVGKRNDTGVFVSDIVKGGIADADGRLMQGDQILMVNGEDVRNATQEAVAALLKVSEGSLSSFTFPLSGSSTSESLESSSKKNALASEIQGLRTVEMKKGPTDSLGISIAGGVGSPLGDVPIFIAMMHPTGVAAQTQKLRVGDRIVTICGTSTEGMTHTQAVNLLKNASGSIEMQVVAGGDVSVVTGHQQEPASSSLSFTGLTSSSIFQDDLGPPQCKSITLERGPDGLGFSIVGGYGSPHGDLPIYVKTVFAKGAASEDGRLKRGDQIIAVNGQSLEGVTHEEAVAILKRTKGTVTLMVLS

SEQ ID NO: 54202 - protein, 362 aa, Homo sapiens
METDAPQPGLASPDSPHDPCKMFIGGLSWQTTQEGLREYFGQFGEVKECLVMRDPLTKRSRGFGFVTFMDQAGVDKVLAQSRHELDSKTIDPKVAFPRRAQPKMVTRTKKIFVGGLSVNTTVEDVKQYFEQFGKVDDAMLMFDKTTNRHRGFGFVTFESEDIVEKVCEIHFHEINNKMVECKKAQPKEVMSPTGSARGRSRVMPYGMDAFMLGIGMLGYPGFQATTYASRSYTGLAPGYTYQFPEFRVERTPLPSAPVLPELTAIPLTAYGPMAAAAAAAAVVRGTGSHPWTMAPPPGSTPSRTGGFLGTTSPGPMAELYGAANQDSGVSSYISAASPAPSTGFGHSLGGPLIATAFTNGYH

SEQ ID NO: 54203 - protein, 208 aa, Homo sapiens [sequence omitted]

SEQ ID NO: 54204 - protein, 208 aa, Homo sapiens [sequence omitted]

SEQ ID NO: 54205 - protein, 132 aa, Homo sapiens
MREQYMRTGDGFLIVYSVTDKASFEHVDRFHQLILRVKDRESFPMILVANKVDLMHLRKITREQGKEMATKHNIPYIETSAKDPPLNVDKAFHDLVRVIRQQIPEKSQKKKKKTKWRGDRATGTHKLQCVIL

SEQ ID NO: 54206 - protein, 208 aa, Homo sapiens [sequence omitted]

SEQ ID NO: 54207 - protein, 23 aa, Homo sapiens
MATSAVPSDNLPTYKLVVVGDGG

SEQ ID NO: 54208 - protein, 875 aa, Homo sapiens
MRELVNIPLVHILTLVAFSGTEKLPKAPVITTPLETVDALVEEVATFMCAVESYPQPEISWTRNKILIKLFDTRYSIRENGQLLTILSVEDSDDGIYCCTANNGVGGAVESCGALQVKMKPKITRPPINVKIIEGLKAVLPCTTMGNPKPSVSWIKGDSPLRENSRIAVLESGSLRIHNVQKEDAGQYRCVAKNSLGTAYSKVVKLEVEVFARILRAPESHNVTFGSFVTLHCTATGIPVPTITWIENGNAVSSGSIQESVKDRVIDSRLQLFITKPGLYTCIATNKHGEKFSTAKAAATISIAEMLFISSFSKPQKDNKGYCAQYRGEVCNAVLAKDALVFLNTSYADPEEAQELLVHTAWNELKVVSPVCRPAAEALLCNHIFQECSPGVVPTPIPICREYCLAVKELFCAKEWLVMEEKTHRGLYRSEMHLLSVPECSKLPSMHWDPTACARLPHLDYNKENLKTFPPMTSSKPSVDIPNLPSSSSSSFSVSPTYSMTVIISIMSSFAIFVLLTITTLYCCRRRKQWKNKKRESAAVTLTTLPSELLLDRLHPNPMYQRMPLLLNPKLLSLEYPRNNIEYVRDIGEGAFGRVFQARAPGLLPYEPFTMVAVKMLKEEASADMQADFQREAALMAEFDNPNIVKLLGVCAVGKPMCLLFEYMAYGDLNEFLRSMSPHTVCSLSHSDLSMRAQVSSPGPPPLSCAEQLCIARQVAAGMAYLSERKFVHRDLATRNCLVGENMVVKIADFGLSRNIYSADYYKANENDAIPIRWMPPESIFYNRYTTESDVWAYGVVLWEIFSYGLQPYYGMAHEEVIYYVRDGNILSCPENCPVELYNLMRLCWSKLPADRPSFTSIHRILERMCERAEGTVSV

SEQ ID NO: 54209 - protein, 189 aa, Homo sapiens [sequence omitted]

SEQ ID NO: 54210 - protein, 116 aa, Homo sapiens
MKPKITRPPINVKIIEGLKAVLPCTTMGNPKPSVSWIKGDSPLRENSRIAVLESGSLRIHNVQKEDAGQYRCVAKNSLGTAYSKVVKLEVEGAKGIHTQFVASALQLRSFLSCPQI

SEQ ID NO: 54211 - protein, 116 aa, Homo sapiens; identical to SEQ ID NO: 54210

SEQ ID NO: 54212 - protein, 189 aa, Homo sapiens [sequence omitted]

SEQ ID NO: 54213 - protein, 783 aa, Homo sapiens [sequence omitted]

SEQ ID NO: 54214 - protein, 869 aa, Homo sapiens
MRELVNIPLVHILTLVAFSGTEKLPKAPVITTPLETVDALVEEVATFMCAVESYPQPEISWTRNKILIKLFDTRYSIRENGQLLTILSVEDSDDGIYCCTANNGVGGAVESCGALQVKMKPKITRPPINVKIIEGLKAVLPCTTMGNPKPSVSWIKGDSPLRENSRIAVLESGSLRIHNVQKEDAGQYRCVAKNSLGTAYSKVVKLEVEVFARILRAPESHNVTFGSFVTLHCTATGIPVPTITWIENGNAVSSGSIQESVKDRVIDSRLQLFITKPGLYTCIATNKHGEKFSTAKAAATISIAEWSKPQKDNKGYCAQYRGEVCNAVLAKDALVFLNTSYADPEEAQELLVHTAWNELKVVSPVCRPAAEALLCNHIFQECSPGVVPTPIPICREYCLAVKELFCAKEWLVMEEKTHRGLYRSEMHLLSVPECSKLPSMHWDPTACARLPHLDYNKENLKTFPPMTSSKPSVDIPNLPSSSSSSFSVSPTYSMTVIISIMSSFAIFVLLTITTLYCCRRRKQWKNKKRESAAVTLTTLPSELLLDRLHPNPMYQRMPLLLNPKLLSLEYPRNNIEYVRDIGEGAFGRVFQARAPGLLPYEPFTMVAVKMLKEEASADMQADFQREAALMAEFDNPNIVKLLGVCAVGKPMCLLFEYMAYGDLNEFLRSMSPHTVCSLSHSDLSMRAQVSSPGPPPLSCAEQLCIARQVAAGMAYLSERKFVHRDLATRNCLVGENMVVKIADFGLSRNIYSADYYKANENDAIPIRWMPPESIFYNRYTTESDVWAYGVVLWEIFSYGLQPYYGMAHEEVIYYVRDGNILSCPENCPVELYNLMRLCWSKLPADRPSFTSIHRILERMCERAEGTVSV

SEQ ID NO: 54215 - protein, 867 aa, Homo sapiens
MRELVNIPLVHILTLVAFSGTEKLPKAPVITTPLETVDALVEEVATFMCAVESYPQPEISWTRNKILIKLFDTRYSIRENGQLLTILSVEDSDDGIYCCTANNGVGGAVESCGALQVKMKPKITRPPINVKIIEGLKAVLPCTTMGNPKPSVSWIKGDSPLRENSRIAVLESGSLRIHNVQKEDAGQYRCVAKNSLGTAYSKVVKLEVEVFARILRAPESHNVTFGSFVTLHCTATGIPVPTITWIENGNAVSSGSIQESVKDRVIDSRLQLFITKPGLYTCIATNKHGEKFSTAKAAATISIAEMLFISSFSKPQKDNKGYCAQYRGEVCNAVLAKDALVFLNTSYADPEEAQELLVHTAWNELKVVSPVCRPAAEALLCNHIFQECSPGVVPTPIPICREYCLAVKELFCAKEWLVMEEKTHRGLYRSEMHLLSVPECSKLPSMHWDPTACARLPHLAFPPMTSSKPSVDIPNLPSSSSSSFSVSPTYSMTVIISIMSSFAIFVLLTITTLYCCRRRKQWKNKKRESAAVTLTTLPSELLLDRLHPNPMYQRMPLLLNPKLLSLEYPRNNIEYVRDIGEGAFGRVFQARAPGLLPYEPFTMVAVKMLKEEASADMQADFQREAALMAEFDNPNIVKLLGVCAVGKPMCLLFEYMAYGDLNEFLRSMSPHTVCSLSHSDLSMRAQVSSPGPPPLSCAEQLCIARQVAAGMAYLSERKFVHRDLATRNCLVGENMVVKIADFGLSRNIYSADYYKANENDAIPIRWMPPESIFYNRYTTESDVWAYGVVLWEIFSYGLQPYYGMAHEEVIYYVRDGNILSCPENCPVELYNLMRLCWSKLPADRPSFTSIHRILERMCERAEGTVSV

SEQ ID NO: 54216 - protein, 869 aa, Homo sapiens
MRELVNIPLVHILTLVAFSGTEKLPKAPVITTPLETVDALVEEVATFMCAVESYPQPEISWTRNKILIKLFDTRYSIRENGQLLTILSVEDSDDGIYCCTANNGVGGAVESCGALQVKMKPKITRPPINVKIIEGLKAVLPCTTMGNPKPSVSWIKGDSPLRENSRIAVLESGSLRIHNVQKEDAGQYRCVAKNSLGTAYSKVVKLEVEVFARILRAPESHNVTFGSFVTLHCTATGIPVPTITWIENGNAVSSGSIQESVKDRVIDSRLQLFITKPGLYTCIATNKHGEKFSTAKAAATISIAAFSKPQKDNKGYCAQYRGEVCNAVLAKDALVFLNTSYADPEEAQELLVHTAWNELKVVSPVCRPAAEALLCNHIFQECSPGVVPTPIPICREYCLAVKELFCAKEWLVMEEKTHRGLYRSEMHLLSVPECSKLPSMHWDPTACARLPHLDYNKENLKTFPPMTSSKPSVDIPNLPSSSSSSFSVSPTYSMTVIISIMSSFAIFVLLTITTLYCCRRRKQWKNKKRESAAVTLTTLPSELLLDRLHPNPMYQRMPLLLNPKLLSLEYPRNNIEYVRDIGEGAFGRVFQARAPGLLPYEPFTMVAVKMLKEEASADMQADFQREAALMAEFDNPNIVKLLGVCAVGKPMCLLFEYMAYGDLNEFLRSMSPHTVCSLSHSDLSMRAQVSSPGPPPLSCAEQLCIARQVAAGMAYLSERKFVHRDLATRNCLVGENMVVKIADFGLSRNIYSADYYKANENDAIPIRWMPPESIFYNRYTTESDVWAYGVVLWEIFSYGLQPYYGMAHEEVIYYVRDGNILSCPENCPVELYNLMRLCWSKLPADRPSFTSIHRILERMCERAEGTVSV

SEQ ID NO: 54217 - protein, 783 aa, Homo sapiens
MRELVNIPLVHILTLVAFSGTEKLPKAPVITTPLETVDALVEEVATFMCAVESYPQPEISWTRNKILIKLFDTRYSIRENGQLLTILSVEDSDDGIYCCTANNGVGGAVESCGALQVKMKPKITRPPINVKIIEGLKAVLPCTTMGNPKPSVSWIKGDSPLRENSRIAVLESGSLRIHNVQKEDAGQYRCVAKNSLGTAYSKVVKLEVEEESEPEQDTKVFARILRAPESHNVTFGSFVTLHCTATGIPVPTITWIENGNAVSSGSIQESVKDRVIDSRLQLFITKPGLYTCIATNKHGEKFSTAKAAATISIAAWKKYCLAVKELFCAKEWLVMEEKTHRGLYRSEMHLLSVPECSKLPSMHWDPTACARLPHLAFPPMTSSKPSVDIPNLPSSSSSSFSVSPTYSMTVIISIMSSFAIFVLLTITTLYCCRRRKQWKNKKRESAAVTLTTLPSELLLDRLHPNPMYQRMPLLLNPKLLSLEYPRNNIEYVRDIGEGAFGRVFQARAPGLLPYEPFTMVAVKMLKEEASADMQADFQREAALMAEFDNPNIVKLLGVCAVGKPMCLLFEYMAYGDLNEFLRSMSPHTVCSLSHSDLSMRAQVSSPGPPPLSCAEQLCIARQVAAGMAYLSERKFVHRDLATRNCLVGENMVVKIADFGLSRNIYSADYYKANENDAIPIRWMPPESIFYNRYTTESDVWAYGVVLWEIFSYGLQPYYGMAHEEVIYYVRDGNILSCPENCPVELYNLMRLCWSKLPADRPSFTSIHRILERMCERAEGTVSV

SEQ ID NO: 54218 - protein, 388 aa, Homo sapiens
MAVSVTPIRDTKWLTLEVCREFQRGTCSRPDTECKFAHPSKSCQVENGRVIACFDSLKGRCSRENCKYLHPPPHLKTQLEINGRNNLIQQKNMAMLAQQMQLANAMMPGAPLQPVPMFSVAPSLATNASAAAFNPYLGPVSPSLVPAEILPTAPMLVTGNPGVPVPAAAAAAAQKLMRTDRLEVCREYQRGNCNRGENDCRFAHPADSTMIDTNDNTVTVCMDYIKGRCSREKCKYFHPPAHLQAKIKAAQYQVNQAAAAQAAATAAAMTQSAVKSLKRPLEATFDLGIPQAVLPPLPKRPALEKTNGATAVFNTGIFQYQQALANMQLQQHTAFLPPVPMVHGATPATVSAATTSATSVPFAATATANQIPIISAEHLTSHKYVTQM

SEQ ID NO: 54219 - protein, 302 aa, Homo sapiens
MAVSVTPIRDTKWLTLEVCREFQRGTCSRPDTECKFAHPSKSCQVENGRVIACFDSLKGRCSRENCKYLHPPPHLKTQLEINGRNNLIQQKNMAMLAQQMQLANAMMPGAPLQPVVCREYQRGNCNRGENDCRFAHPADSTMIDTNDNTVTVCMDYIKGRCSREKCKYFHPPAHLQAKIKAAQYQVNQAAAAQAAATAAAMGIPQAVLPPLPKRPALEKTNGATAVFNTGIFQYQQALANMQLQQHTAFLPPVPMVHGATPATVSAATTSATSVPFAATATANQIPIISAEHLTSHKYVTQM

SEQ ID NO: 54220 - protein, 340 aa, Homo sapiens
MAVSVTPIRDTKWLTLEVCREFQRGTCSRPDTECKFAHPSKSCQVENGRVIACFDSLKGRCSRENCKYLHPPPHLKTQLEINGRNNLIQQKNMAMLAQQMQLANAMMPGAPLQPVPMFSVAPSLATNASAAAFNPYLGPVSPSLVPAEILPTAPMLVTGNPGVPVPAAAAAAAQKLMRTDRLEVCREYQRGNCNRGENDCRFAHPADSTMIDTNDNTVTVCMDYIKGRCSREKCKYFHPPAHLQAKIKAAQYQVNQAAAAQAAATAAAMFPWCTVLRQPLCPQQQHLPQVFPSLQQPQPTSPILDASTLLGATSCPAAAGKMIPIISAEHLTSHKYVTQM

SEQ ID NO: 54221 - protein, 382 aa, Homo sapiens
MAVSVTPIRDTKWLTLEVCREFQRGTCSRPDTECKFAHPSKSCQVENGRVIACFDSLKGRCSRENCKYLHPPPHLKTQLEINGRNNLIQQKNMAMLAQQMQLANAMMPGAPLQPVPMFSVAPSLATNASAAAFNPYLGPVSPSLVPAEILPTAPMLVTGNPGVPVPAAAAAAAQKLMRTDRLEVCREYQRGNCNRGENDCRFAHPADSTMIDTNDNTVTVCMDYIKGRCSREKCKYFHPPAHLQAKIKAAQYQVNQAAAAQAAATAAAMGIPQAVLPPLPKRPALEKTNGATAVFNTGIFQYQQALANMQLQQHTAFLPPGSILCMTPATSVVPMVHGATPATVSAATTSATSVPFAATATANQIPIISAEHLTSHKYVTQM

SEQ ID NO: 54222 - protein, 370 aa, Homo sapiens
MAVSVTPIRDTKWLTLEVCREFQRGTCSRPDTECKFAHPSKSCQVENGRVIACFDSLKGRCSRENCKYLHPPPHLKTQLEINGRNNLIQQKNMAMLAQQMQLANAMMPGAPLQPVPMFSVAPSLATNASAAAFNPYLGPVSPSLVPAEILPTAPMLVTGNPGVPVPAAAAAAAQKLMRTDRLEVCREYQRGNCNRGENDCRFAHPADSTMIDTNDNTVTVCMDYIKGRCSREKCKYFHPPAHLQAKIKAAQYQVNQAAAAQAAATAAAMGIPQAVLPPLPKRPALEKTNGATAVFNTGIFQYQQALANMQLQQHTAFLPPVPMVHGATPATVSAATTSATSVPFAATATANQIPIISAEHLTSHKYVTQM

SEQ ID NO: 54223 - protein, 342 aa, Homo sapiens
MAVSVTPIRDTKWLTLEVCREFQRGTCSRPDTECKFAHPSKSCQVENGRVIACFDSLKGRCSRENCKYLHPPPHLKTQLEINGRNNLIQQKNMAMLAQQMQLANAMMPGAPLQPVPMFSVAPSLATNASAAAFNPYLGPVSPSLVPAEILPTAPMLVTGNPGVPVPAAAAAAAQKLMRTDRLEVCREYQRGNCNRGENDCRFAHPADSTMIDTNDNTVTVCMDYIKGRCSREKCKYFHPPAHLQAKIKAAQYQVNQAAAAQAAATAAAMGIPQAVLPPLPKRPALEKTNGATAVFNTGIFQYQQALANMQLQQHTAFLPPGSILCMTPATSVDTHNICRTSD

SEQ ID NO: 54224 - protein, 388 aa, Homo sapiens; identical to SEQ ID NO: 54218

SEQ ID NO: 54225 - protein, 340 aa, Homo sapiens; identical to SEQ ID NO: 54220

SEQ ID NO: 54226 - protein, 302 aa, Homo sapiens; identical to SEQ ID NO: 54219

SEQ ID NO: 54227 - protein, 342 aa, Homo sapiens; identical to SEQ ID NO: 54223

SEQ ID NO: 54228 - protein, 343 aa, Homo sapiens
MGRCSRENCKYLHPPPHLKTQLEINGRNNLIQQKNMAMLAQQMQLANAMMPGAPLQPVPMFSVAPSLATNASAAAFNPYLGPVSPSLVPAEILPTAPMLVTGNPGVPVPAAAAAAAQKLMRTDRLEVCREYQRGNCNRGENDCRFAHPADSTMIDTNDNTVTVCMDYIKGRCSREKCKYFHPPAHLQAKIKAAQYQVNQAAAAQAAATAAAMTQSAVKSLKRPLEATFDLGIPQAVLPPLPKRPALEKTNGATAVFNTGIFQYQQALANMQLQQHTAFLPPGSILCMTPATSVVPMVHGATPATVSAATTSATSVPFAATATANQIPIISAEHLTSHKYVTQM

SEQ ID NO: 54229 - protein, 314 aa, Homo sapiens
MAVSVTPIRDTKWLTLEVCREFQRGTCSRPDTECKFAHPSKSCQVENGRVIACFDSLKGRCSRENCKYLHPPPHLKTQLEINGRNNLIQQKNMAMLAQQMQLANAMMPGAPLQPVVCREYQRGNCNRGENDCRFAHPADSTMIDTNDNTVTVCMDYIKGRCSREKCKYFHPPAHLQAKIKAAQYQVNQAAAAQAAATAAAMGIPQAVLPPLPKRPALEKTNGATAVFNTGIFQYQQALANMQLQQHTAFLPPGSILCMTPATSVVPMVHGATPATVSAATTSATSVPFAATATANQIPIISAEHLTSHKYVTQM

SEQ ID NO: 54230 - protein, 334 aa, Homo sapiens
MTAVNVALIRDTKWLTLEVCREFQRGTCSRADADCKFAHPPRVCHVENGRVVACFDSLKGRCTRENCKYLHPPPHLKTQLEINGRNNLIQQKTAAAMFAQQMQLMLQNAQMSSLGSFPMTPSIPANPPMAFNPYIPHPGMGLVPAELVPNTPVLIPGNPPLAMPGAVGPKLMRSDKLEVCREFQRGNCTRGENDCRYAHPTDASMIEASDNTVTICMDYIKGRCSREKCKYFHPPAHLQARLKAAHHQMNHSAASAMALTNLQLPQPAFIPAGPILCMAPASNIVPMMHGATPTTVSAATTPATSVPFAAPTTGNQIPQLSIDELNSSMFVSQM

SEQ ID NO: 54231 - protein, 258 aa, Homo sapiens
MFAQQMQLMLQNAQMSSLGSFPMTPSIPANPPMAFNPYIPHPGMGLVPAELVPNTPVLIPGNPPLAMPGAVGPKLMRSDKLEVCREFQRGNCTRGENDCRYAHPTDASMIEASDNTVTICMDYIKGRCSREKCKYFHPPAHLQARLKAAHHQMNHSAASAMALQPGTLQLIPKRSALEKPNGATPVFNPTVFHCQQALTNLQLPQPAFIPAGPILCMAPASNIVPMMHGATPTTVSAATTPATSVPFAAPTTGNQLKF

SEQ ID NO: 54232 - protein, 304 aa, Homo sapiens
MERASKNLKGRCTRENCKYLHPPPHLKTQLEINGRNNLIQQKTAAAMFAQQMQLMLQNAQMSSLGSFPMTPSIPANPPMAFNPYIPHPGMGLVPAELVPNTPVLIPGNPPLAMPGAVGPKLMRSDKLEVCREFQRGNCTRGENDCRYAHPTDASMIEASDNTVTICMDYIKGRCSREKCKYFHPPAHLQARLKAAHHQMNHSAASAMALQPGTLQLIPKRSALEKPNGATPVFNPTVFHCQQALTNLQLPQPAFIPAGPILCMAPASNIVPMMHGATPTTVSAATTPATSVPFAAPTTGNQLKF

SEQ ID NO: 54233 - protein, 354 aa, Homo sapiens
MTAVNVALIRDTKWLTLEVCREFQRGTCSRADADCKFAHPPRVCHVENGRVVACFDSLKGRCTRENCKYLHPPPHLKTQLEINGRNNLIQQKTAAAMFAQQMQLMLQNAQMSSLGSFPMTPSIPANPPMAFNPYIPHPGMGLVPAELVPNTPVLIPGNPPLAMPGAVGPKLMRSDKLEVCREFQRGNCTRGENDCRYAHPTDASMIEASDNTVTICMDYIKGRCSREKCKYFHPPAHLQARLKAAHHQMNHSAASAMALQPGTLQLIPKRSALEKPNGATPVFNPTVFHCQQALTNLQLPQPAFIPAGPILCMAPASNIVPMMHGATPTTVSAATTPATSVPFAAPTTGNQLKF

SEQ ID NO: 54234 - protein, 342 aa, Homo sapiens
MTAVNVALIRDTKWLTLEVCREFQRGTCSRADADCKFAHPPRVCHVENGRVVACFDSLKGRCTRENCKYLHPPPHLKTQLEINGRNNLIQQKTAAAMFAQQMQLMLQNAQMSSLGSFPMTPSIPANPPMAFNPYIPHPGMGLVPAELVPNTPVLIPGNPPLAMPGAVGPKLMRSDKLEVCREFQRGNCTRGENDCRYAHPTDASMIEASDNTVTICMDYIKGRCSREKCKYFHPPAHLQARLKAAHHQMNHSAASAMALQPGTLQLIPKRSALEKPNGATPVFNPTVFHCQQALTNLQLPQPAFIPAVPMMHGATPTTVSAATTPATSVPFAAPTTGNQLKF

SEQ ID NO: 54235 - protein, 258 aa, Homo sapiens; identical to SEQ ID NO: 54231

SEQ ID NO: 54236 - protein, 223 aa, Homo sapiens
MFAQQMQLMLQNAQMSSLGSFPMTPSIPANPPMAFNPYIPHPGMGLVPAELVPNTPVLIPGNPPLAMPGAVGPKLMRSDKLEVCREFQRGNCTRGENDCRYAHPTDASMIEASDNTVTICMDYIKGRCSREKCKYFHPPAHLQARLKAAHHQMNHSAASAMALQPGTLQLIPKRSALEKPNGATPVFNPTVFHCQQALTNLQLPQPAFIPAGPILCMAPASNI

SEQ ID NO: 54237 - protein, 242 aa, Homo sapiens
MFAQQMQLMLQNAQMSSLGSFPMTPSIPANPPMAFNPYIPHPGMGLVPAELVPNTPVLIPGNPPLAMPGAVGPKLMRSDKLEVCREFQRGNCTRGENDCRYAHPTDASMIEASDNTVTICMDYIKGRCSREKCKYFHPPAHLQARLKAAHHQMNHSAASAMALQPGTLQLIPKRSALEKPNGATPVFNPTVFHCQQALTNLQLPQPAFIPAGPILCMAPASNIVPMMHGATPTTVSAATTPA

SEQ ID NO: 54238 - protein, 150 aa, Homo sapiens
IKGRCSREKCKYFHPPAHLQARLKAAHHQMNHSAASAMALQPGTLQLIPKRSALEKPNGATPVFNPTVFHCQQALTNLQLPQPAFIPAGPILCMAPASNIVPMMHGATPTTVSAATTPATSVPFAAPTTGNQIPQLSIDELNSSMFVSQM

SEQ ID NO: 54239 - protein, 292 aa, Homo sapiens
MERASKNLKGRCTRENCKYLHPPPHLKTQLEINGRNNLIQQKTAAAMFAQQMQLMLQNAQMSSLGSFPMTPSIPANPPMAFNPYIPHPGMGLVPAELVPNTPVLIPGNPPLAMPGAVGPKLMRSDKLEVCREFQRGNCTRGENDCRYAHPTDASMIEASDNTVTICMDYIKGRCSREKCKYFHPPAHLQARLKAAHHQMNHSAASAMALQPGTLQLIPKRSALEKPNGATPVFNPTVFHCQQALTNLQLPQPAFIPAVPMMHGATPTTVSAATTPATSVPFAAPTTGNQLKF

SEQ ID NO: 54240 - protein, 458 aa, Homo sapiens
MELEKREKRSLLNKNLEEKLTVSAGGSEAKPLIFTFVPTVRRLPTHTQLADTSKFLVKIPEESSDKSPETVNRSKSNDYLTLNAGSQQERDQAKLTCPSEVSGTILQEREFEANKLQGMQQSDLFKAEYVLIVDSEGEDEAASRKVEQGPPGGIGTAAVRPKSLAISSSLVSDVVRPKTQGTDLKTSSHPEMLHGMAPQQKHGQQYKTKSSYKAFAAIPTNTLLLEQKALDEPAKTESVSKDNTLEPPVELYFPAQLRQQTEELCATIDKVLQDSLSMHSSDSPSRSPKTLLGSDTVKTPTTLPRAAGRETKYANLSSPSSTVSESQLTKPGVIRPVPVKSRILLKKEEEVYEPNPFSKYLEDNSDLFSEQDVTVPPKPVSLHPLYQTKLYPPAKSLLHPQTLSHADCLAPGPFSHLSFSLSDEQENSHTLLSHNACNKLSHPMVAIPEHEALDSKEQ

SEQ ID NO: 54241 - protein, 290 aa, Homo sapiens
MTSCILSGSIQTTPQVSAGGSEAKPLIFTFVPTVRRLPTHTQLADTSKFLVKIPEESSDKSPETVNRSKSNDYLTLNAGSQQERDQAKLTCPSEVSGTILQEREFEANKLQGMQQSDLFKAEYVLIVDSEGEDEAASRKVEQGPPGGIGTAAVRPKSLAISSSLVSDVVRPKTQGTDLKTSSHPEMLHGMAPQQKHGQTPTTLPRAAGRETKYANLSSPSSTVSESQLTKPGVIRPVPVKSRILLKKEEEVYEPNPFSKYLEDNSDLFSEQLSHPMVAIPEHEALDSKEQ

SEQ ID NO: 54242 - protein, 234 aa, Homo sapiens
MCSWYLGFECSSKSNDYLTLNAGSQQERDQAKLTCPSEVSGTILQEREFEANKLQGMQQSDLFKAEYVLIVDSEGEDEAASRKVEQGPPGGIGTAAVRPKSLAISSSLVSDVVRPKTQGTDLKTSSHPEMLHGMAPQQKHGQTPTTLPRAAGRETKYANLSSPSSTVSESQLTKPGVIRPVPVKSRILLKKEEEVYEPNPFSKYLEDNSDLFSEQLSHPMVAIPEHEALDSKEQ

SEQ ID NO: 54243 - protein, 162 aa, Homo sapiens
MQQSDLFKAEYVLIVDSEGEDEAASRKVEQGPPGGIGTAAVRPKSLAISSSLVSDVVRPKTQGTDLKTSSHPEMLHGMAPQQKHGQQYKTKSSYKAFAAIPTNTLLLEQKALDEPAKTESVSKDNTLEPPVETPTTLPRAAGRETKYANLSSPSSTVSESQL

SEQ ID NO: 54244 - protein, 735 aa, Homo sapiens
MAAGGAVAAAPECRLLPYALHKWSSFSSTYLPENILVDKPNDQSSRWSSESNYPPQYLILKLERPAIVQNITFGKYEKTHVCNLKKFKVFGGMNEENMTELLSSGLKNDYNKETFTLKHKIDEQMFPCRFIKIVPLLSWGPSFNFSIWYVELSGIDDPDIVQPCLNWYSKYREQEAIRLCLKHFRQHNYTEAFESLQKKTKIALEHPMLTDIHDKLVLKGDFDACEELIEKAVNDGLFNQYISQQEYKPRWSQIIPKSTKGDGEDNRPGMRGGHQMVIDVQTETVYLFGGWDGTQDLADFWAYSVKENQWTCISRDTEKENGPSARSCHKMCIDIQRRQIYTLGRYLDSSVRNSKSLKSDFYRYDIDTNTWMLLSEDTAADGGPKLVFDHQMCMDSEKHMIYTFGGRILTCNGSVDDSRASEPQFSGLFAFNCQCQTWKLLREDSCNAGPEDIQSRIGHCMLFHSKNRCLYVFGGQRSKTYLNDFFSYDVDSDHVDIISDGTKKDSGMVPMTGFTQRATIDPELNEIHVLSGLSKDKEKREENVRNSFWIYDIVRNSWSCVYKNDQAAKDNPTKSLQEEEPCPRFAHQLVYDELHKVHYLFGGNPGKSCSPKMRLDDFWSLKLCRPSKDYLLRHCKYLIRKHRFEEKAQVDPLSALKYLQNDLYITVDHSDPEETKEFQLLASALFKSGSDFTALGFSDVDHTYAQRTQLFDTLVNFFPDSMTPPKGNLVDLITL

SEQ ID NO: 54245 - protein, 185 aa, Homo sapiens
MTGFTQRATIDPELNEIHVLSGLSKDKEKREENVRNSFWIYDIVRNSWSCVYKNDQAAKDNPTKSLQEEEPCPRFAHQLVYDELHKVHYLFGGNPGKSCSPKMRLDDFWSLKLCRPSKDYLLRHCKYLIRKHRFEEKAQVDPLSALKYLQNDLYITVDHSDPEETKEAFLMWITPMLKELSSLTP

SEQ ID NO: 54246 - protein, 1019 aa, Homo sapiens
MMAAAAAAAAGSSSSGGGGGGSGSSSSSSDTSSTGEEERMRRLFQTCDGDGDGYISRNDLLMVCRQLNMEESVAEIMNQLGADENGKISFQDFTRCRMQLVREIRKEEVDLSAKSDNSCTKKLRDRIASWPTSSDNSLGALSAARESWEYDSGARDLQSPDVQSQSALQKLLEYGGSSLHQQAALHKLLTQSPHIGNSVGGSYLELANTLHSAALASLKGDIVELNKRLQQTERERDLLEKKLAKAQCEQSHLMREHEDVQERTTLRYEERITELHSVIAELNKKIDRLQGTTIREEDEYSELRSELSQSQHEVNEDSRSMDQDQTSVSIPENQSTMVTADMDNCSDLNSELQRVLTGLENVVCGRKKSSCSLSVAEVDKHIEQLTTASEHCDLAIKTVEEIEGVLGRDLYPNLAEERSRWEKELAGLREENESLTAMLCSKEEELNRTKATMNAIREERDRLRRRVRELQTRLQSVQATGPSSPGRLTSTNRPINPSTGELSTSSSSNDIPIAKIAERVKLSKTRSESSSSDRPVLGSEISSIGVSSSVAEHLAHSLQDCSNIQEIFQTLYSHGSAISESKIREFEVETERLNSRIEHLKSQNDLLTITLEECKSNAERMSMLVGKYESNATALRLALQYSEQCIEAYELLLALAESEQSLILGQFRAAGVGSSPGDQSGDENITQMLKRAHDCRKTAENAAKALLMKLDGSCGGAFAVAGCSVQPWESLSSNSHTSTTSSTASSCDTEFTKEDEQRLKDYIQQLKNDRAAVKLTMLELESIHIDPLSYDVKPRGDSQRLDLENAVLMQELMAMKEEMAELKAQLYLLEKEKKALELKLSTREAQEQAYLVHIEHLKSEVEEQKEQRMRSLSSTSSGSKDKPGKECADAASPALSLAELRTTCSENELAAEFTNAIRREKKLKARVQELVSALERLTKSSEIRHQQSAEFVNDLKRANSNLVAAYEKAKKKHQNKLKKLESQMMAMVERHETQVRMLKQRIALLEEENSRPHTNETSL

SEQ ID NO: 54247 - protein, 187 aa, Homo sapiens
MSGGGTETPVGCEAAPGGGSKKRDSLGTAGSAHLIIKDLGEIHSRLLDHRPVIQGETRYFVKEFEEKRGLREMRVLENLKNMIHETNEHTLPKCRDTMRDSLSQVLQRLQAANDSVCRLQQREQERKKIHSDHLVASEKQHMLQWDNFMKEQPNKRAEVDEEHRKAMERLKEQYAEMEKDLAKFSTF

SEQ ID NO: 54248 - protein, 123 aa, Homo sapiens
MEKRGLREMRVLENLKNMIHETNEHTLPKCRDTMRDSLSQVLQRLQAANDSVCRLQQREQERKKIHSDHLVASEKQHMLQWDNFMKEQPNKRAEVDEEHRKAMERLKEQYAEMEKDLAKFSTF

SEQ ID NO: 54249 - protein, 1328 aa, Homo sapiens
MESRDPAQPMSPGEATQSGARPADRYGLLKHSREFLDFFWDIAKPEQETRLAATEKLLEYLRGRPKGSEMKYALKRLITGLGVGRETARPCYSLALAQLLQSFEDLPLCSILQQIQEKYDLHQVKKAMLRPALFANLFGVLALFQSGRLVKDQEALMKSVKLLQALAQYQNHLQEQPRKALVDILSEVSKATLQEILPEVLKADLNIILSSPEQLELFLLAQQKVPSKLKKLVGSVNLFSDENVPRLVNVLKMAASSVKKDRKLPAIALDLLRLALKEDKFPRFWKEVVEQGLLKMQFWPASYLCFRLLGAALPLLTKEQLHLVMQGDVIRHYGEHVCTAKLPKQFKFAPEMDDYVGTFLEGCQDDPERQLAVLVAFSSVTNQGLPVTPTFWRVVRFLSPPALQGYVAWLRAMFLQPDLDSLVDFSTNNQKKAQDSSLHMPERAVFRLRKWIIFRLVSIVDSLHLEMEEALTEQVARFCLFHSFFVTKKPTSQIPETKHPFSFPLENQAREAVSSAFFSLLQTLSTQFKQAPGQTQGGQPWTYHLVQFADLLLNHSHNVTTVTPFTAQQRQAWDRMLQTLKELEAHSAEARAAAFQHLLLLVGIHLLKSPAESCDLLGDIQTCIRKSLGEKPRRSRTKTIDPQEPPWVEVLVEILLALLAQPSHLMRQVARSVFGHICSHLTPRALQLILDVLNPETSEDENDRVVVTDDSDERRLKGAEDKSEEGEDNRSSESEEESEGEESEEEERDGDVDQGFREQLMTVLQAGKALGGEDSENEEELGDEAMMALDQSLASLFAEQKLRIQARRDEKNKLQKEKALRRDFQIRVLDLVEVLVTKQPENALVLELLEPLLSIIRRSLRSSSSKQEQDLLHKTARIFTHHLCRARRYCHDLGERAGALHAQVERLVQQAGRQPDSPTALYHFNASLYLLRVLKGNTAEGCVHETQEKQKAGTDPSHMPTGPQAASCLDLNLVTRVYSTALSSFLTKRNSPLTVPMFLSLFSRHPVLCQSLLPILVQHITGPVRPRHQACLLLQKTLSMREVRSCFEDPEWKQLMGQVLAKVTENLRVLGEAQTKAQHQQALSSLELLNVLFRTCKHEKLTLDLTVLLGVLQGQQQSLQQGAHSTGSSRLHDLYWQAMKTLGVQRPKLEKKDAKEIPSATQSPISKKRKKKGFLPETKKRKKRKSEDGTPAEDGTPAATGGSQPPSMGRKKRNRTKAKVPAQANGTPTTKSPAPGAPTRSPSTPAKSPKLQKKNQKPSQVNGAPGSPTEPAGQKQHQKALPKKGVLGKSPLSALARKKARLSLVIRSPSLLQSGAKKKAQVRKAGKP

SEQ ID NO: 54250 - protein, 1332 aa, Homo sapiens
MESRDPAQPMSPGEATQSGARPADRYGLLKHSREFLDFFWDIAKPEQETRLAATEKLLEYLRGRPKGSEMKYALKRLITGLGVGRETARPCYSLALAQLLQSFEDLPLCSILQQIQEKYDLHQVKKAMLRPALFANLFGVLALFQSGRLVKDQEALMKSVKLLQALAQYQNHLQEQPRKALVDILSEVSKATLQEILPEVLKADLNIILSSPEQLELFLLAQQKVPSKLKKLVGSVNLFSDENVPRLVNVLKMAASSVKKDRKLPAIALDLLRLALKEDKFPRFWKEVVEQGLLKMQFWPASYLCFRLLGAALPLLTKEQLHLVMQGDVIRHYGEHVCTAKLPKQFKFAPEMDDYVGTFLEGCQDDPERQLAVLVAFSSVTNQGLPVTPTFWRVVRFLSPPALQGYVAWLRAMFLQPDLDSLVDFSTNNQKKAQDSSLHMPERAVFRLRKWIIFRLVSIVDSLHLEMEEALTEQVARFCLFHSFFVTKKPTSQIPETKHPFSFPLENQAREAVSSAFFSLLQTLSTQFKQAPGQTQGGQPWTYHLVQFADLLLNHSHNVTTVTPFTAQQRQAWDRMLQTLKELEAHSAEARAAAFQHLLLLVGIHLLKSPAESCDLLGDIQTCIRKSLGEKPRRSRTKTIDPQEPPWVEVLVEILLALLAQPSHLMRQVARSVFGHICSHLTPRALQLILDVLNPETSEDENDRVVVTDDSDERRLKGAEDKSEEGEDNRSSESEEESEGEESEEEERDGDVDQGFREQLMTVLQAGKALGGEDSENEEELGDEAMMALDQSLASLFAEQKLRIQARRDEKNKLQKEKALRRDFQIRVLDLVEVLVTKQPENALVLELLEPLLSIIRRSLRSSSSKQEQDLLHKTARIFTHHLCRARRYCHDLGERAGALHAQVERLVQQAGRQPDSPTALYHFNASLYLLRVLKGNTAEGCVHETQEKQKAGTDPSHMPTGPQAASCLDLNLVTRVYSTALSSFLTKRNSPLTVPMFLSLFSRHPVLCQSLLPILVQHITGPVRPRHQACLLLQKTLSMREVRSCFEDPEWKQLMGQVLAKVTENLRVLGEAQTKAQHQQALSSLELLNVLFRTCKHEKLTLDLTVLLGVLQGQQQSLQQGAHSTGSSRLHDLYWQAMKTLGVQRPKLEKKDAKEIPSATQSPISKKRKKKGFLPETKKRKKRKSEDGTPAEDGTPAATGGSQPPSMGRKKRNRTKAKVPAQANGTPTTKSPAPGAPTRSPSTPAKSPKLQKKNQKPSQVNGAPGSPTEPAGQKQHQKALPKKGVLGKSPLSALARKKARLSLVIRSPSLLQSGAKKKAQTLRFTISSSKK

SEQ ID NO: 54251 - protein, 603 aa, Homo sapiens
MESRDPAQPMSPGEATQSGARPADRYGLLKHSREFLDFFWDIAKPEQETRLAATEKLLEYLRGRPKGSEMKYALKRLITGLGVGRETARPCYSLALAQLLQSFEDLPLCSILQQIQEKYDLHQVKKAMLRPALFANLFGVLALFQSGRLVKDQEALMKSVKLLQALAQYQNHLQEQPRKALVDILSEVSKATLQEILPEVLKADLNIILSSPEQLELFLLAQQKVPSKLKKLVGSVNLFSDENVPRLVNVLKMAASSVKKDRKLPAIALDLLRLALKEDKFPRFWKEVVEQGLLKMQFWPASYLCFRLLGAALPLLTKEQLHLVMQGDVIRHYGEHVCTAKLPKQFKFAPEMDDYVGTFLEGCQDDPERQLAVLVAFSSVTNQGLPVTPTFWRVVRFLSPPALQGYVAWLRAMFLQPDLDSLVDFSTNNQKKAQDSSLHMPERAVFRLRKWIIFRLVSIVDSLHLEMEEALTEQVARFCLFHSFFVTKKPTSQIPETKPQERSEGPAQPPHAPGGPERPKLEKKDAKEIPSAEDGTPAATGGSQPPSMGRKKRNRTKAKVPAQANGTPTTKSPAPGAPTRSPSTPAKSPKLQKKAQVRKAGKP

SEQ ID NO: 54252 - protein, 828 aa, Homo sapiens
MAAEEADVDIEGDVVAAAGAQPGSGENTASVLQKDHYLDSSWRTENGLIPWTLDNTISEENRAVIEKMLLEEEYYLSKKSQPEKVWLDQKEDDKKYMKSLQKTAKIMVHSPTKPASYSVKWTIEEKELFEQGLAKFGRRWTKISKLIGSRTVLQVKSYARQYFKNKVKCGLDKETPNQKTGHNLQVKNEDKGTKAWTPSCLRGRADPNLNAVKIEKLSDDEEVDITDEVDELSSQTPQKNSSSDLLLDFPNSKMHETNQGEFITSDSQEALFSKSSRGCLQNEKQDETLSSSEITLWTEKQSNGDKKSIELNDQKFNELIKNCNKHDGRGIIVDARQLPSPEPCEIQKNLNDNEMLFHSCQMVEESHEEEELKPPEQEIEIDRNIIQEEEKQAIPEFFEGRQAKTPERYLKIRNYILDQWEICKPKYLNKTSVRPGLKNCGDVNCIGRIHTYLELIGAINFGCEQAVYNRPQTVDKVRIRDRKDAVEAYQLAQRLQSMRTRRRRVRDPWGNWCDAKDLEGQTFEHLSAEELAKRREEEKGRPVKSLKVPRPTKSSFDPFQLIPCNFFSEEKQEPFQVKVASEALLIMDLHAHVSMAEVIGLLGGRYSEVDKVVEVCAAEPCNSLSTGLQCEMDPVSQTQASETLAVRGFSVIGWYHSHPAFDPNPSLRDIDTQAKYQSYFSRGGAKFIGMIVSPYNRNNPLPYSQITCLVISEEISPDGSYRLPYKFEVQQMLEEPQWGLVFEKTRWIIEKYRLSHSSVPMDKIFRRDSDLTCLQKLLECMRKTLSKVTNCFMAEEFLTEIENLFLSNYKSNQENGVTEENCTKELLM

SEQ ID NO: 54253 - protein, 280 aa, Homo sapiens
MPKKAKPTGSGKEEGPAPCKQMKLEAAGGPSALNFDSPSSLFESLISPIKTETFFKEFWEQKPLLIQRDDPALATYYGSLFKLTDLKSLCSRGMYYGRDVNVCRCVNGKKKVLNKDGKAHFLQLRKDFDQKRATIQFHQPQRFKDELWRIQEKLECYFGSLVGSNVYITPAGSQGLPPHYDDVEVFILQLEGEKHWRLYHPTVPLAREYSVEAEERIGRPVHEFMLKPGDLLYFPRGTIHQADTPAGLAHSTHVTISTYQNNDAGARMRRCDLRAIAPQK

SEQ ID NO: 54254 - protein, 465 aa, Homo sapiens
MPKKAKPTGSGKEEGPAPCKQMKLEAAGGPSALNFDSPSSLFESLISPIKTETFFKEFWEQKPLLIQRDDPALATYYGSLFKLTDLKSLCSRGMYYGRDVNVCRCVNGKKKVLNKDGKAHFLQLRKDFDQKRATIQFHQPQRFKDELWRIQEKLECYFGSLVGSNVYITPAGSQGLPPHYDDVEVFILQLEGEKHWRLYHPTVPLAREYSVEAEERIGRPVHEFMLKPGDLLYFPRGTIHQADTPAGLAHSTHVTISTYQNNSWGDFLLDTISGLVFDTAKEDVELRTGIPRQLLLQVESTTVATRRLSGFLRTLADRLEGTKELLSSDMKKDFIMHRLPPYSAGDGAELSTPGGKLPRLDSVVRLQFKDHIVLTVLPDQDQSDEAQEKMVYIYHSLKNSRETHMMGNEEETEFHGLRFPLSHLDALKQIWNSPAISVKDLKLTTDEEKESLVLSLWTECLIQVV

SEQ ID NO: 54255 - protein, 464 aa, Homo sapiens
MPKKAKPTGSGKEEGPAPCKQMKLEAAGGPSALNFDSPSSLFESLISPIKTETFFKEFWEQKPLLIQRDDPALATYYGSLFKLTDLKSLCSRGMYYGRDVNVCRCVNGKKKVLNKDGKAHFLQLRKDFDQKRATIQFHQPQRFKDELWRIQEKLECYFGSLVGSNVYITPAGSQGLPPHYDDVEVFILQLEGEKHWRLYHPTVPLAREYSVEAEERIGRPVHEFMLKPGDLLYFPRGTIHQADTPAGLAHSTHVTISTYQNNSWGDFLLDTISGLVFDTAKEDVELRTGIPRQLLLVESTTVATRRLSGFLRTLADRLEGTKELLSSDMKKDFIMHRLPPYSAGDGAELSTPGGKLPRLDSVVRLQFKDHIVLTVLPDQDQSDEAQEKMVYIYHSLKNSRETHMMGNEEETEFHGLRFPLSHLDALKQIWNSPAISVKDLKLTTDEEKESLVLSLWTECLIQVV

SEQ ID NO: 54256 - protein, 465 aa, Homo sapiens; identical to SEQ ID NO: 54254

SEQ ID NO: 54257 - protein, 211 aa, Homo sapiens
MLLQVPCNSWGDFLLDTISGLVFDTAKEDVELRTGIPRQLLLQVESTTVATRRLSGFLRTLADRLEGTKELLSSDMKKDFIMHRLPPYSAGDGAELSTPGGKLPRLDSVVRLQFKDHIVLTVLPDQDQSDEAQEKMVYIYHSLKNSRETHMMGNEEETEFHGLRFPLSHLDALKQIWNSPAISVKDLKLTTDEEKESLVLSLWTECLIQVV

SEQ ID NO: 54258 - protein, 112 aa, Homo sapiens
MPKKAKPTGSGKEEGPAPCKQMKLEAAGGPSALNFDSPSSLFESLISPIKTETFFKEFWEQKPLLIQRDDPALATYYGSLFKLTDLKSLCSRGMYYGRDVNVCRCVNGKKKV

SEQ ID NO: 54259 - protein, 493 aa, Homo sapiens
MFPVFPCTLLAPPFPVLGLDSRGVGGLMNSFPPPQGHAQNPLQVGAELQSRFFASQGCAQSPFQAAPAPPPTPQAPAAEPLQVDLLPVLAAAQESAAAAAAAAAAAAAVAAAPPAPAAASTVDTAALKQPPAPPPPPPPVSAPAAEAAPPASAATIAAAAATAVVAPTSTVAVAPVASALEKKTKSKGPYICALCAKEFKNGYNLRRHEAIHTGAKAGRVPSGAMKMPTMVPLSLLSVPQLSGAGGGGGEAGAGGGAAAVAAGGVVTTTASGKRIRKNHACEMCGKAFRDVYHLNRHKLSHSDEKPYQCPVCQQRFKRKDRMSYHVRSHDGAVHKPYNCSHCGKSFSRPDHLNSHVRQVHSTERPFKCEKCEAAFATKDRLRAHTVRHEEKVPCHVCGKMLSSAYISDHMKVHSQGPHHVCELCNKGFTTAAYLRIHAVKDHGLQAPRADRILCKLCSVHCKTPAQLAGHMQTHLGGAAPPVPGDAPQPQPTC

SEQ ID NO: 54260 - protein, 477 aa, Homo sapiens
MFPVFPCTLLAPPFPVLGLDSRGVGGLMNSFPPPQGHAQNPLQVGAELQSRFFASQGCAQSPFQAAPAPPPTPQAPAAEPLQVDLLPVLAAAQESAAAAAAAAAAAAAVAAAPPAPAAASTVDTAALKQPPAPPPPPPPVSAPAAEAAPPASAATIAAAAATAVVAPTSTVAVAPVASALEKKTKSKGPYICALCAKEFKNGYNLRRHEAIHTGAKAGRVPSGAMKMPTMVPLSLLSVPQLSGAGGGGGEAGAGGGAAAVAAGGVVTTTASGKRIRKNHACEMCGKAFRDVYHLNRHKLSHSDEKPYQCPVCQQRFKRKDRMSYHVRSHDGAVHKPYNCSHCGKSFSRPDHLNSHVRQVHSTERPFKCEKCEAAFATKDRLRAHTVRHEEKVPCHVCGKMLSSAYISDHMKVHSQGPHHVCELCNKGTGEVCPMAAAAAAAAAAAAAAVAAPPTAVGSLSGAEGVPVSSQPLPSQPW

SEQ ID NO: 54261 - protein, 252 aa, Homo sapiens [sequence omitted]

SEQ ID NO: 54262 - protein, 454 aa, Homo sapiens
MDPSNWSSFIFQGHAQNPLQVGAELQSRFFASQGCAQSPFQAAPAPPPTPQAPAAEPLQVDLLPVLAAAQESAAAAAAAAAAAAAVAAAPPAPAAASTVDTAALKQPPAPPPPPPPVSAPAAEAAPPASAATIAAAAATAVVAPTSTVAVAPVASALEKKTKSKGPYICALCAKEFKNGYNLRRHEAIHTGAKAGRVPSGAMKMPTMVPLSLLSVPQLSGAGGGGGEAGAGGGAAAVAAGGVVTTTASGKRIRKNHACEMCGKAFRDVYHLNRHKLSHSDEKPYQCPVCQQRFKRKDRMSYHVRSHDGAVHKPYNCSHCGKSFSRPDHLNSHVRQVHSTERPFKCEKCEAAFATKDRLRAHTVRHEEKVPCHVCGKMLSSAYISDHMKVHSQGPHHVCELCNKGTGEVCPMAAAAAAAAAAAAAAVAAPPTAVGSLSGAEGVPVSSQPLPSQPW

SEQ ID NO: 54263 - protein, 984 aa, Homo sapiens
MRAPARGTGCCGRSGGRWLAGAAQPRCLWAGGAGQRFMVPGGTMKSLKKDSRLRITPTRLLEASENVKEKKRAKGPEQPTPTIQEEPEPVSNVLQGDDILALAIKKEDLKEQHIPRLTEKEDKRVITQKFIIRKLKPMDPRRKVCHLVARPANPDEATKPLDYSGPGDSFDGSDQILPHHILGSLQDFKRIALARGNTQLAERIPTSPCLMTLISAEGESKQKAPKEEKRPPWAPPPQHNFLKNWQRNTALRKKQQEALSEHLKKPVSELLMHTGETYRRIQEERELIDCTLPTRRDRKSWENSGFWSRLEYLGDEMTGLVMTKTKTQRGLMEPITHIRKPHSIRVETGLPAQRDASYRYTWDRSLFLIYRRKELQRIMEELDFSQQDIDGLEVVGKGWPFSAVTVEDYTVFERSQGSSSEDTAYLGTLASSSDVSMPILGPSLLFCGKPACWIRGSNPQDKRQVGIAAHLTFETLEGEKTSSELTVVNNGTVAIWYDWRRQHQPDTFQDLKKNRMQRFYFDNREGVILPGEIKTFTFFFKSLTAGVFREFWEFRTHPTLLGGAILQVNLHAVSLTQDVFEDERKVLESKLTAHEAVTVVREVLQELLMGVLTPERTPSPVDAYLTEEDLFRHRNPPLHYEHQVVQSLHQLWRQYMTLPAKAEEARPGDKEHVSPIATEKASVNAELLPRFRSPISETQVPRPENEALRESGSQKARVGTKSPQRKSIMEEILVEESPDVDSTKSPWEPDGLPLLEWNLCLEDFRKAVMVLPDENHREDALMRLNKAALELCQKPRPLQSNLLHQMCLQLWRDVIDSLVGHSMWLRSVLGLPEKETIYLNVPEEQDQKSPPIMEVKVPVGKAGKEERKGAAQEKKQLGIKDKEDKKGAKLLGKEDRPNSKKHKAKDDKKVIKSASQDRFSLEDPTPDIILSSQEPIDPLVMGKYTQSLHSEVRGLLDTLVTDLMVLADELSPIKNVEEALRLCR

SEQ ID NO: 54264 - protein, 942 aa, Homo sapiens
MVPGGTMKSLKKDSRLRITPTRLLEASENVKEKKRAKGPEQPTPTIQEEPEPVSNVLQGDDILALAIKKEDLKEQHIPRLTEKEDKRVITQKFIIRKLKPMDPRRKVCHLVARPANPDEATKPLDYSGPGDSFDGSDQILPHHILGSLQDFKRIALARGNTQLAERIPTSPCLMTLISAEGESKQKAPKEEKRPPWAPPPQHNFLKNWQRNTALRKKQQEALSEHLKKPVSELLMHTGETYRRIQEERELIDCTLPTRRDRKSWENSGFWSRLEYLGDEMTGLVMTKTKTQRGLMEPITHIRKPHSIRVETGLPAQRDASYRYTWDRSLFLIYRRKELQRIMEELDFSQQDIDGLEVVGKGWPFSAVTVEDYTVFERSQGSSSEDTAYLGTLASSSDVSMPILGPSLLFCGKPACWIRGSNPQDKRQVGIAAHLTFETLEGEKTSSELTVVNNGTVAIWYDWRRQHQPDTFQDLKKNRMQRFYFDNREGVILPGEIKTFTFFFKSLTAGVFREFWEFRTHPTLLGGAILQVNLHAVSLTQDVFEDERKVLESKLTAHEAVTVVREVLQELLMGVLTPERTPSPVDAYLTEEDLFRHRNPPLHYEHQVVQSLHQLWRQYMTLPAKAEEARPGDKEHVSPIATEKASVNAELLPRFRSPISETQVPRPENEALRESGSQKARVGTKSPQRKSIMEEILVEESPDVDSTKSPWEPDGLPLLEWNLCLEDFRKAVMVLPDENHREDALMRLNKAALELCQKPRPLQSNLLHQMCLQLWRDVIDSLVGHSMWLRSVLGLPEKETIYLNVPEEQDQKSPPIMEVKVPVGKAGKEERKGAAQEKKQLGIKDKEDKKGAKLLGKEDRPNSKKHKAKDDKKVIKSASQDRFSLEDPTPDIILSSQEPIDPLVMGKYTQSLHSEVHPGRCVPWENTMQGAFPSTTRCGGSCL

SEQ ID NO: 54265 - protein, 663 aa, Homo sapiens
RSRGAEATESKLSGGFRWTQKTSPTQGDSAITHSLYRMIFLTALPLFWIMISASRGGHWGAWMPSSISAFEGTCVSIPCRFDFPDELRPAVVHGVWYFNSPYPKNYPPVVFKSRTQVVHESFQGRSRLLGDLGLRNCTLLLSNVSPELGGKYYFRGDLGGYNQYTFSEHSVLDIVNTPNIVVPPEVVAGTEVEVSCMVPDNCPELRPELSWLGHEGLGEPAVLGRLREDEGTWVQVSLLHFVPTREANGHRLGCQASFPNTTLQFEGYASMDVKYPPVIVEMNSSVEAIEGSHVSLLCGADSNPPPLLTWMRDGTVLREAVAESLLLELEEVTPAEDGVYACLAENAYGQDNRTVGLSVMYAPWKPTVNGTMVAVEGETVSILCSTQSNPDPILTIFKEKQILSTVIYESELQLELPAVSPEDDGEYWCVAENQYGQRATAFNLSVEFAPVLLLESHCAAARDTVQCLCVVKSNPEPSVAFELPSRNVTVNESEREFVYSERSGLVLTSILTLRGQAQAPPRVICTARNLYGAKSLELPFQGAHRLMWAKIGPVGAVVAFAILIAIVCYITQTRRKKNVTESPSFSAGDNPPVLFSSDFRISGAPEKYESERRLGSERRLLGLRGEPPELDLSYSHSDLGKRPTKDSYTLTEELAEYAEIRVK

SEQ ID NO: 54266 - protein, 582 aa, Homo sapiens
MIFLTALPLFWIMISASRGGHWGAWMPSSISAFEGTCVSIPCRFDFPDELRPAVVHGVWYFNSPYPKNYPPVVFKSRTQVVHESFQGRSRLLGDLGLRNCTLLLSNVSPELGGKYYFRGDLGGYNQYTFSEHSVLDIVNTPNIVVPPEVVAGTEVEVSCMVPDNCPELRPELSWLGHEGLGEPAVLGRLREDEGTWVQVSLLHFVPTREANGHRLGCQASFPNTTLQFEGYASMDVKYPPVIVEMNSSVEAIEGSHVSLLCGADSNPPPLLTWMRDGTVLREAVAESLLLELEEVTPAEDGVYACLAENAYGQDNRTVGLSVMYAPWKPTVNGTMVAVEGETVSILCSTQSNPDPILTIFKEKQILSTVIYESELQLELPAVSPEDDGEYWCVAENQYGQRATAFNLSVEFAPVLLLESHCAAARDTVQCLCVVKSNPEPSVAFELPSRNVTVNESEREFVYSERSGLVLTSILTLRGQAQAPPRVICTARNLYGAKSLELPFQGAHRLMWAKIGPVGAVVAFAILIAIVCYITQTRRKKNVTESPSFSAGDNPPVLFSSDFRISGAPEKYESKEVSTLESH

SEQ ID NO: 54267 - protein, 626 aa, Homo sapiens
MIFLTALPLFWIMISASRGGHWGAWMPSSISAFEGTCVSIPCRFDFPDELRPAVVHGVWYFNSPYPKNYPPVVFKSRTQVVHESFQGRSRLLGDLGLRNCTLLLSNVSPELGGKYYFRGDLGGYNQYTFSEHSVLDIVNTPNIVVPPEVVAGTEVEVSCMVPDNCPELRPELSWLGHEGLGEPAVLGRLREDEGTWVQVSLLHFVPTREANGHRLGCQASFPNTTLQFEGYASMDVKYPPVIVEMNSSVEAIEGSHVSLLCGADSNPPPLLTWMRDGTVLREAVAESLLLELEEVTPAEDGVYACLAENAYGQDNRTVGLSVMYAPWKPTVNGTMVAVEGETVSILCSTQSNPDPILTIFKEKQILSTVIYESELQLELPAVSPEDDGEYWCVAENQYGQRATAFNLSVEFAPVLLLESHCAAARDTVQCLCVVKSNPEPSVAFELPSRNVTVNESEREFVYSERSGLVLTSILTLRGQAQAPPRVICTARNLYGAKSLELPFQGAHRLMWAKIGPVGAVVAFAILIAIVCYITQTRRKKNVTESPSFSAGDNPPVLFSSDFRISGAPEKYESERRLGSERRLLGLRGEPPELDLSYSHSDLGKRPTKDSYTLTEELAEYAEIRVK

SEQ ID NO: 54268 - protein, 601 aa, Homo sapiens
MPSSISAFEGTCVSIPCRFDFPDELRPAVVHGVWYFNSPYPKNYPPVVFKSRTQVVHESFQGRSRLLGDLGLRNCTLLLSNVSPELGGKYYFRGDLGGYNQYTFSEHSVLDIVNTPNIVVPPEVVAGTEVEVSCMVPDNCPELRPELSWLGHEGLGEPAVLGRLREDEGTWVQVSLLHFVPTREANGHRLGCQASFPNTTLQFEGYASMDVKYPPVIVEMNSSVEAIEGSHVSLLCGADSNPPPLLTWMRDGTVLREAVAESLLLELEEVTPAEDGVYACLAENAYGQDNRTVGLSVMYAPWKPTVNGTMVAVEGETVSILCSTQSNPDPILTIFKEKQILSTVIYESELQLELPAVSPEDDGEYWCVAENQYGQRATAFNLSVEFAPVLLLESHCAAARDTVQCLCVVKSNPEPSVAFELPSRNVTVNESEREFVYSERSGLVLTSILTLRGQAQAPPRVICTARNLYGAKSLELPFQGAHRLMWAKIGPVGAVVAFAILIAIVCYITQTRRKKNVTESPSFSAGDNPPVLFSSDFRISGAPEKYESERRLGSERRLLGLRGEPPELDLSYSHSDLGKRPTKDSYTLTEELAEYAEIRVK

SEQ ID NO: 54269 - protein, 304 aa, Homo sapiens
MGNHAGKRELNAEKASTNSETNRGESEKKRNLGELSRTTSEDNEVFGEADANQNNGTSSQDTAVTDSKRTADPKNAWQDAHPADPGSRPHLIRLFSRDAPGREDNTFKDRPSESDELQTIQEDSAATSESLDVMASQKRPSQRHGSKYLATASTMDHARHGFLPRHRDTGILDSIGRFFGGDRGAPKRGSGKDSHHPARTAHYGSLPQKSHGRTQDENPVVHFFKNIVTPRTPPPSQGKGRGLSLSRFSWGAEGQRPGFGYGGRASDYKSAHKGFKGVDAQGTLSKIFKLGGRDSRSGSPMARR

SEQ ID NO: 54270 - protein, 186 aa, Homo sapiens
MASQKRPSQRHGSKYLATASTMDHARHGFLPRHRDTGILDSIGRFFGGDRGAPKRGSGKVPWLKPGRSPLPSHARSQPGLCNMYKDSHHPARTAHYGSLPQKSHGRTQDENPVVHFFKNIVTPRTPPPSQGKGAEGQRPGFGYGGRASDYKSAHKGFKGVDAQGTLSKIFKLGGRDSRSGSPMARR

SEQ ID NO: 54271 - protein, 197 aa, Homo sapiens
MASQKRPSQRHGSKYLATASTMDHARHGFLPRHRDTGILDSIGRFFGGDRGAPKRGSGKVPWLKPGRSPLPSHARSQPGLCNMYKDSHHPARTAHYGSLPQKSHGRTQDENPVVHFFKNIVTPRTPPPSQGKGRGLSLSRFSWGAEGQRPGFGYGGRASDYKSAHKGFKGVDAQGTLSKIFKLGGRDSRSGSPMARR

SEQ ID NO: 54272 - protein, 197 aa, Homo sapiens
MGNHAGKRELNAEKASTNSETNRGESEKKRNLGELSRTTSEDNEVFGEADANQNNGTSSQDTAVTDSKRTADPKNAWQDAHPADPGSRPHLIRLFSRDAPGREDNTFKDRPSESDELQTIQEDSAATSESLDVMASQKRPSQRHGSKYLATASTMDHARHGFLPRHRDTGILDSIGRFFGGDRGAPKRGSGKVSSEE

SEQ ID NO: 54273 - protein, 197 aa, Homo sapiens; identical to SEQ ID NO: 54272

SEQ ID NO: 54274 - protein, 160 aa, Homo sapiens
MASQKRPSQRHGSKYLATASTMDHARHGFLPRHRDTGILDSIGRFFGGDRGAPKRGSGKDSHHPARTAHYGSLPQKSHGRTQDENPVVHFFKNIVTPRTPPPSQGKGAEGQRPGFGYGGRASDYKSAHKGFKGVDAQGTLSKIFKLGGRDSRSGSPMARR

SEQ ID NO: 54275 - protein, 171 aa, Homo sapiens
MASQKRPSQRHGSKYLATASTMDHARHGFLPRHRDTGILDSIGRFFGGDRGAPKRGSGKDSHHPARTAHYGSLPQKSHGRTQDENPVVHFFKNIVTPRTPPPSQGKGRGLSLSRFSWGAEGQRPGFGYGGRASDYKSAHKGFKGVDAQGTLSKIFKLGGRDSRSGSPMARR

SEQ ID NO: 54276 - protein, 86 aa, Homo sapiens
MASQKRPSQRHGSKYLATASTMDHARHGFLPRHRDTGILDSIGRFFGGDRGAPKRGSGKDSHHPARTAHYGSLPQKSHGRTQDENP

SEQ ID NO: 54277 - protein, 295 aa, Homo sapiens [sequence omitted]

SEQ ID NO: 54278 - protein, 213 aa, Homo sapiens
MASLSRPSLPSCLCSFLLLLLLQVSSSYAGQFRVIGPRHPIRALVGDEVELPCRISPGKNATGMEVGWYRPPFSRVVHLYRNGKDQDGDQAPEYRGRTELLKDAIGEGKVTLRIRNVRFSDEGGFTCFFRDHSYQEEAAMELKVEDPFYWVSPGVLVLLAVLPVLLLQITVGLVFLCLQYRLRGKLRAEIENLHRTFGQFLEELLFHLEALSG

SEQ ID NO: 54279 - protein, 131 aa, Homo sapiens
MASLSRPSLPSCLCSFLLLLLLQVSSSYADPFYWVSPGVLVLLAVLPVLLLQITVGLIFLCLQYRLRGKLRAEIENLHRTFDPHFLRVPCWKITLFVIVPVLGPLVALIICYNWLHRRLAGQFLEELRNPF

SEQ ID NO: 54280 - protein, 206 aa, Homo sapiens
MASLSRPSLPSCLCSFLLLLLLQVSSSYAGQFRVIGPRHPIRALVGDEVELPCRISPGKNATGMEVGWYRPPFSRVVHLYRNGKDQDGDQAPEYRGRTELLKDAIGEGKVTLRIRNVRFSDEGGFTCFFRDHSYQEEAAMELKVEDPFYWVSPGVLVLLAVLPVLLLQITVGLIFLCLQYRLRGKLRAEIENLHRTFVFHLEALSG

SEQ ID NO: 54281 - protein, 252 aa, Homo sapiens
MASLSRPSLPSCLCSFLLLLLLQVSSSYAGQFRVIGPRHPIRALVGDEVELPCRISPGKNATGMEVGWYRPPFSRVVHLYRNGKDQDGDQAPEYRGRTELLKDAIGEGKVTLRIRNVRFSDEGGFTCFFRDHSYQEEAAMELKVEDPFYWVSPGVLVLLAVLPVLLLQITVGLIFLCLQYRLRGKLRAEIENLHRTFDPHFLRVPCWKITLFVIVPVLGPLVALIICYNWLHRRLAGQFLEELLFHLEALSG

SEQ ID NO: 54282 - protein, 171 aa, Homo sapiens
MASLSRPSLPSCLCSFLLLLLLQVSSSYAGQFRVIGPRHPIRALVGDEVELPCRISPGKNATGMEVGWYRPPFSRVVHLYRNGKDQDGDQAPEYRGRTELLKDAIGEGKVTLRIRNVRFSDEGGFTCFFRDHSYQEEAAMELKVEVSHSVTQDWLQWHDHGSLQPPPPRLK

SEQ ID NO: 54283 - protein, 247 aa, Homo sapiens
MASLSRPSLPSCLCSFLLLLLLQVSSSYAGQFRVIGPRHPIRALVGDEVELPCRISPGKNATGMEVGWYRPPFSRVVHLYRNGKDQDGDQAPEYRGRTELLKDAIGEGKVTLRIRNVRFSDEGGFTCFFRDHSYQEEAAMELKVEDPFYWVSPGVLVLLAVLPVLLLQITVGLIFLCLQYRLRGKLRAEIENLHRTFDPHFLRVPCWKITLFVIVPVLGPLVALIICYNWLHRRLAGQFLEELRNPF

SEQ ID NO: 54284 - protein, 131 aa, Homo sapiens [sequence omitted]

SEQ ID NO: 54285 - protein, 247 aa, Homo sapiens
MASLSRPSLPSCLCSFLLLLLLQVSSSYAGQFRVIGPRHPIRALVGDEVELPCRISPGKNATGMEVGWYRPPFSRVVHLYRNGKDQDGDQAPEYRGRTELLKDAIGEGKVTLRIRNVRFSDEGGFTCFFRDHSYQEEAAMELKVEDPFYWVSPGVLVLLAVLPVLLLQITVGLVFLCLQYRLRGKLRAEIENLHRTFDPHFLRVPCWKITLFVIVPVLGPLVALIICYNWLHRRLAGQFLEELRNPF

SEQ ID NO: 54286 - protein, 247 aa, Homo sapiens; identical to SEQ ID NO: 54285

SEQ ID NO: 54287 - protein, 229 aa, Homo sapiens [sequence omitted]

SEQ ID NO: 54288 - protein, 213 aa, Homo sapiens
MASLSRPSLPSCLCSFLLLLLLQVSSSYAGQFRVIGPRHPIRALVGDEVELPCRISPGKNATGMEVGWYRPPFSRVVHLYRNGKDQDGDQAPEYRGRTELLKDAIGEGKVTLRIRNVRFSDEGGFTCFFRDHSYQEEAAMELKVEDPFYWVSPGVLVLLAVLPVLLLQITVGLIFLCLQYRLRGKLRAEIENLHRTFGQFLEELLFHLEALSG

SEQ ID NO: 54289 - protein, 224 aa, Homo sapiens
MASLSRPSLPSCLCSFLLLLLLQVSSSYAGQFRVIGPRHPIRALVGDEVELPCRISPGKNATGMEVGWYRPPFSRVVHLYRNGKDQDGDQAPEYRGRTELLKDAIGEGKVTLRIRNVRFSDEGGFTCFFRDHSYQEEAAMELKVEDPFYWVSPGVLVLLAVLPVLLLQITVGLIFLCLQYRLRGKLRAEIENLHRTFESFGVLGPQVKEPKKTGQFLEELRNPF

SEQ ID NO: 54290 - protein, 224 aa, Homo sapiens
MASLSRPSLPSCLCSFLLLLLLQVSSSYAGQFRVIGPRHPIRALVGDEVELPCRISPGKNATGMEVGWYRPPFSRVVHLYRNGKDQDGDQAPEYRGRTELLKDAIGEGKVTLRIRNVRFSDEGGFTCFFRDHSYQEEAAMELKVEDPFYWVSPGVLVLLAVLPVLLLQITLGLVFLCLQYRLRGKLRAEIENLHRTFESFGVLGPQVKEPKKTGQFLEELRNPF

SEQ ID NO: 54291 - protein, 229 aa, Homo sapiens [sequence omitted]

SEQ ID NO: 54292 - protein, 213 aa, Homo sapiens; identical to SEQ ID NO: 54278

SEQ ID NO: 54293 - protein, 179 aa, Homo sapiens
  VARIANT 1: note = MOD_RES - Any amino acid
XQFRVIGPRHPIRALVGDEVELPCRISPGKNATGMEVGWYRPPFSRVVHLYRNGKDQDGDQAPEYRGRTELLKDAIGEGKVTLRIRNVRFSDEGGFTCFFRDHSYQEEAAMELKVEDPFYWVSPGVLVLLAVLPVLLLQITVGLVFLCLQYRLRGKLRAEIENLHRTFGQFLEELRNPF

SEQ ID NO: 54294 - protein, 131 aa, Homo sapiens [sequence omitted]

SEQ ID NO: 54295 - protein, 204 aa, Homo sapiens
SLSRPSLPSCLCSFLLLLLLQVSSSYAGQFRVIGPRHPIRALVGDEVELPCRISPGKNATGMEVGWYRPPFSRVVHLYRNGKDQDGDQAPEYRGRTELLKDAIGEGKVTLRIRNVRFSDEGGFTCFFRDHSYQEEAAMELKVEDPFYWVSPGVLVLLAVLPVLLLQITVGLVFLCLQYRLRGKLRAEIENLHRTFVFHLEALSG

SEQ ID NO: 54296 - protein, 131 aa, Homo sapiens
MASLSRPSLPSCLCSFLLLLLLQVSSSYADPFYWVSPGVLVLLAVLPVLLLQITLGLVFLCLQYRLRGKLRAEIENLHRTFDPHFLRVPCWKITLFVIVPVLGPLVALIICYNWLHRRLAGQFLEELRNPF

SEQ ID NO: 54297 - protein, 224 aa, Homo sapiens [sequence omitted]

SEQ ID NO: 54298 - protein, 224 aa, Homo sapiens [sequence omitted]

SEQ ID NO: 54299 - protein, 224 aa, Homo sapiens [sequence omitted]

SEQ ID NO: 54300 - protein, 252 aa, Homo sapiens
MASLSRPSLPSCLCSFLLLLLLQVSSSYAGQFRVIGPRHPIRALVGDEVELPCRISPGKNATGMEVGWYRPPFSRVVHLYRNGKDQDGDQAPEYRGRTELLKDAIGEGKVTLRIRNVRFSDEGGFTCFFRDHSYQEEAAMELKVEDPFYWVSPGVLVLLAVLPVLLLQITVGLVFLCLQYRLRGKLRAEIENLHRTFDPHFLRVPCWKITLFVIVPVLGPLVALIICYNWLHRRLAGQFLEELLFHLEALSG

SEQ ID NO: 54301 - protein, 247 aa, Homo sapiens; identical to SEQ ID NO: 54285

SEQ ID NO: 54302 - protein, 179 aa, Homo sapiens; identical to SEQ ID NO: 54293
  VARIANT 1: note = MOD_RES - Any amino acid

SEQ ID NO: 54303 - protein, 179 aa, Homo sapiens; identical to SEQ ID NO: 54293
  VARIANT 1: note = MOD_RES - Any amino acid

SEQ ID NO: 54304 - protein, 252 aa, Homo sapiens; identical to SEQ ID NO: 54300

SEQ ID NO: 54305 - protein, 229 aa, Homo sapiens [sequence omitted]

SEQ ID NO: 54306 - protein, 295 aa, Homo sapiens [sequence omitted]

SEQ ID NO: 54307 - protein, 213 aa, Homo sapiens; identical to SEQ ID NO: 54278

SEQ ID NO: 54308 - protein, 252 aa, Homo sapiens; identical to SEQ ID NO: 54300

SEQ ID NO: 54309 - protein, 179 aa, Homo sapiens; identical to SEQ ID NO: 54293
  VARIANT 1: note = MOD_RES - Any amino acid

SEQ ID NO: 54310 - protein, 295 aa, Homo sapiens [sequence omitted]

SEQ ID NO: 54311 - protein, 295 aa, Homo sapiens [sequence omitted]

SEQ ID NO: 54312 - protein, 131 aa, Homo sapiens [sequence omitted]

SEQ ID NO: 54313 - protein, 252 aa, Homo sapiens; identical to SEQ ID NO: 54300

SEQ ID NO: 54314 - protein, 247 aa, Homo sapiens; identical to SEQ ID NO: 54285

SEQ ID NO: 54315 - protein, 204 aa, Homo sapiens; identical to SEQ ID NO: 54295

SEQ ID NO: 54316 - protein, 295 aa, Homo sapiens
MASLSRPSLPSCLCSFLLLLLLQVSSSYAGQFRVIGPRHPIRALVGDEVELPCRISPGKNATGMEVGWYRPPFSRVVHLYRNGKDQDGDQAPEYRGRTELLKDAIGEGKVTLRIRNVRFSDEGGFTCFFRDHSYQEEAAMELKVEDPFYWVSPGVLVLLAVLPVLLLQITLGLVFLCLQYRLRGKLRAEIENLHRTFDPHFLRVPCWKITLFVIVPVLGPLVALIICYNWLHRRLAGQFLEELRKFSSLCYKQRIKSQERETEATRGRGGLLRDHIPRGKEELESLGGGKTPPGR

SEQ ID NO: 54317 - protein, 229 aa, Homo sapiens [sequence omitted]

SEQ ID NO: 54318 - protein, 131 aa, Homo sapiens [sequence omitted]

SEQ ID NO: 54319 - protein, 179 aa, Homo sapiens
  VARIANT 1: note = MOD_RES - Any amino acid
XQFRVIGPRHPIRALVGDEVELPCRISPGKNATGMEVGWYRPPFSRVVHLYRNGKDQDGDQAPEYRGRTELLKDAIGEGKVTLRIRNVRFSDEGGFTCFFRDHSYQEEAAMELKVEDPFYWVSPGVLVLLAVLPVLLLQITLGLVFLCLQYRLRGKLRAEIENLHRTFGQFLEELRNPF

SEQ ID NO: 54320 - protein, 208 aa, Homo sapiens
MASLSRPSLPSCLCSFLLLLLLQVSSSYAGQFRVIGPRHPIRALVGDEVELPCRISPGKNATGMEVGWYRPPFSRVVHLYRNGKDQDGDQAPEYRGRTELLKDAIGEGKVTLRIRNVRFSDEGGFTCFFRDHSYQEEAAMELKVEDPFYWVSPGVLVLLAVLPVLLLQITVGLIFLCLQYRLRGKLRAEIENLHRTFGQFLEELRNPF

SEQ ID NO: 54321 - protein, 247 aa, Homo sapiens; identical to SEQ ID NO: 54285

SEQ ID NO: 54322 - protein, 131 aa, Homo sapiens [sequence omitted]

SEQ ID NO: 54323 - protein, 213 aa, Homo sapiens; identical to SEQ ID NO: 54278

SEQ ID NO: 54324 - protein, 204 aa, Homo sapiens
SLSRPSLPSCLCSFLLLLLLQVSSSYAGQFRVIGPRHPIRALVGDEVELPCRISPGKNATGMEVGWYRPPFSRVVHLYRNGKDQDGDQAPEYRGRTELLKDAIGEGKVTLRIRNVRFSDEGGFTCFFRDHSYQEEAAMELKVEDPFYWVSPGVLVLLAVLPVLLLQITLGLVFLCLQYRLRGKLRAEIENLHRTFVFHLEALSG

SEQ ID NO: 54325 - protein, 224 aa, Homo sapiens [sequence omitted]

SEQ ID NO: 54326 - protein, 229 aa, Homo sapiens [sequence omitted]

SEQ ID NO: 54327 - protein, 295 aa, Homo sapiens [sequence omitted]

SEQ ID NO: 54328 - protein, 179 aa, Homo sapiens; identical to SEQ ID NO: 54293
  VARIANT 1: note = MOD_RES - Any amino acid

SEQ ID NO: 54329 - protein, 213 aa, Homo sapiens; identical to SEQ ID NO: 54278

SEQ ID NO: 54330 - protein, 252 aa, Homo sapiens; identical to SEQ ID NO: 54300

SEQ ID NO: 54331 - protein, 213 aa, Homo sapiens; identical to SEQ ID NO: 54278

SEQ ID NO: 54332 - protein, 224 aa, Homo sapiens [sequence omitted]

SEQ ID NO: 54333 - protein, 204 aa, Homo sapiens; identical to SEQ ID NO: 54295

SEQ ID NO: 54334 - protein, 224 aa, Homo sapiens [sequence omitted]

SEQ ID NO: 54335 - protein, 252 aa, Homo sapiens; identical to SEQ ID NO: 54300

SEQ ID NO: 54336 - protein, 247 aa, Homo sapiens; identical to SEQ ID NO: 54285

SEQ ID NO: 54337 - protein, 204 aa, Homo sapiens; identical to SEQ ID NO: 54295

SEQ ID NO: 54338 - protein, 295 aa, Homo sapiens [sequence omitted]

SEQ ID NO: 54339 - protein, 252 aa, Homo sapiens
MASLSRPSLPSCLCSFLLLLLLQVSSSYAGQFRVIGPRHPIRALVGDEVELPCRISPGKNATGMEVGWYRPPFSRVVHLYRNGKDQDGDQAPEYRGRTELLKDAIGEGKVTLRIRNVRFSDEGGFTCFFRDHSYQEEAAMELKVEDPFYWVSPGVLVLLAVLPVLLLQITLGLVFLCLQYRLRGKLRAEIENLHRTFDPHFLRVPCWKITLFVIVPVLGPLVALIICYNWLHRRLAGQFLEELLFHLEALSG

SEQ ID NO: 54340 - protein, 179 aa, Homo sapiens; identical to SEQ ID NO: 54293
  VARIANT 1: note = MOD_RES - Any amino acid

SEQ ID NO: 54341 - protein, 131 aa, Homo sapiens [sequence omitted]

SEQ ID NO: 54342 - protein, 247 aa, Homo sapiens
MASLSRPSLPSCLCSFLLLLLLQVSSSYAGQFRVIGPRHPIRALVGDEVELPCRISPGKNATGMEVGWYRPPFSRVVHLYRNGKDQDGDQAPEYRGRTELLKDAIGEGKVTLRIRNVRFSDEGGFTCFFRDHSYQEEAAMELKVEDPFYWVSPGVLVLLAVLPVLLLQITLGLVFLCLQYRLRGKLRAEIENLHRTFDPHFLRVPCWKITLFVIVPVLGPLVALIICYNWLHRRLAGQFLEELRNPF

SEQ ID NO: 54343 - protein, 213 aa, Homo sapiens
MASLSRPSLPSCLCSFLLLLLLQVSSSYAGQFRVIGPRHPIRALVGDEVELPCRISPGKNATGMEVGWYRPPFSRVVHLYRNGKDQDGDQAPEYRGRTELLKDAIGEGKVTLRIRNVRFSDEGGFTCFFRDHSYQEEAAMELKVEDPFYWVSPGVLVLLAVLPVLLLQITLGLVFLCLQYRLRGKLRAEIENLHRTFGQFLEELLFHLEALSG

SEQ ID NO: 54344 - protein, 204 aa, Homo sapiens; identical to SEQ ID NO: 54295

SEQ ID NO: 54345 - protein, 229 aa, Homo sapiens [sequence omitted]

SEQ ID NO: 54346 - protein, 204 aa, Homo sapiens; identical to SEQ ID NO: 54295

SEQ ID NO: 54347 - protein, 229 aa, Homo sapiens
MASLSRPSLPSCLCSFLLLLLLQVSSSYAGQFRVIGPRHPIRALVGDEVELPCRISPGKNATGMEVGWYRPPFSRVVHLYRNGKDQDGDQAPEYRGRTELLKDAIGEGKVTLRIRNVRFSDEGGFTCFFRDHSYQEEAAMELKVEDPFYWVSPGVLVLLAVLPVLLLQITLGLVFLCLQYRLRGKLRAEIENLHRTFESFGVLGPQVKEPKKTGQFLEELLFHLEALSG

SEQ ID NO: 54348 - protein, 229 aa, Homo sapiens
MASLSRPSLPSCLCSFLLLLLLQVSSSYAGQFRVIGPRHPIRALVGDEVELPCRISPGKNATGMEVGWYRPPFSRVVHLYRNGKDQDGDQAPEYRGRTELLKDAIGEGKVTLRIRNVRFSDEGGFTCFFRDHSYQEEAAMELKVEDPFYWVSPGVLVLLAVLPVLLLQITVGLIFLCLQYRLRGKLRAEIENLHRTFESFGVLGPQVKEPKKTGQFLEELLFHLEALSG

SEQ ID NO: 54349 - protein, 171 aa, Homo sapiens; identical to SEQ ID NO: 54282

SEQ ID NO: 54350 - protein, 177 aa, Homo sapiens [sequence omitted]

SEQ ID NO: 54351 - protein, 57 aa, Homo sapiens
MASLSRPSLPSCLCSFLLLLLLQVSSSYAGLVAVARSWLIAASTSQAQVILLTQPLE

SEQ ID NO: 54352 - protein, 208 aa, Homo sapiens [sequence omitted]

SEQ ID NO: 54353 - protein, 171 aa, Homo sapiens; identical to SEQ ID NO: 54282

SEQ ID NO: 54354 - protein, 171 aa, Homo sapiens; identical to SEQ ID NO: 54282

SEQ ID NO: 54355 - protein, 206 aa, Homo sapiens [sequence omitted]

SEQ ID NO: 54356 - protein, 208 aa, Homo sapiens [sequence omitted]

SEQ ID NO: 54357 - protein, 206 aa, Homo sapiens [sequence omitted]

SEQ ID NO: 54358 - protein, 177 aa, Homo sapiens [sequence omitted]

SEQ ID NO: 54359 - protein, 206 aa, Homo sapiens [sequence omitted]

SEQ ID NO: 54360 - protein, 206 aa, Homo sapiens [sequence omitted]

SEQ ID NO: 54361 - protein, 177 aa, Homo sapiens [sequence omitted]

SEQ ID NO: 54362 - protein, 206 aa, Homo sapiens [sequence omitted]

SEQ ID NO: 54363 - protein, 57 aa, Homo sapiens; identical to SEQ ID NO: 54351

SEQ ID NO: 54364 - protein, 206 aa, Homo sapiens [sequence omitted]

SEQ ID NO: 54365 - protein, 171 aa, Homo sapiens; identical to SEQ ID NO: 54282

SEQ ID NO: 54366 - protein, 206 aa, Homo sapiens
MASLSRPSLPSCLCSFLLLLLLQVSSSYAGQFRVIGPRHPIRALVGDEVELPCRISPGKNATGMEVGWYRPPFSRVVHLYRNGKDQDGDQAPEYRGRTELLKDAIGEGKVTLRIRNVRFSDEGGFTCFFRDHSYQEEAAMELKVEDPFYWVSPGVLVLLAVLPVLLLQITLGLVFLCLQYRLRGKLRAEIENLHRTFVFHLEALSG

SEQ ID NO: 54367 - protein, 171 aa, Homo sapiens; identical to SEQ ID NO: 54282

SEQ ID NO: 54368 - protein, 171 aa, Homo sapiens; identical to SEQ ID NO: 54282

SEQ ID NO: 54369 - protein, 208 aa, Homo sapiens [sequence omitted]

SEQ ID NO: 54370 - protein, 57 aa, Homo sapiens; identical to SEQ ID NO: 54351

SEQ ID NO: 54371 - protein, 208 aa, Homo sapiens [sequence omitted]

SEQ ID NO: 54372 - protein, 57 aa, Homo sapiens; identical to SEQ ID NO: 54351

SEQ ID NO: 54373 - protein, 177 aa, Homo sapiens [sequence omitted]

SEQ ID NO: 54374 - protein, 171 aa, Homo sapiens; identical to SEQ ID NO: 54282

SEQ ID NO: 54375 - protein, 177 aa, Homo sapiens
MSHISWEERYRNGKDQDGDQAPEYRGRTELLKDAIGEGKVTLRIRNVRFSDEGGFTCFFRDHSYQEEAAMELKVEDPFYWVSPGVLVLLAVLPVLLLQITLGLVFLCLQYRLRGKLRAEIENLHRTFDPHFLRVPCWKITLFVIVPVLGPLVALIICYNWLHRRLAGQFLEELRNPF

SEQ ID NO: 54376 - protein, 208 aa, Homo sapiens [sequence omitted]

SEQ ID NO: 54377 - protein, 57 aa, Homo sapiens; identical to SEQ ID NO: 54351

SEQ ID NO: 54378 - protein, 57 aa, Homo sapiens; identical to SEQ ID NO: 54351

SEQ ID NO: 54379 - protein, 177 aa, Homo sapiens [sequence omitted]

SEQ ID NO: 54380 - protein, 171 aa, Homo sapiens; identical to SEQ ID NO: 54282

SEQ ID NO: 54381 - protein, 177 aa, Homo sapiens [sequence omitted]

SEQ ID NO: 54382 - protein, 57 aa, Homo sapiens; identical to SEQ ID NO: 54351

SEQ ID NO: 54383 - protein, 208 aa, Homo sapiens [sequence omitted]

SEQ ID NO: 54384 - protein, 108 aa, Homo sapiens
MASLSRPSLPSCLCSFLLLLLLQVSSSYADPFYWVSPGVLVLLAVLPVLLLQITVGLIFLCLQYRLRGKLRAEIENLHRTFESFGVLGPQVKEPKKTGQFLEELRNPF

SEQ ID NO: 54385 - protein, 250 aa, Homo sapiens
MAPGAPSSSPSPILAVLLFSSLVLSPAQAIVVYTDREVHGAVGSRVTLHCSFWSSEWVSDDISFTWRYQPEGGRDAISIFHYAKGQPYIDEVGTFKERIQWVGDPRWKDGSIVIHNLDYSDNGTFTCDVKNPPDIVGKTSQVTLYVFEKVPTRYGVVLGAVIGGVLGVVLLLLLLFYVVRYCWLRRQAALQRRLSAMEKGKLHKPGKDASKRGRQTPVLYQCWTTAEAPKLSVRRRPRGWGSLARIRNSG

SEQ ID NO: 54386 - protein, 258 aa, Homo sapiens
MLRAPAPAPAMAPGAPSSSPSPILAVLLFSSLVLSPAQAIVVYTDREVHGAVGSRVTLHCSFWSSEWVSDDISFTWRYQPEGGRDAISIFHYAKGQPYIDEVGTFKERIQWVGDPRWKDGSIVIHNLDYSDNGTFTCDVKNPPDIVGKTSQVTLYVFEKVPTRYGVVLGAVIGGVLGVVLLLLLLFYVVRYCWLRRQAALQRRLSAMEKGKLHKPGKDASKRGRQTPVLYAMLDHSRSTKAVSEKKAKGLGESRKDKK

SEQ ID NO: 54387 - protein, 248 aa, Homo sapiens
MAPGAPSSSPSPILAVLLFSSLVLSPAQAIVVYTDREVHGAVGSRVTLHCSFWSSEWVSDDISFTWRYQPEGGRDAISIFHYAKGQPYIDEVGTFKERIQWVGDPRWKDGSIVIHNLDYSDNGTFTCDVKNPPDIVGKTSQVTLYVFEKVPTRYGVVLGAVIGGVLGVVLLLLLLFYVVRYCWLRRQAALQRRLSAMEKGKLHKPGKDASKRGRQTPVLYAMLDHSRSTKAVSEKKAKGLGESRKDKK

SEQ ID NO: 54388 - protein, 248 aa, Homo sapiens; identical to SEQ ID NO: 54387

SEQ ID NO: 54389 - protein, 215 aa, Homo sapiens
MYGKSSTRAVLLLLGIQLTALWPIAAVEIYTSRVLEAVNGTDARLKCTFSSFAPVGDALTVTWNFRPLDGGPEQFVFYYHIDPFQPMSGRFKDRVSWDGNPERYDASILLWKLQFDDNGTYTCQVKNPPDVDGVIGEIRLSVVHTVRFSEIHFLALAIGSACALMIIIVIVVVLFQHYRKKRWAERAHKVVEIKSKEEERLNQEKKVSVYLEDTD

SEQ ID NO: 54390 - protein, 215 aa, Homo sapiens; identical to SEQ ID NO: 54389

SEQ ID NO: 54391 - protein, 235 aa, Homo sapiens
MQQRGAAGSRGCALFPLLGVLFFQGVYIVFSLEIRADAHVRGYVGEKIKLKCTFKSTSDVTDKLTIDWTYRPPSSSHTVSIFHYQSFQYPTTAGTFRDRISWVGNVYKGDASISISNPTIKDNGTFSCAVKNPPDVHHNIPMTELTVTERGFGTMLSSVALLSILVFVPSAVVVALLLVRMGRKAAGLKKRSRSGYKKSSIEVSDDTDQEEEEACMARLCVRCAECLDSDYEETY

SEQ ID NO: 54392 - protein, 223 aa, Homo sapiens
MQQRGAAGSRGCALFPLLGVLFFQDAHVRGYVGEKIKLKCTFKSTSDVTDKLTIDWTYRPPSSSHTVSIFHYQSFQYPTTAGTFRDRISWVGNVYKGDASISISNPTIKDNGTFSCAVKNPPDVHHNIPMTELTVTERGFGTMLSSVALLSILVFVPSAVVVALLLVRMGRKAAGLKKRSRSGYKKSSIEVSDDTDQEEEEACMARLCVRCAECLDSDYEETY

SEQ ID NO: 54393 - protein, 1121 aa, Homo sapiens
MSLENEDKRARTRSKALRGPPETTAADLSCPTPGCTGSGHVRGKYSRHRSLQSCPLAKKRKLEGAEAEHLVSKRKSHPLKLALDEGYGVDSDGSEDTEVKDASVSDESEGTLEGAEAETSGQDEIHRPETAEGRSPVKSHFGSNPIGSATASSKGSYSSYQGIIATSLLNLGQIAEETLVEEDLGQAAKPGPGIVHLLQEAAEGAASEEGEKGLFIQPEDAEEVVEVTTERSQDLCPQSLEDAASEESSKQKGILSHEEEDEEEEEEEEEEEEDEEEEEEEEEEEEEEEEEEEEEEEEEEEEEEEEAAPDVIFQEDTSHTSAQKAPELRGPESPSPKPEYSVIVEVRSDDDKDEDTHSRKSTVTDESEMQDMMTRGNLGLLEQAIALKAEQVRTVCEPGCPPAEQSQLGLGEPGKAAKPLDTVRKSYYSKDPSRAEKREIKCPTPGCDGTGHVTGLYPHHRSLSGCPHKDRIPPEILAMHENVLKCPTPGCTGQGHVNSNRNTHRSLSGCPIAAAEKLAKSHEKQQPQTGDPSKSSSNSDRILRPMCFVKQLEVPPYGSYRPNVAPATPRANLAKELEKFSKVTFDYASFDAQVFGKRMLAPKIQTSETSPKAFQCFDYSQDAEAAHMAATAILNLSTRCWEMPENLSTKPQDLPSKSVDIEVDENGTLDLSMHKHRKRENAFPSSSSCSSSPGVKSPDASQRHSSTSAPSSSMTSPQSSQASRQDEWDRPLDYTKPSRLREEEPEESEPAAHSFASSEADDQEVSEENFEERKYPGEVTLTNFKLKFLSKDIKKELLTCPTPGCDGSGHITGNYASHRSLSGCPLADKSLRNLMAAHSADLKCPTPGCDGSGHITGNYASHRSLSGCPRAKKSGVKVAPTKDDKEDPELMKCPVPGCVGLGHISGKYASHRSASGCPLAARRQKEGSLNGSSFSWKSLKNEGPTCPTPGCDGSGHANGSFLTHRSLSGCPRATFAGKKGKLSGDEVLSPKFKTSDVLENDEEIKQLNQEIRDLNESNSEMEAAMVQLQSQISSMEKNLKNIEEENKLIEEQNEALFLELSGLSQALIQSLANIRLPHMEPICEQNFDAYVSTLTDMYSNQDPENKDLLESIKQAVRGIQV

SEQ ID NO: 54394 - protein, 591 aa, Homo sapiens
MSLENEDKRARTRSKALRGPPETTAADLSCPTPGCTGSGHVRGKYSRHRSLQSCPLAKKRKLEGAEAEHLVSKRKSHPLKLALDEGYGVDSDGSEDTEVKDASVSDESEGTLEGAEAETSGQDEIHRPETAEDPSRAEKREIKCPTPGCDGTGHVTGLYPHHRSLSGCPHKDRIPPEILAMHENVLKCPTPGCTGQGHVNSNRNTHRSLSGCPIAAAEKLAKSHEKQQPQTGDPSKSSSNSDRILRPMCFVKQLEVPPYGSYRPNVAPATPRANLAKELEKFSKVTFDYASFDAQVFGKRMLAPKIQTSETSPKAFQCFDYSQDAEAAHMAATAILNLSTRCWEMPENLSTKPQDLPSKSVDIEVDENGTLDLSMHKHRKRENAFPSSSSCSSSPGVKSPDASQRHSSTSAPSSSMTSPQSSQASRQDEWDRPLDYTKPSRLREEEPEESEPAAHSFASSEADDQEVSEENFEERKYPGEVTLTNFKLKFLSKDIKKELLTCPTPGCDGSGHITGNYASHRRCPTPGCDGSGHITGNYASHRSLSGCPRAKKSGVKVAPTKDDKEDPELMKYVGPCWLFHCIAELRFSCVL

SEQ ID NO: 54395 - protein, 1148 aa, Homo sapiens
MSLENEDKRARTRSKALRGPPETTAADLSCPTPGCTGSGHVRGKYSRHRSLQSCPLAKKRKLEGAEAEHLVSKRKSHPLKLALDEGYGVDSDGSEDTEVKDASVSDESEGTLEGAEAETSGQDEIHRPETAEGRSPVKSHFGSNPIGSATASSKGSYSSYQGIIATSLLNLGQIAEETLVEEDLGQAAKPGPGIVHLLQEAAEGAASEEGEKGLFIQPEDAEEVVEVTTERSQDLCPQSLEDAASEESSKQKGILSHEEEDEEEEEEEEEEEEDEEEEEEEEEEEEEEEEEEEEEEEEEEEEEEEEAAPDVIFQEDTSHTSAQKAPELRGPESPSPKPEYSVIVEVRSDDDKDEDTHSRKSTVTDESEMQDMMTRGNLGLLEQAIALKAEQVRTVCEPGCPPAEQSQLGLGEPGKAAKPLDTVRKSYYSKDPSRAEKREIKCPTPGCDGTGHVTGLYPHHRSLSGCPHKDRIPPEILAMHENVLKCPTPGCTGQGHVNSNRNTHRSLSGCPIAAAEKLAKSHEKQQPQTGDPSKSSSNSDRILRPMCFVKQLEVPPYGSYRPNVAPATPRANLAKELEKFSKVTFDYASFDAQVFGKRMLAPKIQTSETSPKAFQSKPFPKASSPRHSPSSSYVRSTSSSSAGFDYSQDAEAAHMAATAILNLSTRCWEMPENLSTKPQDLPSKSVDIEVDENGTLDLSMHKHRKRENAFPSSSSCSSSPGVKSPDASQRHSSTSAPSSSMTSPQSSQASRQDEWDRPLDYTKPSRLREEEPEESEPAAHSFASSEADDQEVSEENFEERKYPGEVTLTNFKLKFLSKDIKKELLTCPTPGCDGSGHITGNYASHRSLSGCPLADKSLRNLMAAHSADLKCPTPGCDGSGHITGNYASHRSLSGCPRAKKSGVKVAPTKDDKEDPELMKCPVPGCVGLGHISGKYASHRSASGCPLAARRQKEGSLNGSSFSWKSLKNEGPTCPTPGCDGSGHANGSFLTHRSLSGCPRATFAGKKGKLSGDEVLSPKFKTSDVLENDEEIKQLNQEIRDLNESNSEMEAAMVQLQSQISSMEKNLKNIEEENKLIEEQNEALFLELSGLSQALIQSLANIRLPHMEPICEQNFDAYVSTLTDMYSNQDPENKDLLESIKQAVRGIQV

SEQ ID NO: 54396 - protein, 1132 aa, Homo sapiens
MEVDTEEKRHRTRSKGVRVPVEPAIQELFSCPTPGCDGSGHVSGKYARHRSVYGCPLAKKRKTQDKQPQEPAPKRKPFAVKADSSSVDECDDSDGTEDMDEKEEDEEEEEEEEEENEDHQMNCHNTRIMQDTEKDDNNNDEYDNYDELVAKSLLNLGKIAEDAAYRARTESEMNSNTSNSLEDDSDKNENLGRKSELSLDLDSDVVRETVDSLKLLAQGHGVVLSENMNDRNYADSMSQQDSRNMNYVMLGKPMNNGLMEKMVEESDEEVCLSSLECLRNQCFDLARKLSETNPQERNPQQNMNIRQHVRPEEDFPGRTPDRNYSDMLNLMRLEEQLSPRSRVFASCAKEDGCHERDDDTTSVNSDRSEEVFDMTKGNLTLLEKAIALETERAKAMREKMAMEAGRRDNMRSYEDQSPRQLPGEDRKPKSSDSHVKKPYYDPSRTEKKESKCPTPGCDGTGHVTGLYPHHRSLSGCPHKDRVPPEILAMHESVLKCPTPGCTGRGHVNSNRNSHRSLSGCPIAAAEKLAKAQEKHQSCDVSKSSQASDRVLRPMCFVKQLEIPQYGYRNNVPTTTPRSNLAKELEKYSKTSFEYNSYDNHTYGKRAIAPKVQTRDISPKGYDDAKRYCKDPSPSSSSTSSYAPSSSSNLSCGGGSSASSTCSKSSFDYTHDMEAAHMAATAILNLSTRCREMPQNLSTKPQDLCATRNPDMEVDENGTLDLSMNKQRPRDSCCPILTPLEPMSPQQQAVMNNRCFQLGEGDCWDLPVDYTKMKPRRIDEDESKDITPEDLDPFQEALEERRYPGEVTIPSPKPKYPQCKESKKDLITLSGCPLADKSIRSMLATSSQELKCPTPGCDGSGHITGNYASHRSLSGCPRAKKSGIRIAQSKEDKEDQEPIRCPVPGCDGQGHITGKYASHRSASGCPLAAKRQKDGYLNGSQFSWKSVKTEGMSCPTPGCDGSGHVSGSFLTHRSLSGCPRATSAMKKAKLSGEQMLTIKQRASNGIENDEEIKQLDEEIKELNESNSQMEADMIKLRTQITTMESNLKTIEEENKVIEQQNESLLHELANLSQSLIHSLANIQLPHMDPINEQNFDAYVTTLTEMYTNQDRYQSPENKALLENIKQAVRGIQV

SEQ ID NO: 54397 - protein, 1186 aa, Homo sapiens
MEVDTEEKRHRTRSKGVRVPVEPAIQELFSCPTPGCDGSGHVSGKYARHRSVYGCPLAKKRKTQDKQPQEPAPKRKPFAVKADSSSVDECDDSDGTEDMDEKEEDEGEEYSEDNDEPGDEDEEDEEGDREEEEEIEEEDEDDDEDGEDVEDEEEEEEEEEEEEEEEENEDHQMNCHNTRIMQDTEKDDNNNDEYDNYDELVAKSLLNLGKIAEDAAYRARTESEMNSNTSNSLEDDSDKNENLGRKSELSLDLDSDVVRETVDSLKLLAQGHGVVLSENMNDRNYADSMSQQDSRNMNYVMLGKPMNNGLMEKMVEESDEEVCLSSLECLRNQCFDLARKLSETNPQERNPQQNMNIRQHVRPEEDFPGRTPDRNYSDMLNLMRLEEQLSPRSRVFASCAKEDGCHERDDDTTSVNSDRSEEVFDMTKGNLTLLEKAIALETERAKAMREKMAMEAGRRDNMRSYEDQSPRQLPGEDRKPKSSDSHVKKPYYGKDPSRTEKKESKCPTPGCDGTGHVTGLYPHHRSLSGCPHKDRVPPEILAMHESVLKCPTPGCTGRGHVNSNRNSHRSLSGCPIAAAEKLAKAQEKHQSCDVSKSSQASDRVLRPMCFVKQLEIPQYGYRNNVPTTTPRSNLAKELEKYSKTSFEYNSYDNHTYGKRAIAPKVQTRDISPKGYDDAKRYCKDPSPSSSSTSSYAPSSSSNLSCGGGSSASSTCSKSSFDYTHDMEAAHMAATAILNLSTRCREMPQNLSTKPQDLCATRNPDMEVDENGTLDLSMNKQRPRDSCCPILTPLEPMSPQQQAVMNNRCFQLGEGDCWDLPVDYTKMKPRRIDEDESKDITPEDLDPFQEALEERRYPGEVTIPSPKPKYPQCKESKKDLITLSGCPLADKSIRSMLATSSQELKCPTPGCDGSGHITGNYASHRSLSGCPRAKKSGIRIAQSKEDKEDQEPIRCPVPGCDGQGHITGKYASHRSASGCPLAAKRQKDGYLNGSQFSWKSVKTEGMSCPTPGCDGSGHVSGSFLTHRSLSGCPRATSAMKKAKLSGEQMLTIKQRASNGIENDEEIKQLDEEIKELNESNSQMEADMIKLRTQITTMESNLKTIEEENKVIEQQNESLLHELANLSQSLIHSLANIQLPHMDPINEQNFDAYVTTLTEMYTNQDRYQSPENKALLENIKQAVRGIQV

SEQ ID NO: 54398 - protein, 184 aa, Homo sapiens
MSCPTPGCDGSGHVSGSFLTHRSLSGCPRATSAMKKAKLSGEQMLTIKQRASNGIENDEEIKQLDEEIKELNESNSQMEADMIKLRTQVTITTMESNLKTIEEENKVIEQQNESLLHELANLSQSLIHSLANIQLPHMDPINEQNFDAYVTTLTEMYTNQDRYQSPENKALLENIKQAVRGIQV

SEQ ID NO: 54399 - protein, 1184 aa, Homo sapiens
MEVDTEEKRHRTRSKGVRVPVEPAIQELFSCPTPGCDGSGHVSGKYARHRSVYGCPLAKKRKTQDKQPQEPAPKRKPFAVKADSSSVDECDDSDGTEDMDEKEEDEGEEYSEDNDEPGDEDEEDEEGDREEEEEIEEEDEDDDEDGEDVEDEEEEEEEEEEEEEEEENEDHQMNCHNTRIMQDTEKDDNNNDEYDNYDELVAKSLLNLGKIAEDAAYRARTESEMNSNTSNSLEDDSDKNENLGRKSELSLDLDSDVVRETVDSLKLLAQGHGVVLSENMNDRNYADSMSQQDSRNMNYVMLGKPMNNGLMEKMVEESDEEVCLSSLECLRNQCFDLARKLSETNPQERNPQQNMNIRQHVRPEEDFPGRTPDRNYSDMLNLMRLEEQLSPRSRVFASCAKEDGCHERDDDTTSVNSDRSEEVFDMTKGNLTLLEKAIALETERAKAMREKMAMEAGRRDNMRSYEDQSPRQLPGEDRKPKSSDSHVKKPYYDPSRTEKKESKCPTPGCDGTGHVTGLYPHHRSLSGCPHKDRVPPEILAMHESVLKCPTPGCTGRGHVNSNRNSHRSLSGCPIAAAEKLAKAQEKHQSCDVSKSSQASDRVLRPMCFVKQLEIPQYGYRNNVPTTTPRSNLAKELEKYSKTSFEYNSYDNHTYGKRAIAPKVQTRDISPKGYDDAKRYCKDPSPSSSSTSSYAPSSSSNLSCGGGSSASSTCSKSSFDYTHDMEAAHMAATAILNLSTRCREMPQNLSTKPQDLCATRNPDMEVDENGTLDLSMNKQRPRDSCCPILTPLEPMSPQQQAVMNNRCFQLGEGDCWDLPVDYTKMKPRRIDEDESKDITPEDLDPFQEALEERRYPGEVTIPSPKPKYPQCKESKKDLITLSGCPLADKSIRSMLATSSQELKCPTPGCDGSGHITGNYASHRSLSGCPRAKKSGIRIAQSKEDKEDQEPIRCPVPGCDGQGHITGKYASHRSASGCPLAAKRQKDGYLNGSQFSWKSVKTEGMSCPTPGCDGSGHVSGSFLTHRSLSGCPRATSAMKKAKLSGEQMLTIKQRASNGIENDEEIKQLDEEIKELNESNSQMEADMIKLRTQITTMESNLKTIEEENKVIEQQNESLLHELANLSQSLIHSLANIQLPHMDPINEQNFDAYVTTLTEMYTNQDRYQSPENKALLENIKQAVRGIQV

SEQ ID NO: 54400 - protein, 183 aa, Homo sapiens
MSQKPAKEGPRLSKNQKYSEHFSIHCCPPFTFLNSKKEIVDRKYSICKSGCFYQKKEEDWICCACQKTRTSRRAKSPQRPKQQPAAPPAVVRAPAKPRSPPRSERQPRSPPRSERQPRSPPRSERQPRSPPRSERQPRPRPEVRPPPAKQRPPQKSKQQPRSSPLRGPGASRGGSPVKASRFW

SEQ ID NO: 54401 - protein, 81 aa, Homo sapiens
MSQKPAKEGPRLSKNQKYSEHFSIHCCPPFTFLNSKKEIVDRKYSICKSGCFYQKKEEDWICCACQKTRLKRKIRPTPKKK

SEQ ID NO: 54402 - protein, 81 aa, Homo sapiens; identical to SEQ ID NO: 54401

SEQ ID NO: 54403 - protein, 81 aa, Homo sapiens; identical to SEQ ID NO: 54401

SEQ ID NO: 54404 - protein, 183 aa, Homo sapiens; identical to SEQ ID NO: 54400

SEQ ID NO: 54405 - protein, 183 aa, Homo sapiens; identical to SEQ ID NO: 54400

SEQ ID NO: 54406 - protein, 81 aa, Homo sapiens; identical to SEQ ID NO: 54401

SEQ ID NO: 54407 - protein, 183 aa, Homo sapiens; identical to SEQ ID NO: 54400

SEQ ID NO: 54408 - protein, 81 aa, Homo sapiens; identical to SEQ ID NO: 54401

SEQ ID NO: 54409 - protein, 58 aa, Homo sapiens
MSQKPAKEGPRLSKNQKYSEHFSIHCCPPFTFLNSKKEIVDRKYSICKSGCFYQKKEE

SEQ ID NO: 54410 - protein, 140 aa, Homo sapiens
MLQAADFIERTETAGELSRGLIGVLSSQISWCLLNVNLSKLPTRLQRLSCSVLNSSPAMRGGARGRPQLTLERPLRPGCRLHSCSEAEKGGFVRRKEIILFPPCEDPARGWLSANPGREPSPGICWHLNLGLPSLHNCEE

SEQ ID NO: 54411 - protein, 271 aa, Homo sapiens
MFGLKRNAVIGLNLYCGGAGLGAGSGGATRPGGRLLATEKEASARREIGGGEAGAVIGGSAGASPPSTLTPDSRRVARPPPIGAEVPDVTATPARLLFFAPTRRAAPLEEMEAPAADAIMSPEEELDGYEPEPLGKRPAVLPLLELVGESGNNTSTDGSLPSTPPPAEEEEDELYRQSLEIISRYLREQATGAKDTKPMGRSGATSRKALETLRRVGDGVQRNHETAFQGWVCGVLPCRGPRRWHQECAAGFCRCCWSRSWFGISNKIALL

SEQ ID NO: 54412 - protein, 350 aa, Homo sapiens
MFGLKRNAVIGLNLYCGGAGLGAGSGGATRPGGRLLATEKEASARREIGGGEAGAVIGGSAGASPPSTLTPDSRRVARPPPIGAEVPDVTATPARLLFFAPTRRAAPLEEMEAPAADAIMSPEEELDGYEPEPLGKRPAVLPLLELVGESGNNTSTDGSLPSTPPPAEEEEDELYRQSLEIISRYLREQATGAKDTKPMGRSGATSRKALETLRRVGDGVQRNHETAFQGMLRKLDIKNEDDVKSLSRVMIHVFSDGVTNWGRIVTLISFGAFVAKHLKTINQESCIEPLAESITDVLVRTKRDWLVKQRGWDGFVEFFHVEDLEGGIRNVLLAFAGVAGVGAGLAYLIR

SEQ ID NO: 54413 - protein, 279 aa, Homo sapiens
MFGLKRNAVIGLNLYCGGAGLGAGSGGATRPGGRLLATEMEAPAADAIMSPEEELDGYEPEPLGKRPAVLPLLELVGESGNNTSTDGSLPSTPPPAEEEEDELYRQSLEIISRYLREQATGAKDTKPMGRSGATSRKALETLRRVGDGVQRNHETAFQGMLRKLDIKNEDDVKSLSRVMIHVFSDGVTNWGRIVTLISFGAFVAKHLKTINQESCIEPLAESITDVLVRTKRDWLVKQRGWDGFVEFFHVEDLEGGIRNVLLAFAGVAGVGAGLAYLIR

SEQ ID NO: 54414 - protein, 407 aa, Homo sapiens
MVNEYKKILLLKGFELMDDYHFTSIKSLLAYDLGLTTKMQEEYNRIKITDLMEKKFQGVACLDKLIELAKDMPSLKNLVNNLRKEKSKVAKKIKTQEKAPVKKINQEEVGLAAPAPTARNKLTSEARGRIPVAQKRKTPNKEKTEAKRNKVSQEQSKPPGPSGASTSAAVDHPPLPQTSSSTPSNTSFTPNQETQAQRQVDARRNVPQNDPVTVVVLKATAPFKYESPENGKSTMFHATVASKTQYFHVKVFDINLKEKFVRKKVITISDYSECKGVMEIKEASSVSDFNQNFEVPNRIIEIANKTPKISQLYKQASGTMVYGLFMLQKKSVHKKNTIYEIQDNTGSMDVVGSGKWHNIKCEKGDKLRLFCLQLRTVDRKLKLVCGSHSFIKVIKAKKNKEGPMNVN

SEQ ID NO: 54415 - protein, 104 aa, Homo sapiens
  VARIANT 1: note = MOD_RES - Any amino acid
XPNRIIEIANKTPKISQLYKQASGTMVYGLFMLQKKSVHKKNTIYEIQDNTGSMDVVGSGKWHNIKCEKGDKLRLFCLQLRTVDRKLKLVIKAKKNKEGPMNVN

SEQ ID NO: 54416 - protein, 264 aa, Homo sapiens
MRPDRAEAPGPPAMAAGGPGAGSAAPVSSTSSLPLAALNMRVRRRLSLFLNVRTQVAADWTALAEEMDFEYLEIRQLETQADPTGRLLDAWQGRPGASVGRLLELLTKLGRDDVLLELGPSIGHMPERFDAFICYCPSDIQFVQEMIRQLEQTNYRLKLCVSDRDVLPGTCVWSIASELIEKRCRRMVVVVSDDYLQSKECDFQTKFALSLSPGAHQKRLIPIKYKAMKKEFPSILRFITVCDYTNPCTKSWFWTRLAKALSLP

SEQ ID NO: 54417 - protein, 204 aa, Homo sapiens
MRPDRAEAPGPPAMAAGGPGAGSAAPVSSTSSLPLAALNMRVRRRLSLFLNVRTQVAADWTALAEEMDFEYLEIRQLETQADPTGRLLDAWQGRPGASVGRLLELLTKLGRDDVLLELGPSIEEDCQKYILKQQQEEAEKPLQVAAVDSSVPRTAELAGITTLDDPLGAAGWWWLSLMITCRARNVTSRPNLHSASLQVPIRSD

SEQ ID NO: 54418 - protein, 159 aa, Homo sapiens
MRPDRAEAPGPPAMAAGGPGAGSAAPVSSTSSLPLAALNMRVRRRLSLFLNVRTQVAADWTALAEEMDFEYLEIRQLETQADPTGRLLDAWQGRPGASVGRLLELLTKLGRDDVLLELGPSIGAAGWWWLSLMITCRARNVTSRPNLHSASLQVPIRSD

SEQ ID NO: 54419 - protein, 268 aa, Homo sapiens
MFRMLNSSFEDDPFFSESILAHRENMRQMIRSFSEPFGRDLLSISDGRGRAHNRRGHNDGEDSLTHTDVSSFQTMDQMVSNMRNYMQKLERNFGQLSVDPNGHSFCSSSVMTYSKIGDEPPKVFQASTQTRRAPGGIKETRKAMRDSDSGLEKMAIGHHIHDRAHVIKKSKNKKTGDEEVNQEFINMNESDAHAFDEEWQSEVLKYKPGRHNLGNTRMRSVGHENPGSRELKRREKPQQSPAIEHGRRSNVLGDKLHIKGSSVKSNKK

SEQ ID NO: 54420 - protein, 243 aa, Homo sapiens
MRQMIRSFSEPFGRDLLSISDGRGRAHNRRGHNDGEDSLTHTDVSSFQTMDQMVSNMRNYMQKLERNFGQLSVDPNGHSFCSSSVMTYSKIGDEPPKVFQASTQTRRAPGGIKETRKAMRDSDSGLEKMAIGHHIHDRAHVIKKSKNKKTGDEEVNQEFINMNESDAHAFDEEWQSEVLKYKPGRHNLGNTRMRSVGHENPGSRELKRREKPQQSPAIEHGRRSNVLGDKLHIKGSSVKSNKK

SEQ ID NO: 54421 - protein, 299 aa, Homo sapiens
MLKEVLQREGKSYKSETLMYIKKARASENKLSESILAHRENMRQMIRSFSEPFGRDLLSISDGRGRAHNRRGHNDGEDSLTATSCSLVPFGDFGGMHTDVSSFQTMDQMVSNMRNYMQKLERNFGQLSVDPNGHSFCSSSVMTYSKIGDEPPKVFQASTQTRRAPGGIKETRKAMRDSDSGLEKMAIGHHIHDRAHVIKKSKNKKTGDEEVNQEFINMNESDAHAFDEEWQSEVLKYKPGRHNLGNTRMRSVGHENPGSRELKRREKPQQSPAIEHGRRSNVLGDKLHIKGSSVKSNKK

SEQ ID NO: 54422 - protein, 258 aa, Homo sapiens
MRQMIRSFSEPFGRDLLSISDGRGRAHNRRGHNDGEDSLTATSCSLVPFGDFGGMHTDVSSFQTMDQMVSNMRNYMQKLERNFGQLSVDPNGHSFCSSSVMTYSKIGDEPPKVFQASTQTRRAPGGIKETRKAMRDSDSGLEKMAIGHHIHDRAHVIKKSKNKKTGDEEVNQEFINMNESDAHAFDEEWQSEVLKYKPGRHNLGNTRMRSVGHENPGSRELKRREKPQQSPAIEHGRRSNVLGDKLHIKGSSVKSNKK

SEQ ID NO: 54423 - protein, 258 aa, Homo sapiens; identical to SEQ ID NO: 54422

SEQ ID NO: 54424 - protein, 243 aa, Homo sapiens; identical to SEQ ID NO: 54420

SEQ ID NO: 54425 - protein, 243 aa, Homo sapiens; identical to SEQ ID NO: 54420

SEQ ID NO: 54426 - protein, 200 aa, Homo sapiens
MRQMIRSFSEPFGRDLLSISDGRGRAHNRRGHNDGEDSLTHTDVSSFQTMDQMVSNMRNYMQKLERNFIKETRKAMRDSDSGLEKMAIGHHIHDRAHVIKKSKNKKTGDEEVNQEFINMNESDAHAFDEEWQSEVLKYKPGRHNLGNTRMRSVGHENPGSRELKRREKPQQSPAIEHGRRSNVLGDKLHIKGSSVKSNKK

SEQ ID NO: 54427 - protein, 248 aa, Homo sapiens
MFRFMRDVEPEDPMFLMDPFAIHRQHMSRMLSGGFGYSPFLSITDGNMPGTRPASRRMQQAGAVSPFGMLGMSGGFMDMFGMMNDMIGNMEHMTAGGNCQTFSSSTVISYSNTGDGAPKVYQETSEMRSAPGGIRETRRTVRDSDSGLEQMSIGHHIRDRAHILQRSRNHRTGDQEERQDYINLDESEAAAFDDEWRRETSRFRQQRPLEFRRLESSGAGGRRAEGPPRLAIQGPEDSPSRQSRRYDW

SEQ ID NO: 54428 - protein, 248 aa, Homo sapiens; identical to SEQ ID NO: 54427

SEQ ID NO: 54429 - protein, 248 aa, Homo sapiens; identical to SEQ ID NO: 54427

SEQ ID NO: 54430 - protein, 248 aa, Homo sapiens; identical to SEQ ID NO: 54427

SEQ ID NO: 54431 - protein, 734 aa, Homo sapiens
MRPAVLGSPDRAPPEDEGPVMVKLEDSEEEGEAALWDPGPEAARLRFRCFRYEEATGPQEALAQLRELCRQWLRPEVRSKEQMLELLVLEQFLGALPPEIQARVQGQRPGSPEEAAALVDGLRREPGGPRRWVTVQVQGQEVLSEKMEPSSFQPLPETEPPTPEPGPKTPPRTMQESPLGLQVKEESEVTEDSDFLESGPLAATQESVPTLLPEEAQRCGTVLDQIFPHSKTGPEGPSWREHPRALWHEEAGGIFSPGFALQLGSISAGPGSVSPHLHVPWDLGMAGLSGQIQSPSREGGFAHALLLPSDLRSEQDPTDEDPCRGVGPALITTRWRSPRGRSRGRPSTGGGVVRGGRCDVCGKVFSQRSNLLRHQKIHTGERPFVCSECGRSFSRSSHLLRHQLTHTEERPFVCGDCGQGFVRSARLEEHRRVHTGEQPFRCAECGQSFRQRSNLLQHQRIHGDPPGPGAKPPAPPGAPEPPGPFPCSECRESFARRAVLLEHQAVHTGDKSFGCVECGERFGRRSVLLQHRRVHSGERPFACAECGQSFRQRSNLTQHRRIHTGERPFACAECGKAFRQRPTLTQHLRVHTGEKPFACPECGQRFSQRLKLTRHQRTHTGEKPYHCGECGLGFTQVSRLTEHQRIHTGERPFACPECGQSFRQHANLTQHRRIHTGERPYACPECGKAFRQRPTLTQHLRTHRREKPFACQDCGRRFHQSTKLIQHQRVHSAE

SEQ ID NO: 54432 - protein, 290 aa, Homo sapiens
MRPAVLGSPDRAPPEDEGPVMVKLEDSEEEGEAALWDPGPEAARLRFRCFRYEEATGPQEALAQLRELCRQWLRPEVRSKEQMLELLVLEQFLGALPPEIQARVQGQRPGSPEEAAALVDGLRREPGGPRRWVTVQVQGQEVLSEKMEPSSFQPLPETEPPTPEPGPKTPPRTMQESPLGLQVKEESEVTEDSDFLESGPLAATQESVPTLLPEEAQRCGTVLDQIFPHSKTGPEGPSWREHPRALWHEEAGGIFSPGAGAGAAPALGAGWLGAAVAMYVARCSANAATC

SEQ ID NO: 54433 - protein, 734 aa, Homo sapiens; identical to SEQ ID NO: 54431

SEQ ID NO: 54434 - protein, 512 aa, Homo sapiens
MAHSCRWRFPARPGTTGGGGGGGRRGLGGAPRQRVPALLLPPGPPVGGGGPGAPPSPPAVAAAAAAAGSSGAGVPGGAAAASAASSSSASSSSSSSSSASSGPALLRVGPGFDAALQVSAAIGTNLRRFRAVFGESGGGGGSGELTTQIPCSWRTKGHIHDKKTEPFRLLAWSWCLNDEQFLGFGSDEEVRVRSPTRSPSVKTSPRKPRGRPRSGSDRNSAILSDPSVFSPLNKSETKSGDKIKKKDSKSIEKKRGRPPTFPGVKIKITHGKDISELPKGNKEDSLKKIKRTPSATFQQATKIKKLRAGKLSPLKSKFKTGKLQIGRKGVQIVRRRGRPPSTERIKTPSGLLINSELEKPQKVRKDKEGTPPLTKEDKTVVRQSPRRIKPVRIIPSSKRTDATIAKQLLQRAKKGAQKKIEKEAAQLQGRKVKTQVKNIRQFIMPVVSAISSRIIKTPRRFIEDEDYDPPIKIARLESTPNSRFSAPSCGSSEKSSAASQHSSQMSSDSSRS

SEQ ID NO: 54435 - protein, 3931 aa, Homo sapiens
MAHSCRWRFPARPGTTGGGGGGGRRGLGGAPRQRVPALLLPPGPPVGGGGPGAPPSPPAVAAAAAAAGSSGAGVPGGAAAASAASSSSASSSSSSSSSASSGPALLRVGPGFDAALQVSAAIGTNLRRFRAVFGESGGGGGSGEDEQFLGFGSDEEVRVRSPTRSPSVKTSPRKPRGRPRSGSDRNSAILSDPSVFSPLNKSETKSGDKIKKKDSKSIEKKRGRPPTFPGVKIKITHGKDISELPKGNKEDSLKKIKRTPSATFQQATKIKKLRAGKLSPLKSKFKTGKLQIGRKGVQIVRRRGRPPSTERIKTPSGLLINSELEKPQKVRKDKEGTPPLTKEDKTVVRQSPRRIKPVRIIPSSKRTDATIAKQLLQRAKKGAQKKIEKEAAQLQGRKVKTQVKNIRQFIMPVVSAISSRIIKTPRRFIEDEDYDPPIKIARLESTPNSRFSAPSCGSSEKSSAASQHSSQMSSDSSRSSSPSVDTSTDSQASEEIQVLPEERSDTPEVHPPLPISQSPENESNDRRSRRYSVSERSFGSRTTKKLSTLQSAPQQQTSSSPPPPLLTPPPPLQPASSISDHTPWLMPPTIPLASPFLPASTAPMQGKRKSILREPTFRWTSLKHSRSEPQYFSSAKYAKEGLIRKPIFDNFRPPPLTPEDVGFASGFSASGTAASARLFSPLHSGTRFDMHKRSPLLRAPRFTPSEAHSRIFESVTLPSNRTSAGTSSSGVSNRKRKRKVFSPIRSEPRSPSHSMRTRSGRLSSSELSPLTPPSSVSSSLSISVSPLATSALNPTFTFPSHSLTQSGESAEKNQRPRKQTSAPAEPFSSSSPTPLFPWFTPGSQTERGRNKDKAPEELSKDRDADKSVEKDKSRERDREREKENKRESRKEKRKKGSEIQSSSALYPVGRVSKEKVVGEDVATSSSAKKATGRKKSSSHDSGTDITSVTLGDTTAVKTKILIKKGRGNLEKTNLDLGPTAPSLEKEKTLCLSTPSSSTVKHSTSSIGSMLAQADKLPMTDKRVASLLKKAKAQLCKIEKSKSLKQTDQPKAQGQESDSSETSVRGPRIKHVCRRAAVALGRKRAVFPDDMPTLSALPWEEREKILSSMGNDDKSSIAGSEDAEPLAPPIKPIKPVTRNKAPQEPPVKKGRRSRRCGQCPGCQVPEDCGVCTNCLDKPKFGGRNIKKQCCKMRKCQNLQWMPSKAYLQKQAKAVKKKEKKSKTSEKKDSKESSVVKNVVDSSQKPTPSAREDPAPKKSSSEPPPRKPVEEKSEEGNVSAPGPESKQATTPASRKSSKQVSQPALVIPPQPPTTGPPRKEVPKTTPSEPKKKQPPPPESGPEQSKQKKVAPRPSIPVKQKPKEKEKPPPVNKQENAGTLNILSTLSNGNSSKQKIPADGVHRIRVDFKFVYCQVCCEPFHKFCLEENERPLEDQLENWCCRRCKFCHVCGRQHQATKQLLECNKCRNSYHPECLGPNYPTKPTKKKKVWICTKCVRCKSCGSTTPGKGWDAQWSHDFSLCHDCAKLFAKGNFCPLCDKCYDDDDYESKMMQCGKCDRWVHSKCENLSDEMYEILSNLPESVAYTCVNCTERHPAEWRLALEKELQISLKQVLTALLNSRTTSHLLRYRQAAKPPDLNPETEESIPSRSSPEGPDPPVLTEVSKQDDQQPLDLEGVKRKMDQGNYTSVLEFSDDIVKIIQAAINSDGGQPEIKKANSMVKSFFIRQMERVFPWFSVKKSRFWEPNKVSSNSGMLPNAVLPPSLDHNYAQWQEREENSHTEQPPLMKKIIPAPKPKGPGEPDSPTPLHPPTPPILSTDRSREDSPELNPPPGIEDNRQCALCLTYGDDSANDAGRLLYIGQNEWTHVNCALWSAEVFEDDDGSLKNVHMAVIRGKQLRCEFCQKPGATVGCCLTSCTSNYHFMCSRAKNCVFLDDKKVYCQRHRDLIKGEVVPENGFEVFRRVFVDFEGISLRRKFLNGLEPENIHMMIGSMTIDCLGILNDLSDCEDKLFPIGYQCSRVYWSTTDARKRCVYTCKIVECRPPVVEPDINSTVEHDENRTIAHSPTSFTESSSKESQNTAEIISPPSPDRPPHSQTSGSCYYHVISKVPRIRTPSYSPTQRSPGCRPLPSAGSPTPTTHEIVTVGDPLLSSGLRSIGSRRHSTSSLSPQRSKLRIMSPMRTGNTYSRNNVSSVSTTGTATDLESSAKVVDHVLGPLNSSTSLGQNTSTSSNLQRTVVTVGNKNSHLDGSSSSEMKQSSASDLVSKSSSLKGEKTKVLSSKSSEGSAHNVAYPGIPKLAPQVHNTTSRELNVSKIGSFAEPSSVSFSSKEALSFPHLHLRGQRNDRDQHTDSTQSANSSPDEDTEVKTLKLSGMSNRSSIINEHMGSSSRDRRQKGKKSCKETFKEKHSSKSFLEPGQVTTGEEGNLKPEFMDEVLTPEYMGQRPCNNVSSDKIGDKGLSMPGVPKAPPMQVEGSAKELQAPRKRTVKVTLTPLKMENESQSKNALKESSPASPLQIESTSPTEPISASENPGDGPVAQPSPNNTSCQDSQSNNYQNLPVQDRNLMLPDGPKPQEDGSFKRRYPRRSARARSNMFFGLTPLYGVRSYGEEDIPFYSSSTGKKRGKRSAEGQVDGADDLSTSDEDDLYYYNFTRTVISSGGEERLASHNLFREEEQCDLPKISQLDGVDDGTESDTSVTATTRKSSQIPKRNGKENGTENLKIDRPEDAGEKEHVTKSSVGHKNEPKMDNCHSVSRVKTQGQDSLEAQLSSLESSRRVHTSTPSDKNLLDTYNTELLKSDSDNNNSDDCGNILPSDIMDFVLKNTPSMQALGESPESSSSELLNLGEGLGLDSNREKDMGLFEVFSQQLPTTEPVDSSVSSSISAEEQFELPLELPSDLSVLTTRSPTVPSQNPSRLAVISDSGEKRVTITEKSVASSESDPALLSPGVDPTPEGHMTPDHFIQGHMDADHISSPPCGSVEQGHGNNQDLTRNSSTPGLQVPVSPTVPIQNQKYVPNSTDSPGPSQISNAAVQTTPPHLKPATEKLIVVNQNMQPLYVLQTLPNGVTQKIQLTSSVSSTPSVMETNTSVLGPMGGGLTLTTGLNPSLPTSQSLFPSASKGLLPMSHHQHLHSFPAATQSSFPPNISNPPSGLLIGVQPPPDPQLLVSESSQRTDLSTTVATPSSGLKKRPISRLQTRKNKKLAPSSTPSNIAPSDVVSNMTLINFTPSQLPNHPSLLDLGSLNTSSHRTVPNIIKRSKSSIMYFEPAPLLPQSVGGTAATAAGTSTISQDTSHLTSGSVSGLASSSSVLNVVSMQTTTTPTSSASVPGHVTLTNPRLLGTPDIGSISNLLIKASQQSLGIQDQPVALPPSSGMFPQLGTSQTPSTAAITAASSICVLPSTQTTGITAASPSGEADEHYQLQHVNQLLASKTGIHSSQRDLDSASGPQVSNFTQTVDAPNSMGLEQNKALSSAVQASPTSPGGSPSSPSSGQRSASPSVPGPTKPKPKTKRFQLPLDKGNGKKHKVSHLRTSSSEAHIPDQETTSLTSGTGTPGAEAEQQDTASVEQSSQKECGQPAGQVAVLPEVQVTQNPANEQESAEPKTVEEEESNFSSPLMLWLQQEQKRKESITEKKPKKGLVFEISSDDGFQICAESIEDAWKSLTDKVQEARSNARLKQLSFAGVNGLRMLGILHDAVVFLIEQLSGAKHCRNYKFRFHKPEEANEPPLNPHGSARAEVHLRKSAFDMFNFLASKHRQPPEYNPNDEEEEEVQLKSARRATSMDLPMPMRFRHLKKTSKEAVGVYRSPIHGRGLFCKRNIDAGEMVIEYAGNVIRSIQTDKREKYYDSKGIGCYMFRIDDSEVVDATMHGNAARFINHSCEPNCYSRVINIDGQKHIVIFAMRKIYRGEELTYDYKFPIEDASNKLPCNCGAKKCRKFLN

SEQ ID NO: 54436 - protein, 2879 aa, Homo sapiens
HAHPECLTMEREKILSSMGNDDKSSIAGSEDAEPLAPPIKPIKPVTRNKAPQEPPVKKGRRSRRCGQCPGCQVPEDCGVCTNCLDKPKFGGRNIKKQCCKMRKCQNLQWMPSKAYLQKQAKAVKKKEKKSKTSEKKDSKESSVVKNVVDSSQKPTPSAREDPAPKKSSSEPPPRKPVEEKSEEGNVSAPGPESKQATTPASRKSSKQVSQPALVIPPQPPTTGPPRKEVPKTTPSEPKKKQPPPPESGPEQSKQKKVAPRPSIPVKQKPKEKEKPPPVNKQENAGTLNILSTLSNGNSSKQKIPADGVHRIRVDFKEDCEAENVWEMGGLGILTSVPITPRVVCFLCASSGHVEFVYCQVCCEPFHKFCLEENERPLEDQLENWCCRRCKFCHVCGRQHQATKQLLECNKCRNSYHPECLGPNYPTKPTKKKKVWICTKCVRCKSCGSTTPGKGWDAQWSHDFSLCHDCAKLFAKGNFCPLCDKCYDDDDYESKMMQCGKCDRWVHSKCENLSDEMYEILSNLPESVAYTCVNCTERHPAEWRLALEKELQISLKQVLTALLNSRTTSHLLRYRQAAKPPDLNPETEESIPSRSSPEGPDPPVLTEVSKQDDQQPLDLEGVKRKMDQGNYTSVLEFSDDIVKIIQAAINSDGGQPEIKKANSMVKSFFIRQMERVFPWFSVKKSRFWEPNKVSSNSGMLPNAVLPPSLDHNYAQWQEREENSHTEQPPLMKKIIPAPKPKGPGEPDSPTPLHPPTPPILSTDRSREDSPELNPPPGIEDNRQCALCLTYGDDSANDAGRLLYIGQNEWTHVNCALWSAEVFEDDDGSLKNVHMAVIRGKQLRCEFCQKPGATVGCCLTSCTSNYHFMCSRAKNCVFLDDKKVYCQRHRDLIKGEVVPENGFEVFRRVFVDFEGISLRRKFLNGLEPENIHMMIGSMTIDCLGILNDLSDCEDKLFPIGYQCSRVYWSTTDARKRCVYTCKIVECRPPVVEPDINSTVEHDENRTIAHSPTSFTESSSKESQNTAEIISPPSPDRPPHSQTSGSCYYHVISKVPRIRTPSYSPTQRSPGCRPLPSAGSPTPTTHEIVTVGDPLLSSGLRSIGSRRHSTSSLSPQRSKLRIMSPMRTGNTYSRNNVSSVSTTGTATDLESSAKVVDHVLGPLNSSTSLGQNTSTSSNLQRTVVTVGNKNSHLDGSSSSEMKQSSASDLVSKSSSLKGEKTKVLSSKSSEGSAHNVAYPGIPKLAPQVHNTTSRELNVSKIGSFAEPSSVSFSSKEALSFPHLHLRGQRNDRDQHTDSTQSANSSPDEDTEVKTLKLSGMSNRSSIINEHMGSSSRDRRQKGKKSCKETFKEKHSSKSFLEPGQVTTGEEGNLKPEFMDEVLTPEYMGQRPCNNVSSDKIGDKGLSMPGVPKAPPMQVEGSAKELQAPRKRTVKVTLTPLKMENESQSKNALKESSPASPLQIESTSPTEPISASENPGDGPVAQPSPNNTSCQDSQSNNYQNLPVQDRNLMLPDGPKPQEDGSFKRRYPRRSARARSNMFFGLTPLYGVRSYGEEDIPFYSSSTGKKRGKRSAEGQVDGADDLSTSDEDDLYYYNFTRTVISSGGEERLASHNLFREEEQCDLPKISQLDGVDDGTESDTSVTATTRKSSQIPKRNGKENGTENLKIDRPEDAGEKEHVTKSSVGHKNEPKMDNCHSVSRVKTQGQDSLEAQLSSLESSRRVHTSTPSDKNLLDTYNTELLKSDSDNNNSDDCGNILPSDIMDFVLKNTPSMQALGESPESSSSELLNLGEGLGLDSNREKDMGLFEVFSQQLPTTEPVDSSVSSSISAEEQFELPLELPSDLSVLTTRSPTVPSQNPSRLAVISDSGEKRVTITEKSVASSESDPALLSPGVDPTPEGHMTPDHFIQGHMDADHISSPPCGSVEQGHGNNQDLTRNSSTPGLQVPVSPTVPIQNQKYVPNSTDSPGPSQISNAAVQTTPPHLKPATEKLIVVNQNMQPLYVLQTLPNGVTQKIQLTSSVSSTPSVMETNTSVLGPMGGGLTLTTGLNPSLPTSQSLFPSASKGLLPMSHHQHLHSFPAATQSSFPPNISNPPSGLLIGVQPPPDPQLLVSESSQRTDLSTTVATPSSGLKKRPISRLQTRKNKKLAPSSTPSNIAPSDVVSNMTLINFTPSQLPNHPSLLDLGSLNTSSHRTVPNIIKRSKSSIMYFEPAPLLPQSVGGTAATAAGTSTISQDTSHLTSGSVSGLASSSSVLNVVSMQTTTTPTSSASVPGHVTLTNPRLLGTPDIGSISNLLIKASQQSLGIQDQPVALPPSSGMFPQLGTSQTPSTAAITAASSICVLPSTQTTGITAASPSGEADEHYQLQHVNQLLASKTGIHSSQRDLDSASGPQVSNFTQTVDAPNSMGLEQNKALSSAVQASPTSPGGSPSSPSSGQRSASPSVPGPTKPKPKTKRFQLPLDKGNGKKHKVSHLRTSSSEAHIPDQETTSLTSGTGTPGAEAEQQDTASVEQSSQKECGQPAGQVAVLPEVQVTQNPANEQESAEPKTVEEEESNFSSPLMLWLQQEQKRKESITEKKPKKGLVFEISSDDGFQICAESIEDAWKSLTDKVQEARSNARLKQLSFAGVNGLRMLGILHDAVVFLIEQLSGAKHCRNYKFRFHKPEEANEPPLNPHGSARAEVHLRKSAFDMFNFLASKHRQPPEYNPNDEEEEEVQLKSARRATSMDLPMPMRFRHLKKTSKEAVGVYRSPIHGRGLFCKRNIDAGEMVIEYAGNVIRSIQTDKREKYYDSKGIGCYMFRIDDSEVVDATMHGNAARFINHSCEPNCYSRVINIDGQKHIVIFAMRKIYRGEELTYDYKFPIEDASNKLPCNCGAKKCRKFLN

SEQ ID NO: 54437 - protein, 3969 aa, Homo sapiens
MAHSCRWRFPARPGTTGGGGGGGRRGLGGAPRQRVPALLLPPGPPVGGGGPGAPPSPPAVAAAAAAAGSSGAGVPGGAAAASAASSSSASSSSSSSSSASSGPALLRVGPGFDAALQVSAAIGTNLRRFRAVFGESGGGGGSGEDEQFLGFGSDEEVRVRSPTRSPSVKTSPRKPRGRPRSGSDRNSAILSDPSVFSPLNKSETKSGDKIKKKDSKSIEKKRGRPPTFPGVKIKITHGKDISELPKGNKEDSLKKIKRTPSATFQQATKIKKLRAGKLSPLKSKFKTGKLQIGRKGVQIVRRRGRPPSTERIKTPSGLLINSELEKPQKVRKDKEGTPPLTKEDKTVVRQSPRRIKPVRIIPSSKRTDATIAKQLLQRAKKGAQKKIEKEAAQLQGRKVKTQVKNIRQFIMPVVSAISSRIIKTPRRFIEDEDYDPPIKIARLESTPNSRFSAPSCGSSEKSSAASQHSSQMSSDSSRSSSPSVDTSTDSQASEEIQVLPEERSDTPEVHPPLPISQSPENESNDRRSRRYSVSERSFGSRTTKKLSTLQSAPQQQTSSSPPPPLLTPPPPLQPASSISDHTPWLMPPTIPLASPFLPASTAPMQGKRKSILREPTFRWTSLKHSRSEPQYFSSAKYAKEGLIRKPIFDNFRPPPLTPEDVGFASGFSASGTAASARLFSPLHSGTRFDMHKRSPLLRAPRFTPSEAHSRIFESVTLPSNRTSAGTSSSGVSNRKRKRKVFSPIRSEPRSPSHSMRTRSGRLSSSELSPLTPPSSVSSSLSISVSPLATSALNPTFTFPSHSLTQSGESAEKNQRPRKQTSAPAEPFSSSSPTPLFPWFTPGSQTERGRNKDKAPEELSKDRDADKSVEKDKSRERDREREKENKRESRKEKRKKGSEIQSSSALYPVGRVSKEKVVGEDVATSSSAKKATGRKKSSSHDSGTDITSVTLGDTTAVKTKILIKKGRGNLEKTNLDLGPTAPSLEKEKTLCLSTPSSSTVKHSTSSIGSMLAQADKLPMTDKRVASLLKKAKAQLCKIEKSKSLKQTDQPKAQGQESDSSETSVRGPRIKHVCRRAAVALGRKRAVFPDDMPTLSALPWEEREKILSSMGNDDKSSIAGSEDAEPLAPPIKPIKPVTRNKAPQEPPVKKGRRSRRCGQCPGCQVPEDCGVCTNCLDKPKFGGRNIKKQCCKMRKCQNLQWMPSKAYLQKQAKAVKKKEKKSKTSEKKDSKESSVVKNVVDSSQKPTPSAREDPAPKKSSSEPPPRKPVEEKSEEGNVSAPGPESKQATTPASRKSSKQVSQPALVIPPQPPTTGPPRKEVPKTTPSEPKKKQPPPPESGPEQSKQKKVAPRPSIPVKQKPKEKEKPPPVNKQENAGTLNILSTLSNGNSSKQKIPADGVHRIRVDFKEDCEAENVWEMGGLGILTSVPITPRVVCFLCASSGHVEFVYCQVCCEPFHKFCLEENERPLEDQLENWCCRRCKFCHVCGRQHQATKQLLECNKCRNSYHPECLGPNYPTKPTKKKKVWICTKCVRCKSCGSTTPGKGWDAQWSHDFSLCHDCAKLFAKGNFCPLCDKCYDDDDYESKMMQCGKCDRWVHSKCENLSDEMYEILSNLPESVAYTCVNCTERHPAEWRLALEKELQISLKQVLTALLNSRTTSHLLRYRQAAKPPDLNPETEESIPSRSSPEGPDPPVLTEVSKQDDQQPLDLEGVKRKMDQGNYTSVLEFSDDIVKIIQAAINSDGGQPEIKKANSMVKSFFIRQMERVFPWFSVKKSRFWEPNKVSSNSGMLPNAVLPPSLDHNYAQWQEREENSHTEQPPLMKKIIPAPKPKGPGEPDSPTPLHPPTPPILSTDRSREDSPELNPPPGIEDNRQCALCLTYGDDSANDAGRLLYIGQNEWTHVNCALWSAEVFEDDDGSLKNVHMAVIRGKQLRCEFCQKPGATVGCCLTSCTSNYHFMCSRAKNCVFLDDKKVYCQRHRDLIKGEVVPENGFEVFRRVFVDFEGISLRRKFLNGLEPENIHMMIGSMTIDCLGILNDLSDCEDKLFPIGYQCSRVYWSTTDARKRCVYTCKIVECRPPVVEPDINSTVEHDENRTIAHSPTSFTESSSKESQNTAEIISPPSPDRPPHSQTSGSCYYHVISKVPRIRTPSYSPTQRSPGCRPLPSAGSPTPTTHEIVTVGDPLLSSGLRSIGSRRHSTSSLSPQRSKLRIMSPMRTGNTYSRNNVSSVSTTGTATDLESSAKVVDHVLGPLNSSTSLGQNTSTSSNLQRTVVTVGNKNSHLDGSSSSEMKQSSASDLVSKSSSLKGEKTKVLSSKSSEGSAHNVAYPGIPKLAPQVHNTTSRELNVSKIGSFAEPSSVSFSSKEALSFPHLHLRGQRNDRDQHTDSTQSANSSPDEDTEVKTLKLSGMSNRSSIINEHMGSSSRDRRQKGKKSCKETFKEKHSSKSFLEPGQVTTGEEGNLKPEFMDEVLTPEYMGQRPCNNVSSDKIGDKGLSMPGVPKAPPMQVEGSAKELQAPRKRTVKVTLTPLKMENESQSKNALKESSPASPLQIESTSPTEPISASENPGDGPVAQPSPNNTSCQDSQSNNYQNLPVQDRNLMLPDGPKPQEDGSFKRRYPRRSARARSNMFFGLTPLYGVRSYGEEDIPFYSSSTGKKRGKRSAEGQVDGADDLSTSDEDDLYYYNFTRTVISSGGEERLASHNLFREEEQCDLPKISQLDGVDDGTESDTSVTATTRKSSQIPKRNGKENGTENLKIDRPEDAGEKEHVTKSSVGHKNEPKMDNCHSVSRVKTQGQDSLEAQLSSLESSRRVHTSTPSDKNLLDTYNTELLKSDSDNNNSDDCGNILPSDIMDFVLKNTPSMQALGESPESSSSELLNLGEGLGLDSNREKDMGLFEVFSQQLPTTEPVDSSVSSSISAEEQFELPLELPSDLSVLTTRSPTVPSQNPSRLAVISDSGEKRVTITEKSVASSESDPALLSPGVDPTPEGHMTPDHFIQGHMDADHISSPPCGSVEQGHGNNQDLTRNSSTPGLQVPVSPTVPIQNQKYVPNSTDSPGPSQISNAAVQTTPPHLKPATEKLIVVNQNMQPLYVLQTLPNGVTQKIQLTSSVSSTPSVMETNTSVLGPMGGGLTLTTGLNPSLPTSQSLFPSASKGLLPMSHHQHLHSFPAATQSSFPPNISNPPSGLLIGVQPPPDPQLLVSESSQRTDLSTTVATPSSGLKKRPISRLQTRKNKKLAPSSTPSNIAPSDVVSNMTLINFTPSQLPNHPSLLDLGSLNTSSHRTVPNIIKRSKSSIMYFEPAPLLPQSVGGTAATAAGTSTISQDTSHLTSGSVSGLASSSSVLNVVSMQTTTTPTSSASVPGHVTLTNPRLLGTPDIGSISNLLIKASQQSLGIQDQPVALPPSSGMFPQLGTSQTPSTAAITAASSICVLPSTQTTGITAASPSGEADEHYQLQHVNQLLASKTGIHSSQRDLDSASGPQVSNFTQTVDAPNSMGLEQNKALSSAVQASPTSPGGSPSSPSSGQRSASPSVPGPTKPKPKTKRFQLPLDKGNGKKHKVSHLRTSSSEAHIPDQETTSLTSGTGTPGAEAEQQDTASVEQSSQKECGQPAGQVAVLPEVQVTQNPANEQESAEPKTVEEEESNFSSPLMLWLQQEQKRKESITEKKPKKGLVFEISSDDGFQICAESIEDAWKSLTDKVQEARSNARLKQLSFAGVNGLRMLGILHDAVVFLIEQLSGAKHCRNYKFRFHKPEEANEPPLNPHGSARAEVHLRKSAFDMFNFLASKHRQPPEYNPNDEEEEEVQLKSARRATSMDLPMPMRFRHLKKTSKEAVGVYRSPIHGRGLFCKRNIDAGEMVIEYAGNVIRSIQTDKREKYYDSKGIGCYMFRIDDSEVVDATMHGNAARFINHSCEPNCYSRVINIDGQKHIVIFAMRKIYRGEELTYDYKFPIEDASNKLPCNCGAKKCRKFLN

SEQ ID NO: 54438 - protein, 111 aa, Homo sapiens
DFKDEQFLGFGSDEEVRVRSPTRSPSGSMLAQADKLPMTDKRVASLLKKAKAQLCKIEKSKSLKQTDQPKAQGQESDSSETSVRGPRIKHVCRRAAVALGRKRAVFPDDMP

SEQ ID NO: 54439 - protein, 1439 aa, Homo sapiens
MAHSCRWRFPARPGTTGGGGGGGRRGLGGAPRQRVPALLLPPGPPVGGGGPGAPPSPPAVAAAAAAAGSSGAGVPGGAAAASAASSSSASSSSSSSSSASSGPALLRVGPGFDAALQVSAAIGTNLRRFRAVFGESGGGGGSGELTTQIPCSWRTKGHIHDKKTEPFRLLAWSWCLNDEQFLGFGSDEEVRVRSPTRSPSVKTSPRKPRGRPRSGSDRNSAILSDPSVFSPLNKSETKSGDKIKKKDSKSIEKKRGRPPTFPGVKIKITHGKDISELPKGNKEDSLKKIKRTPSATFQQATKIKKLRAGKLSPLKSKFKTGKLQIGRKGVQIVRRRGRPPSTERIKTPSGLLINSELEKPQKVRKDKEGTPPLTKEDKTVVRQSPRRIKPVRIIPSSKRTDATIAKQLLQRAKKGAQKKIEKEAAQLQGRKVKTQVKNIRQFIMPVVSAISSRIIKTPRRFIEDEDYDPPIKIARLESTPNSRFSAPSCGSSEKSSAASQHSSQMSSDSSRSSSPSVDTSTDSQASEEIQVLPEERSDTPEVHPPLPISQSPENESNDRRSRRYSVSERSFGSRTTKKLSTLQSAPQQQTSSSPPPPLLTPPPPLQPASSISDHTPWLMPPTIPLASPFLPASTAPMQGKRKSILREPTFRWTSLKHSRSEPQYFSSAKYAKEGLIRKPIFDNFRPPPLTPEDVGFASGFSASGTAASARLFSPLHSGTRFDMHKRSPLLRAPRFTPSEAHSRIFESVTLPSNRTSAGTSSSGVSNRKRKRKVFSPIRSEPRSPSHSMRTRSGRLSSSELSPLTPPSSVSSSLSISVSPLATSALNPTFTFPSHSLTQSGESAEKNQRPRKQTSAPAEPFSSSSPTPLFPWFTPGSQTERGRNKDKAPEELSKDRDADKSVEKDKSRERDREREKENKRESRKEKRKKGSEIQSSSALYPVGRVSKEKVVGEDVATSSSAKKATGRKKSSSHDSGTDITSVTLGDTTAVKTKILIKKGRGNLEKTNLDLGPTAPSLEKEKTLCLSTPSSSTVKHSTSSIGSMLAQADKLPMTDKRVASLLKKAKAQLCKIEKSKSLKQTDQPKAQGQESDSSETSVRGPRIKHVCRRAAVALGRKRAVFPDDMPTLSALPWEEREKILSSMGNDDKSSIAGSEDAEPLAPPIKPIKPVTRNKAPQEPPVKKGRRSRRCGQCPGCQVPEDCGVCTNCLDKPKFGGRNIKKQCCKMRKCQNLQWMPSKAYLQKQAKAVKKKEKKSKTSEKKDSKESSVVKNVVDSSQKPTPSAREDPAPKKSSSEPPPRKPVEEKSEEGNVSAPGPESKQATTPASRKSSKQVSQPALVIPPQPPTTGPPRKEVPKTTPSEPKKKQPPPPESGPEQSKQKKVAPRPSIPVKQKPKEKEKPPPVNKQENAGTLNILSTLSNGNSSKQKIPADGVHRIRVDFK

SEQ ID NO: 54440 - protein, 3972 aa, Homo sapiens
MAHSCRWRFPARPGTTGGGGGGGRRGLGGAPRQRVPALLLPPGPPVGGGGPGAPPSPPAVAAAAAAAGSSGAGVPGGAAAASAASSSSASSSSSSSSSASSGPALLRVGPGFDAALQVSAAIGTNLRRFRAVFGESGGGGGSGEDEQFLGFGSDEEVRVRSPTRSPSVKTSPRKPRGRPRSGSDRNSAILSDPSVFSPLNKSETKSGDKIKKKDSKSIEKKRGRPPTFPGVKIKITHGKDISELPKGNKEDSLKKIKRTPSATFQQATKIKKLRAGKLSPLKSKFKTGKLQIGRKGVQIVRRRGRPPSTERIKTPSGLLINSELEKPQKVRKDKEGTPPLTKEDKTVVRQSPRRIKPVRIIPSSKRTDATIAKQLLQRAKKGAQKKIEKEAAQLQGRKVKTQVKNIRQFIMPVVSAISSRIIKTPRRFIEDEDYDPPIKIARLESTPNSRFSAPSCGSSEKSSAASQHSSQMSSDSSRSSSPSVDTSTDSQASEEIQVLPEERSDTPEVHPPLPISQSPENESNDRRSRRYSVSERSFGSRTTKKLSTLQSAPQQQTSSSPPPPLLTPPPPLQPASSISDHTPWLMPPTIPLASPFLPASTAPMQGKRKSILREPTFRWTSLKHSRSEPQYFSSAKYAKEGLIRKPIFDNFRPPPLTPEDVGFASGFSASGTAASARLFSPLHSGTRFDMHKRSPLLRAPRFTPSEAHSRIFESVTLPSNRTSAGTSSSGVSNRKRKRKVFSPIRSEPRSPSHSMRTRSGRLSSSELSPLTPPSSVSSSLSISVSPLATSALNPTFTFPSHSLTQSGESAEKNQRPRKQTSAPAEPFSSSSPTPLFPWFTPGSQTERGRNKDKAPEELSKDRDADKSVEKDKSRERDREREKENKRESRKEKRKKGSEIQSSSALYPVGRVSKEKVVGEDVATSSSAKKATGRKKSSSHDSGTDITSVTLGDTTAVKTKILIKKGRGNLEKTNLDLGPTAPSLEKEKTLCLSTPSSSTVKHSTSSIGSMLAQADKLPMTDKRVASLLKKAKAQLCKIEKSKSLKQTDQPKAQGQESDSSETSVRGPRIKHVCRRAAVALGRKRAVFPDDMPTLSALPWEEREKILSSMGNDDKSSIAGSEDAEPLAPPIKPIKPVTRNKAPQEPPVKKGRRSRRCGQCPGCQVPEDCGVCTNCLDKPKFGGRNIKKQCCKMRKCQNLQWMPSKAYLQKQAKAVKKKEKKSKTSEKKDSKESSVVKNVVDSSQKPTPSAREDPAPKKSSSEPPPRKPVEEKSEEGNVSAPGPESKQATTPASRKSSKQVSQPALVIPPQPPTTGPPRKEVPKTTPSEPKKKQPPPPESGPEQSKQKKVAPRPSIPVKQKPKEKEKPPPVNKQENAGTLNILSTLSNGNSSKQKIPADGVHRIRVDFKEDCEAENVWEMGGLGILTSVPITPRVVCFLCASSGHVEFVYCQVCCEPFHKFCLEENERPLEDQLENWCCRRCKFCHVCGRQHQATKQLLECNKCRNSYHPECLGPNYPTKPTKKKKVWICTKCVRCKSCGSTTPGKGWDAQWSHDFSLCHDCAKLFAKGNFCPLCDKCYDDDDYESKMMQCGKCDRWVHSKCENLSGTEDEMYEILSNLPESVAYTCVNCTERHPAEWRLALEKELQISLKQVLTALLNSRTTSHLLRYRQAAKPPDLNPETEESIPSRSSPEGPDPPVLTEVSKQDDQQPLDLEGVKRKMDQGNYTSVLEFSDDIVKIIQAAINSDGGQPEIKKANSMVKSFFIRQMERVFPWFSVKKSRFWEPNKVSSNSGMLPNAVLPPSLDHNYAQWQEREENSHTEQPPLMKKIIPAPKPKGPGEPDSPTPLHPPTPPILSTDRSREDSPELNPPPGIEDNRQCALCLTYGDDSANDAGRLLYIGQNEWTHVNCALWSAEVFEDDDGSLKNVHMAVIRGKQLRCEFCQKPGATVGCCLTSCTSNYHFMCSRAKNCVFLDDKKVYCQRHRDLIKGEVVPENGFEVFRRVFVDFEGISLRRKFLNGLEPENIHMMIGSMTIDCLGILNDLSDCEDKLFPIGYQCSRVYWSTTDARKRCVYTCKIVECRPPVVEPDINSTVEHDENRTIAHSPTSFTESSSKESQNTAEIISPPSPDRPPHSQTSGSCYYHVISKVPRIRTPSYSPTQRSPGCRPLPSAGSPTPTTHEIVTVGDPLLSSGLRSIGSRRHSTSSLSPQRSKLRIMSPMRTGNTYSRNNVSSVSTTGTATDLESSAKVVDHVLGPLNSSTSLGQNTSTSSNLQRTVVTVGNKNSHLDGSSSSEMKQSSASDLVSKSSSLKGEKTKVLSSKSSEGSAHNVAYPGIPKLAPQVHNTTSRELNVSKIGSFAEPSSVSFSSKEALSFPHLHLRGQRNDRDQHTDSTQSANSSPDEDTEVKTLKLSGMSNRSSIINEHMGSSSRDRRQKGKKSCKETFKEKHSSKSFLEPGQVTTGEEGNLKPEFMDEVLTPEYMGQRPCNNVSSDKIGDKGLSMPGVPKAPPMQVEGSAKELQAPRKRTVKVTLTPLKMENESQSKNALKESSPASPLQIESTSPTEPISASENPGDGPVAQPSPNNTSCQDSQSNNYQNLPVQDRNLMLPDGPKPQEDGSFKRRYPRRSARARSNMFFGLTPLYGVRSYGEEDIPFYSSSTGKKRGKRSAEGQVDGADDLSTSDEDDLYYYNFTRTVISSGGEERLASHNLFREEEQCDLPKISQLDGVDDGTESDTSVTATTRKSSQIPKRNGKENGTENLKIDRPEDAGEKEHVTKSSVGHKNEPKMDNCHSVSRVKTQGQDSLEAQLSSLESSRRVHTSTPSDKNLLDTYNTELLKSDSDNNNSDDCGNILPSDIMDFVLKNTPSMQALGESPESSSSELLNLGEGLGLDSNREKDMGLFEVFSQQLPTTEPVDSSVSSSISAEEQFELPLELPSDLSVLTTRSPTVPSQNPSRLAVISDSGEKRVTITEKSVASSESDPALLSPGVDPTPEGHMTPDHFIQGHMDADHISSPPCGSVEQGHGNNQDLTRNSSTPGLQVPVSPTVPIQNQKYVPNSTDSPGPSQISNAAVQTTPPHLKPATEKLIVVNQNMQPLYVLQTLPNGVTQKIQLTSSVSSTPSVMETNTSVLGPMGGGLTLTTGLNPSLPTSQSLFPSASKGLLPMSHHQHLHSFPAATQSSFPPNISNPPSGLLIGVQPPPDPQLLVSESSQRTDLSTTVATPSSGLKKRPISRLQTRKNKKLAPSSTPSNIAPSDVVSNMTLINFTPSQLPNHPSLLDLGSLNTSSHRTVPNIIKRSKSSIMYFEPAPLLPQSVGGTAATAAGTSTISQDTSHLTSGSVSGLASSSSVLNVVSMQTTTTPTSSASVPGHVTLTNPRLLGTPDIGSISNLLIKASQQSLGIQDQPVALPPSSGMFPQLGTSQTPSTAAITAASSICVLPSTQTTGITAASPSGEADEHYQLQHVNQLLASKTGIHSSQRDLDSASGPQVSNFTQTVDAPNSMGLEQNKALSSAVQASPTSPGGSPSSPSSGQRSASPSVPGPTKPKPKTKRFQLPLDKGNGKKHKVSHLRTSSSEAHIPDQETTSLTSGTGTPGAEAEQQDTASVEQSSQKECGQPAGQVAVLPEVQVTQNPANEQESAEPKTVEEEESNFSSPLMLWLQQEQKRKESITEKKPKKGLVFEISSDDGFQICAESIEDAWKSLTDKVQEARSNARLKQLSFAGVNGLRMLGILHDAVVFLIEQLSGAKHCRNYKFRFHKPEEANEPPLNPHGSARAEVHLRKSAFDMFNFLASKHRQPPEYNPNDEEEEEVQLKSARRATSMDLPMPMRFRHLKKTSKEAVGVYRSPIHGRGLFCKRNIDAGEMVIEYAGNVIRSIQTDKREKYYDSKGIGCYMFRIDDSEVVDATMHGNAARFINHSCEPNCYSRVINIDGQKHIVIFAMRKIYRGEELTYDYKFPIEDASNKLPCNCGAKKCRKFLN

SEQ ID NO: 54441 - protein, 559 aa, Homo sapiens
MDNQCTVQVRLELGHRAQLRKKPTTEGFTHDWMVFVRGPEQCDIQHFVEKVVFWLHDSFPKPRRVCKEPPYKVEESGYAGFIMPIEVHFKNKEEPRKVCFTYDLFLNLEGNPPVNHLRCEKLTFNNPTTEFRYKLLRAGGVMVMPEGADTVSRPSPDYPMLPTIPLSAFSDPKKTKPSHGSKDANKESSKTSKPHKVTKEHRERPRKDSESKSSSKELEREQAKSSKDTSRKLGEGRLPKEEKAPPPKAAFKEPKMALKETKLESTSPKGGPPPPPPPPPRASSKRPATADSPKPSAKKQKKSSSKGSRSAPGTSPRTSSSSSFSDKKPAKDKSSTRGEKVKAESEPREAKKALEVEESNSEDEASFKSESAQSSPSNSSSSSDSSSDSDFEPSQNHSQGPLRSMVEDLQSEESDEDDSSSGEEAAGKTNPGRDSRLSFSDSESDNSADSSLPSREPPPPQKPPPPNSKVSGRRSPESCSKPEKILKKGTYDKAYTDELVELHRRLMALRERNVLQQIVNLIEETGHFNVTNTTFDFDLFSLDETTVRKLQSCLEAVAT

SEQ ID NO: 54442 - protein, 90 aa, Homo sapiens
MRDPVSSQYSSFLFWRMPIPELDLSELEGLGLSDTATYKVKDSSVGKMIGQATAADQEKNPEGDGLLEYSTFNFWRAPIASIHSFELDLL

SEQ ID NO: 54443 - protein, 138 aa, Homo sapiens
MKDLHSDDNEEESDEVEDNDNDSEMERPVNRGGSRSRRVSLSDGSDSESSSASSPLHHEPPPPLLKTNNNQILEVKSPIKQSKSDKQIKNGECDKIVNLIEETGHFHITNTTFDFDLCSLDKTTVRKLQSYLETSGTS

SEQ ID NO: 54444 - protein, 162 aa, Homo sapiens
MKDLHSDDNEEESDEVEDNDNDSEMERPVNRGGSRSRRVSLSDGSDSESSSASSPLHHEPPPPLLKTNNNQILEVKSPIKQSKSDKQIKNGECDKAYLDELVELHRRLMTLRERHILQQIVNLIEETGHFHITNTTFDFDLCSLDKTTVRKLQSYLETSGTS

SEQ ID NO: 54445 - protein, 138 aa, Homo sapiens; identical to SEQ ID NO: 54443

SEQ ID NO: 54446 - protein, 568 aa, Homo sapiens
MASSCAVQVKLELGHRAQVRKKPTVEGFTHDWMVFVRGPEHSNIQHFVEKVVFHLHESFPRPKRVCKDPPYKVEESGYAGFILPIEVYFKNKEEPRKVRFDYDLFLHLEGHPPVNHLRCEKLTFNNPTEDFRRKLLKAGGDPNRSIHTSSSSSSSSSSSSSSSSSSSSSSSSSSSSSSSSSSSSSSSSSSTSFSKPHKLMKEHKEKPSKDSREHKSAFKEPSRDHNKSSKESSKKPKENKPLKEEKIVPKMAFKEPKPMSKEPKPDSNLLTITSGQDKKAPSKRPPISDSEELSAKKRKKSSSEALFKSFSSAPPLILTCSADKKQIKDKSHVKMGKVKIESETSEKKKSTLPPFDDIVDPNDSDVEENISSKSDSEQPSPASSSSSSSSSFTPSQTRQQGPLRSIMKDLHSDDNEEESDEVEDNDNDSEMERPVNRGGSRSRRVSLSDGSDSESSSASSPLHHEPPPPLLKTNNNQILEVKSPIKQSKSDKQIKNGECDKAYLDELVELHRRLMTLRERHILQQIVNLIEETGHFHITNTTFDFDLCSLDKTTVRKLQSYLETSGTS

SEQ ID NO: 54447 - protein, 565 aa, Homo sapiens
MCAVQVKLELGHRAQVRKKPTVEGFTHDWMVFVRGPEHSNIQHFVEKVVFHLHESFPRPKRVCKDPPYKVEESGYAGFILPIEVYFKNKEEPRKVRFDYDLFLHLEGHPPVNHLRCEKLTFNNPTEDFRRKLLKAGGDPNRSIHTSSSSSSSSSSSSSSSSSSSSSSSSSSSSSSSSSSSSSSSSSSTSFSKPHKLMKEHKEKPSKDSREHKSAFKEPSRDHNKSSKESSKKPKENKPLKEEKIVPKMAFKEPKPMSKEPKPDSNLLTITSGQDKKAPSKRPPISDSEELSAKKRKKSSSEALFKSFSSAPPLILTCSADKKQIKDKSHVKMGKVKIESETSEKKKSTLPPFDDIVDPNDSDVEENISSKSDSEQPSPASSSSSSSSSFTPSQTRQQGPLRSIMKDLHSDDNEEESDEVEDNDNDSEMERPVNRGGSRSRRVSLSDGSDSESSSASSPLHHEPPPPLLKTNNNQILEVKSPIKQSKSDKQIKNGECDKAYLDELVELHRRLMTLRERHILQQIVNLIEETGHFHITNTTFDFDLCSLDKTTVRKLQSYLETSGTS

SEQ ID NO: 54448 - protein, 607 aa, Homo sapiens
MQRAPPFPFMCVSRRRKKCQAQRSLPKPRLPVIHGCLSSPCPQCAVQVKLELGHRAQVRKKPTVEGFTHDWMVFVRGPEHSNIQHFVEKVVFHLHESFPRPKRVCKDPPYKVEESGYAGFILPIEVYFKNKEEPRKVRFDYDLFLHLEGHPPVNHLRCEKLTFNNPTEDFRRKLLKAGGDPNRSIHTSSSSSSSSSSSSSSSSSSSSSSSSSSSSSSSSSSSSSSSSSSTSFSKPHKLMKEHKEKPSKDSREHKSAFKEPSRDHNKSSKESSKKPKENKPLKEEKIVPKMAFKEPKPMSKEPKPDSNLLTITSGQDKKAPSKRPPISDSEELSAKKRKKSSSEALFKSFSSAPPLILTCSADKKQIKDKSHVKMGKVKIESETSEKKKSTLPPFDDIVDPNDSDVEENISSKSDSEQPSPASSSSSSSSSFTPSQTRQQGPLRSIMKDLHSDDNEEESDEVEDNDNDSEMERPVNRGGSRSRRVSLSDGSDSESSSASSPLHHEPPPPLLKTNNNQILEVKSPIKQSKSDKQIKNGECDKAYLDELVELHRRLMTLRERHILQQIVNLIEETGHFHITNTTFDFDLCSLDKTTVRKLQSYLETSGTS

SEQ ID NO: 54449 - protein, 1661 aa, Homo sapiens
MSAGGRDEERRKLADIIHHWNANRLDLFEISQPTEDLEFHGVMRFYFQDKAAGNFATKCIRVSSTATTQDVIETLAEKFRPDMRMLSSPKYSLYEVHVSGERRLDIDEKPLVVQLNWNKDDREGRFVLKNENDAIPPKKAQSNGPEKQEKEGVIQNFKRTLSKKEKKEKKKREKEALRQASDKDDRPFQGEDVENSRLAAEVYKDMPETSFTRTISNPEVVMKRRRQQKLEKRMQEFRSSDGRPDSGGTLRIYADSLKPNIPYKTILLSTTDPADFAVAEALEKYGLEKENPKDYCIARVMLPPGAQHSDEKGAKEIILDDDECPLQIFREWPSDKGILVFQLKRRPPDHIPKKTKKHLEGKTPKGKERADGSGYGSTLPPEKLPYLVELSPGRRNHFAYYNYHTYEDGSDSRDKPKLYRLQLSVTEVGTEKLDDNSIQLFGPGIQPHHCDLTNMDGVVTVTPRSMDAETYVEGQRISETTMLQSGMKVQFGASHVFKFVDPSQDHALAKRSVDGGLMVKGPRHKPGIVQETTFDLGGDIHSGTALPTSKSTTRLDSDRVSSASSTAERGMVKPMIRVEQQPDYRRQESRTQDASGPELILPASIEFRESSEDSFLSAIINYTNSSTVHFKLSPTYVLYMACRYVLSNQYRPDISPTERTHKVIAVVNKMVSMMEGVIQKQKNIAGALAFWMANASELLNFIKQDRDLSRITLDAQDVLAHLVQMAFKYLVHCLQSELNNYMPAFLDDPEENSLQRPKIDDVLHTLTGAMSLLRRCRVNAALTIQLFSQLFHFINMWLFNRLVTDPDSGLCSHYWGAIIRQQLGHIEAWAEKQGLELAADCHLSRIVQATTLLTMDKYAPDDIPNINSTCFKLNSLQLQALLQNYHCAPDEPFIPTDLIENVVTVAENTADELARSDGREVQLEEDPDLQLPFLLPEDGYSCDVVRNIPNGLQEFLDPLCQRGFCRLIPHTRSPGTWTIYFEGADYESHLLRENTELAIPLRKEPEIITVTLKKQNGMGLSIVAAKGAGQDKLGIYVKSVVKGGAADVDGRLAAGDQLLSVDGRSLVGLSQERAAELMTRTSSVVTLEVAKQGAIYHGLATLLNQPSPMMQRISDRRGSGKPRPKSEGFELYNNSTQNGSPESPQLPWAEYSEPKKLPGDDRLMKNRADHRSSPNVANQPPSPGGKSAYASGTTAKITSVSTGNLCTEEQTPPPRPEAYPIPTQTYTREYFTFPASKSQDRMAPPQNQWPNYEEKPHMHTDSNHSSIAIQRVTRSQEELREDKAYQLERHRIEAAMDRKSDSDMWINQSSSLDSSTSSQEHLNHSSKSVTPASTLTKSGPGRWKTPAAIPATPVAVSQPIRTDLPPPPPPPPVHYAGDFDGMSMDLPLPPPPSANQIGLPSAQVAAAERRKREEHQRWYEKEKARLEEERERKRREQERKLGQMRTQSLNPAPFSPLTAQQMKPEKPSTLQRPQETVIRELQPQQQPRTIERRDLQYITVSKEELSSGDSLSPDPWKRDAKEKLEKQQQMHIVDMLSKEIQELQSKPDRSAEESDRLRKLMLEWQFQKRLQESKQKDEDDEEEEDDDVDTMLIMQRLEAERRARQTAMPAISVLDLLQDEERRRQQQLEEMRKREAEDRARQEEERRRQEEERTKRDAEEK

SEQ ID NO: 54450 - protein, 1665 aa, Homo sapiens
MSAGGRDEERRKLADIIHHWNANRLDLFEISQPTEDLEFHGVMRFYFQDKAAGNFATKCIRVSSTATTQDVIETLAEKFRPDMRMLSSPKYSLYEVHVSGERRLDIDEKPLVVQLNWNKDDREGRFVLKNENDAIPPKKAQSNGPEKQEKEGVIQNFKRTLSKKEKKEKKKREKEALRQASDKDDRPFQGEDVENSRLAAEVYKDMPETSFTRTISNPEVVMKRRRQQKLEKRMQEFRSSDGRPDSGGTLRIYADSLKPNIPYKTILLSTTDPADFAVAEALEKYGLEKENPKDYCIARVMLPPGAQHSDEKGAKEIILDDDECPLQIFREWPSDKGILVFQLKRRPPDHIPKKTKKHLEGKTPKGKERADGSGYGSTLPPEKLPYLVELSPGRRNHFAYYNYHTYEDGSDSRDKPKLYRLQLSVTEVGTEKLDDNSIQLFGPGIQPHHCDLTNMDGVVTVTPRSMDAETYVEGQRISETTMLQSGMKVQFGASHVFKFVDPSQDHALAKRSVDGGLMVKGPRHKPGIVQETTFDLGGDIHSGTALPTSKSTTRLDSDRVSSASSTAERGMVKPMIRVEQQPDYRRQESRTQDASGPELILPASIEFRESSEDSFLSAIINYTNSSTVHFKLSPTYVLYMACRYVLSNQYRPDISPTERTHKVIAVVNKMVSMMEGVIQKQKNIAGALAFWMANASELLNFIKQDRDLSRITLDAQDVLAHLVQMAFKYLVHCLQSELNNYMPAFLDDPEENSLQRPKIDDVLHTLTGAMSLLRRCRVNAALTIQLFSQLFHFINMWLFNRLVTDPDSGLCSHYWGAIIRQQLGHIEAWAEKQGLELAADCHLSRIVQATTLLTMDKYAPDDIPNINSTCFKLNSLQLQALLQNYHCAPDEPFIPTDLIENVVTVAENTADELARSDGREVQLEEDPDLQLPFLLPEDGYSCDVVRNIPNGLQEFLDPLCQRGFCRLIPHTRSPGTWTIYFEGADYESHLLRENTELAQPLRKEPEIITVTLKKQNGMGLSIVAAKGAGQDKLGIYVKSVVKGGAADVDGRLAAGDQLLSVDGRSLVGLSQERAAELMTRTSSVVTLEVAKQGAIYHGLATLLNQPSPMMQRISDRRGSGKPRPKSEGFELYNNSTQNGSPESPQLPWAEYSEPKKLPGDDRLMKNRADHRSSPNVANQPPSPGGKSAYASGTTAKITSVSTGNLCTEEQTPPPRPEAYPIPTQTYTREYFTFPASKSQDRMAPPQNQWPNYEEKPHMHTDSNHSSIAIQRVTRSQEELREDKAYQLERHRIEAAMDRKSDSDMWINQSSSLDSSTSSQEHLNHSSKSVTPASTLTKSGPGRWKTPAAIPATPVAVSQPIRTDLPPPPPPPPVHYAGDFDGMSMDLPLPPPPSANQIGLPSAQVAAAERRKREEHQRWYEKEKARLEEERERKRREQERKLGQMRTQSLNPAPFSPLTAQQMKPEKPSTLQRPQETVIRELQPQQQPRTIERRDLQYITVSKEELSSGDSLSPDPWKRDAKEKLEKQQQMHIVDMLSKEIQELQSKPDRSAEESDRLRKLMLEWQFQKRLQESKQKDEDDEEEEDDDVDTMLIMQRLEAERRARQTAMPAISVLDLLQDEERRRQQQLEEMRKREAEDRARQEEERRRQEEERTKRDAEEKVMVL

SEQ ID NO: 54451 - protein, 1824 aa, Homo sapiens
MSAGGRDEERRKLADIIHHWNANRLDLFEISQPTEDLEFHGVMRFYFQDKAAGNFATKCIRVSSTATTQDVIETLAEKFRPDMRMLSSPKYSLYEVHVSGERRLDIDEKPLVVQLNWNKDDREGRFVLKNENDAIPPKKAQSNGPEKQEKEGVIQNFKRTLSKKEKKEKKKREKEALRQASDKDDRPFQGEDVENSRLAAEVYKDMPETSFTRTISNPEVVMKRRRQQKLEKRMQEFRSSDGRPDSGGTLRIYADSLKPNIPYKTILLSTTDPADFAVAEALEKYGLEKENPKDYCIARVMLPPGAQHSDEKGAKEIILDDDECPLQIFREWPSDKGILVFQLKRRPPDHIPKKTKKHLEGKTPKGKERADGSGYGSTLPPEKLPYLVELSPGRRNHFAYYNYHTYEDGSDSRDKPKLYRLQLSVTEVGTEKLDDNSIQLFGPGIQPHHCDLTNMDGVVTVTPRSMDAETYVEGQRISETTMLQSGMKVQFGASHVFKFVDPSQDHALAKRSVDGGLMVKGPRHKPGIVQETTFDLGGDIHSGTALPTSKSTTRLDSDRVSSASSTAERGMVKPMIRVEQQPDYRRQESRTQDASGPELILPASIEFRESSEDSFLSAIINYTNSSTVHFKLSPTYVLYMACRYVLSNQYRPDISPTERTHKVIAVVNKMVSMMEGVIQKQKNIAGALAFWMANASELLNFIKQDRDLSRITLDAQDVLAHLVQMAFKYLVHCLQSELNNYMPAFLDDPEENSLQRPKIDDVLHTLTGAMSLLRRCRVNAALTIQLFSQLFHFINMWLFNRLVTDPDSGLCSHYWGAIIRQQLGHIEAWAEKQGLELAADCHLSRIVQATTLLTMDKYAPDDIPNINSTCFKLNSLQLQALLQNYHCAPDEPFIPTDLIENVVTVAENTADELARSDGREVQLEEDPDLQLPFLLPEDGYSCDVVRNIPNGLQEFLDPLCQRGFCRLIPHTRSPGTWTIYFEGADYESHLLRENTELAIPLRKEPEIITVTLKKQNGMGLSIVAAKGAGQDKLGIYVKSVVKGGAADVDGRLAAGDQLLSVDGRSLVGLSQERAAELMTRTSSVVTLEVAKQGAIYHGLATLLNQPSPMMQRISDRRGSGKPRPKSEGFELYNNSTQNGSPESPQLPWAEYSEPKKLPGDDRLMKNRADHRSSPNVANQPPSPGGKSAYASGTTAKITSVSTGNLCTEEQTPPPRPEAYPIPTQTYTREYFTFPASKSQDRMAPPQNQWPNYEEKPHMHTDSNHSSIAIQRVTRSQEELREDKAYQLERHRIEAAMDRKSDSDMWINQSSSLDSSTSSQEHLNHSSKSVTPASTLTKSGPGRWKTPAAIPATPVAVSQPIRTDLPPPPPPPPVHYAGDFDGMSMDLPLPPPPSANQIGLPSAQVAAAERRKREEHQRWYEKEKARLEEERERKRREQERKLGQMRTQSLNPAPFSPLTAQQMKPEKPSTLQRPQETVIRELQPQQQPRTIERRDLQYITVSKEELSSGDSLSPDPWKRDAKEKLEKQQQMHIVDMLSKEIQELQSKPDRSAEESDRLRKLMLEWQFQKRLQESKQKDEDDEEEEDDDVDTMLIMQRLEAERRARLQDEERRRQQQLEEMRKREAEDRARQEEERRRQEEERTKRDAEEKRRQEEGYYSRLEAERRRQHDEAARRLLEPEAPGLCRPPLPRDYEPPSPSPAPGAPPPPPQRNASYLKTQVLSPDSLFTAKFVAYNEEEEEEDCSLAGPNSYPGSTGAAVGAHDACRDAKEKRSKSQDADSPGSSGAPENLTFKERQRLFSQGQDVSNKVKASRKLTELENELNTK

SEQ ID NO: 54452 - protein, 1651 aa, Homo sapiens
MSAGGRDEERRKLADIIHHWNANRLDLFEISQPTEDLEFHGVMRFYFQDKAAGNFATKCIRVSSTATTQDVIETLAEKFRPDMRMLSSPKYSLYEVHVSGERRLDIDEKPLVVQLNWNKDDREGRFVLKNENDAIPPKKAQSNGPEKQEKEGVIQNFKRTLSKKEKKEKKKREKEALRQASDKDDRPFQGEDVENSRLAAEVYKDMPETSFTRTISNPEVVMKRRRQQKLEKRMQEFRSSDGRPDSGGTLRIYADSLKPNIPYKTILLSTTDPADFAVAEALEKYGLEKENPKDYCIARVMLPPGAQHSDEKGAKEIILDDDECPLQIFREWPSDKGILVFQLKRRPPDHIPKKTKKHLEGKTPKGKERADGSGYGSTLPPEKLPYLVELSPGRRNHFAYYNYHTYEDGSDSRDKPKLYRLQLSVTEVGTEKLDDNSIQLFGPGIQPHHCDLTNMDGVVTVTPRSMDAETYVEGQRISETTMLQSGMKVQFGASHVFKFVDPSQDHALAKRSVDGGLMVKGPRHKPGIVQETTFDLGGDIHSGTALPTSKSTTRLDSDRVSSASSTAERGMVKPMIRVEQQPDYRRQESRTQDASGPELILPASIEFRESSEDSFLSAIINYTNSSTVHFKLSPTYVLYMACRYVLSNQYRPDISPTERTHKVIAVVNKMVSMMEGVIQKQKNIAGALAFWMANASELLNFIKQDRDLSRITLDAQDVLAHLVQMAFKYLVHCLQSELNNYMPAFLDDPEENSLQRPKIDDVLHTLTGAMSLLRRCRVNAALTIQLFSQLFHFINMWLFNRLVTDPDSGLCSHYWGAIIRQQLGHIEAWAEKQGLELAADCHLSRIVQATTLLTMDKYAPDDIPNINSTCFKLNSLQLQALLQNYHCAPDEPFIPTDLIENVVTVAENTADELARSDGREVQLEEDPDLQLPFLLPEDGYSCDVVRNIPNGLQEFLDPLCQRGFCRLIPHTRSPGTWTIYFEGADYESHLLRENTELAQPLRKEPEIITVTLKKQNGMGLSIVAAKGAGQDKLGIYVKSVVKGGAADVDGRLAAGDQLLSVDGRSLVGLSQERAAELMTRTSSVVTLEVAKQGAIYHGLATLLNQPSPMMQRISDRRGSGKPRPKSEGFELYNNSTQNGSPESPQLPWAEYSEPKKLPGDDRLMKNRADHRSSPNVANQPPSPGGKSAYASGTTAKITSVSTGNLCTEEQTPPPRPEAYPIPTQTYTREYFTFPASKSQDRMAPPQNQWPNYEEKPHMHTDSNHSSIAIQRVTRSQEELREDKAYQLERHRIEAAMDRKSDSDMWINQSSSLDSSTSSQEHLNHSSKSVTPASTLTKSGPGRWKTPAAIPATPVAVSQPIRTDLPPPPPPPPVHYAGDFDGMSMDLPLPPPPSANQIGLPSAQVAAAERRKREEHQRWYEKEKARLEEERERKRREQERKLGQMRTQSLNPAPFSPLTAQQMKPEKPSTLQRPQETVIRELQPQQQPRTIERRDLQYITVSKEELSSGDSLSPDPWKRDAKEKLEKQQQMHIVDMLSKEIQELQSKPDRSAEESDRLRKLMLEWQFQKRLQESKQKDEDDEEEEDDDVDTMLIMQRLEAERRARDEERRRQQQLEEMRKREAEDRARQEEERRRQEEERTKRDAEEKVMVL

SEQ ID NO: 54453 - protein, 1743 aa, Homo sapiens
MSAGGRDEERRKLADIIHHWNANRLDLFEISQPTEDLEFHGVMRFYFQDKAAGNFATKCIRVSSTATTQDVIETLAEKFRPDMRMLSSPKYSLYEVHVSGERRLDIDEKPLVVQLNWNKDDREGRFVLKNENDAIPPKAQSNGPEKQEKEGVIQNFKRTLSKKEKKEKKKREKEALRQASDKDDRPFQGEDVENSRLAAEVYKDMPETSFTRTISNPEVVMKRRRQQKLEKRMQEFRSSDGRPDSGGTLRIYADSLKPNIPYKTILLSTTDPADFAVAEALEKYGLEKENPKDYCIARVMLPPGAQHSDEKGAKEIILDDDECPLQIFREWPSDKGILVFQLKRRPPDHIPKKTKKHLEGKTPKGKERADGSGYGSTLPPEKLPYLVELSPDGSDSRDKPKLYRLQLSVTEVGTEKLDDNSIQLFGPGIQPHHCDLTNMDGVVTVTPRSMDAETYVEGQRISETTMLQSGMKVQFGASHVFKFVDPSQDHALAKRSVDGGLMVKGPRHKPGIVQETTFDLGGDIHSGTALPTSKSTTRLDSDRVSSASSTAERGMVKPMIRVEQQPDYRRQESRTQDASGPELILPASIEFRESSEDSFLSAIINYTNSSTVHFKLSPTYVLYMACRYVLSNQYRPDISPTERTHKVIAVVNKMVSMMEGVIQKQKNIAGALAFWMANASELLNFIKQDRDLSRITLDAQDVLAHLVQMAFKYLVHCLQSELNNYMPAFLDDPEENSLQRPKIDDVLHTLTGAMSLLRRCRVNAALTIQLFSQLFHFINMWLFNRLVTDPDSGLCSHYWGAIIRQQLGHIEAWAEKQGLELAADCHLSRIVQATTLLTMDKYAPDDIPNINSTCFKLNSLQLQALLQNYHCAPDEPFIPTDLIENVVTVAENTADELARSDGREVQLEEDPDLQLPFLLPEDGYSCDVVRNIPNGLQEFLDPLCQRGFCRLIPHTRSPGTWTIYFEGADYESHLLRENTELAIPLRKEPEIITVTLKKQNGMGLSIVAAKGAGQDKLGIYVKSVVKGGAADDGRLAAGDQLLSVDGRSLVGLSQERAAELMTRTSSVVTLEVAKQGAIYHGLATLLNQPSPMMQRISDRRGSGKPRPKSEGFELYNNSTQNGSPESPQLPWAEYSEPKKLPGDDRLMKNRADHRSSPNVANQPPSPGGKSAYASGTTAKITSVSTGNLCTEEQTPPPRPEAYPIPTQTYTREYFTFPASKSQDRMAPPQNQWPNYEEKPHMHTDSNHSSIAIQRVTRSQEELREDKAYQLERHRIEAAMDRKSDSDMWINQSSSLDSSTSSQEHLNHSSKSVTPASTLTKSGPGRWKTPAAIPATPVAVSQPIRTDLPPPPPPPPVHYAGDFDGMSMDLPLPPPPSANQIGLPSAQVAAAERRKREEHQRWYEKEKARLEEERERKRREQERKLGQMRTQSLNPAPFSPLTAQQMKPEKPSTLQRPQETVIRELQPQQQPRTIERRDLQYITVSKEELSSGDSLSPDPWKRDAKEKLEKQQQMHIVDMLSKEIQELQSKPDRSAEESDRLRKLMLEWQFQKRLQESKQKDEDDEEEEDDDVDTMLIMQRLEAERRARLQDEERRRQQQLEEMRKREAEDRARQEEERRRQEEERTKRDAEEKRRQEEGYYSRLEAERRRQHDEAARRLLEPEAPGPNSYPGSTGAAVGAHDACRDAKEKRSKSQDADSPGSSGAPENLTFKERQRLFSQGQDVSNKVKASRKLTELENELNTK

SEQ ID NO: 54454 - protein, 1824 aa, Homo sapiens
MSAGGRDEERRKLADIIHHWNANRLDLFEISQPTEDLEFHGVMRFYFQDKAAGNFATKCIRVSSTATTQDVIETLAEKFRPDMRMLSSPKYSLYEVHVSGERRLDIDEKPLVVQLNWNKDDREGRFVLKNENDAIPPKKAQSNGPEKQEKEGVIQNFKRTLSKKEKKEKKKREKEALRQASDKDDRPFQGEDVENSRLAAEVYKDMPETSFTRTISNPEVVMKRRRQQKLEKRMQEFRSSDGRPDSGGTLRIYADSLKPNIPYKTILLSTTDPADFAVAEALEKYGLEKENPKDYCIARVMLPPGAQHSDEKGAKEIILDDDECPLQIFREWPSDKGILVFQLKRRPPDHIPKKTKKHLEGKTPKGKERADGSGYGSTLPPEKLPYLVELSPGRRNHFAYYNYHTYEDGSDSRDKPKLYRLQLSVTEVGTEKLDDNSIQLFGPGIQPHHCDLTNMDGVVTVTPRSMDAETYVEGQRISETTMLQSGMKVQFGASHVFKFVDPSQDHALAKRSVDGGLMVKGPRHKPGIVQETTFDLGGDIHSGTALPTSKSTTRLDSDRVSSASSTAERGMVKPMIRVEQQPDYRRQESRTQDASGPELILPASIEFRESSEDSFLSAIINYTNSSTVHFKLSPTYVLYMACRYVLSNQYRPDISPTERTHKVIAVVNKMVSMMEGVIQKQKNIAGALAFWMANASELLNFIKQDRDLSRITLDAQDVLAHLVQMAFKYLVHCLQSELNNYMPAFLDDPEENSLQRPKIDDVLHTLTGAMSLLRRCRVNAALTIQLFSQLFHFINMWLFNRLVTDPDSGLCSHYWGAIIRQQLGHIEAWAEKQGLELAADCHLSRIVQATTLLTMDKYAPDDIPNINSTCFKLNSLQLQALLQNYHCAPDEPFIPTDLIENVVTVAENTADELARSDGREVQLEEDPDLQLPFLLPEDGYSCDVVRNIPNGLQEFLDPLCQRGFCRLIPHTRSPGTWTIYFEGADYESHLLRENTELAQPLRKEPEIITVTLKKQNGMGLSIVAAKGAGQDKLGIYVKSVVKGGAADVDGRLAAGDQLLSVDGRSLVGLSQERAAELMTRTSSVVTLEVAKQGAIYHGLATLLNQPSPMMQRISDRRGSGKPRPKSEGFELYNNSTQNGSPESPQLPWAEYSEPKKLPGDDRLMKNRADHRSSPNVANQPPSPGGKSAYASGTTAKITSVSTGNLCTEEQTPPPRPEAYPIPTQTYTREYFTFPASKSQDRMAPPQNQWPNYEEKPHMHTDSNHSSIAIQRVTRSQEELREDKAYQLERHRIEAAMDRKSDSDMWINQSSSLDSSTSSQEHLNHSSKSVTPASTLTKSGPGRWKTPAAIPATPVAVSQPIRTDLPPPPPPPPVHYAGDFDGMSMDLPLPPPPSANQIGLPSAQVAAAERRKREEHQRWYEKEKARLEEERERKRREQERKLGQMRTQSLNPAPFSPLTAQQMKPEKPSTLQRPQETVIRELQPQQQPRTIERRDLQYITVSKEELSSGDSLSPDPWKRDAKEKLEKQQQMHIVDMLSKEIQELQSKPDRSAEESDRLRKLMLEWQFQKRLQESKQKDEDDEEEEDDDVDTMLIMQRLEAERRARLQDEERRRQQQLEEMRKREAEDRARQEEERRRQEEERTKRDAEEKRRQEEGYYSRLEAERRRQHDEAARRLLEPEAPGLCRPPLPRDYEPPSPSPAPGAPPPPPQRNASYLKTQVLSPDSLFTAKFVAYNEEEEEEDCSLAGPNSYPGSTGAAVGAHDACRDAKEKRSKSQDADSPGSSGAPENLTFKERQRLFSQGQDVSNKVKASRKLTELENELNTK

SEQ ID NO: 54455 - protein, 1093 aa, Homo sapiens [sequence omitted]

SEQ ID NO: 54456 - protein, 325 aa, Homo sapiens
MKEMVGGCCVCSDERGWAENPLVYCDGHACSVVVHQACYGIVQVPTGPWFCRKCESQERAARVRCELCPHKDGALKRTDNGGWAHVVCALYIPEVQFANVLTMEPIVLQYVPHDRFNKTCYICEEQGRESKAASGACMTCNRHGCRQAFHVTCAQMAGLLCEEEVLEVDNVKYCGYCKYHFSKMKTSRHSSGGGGGGAGGGGGSMGGGGSGFISGRRSRSASPSTQQEKHPTHHERGQKKSRKDKERLKQKHKKRPESPPSILTPPVVPTADKPRRGHQSPTNHGIGSLGCCLPDTPICLCPEGLSPGLLSAESGGRHSGLLSKF

SEQ ID NO: 54457 - protein, 5537 aa, Homo sapiens
MDSQKLAGEDKDSEPAADGPAASEDPSATESDLPNPHVGEVSVLSSGSPRLQETPQDCSGGPVRRCALCNCGEPSLHGQRELRRFELPFDWPRCPVVSPGGSPGPNEAVLPSEDLSQIGFPEGLTPAHLGEPGGSCWAHHWCAAWSAGVWGQEGPELCGVDKAIFSGISQRCSHCTRLGASIPCRSPGCPRLYHFPCATASGSFLSMKTLQLLCPEHSEGAAYLEEARCAVCEGPGELCDLFFCTSCGHHYHGACLDTALTARKRAGWQCPECKVCQACRKPGNDSKMLVCETCDKGYHTFCLKPPMEELPAHSWKCKACRVCRACGAGSAELNPNSEWFENYSLCHRCHKAQGGQTIRSVAEQHTPVCSRFSPPEPGDTPTDEPDALYVACQGQPKGGHVTSMQPKEPGPLQCEAKPLGKAGVQLEPQLEAPLNEEMPLLPPPEESPLSPPPEESPTSPPPEASRLSPPPEELPASPLPEALHLSRPLEESPLSPPPEESPLSPPPESSPFSPLEESPLSPPEESPPSPALETPLSPPPEASPLSPPFEESPLSPPPEELPTSPPPEASRLSPPPEESPMSPPPEESPMSPPPEASRLFPPFEESPLSPPPEESPLSPPPEASRLSPPPEDSPMSPPPEESPMSPPPEVSRLSPLPVVSRLSPPPEESPLSPPPEESPTSPPPEASRLSPPPEDSPTSPPPEDSPASPPPEDSLMSLPLEESPLLPLPEEPQLCPRSEGPHLSPRPEEPHLSPRPEEPHLSPQAEEPHLSPQPEEPCLCAVPEEPHLSPQAEGPHLSPQPEELHLSPQTEEPHLSPVPEEPCLSPQPEESHLSPQSEEPCLSPRPEESHLSPELEKPPLSPRPEKPPEEPGQCPAPEELPLFPPPGEPSLSPLLGEPALSEPGEPPLSPLPEELPLSPSGEPSLSPQLMPPDPLPPPLSPIITAAAPPALSPLGELEYPFGAKGDSDPESPLAAPILETPISPPPEANCTDPEPVPPMILPPSPGSPVGPASPILMEPLPPQCSPLLQHSLVPQNSPPSQCSPPALPLSVPSPLSPIGKVVGVSDEAELHEMETEKVSEPECPALEPSATSPLPSPMGDLSCPAPSPAPALDDFSGLGEDTAPLDGIDAPGSQPEPGQTPGSLASELKGSPVLLDPEELAPVTPMEVYPECKQTAGQGSPCEEQEEPRAPVAPTPPTLIKSDIVNEISNLSQGDASASFPGSEPLLGSPDPEGGGSLSMELGVSTDVSPARDEGSLRLCTDSLPETDDSLLCDAGTAISGGKAEGEKGRRRSSPARSRIKQGRSSSFPGRRRPRGGAHGGRGRGRARLKSTASSIETLVVADIDSSPSKEEEEEDDDTMQNTVVLFSNTDKFVLMQDMCVVCGSFGRGAEGHLLACSQCSQCYHPYCVNSKITKVMLLKGWRCVECIVCEVCGQASDPSRLLLCDDCDISYHTYCLDPPLLTVPKGGWKCKWCVSCMQCGAASPGFHCEWQNSYTHCGPCASLVTCPICHAPYVEEDLLIQCRHCERWMHAGCESLFTEDDVEQAADEGFDCVSCQPYVVKPVAPVAPPELVPMKVKEPEPQYFRFEGVWLTETGMALLRNLTMSPLHKRRQRRGRLGLPGEAGLEGSEPSDALGPDDKKDGDLDTDELLKGEGGVEHMECEIKLEGPVSPDVEPGKEETEESKKRKRKPYRPGIGGFMVRQRKSHTRTKKGPAAQAEVLSGDGQPDEVIPADLPAEGAVEQSLAEGDEKKKQQRRGRKKSKLEDMFPAYLQEAFFGKELLDLSRKALFAVGVGRPSFGLGTPKAKGDGGSERKELPTSQKGDDGPDIADEESRGLEGKADTPGPEDGGVKASPVPSDPEKPGTPGEGMLSSDLDRISTEELPKMESKDLQQLFKDVLGSEREQHLGCGTPGLEGSRTPLQRPFLQGGLPLGNLPSSSPMDSYPGLCQSPFLDSRERGGFFSPEPGEPDSPWTGSGGTTPSTPTTPTTEGEGDGLSYNQRSLQRWEKDEELGQLSTISPVLYANINFPNLKQDYPDWSSRCKQIMKLWRKVPAADKAPYLQKAKDNRAAHRINKVQKQAESQINKQTKVGDIARKTDRPALHLRIPPQPGALGSPPPAAAPTIFIGSPTTPAGLSTSADGFLKPPAGSVPGPDSPGELFLKLPPQVPAQVPSQDPFGLAPAYPLEPRFPTAPPTYPPYPSPTGAPAQPPMLGASSRPGAGQPGEFHTTPPGTPRHQPSTPDPFLKPRCPSLDNLAVPESPGVGGGKASEPLLSPPPFGESRKALEVKKEELGASSPSYGPPNLGFVDSPSSGTHLGGLELKTPDVFKAPLTPRASQVEPQSPGLGLRPQEPPPAQALAPSPPSHPDIFRPGSYTDPYAQPPLTPRPQPPPPESCCALPPRSLPSDPFSRVPASPQSQSSSQSPLTPRPLSAEAFCPSPVTPRFQSPDPYSRPPSRPQSRDPFAPLHKPPRPQPPEVAFKAGSLAHTSLGAGGFPAALPAGPAGELHAKVPSGQPPNFVRSPGTGAFVGTPSPMRFTFPQAVGEPSLKPPVPQPGLPPPHGINSHFGPGPTLGKPQSTNYTVATGNFHPSGSPLGPSSGSTGESYGLSPLRPPSVLPPPAPDGSLPYLSHGASQRSGITSPVEKREDPGTGMGSSLATAELPGTQDPGMSGLSQTELEKQRQRQRLRELLIRQQIQRNTLRQEKETAAAAAGAVGPPGSWGAEPSSPAFEQLSRGQTPFAGTQDKSSLVGLPPSKLSGPILGPGSFPSDDRLSRPPPPATPSSMDVNSRQLVGGSQAFYQRAPYPGSLPLQQQQQQLWQQQQATAATSMRFAMSARFPSTPGPELGRQALGSPLAGISTRLPGPGEPVPGPAGPAQFIELRHNVQKGLGPGGTPFPGQGPPQRPRFYPVSEDPHRLAPEGLRGLAVSGLPPQKPSAPPAPELNNSLHPTPHTKGPTLPTGLELVNRPPSSTELGRPNPLALEAGKLPCEDPELDDDFDAHKALEDDEELAHLGLGVDVAKGDDELGTLENLETNDPHLDDLLNGDEFDLLAYTDPELDTGDKKDIFNEHLRLVESANEKAEREALLRGVEPGPLGPEERPPPAADASEPRLASVLPEVKPKVEEGGRHPSPCQFTIATPKVEPAPAANSLGLGLKPGQSMMGSRDTRMGTGPFSSSGHTAEKASFGATGGPPAHLLTPSPLSGPGGSSLLEKFELESGALTLPGGPAASGDELDKMESSLVASELPLLIEDLLEHEKKELQKKQQLSAQLQPAQQQQQQQQQHSLLSAPGPAQAMSLPHEGSSPSLAGSQQQLSLGLAGARQPGLPQPLMPTQPPAHALQQRLAPSMAMVSNQGHMLSGQHGGQAGLVPQQSSQPVLSQKPMGTMPPSMCMKPQQLAMQQQLANSFFPDTDLDKFAAEDIIDPIAKAKMVALKGIKKVMAQGSIGVAPGMNRQQVSLLAQRLSGGPSSDLQNHVAAGSGQERSAGDPSQPRPNPPTFAQGVINEADQRQYEEWLFHTQQLLQMQLKVLEEQIGVHRKSRKALCAKQRTAKKAGREFPEADAEKLKLVTEQQSKIQKQLDQVRKQQKEHTNLMAEYRNKQQQQQQQQQQQQQQHSAVLALSPSQSPRLLTKLPGQLLPGHGLQPPQGPPGGQAGGLRLTPGGMALPGQPGGPFLNTALAQQQQQQHSGGAGSLAGPSGGFFPGNLALRSLGPDSRLLQERQLQLQQQRMQLAQKLQQQQQQQQQQQHLLGQVAIQQQQQQGPGVQTNQALGPKPQGLMPPSSHQGLLVQQLSPQPPQGPQGMLGPAQVAVLQQQHPGALGPQGPHRQVLMTQSRVLSSPQLAQQGQGLMGHRLVTAQQQQQQQQHQQQGSMAGLSHLQQSLMSHSGQPKLSAQPMGSLQQLQQQQQLQQQQQLQQQQQQQLQQQQQLQQQQLQQQQQQQQLQQQQQQQLQQQQQQLQQQQQQQQQQFQQQQQQQQMGLLNQSRTLLSPQQQQQQQVALGPGMPAKPLQHFSSPGALGPTLLLTGKEQNTVDPAVSSEATEGPSTHQGGPLAIGTTPESMATEPGEVKPSLSGDSQLLLVQPQPQPQPSSLQLQPPLRLPGQQQQQVSLLHTAGGGSHGQLGSGSSSEASSVPHLLAQPSVSLGDQPGSMTQNLLGPQQPMLERPMQNNTGPQPPKPGPVLQSGQGLPGVGIMPTVGQLRAQLQGVLAKNPQLRHLSPQQQQQLQALLMQRQLQQSQAVRQTPPYQEPGTQTSPLQGLLGCQPQLGGFPGPQTGPLQELGAGPRPQGPPRLPAPPGALSTGPVLGPVHPTPPPSSPQEPKRPSQLPSPSSQLPTEAQLPPTHPGTPKPQGPTLEPPPGRVSPAAAQLADTLFSKGLGPWDPPDNLAETQKPEQSSLVPGHLDQVNGQVVPEASQLSIKQEPREEPCALGAQSVKREANGEPIGAPGTSNHLLLAGPRSEAGHLLLQKLLRAKNVQLSTGRGSEGLRAEINGHIDSKLAGLEQKLQGTPSNKEDAAARKPLTPKPKRVQKASDRLVSSRKKLRKEDGVRASEALLKQLKQELSLLPLTEPAITANFSLFAPFGSGCPVNGQSQLRGAFGSGALPTGPDYYSQLLTKNNLSNPPTPPSSLPPTPPPSVQQKMVNGVTPSEELGEHPKDAASARDSERALRDTSEVKSLDLLAALPTPPHNQTEDVRMESDEDSDSPDSIVPASSPESILGEEAPRFPHLGSGRWEQEDRALSPVIPLIPRASIPVFPDTKPYGALGLEVPGKLPVTTWEKGKGSEVSVMLTVSAAAAKNLNGVMVAVAELLSMKIPNSYEVLFPESPARAGTEPKKGEAEGPGGKEKGLEGKSPDTGPDWLKQFDAVLPGYTLKSQLDILSLLKQESPAPEPPTQHSYTYNVSNLDVRQLSAPPPEEPSPPPSPLAPSPASPPTEPLVELPTEPLAEPPVPSPLPLASSPESARPKPRARPPEEGEDSRPPRLKKWKGVRWKRLRLLLTIQKGSGRQEDEREVAEFMEQLGTALRPDKVPRDMRRCCFCHEEGDGATDGPARLLNLDLDLWVHLNCALWSTEVYETQGGALMNVEVALHRGLLTKCSLCQRTGATSSCNRMRCPNVYHFACAIRAKCMFFKDKTMLCPMHKIKGPCEQELSSFAVFRRVYIERDEVKQIASIIQRGERLHMFRVGGLVFHAIGQLLPHQMADFHSATALYPVGYEATRIYWSLRTNNRRCCYRCSIGENNGRPEFVIKVIEQGLEDLVFTDASPQAVWNRIIEPVAAMRKEADMLRLFPEYLKGEELFGLTVHAVLRIAESLPGVESCQNYLFRYGRHPLMELPLMINPTGCARSEPKILTHYKRPHTLNSTSMSKAYQSTFTGETNTPYSKQFVHSKSSQYRRLRTEWKNNVYLARSRIQGLGLYAAKDLEKHTMVIEYIGTIIRNEVANRREKIYEEQNRGIYMFRINNEHVIDATLTGGPARYINHSCAPNCVAEVVTFDKEDKIIIISSRRIPKGEELTYDYQFDFEDDQHKIPCHCGAWNCRKWMN

SEQ ID NO: 54458 - protein, 146 aa, Homo sapiens
MDSQKLAGEDKDSEPAADGPAASEDPSATESDLPNPHVGEVSVLSSGSPRLQETPQDCSGGPVRRCALCNCGEPSLHGQRELRRFELPFDWPRCPVVSPGGSPGPNEAVLPSEDLSQIGFPEGLTPAHLGEPGGSCWAHHWCAAWS

SEQ ID NO: 54459 - protein, 4911 aa, Homo sapiens
MSSEEDKSVEQPQPPPPPPEEPGAPAPSPAAADKRPRGRPRKDGASPFQRARKKPRSRGKTAVEDEDSMDGLETTETETIVETEIKEQSAEEDAEAEVDNSKQLIPTLQRSVSEESANSLVSVGVEAKISEQLCAFCYCGEKSSLGQGDLKQFRITPGFILPWRNQPSNKKDIDDNSNGTYEKMQNSAPRKQRGQRKERSPQQNIVSCVSVSTQTASDDQAGKLWDELSLVGLPDAIDIQALFDSTGTCWAHHRCVEWSLGVCQMEEPLLVNVDKAVVSGSTERCAFCKHLGATIKCCEEKCTQMYHYPCAAGAGTFQDFSHIFLLCPEHIDQAPERSKEDANCAVCDSPGDLLDQFFCTTCGQHYHGMCLDIAVTPLKRAGWQCPECKVCQNCKQSGEDSKMLVCDTCDKGYHTFCLQPVMKSVPTNGWKCKNCRICIECGTRSSSQWHHNCLICDNCYQQQDNLCPFCGKCYHPELQKDMLHCNMCKRWVHLECDKPTDHELDTQLKEEYICMYCKHLGAEMDRLQPGEEVEIAELTTDYNNEMEVEGPEDQMVFSEQAANKDVNGQESTPGIVPDAVQVHTEEQQKSHPSESLDTDSLLIAVSSQHTVNTELEKQISNEVDSEDLKMSSEVKHICGEDQIEDKMEVTENIEVVTHQITVQQEQLQLLEEPETVVSREESRPPKLVMESVTLPLETLVSPHEESISLCPEEQLVIERLQGEKEQKENSELSTGLMDSEMTPTIEGCVKDVSYQGGKSIKLSSETESSFSSSADISKADVSSSPTPSSDLPSHDMLHNYPSALSSSAGNIMPTTYISVTPKIGMGKPAITKRKFSPGRPRSKQGAWSTHNTVSPPSWSPDISEGREIFKPRQLPGSAIWSIKVGRGSGFPGKRRPRGAGLSGRGGRGRSKLKSGIGAVVLPGVSTADISSNKDDEENSMHNTVVLFSSSDKFTLNQDMCVVCGSFGQGAEGRLLACSQCGQCYHPYCVSIKITKVVLSKGWRCLECTVCEACGKATDPGRLLLCDDCDISYHTYCLDPPLQTVPKGGWKCKWCVWCRHCGATSAGLRCEWQNNYTQCAPCASLSSCPVCYRNYREEDLILQCRQCDRWMHAVCQNLNTEEEVENVADIGFDCSMCRPYMPASNVPSSDCCESSLVAQIVTKVKELDPPKTYTQDGVCLTESGMTQLQSLTVTVPRRKRSKPKLKLKIINQNSVAVLQTPPDIQSEHSRDGEMDDSREGELMDCDGKSESSPEREAVDDETKGVEGTDGVKKRKRKPYRPGIGGFMVRQRSRTGQGKTKRSVIRKDSSGSISEQLPCRDDGWSEQLPDTLVDESVSVTESTEKIKKRYRKRKNKLEETFPAYLQEAFFGKDLLDTSRQSKISLDNLSEDGAQLLYKTNMNTGFLDPSLDPLLSSSSAPTKSGTHGPADDPLADISEVLNTDDDILGIISDDLAKSVDHSDIGPVTDDPSSLPQPNVNQSSRPLSEEQLDGILSPELDKMVTDGAILGKLYKIPELGGKDVEDLFTAVLSPANTQPTPLPQPPPPTQLLPIHNQDAFSRMPLMNGLIGSSPHLPHNSLPPGSGLGTFSAIAQSSYPDARDKNSAFNPMASDPNNSWTSSAPTVEGENDTMSNAQRSTLKWEKEEALGEMATVAPVLYTNINFPNLKEEFPDWTTRVKQIAKLWRKASSQERAPYVQKARDNRAALRINKVQMSNDSMKRQQQQDSIDPSSRIDSELFKDPLKQRESEHEQEWKFRQQMRQKSKQQAKIEATQKLEQVKNEQQQQQQQQFGSQHLLVQSGSDTPSSGIQSPLTPQPGNGNMSPAQSFHKELFTKQPPSTPTSTSSDDVFVKPQAPPPPPAPSRIPIQDSLSQAQTSQPPSPQVFSPGSSNSRPPSPMDPYAKMVGTPRPPPVGHSFSRRNSAAPVENCTPLSSVSRPLQMNETTANRPSPVRDLCSSSTTNNDPYAKPPDTPRPVMTDQFPKSLGLSRSPVVSEQTAKGPIAAGTSDHFTKPSPRADVFQRQRIPDSYARPLLTPAPLDSGPGPFKTPMQPPPSSQDPYGSVSQASRRLSVDPYERPALTPRPIDNFSHNQSNDPYSQPPLTPHPAVNESFAHPSRAFSQPGTISRPTSQDPYSQPPGTPRPVVDSYSQSSGTARSNTDPYSQPPGTPRPTTVDPYSQQPQTPRPSTQTDLFVTPVTNQRHSDPYAHPPGTPRPGISVPYSQPPATPRPRISEGFTRSSMTRPVLMPNQDPFLQAAQNRGPALPGPLVRPPDTCSQTPRPPGPGLSDTFSRVSPSAARDPYDQSPMTPRSQSDSFGTSQTAHDVADQPRPGSEGSFCASSNSPMHSQGQQFSGVSQLPGPVPTSGVTDTQNTVNMAQADTEKLRQRQKLREIILQQQQQKKIAGRQEKGSQDSPAVPHPGPLQHWQPENVNQAFTRPPPPYPGNIRSPVAPPLGPRYAVFPKDQRGPYPPDVASMGMRPHGFRFGFPGGSHGTMPSQERFLVPPQQIQGSGVSPQLRRSVSVDMPRPLNNSQMNNPVGLPQHFSPQSLPVQQHNILGQAYIELRHRAPDGRQRLPFSAPPGSVVEASSNLRHGNFIPRPDFPGPRHTDPMRRPPQGLPNQLPVHPDLEQVPPSQQEQGHSVHSSSMVMRTLNHPLGGEFSEAPLSTSVPSETTSDNLQITTQPSDGLEEKLDSDDPSVKELDVKDLEGVEVKDLDDEDLENLNLDTEDGKVVELDTLDNLETNDPNLDDLLRSGEFDIIAYTDPELDMGDKKSMFNEELDLPIDDKLDNQCVSVEPKKKEQENKTLVLSDKHSPQKKSTVTNEVKTEVLSPNSKVESKCETEKNDENKDNVDTPCSQASAHSDLNDGEKTSLHPCDPDLFEKRTNRETAGPSANVIQASTQLPAQDVINSCGITGSTPVLSSLLANEKSDNSDIRPSGSPPPPTLPASPSNHVSSLPPFIAPPGRVLDNAMNSNVTVVSRVNHVFSQGVQVNPGLIPGQSTVNHSLGTGKPATQTGPQTSQSGTSSMSGPQQLMIPQTLAQQNRERPLLLEEQPLLLQDLLDQERQEQQQQRQMQAMIRQRSEPFFPNIDFDAITDPIMKAKMVALKGINKVMAQNNLGMPPMVMSRFPFMGQVVTGTQNSEGQNLGPQAIPQDGSITHQISRPNPPNFGPGFVNDSQRKQYEEWLQETQQLLQMQQKYLEEQIGAHRKSKKALSAKQRTAKKAGREFPEEDAEQLKHVTEQQSMVQKQLEQIRKQQKEHAELIEDYRIKQQQQCAMAPPTMMPSVQPQPPLIPGATPPTMSQPTFPMVPQQLQHQQHTTVISGHTSPVRMPSLPGWQPNSAPAHLPLNPPRIQPPIAQLPIKTCTPAPGTVSNANPQSGPPPRVEFDDNNPFSESFQERERKERLREQQERQRIQLMQEVDRQRALQQRMEMEQHGMVGSEISSSRTSVSQIPFYSSDLPCDFMQPLGPLQQSPQHQQQMGQVLQQQNIQQGSINSPSTQTFMQTNERRQVGPPSFVPDSPSIPVGSPNFSSVKQGHGNLSGTSFQQSPVRPSFTPALPAAPPVANSSLPCGQDSTITHGHSYPGSTQSLIQLYSDIIPEEKGKKKRTRKKKRDDDAESTKAPSTPHSDITAPPTPGISETTSTPAVSTPSELPQQADQESVEPVGPSTPNMAAGQLCTELENKLPNSDFSQATPNQQTYANSEVDKLSMETPAKTEEIKLEKAETESCPGQEEPKLEEQNGSKVEGNAVACPVSSAQSPPHSAGAPAAKGDSGNELLKHLLKNKKSSSLLNQKPEGSICSEDDCTKDNKLVEKQNPAEGLQTLGAQMQGGFGCGNQLPKTDGGSETKKQRSKRTQRTGEKAAPRSKKRKKDEEEKQAMYSSTDTFTHLKQQNNLSNPPTPPASLPPTPPPMACQKMANGFATTEELAGKAGVLVSHEVTKTLGPKPFQLPFRPQDDLLARALAQGPKTVDVPASLPTPPHNNQEELRIQDHCGDRDTPDSFVPSSSPESVVGVEVSRYPDLSLVKEEPPEPVPSPIIPILPSTAGKSSESRRNDIKTEPGTLYFASPFGPSPNGPRSGLISVAITLHPTAAENISSVVAAFSDLLHVRIPNSYEVSSAPDVPSMGLVSSHRINPGLEYRQHLLLRGPPPGSANPPRLVSSYRLKQPNVPFPPTSNGLSGYKDSSHGIAESAALRPQWCCHCKVVILGSGVRKSFKDLTLLNKDSRESTKRVEKDIVFCSNNCFILYSSTAQAKNSENKESIPSLPQSPMRETPSKAFHQYSNNISTLDVHCLPQLPEKASPPASPPIAFPPAFEAAQVEAKPDELKVTVKLKPRLRAVHGGFEDCRPLNKKWRGMKWKKWSIHIVIPKGTFKPPCEDEIDEFLKKLGTSLKPDPVPKDYRKCCFCHEEGDGLTDGPARLLNLDLDLWVHLNCALWSTEVYETQAGALINVELALRRGLQMKCVFCHKTGATSGCHRFRCTNIYHFTCAIKAQCMFFKDKTMLCPMHKPKGIHEQELSYFAVFRRVYVQRDEVRQIASIVQRGERDHTFRVGSLIFHTIGQLLPQQMQAFHSPKALFPVGYEASRLYWSTRYANRRCRYLCSIEEKDGRPVFVIRIVEQGHEDLVLSDISPKGVWDKILEPVACVRKKSEMLQLFPAYLKGEDLFGLTVSAVARIAESLPGVEACENYTFRYGRNPLMELPLAVNPTGCARSEPKMSAHVKRFVLRPHTLNSTSTSKSFQSTVTGELNAPYSKQFVHSKSSQYRKMKTEWKSNVYLARSRIQGLGLYAARDIEKHTMVIEYIGTIIRNEVANRKEKLYESQNRGVYMFRMDNDHVIDATLTGGPARYINHSCAPNCVAEVVTFERGHKIIISSSRRIQKGEELCYDYKFDFEDDQHKIPCHCGAVNCRKWMN

SEQ ID NO: 54460 - protein, 4968 aa, Homo sapiens
MSSEEDKSVEQPQPPPPPPEEPGAPAPSPAAADKRPRGRPRKDGASPFQRARKKPRSRGKTAVEDEDSMDGLETTETETIVETEIKEQSAEEDAEAEVDNSKQLIPTLQRSVSEESANSLVSVGVEAKISEQLCAFCYCGEKSSLGQGDLKQFRITPGFILPWRNQPSNKKDIDDNSNGTYEKMQNSAPRKQRGQRKERSPQQNIVSCVSVSTQTASDDQAGKLWDELSLVGLPDAIDIQALFDSTGTCWAHHRCVEWSLGVCQMEEPLLVNVDKAVVSGSTERCAFCKHLGATIKCCEEKCTQMYHYPCAAGAGTFQDFSHIFLLCPEHIDQAPERSKEDANCAVCDSPGDLLDQFFCTTCGQHYHGMCLDIAVTPLKRAGWQCPECKVCQNCKQSGEDSKMLVCDTCDKGYHTFCLQPVMKSVPTNGWKCKNCRICIECGTRSSSQWHHNCLICDNCYQQQDNLCPFCGKCYHPELQKDMLHCNMCKRWVHLECDKPTDHELDTQLKEEYICMYCKHLGAEMDRLQPGEEVEIAELTTDYNNEMEVEGPEDQMVFSEQAANKDVNGQESTPGIVPDAVQVHTEEQQKSHPSESLDTDSLLIAVSSQHTVNTELEKQISNEVDSEDLKMSSEVKHICGEDQIEDKMEVTENIEVVTHQITVQQEQLQLLEEPETVVSREESRPPKLVMESVTLPLETLVSPHEESISLCPEEQLVIERLQGEKEQKENSELSTGLMDSEMTPTIEGCVKDVSYQGGKSIKLSSETESSFSSSADISKADVSSSPTPSSDLPSHDMLHNYPSALSSSAGNIMPTTYISVTPKIGMGKPAITKRKFSPGRPRSKQGAWSTHNTVSPPSWSPDISEGREIFKPRQLPGSAIWSIKVGRGSGFPGKRRPRGAGLSGRGGRGRSKLKSGIGAVVLPGVSTADISSNKDDEENSMHNTVVLFSSSDKFTLNQDMCVVCGSFGQGAEGRLLACSQCGQCYHPYCVSIKITKVVLSKGWRCLECTVCEACGKATDPGRLLLCDDCDISYHTYCLDPPLQTVPKGGWKCKWCVWCRHCGATSAGLRCEWQNNYTQCAPCASLSSCPVCYRNYREEDLILQCRQCDRWMHAVCQNLNTEEEVENVADIGFDCSMCRPYMPASNVPSSDCCESSLVAQIVTKVKELDPPKTYTQDGVCLTESGMTQLQSLTVTVPRRKRSKPKLKLKIINQNSVAVLQTPPDIQSEHSRDGEMDDSREGELMDCDGKSESSPEREAVDDETKGVEGTDGVKKRKRKPYRPGIGGFMVRQRSRTGQGKTKRSVIRKDSSGSISEQLPCRDDGWSEQLPDTLVDESVSVTESTEKIKKRYRKRKNKLEETFPAYLQEAFFGKDLLDTSRQSKISLDNLSEDGAQLLYKTNMNTGFLDPSLDPLLSSSSAPTKSGTHGPADDPLADISEVLNTDDDILGIISDDLAKSVDHSDIGPVTDDPSSLPQPNVNQSSRPLSEEQLDGILSPELDKMVTDGAILGKLYKIPELGGKDVEDLFTAVLSPANTQPTPLPQPPPPTQLLPIHNQDAFSRMPLMNGLIGSSPHLPHNSLPPGSGLGTFSAIAQSSYPDARDKNSAFNPMASDPNNSWTSSAPTVEGENDTMSNAQRSTLKWEKEEALGEMATVAPVLYTNINFPNLKEEFPDWTTRVKQIAKLWRKASSQERAPYVQKARDNRAALRINKVQMSNDSMKRQQQQDSIDPSSRIDSELFKDPLKQRESEHEQEWKFRQQMRQKSKQQAKIEATQKLEQVKNEQQQQQQQQFGSQHLLVQSGSDTPSSGIQSPLTPQPGNGNMSPAQSFHKELFTKQPPSTPTSTSSDDVFVKPQAPPPPPAPSRIPIQDSLSQAQTSQPPSPQVFSPGSSNSRPPSPMDPYAKMVGTPRPPPVGHSFSRRNSAAPVENCTPLSSVSRPLQMNETTANRPSPVRDLCSSSTTNNDPYAKPPDTPRPVMTDQFPKSLGLSRSPVVSEQTAKGPIAAGTSDHFTKPSPRADVFQRQRIPDSYARPLLTPAPLDSGPGPFKTPMQPPPSSQDPYGSVSQASRRLSVDPYERPALTPRPIDNFSHNQSNDPYSQPPLTPHPAVNESFAHPSRAFSQPGTISRPTSQDPYSQPPGTPRPVVDSYSQSSGTARSNTDPYSQPPGTPRPTTVDPYSQQPQTPRPSTQTDLFVTPVTNQRHSDPYAHPPGTPRPGISVPYSQPPATPRPRISEGFTRSSMTRPVLMPNQDPFLQAAQNRGPALPGPLVRPPDTCSQTPRPPGPGLSDTFSRVSPSAARDPYDQSPMTPRSQSDSFGTSQTAHDVADQPRPGSEGSFCASSNSPMHSQGQQFSGVSQLPGPVPTSGVTDTQNTVNMAQADTEKLRQRQKLREIILQQQQQKKIAGRQEKGSQDSPAVPHPGPLQHWQPENVNQAFTRPPPPYPGNIRSPVAPPLGPRYAVFPKDQRGPYPPDVASMGMRPHGFRFGFPGGSHGTMPSQERFLVPPQQIQGSGVSPQLRRSVSVDMPRPLNNSQMNNPVGLPQHFSPQSLPVQQHNILGQAYIELRHRAPDGRQRLPFSAPPGSVVEASSNLRHGNFIPRPDFPGPRHTDPMRRPPQGLPNQLPVHPDLEQVPPSQQEQGHSVHSSSMVMRTLNHPLGGEFSEAPLSTSVPSETTSDNLQITTQPSDGLEEKLDSDDPSVKELDVKDLEGVEVKDLDDEDLENLNLDTEDGKVVELDTLDNLETNDPNLDDLLRSGEFDIIAYTDPELDMGDKKSMFNEELDLPIDDKLDNQCVSVEPKKKEQENKTLVLSDKHSPQKKSTVTNEVKTEVLSPNSKVESKCETEKNDENKDNVDTPCSQASAHSDLNDGEKTSLHPCDPDLFEKRTNRETAGPSANVIQASTQLPAQDVINSCGITGSTPVLSSLLANEKSDNSDIRPSGSPPPPTLPASPSNHVSSLPPFIAPPGRVLDNAMNSNVTVVSRVNHVFSQGVQVNPGLIPGQSTVNHSLGTGKPATQTGPQTSQSGTSSMSGPQQLMIPQTLAQQNRERPLLLEEQPLLLQDLLDQERQEQQQQRQMQAMIRQRSEPFFPNIDFDAITDPIMKAKMVALKGINKVMAQNNLGMPPMVMSRFPFMGQVVTGTQNSEGQNLGPQAIPQDGSITHQISRPNPPNFGPGFVNDSQRKQYEEWLQETQQLLQMQQKYLEEQIGAHRKSKKALSAKQRTAKKAGREFPEEDAEQLKHVTEQQSMVQKQLEQIRKQQKEHAELIEDYRIKQQQQCAMAPPTMMPSVQPQPPLIPGATPPTMSQPTFPMVPQQLQHQQHTTVISGHTSPVRMPSLPGWQPNSAPAHLPLNPPRIQPPIAQLPIKTCTPAPGTVSNANPQSGPPPRVEFDDNNPFSESFQERERKERLREQQERQRIQLMQEVDRQRALQQRMEMEQHGMVGSEISSSRTSVSQIPFYSSDLPCDFMQPLGPLQQSPQHQQQMGQVLQQQNIQQGSINSPSTQTFMQTNERRQVGPPSFVPDSPSIPVGSPNFSSVKQGHGNLSGTSFQQSPVRPSFTPALPAAPPVANSSLPCGQDSTITHGHSYPGSTQSLIQLYSDIIPEEKGKKKRTRKKKRDDDAESTKAPSTPHSDITAPPTPGISETTSTPAVSTPSELPQQADQESVEPVGPSTPNMAAGQLCTELENKLPNSDFSQATPNQQTYANSEVDKLSMETPAKTEEIKLEKAETESCPGQEEPKLEEQNGSKVEGNAVACPVSSAQSPPHSAGAPAAKGDSGNELLKHLLKNKKSSSLLNQKPEGSICSEDDCTKDNKLVEKQNPAEGLQTLGAQMQGGFGCGNQLPKTDGGSETKKQRSKRTQRTGEKAAPRSKKRKKDEEEKQAMYSSTDTFTHLKQVRQLSLLPLMEPIIGVNFAHFLPYGSGQFNSGNRLLGTFGSATLEGVSDYYSQLIYKQNNLSNPPTPPASLPPTPPPMACQKMANGFATTEELAGKAGVLVSHEVTKTLGPKPFQLPFRPQDDLLARALAQGPKTVDVPASLPTPPHNNQEELRIQDHCGDRDTPDSFVPSSSPESVVGVEVSRYPDLSLVKEEPPEPVPSPIIPILPSTAGKSSESRRNDIKTEPGTLYFASPFGPSPNGPRSGLISVAITLHPTAAENISSVVAAFSDLLHVRIPNSYEVSSAPDVPSMGLVSSHRINPGLEYRQHLLLRGPPPGSANPPRLVSSYRLKQPNVPFPPTSNGLSGYKDSSHGIAESAALRPQWCCHCKVVILGSGVRKSFKDLTLLNKDSRESTKRVEKDIVFCSNNCFILYSSTAQAKNSENKESIPSLPQSPMRETPSKAFHQYSNNISTLDVHCLPQLPEKASPPASPPIAFPPAFEAAQVEAKPDELKVTVKLKPRLRAVHGGFEDCRPLNKKWRGMKWKKWSIHIVIPKGTFKPPCEDEIDEFLKKLGTSLKPDPVPKDYRKCCFCHEEGDGLTDGPARLLNLDLDLWVHLNCALWSTEVYETQAGALINVELALRRGLQMKCVFCHKTGATSGCHRFRCTNIYHFTCAIKAQCMFFKDKTMLCPMHKPKGIHEQELSYFAVFRRVYVQRDEVRQIASIVQRGERDHTFRVGSLIFHTIGQLLPQQMQAFHSPKALFPVGYEASRLYWSTRYANRRCRYLCSIEEKDGRPVFVIRIVEQGHEDLVLSDISPKGVWDKILEPVACVRKKSEMLQLFPAYLKGEDLFGLTVSAVARIAESLPGVEACENYTFRYGRNPLMELPLAVNPTGCARSEPKMSAHVKRFVLRPHTLNSTSTSKSFQSTVTGELNAPYSKQFVHSKSSQYRKMKTEWKSNVYLARSRIQGLGLYAARDIEKHTMVIEYIGTIIRNEVANRKEKLYESQNRGVYMFRMDNDHVIDATLTGGPARYINHSCAPNCVAEVVTFERGHKIIISSSRRIQKGEELCYDYKFDFEDDQHKIPCHCGAVNCRKWMN

SEQ ID NO: 54461 - protein, 1524 aa, Homo sapiens
LMQEVDRQRALQQRMEMEQHGMVGSEISSSRTSVSQIPFYSSDLPCDFMQPLGPLQQSPQHQQQMGQVLQQQNIQQGSINSPSTQTFMQTNERRQVGPPSFVPDSPSIPVGSPNFSSVKQGHGNLSGTSFQQSPVRPSFTPALPAAPPVANSSLPCGQDSTITHGHSYPGSTQSLIQLYSDIIPEEKGKKKRTRKKKRDDDAESTKAPSTPHSDITAPPTPGISETTSTPAVSTPSELPQQADQESVEPVGPSTPNMAAGQLCTELENKLPNSDFSQATPNQQTYANSEVDKLSMETPAKTEEIKLEKAETESCPGQEEPKLEEQNGSKVEGNAVACPVSSAQSPPHSAGAPAAKGDSGNELLKHLLKNKKSSSLLNQKPEGSICSEDDCTKDNKLVEKQNPAEGLQTLGAQMQGGFGCGNQLPKTDGGSETKKQRSKRTQRTGEKAAPRSKKRKKDEEEKQAMYSSTDTFTHLKQQLSLLPLMEPIIGVNFAHFLPYGSGQFNSGNRLLGTFGSATLEGVSDYYSQLIYKKMANGFATTEELAGKAGVLVSHEVTKTLGPKPFQLPFRPQDDLLARALAQGPKTVDVPASLPTPPHNNQEELRIQDHCGDRDTPDSFVPSSSPESVVGVEVSRYPDLSLVKEEPPEPVPSPIIPILPSTAGKSSESRRNDIKTEPGTLYFASPFGPSPNGPRSGLISVAITLHPTAAENISSVVAAFSDLLHVRIPNSYEVSSAPDVPSMGLVSSHRINPGLEYRQHLLLRGPPPGSANPPRLVSSYRLKQPNVPFPPTSNGLSGYKDSSHGIAESAALRPQWCCHCKVVILGSGVRKSFKDLTLLNKDSRESTKRVEKDIVFCSNNCFILYSSTAQAKNSENKESIPSLPQSPMRETPSKAFHQYSNNISTLDVHCLPQLPEKASPPASPPIAFPPAFEAAQVEAKPDELKVTVKLKPRLRAVHGGFEDCRPLNKKWRGMKWKKWSIHIVIPKGTFKPPCEDEIDEFLKKLGTSLKPDPVPKDYRKCCFCHEEGDGLTDGPARLLNLDLDLWVHLNCALWSTEVYETQAGALINVELALRRGLQMKCVFCHKTGATSGCHRFRCTNIYHFTCAIKAQCMFFKDKTMLCPMHKPKGIHEQELSYFAVFRRVYVQRDEVRQIASIVQRGERDHTFRVGSLIFHTIGQLLPQQMQAFHSPKALFPVGYEASRLYWSTRYANRRCRYLCSIEEKDGRPVFVIRIVEQGHEDLVLSDISPKGVWDKILEPVACVRKKSEMLQLFPAYLKGEDLFGLTVSAVARIAESLPGVEACENYTFRYGRNPLMELPLAVNPTGCARSEPKMSAHVKRPHTLNSTSTSKSFQSTVTGELNAPYSKQFVHSKSSQYRKMKTEWKSNVYLARSRIQGLGLYAARDIEKHTMVIEYIGTIIRNEVANRKEKLYESQNRGVYMFRMDNDHVIDATLTGGPARYINHSCAPNCVAEVVTFERGHKIIISSSRRIQKGEELCYDYKFDFEDDQHKIPCHCGAVNCRKWMN

SEQ ID NO: 54462 - protein, 116 aa, Homo sapiens
MVIEYIGTIIRNEVANRKEKLYESQNRGVYMFRMDNDHVIDATLTGGPARYINHSCAPNCVAEVVTFERGHKIIISSSRRIQKGEELCYDYKFDFEDDQHKIPCHCGAVNCRKWMN

SEQ ID NO: 54463 - protein, 1858 aa, Homo sapiens
MSIVIPLGVDTAETSYLEMAAGSEPESVEASPVVVEKSNSYPHQLYTSSSHHSHSYIGLPYADHNYGARPPPTPPASPPPSVLISKNEVGIFTTPNFDETSSATTISTSEDGSYGTDVTRCICGFTHDDGYMICCDKCSVWQHIDCMGIDRQHIPDTYLCERCQPRNLDKERAVLLQRRKRENMSDGDTSATESGDEVPVELYTAFQHTPTSITLTASRVSKVNDKRRKKSGEKEQHISKCKKAFREGSRKSSRVKGSAPEIDPSSDGSNFGWETKIKAWMDRYEEANNNQYSEGVQREAQRIALRLGNGNDKKEMNKSDLNTNNLLFKPPVESHIQKNKKILKSAKDLPPDALIIEYRGKFMLREQFEANGYFFKRPYPFVLFYSKFHGLEMCVDARTFGNEARFIRRSCTPNAEVRHEIQDGTIHLYIYSIHSIPKGTEITIAFDFDYGNCKYKVDCACLKENPECPVLKRSSESMENINSGYETRRKKGKKDKDISKEKDTQNQNITLDCEGTTNKMKSPETKQRKLSPLRLSVSNNQEPDFIDDIEEKTPISNEVEMESEEQIAERKRKMTREERKMEAILQAFARLEKREKRREQALERISTAKTEVKTECKDTQIVSDAEVIQEQAKEENASKPTPAKVNRTKQRKSFSRSRTHIGQQRRRHRTVSMCSDIQPSSPDIEVTSQQNDIENTVLTIEPETETALAEIITETEVPALNKCPTKYPKTKKHLVNEWLSEKNEKTGKPSDGLSERPLRITTDPEVLATQLNSLPGLTYSPHVYSTPKHYIRFTSPFLSEKRRRKEPTENISGSCKKRWLKQALEEENSAILHRFNSPCQERSRSPAVNGENKSPLLLNDSCSLPDLTTPLKKRRFYQLLDSVYSETSTPTPSPYATPTHTDITPMDPSFATPPRIKSDDETCRNGYKPIYSPVTPVTPGTPGNTMHFENISSPESSPEIKRRTYSQEGYDRSSTMLTLGPFRNSNLTELGLQEIKTIGYTSPRSRTEVNRQCPGEKEPVSDLQLGLDAVEPTALHKTLETPAHDRAEPNSQLDSTHSGRGTMYSSWVKSPDRTGVNFSVNSNLRDLTPSHQLEVGGGFRISESKCLMQDDTRGMFMETTVFCTSEDGLVSGFGRTVNDNLIDGNCTPQNPPQKKKVSLLEYRKRQREARKSGSKTENFPLISVSPHASGSLSNNGDGCASSNDNGEQVDHTASLPLPTPATVYNATSEETSNNCPVKDATASEKNEPEVQWTASTSVEQVRERSYQRALLLSDHRKDKDSGGESPCVSCSPSHVQSSPSSHSNHIPQLQAKGPVPSFSELMEDPDPENPEPTTTNECPSPDTSQNTCKSPPKMSKPGSPGSVIPAQAHGKIFTKPDPQWDSTVSASEAENGVHLKTELQQKQLSNNNQALSKNHPPQTHVRNSSEQLSQKLPSVPTKLHCPPSPHLENPPKSSTPHTPVQHGYLSPKPPSQQLGSPYRPHHSQSPQVGTPQREPQRNFYPAAQNLPANTQQATSGTLFTQTPSGQSSATYSQFNQQSLNSTAPPPPPPPPPSSSYYQNQQPSANFQNYNQLKGSLSQQTVFTSGPNQALPGTTSQQTVPGHHVTPGHFLPSQNPTIHHQTAAAVVPPPPPPPPAPGPHLVQQPNSHQQHSVAHVVGPVHAVTPGSHIHSQTAGHHLPPPPPPPGPAPHHHPPPHPSTGLQGLQAQHQHVVNSAPPPPPPPPPSSVLASGHHTTSAQALHHPPHQGPPLFPSSAHPTVPPYPSQATHHTTLGPGPQHQPSGTGPHCPLPVTGPHLQPQGPNSIPTPTASGFCPHPGSVALPHGVQGPQQASPVPGQIPIHRAQVPPTFQNNYHGSGWH

SEQ ID NO: 54464 - protein, 1858 aa, Homo sapiens; identical to SEQ ID NO: 54463

SEQ ID NO: 54465 - protein, 1816 aa, Homo sapiens
MSIVIPLGVDTAETSYLEMAAGSEPESVEASPVVVEKSNSYPHQLYTSSSHHSHSYIGLPYADHNYGARPPPTPPASPPPSVLISKNEVGIFTTPNFDETSSATTISTSEDGSYGTDVTRCICGFTHDDGYMICCDKCSVWQHIDCMGIDRQHIPDTYLCERCQPRNLDKERAVLLQRRKRENMSDGDTSATESGDEVPVELYTAFQHTPTSITLTASRVSKVNDKRRKKSGEKEQHISKCKKAFREGSRKSSRVKGSAPEIDPSSDGSNFGWETKIKAWMDRYEEANNNQYSEGVQREAQRIALRLGNGNDKKEMNKSDLNTNNLLFKPPVESHIQKNKKILKSAKDLPPDALIIEYRGKFMLREQFEANGYFFKRPYPFVLFYSKFHGLEMCVDARTFGNEARFIRRSCTPNAEVRHEIQDGTIHLYIYSIHSIPKGTEITIAFDFDYGNCKYKVDCACLKENPECPVLKRSSESMENINSGYETRRKKGKKDKDISKEKDTQNQNITLDCEGTTNKMKSPETKQRKLSPLRLSVSNNQEPDFIDDIEEKTPISNEVEMESEEQIAERKRKMTREERKMEAILQAFARLEKREKRREQALERISTAKTEVKTECKDTQIVSDAEVIQEQAKEENASKPTPAKVNRTKQRKSFSRSRTHIGQQRRRHRTVSMCSDIQPSSPDIEVTSQQNDIENTVLTIEPETETALAEIITETEVPALNKCPTKYPKTKKHLVNEWLSEKNEKTGKPSDGLSERPLRITTDPEVLATQLNSLPGLTYSPHVYSTPKHYIRFTSPFLSEKRRRKEPTENISGSCKKRWLKQALEEENSAILHRFNSPCQERSRSPAVNGENKSPLLLNDSCSLPDLTTPLKKRRFYQLLDSVYSETSTPTPSPYATPTHTDITPMDPSFATPPRIKSDDETCRNGYKPIYSPVTPVTPGTPGNTMHFENISSPESSPEIKRRTYSQEGYDRSSTMLTLGPFRNSNLTELGLQEIKTIGYTSPRSRTEVNRQCPGEKEPVSDLQLGLDAVEPTALHKTLETPAHDRAEPNSQLDSTHSGRGTMYSSWVKSPDRTGVNFSVNSNLRDLTPSHQLEVGGGFRISESKCLMQDDTRGMFMETTVFCTSEDGLVSGFGRTVNDNLIDGNCTPQNPPQKKKVSLLEYRKRQREARKSGSKTENFPLISVSPHASGSLSNNGDGCASSNDNGEQVDHTASLPLPTPATVYNATSEETSNNCPVKDATASEKNEPEVQWTASTSVEQVRERSYQRALLLSDHRKDKDSDPDPENPEPTTTNECPSPDTSQNTCKSPPKMSKPGSPGSVIPAQAHGKIFTKPDPQWDSTVSASEAENGVHLKTELQQKQLSNNNQALSKNHPPQTHVRNSSEQLSQKLPSVPTKLHCPPSPHLENPPKSSTPHTPVQHGYLSPKPPSQQLGSPYRPHHSQSPQVGTPQREPQRNFYPAAQNLPANTQQATSGTLFTQTPSGQSSATYSQFNQQSLNSTAPPPPPPPPPSSSYYQNQQPSANFQNYNQLKGSLSQQTVFTSGPNQALPGTTSQQTVPGHHVTPGHFLPSQNPTIHHQTAAAVVPPPPPPPPAPGPHLVQQPNSHQQHSVAHVVGPVHAVTPGSHIHSQTAGHHLPPPPPPPGPAPHHHPPPHPSTGLQGLQAQHQHVVNSAPPPPPPPPPSSVLASGHHTTSAQALHHPPHQGPPLFPSSAHPTVPPYPSQATHHTTLGPGPQHQPSGTGPHCPLPVTGPHLQPQGPNSIPTPTASGFCPHPGSVALPHGVQGPQQASPVPGQIPIHRAQVPPTFQNNYHGSGWH

SEQ ID NO: 54466 - protein, 589 aa, Homo sapiens
MHFENISSPESSPEIKRRTYSQEGYDRSSTMLTLGPFRNSNLTELGLQEIKTIGYTSPRSRTEVNRQCPGEKEPVSDLQLGLDAVEPTALHKTLETPAHDRAEPNSQLDSTHSGRGTMYSSWVKSPDRTGVNFSVNSNLRDLTPSHQLEVGGGFRISESKCLMQDDTRGMFMETTVFCTSEDGLVSGFGRTVNDNLIDGNCTPQNPPQKKKVSLLEYRKRQREARKSGSKTENFPLISVSPHASGSLSNNGDGCASSNDNGEQVDHTASLPLPTPATVYNATSEETSNNCPVKDATASEKNEPEVQWTASTSVEQVRERSYQRALLLSDHRKDKDSGGESPCVSCSPSHVQSSPSSHSNHIPQLQAKGPVPSFSELMEDPDPENPEPTTTNECPSPDTSQNTCKSPPKMSKPGSPGSVIPAQAHGKIFTKPDPQWDSTVSASEAENGVHLKTELQQKQLSNNNQALSKNHPPQTHVRNSSEQLSQKLPSVPTKLHCPPSPHLENPPKSSTPHTPVQHGYLSPKPPSQQLGSPYRPHHSQSPQVGTPQREPQRNFYPAAQNLPANTQQATSGTLFTQTPSGQSSATYTQR

SEQ ID NO: 54467 - protein, 1778 aa, Homo sapiens
MSIVIPLGVDTAETSYLEMAAGSEPESVEASPVVVEKSNSYPHQLYTSSSHHSHSYIGLPYADHNYGARPPPTPPASPPPSVLISKNEVGIFTTPNFDETSSATTISTSEDGSYGTDVTRCICGFTHDDGYMICCDKCSVWQHIDCMGIDRQHIPDTYLCERCQPRNLDKERAVLLQRRKRENMSDGDTSATESGDEVPVELYTAFQHTPTSITLTASRVSKVNDKRRKKSGEKEQHISKCKKAFREGSRKSSRVKGSAPEIDPSSDGSNFGWETKIKAWMDRYEEANNNQYSEGVQREAQRIALRLGNGNDKKEMNKSDLNTNNLLFKPPVESHIQKNKKILKSAKDLPPDALIIEYRGKFMLREQFEANGYFFKRPYPFVLFYSKFHGLEMCVDARTFGNEARFIRRSCTPNAEVRHEIQDGTIHLYIYSIHSIPKGTEITIAFDFDYGNCKYKVDCACLKENPECPVLKRSSESMENINSGYETRRKKGKKTREERKMEAILQAFARLEKREKRREQALERISTAKTEVKTECKDTQIVSDAEVIQEQAKEENASKPTPAKVNRTKQRKSFSRSRTHIGQQRRRHRTVSMCSDIQPSSPDIEVTSQQNDIENTVLTIEPETETALAEIITETEVPALNKCPTKYPKTKKHLVNEWLSEKNEKTGKPSDGLSERPLRITTDPEVLATQLNSLPGLTYSPHVYSTPKHYIRFTSPFLSEKRRRKEPTENISGSCKKRWLKQALEEENSAILHRFNSPCQERSRSPAVNGENKSPLLLNDSCSLPDLTTPLKKRRFYQLLDSVYSETSTPTPSPYATPTHTDITPMDPSFATPPRIKSDDETCRNGYKPIYSPVTPVTPGTPGNTMHFENISSPESSPEIKRRTYSQEGYDRSSTMLTLGPFRNSNLTELGLQEIKTIGYTSPRSRTEVNRQCPGEKEPVSDLQLGLDAVEPTALHKTLETPAHDRAEPNSQLDSTHSGRGTMYSSWVKSPDRTGVNFSVNSNLRDLTPSHQLEVGGGFRISESKCLMQDDTRGMFMETTVFCTSEDGLVSGFGRTVNDNLIDGNCTPQNPPQKKKVSLLEYRKRQREARKSGSKTENFPLISVSPHASGSLSNNGDGCASSNDNGEQVDHTASLPLPTPATVYNATSEETSNNCPVKDATASEKNEPEVQWTASTSVEQVRERSYQRALLLSDHRKDKDSGGESPCVSCSPSHVQSSPSSHSNHIPQLQAKGPVPSFSELMEDPDPENPEPTTTNECPSPDTSQNTCKSPPKMSKPGSPGSVIPAQAHGKIFTKPDPQWDSTVSASEAENGVHLKTELQQKQLSNNNQALSKNHPPQTHVRNSSEQLSQKLPSVPTKLHCPPSPHLENPPKSSTPHTPVQHGYLSPKPPSQQLGSPYRPHHSQSPQVGTPQREPQRNFYPAAQNLPANTQQATSGTLFTQTPSGQSSATYSQFNQQSLNSTAPPPPPPPPPSSSYYQNQQPSANFQNYNQLKGSLSQQTVFTSGPNQALPGTTSQQTVPGHHVTPGHFLPSQNPTIHHQTAAAVVPPPPPPPPAPGPHLVQQPNSHQQHSVAHVVGPVHAVTPGSHIHSQTAGHHLPPPPPPPGPAPHHHPPPHPSTGLQGLQAQHQHVVNSAPPPPPPPPPSSVLASGHHTTSAQALHHPPHQGPPLFPSSAHPTVPPYPSQATHHTTLGPGPQHQPSGTGPHCPLPVTGPHLQPQGPNSIPTPTASGFCPHPGSVALPHGVQGPQQASPVPGQIPIHRAQVPPTFQNNYHGSGWH

SEQ ID NO: 54468 - protein, 1653 aa, Homo sapiens
MSIVIPLGVDTAETSYLEMAAGSEPESVEASPVVVEKSNSYPHQLYTSSSHHSHSYIGLPYADHNYGARPPPTPPASPPPSVLISKNEVGIFTTPNFDETSSATTISTSEDGSYGTDVTRCICGFTHDDGYMICCDKCSVWQHIDCMGIDRQHIPDTYLCERCQPRNLDKERAVLLQRRKRENMSDGDTSATESGDEVPVELYTAFQHTPTSITLTASRVSKVNDKRRKKSGEKEQHISKCKKAFREGSRKSSRVKGSAPEIDPSSDGSNFGWETKIKAWMDRYEEANNNQYSEGVQREAQRIALRLGNGNDKKEMNKSDLNTNNLLFKPPVESHIQKNKKILKSAKDLPPDALIIEYRGKFMLREQFEANGYFFKRPYPFVLFYSKFHGLEMCVDARTFGNEARFIRRSCTPNAEVRHEIQDGTIHLYIYSIHSIPKGTEITIAFDFDYGNCKYKVDCACLKENPECPVLKRSSESMENINSGYETRRKKGKKDKDISKEKDTQNQNITLDCEGTTNKMKSPETKQRKLSPLRLSVSNNQEPDFIDDIEEKTPISNEVEMESEEQIAERKRKMTREERKMEAILQAFARLEKREKRREQALERISTAKTEVKTECKDTQIVSDAEVIQEQAKEENASKPTPAKVNRTKQRKSFSRSRTHIGQQRRRHRTVSMCSDIQPSSPDIEVTSQQNDIENTVLTIEPETETALAEIITETEVPALNKCPTKYPKTKKHLVNEWLSEKNEKTGKPSDGLSERPLRITTDPEVLATQLNSLPGLTYSPHVYSTPKHYIRFTSPFLSEKRRRKEPTENISGSCKKRWLKQALEEENSAILHRFNSPCQERSRSPAVNGENKSPLLLNDSCSLPDLTTPLKKRRFYQLLDSVYSETSTPTPSPYATPTHTDITPMDPSFATPPRIKSDDETCRNGYKPIYSPVTPVTPGTPGNTMHFENISSPESSPEIKRRTYSQEGYDRSSTMLTLGPFRNSNLTELGLQEIKTIGYTSPRSRTEVNRQCPGEKEPVSDLQLGLDAVEPTALHKTLETPAHDRAEPNSQLDSTHSGRGTMYSSWVKSPDRTGVNFSVNSNLRDLTPSHQLEVGGGFRISESKCLMQDDTRGMFMETTVFCTSEDGLVSGFGRTVNDNLIDGNCTPQNPPQKKKVSLLEYRKRQREARKSGSKTENFPLISVSPHASGSLSNNGDGCASSNDNGEQVDHTASLPLPTPATVYNATSEETSNNCPVKDATASEKNEPEVQWTASTSVEQVRERSYQRALLLSDHRKDKDSGGESPCVSCSPSHVQSSPSSHSNHIPQLQAKGPVPSFSELMEDPDPENPEPTTTNECPSPDTSQNTCKSPPKMSKPGSPGSVIPAQAHGKIFTKPDPQWDSTVSASEAENGVHLKTELQQKQLSNNNQALSKNHPPQTHVRNSSEQLSQKLPSVPTKLHCPPSPHLENPPKSSTPHTPVQHGYLSPKPPSQQLGSPYRPHHSQSPQVGTPQREPQRNFYPAAQNLPVFWLLGIIPHQLKPYTTHLIKDLHFFLRVLIQLYHRIPHKLHIIPLWDRDPSTSLLEQGHIVHYLSQVLISSPKDQTVFQHLLLQGSVLILALWPCHMGFKDLSRHLQCLDRFQFTEHRCHQHFKTITMGQGGIKMDSKNIFLNVL

SEQ ID NO: 54469 - protein, 125 aa, Homo sapiens
  VARIANT 1: note = MOD_RES - Any amino acid
XGSLSNNGDGCASSNDNGEQVDHTASLPLPTPATVYNATSEETSNNCPVKDATASEKNEPEVQWTASTSVEQVRERSYQRALLLSDHRKDKDSDPDPENPEPTTTNECPSPDTSQNTCKSPPKMS

SEQ ID NO: 54470 - protein, 71 aa, Homo sapiens
MSIVIPLGVDTAETSYLEMAAGSEPESVEASPVVVEKSNSYPHQLYTSSSHHSHSYIGLPYADHNYGARPP

SEQ ID NO: 54471 - protein, 609 aa, Homo sapiens
MSIVIPLGVDTAETSYLEMAAGSEPESVEASPVVVEKSNSYPHQLYTSSSHHSHSYIGLPYADHNYGARPPPTPPASPPPSVLISKNEVGIFTTPNFDETSSATTISTSEDGSYGTDVTRCICGFTHDDGYMICCDKCSVWQHIDCMGIDRQHIPDTYLCERCQPRNLDKERAVLLQRRKRENMSDGDTSATESGDEVPVELYTAFQHTPTSITLTASRVSKVNDKRRKKSGEKEQHISKCKKAFREGSRKSSRVKGSAPEIDPSSDGSNFGWETKIKAWMDRYEEANNNQYSEGVQREAQRIALRLGNGNDKKEMNKSDLNTNNLLFKPPVESHIQKNKKILKSAKDLPPDALIIEYRGKFMLREQFEANGYFFKRPYPFVLFYSKFHGLEMCVDARTFGNEARFIRRSCTPNAEVRHEIQDGTIHLYIYSIHSIPKGTEITIAFDFDYGNCKYKVDCACLKENPECPVLKRSSESMENINSGYETRRKKGKKDKDISKEKDTQNQNITLDCEGTTNKMKSPETKQRKLSPLRLSVSNNQEPDFIDDIEEKTPISNEVEMESEEQIAERKRKMVSWEASSLGLVTAALHMVIVAAFTWAFTLFFEVSE

SEQ ID NO: 54472 - protein, 230 aa, Homo sapiens
MSIVIPLGVDTAETSYLEMAAGSEPESVEASPVVVEKSNSYPHQLYTSSSHHSHSYIGLPYADHNYGARPPPTPPASPPPSVLISKNEVGIFTTPNFDETSSATTISTSEDGSYGTDVTRCICGFTHDDGYMICCDKCSVWQHIDCMGIDRQHIPDTYLCERCQPRNLDKERAVLLQRRKRENMSDGDTSATESGDEVPVELYTAFQHTPTSITLTASRVSKVNDKRRKK

SEQ ID NO: 54473 - protein, 453 aa, Homo sapiens [sequence omitted]

SEQ ID NO: 54474 - protein, 322 aa, Homo sapiens
MPVTVTRTTITTTTTSSSGLGSPMIVGSPRALTQPLGLLRLLQLVSTCVAFSLVASVGAWTGSMGNWSMFTWCFCFSVTLIILIVELCGLQARFPLSWRNFPITFACYAALFCLSASIIYPTTYVQFLSHGRSRDHAIAATFFSCIACVAYATEVAWTRARPGEITGYMATVPGLLKVLETFVACIIFAFISDPNLYQHQPALEWCVAVYAICFILAAIAILLNLGECTNVLPIPFPSFLSGLALLSVLLYATALVLWPLYQFDEKYGGQPRRSRDVSCSRSHAYYVCAWDRRLAVAILTAINLLAYVADLVHSAHLVFVKV

SEQ ID NO: 54475 - protein, 322 aa, Homo sapiens; identical to SEQ ID NO: 54474

SEQ ID NO: 54476 - protein, 322 aa, Homo sapiens; identical to SEQ ID NO: 54474

SEQ ID NO: 54477 - protein, 322 aa, Homo sapiens; identical to SEQ ID NO: 54474

SEQ ID NO: 54478 - protein, 322 aa, Homo sapiens; identical to SEQ ID NO: 54474

SEQ ID NO: 54479 - protein, 147 aa, Homo sapiens
MPVTVTRTTITTTTTSSSGLGSPMIVGSPRALTQPLGLLRLLQLVSTCVAFSLVASVGAWTGSMGNWSMFTWCFCFSVTLIILIVELCGLQARFPLSWRNFPITFACYAALFCLSASIIYPTTYVQFLSHGRSRDHAIAATFFSCIA

SEQ ID NO: 54480 - protein, 285 aa, Homo sapiens
MPVTVTRTTITTTTTSSSGLGSPMIVGSPRALTQPLGLLRLLQLVSTCVAFSLVASVGAWTGSMGNWSMFTWCFCFSVTLIILIVELCGLQARFPLSWRNFPITFFSCIACVAYATEVAWTRARPGEITGYMATVPGLLKVLETFVACIIFAFISDPNLYQHQPALEWCVAVYAICFILAAIAILLNLGECTNVLPIPFPSFLSGLALLSVLLYATALVLWPLYQFDEKYGGQPRRSRDVSCSRSHAYYVCAWDRRLAVAILTAINLLAYVADLVHSAHLVFVKV

SEQ ID NO: 54481 - protein, 242 aa, Homo sapiens
MPVTVTRTTITTTTTSSSGLGSPMIVGSPRALTQPLGLLRLLQLVSTCVAFSLVASVGAWTGSMGNWSMFTWCFCFSVTLIILIVELCGLQARFPLSWRNFPITFACYAALFCLSASIIYPTTYVQFLSHGRSRDHAIAATFFSCIACVAYATEVAWTRARPGEITGYMATVPGLLKVLETFVACIIFAFISDPNLYQHQPALEWCVAVYAICFILAAIAILLNLGECTNVLPIPFPSFLSG

SEQ ID NO: 54482 - protein, 259 aa, Homo sapiens
MPVTVTRTTITTTTTSSSGLGSPMIVGSPRALTQPLGLLRLLQLVSTCVAFSLVASVGAWTGSMGNWSMFTWCFCFSVTLIILIVELCGLQARFPLSWRNFPITFACYAALFCLSASIIYPTTYVQFLSHGRSRDHAIAATFFSCIACVAYATEVAWTRARPGEITGYMATVPGLLKVLETFVACIIFAFISDPNLYQHQPALEWCVAVYAICFILAAIAILLNLGECTNVLPIPFPSFLSGLALLSVLLYATALVLWP

SEQ ID NO: 54483 - protein, 188 aa, Homo sapiens
MPVTVTRTTITTTTTSSSGLGSPMIVGSPRALTQPLGLLRLLQLVSTCVAFSLVASVGAWTGSMGNWSMFTWCFCFSVTLIILIVELCGLQARFPLSWRNFPITFACYAALFCLSASIIYPTTYVQFLSHGRSRDHAIAATFFSCIACVAYATEVAWTRARPGEITGYMATVPGLLKVLETFVACIIF

SEQ ID NO: 54484 - protein, 313 aa, Homo sapiens
MALRICVTYTPALPIGLCTRCCLCLEQSPSWCHCLRGVSFLTFHLHQSVPLGDRDSLLMFTRQAGHFVEGSKAGRSRGRLCLSQALRVAVRGAFVSLWFAAGAGDRERNKGDKGAQTGAGLSQEAEDVDVSRARRVTDAPQGTLCGTGNRNSGSQSARVVGVAHLGEAFRVGVEQAISSCPEEVHGRHGLSMEIMWARMDVALRSPGRGLLAGAGALCMTLAESSCPDYERGRRACLTLHRHPTPHCSTWGLPLRVAGSWLTVVTVEALGGWRMGVRRTGQVGPTMHPPPVSGASPLLLHHLLLLLLIIILTC

SEQ ID NO: 54485 - protein, 313 aa, Homo sapiens; identical to SEQ ID NO: 54484

SEQ ID NO: 54486 - protein, 745 aa, Homo sapiens
MGVPFFSSLRCMVDLGPCWAGGLTAEMKLLLALAGLLAILATPQPSEGAAPAVLGEVDTSLVLSSMEEAKQLVDKAYKERRESIKQRLRSGSASPMELLSYFKQPVAATRTAVRAADYLHVALDLLERKLRSLWRRPFNVTDVLTPAQLNVLSKSSGCAYQDVGVTCPEQDKYRTITGMCNNRRSPTLGASNRAFVRWLPAEYEDGFSLPYGWTPGVKRNGFPVALARAVSNEIVRFPTDQLTPDQERSLMFMQWGQLLDHDLDFTPEPAARASFVTGVNCETSCVQQPPCFPLKIPPNDPRIKNQADCIPFFRSCPACPGSNITIRNQINALTSFVDASMVYGSEEPLARNLRNMSNQLGLLAVNQRFQDNGRALLPFDNLHDDPCLLTNRSARIPCFLAGDTRSSEMPELTSMHTLLLREHNRLATELKSLNPRWDGERLYQEARKIVGAMVQIITYRDYLPLVLGPTAMRKYLPTYRSYNDSVDPRIANVFTNAFRYGHTLIQPFMFRLDNRYQPMEPNPRVPLSRVFFASWRVVLEGGIDPILRGLMATPAKLNRQNQIAVDEIRERLFEQVMRIGLDLPALNMQRSRDHGLPGYNAWRRFCGLPQPETVGQLGTVLRNLKLARKLMEQYGTPNNIDIWMGGVSEPLKRKGRVGPLLACIIGTQFRKLRDGDRFWWENEGVFSMQQRQALAQISLPRIICDNTGITTVSKNNIFMSNSYPRDFVNCSTLPALNLASWREAS

SEQ ID NO: 54487 - protein, 777 aa, Homo sapiens
MGVPFFSSLRCMVDLGPCWAGGLTAEMKLLLALAGLLAILATPQPSEGAAPAVLGEVDTSLVLSSMEEAKQLVDKAYKERRESIKQRLRSGSASPMELLSYFKQPVAATRTAVRAADYLHVALDLLERKLRSLWRRPFNVTDVLTPAQLNVLSKSSGCAYQDVGVTCPEQDKYRTITGMCNNRCGWLGVAAGTGLREASRTPQASRCQRPVLPCRRSPTLGASNRAFVRWLPAEYEDGFSLPYGWTPGVKRNGFPVALARAVSNEIVRFPTDQLTPDQERSLMFMQWGQLLDHDLDFTPEPAARASFVTGVNCETSCVQQPPCFPLKIPPNDPRIKNQADCIPFFRSCPACPGSNITIRNQINALTSFVDASMVYGSEEPLARNLRNMSNQLGLLAVNQRFQDNGRALLPFDNLHDDPCLLTNRSARIPCFLAGDTRSSEMPELTSMHTLLLREHNRLATELKSLNPRWDGERLYQEARKIVGAMVQIITYRDYLPLVLGPTAMRKYLPTYRSYNDSVDPRIANVFTNAFRYGHTLIQPFMFRLDNRYQPMEPNPRVPLSRVFFASWRVVLEGGIDPILRGLMATPAKLNRQNQIAVDEIRERLFEQVMRIGLDLPALNMQRSRDHGLPGYNAWRRFCGLPQPETVGQLGTVLRNLKLARKLMEQYGTPNNIDIWMGGVSEPLKRKGRVGPLLACIIGTQFRKLRDGDRFWWENEGVFSMQQRQALAQISLPRIICDNTGITTVSKNNIFMSNSYPRDFVNCSTLPALNLASWREAS

SEQ ID NO: 54488 - protein, 513 aa, Homo sapiens
MPSWALFMVTSCLLLAPQNLAQVSSQDVSLLASDSEPLKCFSRTFEDLTCFWDEEEAAPSGTYQLLYAYPREKPRACPLSSQSMPHFGTRYVCQFPDQEEVRLFFPLHLWVKNVFLNQTRTQRVLFVDSVGLPAPPSIIKAMGGSQPGELQISWEEPAPEISDFLRYELRYGPRDPKNSTGPTVIQLIATETCCPALQRPHSASALDQSPCAQPTMPWQDGPKQTSPSREASALTAEGGSCLISGLQPGNSYWLQLRSEPDGISLGGSWGSWSLPVTVDLPGDAVALGLQCFTLDLKNVTCQWQQQDHASSQGFFYHSRARCCPRDRYPIWENCEEEEKTNPGLQTPQFSRCHFKSRNDSIIHILVEVTTAPGTVHSYLGSPFWIHQAVRLPTPNLHWREISSGHLELEWQHPSSWAAQETCYQLRYTGEGHQDWKVLEPPLGARGGTLELRPRSRYRLQLRARLNGPTYQGPWSSWSDPTRVETATETAWISLVTALHLVLGLSAVLGLLLL

SEQ ID NO: 54489 - protein, 635 aa, Homo sapiens
MPSWALFMVTSCLLLAPQNLAQVSSQDVSLLASDSEPLKCFSRTFEDLTCFWDEEEAAPSGTYQLLYAYPREKPRACPLSSQSMPHFGTRYVCQFPDQEEVRLFFPLHLWVKNVFLNQTRTQRVLFVDSVGLPAPPSIIKAMGGSQPGELQISWEEPAPEISDFLRYELRYGPRDPKNSTGPTVIQLIATETCCPALQRPHSASALDQSPCAQPTMPWQDGPKQTSPSREASALTAEGGSCLISGLQPGNSYWLQLRSEPDGISLGGSWGSWSLPVTVDLPGDAVALGLQCFTLDLKNVTCQWQQQDHASSQGFFYHSRARCCPRDRYPIWENCEEEEKTNPGLQTPQFSRCHFKSRNDSIIHILVEVTTAPGTVHSYLGSPFWIHQAVRLPTPNLHWREISSGHLELEWQHPSSWAAQETCYQLRYTGEGHQDWKVLEPPLGARGGTLELRPRSRYRLQLRARLNGPTYQGPWSSWSDPTRVETATETAWISLVTALHLVLGLSAVLGLLLLRWQFPAHYRRLRHALWPSLPDLHRVLGQYLRDTAALSPPKATVSDTCEEVEPSLLEILPKSSERTPLPLCSSQAQMDYRRLQPSCLGTMPLSVCPPMAESGSCCTTHIANHSYLPLSYWQQP

SEQ ID NO: 54490 - protein, 549 aa, Homo sapiens
MPSWALFMVTSCLLLAPQNLAQVSSQDVSLLASDSEPLKCFSRTFEDLTCFWDEEEAAPSGTYQLLYAYPREKPRACPLSSQSMPHFGTRYVCQFPDQEEVRLFFPLHLWVKNVFLNQTRTQRVLFVDSVGLPAPPSIIKAMGGSQPGELQISWEEPAPEISDFLRYELRYGPRDPKNSTGPTVIQLIATETCCPALQRPHSASALDQSPCAQPTMPWQDGPKQTSPSREASALTAEGGSCLISGLQPGNSYWLQLRSEPDGISLGGSWGSWSLPVTVDLPGDAVALGLQCFTLDLKNVTCQWQQQDHASSQGFFYHSRARCCPRDRYPIWENCEEEEKTNPGLQTPQFSRCHFKSRNDSIIHILVEVTTAPGTVHSYLGSPFWIHQAVRLPTPNLHWREISSGHLELEWQHPSSWAAQETCYQLRYTGEGHQDWKVLEPPLGARGGTLELRPRSRYRLQLRARLNGPTYQGPWSSWSDPTRVETATETAWISLVTALHLVLGLSAVLGLLLLRWQFPAHYRYRPRQAGDWRWTRWSRRPVNRHSWFAL

SEQ ID NO: 54491 - protein, 938 aa, Homo sapiens
MTLLGSEHSLLIRSKFRSVLQLRLQQRRTQEQLANQGIIPPLKRPAEFHEQRKHLDSDKAKNSLKRKARNRCNSADLVNMHILQASTAERSIPTAQMKLKRARLADDLNEKIALRPGPLELVEKNILPVDSAVKEAIKGNQVSFSKSTDAFAFEEDSSSDGLSPDQTRSEDPQNSAGSPPDAKASDTPSTGSLGTNQDLASGSENDRNDSASQPSHQSDAGKQGLGPPSTPIAVHAAVKSKSLGDSKNRHKKPKDPKPKVKKLKYHQYIPPDQKAEKSPPPMDSAYARLLQQQQLFLQLQILSQQQQQQQHRFSYLGMHQAQLKEPNEQMVRNPNSSSTPLSNTPLSPVKNSFSGQTGVSSFKPGPLPPNLDDLKVSELRQQLRIRGLPVSGTKTALMDRLRPFQDCSGNPVPNFGDITTVTFPVTPNTLPNYQSSSSTSALSNGFYHFGSTSSSPPISPASSDLSVAGSLPDTFNDASPSFGLHPSPVHVCTEESLMSSLNGGSVPSELDGLDSEKDKMLVEKQKVINELTWKLQQEQRQVEELRMQLQKQKRNNCSEKKPLPFLAASIKQEEAVSSCPFASQVPVKRQSSSSECHPPACEAAQLQPLGNAHCVESSDQTNVLSSTFLSPQCSPQHSPLGAVKSPQHISLPPSPNNPHFLPSSSGAQGEGHRVSSPISSQVCTAQMAGLHSSDKVGPKFSIPSPTFSKSSSAISEVTQPPSYEDAVKQQMTRSQQMDELLDVLIESGEMPADAREDHSCLQKVPKIPRSSRSPTAVLTKPSASFEQASSGSQIPFDPYATDSDEHLEVLLNSQSPLGKMSDVTLLKIGSEEPHFDGIMDGFSGKAAEDLFNAHEILPGPLSPMQTQFSPSSVDSNGLQLSFTESPWETMEWLDLTPPNSTPGFSALTTSSPSIFNIDFLDVTDLNLNSSMDLHLQQW

SEQ ID NO: 54492 - protein, 662 aa, Homo sapiens
MDSAYARLLQQQQLFLQLQILSQQQQQQQHRFSYLGMHQAQLKEPNEQMVRNPNSSSTPLSNTPLSPVKNSFSGQTGVSSFKPGPLPPNLDDLKVSELRQQLRIRGLPVSGTKTALMDRLRPFQDCSGNPVPNFGDITTVTFPVTPNTLPNYQSSSSTSALSNGFYHFGSTSSSPPISPASSDLSVAGSLPDTFNDASPSFGLHPSPVHVCTEESLMSSLNGGSVPSELDGLDSEKDKMLVEKQKVINELTWKLQQEQRQVEELRMQLQKQKRNNCSEKKPLPFLAASIKQEEAVSSCPFASQVPVKRQSSSSECHPPACEAAQLQPLGNAHCVESSDQTNVLSSTFLSPQCSPQHSPLGAVKSPQHISLPPSPNNPHFLPSSSGAQGEGHRVSSPISSQVCTAQNSGAHDGHPPSFSPHSSSLHPPFSGAQADSSHGAGGNPCPKSPCVQQKQMTRSQQMDELLDVLIESGEMPADAREDHSCLQKVPKIPRSSRSPTAVLTKPSASFEQASSGSQIPFDPYATDSDEHLEVLLNSQSPLGKMSDVTLLKIGSEEPHFDGIMDGFSGKAAEDLFNAHEILPGPLSPMQTQFSPSSVDSNGLQLSFTESPWETMEWLDLTPPNSTPGFSALTTSSPSIFNIDFLDVTDLNLNSSMDLHLQQW

SEQ ID NO: 54493 - protein, 684 aa, Homo sapiens
MKLKRARLADDLNEKIALRPGPLELVEKNILPVDSAVKEAIKGNQVSFSKSTDAFAFEEDSSSDGLSPDQTRSEDPQNSAGSPPDAKASDTPSTGSLGTNQDLASGSENDRNDSASQPSHQSDAGKQGLGPPSTPIAVHAAVKSKSLGDSKNRHKKPKDPKPKVKKLKYHQYIPPDQKAEKSPPPMDSAYARLLQQQQLFLQLQILSQQQQQQQHRFSYLGMHQAQLKEPNEQMVRNPNSSSTPLSNTPLSPVKNSFSGQTGVSSFKPGPLPPNLDDLKVSELRQQLRIRGLPVSGTKTALMDRLRPFQDCSGNPVPNFGDITTVTFPVTPNTLPNYQSSSSTSALSNGFYHFGSTSSSPPISPASSDLSVAGSLPDTFNDASPSFGLHPSPVHVCTEESLMSSLNGGSVPSELDGLDSEKDKMLVEKQKVINELTWKLQQEQRQVEELRMQLQKQKRNNCSEKKPLPFLAASIKQEEAVSSCPFASQVPVKRQSSSSECHPPACEAAQLQPLGNAHCVESSDQTNVLSSTFLSPQCSPQHSPLGAVKSPQHISLPPSPNNPHFLPSSSGAQGEGHRVSSPISSQVCTAQNSGAHDGHPPSFSPHSSSLHPPFSGAQADSSHGAGGNPCPKSPCVQQKMAGLHSSDKVGPKFSIPSPTFSKSSSAISEVTQPPSYEDAVKQVTM

SEQ ID NO: 54494 - protein, 986 aa, Homo sapiens
MTLLGSEHSLLIRSKFRSVLQLRLQQRRTQEQLANQGIIPPLKRPAEFHEQRKHLDSDKAKNSLKRKARNRCNSADLVNMHILQASTAERSIPTAQMKLKRARLADDLNEKIALRPGPLELVEKNILPVDSAVKEAIKGNQVSFSKSTDAFAFEEDSSSDGLSPDQTRSEDPQNSAGSPPDAKASDTPSTGSLGTNQDLASGSENDRNDSASQPSHQSDAGKQGLGPPSTPIAVHAAVKSKSLGDSKNRHKKPKDPKPKVKKLKYHQYIPPDQKAEKSPPPMDSAYARLLQQQQLFLQLQILSQQQQQQQHRFSYLGMHQAQLKEPNEQMVRNPNSSSTPLSNTPLSPVKNSFSGQTGVSSFKPGPLPPNLDDLKVSELRQQLRIRGLPVSGTKTALMDRLRPFQDCSGNPVPNFGDITTVTFPVTPNTLPNYQSSSSTSALSNGFYHFGSTSSSPPISPASSDLSVAGSLPDTFNDASPSFGLHPSPVHVCTEESLMSSLNGGSVPSELDGLDSEKDKMLVEKQKVINELTWKLQQEQRQVEELRMQLQKQKRNNCSEKKPLPFLAASIKQEEAVSSCPFASQVPVKRQSSSSECHPPACEAAQLQPLGNAHCVESSDQTNVLSSTFLSPQCSPQHSPLGAVKSPQHISLPPSPNNPHFLPSSSGAQGEGHRVSSPISSQVCTAQNSGAHDGHPPSFSPHSSSLHPPFSGAQADSSHGAGGNPCPKSPCVQQKMAGLHSSDKVGPKFSIPSPTFSKSSSAISEVTQPPSYEDAVKQQMTRSQQMDELLDVLIESGEMPADAREDHSCLQKVPKIPRSSRSPTAVLTKPSASFEQASSGSQIPFDPYATDSDEHLEVLLNSQSPLGKMSDVTLLKIGSEEPHFDGIMDGFSGKAAEDLFNAHEILPGPLSPMQTQFSPSSVDSNGLQLSFTESPWETMEWLDLTPPNSTPGFSALTTSSPSIFNIDFLDVTDLNLNSSMDLHLQQW

SEQ ID NO: 54495 - protein, 648 aa, Homo sapiens
FLQLQILSQQQQQQQHRFSYLGMHQAQLKEPNEQMVRNPNSSSTPLSNTPLSPVKNSFSGQTGVSSFKPGPLPPNLDDLKVSELRQQLRIRGLPVSGTKTALMDRLRPFQDCSGNPVPNFGDITTVTFPVTPNTLPNYQSSSSTSALSNGFYHFGSTSSSPPISPASSDLSVAGSLPDTFNDASPSFGLHPSPVHVCTEESLMSSLNGGSVPSELDGLDSEKDKMLVEKQKVINELTWKLQQEQRQVEELRMQLQKQKRNNCSEKKPLPFLAASIKQEEAVSSCPFASQVPVKRQSSSSECHPPACEAAQLQPLGNAHCVESSDQTNVLSSTFLSPQCSPQHSPLGAVKSPQHISLPPSPNNPHFLPSSSGAQGEGHRVSSPISSQVCTAQNSGAHDGHPPSFSPHSSSLHPPFSGAQADSSHGAGGNPCPKSPCVQQKQMTRSQQMDELLDVLIESGEMPADAREDHSCLQKVPKIPRSSRSPTAVLTKPSASFEQASSGSQIPFDPYATDSDEHLEVLLNSQSPLGKMSDVTLLKIGSEEPHFDGIMDGFSGKAAEDLFNAHEILPGPLSPMQTQFSPSSVDSNGLQLSFTESPWETMEWLDLTPPNSTPGFSALTTSSPSIFNIDFLDVTDLNLNSSMDLHLQQW

SEQ ID NO: 54496 - protein, 504 aa, Homo sapiens
MRFFCARCCSFGPEMPAVQLLLLACLVWDVGARTAQLRKANDQSGRCQYTFSVASPNESSCPEQSQAMSVIHNLQRDSSTQRLDLEATKARLSSLESLLHQLTLDQAARPQETQEGLQRELGTLRRERDQLETQTRELETAYSNLLRDKSVLEEEKKRLRQENENLARRLESSSQEVARLRRGQCPQTRDTARAVPPGSREVSTWNLDTLAFQELKSELTEVPASRILKESPSGYLRSGEGDTGCGELVWVGEPLTLRTAETITGKYGVWMRDPKPTYPYTQETTWRIDTVGTDVRQVFEYDLISQFMQGYPSKVHILPRPLESTGAVVYSGSLYFQGAESRTVIRYELNTETVKAEKEIPGAGYHGQFPYSWGGYTDIDLAVDEAGLWVIYSTDEAKGAIVLSKLNPENLELEQTWETNIRKQSVANAFIICGTLYTVSSYTSADATVNFAYDTGTGISKTLTIPFKNRYKYSSMIDYNPLEKKLFAWDNLNMVTYDIKLSKM

SEQ ID NO: 54497 - protein, 457 aa, Homo sapiens
MRFFCARCCSFGPEMPAVQLLLLACLVWDVGARTAQLRKANDQSGRCQYTFSVASPNESSCPEQSQAMSVIHNLQRDSSTQRLDLEATKARLSSLESLLRDKSVLEEEKKRLRQENENLARRLESSSQEVARLRRGQCPQTRDTARAVPPGSREVSTWNLDTLAFQELKSELTEVPASRILKESPSGYLRSGEGDTGCGELVWVGEPLTLRTAETITGKYGVWMRDPKPTYPYTQETTWRIDTVGTDVRQVFEYDLISQFMQGYPSKVHILPRPLESTGAVVYSGSLYFQGAESRTVIRYELNTETVKAEKEIPGAGYHGQFPYSWGGYTDIDLAVDEAGLWVIYSTDEAKGAIVLSKLNPENLELEQTWETNIRKQSVANAFIICGTLYTVSSYTSADATVNFAYDTGTGISKTLTIPFKNRYKYSSMIDYNPLEKKLFAWDNLNMVTYDIKLSKM

SEQ ID NO: 54498 - protein, 437 aa, Homo sapiens
MSVIHNLQRDSSTQRLDLEATKARLSSLESLLHQLTLDQAARPQETQEGLQRELGTLRRERDQLETQTRELETAYSNLLRDKSVLEEEKKRLRQENENLARRLESSSQEVARLRRGQCPQTRDTARAVPPGSREVSTWNLDTLAFQELKSELTEVPASRILKESPSGYLRSGEGDTGCGELVWVGEPLTLRTAETITGKYGVWMRDPKPTYPYTQETTWRIDTVGTDVRQVFEYDLISQFMQGYPSKVHILPRPLESTGAVVYSGSLYFQGAESRTVIRYELNTETVKAEKEIPGAGYHGQFPYSWGGYTDIDLAVDEAGLWVIYSTDEAKGAIVLSKLNPENLELEQTWETNIRKQSVANAFIICGTLYTVSSYTSADATVNFAYDTGTGISKTLTIPFKNRYKYSSMIDYNPLEKKLFAWDNLNMVTYDIKLSKM

SEQ ID NO: 54499 - protein, 344 aa, Homo sapiens
MRFFCARCCSFGPEMPAVQLLLLACLVWDVGARTAQLRKANDQSGRCQYTFSVASPNESSCPEQSQAMSVIHNLQRDSSTQRLDLEATKARLSSLESLLHQLTLDQAARPQETQEGLQRELGTLRRERDQLETQTRELETAYSNLLRDKSVLEEEKKRLRQENENLARRLESSSQEVARLRRGQCPQTRDTARAVPPGSREVSTWNLDTLAFQELKSELTEVPASRILKESPSGYLRSGEGDTGCGELVWVGEPLTLRTAETITGKYGVWMRDPKPTYPYTQETTWRIDTVGTDVRQVFEYDLISQFMQGYPSKVHILPRPLESTGAVVYSGSLYFRALSPELS

SEQ ID NO: 54500 - protein, 506 aa, Homo sapiens
MGRKKIQITRIMDERNRQVTFTKRKFGLMKKAYELSVLCDCEIALIIFNSSNKLFQYASTDMDKVLLKYTEYNEPHESRTNSDIVETLRKKGLNGCESPDADDYFEHSPLSEDRFSKLNEDSDFIFKRGPPGLPPQNFSMSVTVPVTSPNALSYTNPGSSLVSPSLAASSTLTDSSMLSPPQTTLHRNVSPGAPQRPPSTGNAGGMLSTTDLTVPNGAGSSPVGNGFVNSRASPNLIGATGANSLGKVMPTKSPPPPGGGNLGMNSRKPDLRVVIPPSSKGMMPPLYLKRQLNTNNTQRISSSQATQPLATPVVSVTTPSLPPQGLVYSAMPTAYNTDYSLTSADLSALQGFNSPGMLSLGQVSAWQQHHLGQAALSSLVAGGQLSQGSNLSINTNQNISIKSEPISPPRDRMTPSGFQQQQQQQQQQQPPPPPQPQPQPPQPQPRQEMGRSPVDSLSSSSSSYDGSDREDPRGDFHSPIVLGRPPNTEDRESPSVKRMRMDAWVT

SEQ ID NO: 54501 - protein, 499 aa, Homo sapiens
MGRKKIQITRIMDERNRQVTFTKRKFGLMKKAYELSVLCDCEIALIIFNSSNKLFQYASTDMDKVLLKYTEYNEPHESRTNSDIVEALNKKEHRGCDSPDPDTSYVLTPHTEEKYKKINEEFDNMMRNHKIAPGLPPQNFSMSVTVPVTSPNALSYTNPGSSLVSPSLAASSTLTDSSMLSPPQTTLHRNVSPGAPQRPPSTGNAGGMLSTTDLTVPNGAGSSPVGNGFVNSRASPNLIGATGANSLGKVMPTKSPPPPGGGNLGMNSRKPDLRVVIPPSSKGMMPPLNTQRISSSQATQPLATPVVSVTTPSLPPQGLVYSAMPTAYNTDYSLTSADLSALQGFNSPGMLSLGQVSAWQQHHLGQAALSSLVAGGQLSQGSNLSINTNQNISIKSEPISPPRDRMTPSGFQQQQQQQQQQQPPPPPQPQPQPPQPQPRQEMGRSPVDSLSSSSSSYDGSDREDPRGDFHSPIVLGRPPNTEDRESPSVKRMRMDAWVT

SEQ ID NO: 54502 - protein, 429 aa, Homo sapiens
MGRKKIQITRIMDERNRQTLRKKGLNGCESPDADDYFEHSPLSEDRFSKLNEDSDFIFKRGPPGLPPQNFSMSVTVPVTSPNALSYTNPGSSLVSPSLAASSTLTDSSMLSPPQTTLHRNVSPGAPQRPPSTGNAGGMLSTTDLTVPNGAGSSPVGNGFVNSRASPNLIGATGANSLGKVMPTKSPPPPGGGNLGMNSRKPDLRVVIPPSSKGMMPPLNTQRISSSQATQPLATPVVSVTTPSLPPQGLVYSAMPTAYNTDYSLTSADLSALQGFNSPGMLSLGQVSAWQQHHLGQAALSSLVAGGQLSQGSNLSINTNQNISIKSEPISPPRDRMTPSGFQQQQQQQQQQQPPPPPQPQPQPPQPQPRQEMGRSPVDSLSSSSSSYDGSDREDPRGDFHSPIVLGRPPNTEDRESPSVKRMRMDAWVT

SEQ ID NO: 54503 - protein, 497 aa, Homo sapiens
MGRKKIQITRIMDERNRQVTFTKRKFGLMKKAYELSVLCDCEIALIIFNSSNKLFQYASTDMDKVLLKYTEYNEPHESRTNSDIVETLRKKGLNGCESPDADDYFEHSPLSEDRFSKLNEDSDFIFKRGPPGLPPQNFSMSVTVPVTSPNALSYTNPGSSLVSPSLAASSTLTDSSMLSPPQTTLHRNVSPGAPQRPPSTGNAGGMLSTTDLTVPNGAGSSPVGNGFVNSRASPNLIGATGANSLGKVMPTKSPPPPGGGNLGMNSRKPDLRVVIPPSSKGMMPPLNTQRISSSQATQPLATPVVSVTTPSLPPQGLVYSAMPTAYNTDYSLTSADLSALQGFNSPGMLSLGQVSAWQQHHLGQAALSSLVAGGQLSQGSNLSINTNQNISIKSEPISPPRDRMTPSGFQQQQQQQQQQQPPPPPQPQPQPPQPQPRQEMGRSPVDSLSSSSSSYDGSDREDPRGDFHSPIVLGRPPNTEDRESPSVKRMRMDAWVT

SEQ ID NO: 54504 - protein, 497 aa, Homo sapiens; identical to SEQ ID NO: 54503

SEQ ID NO: 54505 - protein, 505 aa, Homo sapiens
MGRKKIQITRIMDERNRQVTFTKRKFGLMKKAYELSVLCDCEIALIIFNSSNKLFQYASTDMDKVLLKYTEYNEPHESRTNSDIVETLRKKGLNGCESPDADDYFEHSPLSEDRFSKLNEDSDFIFKRGPPGLPPQNFSMSVTVPVTSPNALSYTNPGSSLVSPSLAASSTLTDSSMLSPPQTTLHRNVSPGAPQRPPSTGNAGGMLSTTDLTVPNGAGSSPVGNGFVNSRASPNLIGATGANSLGKVMPTKSPPPPGGGNLGMNSRKPDLRVVIPPSSKGMMPPLSEEEELELNTQRISSSQATQPLATPVVSVTTPSLPPQGLVYSAMPTAYNTDYSLTSADLSALQGFNSPGMLSLGQVSAWQQHHLGQAALSSLVAGGQLSQGSNLSINTNQNISIKSEPISPPRDRMTPSGFQQQQQQQQQQQPPPPPQPQPQPPQPQPRQEMGRSPVDSLSSSSSSYDGSDREDPRGDFHSPIVLGRPPNTEDRESPSVKRMRMDAWVT

SEQ ID NO: 54506 - protein, 38 aa, Homo sapiens
MGRKKIQITRIMDERNRQVTFTKRKFGLMKKAYELSVL

SEQ ID NO: 54507 - protein, 437 aa, Homo sapiens
MGRKKIQITRIMDERNRQTLRKKGLNGCESPDADDYFEHSPLSEDRFSKLNEDSDFIFKRGPPGLPPQNFSMSVTVPVTSPNALSYTNPGSSLVSPSLAASSTLTDSSMLSPPQTTLHRNVSPGAPQRPPSTGNAGGMLSTTDLTVPNGAGSSPVGNGFVNSRASPNLIGATGANSLGKVMPTKSPPPPGGGNLGMNSRKPDLRVVIPPSSKGMMPPLSEEEELELNTQRISSSQATQPLATPVVSVTTPSLPPQGLVYSAMPTAYNTDYSLTSADLSALQGFNSPGMLSLGQVSAWQQHHLGQAALSSLVAGGQLSQGSNLSINTNQNISIKSEPISPPRDRMTPSGFQQQQQQQQQQQPPPPPQPQPQPPQPQPRQEMGRSPVDSLSSSSSSYDGSDREDPRGDFHSPIVLGRPPNTEDRESPSVKRMRMDAWVT

SEQ ID NO: 54508 - protein, 77 aa, Homo sapiens
MGRKKIQITRIMDERNRQVTFTKRKFGLMKKAYELSVLCDCEIALIIFNSSNKLFQYASTDMDKVLLKYTEYNEPHE

SEQ ID NO: 54509 - protein, 85 aa, Homo sapiens
MGRKKIQITRIMDERNRQVTFTKRKFGLMKKAYELSVLCDCEIALIIFNSSNKLFQYASTDMDKVLLKYTEYNEPHESRTNSDIV

SEQ ID NO: 54510 - protein, 368 aa, Homo sapiens
MGRKKIQISRILDQRNRQVTFTKRKFGLMKKAYELSVLCDCEIALIIFNSANRLFQYASTDMDRVLLKYTEYSEPHESRTNTDILETLKRRGIGLDGPELEPDEGPEEPGEKFRRLAGEGGDPALPRPRLYPAAPAMPSPDVVYGALPPPGCDPSGLGEALPAQSRPSPFRPAAPKAGPPGLVHPLFSPSHLTSKTPPPLYLPTEGRRSDLPGGLAGPRGGLNTSRSLYSGLQNPCSTATPGPPLGSFPFLPGGPPEYGLGDPPPPPGLLQPPTLAPWQPSRGDGPPAVSSQPSGGRSLGEEGPPTRGASPPTPPVSIKSERLSPAPGGPGDFPKTFPYPLLLARSLAEPLRPGPALRRLPLADGWPR

SEQ ID NO: 54511 - protein, 297 aa, Homo sapiens
MGRKKIQISRILDQRNRQVTFTKRKFGLMKKAYELSVLCDCEIALIIFNSANRLFQYASTDMDRVLLKYTEYSEPHESRTNTDILEVPQTLKRRGIGLDGPELEPDEGPEEPGEKFRRLAGEGGDPALPRPRLYPAAPAMPSPDVVYGALPPPGCDPSGLGEALPAQSRPSPFRPAAPKAGPPGLVHPLFSPSHLTSKTPPPLYLPTEGRRSDLPGGLAGPRGGLNTSRSLYSGLQNPCSTATPGPPLGSFPFLPGGPPEYGLGDPPPPPGLLQPPTLAPWQPSRGDGPPAVSSQPR

SEQ ID NO: 54512 - protein, 368 aa, Homo sapiens; identical to SEQ ID NO: 54510

SEQ ID NO: 54513 - protein, 365 aa, Homo sapiens
MGRKKIQISRILDQRNRQVTFTKRKFGLMKKAYELSVLCDCEIALIIFNSANRLFQYASTDMDRVLLKYTEYSEPHESRTNTDILETLKRRGIGLDGPELEPDEGPEEPGEKFRRLAGEGGDPALPRPRLYPAAPAMPSPDVVYGALPPPGCDPSGLGEALPAQSRPSPFRPAAPKAGPPGLVHPLFSPSHLTSKTPPPLYLPTEGRRSDLPGGLAGPRGGLNTSRSLYSGLQNPCSTATPGPPLGSFPFLPGGPPVGAEAWARRVPQPAAPPRRPPQSASSLSASLRPPGAPATFLRPSPIPCSSPGPWQSLCGLGPPCAGCPWPTAGPGRRSPGGTSPERSPGTARARGDPTSLQASSEKTQQ

SEQ ID NO: 54514 - protein, 463 aa, Homo sapiens
MGRKKIQITRIMDERNRQVTFTKRKFGLMKKAYELSVLCDCEIALIIFNSTNKLFQYASTDMDKVLLKYTEYNEPHESRTNSDIVEALNKKENKGCESPDPDSSYALTPRTEEKYKKINEEFDNMIKSHKIPAVPPPNFEMPVSIPVSSHNSLVYSNPVSSLGNPNLLPLAHPSLQRNSMSPGVTHRPPSAGNTGGLMGGDLTSGAGTSAGNGYGNPRNSPGLLVSPGNLNKNMQAKSPPPMNLGMNNRKPDLRVLIPPGSKNTMPSVNQRINNSQSAQSLATPVVSVATPTLPGQGMGGYPSAISTTYGTEYSLSSADLSSLSGFNTASALHLGSVTGWQQQHLHNMPPSALSQLGACTSTHLSQSSNLSLPSTQSLNIKSEPVSPPRDRTTTPSRYPQHTRHEAGRSPVDSLSSCSSSYDGSDREDHRNEFHSPIGLTRPSPDERESPSVKRMRLSEGWAT

SEQ ID NO: 54515 - protein, 473 aa, Homo sapiens
MGRKKIQITRIMDERNRQVTFTKRKFGLMKKAYELSVLCDCEIALIIFNSTNKLFQYASTDMDKVLLKYTEYNEPHESRTNSDIVETLRKKGLNGCDSPDPDADDSVGHSPESEDKYRKINEDIDLMISRQRLCAVPPPNFEMPVSIPVSSHNSLVYSNPVSSLGNPNLLPLAHPSLQRNSMSPGVTHRPPSAGNTGGLMGGDLTSGAGTSAGNGYGNPRNSPGLLVSPGNLNKNMQAKSPPPMNLGMNNRKPDLRVLIPPGSKNTMPSVSEDVDLLLNQRINNSQSAQSLATPVVSVATPTLPGQGMGGYPSAISTTYGTEYSLSSADLSSLSGFNTASALHLGSVTGWQQQHLHNMPPSALSQLGACTSTHLSQSSNLSLPSTQSLNIKSEPVSPPRDRTTTPSRYPQHTRHEAGRSPVDSLSSCSSSYDGSDREDHRNEFHSPIGLTRPSPDERESPSVKRMRLSEGWAT

SEQ ID NO: 54516 - protein, 98 aa, Homo sapiens
MGRKKIQITRIMDERNRQVTFTKRKFGLMKKAYELSVLCDCEIALIIFNSTNKLFQYASTDMDKVLLKYTEYNEPHESRTNSDIVETLRKKGLNGCDS

SEQ ID NO: 54517 - protein, 129 aa, Homo sapiens
MGRKKIQITRIMDERNRQVTFTKRKFGLMKKAYELSVLCDCEIALIIFNSTNKLFQYASTDMDKVLLKYTEYNEPHESRTNSDIVETLRKKGLNGCDSPDPDADDSVGHSPESEDKYRKINEDIDLMIS

SEQ ID NO: 54518 - protein, 87 aa, Homo sapiens
MGRKKIQITRIMDERNRQVTFTKRKFGLMKKAYELSVLCDCEIALIIFNSTNKLFQYASTDMDKVLLKYTEYNEPHESRTNSDIVET

SEQ ID NO: 54519 - protein, 473 aa, Homo sapiens
MGRKKIQITRIMDERNRQVTFTKRKFGLMKKAYELSVLCDCEIALIIFNSTNKLFQYASTDMDKVLLKYTEYNEPHESRTNSDIVETLRKKGLNGCDSPDPDADDSVGHSPESEDKYRKINEDIDLMISRQRLCAVPPPNFEMPVSIPVSSHNSLVYSNPVSSLGNPNLLPLAHPSLQRNSMSPGVTHRPPSAGNTGGLMGGDLTSGAGTSAGNGYGNPRNSPGLLVSPGNLNKNMQAKSPPPMNLGMNNRKPDLRVLIPPGSKNTMPSVVIQNYILKNQRINNSQSAQSLATPVVSVATPTLPGQGMGGYPSAISTTYGTEYSLSSADLSSLSGFNTASALHLGSVTGWQQQHLHNMPPSALSQLGACTSTHLSQSSNLSLPSTQSLNIKSEPVSPPRDRTTTPSRYPQHTRHEAGRSPVDSLSSCSSSYDGSDREDHRNEFHSPIGLTRPSPDERESPSVKRMRLSEGWAT

SEQ ID NO: 54520 - protein, 227 aa, Homo sapiens
MGRKKIQITRIMDERNRQVTFTKRKFGLMKKAYELSVLCDCEIALIIFNSTNKLFQYASTDMDKVLLKYTEYNEPHESRTNSDIVEALNKKENKGCESPDPDSSYALTPRTEEKYKKINEEFDNMIKSHKIPAVPPPNFEMPVSIPVSSHNSLVYSNPVSSLGNPNLLPLAHPSLQRNSMSPGVTHRPPSAGNTGGLMGGDLTSGAGTSAGNGYGNPRNSPGLLVSP

SEQ ID NO: 54521 - protein, 120 aa, Homo sapiens
MGRKKIQITRIMDERNRQVTFTKRKFGLMKKAYELSVLCDCEIALIIFNSTNKLFQYASTDMDKVLLKYTEYNEPHESRTNSDIVEALNKKENKGCESPDPDSSYALTPRTEEKYKKINE

SEQ ID NO: 54522 - protein, 126 aa, Homo sapiens
MGRKKIQITRIMDERNRQVTFTKRKFGLMKKAYELSVLCDCEIALIIFNSTNKLFQYASTDMDKVLLKYTEYNEPHESRTNSDIVETLRKKGLNGCDSPDPDADDSVGHSPESEDKYRKINEDIDL

SEQ ID NO: 54523 - protein, 28 aa, Homo sapiens
MGRKKIQITRIMDERNRQVTFTKRKFGL

SEQ ID NO: 54524 - protein, 465 aa, Homo sapiens
MGRKKIQITRIMDERNRQVTFTKRKFGLMKKAYELSVLCDCEIALIIFNSTNKLFQYASTDMDKVLLKYTEYNEPHESRTNSDIVETLRKKGLNGCDSPDPDADDSVGHSPESEDKYRKINEDIDLMISRQRLCAVPPPNFEMPVSIPVSSHNSLVYSNPVSSLGNPNLLPLAHPSLQRNSMSPGVTHRPPSAGNTGGLMGGDLTSGAGTSAGNGYGNPRNSPGLLVSPGNLNKNMQAKSPPPMNLGMNNRKPDLRVLIPPGSKNTMPSVNQRINNSQSAQSLATPVVSVATPTLPGQGMGGYPSAISTTYGTEYSLSSADLSSLSGFNTASALHLGSVTGWQQQHLHNMPPSALSQLGACTSTHLSQSSNLSLPSTQSLNIKSEPVSPPRDRTTTPSRYPQHTRHEAGRSPVDSLSSCSSSYDGSDREDHRNEFHSPIGLTRPSPDERESPSVKRMRLSEGWAT

SEQ ID NO: 54525 - protein, 242 aa, Homo sapiens
MGRKKIQITRIMDERNRQVTFTKRKFGLMKKAYELSVLCDCEIALIIFNSTNKLFQYASTDMDKVLLKYTEYNEPHESRTNSDIVEALNKKENKGCESPDPDSSYALTPRTEEKYKKINEEFDNMIKSHKIPAVPPPNFEMPVSIPVSSHNSLVYSNPVSSLGNPNLLPLAHPSLQRNSMSPGVTHRPPSAGNTGGLMGGDLTSGAGTSAGNGYGNPRNSPGLLVSPGNLNKNMQAKSPPPM

SEQ ID NO: 54526 - protein, 441 aa, Homo sapiens
MGRKKIQITRIMDERNRQVTFTKRKFGLMKKAYELSVLCDCEIALIIFNSTNKLFQYASTDMDKVLLKYTEYNEPHESRTNSDIVETLRKKGLNGCDSPDPDADDSVGHSPESEDKYRKINEDIDLMISRQRLCAVPPPNFEMPVSIPVSSHNSLVYSNPVSSLGNPNLLPLAHPSLQRNSMSPGVTHRPPSAGNTGGLMGGDLTSGAGTSAGNGYGNPRNSPGLLVSPGNLNKNMQAKSPPPMNLGMNNRKPDLRVLIPPGSKNTMPSVSEDVDLLLNQRINNSQSAQSLATPVVSVATPTLPGQGMGGYPSAISTTYGTEYSLSSADLSSLSGFNTASALHLGSVTGWQQQHLHNMPPSALSQLGDRTTTPSRYPQHTRHEAGRSPVDSLSSCSSSYDGSDREDHRNEFHSPIGLTRPSPDERESPSVKRMRLSEGWAT

SEQ ID NO: 54527 - protein, 473 aa, Homo sapiens; identical to SEQ ID NO: 54515

SEQ ID NO: 54528 - protein, 417 aa, Homo sapiens
MGRKKIQITRIMDERNRQVTFTKRKFGLMKKAYELSVLCDCEIALIIFNSTNKLFQYASTDMDKVLLKYTEYNEPHESRTNSDIVEAVPPPNFEMPVSIPVSSHNSLVYSNPVSSLGNPNLLPLAHPSLQRNSMSPGVTHRPPSAGNTGGLMGGDLTSGAGTSAGNGYGNPRNSPGLLVSPGNLNKNMQAKSPPPMNLGMNNRKPDLRVLIPPGSKNTMPSVNQRINNSQSAQSLATPVVSVATPTLPGQGMGGYPSAISTTYGTEYSLSSADLSSLSGFNTASALHLGSVTGWQQQHLHNMPPSALSQLGACTSTHLSQSSNLSLPSTQSLNIKSEPVSPPRDRTTTPSRYPQHTRHEAGRSPVDSLSSCSSSYDGSDREDHRNEFHSPIGLTRPSPDERESPSVKRMRLSEGWAT

SEQ ID NO: 54529 - protein, 483 aa, Homo sapiens
MGRKKIQITRIMDERNRQVTFTKRKFGLMKKAYELSVLCDCEIALIIFNSTNKLFQYASTDMDKVLLKYTEYNEPHESRTNSDIVETLRKKGLNGCDSPDPDADDSALNKKENKGCESPDPDSSYALTPRTEEKYKKINEEFDNMIKSHKIPAVPPPNFEMPVSIPVSSHNSLVYSNPVSSLGNPNLLPLAHPSLQRNSMSPGVTHRPPSAGNTGGLMGGDLTSGAGTSAGNGYGNPRNSPGLLVSPGNLNKNMQAKSPPPMNLGMNNRKPDLRVLIPPGSKNTMPSVNQRINNSQSAQSLATPVVSVATPTLPGQGMGGYPSAISTTYGTEYSLSSADLSSLSGFNTASALHLGSVTGWQQQHLHNMPPSALSQLGACTSTHLSQSSNLSLPSTQSLNIKSEPVSPPRDRTTTPSRYPQHTRHEAGRSPVDSLSSCSSSYDGSDREDHRNEFHSPIGLTRPSPDERESPSVKRMRLSEGWAT

SEQ ID NO: 54530 - protein, 520 aa, Homo sapiens
MGRKKIQIQRITDERNRQVTFTKRKFGLMKKAYELSVLCDCEIALIIFNHSNKLFQYASTDMDKVLLKYTEYNEPHESRTNADIIEALHKKHRECESPEVDEVFALTPQTEEKYKKIDEEFDKMMQSYRLASTVPAPNFAMPVTVPVSNQSSLQFSNPSGSLVTPSLVTSSLTDPRLLSPQQPALQRNSVSPGLPQRPASAGAMLGGDLNSANGACPSPVGNGYVSARASPGLLPVANGNSLNKVIPAKSPPPPTHSTQLGAPSRKPDLRVITSQAGKGLMHHLTEDHLDLNNAQRLGVSQSTHSLTTPVVSVATPSLLSQGLPFSSMPTAYNTDYQLTSAELSSLPAFSSPGGLSLGNVTAWQQPQQPQQPQQPQPPQQQPPQPQQPQPQQPQQPQQPPQQQSHLVPVSLSNLIPGSPLPHVGAALTVTTHPHISIKSEPVSPSRERSPAPPPPAVFPAARPEPGDGLSSPAGGSYETGDRDDGRGDFGPTLGLLRPAPEPEAEGSAVKRMRLDTWTLK

SEQ ID NO: 54531 - protein, 521 aa, Homo sapiens
MGRKKIQIQRITDERNRQVTFTKRKFGLMKKAYELSVLCDCEIALIIFNHSNKLFQYASTDMDKVLLKYTEYNEPHESRTNADIIETLRKKGFNGCDSPEPDGEDSLEQSPLLEDKYRRASEELDGLFRRYGSTVPAPNFAMPVTVPVSNQSSLQFSNPSGSLVTPSLVTSSLTDPRLLSPQQPALQRNSVSPGLPQRPASAGAMLGGDLNSANGACPSPVGNGYVSARASPGLLPVANGNSLNKVIPAKSPPPPTHSTQLGAPSRKPDLRVITSQAGKGLMHHLTEDHLDLNNAQRLGVSQSTHSLTTPVVSVATPSLLSQGLPFSSMPTAYNTDYQLTSAELSSLPAFSSPGGLSLGNVTAWQQPQQPQQPQQPQPPQQQPPQPQQPQPQQPQQPQQPPQQQSHLVPVSLSNLIPGSPLPHVGAALTVTTHPHISIKSEPVSPSRERSPAPPPPAVFPAARPEPGDGLSSPAGGSYETGDRDDGRGDFGPTLGLLRPAPEPEAEGSAVKRMRLDTWTLK

SEQ ID NO: 54532 - protein, 475 aa, Homo sapiens
MGRKKIQIQRITDERNRQVTFTKRKFGLMKKAYELSVLCDCEIALIIFNHSNKLFQYASTDMDKVLLKYTEYNEPHESRTNADIIESTVPAPNFAMPVTVPVSNQSSLQFSNPSGSLVTPSLVTSSLTDPRLLSPQQPALQRNSVSPGLPQRPASAGAMLGGDLNSANGACPSPVGNGYVSARASPGLLPVANGNSLNKVIPAKSPPPPTHSTQLGAPSRKPDLRVITSQAGKGLMHHLTEDHLDLNNAQRLGVSQSTHSLTTPVVSVATPSLLSQGLPFSSMPTAYNTDYQLTSAELSSLPAFSSPGGLSLGNVTAWQQPQQPQQPQQPQPPQQQPPQPQQPQPQQPQQPQQPPQQQSHLVPVSLSNLIPGSPLPHVGAALTVTTHPHISIKSEPVSPSRERSPAPPPPAVFPAARPEPGDGLSSPAGGSYETGDRDDGRGDFGPTLGLLRPAPEPEAEGSAVKRMRLDTWTLK

SEQ ID NO: 54533 - protein, 514 aa, Homo sapiens
MGRKKIQIQRITDERNRQVTFTKRKFGLMKKAYELSVLCDCEIALIIFNHSNKLFQYASTDMDKVLLKYTEYNEPHESRTNADIIETLRKKGFNGCDSPEPDGEDSLEQSPLLEDKYRRASEELDGLFRRYGSTVPAPNFAMPVTVPVSNQSSLQFSNPSGSLVTPSLVTSSLTDPRLLSPQQPALQRNSVSPGLPQRPASAGAMLGGDLNSANGACPSPVGNGYVSARASPGLLPVANGNSLNKVIPAKSPPPPTHSTQLGAPSRKPDLRVITSQAGKGLMHHLNNAQRLGVSQSTHSLTTPVVSVATPSLLSQGLPFSSMPTAYNTDYQLTSAELSSLPAFSSPGGLSLGNVTAWQQPQQPQQPQQPQPPQQQPPQPQQPQPQQPQQPQQPPQQQSHLVPVSLSNLIPGSPLPHVGAALTVTTHPHISIKSEPVSPSRERSPAPPPPAVFPAARPEPGDGLSSPAGGSYETGDRDDGRGDFGPTLGLLRPAPEPEAEGSAVKRMRLDTWTLK

SEQ ID NO: 54534 - protein, 514 aa, Homo sapiens; identical to SEQ ID NO: 54533

SEQ ID NO: 54535 - protein, 510 aa, Homo sapiens
MGRKKIQIQRITDERNRQVTFTKRKFGLMKKAYELSVLCDCEIALIIFNHSNKLFQYASTDMDKVLLKYTEYNEPHESRTNADIIEALHKKHRECESPEVDEVFALTPQTEEKYKKIDEEFDKMMQSYRLASTVPAPNFAMPVTVPVSNQSSLQFSNPSGSLVTPSLVTSSLTDPRLLSPQQPALQRNSVSPGLPQRPASAGAMLGGDLNSANGACPSPVGNGYVSARASPGLLPVANGNSLNKVIPAKSPPPPTHSTQLGAPSRKPDLRVITSQAGKGLMHHLNNAQRLGVSQSTHSLTTPVVSVATPSLLSQGLPFSSMPTAYNTDYQLTSAELSSLPAFSSPGGLSLGNVTAWQQPQQPQQPQQPQPPQQQPPQPQQPQPQQPQQPQQPPQQQSHLVPVSLSNLIPGSPLPHVGAALTVTTHPHISIKSEPVSPSRERSPAPPPPAVFPAARPEPGDGLSSPAGGSYETGDRDDGRGDFGPTLGLLRPAPEPEAEGSAVKRMRLDTW

SEQ ID NO: 54536 - protein, 139 aa, Homo sapiens
MGRKKIQIQRITDERNRQVTFTKRKFGLMKKAYELSVLCDCEIALIIFNHSNKLFQYASTDMDKVLLKYTEYNEPHESRTNADIIETLRKKGFNGCDSPEPDGEDSLEQSPLLEDKYRRASEELDGLFRRYGGPCWGVT

SEQ ID NO: 54537 - protein, 246 aa, Homo sapiens
MYQVSGQRPSGCDAPYGAPSAAPGPAQTLSLLPGLEVVTGSTHPAEAAPEEGSLEEAATPMPQGNGPGIPQGLDSTDLDVPTEAVTCQPQGNPLGCTPLLPNDSGHPSELGGTRRAGNGALGGPKAHRKLQTHPSLASQGSKKSKSSSKSTTSQIPLQAQEDCCVHCILSCLFCEFLTLCNIVLDCATCGSCSSEDSCLCCCCCGSGECADCDLPCDLDCGILDACCESADCLEICMECCGLCFSS

SEQ ID NO: 54538 - protein, 246 aa, Homo sapiens; identical to SEQ ID NO: 54537

SEQ ID NO: 54539 - protein, 231 aa, Homo sapiens
MYQVSGQRPSGCDAPYGAPSAAPGPAQTLSLLPGLEVVTGSTHPAEAAPEEGSLEEAATPMPQGNGPGIPQGLDSTDLDVPTEAVTCQPQGNPLGCTPLLPNDSGHPSELGGTRRAGNGALGGPKAHRKLQTHPSLASQGSKKSKSSSKSTTSQIPLQAQEDCCVHCILSCLFCEFLTLCNIVLDCATCGSCSSEDSCLCCCCCGSGECADCDLPCDLDCGILDACCESAD

SEQ ID NO: 54540 - protein, 213 aa, Homo sapiens
MYQVSGQRPSGCDAPYGAPSAAPGPAQTLSLLPGLEVVTGSTHPAEAAPEEGSLEEAATPMPQGNGPGIPQGLDSTDLDVPTEAVTCQPQGNPLGCTPLLPNDSGHPSELGGTRRAGNGALGGPKAHRKLQTHPSLASQGSKKSKSSSKSTTSQIPLQAQEDCCVHCILSCLFCEFLTLCNIVLDCATCGSCSSEDSCLCCCCCGSGECADCD

SEQ ID NO: 54541 - protein, 98 aa, Homo sapiens
MYQVSGQRPSGCDAPYGAPSAAPGPAQTLSLLPGLEVVTGSTHPAEAAPEEGSLEEAATPMPQGNGPGIPQGLDSTDLDVPTEAVTCQPQGNPLGCTP

SEQ ID NO: 54542 - protein, 128 aa, Homo sapiens
MYQVSGQRPSGCDAPYGAPSAAPGPAQTLSLLPGLEVVTGSTHPAEAAPEEGSLEEAATPMPQGNGPGIPQGLDSTDLDVPTEAVTCQPQGNPLGCTPLLPNDSGHPSELGGTRRAGNGALGGPKAHR

SEQ ID NO: 54543 - protein, 246 aa, Homo sapiens; identical to SEQ ID NO: 54537

SEQ ID NO: 54544 - protein, 255 aa, Homo sapiens
MDVMDGCQFSPSEYFYDGSCIPSPEGEFGDEFVPRVAAFGAHKAELQGSDEDEHVRAPTGHHQAGHCLMWACKACKRKSTTMDRRKAATMRERRRLKKVNQAFETLKRCTTTNPNQRLPKVEILRNAIRYIESLQELLREQVENYYSLPGQSCSEPTSPTSNCSDGMPECNSPVWSRKSSTFDSIYCPDVSNVYATDKNSLSSLDCLSNIVDRITSSEQPGLPLQDLASLSPVASTDSQPATPGASSSRLIYHVL

SEQ ID NO: 54545 - protein, 242 aa, Homo sapiens
MMMDLFETGSYFFYLDGENVTLQPLEVAEGSPLYPGSDGTLSPCQDQMPPEAGSDSSGEEHVLAPPGLQPPHCPGQCLIWACKTCKRKSAPTDRRKAATLRERRRLKKINEAFEALKRRTVANPNQRLPKVEILRSAISYIERLQDLLHRLDQQEKMQELGVDPFSYRPKQENLEGADFLRTCSSQWPSVSDHSRGLVITAKEGGASIDSSASSSLRCLSSIVDSISSEERKLPCVEEVVEK

SEQ ID NO: 54546 - protein, 224 aa, Homo sapiens
MELYETSPYFYQEPRFYDGENYLPVHLQGFEPPGYERTELTLSPEAPGPLEDKGLGTPEHCPGQCLPWACKVCKRKSVSVDRRRAATLREKRRLKKVNEAFEALKRSTLLNPNQRLPKVEILRSAIQYIERLQALLSSLNQEERDLRYRGGGGPQPGVPSECSSHSASCSPEWGSALEFSANPGDHLLTADPTDAHNLHSLTSIVDSITVEDVSVAFPDETMPN

SEQ ID NO: 54547 - protein, 154 aa, Homo sapiens
MGLSDGEWQLVLNVWGKVEADIPGHGQEVLIRLFKGHPETLEKFDKFKHLKSEDEMKASEDLKKHGATVLTALGGILKKKGHHEAEIKPLAQSHATKHKIPVKYLEFISECIIQVLQSKHPGDFGADAQGAMNKALELFRKDMASNYKELGFQG

SEQ ID NO: 54548 - protein, 154 aa, Homo sapiens; identical to SEQ ID NO: 54547

SEQ ID NO: 54549 - protein, 154 aa, Homo sapiens; identical to SEQ ID NO: 54547

SEQ ID NO: 54550 - protein, 154 aa, Homo sapiens; identical to SEQ ID NO: 54547

SEQ ID NO: 54551 - protein, 77 aa, Homo sapiens
MGLSDGEWQLVLNVWGKVEADIPGHGQEVLIRLFKGHPETLEKFDKFKHLKSEDEMKASEDLKKHGATVLTALGGIL

SEQ ID NO: 54552 - protein, 143 aa, Homo sapiens
MGLSDGEWQLVLNVWGKVEADIPGHGQEVLIRLFKGHPETLEKFDKFKHLKSEDEMKASEDLKKHGATVLTALGGILKKKGHHEAEIKPLAQSHATKHKIPVKYLEFISECIIQVLQSKHPGDFGADAQGAMNKALELFRKDM

SEQ ID NO: 54553 - protein, 106 aa, Homo sapiens
MGLSDGEWQLVLNVWGKVEADIPGHGQEVLIRLFKGHPETLEKFDKFKHLKSEDEMKASEDLKKHGATVLTALGGILKKKGHHEAEIKPLAQSHATKHKIPVKYLE

SEQ ID NO: 54554 - protein, 106 aa, Homo sapiens; identical to SEQ ID NO: 54553

SEQ ID NO: 54555 - protein, 136 aa, Homo sapiens [sequence omitted]

SEQ ID NO: 54556 - protein, 1465 aa, Homo sapiens
MSLVTVPFYQKRHRHFDQSYRNIQTRYLLDEYASKKRASTQASSQKSLSQRSSSQRASSQTSLGGTICRVCAKRVSTQEDEEQENRSRYQSLVAAYGEAKRQRFLSELAHLEEDVHLARSQARDKLDKYAIQQMMEDKLAWERHTFEERISRAPEILVRLRSHTVWERMSVKLCFTVQGFPTPVVQWYKDGSLICQAAEPGKYRIESNYGVHTLEINRADFDDTATYSAVATNAHGQVSTNAAVVVRRFRGDEEPFRSVGLPIGLPLSSMIPYTHFDVQFLEKFGVTFRREGETVTLKCTMLVTPDLKRVQPRAEWYRDDVLLKESKWTKMFFGEGQASLSFSHLHKDDEGLYTLRIVSRGGVSDHSAFLFVRDADPLVTGAPGAPMDLQCHDANRDYVIVTWKPPNTTTESPVMGYFVDRCEVGTNNWVQCNDAPVKICKYPVTGLFEGRSYIFRVRAVNSAGISRPSRVSDAVAALDPLDLRRLQAVHLEGEKEIAIYQDDLEGDAQVPGPPTGVHASEISRNYVVLSWEPPTPRGKDPLMYFIEKSVVGSGSWQRVNAQTAVRSPRYAVFDLMEGKSYVFRVLSANRHGLSEPSEITSPIQAQDVTVVPSAPGRVLASRNTKTSVVVQWDRPKHEEDLLGYYVDCCVAGTNLWEPCNHKPIGYNRFVVHGLTTGEQYIFRVKAVNAVGMSENSQESDVIKVQAALTVPSHPYGITLLNCDGHSMTLGWKVPKFSGGSPILGYYLDKREVHHKNWHEVNSSPSKPTILTVDGLTEGSLYEFKIAAVNLAGIGEPSDPSEHFKCEAWTMPEPGPAYDLTFCEVRDTSLVMLWKAPVYSGSSPVSGYFVDFREEDAGEWITVNQTTTANRYLKVSDLQQGKTYVFRVRAVNANGVGKPSDTSEPVLVEARPGTKEISAGVDEQGNIYLGFDCQEMTDASQFTWCKSYEEISDDERFKIETVGDHSKLYLKNPDKEDLGTYSVSVSDTDGVSSSFVLDPEELERLMALSNEIKNPTIPLKSELAYEIFDKGRVRFWLQAEHLSPDASYRFIINDREVSDSEIHRIKCDKATGIIEMVMDRFSIENEGTYTVQIHDGKAKSQSSLVLIGDAFKTVLEEAEFQRKEFLRKQGPHFAEYLHWDVTEECEVRLVCKVANTKKETVFKWLKDDVLYETETLPNLERGICELLIPKLSKKDHGEYKATLKDDRGQDVSILEIAGKVYDDMILAMSRVCGKSASPLKVLCTPEGIRLQCFMKYFTDEMKVNWCHKDAKISSSEHMRIGGSEEMAWLQICEPTEKDKGKYTFEIFDGKDNHQRSLDLSGQAFDEAFAEFQQFKAAAFAEKNRGRLIGGLPDVVTIMEGKTLNLTCTVFGNPDPEVIWFKNDQDIQLSEHFSVKVEQAKYVSMTIKGVTSEDSGKYSINIKNKYGGEKIDVTVSVYKHGEKIPDMAPPQQAKPKLIPASASAAGQ

SEQ ID NO: 54557 - protein, 1139 aa, Homo sapiens
MPEPTKKEDEEEVSPPSALPPDWTLVETPPGEEQAKQNANSQLSILFIEKPQGGTVKVGEDITFIAKVKAEDLLRKPTIKWFKGKWMDLASKAGKHLQLKETFERHSRVYTFEMQIIKAKDNFAGNYRCEVTYKDKFDSCSFDLEVHESTGTTPNIDIRSAFKRSGEGQEDAGELDFSGLLKRREVKQQEEEPQVDVWELLKNAKPSEYEKIAFQYGITDLRGMLKRLKRMRREEKKSAAFAKILDPAYQVDKGGRVRFVVELADPKLEVKWYKNGQEIRPSTKYIFEHKGCQRILFINNCQMTDDSEYYVTAGDEKCSTELFVREPPIMVTKQLEDTTAYCGERVELECEVSEDDANVKWFKNGEEIIPGPKSRYRIRVEGKKHILIIEGATKADAAEYSVMTTGGQSSAKLSVDLKPLKILTPLTDQTVNLGKEICLKCEISENIPGKWTKNGLPVQESDRLKVVHKGRIHKLVIANALTEDEGDYVFAPDAYNVTLPAKVHVIDPPKIILDGLDADNTVTVIAGNKLRLEIPISGEPPPKAMWSRGDKAIMEGSGRIRTESYPDSSTLVIDIAERDDSGVYHINLKNEAGEAHASIKVKVVDFPDPPVAPTVTEVGDDWCIMNWEPPAYDGGSPILGYFIERKKKQSSRWMRLNFDLCKETTFEPKKMIEGVAYEVRIFAVNAIGISKPSMPSRPFVPLAVTSPPTLLTVDSVTDTTVTMRWRPPDHIGAAGLDGYVLEYCFEGTEDWIVANKDLIDKTKFTITGLPTDAKIFVRVKAVNAAGASEPKYYSQPILVKEIIEPPKIRIPRHLKQTYIRRVGEAVNLVIPFQGKPRPELTWKKDGAEIDKNQINIRNSETDTIIFIRKAERSHSGKYDLQVKVDKFVETASIDIQIIDRPGPPQIVKIEDVWGENVALTWTPPKDDGNAAITGYTIQKADKKSMEWFTVIEHYHRTSATITELVIGNEYYFRVFSENMCGLSEDATMTKESAVIARDGKIYKNPVYEDFDFSEAPMFTQPLVNTYAIAGYNATLNCSVRGNPKPKITWMKNKVAIVDDPRYRMFSNQGVCTLEIRKPSPYDGGTYCCKAVNDLGTVEIECKLEVKGGLSFCRLLLQGVPPNIIDSYLRDLHSSNPEEY

SEQ ID NO: 54558 - protein, 1173 aa, Homo sapiens
MPEPTKKEENEVPAPAPPPEEPSKEKEAGTTPAKDWTLVETPPGEEQAKQNANSQLSILFIEKPQGGTVKVGEDITFIAKVKAEDLLRKPTIKWFKGKWMDLASKAGKHLQLKETFERHSRVYTFEMQIIKAKDNFAGNYRCEVTYKDKFDSCSFDLEVHESTGTTPNIDIRSAFKRSGEGQEDAGELDFSGLLKRREVKQQEEEPQVDVWELLKNAKPSEYEKIAFQYGITDLRGMLKRLKRMRREEKKSAAFAKILDPAYQVDKGGRVRFVVELADPKLEVKWYKNGQEIRPSTKYIFEHKGCQRILFINNCQMTDDSEYYVTAGDEKCSTELFVREPPIMVTKQLEDTTAYCGERVELECEVSEDDANVKWFKNGEEIIPGPKSRYRIRVEGKKHILIIEGATKADAAEYSVMTTGGQSSAKLSVDLKPLKILTPLTDQTVNLGKEICLKCEISENIPGKWTKNGLPVQESDRLKVVHKGRIHKLVIANALTEDEGDYVFAPDAYNVTLPAKVHVIDPPKIILDGLDADNTVTVIAGNKLRLEIPISGEPPPKAMWSRGDKAIMEGSGRIRTESYPDSSTLVIDIAERDDSGVYHINLKNEAGEAHASIKVKVVDFPDPPVAPTVTEVGDDWCIMNWEPPAYDGGSPILGYFIERKKKQSSRWMRLNFDLCKETTFEPKKMIEGVAYEVRIFAVNAIGISKPSMPSRPFVPLAVTSPPTLLTVDSVTDTTVTMRWRPPDHIGAAGLDGYVLEYCFEGSTSAKQSDENGEAAYDLPAEDWIVANKDLIDKTKFTITGLPTDAKIFVRVKAVNAAGASEPKYYSQPILVKEIIEPPKIRIPRHLKQTYIRRVGEAVNLVIPFQGKPRPELTWKKDGAEIDKNQINIRNSETDTIIFIRKAERSHSGKYDLQVKVDKFVETASIDIQIIDRPGPPQIVKIEDVWGENVALTWTPPKDDGNAAITGYTIQKADKKSMEWFTVIEHYHRTSATITELVIGNEYYFRVFSENMCGLSEDATMTKESAVIARDGKIYKNPVYEDFDFSEAPMFTQPLVNTYAIAGYNATLNCSVRGNPKPKITWMKNKVAIVDDPRYRMFSNQGVCTLEIRKPSPYDGGTYCCKAVNDLGTVEIECKLEVKVIYQGVNTPGQPVFLEGQQQVGSPSADSSCKAYLQT

SEQ ID NO: 54559 - protein, 1127 aa, Homo sapiens
MPEPTKKEENEVPAPAPPPEEPSKEKEAGTTPAKDWTLVETPPGEEQAKQNANSQLSILFIEKPQGGTVKVGEDITFIAKVKAEDLLRKPTIKWFKGKWMDLASKAGKHLQLKETFERHSRVYTFEMQIIKAKDNFAGNYRCEVTYKDKFDSCSFDLEVHESTGTTPNIDIRSAFKRREVKQQEEEPQVDVWELLKNAKPSEYEKIAFQYGITDLRGMLKRLKRMRREEKKSAAFAKILDPAYQVDKGGRVRFVVELADPKLEVKWYKNGQEIRPSTKYIFEHKGCQRILFINNCQMTDDSEYYVTAGDEKCSTELFVREPPIMVTKQLEDTTAYCGERVELECEVSEDDANVKWFKNGEEIIPGPKSRYRIRVEGKKHILIIEGATKADAAEYSVMTTGGQSSAKLSVDLKPLKILTPLTDQTVNLGKEICLKCEISENIPGKWTKNGLPVQESDRLKVVHKGRIHKLVIANALTEDEGDYVFAPDAYNVTLPAKVHVIDPPKIILDGLDADNTVTVIAGNKLRLEIPISGEPPPKAMWSRGDKAIMEGSGRIRTESYPDSSTLVIDIAERDDSGVYHINLKNEAGEAHASIKVKVVDFPDPPVAPTVTEVGDDWCIMNWEPPAYDGGSPILGYFIERKKKQSSRWMRLNFDLCKETTFEPKKMIEGVAYEVRIFAVNAIGISKPSMPSRPFVPLAVTSPPTLLTVDSVTDTTVTMRWRPPDHIGAAGLDGYVLEYCFEGTEDWIVANKDLIDKTKFTITGLPTDAKIFVRVKAVNAAGASEPKYYSQPILVKEIIEPPKIRIPRHLKQTYIRRVGEAVNLVIPFQGKPRPELTWKKDGAEIDKNQINIRNSETDTIIFIRKAERSHSGKYDLQVKVDKFVETASIDIQIIDRPGPPQIVKIEDVWGENVALTWTPPKDDGNAAITGYTIQKADKKSMEWFTVIEHYHRTSATITELVIGNEYYFRVFSENMCGLSEDATMTKESAVIARDGKIYKNPVYEDFDFSEAPMFTQPLVNTYAIAGYNATLNCSVRGNPKPKITWMKNKVAIVDDPRYRMFSNQGVCTLEIRKPSPYDGGTYCCKAVNDLGTVEIECKLEVKVIYQGVNTPGQPVFLEGQQQSLHNKDF

SEQ ID NO: 54560 - protein, 1120 aa, Homo sapiens
MPEPTKKEDWTLVETPPGEEQAKQNANSQLSILFIEKPQGGTVKVGEDITFIAKVKAEDLLRKPTIKWFKGKWMDLASKAGKHLQLKETFERHSRVYTFEMQIIKAKDNFAGNYRCEVTYKDKFDSCSFDLEVHESTGTTPNIDIRSAFKRSGEGQEDAGELDFSGLLKRREVKQQEEEPQVDVWELLKNAKPSEYEKIAFQYGITDLRGMLKRLKRMRREEKKSAAFAKILDPAYQVDKGGRVRFVVELADPKLEVKWYKNGQEIRPSTKYIFEHKGCQRILFINNCQMTDDSEYYVTAGDEKCSTELFVREPPIMVTKQLEDTTAYCGERVELECEVSEDDANVKWFKNGEEIIPGPKSRYRIRVEGKKHILIIEGATKADAAEYSVMTTGGQSSAKLSVDLKPLKILTPLTDQTVNLGKEICLKCEISENIPGKWTKNGLPVQESDRLKVVHKGRIHKLVIANALTEDEGDYVFAPDAYNVTLPAKVHVIDPPKIILDGLDADNTVTVIAGNKLRLEIPISGEPPPKAMWSRGDKAIMEGSGRIRTESYPDSSTLVIDIAERDDSGVYHINLKNEAGEAHASIKVKVVDFPDPPVAPTVTEVGDDWCIMNWEPPAYDGGSPILGYFIERKKKQSSRWMRLNFDLCKETTFEPKKMIEGVAYEVRIFAVNAIGISKPSMPSRPFVPLAVTSPPTLLTVDSVTDTTVTMRWRPPDHIGAAGLDGYVLEYCFEGTEDWIVANKDLIDKTKFTITGLPTDAKIFVRVKAVNAAGASEPKYYSQPILVKEIIEPPKIRIPRHLKQTYIRRVGEAVNLVIPFQGKPRPELTWKKDGAEIDKNQINIRNSETDTIIFIRKAERSHSGKYDLQVKVDKFVETASIDIQIIDRPGPPQIVKIEDVWGENVALTWTPPKDDGNAAITGYTIQKADKKSMEWFTVIEHYHRTSATITELVIGNEYYFRVFSENMCGLSEDATMTKESAVIARDGKIYKNPVYEDFDFSEAPMFTQPLVNTYAIAGYNATLNCSVRGNPKPKITWMKNKVAIVDDPRYRMFSNQGVCTLEIRKPSPYDGGTYCCKAVNDLGTVEIECKLEVKVIYQGVNTPGQPVFLEGQQQSLHNKDF

SEQ ID NO: 54561 - protein, 1132 aa, Homo sapiens
MPEPTKKEENEVPAPAPPPEDWTLVETPPGEEQAKQNANSQLSILFIEKPQGGTVKVGEDITFIAKVKAEDLLRKPTIKWFKGKWMDLASKAGKHLQLKETFERHSRVYTFEMQIIKAKDNFAGNYRCEVTYKDKFDSCSFDLEVHESTGTTPNIDIRSAFKRSGEGQEDAGELDFSGLLKRREVKQQEEEPQVDVWELLKNAKPSEYEKIAFQYGITDLRGMLKRLKRMRREEKKSAAFAKILDPAYQVDKGGRVRFVVELADPKLEVKWYKNGQEIRPSTKYIFEHKGCQRILFINNCQMTDDSEYYVTAGDEKCSTELFVREPPIMVTKQLEDTTAYCGERVELECEVSEDDANVKWFKNGEEIIPGPKSRYRIRVEGKKHILIIEGATKADAAEYSVMTTGGQSSAKLSVDLKPLKILTPLTDQTVNLGKEICLKCEISENIPGKWTKNGLPVQESDRLKVVHKGRIHKLVIANALTEDEGDYVFAPDAYNVTLPAKVHVIDPPKIILDGLDADNTVTVIAGNKLRLEIPISGEPPPKAMWSRGDKAIMEGSGRIRTESYPDSSTLVIDIAERDDSGVYHINLKNEAGEAHASIKVKVVDFPDPPVAPTVTEVGDDWCIMNWEPPAYDGGSPILGYFIERKKKQSSRWMRLNFDLCKETTFEPKKMIEGVAYEVRIFAVNAIGISKPSMPSRPFVPLAVTSPPTLLTVDSVTDTTVTMRWRPPDHIGAAGLDGYVLEYCFEGTEDWIVANKDLIDKTKFTITGLPTDAKIFVRVKAVNAAGASEPKYYSQPILVKEIIEPPKIRIPRHLKQTYIRRVGEAVNLVIPFQGKPRPELTWKKDGAEIDKNQINIRNSETDTIIFIRKAERSHSGKYDLQVKVDKFVETASIDIQIIDRPGPPQIVKIEDVWGENVALTWTPPKDDGNAAITGYTIQKADKKSMEWFTVIEHYHRTSATITELVIGNEYYFRVFSENMCGLSEDATMTKESAVIARDGKIYKNPVYEDFDFSEAPMFTQPLVNTYAIAGYNATLNCSVRGNPKPKITWMKNKVAIVDDPRYRMFSNQGVCTLEIRKPSPYDGGTYCCKAVNDLGTVEIECKLEVKVIYQGVNTPGQPVFLEGQQQSLHNKDF

SEQ ID NO: 54562 - protein, 1273 aa, Homo sapiens [sequence omitted]

SEQ ID NO: 54563 - protein, 1274 aa, Homo sapiens
MPEPGKKPVSAFSKKPRSVEVAAGSPAVFEAETERAGVKVRWQRGGSDISASNKYGLATEGTRHTLTVREVGPADQGSYAVIAGSSKVKFDLKVIEAEKAEPMLAPAPAPAEATGAPGEAPAPAAELGESAPSPKGSSSAALNGPTPGAPDDPIGLFVMRPQDGEVTVGGSITFSARVAGASLLKPPVVKWFKGKWVDLSSKVGQHLQLHDSYDRASKVYLFELHITDAQPAFTGSYRCEVSTKDKFDCSNFNLTVHEAMGTGDLDLLSAFRRTSLAGGGRRISDSHEDTGILDFSSLLKKSSSFRTPRDSKLEAPAEEDVWEILRQAPPSEYERIAFQYGVTDLRGMLKRLKGMRRDEKKSTAFQKKLEPAYQVSKGHKIRLTVELADHDAEVKWLKNGQEIQMSGSKYIFESIGAKRTLTISQCSLADDAAYQCVVGGEKCSTELFVKEPPVLITRPLEDQLVMVGQRVEFECEVSEEGAQVKWLKDGVELTREETFKYRFKKDGQRHHLIINEAMLEDAGHYALCTSGGQALAELIVQEKKLEVYQSIADLMVGAKDQAVFKCEVSDENVRGVWLKNGKELVPDSRIKVSHIGRVHKLTIDDVTPADEADYSFVPEGFACNLSAKLHFMEVKIDFVPRQEPPKIHLDCPGRIPDTIVVVAGNKLRLDVPISGDPAPTVIWQKAITQGNKAPARPAPDAPEDTGDSDEWVFDKKLLCETEGRVRVETTKDRSIFTVEGAEKEDEGVYTVTVKNPVGEDQVNLTVKVIDVPDAPAAPKISNVGEDSCTVQWEPPAYDGGQPILGYILERKKKKSYRWMRLNFDLIQELSHEARRMIEGVVYEMRVYAVNAIGMSRPSPASQPFMPIGPPSEPTHLAVEDVSDTTVSLKWRPPERVGAGGLDGYSVEYCPEGCSEWVAALQGLTEHTSILVKDLPTGARLLFRVRAHNMAGPGAPVTTTEPVTVQEILQRPRLQLPRHLRQTIQKKVGEPVNLLIPFQGKPRPQVTWTKEGQPLAGEEVSIRNSPTDTILFIRAARRVHSGTYQVTVRIENMEDKATLVLQVVDKPSPPQDLRVTDAWGLNVALEWKPPQDVGNTELWGYTVQKADKKTMEWFTVLEHYRRTHCVVPELIIGNGYYFRVFSQNMVGFSDRAATTKEPVFIPRPGITYEPPNYKALDFSEAPSFTQPLVNRSVIAGYTAMLCCAVRGSPKPKISWFKNGLDLGEDARFRMFSKQGVLTLEIRKPCPFDGGIYVCRATNLQGEARCECRLEVRVPQ

SEQ ID NO: 54564 - protein, 1274 aa, Homo sapiens
MPEPGKKPVSAFSKKPRSVEVAAGSPAVFEAETERAGVKVRWQRGGSDISASNKYGLATEGTRHTLTVREVGPADQGSYAVIAGSSKVKFDLKVIEAEKAEPMLAPAPAPAEATGAPGEAPAPAAELGESAPSPKGSSSAALNGPTPGAPDDPIGLFVMRPQDGEVTVGGSITFSARVAGASLLKPPVVKWFKGKWVDLSSKVGQHLQLHDSYDRASKVYLFELHITDAQPAFTGSYRCEVSTKDKFDCSNFNLTVHEAMGTGDLDLLSAFRRTSLAGGGRRISDSHEDTGILDFSSLLKKRDSFRTPRDSKLEAPAEEDVWEILRQAPPSEYERIAFQYGVTDLRGMLKRLKGMRRDEKKSTAFQKKLEPAYQVSKGHKIRLTVELADHDAEVKWLKNGQEIQMSGSKYIFESIGAKRTLTISQCSLADDAAYQCVVGGEKCSTELFVKEPPVLITRPLEDQLVMVGQRVEFECEVSEEGAQVKWLKDGVELTREETFKYRFKKDGQRHHLIINEAMLEDAGHYALCTSGGQALAELIVQEKKLEVYQSIADLMVGAKDQAVFKCEVSDENVRGVWLKNGKELVPDSRIKVSHIGRVHKLTIDDVTPADEADYSFVPEGFACNLSAKLHFMEVKIDFVPRQEPPKIHLDCPGRIPDTIVVVAGNKLRLDVPISGDPAPTVIWQKAITQGNKAPARPAPDAPEDTGDSDEWVFDKKLLCETEGRVRVETTKDRSIFTVEGAEKEDEGVYTVTVKNPVGEDQVNLTVKVIDVPDAPAAPKISNVGEDSCTVQWEPPAYDGGQPILGYILERKKKKSYRWMRLNFDLIQELSHEARRMIEGVVYEMRVYAVNAIGMSRPSPASQPFMPIGPPSEPTHLAVEDVSDTTVSLKWRPPERVGAGGLDGYSVEYCPEGCSEWVAALQGLTEHTSILVKDLPTGARLLFRVRAHNMAGPGAPVTTTEPVTVQEILQRPRLQLPRHLRQTIQKKVGEPVNLLIPFQGKPRPQVTWTKEGQPLAGEEVSIRNSPTDTILFIRAARRVHSGTYQVTVRIENMEDKATLVLQVVDKPSPPQDLRVTDAWGLNVALEWKPPQDVGNTELWGYTVQKADKKTMEWFTVLEHYRRTHCVVPELIIGNGYYFRVFSQNMVGFSDRAATTKEPVFIPRPGITYEPPNYKALDFSEAPSFTQPLVNRSVIAGYTAMLCCAVRGSPKPKISWFKNGLDLGEDARFRMFSKQGVLTLEIRKPCPFDGGIYVCRATNLQGEARCECRLEVRVPQ

SEQ ID NO: 54565 - protein, 1141 aa, Homo sapiens
MPEAKPAAKKAPKGKDAPKGAPKEAPPKEAPAEAPKEAPPEDQSPTAEEPTGVFLKKPDSVSVETGKDAVVVAKVNGKELPDKPTIKWFKGKWLELGSKSGARFSFKESHNSASNVYTVELHIGKVVLGDRGYYRLEVKAKDTCDSCGFNIDVEAPRQDASGQSLESFKRTSEKKSDTAGELDFSGLLKKREVVEEEKKKKKKDDDDLGIPPEIWELLKGAKKSEYEKIAFQYGITDLRGMLKRLKKAKVEVKKSAAFTKKLDPAYQVDRGNKIKLMVEISDPDLTLKWFKNGQEIKPSSKYVFENVGKKRILTINKCTLADDAAYEVAVKDEKCFTELFVKEPPVLIVTPLEDQQVFVGDRVEMAVEVSEEGAQVMWMKDGVELTREDSFKARYRFKKDGKRHILIFSDVVQEDRGRYQVITNGGQCEAELIVEEKQLEVLQDIADLTVKASEQAVFKCEVSDEKVTGKWYKNGVEVRPSKRITISHVGRFHKLVIDDVRPEDEGDYTFVPDGYALSLSAKLNFLEIKVEYVPKQEPPKIHLDCSGKTSENAIVVVAGNKLRLDVSITGEPPPVATWLKGDEVFTTTEGRTRIEKRVDCSSFVIESAQREDEGRYTIKVTNPVGEDVASIFLQVVDVPDPPEAVRITSVGEDWAILVWEPPMYDGGKPVTGYLVERKKKGSQRWMKLNFEVFTETTYESTKMIEGILYEMRVFAVNAIGVSQPSMNTKPFMPIAPTSEPLHLIVEDVTDTTTTLKWRPPNRIGAGGIDGYLVEYCLEGSEEWVPANTEPVERCGFTVKNLPTGARILFRVVGVNIAGRSEPATLAQPVTIREIAEPPKIRLPRHLRQTYIRKVGEQLNLVVPFQGKPRPQVVWTKGGAPLDTSRVHVRTSDFDTVFFVRQAARSDSGEYELSVQIENMKDTATIRIRVVEKAGPPINVMVKEVWGTNALVEWQAPKDDGNSEIMGYFVQKADKKTMEWFNVYERNRHTSCTVSDLIVGNEYYFRVYTENICGLSDSPGVSKNTARILKTGITFKPFEYKEHDFRMAPKFLTPLIDRVVVAGYSAALNCAVRGHPKPKVVWMKNKMEIREDPKFLITNYQGVLTLNIRRPSPFDAGTYTCRAVNELGEALAECKLEVRVPQ

SEQ ID NO: 54566 - protein, 1141 aa, Homo sapiens
MPEPTKKEENEVPAPAPPPEEPSKEKEAGTTPAKDWTLVETPPGEEQAKQNANSQLSILFIEKPQGGTVKVGEDITFIAKVKAEDLLRKPTIKWFKGKWMDLASKAGKHLQLKETFERHSRVYTFEMQIIKAKDNFAGNYRCEVTYKDKFDSCSFDLEVHESTGTTPNIDIRSAFKRSGEGQEDAGELDFSGLLKRREVKQQEEEPQVDVWELLKNAKPSEYEKIAFQYGITDLRGMLKRLKRMRREEKKSAAFAKILDPAYQVDKGGRVRFVVELADPKLEVKWYKNGQEIRPSTKYIFEHKGCQRILFINNCQMTDDSEYYVTAGDEKCSTELFVREPPIMVTKQLEDTTAYCGERVELECEVSEDDANVKWFKNGEEIIPGPKSRYRIRVEGKKHILIIEGATKADAAEYSVMTTGGQSSAKLSVDLKPLKILTPLTDQTVNLGKEICLKCEISENIPGKWTKNGLPVQESDRLKVVHKGRIHKLVIANALTEDEGDYVFAPDAYNVTLPAKVHVIDPPKIILDGLDADNTVTVIAGNKLRLEIPISGEPPPKAMWSRGDKAIMEGSGRIRTESYPDSSTLVIDIAERDDSGVYHINLKNEAGEAHASIKVKVVDFPDPPVAPTVTEVGDDWCIMNWEPPAYDGGSPILGYFIERKKKQSSRWMRLNFDLCKETTFEPKKMIEGVAYEVRIFAVNAIGISKPSMPSRPFVPLAVTSPPTLLTVDSVTDTTVTMRWRPPDHIGAAGLDGYVLEYCFEGSTSAKQSDENGEAAYDLPAEDWIVANKDLIDKTKFTITGLPTDAKIFVRVKAVNAAGASEPKYYSQPILVKEIIEPPKIRIPRHLKQTYIRRVGEAVNLVIPFQGKPRPELTWKKDGAEIDKNQINIRNSETDTIIFIRKAERSHSGKYDLQVKVDKFVETASIDIQIIDRPGPPQIVKIEDVWGENVALTWTPPKDDGNAAITGYTIQKADKKSMEWFTVIEHYHRTSATITELVIGNEYYFRVFSENMCGLSEDATMTKESAVIARDGKIYKNPVYEDFDFSEAPMFTQPLVNTYAIAGYNATLNCSVRGNPKPKITWMKNKVAIVDDPRYRMFSNQGVCTLEIRKPSPYDGGTYCCKAVNDLGTVEIECKLEVKVIAQ

SEQ ID NO: 54567 - protein, 1171 aa, Homo sapiens
MPEPTKKEENEVPAPAPPPEEPSKEKEAGTTPAKDEEEVSPPSALPPGLGSRALERKDSDWTLVETPPGEEQAKQNANSQLSILFIEKPQGGTVKVGEDITFIAKVKAEDLLRKPTIKWFKGKWMDLASKAGKHLQLKETFERHSRVYTFEMQIIKAKDNFAGNYRCEVTYKDKFDSCSFDLEVHESTGTTPNIDIRSAFKRSGEGQEDAGELDFSGLLKRREVKQQEEEPQVDVWELLKNAKPSEYEKIAFQYGITDLRGMLKRLKRMRREEKKSAAFAKILDPAYQVDKGGRVRFVVELADPKLEVKWYKNGQEIRPSTKYIFEHKGCQRILFINNCQMTDDSEYYVTAGDEKCSTELFVREPPIMVTKQLEDTTAYCGERVELECEVSEDDANVKWFKNGEEIIPGPKSRYRIRVEGKKHILIIEGATKADAAEYSVMTTGGQSSAKLSVDLKPLKILTPLTDQTVNLGKEICLKCEISENIPGKWTKNGLPVQESDRLKVVHKGRIHKLVIANALTEDEGDYVFAPDAYNVTLPAKVHVIDPPKIILDGLDADNTVTVIAGNKLRLEIPISGEPPPKAMWSRGDKAIMEGSGRIRTESYPDSSTLVIDIAERDDSGVYHINLKNEAGEAHASIKVKVVDFPDPPVAPTVTEVGDDWCIMNWEPPAYDGGSPILGYFIERKKKQSSRWMRLNFDLCKETTFEPKKMIEGVAYEVRIFAVNAIGISKPSMPSRPFVPLAVTSPPTLLTVDSVTDTTVTMRWRPPDHIGAAGLDGYVLEYCFEGTEDWIVANKDLIDKTKFTITGLPTDAKIFVRVKAVNAAGASEPKYYSQPILVKEIIEPPKIRIPRHLKQTYIRRVGEAVNLVIPFQGKPRPELTWKKDGAEIDKNQINIRNSETDTIIFIRKAERSHSGKYDLQVKVDKFVETASIDIQIIDRPGPPQIVKIEDVWGENVALTWTPPKDDGNAAITGYTIQKADKKSMEWFTVIEHYHRTSATITELVIGNEYYFRVFSENMCGLSEDATMTKESAVIARDGKIYKNPVYEDFDFSEAPMFTQPLVNTYAIAGYNATLNCSVRGNPKPKITWMKNKVAIVDDPRYRMFSNQGVCTLEIRKPSPYDGGTYCCKAVNDLGTVEIECKLEVKVIYQGVNTPGQPVFLEGQQQSLHNKDF

SEQ ID NO: 54568 - protein, 1148 aa, Homo sapiens
MPEPTKKEENEVPAPAPPPEEPSKEKEAGTTPAKDEEEVSPPSALPPGLGSRALERKDSDWTLVETPPGEEQAKQNANSQLSILFIEKPQGGTVKVGEDITFIAKVKAEDLLRKPTIKWFKGKWMDLASKAGKHLQLKETFERHSRVYTFEMQIIKAKDNFAGNYRCEVTYKDKFDSCSFDLEVHESTGTTPNIDIRSAFKRSGEGQEDAGELDFSGLLKRREVKQQEEEPQVDVWELLKNAKPSEYEKIAFQYGITDLRGMLKRLKRMRREEKKSAAFAKILDPAYQVDKGGRVRFVVELADPKLEVKWYKNGQEIRPSTKYIFEHKGCQRILFINNCQMTDDSEYYVTAGDEKCSTELFVREPPIMVTKQLEDTTAYCGERVELECEVSEDDANVKWFKNGEEIIPGPKSRYRIRVEGKKHILIIEGATKADAAEYSVMTTGGQSSAKLSVDLKPLKILTPLTDQTVNLGKEICLKCEISENIPGKWTKNGLPVQESDRLKVVHKGRIHKLVIANALTEDEGDYVFAPDAYNVTLPAKVHVIDPPKIILDGLDADNTVTVIAGNKLRLEIPISGEPPPKAMWSRGDKAIMEGSGRIRTESYPDSSTLVIDIAERDDSGVYHINLKNEAGEAHASIKVKVVDFPDPPVAPTVTEVGDDWCIMNWEPPAYDGGSPILGYFIERKKKQSSRWMRLNFDLCKETTFEPKKMIEGVAYEVRIFAVNAIGISKPSMPSRPFVPLAVTSPPTLLTVDSVTDTTVTMRWRPPDHIGAAGLDGYVLEYCFEGTEDWIVANKDLIDKTKFTITGLPTDAKIFVRVKAVNAAGASEPKYYSQPILVKEIIEPPKIRIPRHLKQTYIRRVGEAVNLVIPFQGKPRPELTWKKDGAEIDKNQINIRNSETDTIIFIRKAERSHSGKYDLQVKVDKFVETASIDIQIIDRPGPPQIVKIEDVWGENVALTWTPPKDDGNAAITGYTIQKADKKSMEWFTVIEHYHRTSATITELVIGNEYYFRVFSENMCGLSEDATMTKESAVIARDGKIYKNPVYEDFDFSEAPMFTQPLVNTYAIAGYNATLNCSVRGNPKPKITWMKNKVAIVDDPRYRMFSNQGVCTLEIRKPSPYDGGTYCCKAVNDLGTVEIECKLEVKVIAQ

SEQ ID NO: 54569 - protein, 1164 aa, Homo sapiens
MPEPTKKEENEVPAPAPPPEEPSKEKEAGTTPAKDWTLVETPPGEEQAKQNANSQLSILFIEKPQGGTVKVGEDITFIAKVKAEDLLRKPTIKWFKGKWMDLASKAGKHLQLKETFERHSRVYTFEMQIIKAKDNFAGNYRCEVTYKDKFDSCSFDLEVHESTGTTPNIDIRSAFKRSGEGQEDAGELDFSGLLKRREVKQQEEEPQVDVWELLKNAKPSEYEKIAFQYGITDLRGMLKRLKRMRREEKKSAAFAKILDPAYQVDKGGRVRFVVELADPKLEVKWYKNGQEIRPSTKYIFEHKGCQRILFINNCQMTDDSEYYVTAGDEKCSTELFVREPPIMVTKQLEDTTAYCGERVELECEVSEDDANVKWFKNGEEIIPGPKSRYRIRVEGKKHILIIEGATKADAAEYSVMTTGGQSSAKLSVDLKPLKILTPLTDQTVNLGKEICLKCEISENIPGKWTKNGLPVQESDRLKVVHKGRIHKLVIANALTEDEGDYVFAPDAYNVTLPAKVHVIDPPKIILDGLDADNTVTVIAGNKLRLEIPISGEPPPKAMWSRGDKAIMEGSGRIRTESYPDSSTLVIDIAERDDSGVYHINLKNEAGEAHASIKVKVVDFPDPPVAPTVTEVGDDWCIMNWEPPAYDGGSPILGYFIERKKKQSSRWMRLNFDLCKETTFEPKKMIEGVAYEVRIFAVNAIGISKPSMPSRPFVPLAVTSPPTLLTVDSVTDTTVTMRWRPPDHIGAAGLDGYVLEYCFEGSTSAKQSDENGEAAYDLPAEDWIVANKDLIDKTKFTITGLPTDAKIFVRVKAVNAAGASEPKYYSQPILVKEIIEPPKIRIPRHLKQTYIRRVGEAVNLVIPFQGKPRPELTWKKDGAEIDKNQINIRNSETDTIIFIRKAERSHSGKYDLQVKVDKFVETASIDIQIIDRPGPPQIVKIEDVWGENVALTWTPPKDDGNAAITGYTIQKADKKSMEWFTVIEHYHRTSATITELVIGNEYYFRVFSENMCGLSEDATMTKESAVIARDGKIYKNPVYEDFDFSEAPMFTQPLVNTYAIAGYNATLNCSVRGNPKPKITWMKNKVAIVDDPRYRMFSNQGVCTLEIRKPSPYDGGTYCCKAVNDLGTVEIECKLEVKVIYQGVNTPGQPVFLEGQQQSLHNKDF

SEQ ID NO: 54570 - protein, 782 aa, Homo sapiens
MPEPTKKEENEVPAPAPPPEEPSKEKEAGTTPAKDEEEVSPPSALPPGLGSRALERKDSDWTLVETPPGEEQAKQNANSQLSILFIEKPQGGTVKVGEDITFIAKVKAEDLLRKPTIKWFKGKWMDLASKAGKHLQLKETFERHSRVYTFEMQIIKAKDNFAGNYRCEVTYKDKFDSCSFDLEVHESTGTTPNIDIRSAFKRSGEGQEDAGELDFSGLLKRREVKQQEEEPQVDVWELLKNAKPSEYEKIAFQYGITDLRGMLKRLKRMRREEKKSAAFAKILDPAYQVDKGGRVRFVVELADPKLEVKWYKNGQEIRPSTKYIFEHKGCQRILFINNCQMTDDSEYYVTAGDEKCSTELFVREPPIMVTKQLEDTTAYCGERVELECEVSEDDANVKWFKNGEEIIPGPKSRYRIRVEGKKHILIIEGATKADAAEYSVMTTGGQSSAKLSVDLKPLKILTPLTDQTVNLGKEICLKCEISENIPGKWTKNGLPVQESDRLKVVHKGRIHKLVIANALTEDEGDYVFAPDAYNVTLPAKVHVIDPPKIILDGLDADNTVTVIAGNKLRLEIPISGEPPPKAMWSRGDKAIMEGSGRIRTESYPDSSTLVIDIAERDDSGVYHINLKNEAGEAHASIKVKVVDFPDPPVAPTVTEVGDDWCIMNWEPPAYDGGSPILGYFIERKKKQSSRWMRLNFDLCKETTFEPKKMIEGVAYEVRIFAVNAIGISKPSMPSRPFVPLAVTSPPTLLTVDSVTDTTVTMRWRPRPHWCSRFRWLCARVLL

SEQ ID NO: 54571 - protein, 1141 aa, Homo sapiens; identical to SEQ ID NO: 54566

SEQ ID NO: 54572 - protein, 1123 aa, Homo sapiens
MPEPTKKEENEVPAPAPPPEEPSKEKEAGTTPAKDWTLVETPPGEEQAKQNANSQLSILFIEKPQGGTVKVGEDITFIAKVKAEDLLRKPTIKWFKGKWMDLASKAGKHLQLKETFERHSRVYTFEMQIIKAKDNFAGNYRCEVTYKDKFDSCSFDLEVHESTGTTPNIDIRSAFKRSGEGQEDAGELDFSGLLKRREVKQQEEEPQVDVWELLKNAKPSEYEKIAFQYGITDLRGMLKRLKRMRREEKKSAAFAKILDPAYQVDKGGRVRFVVELADPKLEVKWYKNGQEIRPSTKYIFEHKGCQRILFINNCQMTDDSEYYVTAGDEKCSTELFVREPPIMVTKQLEDTTAYCGERVELECEVSEDDANVKWFKNGEEIIPGPKSRYRIRVEGKKHILIIEGATKADAAEYSVMTTGGQSSAKLSVDLKPLKILTPLTDQTVNLGKEICLKCEISENIPGKWTKNGLPVQESDRLKVVHKGRIHKLVIANALTEDEGDYVFAPDAYNVTLPAKVHVIDPPKIILDGLDADNTVTVIAGNKLRLEIPISGEPPPKAMWSRGDKAIMEGSGRIRTESYPDSSTLVIDIAERDDSGVYHINLKNEAGEAHASIKVKVVDFPDPPVAPTVTEVGDDWCIMNWEPPAYDGGSPILGYFIERKKKQSSRWMRLNFDLCKETTFEPKKMIEGVAYEVRIFAVNAIGISKPSMPSRPFVPLAVTSPPTLLTVDSVTDTTVTMRWRPPDHIGAAGLDGYVLEYCFEGTEDWIVANKDLIDKTKFTITGLPTDAKIFVRVKAVNAAGASEPKYYSQPILVKEIIEPPKIRIPRHLKQTYIRRVGEAVNLVIPFQGKPRPELTWKKDGAEIDKNQINIRNSETDTIIFIRKAERSHSGKYDLQVKVDKFVETASIDIQIIDRPGPPQIVKIEDVWGENVALTWTPPKDDGNAAITGYTIQKADKKSMEWFTVIEHYHRTSATITELVIGNEYYFRVFSENMCGLSEDATMTKESAVIARDGKIYKNPVYEDFDFSEAPMFTQPLVNTYAIAGYNATLNCSVRGNPKPKITWMKNKVAIVDDPRYRMFSNQGVCTLEIRKPSPYDGGTYCCKAVNDLGTVEIECKLEVKVIAQ

SEQ ID NO: 54573 - protein, 477 aa, Homo sapiens
MMEKNTSEGPACSPEETASESAKVPTAEPPGEVAVSESTREEQVPKPQAPAPQAPTASTATKPAPPSEDVPSAPLLLTLDDVSSSSVTVSWEPPERLGRLGLQGYVLELCREGASEWVPVSARPMMVTQQTVRNLALGDKFLLRVSAVSSAGAGPPAMLDQPIHIRENIEAPKIRVPRHLRQTYIRQVGETVNLQIPFQGKPKPQATWTHNGHALDSQRVSMRTGDQDSILFIRSAQRSDSGRYELTVRVEDLEAKAVIDILVIEKPGPPSSIRLLDVWGCNAALQWTPPQDTGNTELLGYMVQKADKKTGQWFTVLERYHPTTCTISDLIIGNSYSFRVFSENLCGLSTSATVTKELAHIQKADIAAKPKGFIERDFSEAPSFTQPLADHTSTPGYSTQLFCSVRASPKPKIIWMKNKMEIQGNPKYRALSEQGVCTLEIRKPSPFDSGVYTCKAINVLGEASVDCRLEVKASAAH

SEQ ID NO: 54574 - protein, 1938 aa, Homo sapiens
MSSDAEMAIFGEAAPYLRKPEKERIEAQNRPFDSKKACFVADNKEMYVKGMIQTRENDKVIVKTLDDRMLTLNNDQVFPMNPPKFDKIEDMAMMTHLHEPAVLYNLKERYAAWMIYTYSGLFCVTVNPYKWLPVYKPEVVAAYRGKKRQEAPPHIFSISDNAYQFMLTDRDNQSILITGESGAGKTVNTKRVIQYFATIAVTGDKKKETQPGKMQGTLEDQIIQANPLLEAFGNAKTVRNDNSSRFGKFIRIHFGATGKLASADIETYLLEKSRVTFQLSSERSYHIFYQIMSNKKPELIDLLLISTNPFDFPFVSQGEVTVASIDDSEELLATDNAIDILGFSSEEKVGIYKLTGAVMHYGNMKFKQKQREEQAEPDGTEVADKAGYLMGLNSAEMLKGLCCPRVKVGNEYVTKGQNVQQVTNSVGALAKAVYEKMFLWMVTRINQQLDTKQPRQYFIGVLDIAGFEIFDFNSLEQLCINFTNEKLQQFFNHHMFVLEQEEYKKEGIEWEFIDFGMDLAACIELIEKPMGIFSILEEECMFPKATDTSFKNKLYDQHLGKSNNFQKPKPAKGKAEAHFSLVHYAGTVDYNIAGWLDKNKDPLNETVVGLYQKSSLKLLSFLFSNYAGAETGDSGGSKKGGKKKGSSFQTVSAVFRENLNKLMTNLRSTHPHFVRCLIPNETKTPGVMDHYLVMHQLRCNGVLEGIRICRKGFPSRILYADFKQRYRILNASAIPEGQFIDSKNASEKLLNSIDVDREQFRFGNTKVFFKAGLLGLLEEMRDEKLVTLMTSTQAVCRGYLMRVEFKKMMERRDSIFCIQYNIRSFMNVKHWPWMNLFFKIKPLLKSAEAEKEMATMKEDFERTKEELARSEARRKELEEKMVSLLQEKNDLQLQVQSETENLMDAEERCEGLIKSKILLEAKVKELTERLEEEEEMNSELVAKKRNLEDKCSSLKRDIDDLELTLTKVEKEKHATENKVKNLSEEMTALEENISKLTKEKKSLQEAHQQTLDDLQVEEDKVNGLIKINAKLEQQTDDLEGSLEQEKKLRADLERAKRKLEGDLKMSQESIMDLENDKQQIEEKLKKKEFELSQLQAKIDDEQVHSLQFQKKIKELQARIEELEEEIEAEHTLRAKIEKQRSDLARELEEISERLEEASGATSAQIEMNKKREAEFQKMRRDLEEATLQHEATAATLRKKQADSVAELGEQIDNLQRVKQKLEKEKSELKMEIDDMASNIEALSKSKSNIERTCRTVEDQFSEIKAKDEQQTQLIHDLNMQKARLQTQNGELSHRVEEKESLISQLTKSKQALTQQLEELKRQMEEETKAKNAMAHALQSSRHDCDLLREQYEEEQEAKAELQRALSKANSEVAQWRTKYETDAIQRTEELEEAKKKLAQRLQEAEENTETANSKCASLEKTKQRLQGEVEDLMRDLERSHTACATLDKKQRNFDKVLAEWKQKLDESQAELEAAQKESRSLSTELFKMRNAYEEVVDQLETLRRENKNLQEEISDLTEQIAETGKNLQEAEKTKKLVEQEKSDLQVALEEVEGSLEHEESKILRVQLELSQVKSELDRKVIEKDEEIEQLKRNSQRAAEALQSVLDAEIRSRNDALRLKKKMEGDLNEMEIQLGHSNRQMAETQKHLRTVQGQLKDSQLHLDDALRSNEDLKEQLAIVERRNGLLLEELEEMKVALEQTERTRRLSEQELLDASDRVQLLHSQNTSLINTKKKLEADIAQCQAEVENSIQESRNAEEKAKKAITDAAMMAEELKKEQDTSAHLERMKKNLEQTVKDLQHRLDEAEQLALKGGKKQIQKLENRVRELENELDVEQKRGAEALKGAHKYERKVKEMTYQAEEDHKNILRLQDLVDKLQAKVKSYKRQAEEAEEQANTQLSRCRRVQHELEEAAERADIAESQVNKLRAKSRDVGSQKMEE

SEQ ID NO: 54575 - protein, 2036 aa, Homo sapiens
MAAVTMSVPGRKAPPRPGPVPEAAQPFLFTPRGPSAGGGPGSGTSPQVEWTARRLVWVPSELHGFEAAALRDEGEEEAEVELAESGRRLRLPRDQIQRMNPPKFSKAEDMAELTCLNEASVLHNLRERYYSGLIYTYSGLFCVVINPYKQLPIYTEAIVEMYRGKKRHEVPPHVYAVTEGAYRSMLQDREDQSILCTGESGAGKTENTKKVIQYLAHVASSPKGRKEPGVPASVSTVSYGELERQLLQANPILEAFGNAKTVKNDNSSRFGKFIRINFDVAGYIVGANIETYLLEKSRAIRQAKDECSFHIFYQLLGGAGEQLKADLLLEPCSHYRFLTNGPSSSPGQERELFQETLESLRVLGFSHEEIISMLRMVSAVLQFGNIALKRERNTDQATMPDNTAAQKLCRLLGLGVTDFSRALLTPRIKVGRDYVQKAQTKEQADFALEALAKATYERLFRWLVLRLNRALDRSPRQGASFLGILDIAGFEIFQLNSFEQLCINYTNEKLQQLFNHTMFVLEQEEYQREGIPWTFLDFGLDLQPCIDLIERPANPPGLLALLDEECWFPKATDKSFVEKVAQEQGGHPKFQRPRHLRDQADFSVLHYAGKVDYKANEWLMKNMDPLNDNVAALLHQSTDRLTAEIWKDEHGGFQQFSFLGSFPPSPPGSAERCSSAISPPGVEGIVGLEQVSSLGDGPPGGRPRRGMFRTVGQLYKESLSRLMATLSNTNPSFVRCIVPNHEKRAGKLEPRLVLDQLRCNGVLEGIRICRQGFPNRILFQEFRQRYEILTPNAIPKGFMDGKQACEKMIQALELDPNLYRVGQSKIFFRAGVLAQLEEERDLKVTDIIVSFQAAARGYLARRAFQKRQQQQSALRVMQRNCAAYLKLRHWQWWRLFTKVKPLLQVTRQDEVLQARAQELQKVQELQQQSAREVGELQGRVAQLEEERARLAEQLRAEAELCAEAEETRGRLAARKQELELVVSELEARVGEEEECSRQMQTEKKRLQQHIQELEAHLEAEEGARQKLQLEKVTTEAKMKKFEEDLLLLEDQNSKLSKERKLLEDRLAEFSSQAAEEEEKVKSLNKLRLKYEATIADMEDRLRKEEKGRQELEKLKRRLDGESSELQEQMVEQQQRAEELRAQLGRKEEELQAALARAEDEGGARAQLLKSLREAQAALAEAQEDLESERVARTKAEKQRRDLGEELEALRGELEDTLDSTNAQQELRSKREQEVTELKKTLEEETRIHEAAVQELRQRHGQALGELAEQLEQARRGKGAWEKTRLALEAEVSELRAELSSLQTARQEGEQRRRRLELQLQEVQGRAGDGERARAEAAEKLQRAQAELENVSGALNEAESKTIRLSKELSSTEAQLHDAQELLQEETRAKLALGSRVRAMEAEAAGLREQLEEEAAARERAGRELQTAQAQLSEWRRRQEEEAGALEAGEEARRRAAREAEALTQRLAEKTETVDRLERGRRRLQQELDDATMDLEQQRQLVSTLEKKQRKFDQLLAEEKAAVLRAVEERERAEAEGREREARALSLTRALEEEQEAREELERQNRALRAELEALLSSKDDVGKSVHELERACRVAEQAANDLRAQVTELEDELTAAEDAKLRLEVTVQALKTQHERDLQGRDEAGEERRRQLAKQLRDAEVERDEERKQRTLAVAARKKLEGELEELKAQMASAGQGKEEAVKQLRKMQAQMKELWREVEETRTSREEIFSQNRESEKRLKGLEAEVLRLQEELAASDRARRQAQQDRDEMADEVANGNLSKAAILEEKRQLEGRLGQLEEELEEEQSNSELLNDRYRKLLLQVESLTTELSAERSFSAKAESGRQQLERQIQELRGRLGEEDAGARARHKMTIAALESKLAQAEEQLEQETRERILSGKLVRRAEKRLKEVVLQVEEERRVADQLRDQLEKGNLRVKQLKRQLEEAEEEASRAQAGRRRLQRELEDVTESAESMNREVTTLRNRLRRGPLTFTTRTVRQVFRLEEGVASDEEAEEAQPGSGPSPEPEGSPPAHPQ

SEQ ID NO: 54576 - protein, 1940 aa, Homo sapiens
MSSDTEMEVFGIAAPFLRKSEKERIEAQNQPFDAKTYCFVVDSKEEYAKGKIKSSQDGKVTVETEDNRTLVVKPEDVYAMNPPKFDRIEDMAMLTHLNEPAVLYNLKDRYTSWMIYTYSGLFCVTVNPYKWLPVYNPEVVEGYRGKKRQEAPPHIFSISDNAYQFMLTDRENQSILITGESGAGKTVNTKRVIQYFATIAATGDLAKKKDSKMKGTLEDQIISANPLLEAFGNAKTVRNDNSSRFGKFIRIHFGTTGKLASADIETYLLEKSRVTFQLKAERSYHIFYQILSNKKPELIELLLITTNPYDYPFISQGEILVASIDDAEELLATDSAIDILGFTPEEKSGLYKLTGAVMHYGNMKFKQKQREEQAEPDGTEVADKTAYLMGLNSSDLLKALCFPRVKVGNEYVTKGQTVDQVHHAVNALSKSVYEKLFLWMVTRINQQLDTKLPRQHFIGVLDIAGFEIFEYNSLEQLCINFTNEKLQQFFNHHMFVLEQEEYKKEGIEWTFIDFGMDLAACIELIEKPMGIFSILEEECMFPKATDTSFKNKLYDQHLGKSNNFQKPKVVKGRAEAHFSLIHYAGTVDYSVSGWLEKNKDPLNETVVGLYQKSSNRLLAHLYATFATADADSGKKKVAKKKGSSFQTVSALFRENLNKLMSNLRTTHPHFVRCIIPNETKTPGAMEHSLVLHQLRCNGVLEGIRICRKGFPNRILYGDFKQRYRVLNASAIPEGQFIDSKKACEKLLASIDIDHTQYKFGHTKVFFKAGLLGTLEEMRDDRLAKLITRTQAVCRGFLMRVEFQKMVQRRESIFCIQYNIRSFMNVKHWPWMKLFFKIKPLLKSAETEKEMATMKEEFQKTKDELAKSEAKRKELEEKLVTLVQEKNDLQLQVQAESENLLDAEERCDQLIKAKFQLEAKIKEVTERAEDEEEINAELTAKKRKLEDECSELKKDIDDLELTLAKVEKEKHATENKVKNLTEELSGLDETIAKLTREKKALQEAHQQALDDLQAEEDKVNSLNKTKSKLEQQVEDLESSLEQEKKLRVDLERNKRKLEGDLKLAQESILDLENDKQQLDERLKKKDFEYCQLQSKVEDEQTLGLQFQKKIKELQARIEELEEEIEAERATRAKTEKQRSDYARELEELSERLEEAGGVTSTQIELNKKREAEFLKLRRDLEEATLQHEAMVAALRKKHADSVAELGEQIDNLQRVKQKLEKEKSEFKLEIDDLSSSMESVSKSKANLEKICRTLEDQLSEARGKNEEIQRSLSELTTQKSRLQTEAGELSRQLEEKESIVSQLSRSKQAFTQQTEELKRQLEEENKAKNALAHALQSSRHDCDLLREQYEEEQEGKAELQRALSKANSEVAQWRTKYETDAIQRTEELEEAKKKLAQRLQDSEEQVEAVNAKCASLEKTKQRLQGEVEDLMVDVERANSLAAALDKKQRNFDKVLAEWKTKCEESQAELEASLKESRSLSTELFKLKNAYEEALDQLETVKRENKNLEQEIADLTEQIAENGKTIHELEKSRKQIELEKADIQLALEEAEAALEHEEAKILRIQLELTQVKSEIDRKIAEKDEEIEQLKRNYQRTVETMQSALDAEVRSRNEAIRLKKKMEGDLNEIEIQLSHANRQAAETLKHLRSVQGQLKDTQLHLDDALRGQEDLKEQLAIVERRANLLQAEVEELRATLEQTERARKLAEQELLDSNERVQLLHTQNTSLIHTKKKLETDLMQLQSEVEDASRDARNAEEKAKKAITDAAMMAEELKKEQDTSAHLERMKKNLEQTVKDLQHRLDEAEQLALKGGKKQIQKLETRIRELEFELEGEQKKNTESVKGLRKYERRVKELTYQSEEDRKNVLRLQDLVDKLQVKVKSYKRQAEEADEQANAHLTKFRKAQHELEEAEERADIAESQVNKLRAKTRDFTSSRMVVHESEE

SEQ ID NO: 54577 - protein, 1043 aa, Homo sapiens
MPLLEGSVGVEDLVLLEPLVEESLLKNLQLRYENKEIYTYIGNVVISVNPYQQLPIYGPEFIAKYQDYTFYELKPHIYALANVAYQSLRDRDRDQCILITGESGSGKTEASKLVMSYVAAVCGKGEQVNSVKEQLLQSNPVLEAFGNAKTIRNNNSSRFGKYMDIEFDFKGSPLGGVITNYLLEKSRLVKQLKGERNFHIFYQLLAGADEQLLKALKLERDTTGYAYLNHEVSRVDGMDDASSFRAVQSAMAVIGFSEEEIRQVLEVTSMVLKLGNVLVADEFQASGIPASGIRDGRGVREIGEMVGLNSEEVERALCSRTMETAKEKVVTALNVMQAQYARDALAKNIYSRLFDWIVNRINESIKVGIGEKKKVMGVLDIYGFEILEDNSFEQFVINYCNEKLQQVFIEMTLKEEQEEYKREGIPWTKVDYFDNGIICKLIEHNQRGILAMLDEECLRPGVVSDSTFLAKLNQLFSKHGHYESKVTQNAQRQYDHTMGLSCFRICHYAGKVTYNVTSFIDKNNDLLFRDLLQAMWKAQHPLLRSLFPEGNPKQASLKRPPTAGAQFKSSVAILMKNLYSKSPNYIRCIKPNEHQQRGQFSSDLVATQARYLGLLENVRVRRAGYAHRQGYGPFLERYRLLSRSTWPHWNGGDREGVEKVLGELSMSSGELAFGKTKIFIRSPKTLFYLEEQRRLRLQQLATLIQKIYRGWRCRTHYQLMRKSQILISSWFRGNMQKKCYGKIKASVLLIQAFVRGWKARKNYRKYFRSEAALTLADFIYKSMVQKFLLGLKNNLPSTNVLDKTWPAAPYKCLSTANQELQQLFYQWKCKRFRDQLSPKQVEILREKLCASELFKGKKASYPQSVPIPFCGDYIGLQGNPKLQKLKGGEEGPVLMAEAVKKVNRGNGKTSSRILLLTKGHVILTDTKKSQAKIVIGLDNVAGVSVTSLKDGLFSLHLSEMSSVGSKGDFLLVSEHVIELLTKMYRAVLDATQRQLTVTVTEKFSVRFKENSVAVKVVQGPAGGDNSKLRYKKKGSHCLEVTVQ

SEQ ID NO: 54578 - protein, 96 aa, Homo sapiens
MPLLEGSVGVEDLVLLEPLVEESLLKNLQLRYENKEIYTYIGNVVISVNPYQQLPIYGPEFIAKYQDYTFYELKPHIYALANVAYQSLRDRDRDQC

SEQ ID NO: 54579 - protein, 1043 aa, Homo sapiens; identical to SEQ ID NO: 54577

SEQ ID NO: 54580 - protein, 881 aa, Homo sapiens
MDIEFDFKGSPLGGVITNYLLEKSRLVKQLKGERNFHIFYQLLAGADEQLLKALKLERDTTGYAYLNHEVSRVDGMDDASSFRAVQSAMAVIGFSEEEIRQVLEVTSMVLKLGNVLVADEFQASGIPASGIRDGRGVREIGEMVGLNSEEVERALCSRTMETAKEKVVTALNVMQAQYARDALAKNIYSRLFDWIVNRINESIKVGIGEKKKVMGVLDIYGFEILEDNSFEQFVINYCNEKLQQVFIEMTLKEEQEEYKREGIPWTKVDYFDNGIICKLIEHNQRGILAMLDEECLRPGVVSDSTFLAKLNQLFSKHGHYESKVTQNAQRQYDHTMGLSCFRICHYAGKVTYNVTSFIDKNNDLLFRDLLQAMWKAQHPLLRSLFPEGNPKQASLKRPPTAGAQFKSSVAILMKNLYSKSPNYIRCIKPNEHQQRGQFSSDLVATQARYLGLLENVRVRRAGYAHRQGYGPFLERYRLLSRSTWPHWNGGDREGVEKVLGELSMSSGELAFGKTKIFIRSPKTLFYLEEQRRLRLQQLATLIQKIYRGWRCRTHYQLMRKSQILISSWFRGNMQKKCYGKIKASVLLIQAFVRGWKARKNYRKYFRSEAALTLADFIYKSMVQKFLLGLKNNLPSTNVLDKTWPAAPYKCLSTANQELQQLFYQWKCKRFRDQLSPKQVEILREKLCASELFKGKKASYPQSVPIPFCGDYIGLQGNPKLQKLKGGEEGPVLMAEAVKKVNRGNGKTSSRILLLTKGHVILTDTKKSQAKIVIGLDNVAGVSVTSLKDGLFSLHLSEMSSVGSKGDFLLVSEHVIELLTKMYRAVLDATQRQLTVTVTEKFSVRFKENSVAVKVVQGPAGGDNSKLRYKKKGSHCLEVTVQ

SEQ ID NO: 54581 - protein, 1136 aa, Homo sapiens
MAKMEVKTSLLDNMIGVGDMVLLEPLNEETFINNLKKRFDHSEIYTYIGSVVISVNPYRSLPIYSPEKVEEYRNRNFYELSPHIFALSDEAYRSLRDQDKDQCILITGESGAGKTEASKLVMSYVAAVCGKGAEVNQVKEQLLQSNPVLEAFGNAKTVRNDNSSRFGKYMDIEFDFKGDPLGGVISNYLLEKSRVVKQPRGERNFHVFYQLLSGASEELLNKLKLERDFSRYNYLSLDSAKVNGVDDAANFRTVRNAMQIVGFMDHEAESVLAVVAAVLKLGNIEFKPESRVNGLDESKIKDKNELKEICELTGIDQSVLERAFSFRTVEAKQEKVSTTLNVAQAYYARDALAKNLYSRLFSWLVNRINESIKAQTKVRKKVMGVLDIYGFEIFEDNSFEQFIINYCNEKLQQIFIELTLKEEQEEYIREDIEWTHIDYFNNAIICDLIENNTNGILAMLDEECLRPGTVTDETFLEKLNQVCATHQHFESRMSKCSRFLNDTSLPHSCFRIQHYAGKVLYQVEGFVDKNNDLLYRDLSQAMWKASHALIKSLFPEGNPAKINLKRPPTAGSQFKASVATLMKNLQTKNPNYIRCIKPNDKKAAHIFNEALVCHQIRYLGLLENVRVRRAGYAFRQAYEPCLERYKMLCKQTWPHWKGPARSGVEVLFNELEIPVEEYSFGRSKIFIRNPRTLFKLEDLRKQRLEDLATLIQKIYRGWKCRTHFLLMKKSQIVIAAWYRRYAQQKRYQQTKSSALVIQSYIRGWKARKILRELKHQKRCKEAVTTIAAYWHGTQARRELRRLKEEARNKHAIAVIWAYWLGSKARRELKRLKEEARRKHAVAVIWAYWLGLKVRREYRKFFRANAGKKIYEFTLQRIVQKYFLEMKNKMPSLSPIDKNWPSRPYLFLDSTHKELKRIFHLWRCKKYRDQFTDQQKLIYEEKLEASELFKDKKALYPSSVGQPFQGAYLEINKNPKYKKLKDAIEEKIIIAEVVNKINRANGKSTSRIFLLTNNNLLLADQKSGQIKSEVPLVDVTKVSMSSQNDGFFAVHLKEGSEAASKGDFLFSSDHLIEMATKLYRTTLSQTKQKLNIEISDEFLVQFRQDKVCVKFIQGNQKNGSVPTCKRKNNRLLEVAVP

SEQ ID NO: 54582 - protein, 1078 aa, Homo sapiens
MAKMEVKTSLLDNMIGVGDMVLLEPLNEETFINNLKKRFDHSEIYTYIGSVVISVNPYRSLPIYSPEKVEEYRNRNFYELSPHIFALSDEAYRSLRDQDKDQCILITGESGAGKTEASKLVMSYVAAVCGKGAEVNQVKEQLLQSNPVLEAFGNAKTVRNDNSSRFGKYMDIEFDFKGDPLGGVISNYLLEKSRVVKQPRGERNFHVFYQLLSGASEELLNKLKLERDFSRYNYLSLDSAKVNGVDDAANFRTVRNAMQIVGFMDHEAESVLAVVAAVLKLGNIEFKPESRVNGLDESKIKDKNELKEICELTGIDQSVLERAFSFRTVEAKQEKVSTTLNVAQAYYARDALAKNLYSRLFSWLVNRINESIKAQTKVRKKVMGVLDIYGFEIFEDNSFEQFIINYCNEKLQQIFIELTLKEEQEEYIREDIEWTHIDYFNNAIICDLIENNTNGILAMLDEECLRPGTVTDETFLEKLNQVCATHQHFESRMSKCSRFLNDTSLPHSCFRIQHYAGKVLYQVEGFVDKNNDLLYRDLSQAMWKASHALIKSLFPEGNPAKINLKRPPTAGSQFKASVATLMKNLQTKNPNYIRCIKPNDKKAAHIFNEALVCHQIRYLGLLENVRVRRAGYAFRQAYEPCLERYKMLCKQTWPHWKGPARSGVEVLFNELEIPVEEYSFGRSKIFIRNPRTLFKLEDLRKQRLEDLATLIQKIYRGWKCRTHFLLMKKSQIVIAAWYRRYAQQKRYQQTKSSALVIQSYIRGWKARKILRELKHQKRCKEAVTTIAAYWHGTQVRREYRKFFRANAGKKIYEFTLQRIVQKYFLEMKNKMPSLSPIDKNWPSRPYLFLDSTHKELKRIFHLWRCKKYRDQFTDQQKLIYEEKLEASELFKDKKALYPSSVGQPFQGAYLEINKNPKYKKLKDAIEEKIIIAEVVNKINRANGKSTSRIFLLTNNNLLLADQKSGQIKSEVPLVDVTKVSMSSQNDGFFAVHLKEGSEAASKGDFLFSSDHLIEMATKLYRTTLSQTKQKLNIEISDEFLVQFRQDKVCVKFIQGNQKNGSVPTCKRKNNRLLEVAVP

SEQ ID NO: 54583 - protein, 1107 aa, Homo sapiens
MAKMEVKTSLLDNMIGVGDMVLLEPLNEETFINNLKKRFDHSEIYTYIGSVVISVNPYRSLPIYSPEKVEEYRNRNFYELSPHIFALSDEAYRSLRDQDKDQCILITGESGAGKTEASKLVMSYVAAVCGKGAEVNQVKEQLLQSNPVLEAFGNAKTVRNDNSSRFGKYMDIEFDFKGDPLGGVISNYLLEKSRVVKQPRGERNFHVFYQLLSGASEELLNKLKLERDFSRYNYLSLDSAKVNGVDDAANFRTVRNAMQIVGFMDHEAESVLAVVAAVLKLGNIEFKPESRVNGLDESKIKDKNELKEICELTGIDQSVLERAFSFRTVEAKQEKVSTTLNVAQAYYARDALAKNLYSRLFSWLVNRINESIKAQTKVRKKVMGVLDIYGFEIFEDNSFEQFIINYCNEKLQQIFIELTLKEEQEEYIREDIEWTHIDYFNNAIICDLIENNTNGILAMLDEECLRPGTVTDETFLEKLNQVCATHQHFESRMSKCSRFLNDTSLPHSCFRIQHYAGKVLYQVEGFVDKNNDLLYRDLSQAMWKASHALIKSLFPEGNPAKINLKRPPTAGSQFKASVATLMKNLQTKNPNYIRCIKPNDKKAAHIFNEALVCHQIRYLGLLENVRVRRAGYAFRQAYEPCLERYKMLCKQTWPHWKGPARSGVEVLFNELEIPVEEYSFGRSKIFIRNPRTLFKLEDLRKQRLEDLATLIQKIYRGWKCRTHFLLMKKSQIVIAAWYRRYAQQKRYQQTKSSALVIQSYIRGWKARKILRELKHQKRCKEAVTTIAAYWHGTQARRELKRLKEEARRKHAVAVIWAYWLGLKVRREYRKFFRANAGKKIYEFTLQRIVQKYFLEMKNKMPSLSPIDKNWPSRPYLFLDSTHKELKRIFHLWRCKKYRDQFTDQQKLIYEEKLEASELFKDKKALYPSSVGQPFQGAYLEINKNPKYKKLKDAIEEKIIIAEVVNKINRANGKSTSRIFLLTNNNLLLADQKSGQIKSEVPLVDVTKVSMSSQNDGFFAVHLKEGSEAASKGDFLFSSDHLIEMATKLYRTTLSQTKQKLNIEISDEFLVQFRQDKVCVKFIQGNQKNGSVPTCKRKNNRLLEVAVP

SEQ ID NO: 54584 - protein, 1136 aa, Homo sapiens; identical to SEQ ID NO: 54581

SEQ ID NO: 54585 - protein, 163 aa, Homo sapiens
MAKMEVKTSLLDNMIGVGDMVLLEPLNEETFINNLKKRFDHSEIYTYIGSVVISVNPYRSLPIYSPEKVEEYRNRNFYELSPHIFALSDEAYRSLRDQDKDQCILITGESGAGKTEASKLVMSYVAAVCGKGAEVNQVKEQLLQSNPVLEAFGNAKTVRNDNS

SEQ ID NO: 54586 - protein, 83 aa, Homo sapiens
MAKMEVKTSLLDNMIGVGDMVLLEPLNEETFINNLKKRFDHSEIYTYIGSVVISVNPYRSLPIYSPEKVEEYRNRNFYELSPH

SEQ ID NO: 54587 - protein, 149 aa, Homo sapiens
MAKMEVKTSLLDNMIGVGDMVLLEPLNEETFINNLKKRFDHSEIYTYIGSVVISVNPYRSLPIYSPEKVEEYRNRNFYELSPHIFALSDEAYRSLRDQDKDQCILITGESGAGKTEASKLVMSYVAAVCGKGAEVNQVKEQLLQSNPVL

SEQ ID NO: 54588 - protein, 381 aa, Homo sapiens
MKKSQIVIAAWYRRYAQQKRYQQTKSSALVIQSYIRGWKARKILRELKHQKRCKEAVTTIAAYWHGTQARRELKRLKEEARRKHAVAVIWAYWLGLKVRREYRKFFRANAGKKIYEFTLQRIVQKYFLEMKNKMPSLSPIDKNWPSRPYLFLDSTHKELKRIFHLWRCKKYRDQFTDQQKLIYEEKLEASELFKDKKALYPSSVGQPFQGAYLEINKNPKYKKLKDAIEEKIIIAEVVNKINRANGKSTSRIFLLTNNNLLLADQKSGQIKSEVPLVDVTKVSMSSQNDGFFAVHLKEGSEAASKGDFLFSSDHLIEMATKLYRTTLSQTKQKLNIEISDEFLVQFRQDKVCVKFIQGNQKNGSVPTCKRKNNRLLEVAVP

SEQ ID NO: 54589 - protein, 307 aa, Homo sapiens
MAKMEVKTSLLDNMIGVGDMVLLEPLNEETFINNLKKRFDHSEIYTYIGSVVISVNPYRSLPIYSPEKVEEYRNRNFYELSPHIFALSDEAYRSLRDQDKDQCILITGESGAGKTEASKLVMSYVAAVCGKGAEVNQVKEQLLQSNPVLEAFGNAKTVRNDNSSRFGKYMDIEFDFKGDPLGGVISNYLLEKSRVVKQPRGERNFHVFYQLLSGASEELLNKLKLERDFSRYNYLSLDSAKVNGVDDAANFRTVRNAMQIVGFMDHEAESVLAVVAAVLKLGNIEFKPESRVNGLDESKIKDKNESK

SEQ ID NO: 54590 - protein, 303 aa, Homo sapiens
MAKMEVKTSLLDNMIGVGDMVLLEPLNEETFINNLKKRFDHSEIYTYIGSVVISVNPYRSLPIYSPEKVEEYRNRNFYELSPHIFALSDEAYRSLRDQDKDQCILITGESGAGKTEASKLVMSYVAAVCGKGAEVNQVKEQLLQSNPVLEAFGNAKTVRNDNSSRFGKYMDIEFDFKGDPLGGVISNYLLEKSRVVKQPRGERNFHVFYQLLSGASEELLNKLKLERDFSRYNYLSLDSAKVNGVDDAANFRTVRNAMQIVGFMDHEAESVLAVVAAVLKLGNIEFKPESRVNGLDESKIKDK

SEQ ID NO: 54591 - protein, 1063 aa, Homo sapiens
MALQVELVPTGEIIRVVHPHRPCKLALGSDGVRVTMESALTARDRVGVQDFVLLENFTSEAAFIENLRRRFRENLIYTYIGPVLVSVNPYRDLQIYSRQHMERYRGVSFYEVPPHLFAVADTVYRALRTERRDQAVMISGESGAGKTEATKRLLQFYAETCPAPERGGAVRDRLLQSNPVLEAFGNAKTLRNDNSSRFGKYMDVQFDFKGAPVGGHILSYLLEKSRVVHQNHGERNFHIFYQLLEGGEEETLRRLGLERNPQSYLYLVKGQCAKVSSINDKSDWKVVRKALTVIDFTEDEVEDLLSIVASVLHLGNIHFAANEESNAQVTTENQLKYLTRLLSVEGSTLREALTHRKIIAKGEELLSPLNLEQAAYARDALAKAVYSRTFTWLVGKINRSLASKDVESPSWRSTTVLGLLDIYGFEVFQHNSFEQFCINYCNEKLQQLFIELTLKSEQEEYEAEGIAWEPVQYFNNKIICDLVEEKFKGIISILDEECLRPGEATDLTFLEKLEDTVKHHPHFLTHKLADQRTRKSLGRGEFRLLHYAGEVTYSVTGFLDKNNDLLFRNLKETMCSSKNPIMSQCFDRSELSDKKRPETVATQFKMSLLQLVEILQSKEPAYVRCIKPNDAKQPGRFDEVLIRHQVKYLGLLENLRVRRAGFAYRRKYEAFLQRYKSLCPETWPTWAGRPQDGVAVLVRHLGYKPEEYKMGRTKIFIRFPKTLFATEDALEVRRQSLATKIQAAWRGFHWRQKFLRVKRSAICIQSWWRGTLGRRKAAKRKWAAQTIRRLIRGFVLRHAPRCPENAFFLDHVRTSFLLNLRRQLPQNVLDTSWPTPPPALREASELLRELCIKNMVWKYCRSISPEWKQQLQQKAVASEIFKGKKDNYPQSVPRLFISTRLGTDEISPRVLQALGSEPIQYAVPVVKYDRKGYKPRSRQLLLTPNAVVIVEDAKVKQRIDYANLTGISVSSLSDSLFVLHVQRADNKQKGDVVLQSDHVIETLTKTALSANRVNSININQGSITFAGGPGRDGTIDFTPGSELLITKAKNGHLAVVAPRLNSR

SEQ ID NO: 54592 - protein, 1028 aa, Homo sapiens
MESALTARDRVGVQDFVLLENFTSEAAFIENLRRRFRENLIYTYIGPVLVSVNPYRDLQIYSRQHMERYRGVSFYEVPPHLFAVADTVYRALRTERRDQAVMISGESGAGKTEATKRLLQFYAETCPAPERGGAVRDRLLQSNPVLEAFGNAKTLRNDNSSRFGKYMDVQFDFKGAPVGGHILSYLLEKSRVVHQNHGERNFHIFYQLLEGGEEETLRRLGLERNPQSYLYLVKGQCAKVSSINDKSDWKVVRKALTVIDFTEDEVEDLLSIVASVLHLGNIHFAANEESNAQVTTENQLKYLTRLLSVEGSTLREALTHRKIIAKGEELLSPLNLEQAAYARDALAKAVYSRTFTWLVGKINRSLASKDVESPSWRSTTVLGLLDIYGFEVFQHNSFEQFCINYCNEKLQQLFIELTLKSEQEEYEAEGIAWEPVQYFNNKIICDLVEEKFKGIISILDEECLRPGEATDLTFLEKLEDTVKHHPHFLTHKLADQRTRKSLGRGEFRLLHYAGEVTYSVTGFLDKNNDLLFRNLKETMCSSKNPIMSQCFDRSELSDKKRPETVATQFKMSLLQLVEILQSKEPAYVRCIKPNDAKQPGRFDEVLIRHQVKYLGLLENLRVRRAGFAYRRKYEAFLQRYKSLCPETWPTWAGRPQDGVAVLVRHLGYKPEEYKMGRTKIFIRFPKTLFATEDALEVRRQSLATKIQAAWRGFHWRQKFLRVKRSAICIQSWWRGTLGRRKAAKRKWAAQTIRRLIRGFVLRHAPRCPENAFFLDHVRTSFLLNLRRQLPQNVLDTSWPTPPPALREASELLRELCIKNMVWKYCRSISPEWKQQLQQKAVASEIFKGKKDNYPQSVPRLFISTRLGTDEISPRVLQALGSEPIQYAVPVVKYDRKGYKPRSRQLLLTPNAVVIVEDAKVKQRIDYANLTGISVSSLSDSLFVLHVQRADNKQKGDVVLQSDHVIETLTKTALSANRVNSININQGSITFAGGPGRDGTIDFTPGSELLITKAKNGHLAVVAPRLNSR

SEQ ID NO: 54593 - protein, 1044 aa, Homo sapiens
MRYRASALGSDGVRVTMESALTARDRVGVQDFVLLENFTSEAAFIENLRRRFRENLIYTYIGPVLVSVNPYRDLQIYSRQHMERYRGVSFYEVPPHLFAVADTVYRALRTERRDQAVMISGESGAGKTEATKRLLQFYAETCPAPERGGAVRDRLLQSNPVLEAFGNAKTLRNDNSSRFGKYMDVQFDFKGAPVGGHILSYLLEKSRVVHQNHGERNFHIFYQLLEGGEEETLRRLGLERNPQSYLYLVKGQCAKVSSINDKSDWKVVRKALTVIDFTEDEVEDLLSIVASVLHLGNIHFAANEESNAQVTTENQLKYLTRLLSVEGSTLREALTHRKIIAKGEELLSPLNLEQAAYARDALAKAVYSRTFTWLVGKINRSLASKDVESPSWRSTTVLGLLDIYGFEVFQHNSFEQFCINYCNEKLQQLFIELTLKSEQEEYEAEGIAWEPVQYFNNKIICDLVEEKFKGIISILDEECLRPGEATDLTFLEKLEDTVKHHPHFLTHKLADQRTRKSLGRGEFRLLHYAGEVTYSVTGFLDKNNDLLFRNLKETMCSSKNPIMSQCFDRSELSDKKRPETVATQFKMSLLQLVEILQSKEPAYVRCIKPNDAKQPGRFDEVLIRHQVKYLGLLENLRVRRAGFAYRRKYEAFLQRYKSLCPETWPTWAGRPQDGVAVLVRHLGYKPEEYKMGRTKIFIRFPKTLFATEDALEVRRQSLATKIQAAWRGFHWRQKFLRVKRSAICIQSWWRGTLGRRKAAKRKWAAQTIRRLIRGFVLRHAPRCPENAFFLDHVRTSFLLNLRRQLPQNVLDTSWPTPPPALREASELLRELCIKNMVWKYCRSISPEWKQQLQQKAVASEIFKGKKDNYPQSVPRLFISTRLGTDEISPRVLQALGSEPIQYAVPVVKYDRKGYKPRSRQLLLTPNAVVIVEDAKVKQRIDYANLTGISVSSLSDSLFVLHVQRADNKQKGDVVLQSDHVIETLTKTALSANRVNSININQGSITFAGGPGRDGTIDFTPGSELLITKAKNGHLAVVAPRLNSR

SEQ ID NO: 54594 - protein, 805 aa, Homo sapiens
MESALTARDRVGVQDFVLLENFTSEAAFIENLRRRFRENLIYTYIGPVLVSVNPYRDLQIYSRQHMERYRGVSFYEVPPHLFAVADTVYRALRTERRDQAVMISGESGAGKTEATKRLLQFYAETCPAPERGGAVRDRLLQSNPVLEAFGNAKTLRNDNSSRFGKYMDVQFDFKGAPVGGHILSYLLEKSRVVHQNHGERNFHIFYQLLEGGEEETLRRLGLERNPQSYLYLVKGQCAKVSSINDKSDWKVVRKALTVIDFTEDEVEDLLSIVASVLHLGNIHFAANEESNAQVTTENQLKYLTRLLSVEGSTLREALTHRKIIAKGEELLSPLNLEQAAYARDALAKAVYSRTFTWLVGKINRSLASKDVESPSWRSTTVLGLLDIYGFEVFQHNSFEQFCINYCNEKLQQLFIELTLKSEQEEYEAEGIAWEPVQYFNNKIICDLVEEKFKGIISILDEECLRPGEATDLTFLEKLEDTVKHHPHFLTHKLADQRTRKSLGRGEFRLLHYAGEVTYSVTGFLDKNNDLLFRNLKETMCSSKNPIMSQCFDRSELSDKKRPETVATQFKMSLLQLVEILQSKEPAYVRCIKPNDAKQPGRFDEVLIRHQVKYLGLLENLRVRRAGFAYRRKYEAFLQRYKSLCPETWPTWAGRPQDGVAVLVRHLGYKPEEYKMGRTKIFIRFPKTLFATEDALEVRRQSLATKIQAAWRGFHWRQKFLRVKRSAICIQSWWRGTLGRRKAAKEVGGTDHPAAHPRLRPAPRPPLPRERLLPGPCAHLFFAKPEAAAAPECPGHLVAHAPTCPA

SEQ ID NO: 54595 - protein, 1044 aa, Homo sapiens
MRGRASALGSDGVRVTMESALTARDRVGVQDFVLLENFTSEAAFIENLRRRFRENLIYTYIGPVLVSVNPYRDLQIYSRQHMERYRGVSFYEVPPHLFAVADTVYRALRTERRDQAVMISGESGAGKTEATKRLLQFYAETCPAPERGGAVRDRLLQSNPVLEAFGNAKTLRNDNSSRFGKYMDVQFDFKGAPVGGHILSYLLEKSRVVHQNHGERNFHIFYQLLEGGEEETLRRLGLERNPQSYLYLVKGQCAKVSSINDKSDWKVVRKALTVIDFTEDEVEDLLSIVASVLHLGNIHFAANEESNAQVTTENQLKYLTRLLSVEGSTLREALTHRKIIAKGEELLSPLNLEQAAYARDALAKAVYSRTFTWLVGKINRSLASKDVESPSWRSTTVLGLLDIYGFEVFQHNSFEQFCINYCNEKLQQLFIELTLKSEQEEYEAEGIAWEPVQYFNNKIICDLVEEKFKGIISILDEECLRPGEATDLTFLEKLEDTVKHHPHFLTHKLADQRTRKSLGRGEFRLLHYAGEVTYSVTGFLDKNNDLLFRNLKETMCSSKNPIMSQCFDRSELSDKKRPETVATQFKMSLLQLVEILQSKEPAYVRCIKPNDAKQPGRFDEVLIRHQVKYLGLLENLRVRRAGFAYRRKYEAFLQRYKSLCPETWPTWAGRPQDGVAVLVRHLGYKPEEYKMGRTKIFIRFPKTLFATEDALEVRRQSLATKIQAAWRGFHWRQKFLRVKRSAICIQSWWRGTLGRRKAAKRKWAAQTIRRLIRGFVLRHAPRCPENAFFLDHVRTSFLLNLRRQLPQNVLDTSWPTPPPALREASELLRELCIKNMVWKYCRSISPEWKQQLQQKAVASEIFKGKKDNYPQSVPRLFISTRLGTDEISPRVLQALGSEPIQYAVPVVKYDRKGYKPRSRQLLLTPNAVVIVEDAKVKQRIDYANLTGISVSSLSDSLFVLHVQRADNKQKGDVVLQSDHVIETLTKTALSANRVNSININQGSITFAGGPGRDGTIDFTPGSELLITKAKNGHLAVVAPRLNSR

SEQ ID NO: 54596 - protein, 1039 aa, Homo sapiens
MALGSDGVRVTMESALTARDRVGVQDFVLLENFTSEAAFIENLRRRFRENLIYTYIGPVLVSVNPYRDLQIYSRQHMERYRGVSFYEVPPHLFAVADTVYRALRTERRDQAVMISGESGAGKTEATKRLLQFYAETCPAPERGGAVRDRLLQSNPVLEAFGNAKTLRNDNSSRFGKYMDVQFDFKGAPVGGHILSYLLEKSRVVHQNHGERNFHIFYQLLEGGEEETLRRLGLERNPQSYLYLVKGQCAKVSSINDKSDWKVVRKALTVIDFTEDEVEDLLSIVASVLHLGNIHFAANEESNAQVTTENQLKYLTRLLSVEGSTLREALTHRKIIAKGEELLSPLNLEQAAYARDALAKAVYSRTFTWLVGKINRSLASKDVESPSWRSTTVLGLLDIYGFEVFQHNSFEQFCINYCNEKLQQLFIELTLKSEQEEYEAEGIAWEPVQYFNNKIICDLVEEKFKGIISILDEECLRPGEATDLTFLEKLEDTVKHHPHFLTHKLADQRTRKSLGRGEFRLLHYAGEVTYSVTGFLDKNNDLLFRNLKETMCSSKNPIMSQCFDRSELSDKKRPETVATQFKMSLLQLVEILQSKEPAYVRCIKPNDAKQPGRFDEVLIRHQVKYLGLLENLRVRRAGFAYRRKYEAFLQRYKSLCPETWPTWAGRPQDGVAVLVRHLGYKPEEYKMGRTKIFIRFPKTLFATEDALEVRRQSLATKIQAAWRGFHWRQKFLRVKRSAICIQSWWRGTLGRRKAAKRKWAAQTIRRLIRGFVLRHAPRCPENAFFLDHVRTSFLLNLRRQLPQNVLDTSWPTPPPALREASELLRELCIKNMVWKYCRSISPEWKQQLQQKAVASEIFKGKKDNYPQSVPRLFISTRLGTDEISPRVLQALGSEPIQYAVPVVKYDRKGYKPRSRQLLLTPNAVVIVEDAKVKQRIDYANLTGISVSSLSDSLFVLHVQRADNKQKGDVVLQSDHVIETLTKTALSANRVNSININQGSITFAGGPGRDGTIDFTPGSELLITKAKNGHLAVVAPRLNSR

SEQ ID NO: 54597 - protein, 1006 aa, Homo sapiens
MAEQESLEFGKADFVLMDTVSMPEFMANLRLRFEKGRIYTFIGEVVVSVNPYKLLNIYGRDTIEQYKGRELYERPPHLFAIADAAYKAMKRRSKDTCIVISGESGAGKTEASKYIMQYIAAITNPSQRAEVERVKNMLLKSNCVLEAFGNAKTNRNDNSSRFGKYMDINFDFKGDPIGGHINNYLLEKSRVIVQQPGERSFHSFYQLLQGGSEQMLRSLHLQKSLSSYNYIHVGAQLKSSINDAAEFRVVADAMKVIGFKPEEIQTVYKILAAILHLGNLKFVVDGDTPLIENGKVVSIIAELLSTKTDMVEKALLYRTVATGRDIIDKQHTEQEASYGRDAFAKAIYERLFCWIVTRINDIIEVKNYDTTIHGKNTVIGVLDIYGFEIFDNNSFEQFCINYCNEKLQQLFIQLVLKQEQEEYQREGIPWKHIDYFNNQIIVDLVEQQHKGIIAILDDACMNVGKVTDEMFLEALNSKLGKHAHFSSRKLCASDKILEFDRDFRIRHYAGDVVYSVIGFIDKNKDTLFQDFKRLMYNSSNPVLKNMWPEGKLSITEVTKRPLTAATLFKNSMIALVDNLASKEPYYVRCIKPNDKKSPQIFDDERCRHQVEYLGLLENVRVRRAGFAFRQTYEKFLHRYKMISEFTWPNHDLPSDKEAVKKLIERCGFQDDVAYGKTKIFIRTPRTLFTLEELRAQMLIRIVLFLQKVWRGTLARMRYKRTKAALTIIRYYRRYKVKSYIHEVARRFHGVKTMRDYGKHVKWPSPPKVLRRFEEALQTIFNRWRASQLIKSIPASDLPQVRAKVAAVEMLKGQRADLGLQRAWEGNYLASKPDTPQTSGTFVPVANELKRKDKYMNVLFSCHVRKVNRFSKVEDRAIFVTDRHLYKMDPTKQYKVMKTIPLYNLTGLSVSNGKDQLVVFHTKDNKDLIVCLFSKQPTHESRIGELVGVLVNHFKSEKRHLQVNVTNPVQCSLHGKKCTVSVETRLNQPQPDFTKNRSGFILSVPGN

SEQ ID NO: 54598 - protein, 198 aa, Homo sapiens [sequence omitted]

SEQ ID NO: 54599 - protein, 1108 aa, Homo sapiens
MGSKGVYQYHWQSHNVKHSGVDDMVLLSKITENSIVENLKKRYMDDYIFTYIGSVLISVNPFKQMPYFGEKEIEMYQGAAQYENPPHIYALADNMYRNMIIDRENQCVIISGESGAGKTVAAKYIMSYISRVSGGGTKVQHVKDIILQSNPLLEAFGNAKTVRNNNSSRFGKYFEIQFSPGGEPDGGKISNFLLEKSRVVMRNPGERSFHIFYQLIEGASAEQKHSLGITSMDYYYYLSLSGSYKVDDIDDRREFQETLHAMNVIGIFAEEQTLVLQIVAGILHLGNISFKEVGNYAAVESEEFLAFPAYLLGINQDRLKEKLTSRQMDSKWGGKSESIHVTLNVEQACYTRDALAKALHARVFDFLVDSINKAMEKDHEEYNIGVLDIYGFEIFQKNGFEQFCINFVNEKLQQIFIELTLKAEQEEYVQEGIRWTPIEYFNNKIVCDLIENKVNPPGIMSILDDVCATMHAVGEGADQTLLQKLQMQIGSHEHFNSWNQGFIIHHYAGKVSYDMDGFCERNRDVLFMDLIELMQSSELPFIKSLFPENLQADKKGRPTTAGSKIKKQANDLVSTLMKCTPHYIRCIKPNETKKPRDWEESRVKHQVEYLGLKENIRVRRAGYAYRRIFQKFLQRYAILTKATWPSWQGEEKQGVLHLLQSVNMDSDQFQLGRSKVFIKAPESLFLLEEMRERKYDGYARVIQKSWRKFVARKKYVQMREEASDLLLNKKERRRNSINRNFIGDYIGMEEHPELQQFVGKREKIDFADTVTKYDRRFKGVKRDLLLTPKCLYLIGREKVKQGPDKGLVKEVLKRKIEIERILSVSLSTMQDDIFILHEQEYDSLLESVFKTEFLSLLAKRYEEKTQKQLPLKFSNTLELKLKKENWGPWSAGGSRQVQFHQGFGDLAVLKPSNKVLQVSIGPGLPKNSRPTRRNTTQNTGYSSGTQNANYPVRAAPPPPGYHQNGVIRNQYVPYPHAPGSQRSNQKSLYTSMARPPLPRQQSTSSDRVSQTPESLDFLKVPDQGAAGVRRQTTSRPPPAGGRPKPQPKPKPQVPQCKALYAYDAQDTDELSFNANDIIDIIKEDPSGWWTGRLRGKQGLFPNNYVTKI

SEQ ID NO: 54600 - protein, 1103 aa, Homo sapiens
GTKAGSPVNGQKQGHAQATPKIPLNLHLHHDPFRSLQEPRHQPPTMGSKERFHWQSHNVKQSGVDDMVLLPQITEDAIAANLRKRFMDDYIFTYIGSVLISVNPFKQMPYFTDREIDLYQGAAQYENPPHIYALTDNMYRNMLIDCENQCVIISGESGAGKTVAAKYIMGYISKVSGGGEKVQHVKDIILQSNPLLEAFGNAKTVRNNNSSRFGKYFEIQFSRGGEPDGGKISNFLLEKSRVVMQNENERNFHIYYQLLEGASQEQRQNLGLMTPDYYYYLNQSDTYQVDGTDDRSDFGETLSAMQVIGIPPSIQQLVLQLVAGILHLGNISFCEDGNYARVESVDLLAFPAYLLGIDSGRLQEKLTSRKMDSRWGGRSESINVTLNVEQAAYTRDALAKGLYARLFDFLVEAINRAMQKPQEEYSIGVLDIYGFEIFQKNGFEQFCINFVNEKLQQIFIELTLKAEQEEYVQEGIRWTPIQYFNNKVVCDLIENKLSPPGIMSVLDDVCATMHATGGGADQTLLQKLQAAVGTHEHFNSWSAGFVIHHYAGKVSYDVSGFCERNRDVLFSDLIELMQTSEQAFLRMLFPEKLDGDKKGRPSTAGSKIKKQANDLVATLMRCTPHYIRCIKPNETKRPRDWEENRVKHQVEYLGLKENIRVRRAGFAYRRQFAKFLQRYAILTPETWPRWRGDERQGVQHLLRAVNMEPDQYQMGSTKVFVKNPESLFLLEEVRERKFDGFARTIQKAWRRHVAVRKYEEMREEASNILLNKKERRRNSINRNFVGDYLGLEERPELRQFLGKRERVDFADSVTKYDRRFKPIKRDLILTPKCVYVIGREKVKKGPEKGQVCEVLKKKVDIQALRGVSLSTRQDDFFILQEDAADSFLESVFKTEFVSLLCKRFEEATRRPLPLTFSDTLQFRVKKEGWGGGGTRSVTFSRGFGDLAVLKVGGRTLTVSVGDGLPKSSKPTRKGMAKGKPRRSSQAPTRAAPAPPRGMDRNGVPPSARGGPLPGDHVWRGHPQASPGLRPHPWEPADDPGHVRPQSTTQNSSTCLTRAWPACRGSAAWGNGQCLVWADPSPSLGHMVPGAGPYTSTWAKMWTS

SEQ ID NO: 54601 - protein, 1098 aa, Homo sapiens
MGSKERFHWQSHNVKQSGVDDMVLLPQITEDAIAANLRKRFMDDYIFTYIGSVLISVNPFKQMPYFTDREIDLYQGAAQYENPPHIYALTDNMYRNMLIDCENQCVIISGESGAGKTVAAKYIMGYISKVSGGGEKVQHVKDIILQSNPLLEAFGNAKTVRNNNSSRFGKYFEIQFSRGGEPDGGKISNFLLEKSRVVMQNENERNFHIYYQLLEGASQEQRQNLGLMTPDYYYYLNQSDTYQVDGTDDRSDFGETLSAMQVIGIPPSIQQLVLQLVAGILHLGNISFCEDGNYARVESVDLLAFPAYLLGIDSGRLQEKLTSRKMDSRWGGRSESINVTLNVEQAAYTRDALAKGLYARLFDFLVEAINRAMQKPQEEYSIGVLDIYGFEIFQKNGFEQFCINFVNEKLQQIFIELTLKAEQEEYVQEGIRWTPIQYFNNKVVCDLIENKLSPPGIMSVLDDVCATMHATGGGADQTLLQKLQAAVGTHEHFNSWSAGFVIHHYAGKVSYDVSGFCERNRDVLFSDLIELMQTSEQAFLRMLFPEKLDGDKKGRPSTAGSKIKKQANDLVATLMRCTPHYIRCIKPNETKRPRDWEENRVKHQVEYLGLKENIRVRRAGFAYRRQFAKFLQRYAILTPETWPRWRGDERQGVQHLLRAVNMEPDQYQMGSTKVFVKNPESLFLLEEVRERKFDGFARTIQKAWRRHVAVRKYEEMREEASNILLNKKERRRNSINRNFVGDYLGLEERPELRQFLGKRERVDFADSVTKYDRRFKPIKRDLILTPKCVYVIGREKVKKGPEKGQVCEVLKKKVDIQALRGVSLSTRQDDFFILQEDAADSFLESVFKTEFVSLLCKRFEEATRRPLPLTFSDTLQFRVKKEGWGGGGTRSVTFSRGFGDLAVLKVGGRTLTVSVGDGLPKSSKPTRKGMAKGKPRRSSQAPTRAAPAPPRGMDRNGVPPSARGGPLPLEIMSGGGTHRPPRGPPSTSLGASRRPRARPPSEHNTEFLNVPDQGMAGMQRKRSVGQRPVPGVGRPKPQPRTHGPRCRALYQYVGQDVDELSFNVNEVIEILMEDPSGWWKGRLHGQEGLFPGNYVEKI

SEQ ID NO: 54602 - protein, 1018 aa, Homo sapiens
MEDEEGPEYGKPDFVLLDQVTMEDFMRNLQLRFEKGRIYTYIGEVLVSVNPYQELPLYGPEAIARYQGRELYERPPHLYAVANAAYKAMKHRSRDTCIVISGESGAGKTEASKHIMQYIAAVTNPSQRAEVERVKDVLLKSTCVLEAFGNARTNRNHNSSRFGKYMDINFDFKGDPIGGHIHSYLLEKSRVLKQHVGERNFHAFYQLLRGSEDKQLHELHLERNPAVYNFTHQGAGLNMTVHSALDSDEQSHQAVTEAMRVIGFSPEEVESVHRILAAILHLGNIEFVETEEGGLQKEGLAVAEEALVDHVAELTATPRDLVLRSLLARTVASGGRELIEKGHTAAEASYARDACAKAVYQRLFEWVVNRINSVMEPRGRDPRRDGKDTVIGVLDIYGFEVFPVNSFEQFCINYCNEKLQQLFIQLILKQEQEEYEREGITWQSVEYFNNATIVDLVERPHRGILAVLDEACSSAGTITDRIFLQTLDMHHRHHLHYTSRQLCPTDKTMEFGRDFRIKHYAGDVTYSVEGFIDKNRDFLFQDFKRLLYNSTDPTLRAMWPDGQQDITEVTKRPLTAGTLFKNSMVALVENLASKEPFYVRCIKPNEDKVAGKLDENHCRHQVAYLGLLENVRVRRAGFASRQPYSRFLLRYKMTCEYTWPNHLLGSDKAAVSALLEQHGLQGDVAFGHSKLFIRSPRTLVTLEQSRARLIPIIVLLLQKAWRGTLARWRCRRLRAIYTIMRWFRRHKVRAHLAELQRRFQAARQPPLYGRDLVWPLPPAVLQPFQDTCHALFCRWRARQLVKNIPPSDMPQIKAKVAAMGALQGLRQDWGCRRAWARDYLSSATDNPTASSLFAQRLKTLQDKDGFGAVLFSSHVRKVNRFHKIRNRALLLTDQHLYKLDPDRQYRVMRAVPLEAVTGLSVTSGGDQLVVLHARGQDDLVVCLHRSRPPLDNRVGELVGVLAAHCQGEGRTLEVRVSDCIPLSHRGVRRLISVEPRPEQPEPDFRCARGSFTLLWPSR

SEQ ID NO: 54603 - protein, 1616 aa, Homo sapiens
MFPLIGKTIIFDNFPDPSDTWEITETIGKGTYGKVFKVLNKKNGQKAAVKILDPIHDIDEEIEAEYNILKALSDHPNVVRFYGIYFKKDKVNGDKLWLVLELCSGGSVTDLVKGFLKRGERMSEPLIAYILHEALMGLQHLHNNKTIHRDVKGNNILLTTEGGVKLVDFGVSAQLTSTRHRRNTSVGTPFWMAPEVIACEQQLDTTYDARCDTWSLGITAIELGDGDPPLADLHPMRALFKIPRNPPPKLRQPELWSAEFNDFISKCLTKDYEKRPTVSELLQHKFITQIEGKDVMLQKQLTEFIGIHQCMGGTEKARRERIHTKKGNFNRPLISNLKDVDDLATLEILDENTVSEQLEKCYSRDQIYVYVGDILIALNPFQSLGLYSTKHSKLYIGSKRTASPPHIFAMADLGYQSMITYNSDQCIVISGESGAGKTENAHLLVQQLTVLGKANNRTLQEKILQVNNLVEAFGNACTIINDNSSRFGKYLEMKFTSSGAVVGAQISEYLLEKSRVIHQAIGEKNFHIFYYIYAGLAEKKKLAHYKLPENKPPRYLQNDHLRTVQDIMNNSFYKSQYELIEQCFKVIGFTMEQLGSIYSILAAILNVGNIEFSSVATEHQIDKSHISNHTALENCASLLCIRADELQEALTSHCVVTRGETIIRPNTVEKATDVRDAMAKTLYGRLFSWIVNCINSLLKHDSSPSGNGDELSIGILDIFGFENFKKNSFEQLCINIANEQIQYYYNQHVFAWEQNEYLNEDVDARVIEYEDNWPLLDMFLQKPMGLLSLLDEESRFPKATDQTLVEKFEGNLKSQYFWRPKRMELSFGIHHYAGKVLYNASGFLAKNRDTLPTDIVLLLRSSDNSVIRQLVNHPLTKTGNLPHSKTKNVINYQMRTSEKLINLAKGDTGEATRHARETTNMKTQTVASYFRYSLMDLLSKMVVGQPHFVRCIKPNSERQARKYDKEKVLLQLRYTGILETARIRRLGFSHRILFANFIKRYYLLCYKSSEEPRMSPDTCATILEKAGLDNWALGKTKVFLKYYHVEQLNLMRKEAIDKLILIQACVRAFLCSRRYQKIQEKRKESAIIIQSAARGHLVRKQRKEIVDMKNTAVTTIQTSDQEFDYKKNFENTRESFVKKQAENAISANERFISAPNNKGSVSVVKTSTFKPEEETTNAVESNNRVYQTPKKMNNVYEEEVKQEFYLVGPEVSPKQKSVKDLEENSNLRKVEKEEAMIQSYYQRYTEERNCEESKAAYLERKAISERPSYPVPWLAENETSFKKTLEPTLSQRSIYQNANSMEKEKKTSVVTQRAPICSQEEGRGRLRHETVKERQVEPVTQAQEEEDKAAVFIQSKYRGYKRRQQLRKDKMSSFKHQRIVTTPTEVARNTHNLYSYPTKHEEINNIKKKDNKDSKATSEREACGLAIFSKQISKLSEEYFILQKKLNEMILSQQLKSLYLGVSHHKPINRRVSSQQCLSGVCKGEEPKILRPPRRPRKPKTLNNPEDSTYYYLLHKSIQEEKRRPRKDSQGKLLDLEDFYYKEFLPSRSGPKEHSPSLRERRPQQELQNQCIKANERCWAAESPEKEEEREPAANPYDFRRLLRKTSQRRRLVQQS

SEQ ID NO: 54604 - protein, 197 aa, Homo sapiens
MFPLIGKTIIFDNFPDPSDTWEITETIGKGTYGKVFKVLNKKNGQKAAVKILDPIHDIDEEIEAEYNILKALSDHPNVVRFYGIYFKKDKVNGDKLWLVLELCSGGSVTDLVKGFLKRGERMSEPLIAYILHEALMGLQHLHNNKTIHRDVKGNNILLTTEGGVKLVDFGVSAQLTSTRHRRNTSVGTPFWMAPEVR

SEQ ID NO: 54605 - protein, 247 aa, Homo sapiens
MFPLIGKTIIFDNFPDPSDTWEITETIGKGTYGKVFKVLNKKNGQKAAVKILDPIHDIDEEIEAEYNILKALSDHPNVVRFYGIYFKKDKVNGDKLWLVLELCSGGSVTDLVKGFLKRGERMSEPLIAYILHEALMGLQHLHNNKTIHRDVKGNNILLTTEGGVKLVDFGVSAQLTSTRHRRNTSVGTPFWMAPEVIACEQQLDTTYDARCDTWSLGITAIELGDGDPPLADLHPMRALFKIPRSDD

SEQ ID NO: 54606 - protein, 664 aa, Homo sapiens
MFPLIGKTIIFDNFPDPSDTWEITETIGKGTYGKVFKVLNKKNGQKAAVKILDPIHDIDEEIEAEYNILKALSDHPNVVRFYGIYFKKDKVNGDKLWLVLELCSGGSVTDLVKGFLKRGERMSEPLIAYILHEALMGLQHLHNNKTIHRDVKGNNILLTTEGGVKLVDFGVSAQLTSTRHRRNTSVGTPFWMAPEVIACEQQLDTTYDARCDTWSLGITAIELGDGDPPLADLHPMRALFKIPRNPPPKLRQPELWSAEFNDFISKCLTKDYEKRPTVSELLQHKFITQIEGKDVMLQKQLTEFIGIHQCMGGTEKARRERIHTKKGNFNRPLISNLKDVDDLATLEILDENTVSEQLEKCYSRDQIYVYVGDILIALNPFQSLGLYSTKHSKLYIGSKRTASPPHIFAMADLGYQSMITYNSDQCIVISGESGAGKTENAHLLVQQLTVLGKANNRTLQEKILQVNNLVEAFGNACTIINDNSSRFGKYLEMKFTSSGAVVGAQISEYLLEKSRVIHQAIGEKNFHIFYYIYAGLAEKKKLAHYKLPENKPPRYLQNDHLRTVQDIMNNSFYKSQYELIEQCFKVIGFTMEVLGGGEPREGGGERASSQPLRLQEAPAQNLPAPAPRPAVLTVQRGSHRRRKALEPAGQQGPSRHSGAGTSRH

SEQ ID NO: 54607 - protein, 1277 aa, Homo sapiens
KHLYGLFHYNPMMLGLESLPDPTDTWEIIETIGKGTYGKVYKVTNKRDGSLAAVKILDPVSDMDEEIEAEYNILQFLPNHPNVVKFYGMFYKADHCVGGQLWLVLELCNGGSVTELVKGLLRCGQRLDEAMISYILYGALLGLQHLHNNRIIHRDVKGNNILLTTEGGVKLVDFGVSAQLTSTRLRRNTSVGTPFWMAPEVIACEQQYDSSYDARCDVWSLGITAIELGDGDPPLFDMHPVKTLFKIPRNPPPTLLHPEKWCEEFNHFISQCLIKDFERRPSVTHLLDHPFIKGVHGKVLFLQKQLAKVLQDQKHQNPVAKTRHERMHTRRPYHVEDAEKYCLEDDLVNLEVLDEDTIIHQLQKRYADLLIYTYVGDILIALNPFQNLSIYSPQFSRLYHGVKRASNPPHIFASADAAYQCMVTLSKDQCIVISGESGSGKTESAHLIVQHLTFLGKANNQTLREKILQVNSLVEAFGNSCTAINDNSSRFGKYLEMMFTPTGVVMGARISEYLLEKSRVIKQAAREKNFHIFYYIYAGLHHQKKLSDFRLPEEKPPRYIADETGRVMHDITSKESYRRQFEAIQHCFRIIGFTDKEVHSVYRILAGILNIGNIEFAAISSQHQTDKSEVPNAEALQNAASVLCISPEELQEALTSHCVVTRGETIIRANTVDRAADVRDAMSKALYGRLFSWIVNRINTLLQPDENICSAGGGMNVGILDIFGFENFQRNSFEQLCINIANEQIQYYFNQHVFALEQMEYQNEGIDAVPVEYEDNRPLLDMFLQKPLGLLALLDEESRFPQATDQTLVDKFEDNLRCKYFWRPKGVELCFGIQHYAGKVLYDASGVLEKNRDTLPADVVVVLRTSENKLLQQLFSIPLTKTGNLAQTRARITVASSSLPPHFSAGKAKVDTLEVIRHPEETTNMKRQTVASYFRYSLMDLLSKMVVGQPHFVRCIKPNDDREALQFSRERVLAQLRSTGILETVSIRRQGYSHRILFEEFVKRYYYLAFTAHQTPLASKESCVAILEKSRLDHWVLGKTKVFLKYYHVEQLNLLLREVIGRVVVLQAYTKGWLGARRYKRVREKREKGAIAIQSAWRGYDARRKFKKISNRRNESAAHNQAGDTSNQSSGPHSPVAAGTRGSAEVQDCSEPGDHKVLRGSVHRRSHSQAESNNGRTQTSSNSPAVTEKNGHSQAQSSPKGCDIFAGHANKHSVSGTDLLSSRICHPAPDQQGLSLWGAPQKPAFPHYGCNFYGFRKWSCTEASNTSPTMSAAQNAE

SEQ ID NO: 54608 - protein, 1350 aa, Homo sapiens
MLQSALLSTRKHLYGLFHYNPMMLGLESLPDPTDTWEIIETIGKGTYGKVYKVTNKRDGSLAAVKILDPVSDMDEEIEAEYNILQFLPNHPNVVKFYGMFYKADHCVGGQLWLVLELCNGGSVTELVKGLLRCGQRLDEAMISYILYGALLGLQHLHNNRIIHRDVKGNNILLTTEGGVKLVDFGVSAQLTSTRLRRNTSVGTPFWMAPEVIACEQQYDSSYDARCDVWSLGITAIELGDGDPPLFDMHPVKTLFKIPRNPPPTLLHPEKWCEEFNHFISQCLIKDFERRPSVTHLLDHPFIKGVHGKVLFLQKQLAKVLQDQKHQNPVAKTRHERMHTRRPYHVEDAEKYCLEDDLVNLEVLDEDTIIHQLQKRYADLLIYTYVGDILIALNPFQNLSIYSPQFSRLYHGVKRASNPPHIFASADAAYQCMVTLSKDQCIVISGESGSGKTESAHLIVQHLTFLGKANNQTLREKILQVNSLVEAFGNSCTAINDNSSRFGKYLEMMFTPTGVVMGARISEYLLEKSRVIKQAAREKNFHIFYYIYAGLHHQKKLSDFRLPEEKPPRYIADETGRVMHDITSKESYRRQFEAIQHCFRIIGFTDKEVHSVYRILAGILNIGNIEFAAISSQHQTDKSEVPNAEALQNAASVLCISPEELQEALTSHCVVTRGETIIRANTVDRAADVRDAMSKALYGRLFSWIVNRINTLLQPDENICSAGGGMNVGILDIFGFENFQRNSFEQLCINIANEQIQYYFNQHVFALEQMEYQNEGIDAVPVEYEDNRPLLDMFLQKPLGLLALLDEESRFPQATDQTLVDKFEDNLRCKYFWRPKGVELCFGIQHYAGKVLYDASGVLEKNRDTLPADVVVVLRTSENKLLQQLFSIPLTKTGNLAQTRARITVASSSLPPHFSAGKAKVDTLEVIRHPEETTNMKRQTVASYFRYSLMDLLSKMVVGQPHFVRCIKPNDDREALQFSRERVLAQLRSTGILETVSIRRQGYSHRILFEEFVKRYYYLAFTAHQTPLASKESCVAILEKSRLDHWVLGKTKVFLKYYHVEQLNLLLREVIGRVVVLQAYTKGWLGARRYKRVREKREKGAIAIQSAWRGYDARRKFKKISNRRNESAAHNQAGDTSNQSSGPHSPVAAGTRGSAEVQDCSEPGDHKVLRGSVHRRSHSQAESNNGRTQTSSNSPAVTEKNGHSQAQSSPKGCDIFAGHANKHSVSGTDLLSSRICHPAPDQQGLSLWGAPQKPGSENGLAQKHRTPRRRCQQPKMLSSPEDTMYYNQLNGTLEYQGSKRKPRKLGQIKVLDGEDEYYKSLSPVDCIPEENNSAHPSFFSSSSKGDSFAQH

SEQ ID NO: 54609 - protein, 1341 aa, Homo sapiens
MKHLYGLFHYNPMMLGLESLPDPTDTWEIIETIGKGTYGKVYKVTNKRDGSLAAVKILDPVSDMDEEIEAEYNILQFLPNHPNVVKFYGMFYKADHCVGGQLWLVLELCNGGSVTELVKGLLRCGQRLDEAMISYILYGALLGLQHLHNNRIIHRDVKGNNILLTTEGGVKLVDFGVSAQLTSTRLRRNTSVGTPFWMAPEVIACEQQYDSSYDARCDVWSLGITAIELGDGDPPLFDMHPVKTLFKIPRNPPPTLLHPEKWCEEFNHFISQCLIKDFERRPSVTHLLDHPFIKGVHGKVLFLQKQLAKVLQDQKHQNPVAKTRHERMHTRRPYHVEDAEKYCLEDDLVNLEVLDEDTIIHQLQKRYADLLIYTYVGDILIALNPFQNLSIYSPQFSRLYHGVKRASNPPHIFASADAAYQCMVTLSKDQCIVISGESGSGKTESAHLIVQHLTFLGKANNQTLREKILQVNSLVEAFGNSCTAINDNSSRFGKYLEMMFTPTGVVMGARISEYLLEKSRVIKQAAREKNFHIFYYIYAGLHHQKKLSDFRLPEEKPPRYIADETGRVMHDITSKESYRRQFEAIQHCFRIIGFTDKEVHSVYRILAGILNIGNIEFAAISSQHQTDKSEVPNAEALQNAASVLCISPEELQEALTSHCVVTRGETIIRANTVDRAADVRDAMSKALYGRLFSWIVNRINTLLQPDENICSAGGGMNVGILDIFGFENFQRNSFEQLCINIANEQIQYYFNQHVFALEQMEYQNEGIDAVPVEYEDNRPLLDMFLQKPLGLLALLDEESRFPQATDQTLVDKFEDNLRCKYFWRPKGVELCFGIQHYAGKVLYDASGVLEKNRDTLPADVVVVLRTSENKLLQQLFSIPLTKTGNLAQTRARITVASSSLPPHFSAGKAKVDTLEVIRHPEETTNMKRQTVASYFRYSLMDLLSKMVVGQPHFVRCIKPNDDREALQFSRERVLAQLRSTGILETVSIRRQGYSHRILFEEFVKRYYYLAFTAHQTPLASKESCVAILEKSRLDHWVLGKTKVFLKYYHVEQLNLLLREVIGRVVVLQAYTKGWLGARRYKRVREKREKGAIAIQSAWRGYDARRKFKKISNRRNESAAHNQAGDTSNQSSGPHSPVAAGTRGSAEVQDCSEPGDHKVLRGSVHRRSHSQAESNNGRTQTSSNSPAVTEKNGHSQAQSSPKGCDIFAGHANKHSVSGTDLLSSRICHPAPDQQGLSLWGAPQKPGSENGLAQKHRTPRRRCQQPKMLSSPEDTMYYNQLNGTLEYQGSKRKPRKLGQIKVLDGEDEYYKSLSPVDCIPEENNSAHPSFFSSSSKGDSFAQH

SEQ ID NO: 54610 - protein, 1314 aa, Homo sapiens
MKHLYGLFHYNPMMLGLESLPDPTDTWEIIETIGKGTYGKVYKVTNKRDGSLAAVKILDPVSDMDEEIEAEYNILQFLPNHPNVVKFYGMFYKADHCVGGQLWLVLELCNGGSVTELVKGLLRCGQRLDEAMISYILYGALLGLQHLHNNRIIHRDVKGNNILLTTEGGVKLVDFGVSAQLTSTRLRRNTSVGTPFWMAPEVIACEQQYDSSYDARCDVWSLGITAIELGDGDPPLFDMHPVKTLFKIPRNPPPTLLHPEKWCEEFNHFISQCLIKDFERRPSVTHLLDHPFIKGVHGKVLFLQKQLAKVLQDQKHQNPVAKTRHERMHTRRPYHVEDAEKYCLEDDLVNLEVLDEDTIIHQLQKRYADLLIYTYVGDILIALNPFQNLSIYSPQFSRLYHGVKRASNPPHIFASADAAYQCMVTLSKDQCIVISGESGSGKTESAHLIVQHLTFLGKANNQTLREKILQVNSLVEAFGNSCTAINDNSSRFGKYLEMMFTPTGVVMGARISEYLLEKSRVIKQAAREKNFHIFYYIYAGLHHQKKLSDFRLPEEKPPRYIADETGRVMHDITSKESYRRQFEAIQHCFRIIGFTDKEVHSVYRILAGILNIGNIEFAAISSQHQTDKSEVPNAEALQNAASVLCISPEELQEALTSHCVVTRGETIIRANTVDRAADVRDAMSKALYGRLFSWIVNRINTLLQPDENICSAGGGMNVGILDIFGFENFQRNSFEQLCINIANEQIQYYFNQHVFALEQMEYQNEGIDAVPVEYEDNRPLLDMFLQKPLGLLALLDEESRFPQATDQTLVDKFEDNLRCKYFWRPKGVELCFGIQHYAGKVLYDASGVLEKNRDTLPADVVVVLRTSENKLLQQLFSIPLTKTGNLAQTRARITVASSSLPPHFSAGKAKVDTLEVIRHPEETTNMKRQTVASYFRYSLMDLLSKMVVGQPHFVRCIKPNDDREALQFSRERVLAQLRSTGILETVSIRRQGYSHRILFEEFVKRYYYLAFTAHQTPLASKESCVAILEKSRLDHWVLGKTKVFLKYYHVEQLNLLLREVIGRVVVLQAYTKGWLGARRYKRVREKREKGAIAIQSGDTSNQSSGPHSPVAAGTRGSAEVQDCSEPGDHKVLRGSVHRRSHSQAESNNGRTQTSSNSPAVTEKNGHSQAQSSPKGCDIFAGHANKHSVSGTDLLSSRICHPAPDQQGLSLWGAPQKPGSENGLAQKHRTPRRRCQQPKMLSSPEDTMYYNQLNGTLEYQGSKRKPRKLGQIKVLDGEDEYYKSLSPVDCIPEENNSAHPSFFSSSSKGDSFAQH

SEQ ID NO: 54611 - protein, 1129 aa, Homo sapiens
MNINDGGRRRFEDNEHTLRIYPGAISEGTIYCPIPARKNSTAAEVIESLINKLHLDKTKCYVLAEVKEFGGEEWILNPTDCPVQRMMLWPRMALENRLSGEDYRFLLREKNLDGSIHYGSLQSWLRVTEERRRMMERGFLPQPQQKDFDDLCSLPDLNEKTLLENLRNRFKHEKIYTYVGSILIVINPFKFLPIYNPKYVKMYDNHQLGKLEPHIYAVADVAYHAMLQRKKNQCIVISGESGSGKTQSTNFLIHHLTALSQKGFASGVEQIILGAGPVLEAFGNAKTAHNNNSSRFGKFIQVNYQETGTVLGAYVEKYLLEKSRLVYQEHNERNYHVFYYLLAGASEDERSAFHLKQPEEYHYLNQDCFTVEGEDLRHDFERLQLAMEMVGFLPKTRRQIFSLLSAILHLGNICYKKKTYRDDSIDICNPEVLPIVSELLEVKEEMLFEALVTRKTVTVGEKLILPYKLAEAVTVRNSMAKSLYSALFDWIVFRINHALLNSKDLEHNTKTLSIGVLDIFGFEDYENNSFEQFCINFANERLQHYFNQHIFKLEQEEYRTEGISWHNIDYIDNTCCINLISKKPTGLLHLLDEESNFPQATNQTLLDKFKHQHEDNSYIEFPAVMEPAFIIKHYAGKVKYGVKDFREKNTDHMRPDIVALLRSSKNAFISGMIGIDPVAVFRWAILRAFFRAMVAFREAGKRNIHRKTGHDDTAPCAILKSMDSFSFLQHPVHQRSLEILQRCKEEKYSITRKNPRTPLSDLQGMNALNEKNQHDTFDIAWNGRTGIRQSRLSSGTSLLDKDGIFANSTSSKLLERAHGILTRNKNFKSKPALPKHLLEVNSLKHLTRLTLQDRITKSLLHLHKKKKPPSISAQFQASLSKLMETLGQAEPYFVKCIRSNAEKLPLRFSDVLVLRQLRYTGMLETVRIRQSGYSSKYSFQDFVSHFHVLLPRNIIPSKFNIQDFFRKINLNPDNYQVGKTMVFLKEQERQHLQDLLHQEVLRRIILLQRWFRVLLCRQHFLHLRQASVIIQRFWRNYLNQKQVRDAAVQKDAFVMASAAALLQASWRAHLERQRYLELRAAAIVIQQKWRDYYRRRHMAAICIQARWKAYRESKRYQEQRKNYPFAINM

SEQ ID NO: 54612 - protein, 2548 aa, Homo sapiens
MNINDGGRRRFEDNEHTLRIYPGAISEGTIYCPIPARKNSTAAEVIESLINKLHLDKTKCYVLAEVKEFGGEEWILNPTDCPVQRMMLWPRMALENRLSGEDYRFLLREKNLDGSIHYGSLQSWLRVTEERRRMMERGFLPQPQQKDFDDLCSLPDLNEKTLLENLRNRFKHEKIYTYVGSILIVINPFKFLPIYNPKYVKMYDNHQLGKLEPHIYAVADVAYHAMLQRKKNQCIVISGESGSGKTQSTNFLIHHLTALSQKGFASGVEQIILGAGPVLEAFGNAKTAHNNNSSRFGKFIQVNYQETGTVLGAYVEKYLLEKSRLVYQEHNERNYHVFYYLLAGASEDERSAFHLKQPEEYHYLNQITKKPLRQSWDDYCYDSEPDCFTVEGEDLRHDFERLQLAMEMVGFLPKTRRQIFSLLSAILHLGNICYKKKTYRDDSIDICNPEVLPIVSELLEVKEEMLFEALVTRKTVTVGEKLILPYKLAEAVTVRNSMAKSLYSALFDWIVFRINHALLNSKDLEHNTKTLSIGVLDIFGFEDYENNSFEQFCINFANERLQHYFNQHIFKLEQEEYRTEGISWHNIDYIDNTCCINLISKKPTGLLHLLDEESNFPQATNQTLLDKFKHQHEDNSYIEFPAVMEPAFIIKHYAGKVKYGVKDFREKNTDHMRPDIVALLRSSKNAFISGMIGIDPVAVFRWAILRAFFRAMVAFREAGKRNIHRKTGHDDTAPCAILKSMDSFSFLQHPVHQRSLEILQRCKEEKYSITRKNPRTPLSDLQGMNALNEKNQHDTFDIAWNGRTGIRQSRLSSGTSLLDKDGIFANSTSSKLLERAHGILTRNKNFKSKPALPKHLLEVNSLKHLTRLTLQDRITKSLLHLHKKKKPPSISAQFQASLSKLMETLGQAEPYFVKCIRSNAEKLPLRFSDVLVLRQLRYTGMLETVRIRQSGYSSKYSFQDFVSHFHVLLPRNIIPSKFNIQDFFRKINLNPDNYQVGKTMVFLKEQERQHLQDLLHQEVLRRIILLQRWFRVLLCRQHFLHLRQASVIIQRFWRNYLNQKQVRDAAVQKDAFVMASAAALLQASWRAHLERQRYLELRAAAIVIQQKWRDYYRRRHMAAICIQARWKAYRESKRYQEQRKKIILLQSTCRGFRARQRFKALKEQRLRETKPEVGLVNIKGYGSLEIQGSDPSGWEDCSFDNRIKAIEECKSVIESNRISRESSVDCLKESPNKQQERAQSQSGVDLQEDVLVRERPRSLEDLHQKKVGRAKRESRRMRELEQAIFSLELLKVRSLGGISPSEDRRWSTELVPEGLQSPRGTPDSESSQGSLELLSYEESQKSKLESVISDEGDLQFPSPKISSSPKFDSRDNALSASNETSSAEHLKDGTMKEMVVCSSESITCKPQLKDSFISNSLPTFFYIPQQDPLKTNSQLDTSIQRNKLLENEDTAGEALTLDINRETRRYHCSGKDQIVPSLNTESSNPVLKKLEKLNTEKEERQKQLQQQNEKEMMEQIRQQTDILEKERKAFKTIEKPRIGECLVAPSSYQSKQRVERPSSLLSLNTSNKGELNVLGSLSLKDAALAQKDSSSAHLPPKDRPVTVFFERKGSPCQSSTVKELSKTDRMGTQLNVACKLSNNRISKREHFRPTQSYSHNSDDLSREGNARPIFFTPKDNMSIPLVSKEALNSKNPQLHKEDEPAWKPVKLAGPGQRETSQRFSSVDEQAKLHKTMSQGEITKLAVRQKASDSDIRPQRAKMRFWAKGKQGEKKTTRVKPTTQSEVSPLFAGTDVIPAHQFPDELAAYHPTPPLSPELPGSCRKEFKENKEPSPKAKRKRSVKISNVALDSMHWQNDSVQIIASVSDLKSMDEFLLKKVNDLDNEDSKKDTLVDVVFKKALKEFRQNIFSFYSSALAMDDGKSIRYKDLYALFEQILEKTMRLEQRDSLGESPVRVWVNTFKVFLDEYMNEFKTSDCTATKVPKTERKKRRKKETDLVEEHNGHIFKATQYSIPTYCEYCSSLIWIMDRASVCKLCKYACHKKCCLKTTAKCSKKYDPELSSRQFGVELSRLTSEDRTVPLVVEKLINYIEMHGLYTEGIYRKSGSTNKIKELRQGLDTDAESVNLDDYNIHVIASVFKQWLRDLPNPLMTFELYEEFLRAMGLQERKETIRGVYSVIDQLSRTHLNTLERLIFHLVRIALQEDTNRMSANALAIVFAPCILRCPDTTDPLQSVQDISKTTTCVELIVVEQMNKYKARLKDISSLEFAENKAKTRLSLIRRSMGKGRIRRGNYPGPSSPVVVRLPSVSDVSEETLTSEAAMETDITEQQQAAMQQEERVLTEQIENLQKEKEELTFEMLVLEPRASDDETLESEASIGTADSSENLNMESEYAISEKSERSLALSSLKTAGKSEPSSKLRKQLKKQQDSLDVVDSSVSSLCLSNTASSHGTRKLFQIYSKSPFYRAASGNEALGMEGPLGQTKFLEDKPQFISRGTFNPEKGKQKLKNVKNSPQKTKETPEGTVMSGRRKTVDPDCTSNQQLALFGNNEFMV

SEQ ID NO: 54613 - protein, 2619 aa, Homo sapiens
MNINDGGRRRFEDNEHTLRIYPGAISEGTIYCPIPARKNSTAAEVIESLINKLHLDKTKCYVLAEVKEFGGEEWILNPTDCPVQRMMLWPRMALENRLSGEDYRFLLREKNLDGSIHYGSLQSWLRVTEERRRMMERGFLPQPQQKDFDDLCSLPDLNEKTLLENLRNRFKHEKIYTYVGSILIVINPFKFLPIYNPKYVKMYDNHQLGKLEPHIYAVADVAYHAMLQRKKNQCIVISGESGSGKTQSTNFLIHHLTALSQKGFASGVEQIILGAGPVLEAFGNAKTAHNNNSSRFGKFIQVNYQETGTVLGAYVEKYLLEKSRLVYQEHNERNYHVFYYLLAGASEDERSAFHLKQPEEYHYLNQITKKPLRQSWDDYCYDSEPDCFTVEGEDLRHDFERLQLAMEMVGFLPKTRRQIFSLLSAILHLGNICYKKKTYRDDSIDICNPEVLPIVSELLEVKEEMLFEALVTRKTVTVGEKLILPYKLAEAVTVRNSMAKSLYSALFDWIVFRINHALLNSKDLEHNTKTLSIGVLDIFGFEDYENNSFEQFCINFANERLQHYFNQHIFKLEQEEYRTEGISWHNIDYIDNTCCINLISKKPTGLLHLLDEESNFPQATNQTLLDKFKHQHEDNSYIEFPAVMEPAFIIKHYAGKVKYGVKDFREKNTDHMRPDIVALLRSSKNAFISGMIGIDPVAVFRWAILRAFFRAMVAFREAGKRNIHRKTGHDDTAPCAILKSMDSFSFLQHPVHQRSLEILQRCKEEKYSITRKNPRTPLSDLQGMNALNEKNQHDTFDIAWNGRTGIRQSRLSSGTSLLDKDGIFANSTSSKLLERAHGILTRNKNFKSKPALPKHLLEVNSLKHLTRLTLQDRITKSLLHLHKKKKPPSISAQFQASLSKLMETLGQAEPYFVKCIRSNAEKLPLRFSDVLVLRQLRYTGMLETVRIRQSGYSSKYSFQDFVSHFHVLLPRNIIPSKFNIQDFFRKINLNPDNYQVGKTMVFLKEQERQHLQDLLHQEVLRRIILLQRWFRVLLCRQHFLHLRQASVIIQRFWRNYLNQKQVRDAAVQKDAFVMASAAALLQASWRAHLERQRYLELRAAAIVIQQKWRDYYRRRHMAAICIQARWKAYRESKRYQEQRKKIILLQSTCRGFRARQRFKALKEQRLRETKPEVGLVNIKGYGSLEIQGSDPSGWEDCSFDNRIKAIEECKSVIESNRISRESSVDCLKESPNKQQERAQSQSGVDLQEDVLVRERPRSLEDLHQKKVGRAKRESRRMRELEQAIFSLELLKVRSLGGISPSEDRRWSTELVPEGLQSPRGTPDSESSQGSLELLSYEESQKSKLESVISDEGDLQFPSPKISSSPKFDSRDNALSASNETSSAEHLKDGTMKEMVVCSSESITCKPQLKDSFISNSLPTFFYIPQQDPLKTNSQLDTSIQRNKLLENEDTAGEALTLDINRETRRYHCSGKDQIVPSLNTESSNPVLKKLEKLNTEKEERQKQLQQQNEKEMMEQIRQQTDILEKERKAFKTIEKPRIGECLVAPSSYQSKQRVERPSSLLSLNTSNKGELNVLGSLSLKDAALAQKDSSSAHLPPKDRPVTVFFERKGSPCQSSTVKELSKTDRMGTQLNVACKLSNNRISKREHFRPTQSYSHNSDDLSREGNARPIFFTPKDNMSIPLVSKEALNSKNPQLHKEDEPAWKPVKLAGPGQREVARPAHKKKARMARTRSDFLTRGTFADGEGDTEEDDYDDIIEPLLSLDQASHCELGPAPSLGQASHSDSEMTSQRFSSVDEQAKLHKTMSQGEITKLAVRQKASDSDIRPQRAKMRFWAKGKQGEKKTTRVKPTTQSEVSPLFAGTDVIPAHQFPDELAAYHPTPPLSPELPGSCRKEFKENKEPSPKAKRKRSVKISNVALDSMHWQNDSVQIIASVSDLKSMDEFLLKKVNDLDNEDSKKDTLVDVVFKKALKEFRQNIFSFYSSALAMDDGKSIRYKDLYALFEQILEKTMRLEQRDSLGESPVRVWVNTFKVFLDEYMNEFKTSDCTATKVPKTERKKRRKKETDLVEEHNGHIFKATQYSIPTYCEYCSSLIWIMDRASVCKLCKYACHKKCCLKTTAKCSKKYDPELSSRQFGVELSRLTSEDRTVPLVVEKLINYIEMHGLYTEGIYRKSGSTNKIKELRQGLDTDAESVNLDDYNIHVIASVFKQWLRDLPNPLMTFELYEEFLRAMGLQERKETIRGVYSVIDQLSRTHLNTLERLIFHLVRIALQEDTNRMSANALAIVFAPCILRCPDTTDPLQSVQDISKTTTCVELIVVEQMNKYKARLKDISSLEFAENKAKTRLSLIRRSMGKGRIRRGNYPGPSSPVVVRLPSVSDVSEETLTSEAAMETDITEQQQAAMQQEERVLTEQIENLQKEKEELTFEMLVLEPRASDDETLESEASIGTADSSENLNMESEYAISEKSERSLALSSLKTAGKSEPSSKLRKQLKKQQDSLDVVDSSVSSLCLSNTASSHGTRKLFQIYSKSPFYRAASGNEALGMEGPLGQTKFLEDKPQFISRGTFNPEKGKQKLKNVKNSPQKTKETPEGTVMSGRRKTVDPDCTSNQQLALFGNNEFMV

SEQ ID NO: 54614 - protein, 2529 aa, Homo sapiens
MNINDGGRRRFEDNEHTLRIYPGAISEGTIYCPIPARKNSTAAEVIESLINKLHLDKTKCYVLAEVKEFGGEEWILNPTDCPVQRMMLWPRMALENRLSGEDYRFLLREKNLDGSIHYGSLQSWLRVTEERRRMMERGFLPQPQQKDFDDLCSLPDLNEKTLLENLRNRFKHEKIYTYVGSILIVINPFKFLPIYNPKYVKMYDNHQLGKLEPHIYAVADVAYHAMLQRKKNQCIVISGESGSGKTQSTNFLIHHLTALSQKGFASGVEQIILGAGPVLEAFGNAKTAHNNNSSRFGKFIQVNYQETGTVLGAYVEKYLLEKSRLVYQEHNERNYHVFYYLLAGASEDERSAFHLKQPEEYHYLNQDCFTVEGEDLRHDFERLQLAMEMVGFLPKTRRQIFSLLSAILHLGNICYKKKTYRDDSIDICNPEVLPIVSELLEVKEEMLFEALVTRKTVTVGEKLILPYKLAEAVTVRNSMAKSLYSALFDWIVFRINHALLNSKDLEHNTKTLSIGVLDIFGFEDYENNSFEQFCINFANERLQHYFNQHIFKLEQEEYRTEGISWHNIDYIDNTCCINLISKKPTGLLHLLDEESNFPQATNQTLLDKFKHQHEDNSYIEFPAVMEPAFIIKHYAGKVKYGVKDFREKNTDHMRPDIVALLRSSKNAFISGMIGIDPVAVFRWAILRAFFRAMVAFREAGKRNIHRKTGHDDTAPCAILKSMDSFSFLQHPVHQRSLEILQRCKEEKYSITRKNPRTPLSDLQGMNALNEKNQHDTFDIAWNGRTGIRQSRLSSGTSLLDKDGIFANSTSSKLLERAHGILTRNKNFKSKPALPKHLLEVNSLKHLTRLTLQDRITKSLLHLHKKKKPPSISAQFQASLSKLMETLGQAEPYFVKCIRSNAEKLPLRFSDVLVLRQLRYTGMLETVRIRQSGYSSKYSFQDFVSHFHVLLPRNIIPSKFNIQDFFRKINLNPDNYQVGKTMVFLKEQERQHLQDLLHQEVLRRIILLQRWFRVLLCRQHFLHLRQASVIIQRFWRNYLNQKQVRDAAVQKDAFVMASAAALLQASWRAHLERQRYLELRAAAIVIQQKWRDYYRRRHMAAICIQARWKAYRESKRYQEQRKKIILLQSTCRGFRARQRFKALKEQRLRETKPEVGLVNIKGYGSLEIQGSDPSGWEDCSFDNRIKAIEECKSVIESNRISRESSVDCLKESPNKQQERAQSQSGVDLQEDVLVRERPRSLEDLHQKKVGRAKRESRRMRELEQAIFSLELLKVRSLGGISPSEDRRWSTELVPEGLQSPRGTPDSESSQGSLELLSYEESQKSKLESVISDEGDLQFPSPKISSSPKFDSRDNALSASNETSSAEHLKDGTMKEMVVCSSESITCKPQLKDSFISNSLPTFFYIPQQDPLKTNSQLDTSIQRNKLLENEDTAGEALTLDINRETRRYHCSGKDQIVPSLNTESSNPVLKKLEKLNTEKEERQKQLQQQNEKEMMEQIRQQTDILEKERKAFKTIEKPRIGECLVAPSSYQSKQRVERPSSLLSLNTSNKGELNVLGSLSLKDAALAQKDSSSAHLPPKDRPVTVFFERKGSPCQSSTVKELSKTDRMGTQLNVACKLSNNRISKREHFRPTQSYSHNSDDLSREGNARPIFFTPKDNMSIPLVSKEALNSKNPQLHKEDEPAWKPVKLAGPGQRETSQRFSSVDEQAKLHKTMSQGEITKLAVRQKASDSDIRPQRAKMRFWAKGKQGEKKTTRVKPTTQSEVSPLFAGTDVIPAHQFPDELAAYHPTPPLSPELPGSCRKEFKENKEPSPKAKRKRSVKISNVALDSMHWQNDSVQIIASVSDLKSMDEFLLKKVNDLDNEDSKKDTLVDVVFKKALKEFRQNIFSFYSSALAMDDGKSIRYKDLYALFEQILEKTMRLEQRDSLGESPVRVWVNTFKVFLDEYMNEFKTSDCTATKVPKTERKKRRKKETDLVEEHNGHIFKATQYSIPTYCEYCSSLIWIMDRASVCKLCKYACHKKCCLKTTAKCSKKYDPELSSRQFGVELSRLTSEDRTVPLVVEKLINYIEMHGLYTEGIYRKSGSTNKIKELRQGLDTDAESVNLDDYNIHVIASVFKQWLRDLPNPLMTFELYEEFLRAMGLQERKETIRGVYSVIDQLSRTHLNTLERLIFHLVRIALQEDTNRMSANALAIVFAPCILRCPDTTDPLQSVQDISKTTTCVELIVVEQMNKYKARLKDISSLEFAENKAKTRLSLIRRSMGKGRIRRGNYPGPSSPVVVRLPSVSDVSEETLTSEAAMETDITEQQQAAMQQEERVLTEQIENLQKEKEELTFEMLVLEPRASDDETLESEASIGTADSSENLNMESEYAISEKSERSLALSSLKTAGKSEPSSKLRKQLKKQQDSLDVVDSSVSSLCLSNTASSHGTRKLFQIYSKSPFYRAASGNEALGMEGPLGQTKFLEDKPQFISRGTFNPEKGKQKLKNVKNSPQKTKETPEGTVMSGRRKTVDPDCTSNQQLALFGNNEFMV

SEQ ID NO: 54615 - protein, 729 aa, Homo sapiens
MNINDGGRRRFEDNEHTLRIYPGAISEGTIYCPIPARKNSTAAEVIESLINKLHLDKTKCYVLAEVKEFGGEEWILNPTDCPVQRMMLWPRMALENRLSGEDYRFLLREKNLDGSIHYGSLQSWLRVTEERRRMMERGFLPQPQQKDFDDLCSLPDLNEKTLLENLRNRFKHEKIYTYVGSILIVINPFKFLPIYNPKYVKMYDNHQLGKLEPHIYAVADVAYHAMLQRKKNQCIVISGESGSGKTQSTNFLIHHLTALSQKGFASGVEQIILGAGPVLEAFGNAKTAHNNNSSRFGKFIQVNYQETGTVLGAYVEKYLLEKSRLVYQEHNERNYHVFYYLLAGASEDERSAFHLKQPEEYHYLNQITKKPLRQSWDDYCYDSEPDCFTVEGEDLRHDFERLQLAMEMVGFLPKTRRQIFSLLSAILHLGNICYKKKTYRDDSIDICNPEVLPIVSELLEVKEEMLFEALVTRKTVTVGEKLILPYKLAEAVTVRNSMAKSLYSALFDWIVFRINHALLNSKDLEHNTKTLSIGVLDIFGFEDYENNSFEQFCINFANERLQHYFNQHIFKLEQEEYRTEGISWHNIDYIDNTCCINLISKKPTGLLHLLDEESNFPQATNQTLLDKFKHQHEDNSYIEFPAVMEPAFIIKHYAGKVKYGVKDFREKNTDHMRPDIVALLRSSKNAFISGMIGIDPVAVFRWAILRAFFRAMVAFREAGKRNIHRKTGK

SEQ ID NO: 54616 - protein, 502 aa, Homo sapiens
MDKALLCSVCKMTCHKKCVHKIQSHCSYTYGRKGEPGVEPGHFGVCVDSLTSDKASVPIVLEKLLEHVEMHGLYTEGLYRKSGAANRTRELRQALQTDPAAVKLENFPIHAITGVLKQWLRELPEPLMTFAQYGDFLRAVELPEKQEQLAAIYAVLEHLPEANHNSLERLIFHLLAVALLEDVNRMSPGALAIIFAPCLLRCPDNSDPLTSMKDVLKITTCVEMLIKEQMRKYKVKMEEISQLEAAESIAFRRLSLLRQNAPWPLKLGFSSPYEGVLNKSPKTRDIQEEELEVLLEEEAAGGDEDREKEILIERIQSIKEEKQDITYRLPELDPRGSDEENLDSETSASTESLLEERAGRGASEGPPAPALPCPGAPTPSPLPTVAAPPRRRPSSFVTVRVKTPRRTPIMPTANIKLPPGLPSHLPRWAPGAREAAAPVRRREPPARRPDQIHSVYITPGADLPVQGALEPLEEDGQPPGAKRRYSDPPTYCLPPASGQTNG

SEQ ID NO: 54617 - protein, 2022 aa, Homo sapiens
MSVKEAGSSGRREQAAYHLHIYPQLSTTESQASCRVTATKDSTTSDVIKDAIASLRLDGTKCYVLVEVKESGGEEWVLDANDSPVHRVLLWPRRAQDEHPQEDGYYFLLQERNADGTIKYVHMQLVAQATATRRLVERGLLPRQQADFDDLCNLPELTEGNLLKNLKHRFLQQKIYTYAGSILVAINPFKFLPIYNPKYVKMYENQQLGKLEPHVFALADVAYYTMLRKRVNQCIVISGESGSGKTQSTNFLIHCLTALSQKGYASGVERTILGAGPVLEAFGNAKTAHNNNSSRFGKFIQVSYLESGIVRGAVVEKYLLEKSRLVSQEKDERNYHVFYYLLLGVSEEERQEFQLKQPEDYFYLNQHNLKIEDGEDLKHDFERLKQAMEMVGFLPATKKQIFAVLSAILYLGNVTYKKRATGREEGLEVGPPEVLDTLSQLLKVKREILVEVLTKRKTVTVNDKLILPYSLSEAITARDSMAKSLYSALFDWIVLRINHALLNKKDVEEAVSCLSIGVLDIFGFEDFERNSFEQFCINYANEQLQYYFNQHIFKLEQEEYQGEGITWHNIGYTDNVGCIHLISKKPTGLFYLLDEESNFPHATSQTLLAKFKQQHEDNKYFLGTPVMEPAFIIQHFAGKVKYQIKDFREKNMDYMRPDIVALLRGSDSSYVRELIGMDPVAVFRWAVLRAAIRAMAVLREAGRLRAERAEKAAGMSSPGAQSHPEELPRGASTPSEKLYRDLHNQMIKSIKGLPWQGEDPRSLLQSLSRLQKPRAFILKSKGIKQKQIIPKNLLDSKSLKLIISMTLHDRTTKSLLHLHKKKKPPSISAQFQTSLNKLLEALGKAEPFFIRCIRSNAEKKELCFDDELVLQQLRYTGMLETVRIRRSGYSAKYTFQDFTEQFQVLLPKDAQPCREVISTLLEKMKIDKRNYQIGKTKVFLKETERQALQETLHREVVRKILLLQSWFRMVLERRHFLQMKRAAVTIQACWRSYRVRRALERTQAAVYLQASWRGYWQRKLYRHQKQSIIRLQSLCRGHLQRKSFSQMISEKQKAEEKEREALEAARAGAEEGGQGQAAGGQQVAEQGPEPAEDGGHLASEPEVQPSDRSPLEHSSPEKEAPSPEKTLPPQKTVAAESHEKVPSSREKRESRRQRGLEHVKFQNKHIQSCKEESALREPSRRVTQEQGVSLLEDKKESREDETLLVVETEAENTSQKQPTEQPQAMAVGKVSEETEKTLPSGSPRPGQLERPTSLALDSRVSPPAPGSAPETPEDKSKPCGSPRVQEKPDSPGGSTQIQRYLDAERLASAVELWRGKKLVAAASPSAMLSQSLDLSDRHRATGAALTPTEERRTSFSTSDVSKLLPSLAKAQPAAETTDGERSAKKPAVQKKKPGDASSLPDAGLSPGSQVDSKSTFKRLFLHKTKDKKYSLEGAEELENAVSGHVVLEATTMKKGLEAPSGQQHRHAAGEKRTKEPGGKGKKNRNVKIGKITVSEKWRESVFRQITNANELKYLDEFLLNKINDLRSQKTPIESLFIEATEKFRSNIKTMYSVPNGKIHVGYKDLMENYQIVVSNLATERGQKDTNLVLNLFQSLLDEFTRGYTKNDFEPVKQSKAQKKKRKQERAVQEHNGHVFASYQVSIPQSCEQCLSYIWLMDKALLCSVCKMTCHKKCVHKIQSHCSYTYGRKGEPGVEPGHFGVCVDSLTSDKASVPIVLEKLLEHVEMHGLYTEGLYRKSGAANRTRELRQALQTDPAAVKLENFPIHAITGVLKQWLRELPEPLMTFAQYGDFLRAVELPEKQEQLAAIYAVLEHLPEANHNSLERLIFHLVKVALLEDVNRMSPGALAIIFAPCLLRCPDNSDPLTSMKDVLKITTCVEMLIKEQMRKYKVKMEEISQLEAAESIAFRRLSLLRQNAPWPLKLGFSSPYEGVLNKSPKTRDIQEEELEVLLEEEAAGGDEDREKEILIERIQSIKEEKEDITYRLPELDPRGSDEENLDSETSASTESLLEERAGRGASEGQY

SEQ ID NO: 54618 - protein, 2022 aa, Homo sapiens; identical to SEQ ID NO: 54617

SEQ ID NO: 54619 - protein, 172 aa, Homo sapiens
MSSKKAKTKTTKKRPQRATSNVFAMFDQSQIQEFKEAFNMIDQNRDGFIDKEDLHDMLASLGKNPTDAYLDAMMNEAPGPINFTMFLTMFGEKLNGTDPEDVIRNAFACFDEEATGTIQEDYLRELLTTMGDRFTDEEVDELYREAPIDKKGNFNYIEFTRILKHGAKDKDD

SEQ ID NO: 54620 - protein, 596 aa, Homo sapiens
MATENGAVELGIQNPSTDKAPKGPTGERPLAAGKDPGPPDPKKAPDPPTLKKDAKAPASEKGDGTLAQPSTSSQGPKGEGDRGGGPAEGSAGPPAALPQQTATPETSVKKPKAEQGASGSQDPGKPRVGKKAAEGQAAARRGSPAFLHSPSCPAIISSSEKLLAKKPPSEASELTFEGVPMTHSPTDPRPAKAEEGKNILAESQKEVGEKTPGQAGQAKMQGDTSRGIEFQAVPSEKSEVGQALCLTAREEDCFQILDDCPPPPAPFPHRMVELRTGNVSSEFSMNSKEALGGGKFGAVCTCMEKATGLKLAAKVIKKQTPKDKEMVLLEIEVMNQLNHRNLIQLYAAIETPHEIVLFMEYIEGGELFERIVDEDYHLTEVDTMVFVRQICDGILFMHKMRVLHLDLKPENILCVNTTGHLVKIIDFGLARRYNPNEKLKVNFGTPEFLSPEVVNYDQISDKTDMWSMGVITYMLLSGLSPFLGDDDTETLNNVLSGNWYFDEETFEAVSDEAKDFVSNLIVKDQRARMNAAQCLAHPWLNNLAEKAKRCNRRLKSQILLKKYLMKRRWKKNFIAVSAANRFKKISSSGALMALGV

SEQ ID NO: 54621 - protein, 596 aa, Homo sapiens; identical to SEQ ID NO: 54620

SEQ ID NO: 54622 - protein, 819 aa, Homo sapiens
MSGTSKESLGHGGLPGLGKTCLTTMDTKLNMLNEKVDQLLHFQEDVTEKLQSMCRDMGHLERGLHRLEASRAPGPGGADGVPHIDTQAGWPEVLELVRAMQQDAAQHGARLEALFRMVAAVDRAIALVGATFQKSKVADFLMQGRVPWRRGSPGDSPEENKERVEEEGGKPKHVLSTSGVQSDAREPGEESQKADVLEGTAERLPPIRASGLGADPAQAVVSPGQGDGVPGPAQAFPGHLPLPTKVEAKAPETPSENLRTGLELAPAPGRVNVVSPSLEVAPGAGQGASSSRPDPEPLEEGTRLTPGPGPQCPGPPGLPAQARATHSGGETPPRISIHIQEMDTPGEMLMTGRGSLGPTLTTEAPAAAQPGKQGPPGTGRCLQAPGTEPGEQTPEGARELSPLQESSSPGGVKAEEEQRAGAEPGTRPSLARSDDNDHEVGALGLQQGKSPGAGNPEPEQDCAARAPVRAEAVRRMPPGAEAGSVVLDDSPAPPAPFEHRVVSVKETSISAGYEVCQHEVLGGGRFGQVHRCTEKSTGLPLAAKIIKVKSAKDREDVKNEINIMNQLSHVNLIQLYDAFESKHSCTLVMEYVDGGELFDRITDEKYHLTELDVVLFTRQICEGVHYLHQHYILHLDLKPENILCVNQTGHQIKIIDFGLARRYKPREKLKVNFGTPEFLAPEVVNYEFVSFPTDMWSVGVITYMLLSGLSPFLGETDAETMNFIVNCSWDFDADTFEGLSEEAKDFVSRLLVKEKSCRMSATQCLKHEWLNNLPAKASRSKTRLKSQLLLQKYIAQRKWKKHFYVVTAANRLRKFPTSP

SEQ ID NO: 54623 - protein, 478 aa, Homo sapiens
MDTPGEMLMTGRGSLGPTLTTEAPAAAQPGKQGPPGTGRCLQAPGTEPGEQTPEGARELSPLQESSSPGGVKAEEEQRAGAEPGTRPSLARSDDNDHEVGALGLQQGKSPGAGNPEPEQDCAARAPVRAEAVRRMPPGAEAGSVVLDDSPAPPAPFEHRVVSVKETSISAGYEVCQHEVLGGGRFGQVHRCTEKSTGLPLAAKIIKVKSAKDREDVKNEINIMNQLSHVNLIQLYDAFESKHSCTLVMEYVDGGELFDRITDEKYHLTELDVVLFTRQICEGVHYLHQHYILHLDLKPENILCVNQTGHQIKIIDFGLARRYKPREKLKVNFGTPEFLAPEVVNYEFVSFPTDMWSVGVITYMLLSGLSPFLGETDAETMNFIVNCSWDFDADTFEGLSEEAKDFVSRLLVKEKSCRMSATQCLKHEWLNNLPAKASRSKTRLKSQLLLQKYIAQRKWKKHFYVVTAANRLRKFPTSP

SEQ ID NO: 54624 - protein, 1403 aa, Homo sapiens
  VARIANT 1: note = MOD_RES - Any amino acid
XLLLESCEKEKQALLQNLKEVEDKASAYEDQLQGQAQQVETLQKEKLSATFEGSEQVHQLEEQLEAREASVRRLAEHVQSLCDERDLLRQRFQELTERVATSDEDVAELREKLRRREADNQSLEHSYQRVSSQLQSMHTLLREKEEELERIKEAHEKVLEKKEQDLNEALVKMVALGSSLEETEIKLQAKEEILRKFASESPKDMEEPRSTPEETERDGTLLPGQPVQATRAPLGLPHTRLEDEDEDLGAPPGEEYGDGSPSREDSMVPPKSVEVLDREGHQQGTAKLDQGAPGVKRQRIRFSTIQCQRYIHPEGSEKTWTSSTSSDTSQDRSPSEESMSSEPAPSVLPATGDSDTYLSIIHSLETKLYVTEEKLKDVTVRLESQQGQSREALLALHHQWAGTEAQLREQLRASLLQVGALASQLEQERQERARRVEGHVGELGDFQVKNSQALMCLENCREQLRSLPRASQEDEQDARAASLASVESALVSAIQALQHWPAPAHGGARAQLETGGTEENGKPASLQQCSQSELTEQEQVRLLSDQIALEASLISQIADSLKNTTSDVSRMLHEISWSGQPPMESAGAPVDTWARKVLVDGEFWSQVESLRKHLGTLGGEAVGASGDGQQSIPQGLAPILANATWVRAELSFATQSVRESFHRRLQSIQETLRGTQTALRQHKCLLREILGAYQTPDFERVMQQVLEALRLPAGHEDGVQLSWDLSPLGEVLGRDSDSSQEPFDVSDQSPGAFVAIQEELAQQLKEKASLLEEIAAALPSLPPVESLRDCQKLLQVSQSLSYNTCLGGLGQYSSLLVQDAIIQAQVCYASCRIRLEYEKELQLCKESWQTREPSCSEQAQAARALREEYEELLRKQKSEYLDVIAIVERENAELKAKAAQLDHQQQCLEDAESKHSMSMFTLRGRYEEEIRCVVEQLTRTESTLQAERSRVLSQLDASVRDRQDMERHHGEQIQTLEDRFQLKVRELQTIHEEELRTLQEHYSQSLRCLQDTLCLHQGPHPKALPAPAPNWQATQGEADSMTGLRERIQELEAQMDVMREELGHKDLEGDAATLREKYQRDLESLKATCERGFAAMEETHQKKIEDLQRQHQRELEKLREEKDRLLAEETAATISAIEAMKNAHREEMERELEKSQRSQISSVNSDVEALRRQYLEELQSVQRELEVLSEQYSQKCLENAHLAQALEAERQALRQCQRENQELNAHNQELNNRLAAEITRLRTLLTGDGGGEATGSPLAQGKDAYELEVLLRVKESEIQYLKQEISSLKDELQTALRDKKYASDKYKDIYTELSIAKAKADCDISRLKEQLKAATEALGEKSPDSATVSGYDIMKSKSNPDFLKKDRSCVTRQLRNIRSKSLKEGLTVQERLKLFESRDLKKD

SEQ ID NO: 54625 - protein, 1025 aa, Homo sapiens
MSAAKENPCRKFQANIFNKSKCQNCFKPRESHLLNDEDLTQAKPIYGGWLLLAPDGTDFDNPVHRSRKWQRRFFILYEHGLLRYALDEMPTTLPQGTINMNQCTDVVDGEGRTGQKFSLCILTPEKEHFIRAETKEIVSGWLEMLMVYPRTNKQNQKKKRKVEPPTPQEPGPAKVAVTSSSSSSSSSSSIPSAEKVPTTKSTLWQEEMRTKDQPDGSSLSPAQSPSQSQPPAASSLREPGLESKEEESAMSSDRMDCGRKVRVESGYFSLEKTKQDLKAEEQQLPPPLSPPSPSTPNHRRSQVIEKFEALDIEKAEHMETNAVGPSPSSDTRQGRSEKRAFPRKRDFTNEAPPAPLPDASASPLSPHRRAKSLDRRSTEPSVTPDLLNFKKGWLTKQYEDGQWKKHWFVLADQSLRYYRDSVAEEAADLDGEIDLSACYDVTEYPVQRNYGFQIHTKEGEFTLSAMTSGIRRNWIQTIMKHVHPTTAPDVTSSLPEEKNKSSCSFETCPRPTEKQEAELGEPDPEQKRSRARERRREGRSKTFDWAEFRPIQQALAQERVGGVGPADTHEPLRPEAEPGELERERARRREERRKRFGMLDATDGPGTEDAALRMEVDRSPGLPMSDLKTHNVHVEIEQRWHQVETTPLREEKQVPIAPVHLSSEDGGDRLSTHELTSLLEKELEQSQKEASDLLEQNRLLQDQLRVALGREQSAREGYVLQATCERGFAAMEETHQKKIEDLQRQHQRELEKLREEKDRLLAEETAATISAIEAMKNAHREEMERELEKSQRSQISSVNSDVEALRRQYLEELQSVQRELEVLSEQYSQKCLENAHLAQALEAERQALRQCQRENQELNAHNQELNNRLAAEITRLRTLLTGDGGGEATGSPLAQGKDAYELEVLLRVKESEIQYLKQEISSLKDELQTALRDKKYASDKYKDIYTELSIAKAKADCDISRLKEQLKAATEALGEKSPDSATVSGYDIMKSKSNPDFLKKDRSCVTRQLRNIRSKSVIEQVSWDT

SEQ ID NO: 54626 - protein, 1025 aa, Homo sapiens; identical to SEQ ID NO: 54625

SEQ ID NO: 54627 - protein, 63 aa, Homo sapiens
MSAAKENPCRKFQANIFNKSKCQNCFKPRESHLLNDEDLTQQNTHPLEMKRGAHIYDARMFSC

SEQ ID NO: 54628 - protein, 93 aa, Homo sapiens [sequence omitted]

SEQ ID NO: 54629 - protein, 1038 aa, Homo sapiens
MSAAKENPCRKFQANIFNKSKCQNCFKPRESHLLNDEDLTQAKPIYGGWLLLAPDGTDFDNPVHRSRKWQRRFFILYEHGLLRYALDEMPTTLPQGTINMNQCTDVVDGEGRTGQKFSLCILTPEKEHFIRAETKEIVSGWLEMLMVYPRTNKQNQKKKRKVEPPTPQEPGPAKVAVTSSSSSSSSSSSIPSAEKVPTTKSTLWQEEMRTKDQPDGSSLSPAQSPSQSQPPAASSLREPGLESKEEESAMSSDRMDCGRKVRVESGYFSLEKTKQDLKAEEQQLPPPLSPPSPSTPNHRRSQVIEKFEALDIEKAEHMETNAVGPSPSSDTRQGRSEKRAFPRKRDFTNEAPPAPLPDASASPLSPHRRAKSLDRRSTEPSVTPDLLNFKKGWLTKQYEDGQWKKHWFVLADQSLRYYRDSVAEEAADLDGEIDLSACYDVTEYPVQRNYGFQIHTKEGEFTLSAMTSGIRRNWIQTIMKHVHPTTAPDVTSSLPEEKNKSSCSFETCPRPTEKQEAELGEPDPEQKRSRARERRREGRSKTFDWAEFRPIQQALAQERVGGVGPADTHEPLRPEAEPGELERERARRREERRKRFGMLDATDGPGTEDAALRMEVDRSPGLPMSDLKTHNVHVEIEQRWHQVETTPLREEKQVPIAPVHLSSEDGGDRLSTHELTSLLEKELEQSQKEASDLLEQNRLLQDQLRVALGREQSAREGYVLQATCERGFAAMEETHQKKIEDLQRQHQRELEKLREEKDRLLAEETAATISAIEAMKNAHREEMERELEKSQRSQISSVNSDVEALRRQYLEELQSVQRELEVLSEQYSQKCLENAHLAQALEAERQALRQCQRENQELNAHNQELNNRLAAEITRLRTLLTGDGGGEATGSPLAQGKDAYELEVLLRVKESEIQYLKQEISSLKDELQTALRDKKYASDKYKDIYTELSIAKAKADCDISRLKEQLKAATEALGEKSPDSATVSGYDIMKSKSNPDFLKKDRSCVTRQLRNIRSKSLKEGLTVQERLKLFESRDLKKD

SEQ ID NO: 54630 - protein, 1091 aa, Homo sapiens
  VARIANT 1: note = MOD_RES - Any amino acid
XRFSTIQCQRYIHPEGSEKTWTSSTSSDTSQDRSPSEESMSSEPAPSVLPATGDSDTYLSIIHSLETKLYVTEEKLKDVTVRLESQQGQSREALLALHHQWAGTEAQLREQLRASLLQVGALASQLEQERQERARRVEGHVGELGDFQVKNSQALMCLENCREQLRSLPRASQEDEQDARAASLASVESALVSAIQALQHWPAPAHGGARAQLETGGTEENGKPASLQQCSQSELTEQEQVRLLSDQIALEASLISQIADSLKNTTSDVSRMLHEISWSGQPPMESAGAPVDTWARKVLVDGEFWSQVESLRKHLGTLGGEAVGASGDGQQSIPQGLAPILANATWVRAELSFATQSVRESFHRRLQSIQETLRGTQTALRQHKCLLREILGAYQTPDFERVMQQVLEALRLPAGHEDGVQLSWDLSPLGEVLGRDSDSSQEPFDVSDQSPGAFVAIQEELAQQLKEKASLLEEIAAALPSLPPVESLRDCQKLLQVSQSLSYNTCLGGLGQYSSLLVQDAIIQAQVCYASCRIRLEYEKELQLCKESWQTREPSCSEQAQAARALREEYEELLRKQKSEYLDVIAIVERENAELKAKAAQLDHQQQCLEDAESKHSMSMFTLRGRYEEEIRCVVEQLTRTESTLQAERSRVLSQLDASVRDRQDMERHHGEQIQTLEDRFQLKVRELQTIHEEELRTLQEHYSQSLRCLQDTLCLHQGPHPKALPAPAPNWQATQGEADSMTGLRERIQELEAQMDVMREELGHKDLEGDAATLREKYQRDLESLKATCERGFAAMEETHQKKIEDLQRQHQRELEKLREEKDRLLAEETAATISAIEAMKNAHREEMERELEKSQRSQISSVNSDVEALRRQYLEELQSVQRELEVLSEQYSQKCLENAHLAQALEAERQALRQCQRENQELNAHNQELNNRLAAEITRLRTLLTGDGGGEATGSPLAQGKDAYELEVLLRVKESEIQYLKQEISSLKDELQTALRDKKYASDKYKDIYTELSIAKAKADCDISRLKEQLKAATEALGEKSPDSATVSGYDIMKSKSNPDFLKKDRSCVTRQLRNIRSKSVIEQVSWDT

SEQ ID NO: 54631 - protein, 279 aa, Homo sapiens
  VARIANT 1: note = MOD_RES - Any amino acid
XQEAELGEPDPEQKRSRARERRREGRSKTFDWAEFRPIQQALAQERVGGVGPADTHEPLRPEAEPGELERERARRREERRKRFGMLDATDGPGTEDAALRMEVDRSPGLPMSDLKTHNVHVEIEQRWHQVETTPLREEKQVPIAPVHLSSEDGGDRLSTHELTSLLEKELEQSQKEASDLLEQNRLLQDQLRVALGREQSAREGYVLQTEVAASPSGAWQRLHRVNQDLQSELEAQCQRQELITHQIQTLKRSYGEAKDTIRHHEAEIRSLQARLSNAA

SEQ ID NO: 54632 - protein, 194 aa, Homo sapiens
LRQQTVEELQSVQRELEVLSEQYSQKCLENAHLAQALEAERQALRQCQRENQELNAHNQVLLRVKESEIQYLKQEISSLKDELQTALRDKKYASDKYKDIYTELSIAKAKADCDISRLKEQLKAATEALGEKSPDSATVSGYDIMKSKSNPDFLKKDRSCVTRQLRNIRSKSLKEGLTVQERLKLFESRDLKKD

SEQ ID NO: 54633 - protein, 1000 aa, Homo sapiens
MSAAKENPCRKFQANIFNKSKCQNCFKPRESHLLNDEDLTQAKPIYGGWLLLAPDGTDFDNPVHRSRKWQRRFFILYEHGLLRYALDEMPTTLPQGTINMNQCTDVVDGEGRTGQKFSLCILTPEKEHFIRAETKEIVSGWLEMLMVYPRTNKQNQKKKRKVEPPTPQEPGPAKVAVTSSSSSSSSSSSIPSAEKVPTTKSTLWQEEMRTKDQPDGSSLSPAQSPSQSQPPAASSLREPGLESKEEESAMSSDRMDCGRKVRVESGYFSLEKTKQDLKAEEQQLPPPLSPPSPSTPNHRRSQVIEKFEALDIEKAEHMETNAVGPSPSSDTRQGRSEKRAFPRKRPDLLNFKKGWLTKQYEDGQWKKHWFVLADQSLRYYRDSVAEEAADLDGEIDLSACYDVTEYPVQRNYGFQIHTKEGEFTLSAMTSGIRRNWIQTIMKHVHPTTAPDVTSSLPEEKNKSSCSFETCPRPTEKQEAELGEPDPEQKRSRARERRREGRSKTFDWAEFRPIQQALAQERVGGVGPADTHEPLRPEAEPGELERERARRREERRKRFGMLDATDGPGTEDAALRMEVDRSPGLPMSDLKTHNVHVEIEQRWHQVETTPLREEKQVPIAPVHLSSEDGGDRLSTHELTSLLEKELEQSQKEASDLLEQNRLLQDQLRVALGREQSAREGYVLQATCERGFAAMEETHQKKIEDLQRQHQRELEKLREEKDRLLAEETAATISAIEAMKNAHREEMERELEKSQRSQISSVNSDVEALRRQYLEELQSVQRELEVLSEQYSQKCLENAHLAQALEAERQALRQCQRENQELNAHNQELNNRLAAEITRLRTLLTGDGGGEATGSPLAQGKDAYELEVLLRVKESEIQYLKQEISSLKDELQTALRDKKYASDKYKDIYTELSIAKAKADCDISRLKEQLKAATEALGEKSPDSATVSGYDIMKSKSNPDFLKKDRSCVTRQLRNIRSKSLKEGLTVQERLKLFESRDLKKD

SEQ ID NO: 54634 - protein, 264 aa, Homo sapiens
MENYGIEWHSVRDSEGQKLLIGVGPEGISICKDDFSPINRIAYPVVQMATQSGKNVYLTVTKESGNSIVLLFKMISTRAASGLYRAITETHAFYRCDTVTSAVMMQYSRDLKGHLASLFLNENINLGKKYVFDIKRTSKEVYDHARRALYNAGVVDLVSRNNQSPSHSPLKSSESSMNCSSCEGLSCQQTRVLQEKLRKLKEAMLCMVCCEEEINSTFCPCGHTVCCESCAAQLQSCPVCRSRVEHVQHVYLPTHTSLLNLTVI

SEQ ID NO: 54635 - protein, 445 aa, Homo sapiens
MLCYVTRPDAVLMEVEVEAKANGEDCLNQVCRRLGIIEVDYFGLQFTGSKGESLWLNLRNRISQQMDGLAPYRLKLRVKFFVEPHLILQEQTRHIFFLHIKEALLAGHLLCSPEQAVELSALLAQTKFGDYNQNTAKYNYEELCAKELSSATLNSIVAKHKELEGTSQASAEYQVLQIVSAMENYGIEWHSVRDSEGQKLLIGVGPEGISICKDDFSPINRIAYPVVQMATQSGKNVYLTVTKESGNSIVLLFKMISTRAASGLYRAITETHAFYRCDTVTSAVMMQYSRDLKGHLASLFLNENINLGKKYVFDIKRTSKEVYDHARRALYNAGVVDLVSRNNQSPSHSPLKSSESSMNCSSCEGLSCQQTRVLQEKLRKLKEAMLCMVCCEEEINSTFCPCGHTVCCESCAAQLQSCPVCRSRVEHVQHVYLPTHTSLLNLTVI

SEQ ID NO: 54636 - protein, 1828 aa, Homo sapiens
MAASELYTKFARVWIPDPEEVWKSAELLKDYKPGDKVLLLHLEEGKDLEYHLDPKTKELPHLRNPDILVGENDLTALSYLHEPAVLHNLRVRFIDSKLIYTYCGIVLVAINPYEQLPIYGEDIINAYSGQNMGDMDPHIFAVAEEAYKQMARDERNQSIIVSGESGAGKTVSAKYAMRYFATVSGSASEANVEEKVLASNPIMESIGNAKTTRNDNSSRFGKYIEIGFDKRYRIIGANMRTYLLEKSRVVFQAEEERNYHIFYQLCASAKLPEFKMLRLGNADNFNYTKQGGSPVIEGVDDAKEMAHTRQACTLLGISESHQMGIFRILAGILHLGNVGFTSRDADSCTIPPKHEPLCIFCELMGVDYEEMCHWLCHRKLATATETYIKPISKLQATNARDALAKHIYAKLFNWIVDNVNQALHSAVKQHSFIGVLDIYGFETFEINSFEQFCINYANEKLQQQFNMHVFKLEQEEYMKEQIPWTLIDFYDNQPCINLIESKLGILDLLDEECKMPKGTDDTWAQKLYNTHLNKCALFEKPRLSNKAFIIQHFADKVEYQCEGFLEKNKDTVFEEQIKVLKSSKFKMLPELFQDDEKAISPTSATSSGRTPLTRTPAKPTKGRPGQMAKEHKKTVGHQFRNSLHLLMETLNATTPHYVRCIKPNDFKFPFTFDEKRAVQQLRACGVLETIRISAAGFPSRWTYQEFFSRYRVLMKQKDVLSDRKQTCKNVLEKLILDKDKYQFGKTKIFFRAGQVAYLEKLRADKLRAACIRIQKTIRGWLLRKKYLRMRKAAITMQRYVRGYQARCYAKFLRRTKAATIIQKYWRMYVVRRRYKIRRAATIVLQSYLRGFLARNRYRKILREHKAVIIQKRVRGWLARTHYKRSMHAIIYLQCCFRRMMAKRELKKLKIEARSVERYKKLHIGMENKIMQLQRKVDEQNKDYKCLVEKLTNLEGIYNSETEKLRSDLERLQLSEEEAKVATGRVLSLQEEIAKLRKDLEQTRSEKKCIEEHADRYKQETEQLVSNLKEENTLLKQEKEALNHRIVQQAKEMTETMEKKLVEETKQLELDLNDERLRYQNLLNEFSRLEERYDDLKEEMTLMVHVPKPGHKRTDSTHSSNESEYIFSSEIAEMEDIPSRTEEPSEKKVPLDMSLFLKLQKRVTELEQEKQVMQDELDRKEEQVLRSKAKEEERPQIRGAELEYESLKRQELESENKKLKNELNELRKALSEKSAPEVTAPGAPAYRVLMEQLTSVSEELDVRKEEVLILRSQLVSQKEAIQPKDDKNTMTDSTILLEDVQKMKDKGEIAQAYIGLKETNRLLESQLQSQKRSHENEAEALRGEIQSLKEENNRQQQLLAQNLQLPPEARIEASLQHEITRLTNENLDLMEQLEKQDKTVRKLKKQLKVFAKKIGELEVGQMENISPGQIIDEPIRPVNIPRKEKDFQGMLEYKKEDEQKLVKNLILELKPRGVAVNLIPGLPAYILFMCVRHADYLNDDQKVRSLLTSTINSIKKVLKKRGDDFETVSFWLSNTCRFLHCLKQYSGEEGFMKHNTSRQNEHCLTNFDLAEYRQVLSDLAIQIYQQLVRVLENILQPMIVSGMLEHETIQGVSGVKPTGLRKRTSSIADEGTYTLDSILRQLNSFHSVMCQHGMDPELIKQVVKQMFYIIGAITLNNLLLRKDMCSWSKGMQIRYNVSQLEEWLRDKNLMNSGAKETLEPLIQAAQLLQVKKKTDDDAEAICSMCNALTTAQIVKVLNLYTPVNEFEERVSVSFIRTIQMRLRDRKDSPQLLMDAKHIFPVTFPFNPSSLALETIQIPASLGLGFISRV

SEQ ID NO: 54637 - protein, 1880 aa, Homo sapiens
MKSSSLETMFARVWIPDPEEVWKSAELLKDYKPGDKVLLLHLEEGKDLEYHLDPKTKELPHLRNPDILVGENDLTALSYLHEPAVLHNLRVRFIDSKLIYTYCGIVLVAINPYEQLPIYGEDIINAYSGQNMGDMDPHIFAVAEEAYKQMARDERNQSIIVSGESGAGKTVSAKYAMRYFATVSGSASEANVEEKVLASNPIMESIGNAKTTRNDNSSRFGKYIEIGFDKRYRIIGANMRTYLLEKSRVVFQAEEERNYHIFYQLCASAKLPEFKMLRLGNADNFNYTKQGGSPVIEGVDDAKEMAHTRQACTLLGISESHQMGIFRILAGILHLGNVGFTSRDADSCTIPPKHEPLCIFCELMGVDYEEMCHWLCHRKLATATETYIKPISKLQATNARDALAKHIYAKLFNWIVDNVNQALHSAVKQHSFIGVLDIYGFETFEINSFEQFCINYANEKLQQQFNMHVFKLEQEEYMKEQIPWTLIDFYDNQPCINLIESKLGILDLLDEECKMPKGTDDTWAQKLYNTHLNKCALFEKPRLSNKAFIIQHFADKVEYQCEGFLEKNKDTVFEEQIKVLKSSKFKMLPELFQDDEKAISPTSATSSGRTPLTRTPAKPTKGRPGQMAKEHKKTVGHQFRNSLHLLMETLNATTPHYVRCIKPNDFKFPFTFDEKRAVQQLRACGVLETIRISAAGFPSRWTYQEFFSRYRVLMKQKDVLSDRKQTCKNVLEKLILDKDKYQFGKTKIFFRAGQVAYLEKLRADKLRAACIRIQKTIRGWLLRKKYLRMRKAAITMQRYVRGYQARCYAKFLRRTKAATIIQKYWRMYVVRRRYKIRRAATIVLQSYLRGFLARNRYRKILREHKAVIIQKRVRGWLARTHYKRSMHAIIYLQCCFRRMMAKRELKKLKIEARSVERYKKLHIGMENKIMQLQRKVDEQNKDYKCLVEKLTNLEGIYNSETEKLRSDLERLQLSEEEAKVATGRVLSLQEEIAKLRKDLEQTRSEKKCIEEHADRYKQETEQLVSNLKEENTLLKQEKEALNHRIVQQAKEMTETMEKKLVEETKQLELDLNDERLRYQNLLNEFSRLEERYDDLKEEMTLMVHVPKPGHKRTDSTHSSNESEYIFSSEIAEMEDIPSRTEEPSEKKVPLDMSLFLKLQKRVTELEQEKQVMQDELDRKEEQVLRSKAKEEERPQIRGAELEYESLKRQELESENKKLKNELNELRKALSEKSAPEVTAPGAPAYRVLMEQLTSVSEELDVRKEEVLILRSQLVSQKEAIQPKLHENTMTDSTILLEDVQKMKDKGEIAQAYIGLKETNRSSALDYHELNEDGELWLVYEGLKQANRLLESQLQSQKRSHENEAEALRGEIQSLKEENNRQQQLLAQNLQLPPEARIEASLQHEITRLTNENLYFEELYADDPKKYQSYRISLYKRMIDLMEQLEKQDKTVRKLKKQLKVFAKKIGELEVGQMENISPGQIIDEPIRPVNIPRKEKDFQGMLEYKKEDEQKLVKNLILELKPRGVAVNLIPGLPAYILFMCVRHADYLNDDQKVRSLLTSTINSIKKVLKKRGDDFETVSFWLSNTCRFLHCLKQYSGEEGFMKHNTSRQNEHCLTNFDLAEYRQVLSDLAIQIYQQLVRVLENILQPMIVSGMLEHETIQGVSGVKPTGLRKRTSSIADEGTYTLDSILRQLNSFHSVMCQHGMDPELIKQVVKQMFYIIGAITLNNLLLRKDMCSWSKGMQIRYNVSQLEEWLRDKNLMNSGAKETLEPLIQAAQLLQVKKKTDDDAEAICSMCNALTTAQIVKVLNLYTPVNEFEERVSVSFIRTIQMRLRDRKDSPQLLMDAKHIFPVTFPFNPSSLALETIQIPASLGLGFISRV

SEQ ID NO: 54638 - protein, 1362 aa, Homo sapiens
MHVFKLEQEEYMKEQIPWTLIDFYDNQPCINLIESKLGILDLLDEECKMPKGTDDTWAQKLYNTHLNKCALFEKPRLSNKAFIIQHFADKVEYQCEGFLEKNKDTVFEEQIKVLKSSKFKMLPELFQDDEKAISPTSATSSGRTPLTRTPAKPTKGRPGQMAKEHKKTVGHQFRNSLHLLMETLNATTPHYVRCIKPNDFKFPFTFDEKRAVQQLRACGVLETIRISAAGFPSRWTYQEFFSRYRVLMKQKDVLSDRKQTCKNVLEKLILDKDKYQFGKTKIFFRAGQVAYLEKLRADKLRAACIRIQKTIRGWLLRKKYLRMRKAAITMQRYVRGYQARCYAKFLRRTKAATIIQKYWRMYVVRRRYKIRRAATIVLQSYLRGFLARNRYRKILREHKAVIIQKRVRGWLARTHYKRSMHAIIYLQCCFRRMMAKRELKKLKIEARSVERYKKLHIGMENKIMQLQRKVDEQNKDYKCLVEKLTNLEGIYNSETEKLRSDLERLQLSEEEAKVATGRVLSLQEEIAKLRKDLEQTRSEKKCIEEHADRYKQETEQLVSNLKEENTLLKQEKEALNHRIVQQAKEMTETMEKKLVEETKQLELDLNDERLRYQNLLNEFSRLEERYDDLKEEMTLMVHVPKPGHKRTDSTHSSNESEYIFSSEIAEMEDIPSRTEEPSEKKVPLDMSLFLKLQKRVTELEQEKQVMQDELDRKEEQVLRSKAKEEERPQIRGAELEYESLKRQELESENKKLKNELNELRKALSEKSAPEVTAPGAPAYRVLMEQLTSVSEELDVRKEEVLILRSQLVSQKEAIQPKDDKNTMTDSTILLEDVQKMKDKGEIAQAYIGLKETNRLLESQLQSQKRSHENEAEALRGEIQSLKEENNRQQQLLAQNLQLPPEARIEASLQHEITRLTNENLDLMEQLEKQDKTVRKLKKQLKVFAKKIGELEVGQMENISPGQIIDEPIRPVNIPRKEKDFQGMLEYKKEDEQKLVKNLILELKPRGVAVNLIPGLPAYILFMCVRHADYLNDDQKVRSLLTSTINSIKKVLKKRGDDFETVSFWLSNTCRFLHCLKQYSGEEGFMKHNTSRQNEHCLTNFDLAEYRQVLSDLAIQIYQQLVRVLENILQPMIVSGMLEHETIQGVSGVKPTGLRKRTSSIADEGTYTLDSILRQLNSFHSVMCQHGMDPELIKQVVKQMFYIIGAITLNNLLLRKDMCSWSKGMQIRYNVSQLEEWLRDKNLMNSGAKETLEPLIQAAQLLQVKKKTDDDAEAICSMCNALTTAQIVKVLNLYTPVNEFEERVSVSFIRTIQMRLRDRKDSPQLLMDAKHIFPVTFPFNPSSLALETIQIPASLGLGFISRV

SEQ ID NO: 54639 - protein, 1855 aa, Homo sapiens
MAASELYTKFARVWIPDPEEVWKSAELLKDYKPGDKVLLLHLEEGKDLEYHLDPKTKELPHLRNPDILVGENDLTALSYLHEPAVLHNLRVRFIDSKLIYTYCGIVLVAINPYEQLPIYGEDIINAYSGQNMGDMDPHIFAVAEEAYKQMARDERNQSIIVSGESGAGKTVSAKYAMRYFATVSGSASEANVEEKVLASNPIMESIGNAKTTRNDNSSRFGKYIEIGFDKRYRIIGANMRTYLLEKSRVVFQAEEERNYHIFYQLCASAKLPEFKMLRLGNADNFNYTKQGGSPVIEGVDDAKEMAHTRQACTLLGISESHQMGIFRILAGILHLGNVGFTSRDADSCTIPPKHEPLCIFCELMGVDYEEMCHWLCHRKLATATETYIKPISKLQATNARDALAKHIYAKLFNWIVDNVNQALHSAVKQHSFIGVLDIYGFETFEINSFEQFCINYANEKLQQQFNMHVFKLEQEEYMKEQIPWTLIDFYDNQPCINLIESKLGILDLLDEECKMPKGTDDTWAQKLYNTHLNKCALFEKPRLSNKAFIIQHFADKVEYQCEGFLEKNKDTVFEEQIKVLKSSKFKMLPELFQDDEKAISPTSATSSGRTPLTRTPAKPTKGRPGQMAKEHKKTVGHQFRNSLHLLMETLNATTPHYVRCIKPNDFKFPFTFDEKRAVQQLRACGVLETIRISAAGFPSRWTYQEFFSRYRVLMKQKDVLSDRKQTCKNVLEKLILDKDKYQFGKTKIFFRAGQVAYLEKLRADKLRAACIRIQKTIRGWLLRKKYLRMRKAAITMQRYVRGYQARCYAKFLRRTKAATIIQKYWRMYVVRRRYKIRRAATIVLQSYLRGFLARNRYRKILREHKAVIIQKRVRGWLARTHYKRSMHAIIYLQCCFRRMMAKRELKKLKIEARSVERYKKLHIGMENKIMQLQRKVDEQNKDYKCLVEKLTNLEGIYNSETEKLRSDLERLQLSEEEAKVATGRVLSLQEEIAKLRKDLEQTRSEKKCIEEHADRYKQETEQLVSNLKEENTLLKQEKEALNHRIVQQAKEMTETMEKKLVEETKQLELDLNDERLRYQNLLNEFSRLEERYDDLKEEMTLMVHVPKPGHKRTDSTHSSNESEYIFSSEIAEMEDIPSRTEEPSEKKVPLDMSLFLKLQKRVTELEQEKQVMQDELDRKEEQVLRSKAKEEERPQIRGAELEYESLKRQELESENKKLKNELNELRKALSEKSAPEVTAPGAPAYRVLMEQLTSVSEELDVRKEEVLILRSQLVSQKEAIQPKDDKNTMTDSTILLEDVQKMKDKGEIAQAYIGLKETNRSSALDYHELNEDGELWLVYEGLKQANRLLESQLQSQKRSHENEAEALRGEIQSLKEENNRQQQLLAQNLQLPPEARIEASLQHEITRLTNENLDLMEQLEKQDKTVRKLKKQLKVFAKKIGELEVGQMENISPGQIIDEPIRPVNIPRKEKDFQGMLEYKKEDEQKLVKNLILELKPRGVAVNLIPGLPAYILFMCVRHADYLNDDQKVRSLLTSTINSIKKVLKKRGDDFETVSFWLSNTCRFLHCLKQYSGEEGFMKHNTSRQNEHCLTNFDLAEYRQVLSDLAIQIYQQLVRVLENILQPMIVSGMLEHETIQGVSGVKPTGLRKRTSSIADEGTYTLDSILRQLNSFHSVMCQHGMDPELIKQVVKQMFYIIGAITLNNLLLRKDMCSWSKGMQIRYNVSQLEEWLRDKNLMNSGAKETLEPLIQAAQLLQVKKKTDDDAEAICSMCNALTTAQIVKVLNLYTPVNEFEERVSVSFIRTIQMRLRDRKDSPQLLMDAKHIFPVTFPFNPSSLALETIQIPASLGLGFISRV

SEQ ID NO: 54640 - protein, 1852 aa, Homo sapiens
MAASELYTKFARVWIPDPEEVWKSAELLKDYKPGDKVLLLHLEEGKDLEYHLDPKTKELPHLRNPDILVGENDLTALSYLHEPAVLHNLRVRFIDSKLIYTYCGIVLVAINPYEQLPIYGEDIINAYSGQNMGDMDPHIFAVAEEAYKQMARDERNQSIIVSGESGAGKTVSAKYAMRYFATVSGSASEANVEEKVLASNPIMESIGNAKTTRNDNSSRFGKYIEIGFDKRYRIIGANMRTYLLEKSRVVFQAEEERNYHIFYQLCASAKLPEFKMLRLGNADNFNYTKQGGSPVIEGVDDAKEMAHTRQACTLLGISESHQMGIFRILAGILHLGNVGFTSRDADSCTIPPKHEPLCIFCELMGVDYEEMCHWLCHRKLATATETYIKPISKLQATNARDALAKHIYAKLFNWIVDNVNQALHSAVKQHSFIGVLDIYGFETFEINSFEQFCINYANEKLQQQFNMHVFKLEQEEYMKEQIPWTLIDFYDNQPCINLIESKLGILDLLDEECKMPKGTDDTWAQKLYNTHLNKCALFEKPRLSNKAFIIQHFADKVEYQCEGFLEKNKDTVFEEQIKVLKSSKFKMLPELFQDDEKAISPTSATSSGRTPLTRTPAKPTKGRPGQMAKEHKKTVGHQFRNSLHLLMETLNATTPHYVRCIKPNDFKFPFTFDEKRAVQQLRACGVLETIRISAAGFPSRWTYQEFFSRYRVLMKQKDVLSDRKQTCKNVLEKLILDKDKYQFGKTKIFFRAGQVAYLEKLRADKLRAACIRIQKTIRGWLLRKKYLRMRKAAITMQRYVRGYQARCYAKFLRRTKAATIIQKYWRMYVVRRRYKIRRAATIVLQSYLRGFLARNRYRKILREHKAVIIQKRVRGWLARTHYKRSMHAIIYLQCCFRRMMAKRELKKLKIEARSVERYKKLHIGMENKIMQLQRKVDEQNKDYKCLVEKLTNLEGIYNSETEKLRSDLERLQLSEEEAKVATGRVLSLQEEIAKLRKDLEQTRSEKKCIEEHADRYKQETEQLVSNLKEENTLLKQEKEALNHRIVQQAKEMTETMEKKLVEETKQLELDLNDERLRYQNLLNEFSRLEERYDDLKEEMTLMVHVPKPGHKRTDSTHSSNESEYIFSSEIAEMEDIPSRTEEPSEKKVPLDMSLFLKLQKRVTELEQEKQVMQDELDRKEEQVLRSKAKEEERPQIRGAELEYESLKRQELESENKKLKNELNELRKALSEKSAPEVTAPGAPAYRVLMEQLTSVSEELDVRKEEVLILRSQLVSQKEAIQPKNTMTDSTILLEDVQKMKDKGEIAQAYIGLKETNRSSALDYHELNEDGELWLVYEGLKQANRLLESQLQSQKRSHENEAEALRGEIQSLKEENNRQQQLLAQNLQLPPEARIEASLQHEITRLTNENLDLMEQLEKQDKTVRKLKKQLKVFAKKIGELEVGQMENISPGQIIDEPIRPVNIPRKEKDFQGMLEYKKEDEQKLVKNLILELKPRGVAVNLIPGLPAYILFMCVRHADYLNDDQKVRSLLTSTINSIKKVLKKRGDDFETVSFWLSNTCRFLHCLKQYSGEEGFMKHNTSRQNEHCLTNFDLAEYRQVLSDLAIQIYQQLVRVLENILQPMIVSGMLEHETIQGVSGVKPTGLRKRTSSIADEGTYTLDSILRQLNSFHSVMCQHGMDPELIKQVVKQMFYIIGAITLNNLLLRKDMCSWSKGMQIRYNVSQLEEWLRDKNLMNSGAKETLEPLIQAAQLLQVKKKTDDDAEAICSMCNALTTAQIVKVLNLYTPVNEFEERVSVSFIRTIQMRLRDRKDSPQLLMDAKHIFPVTFPFNPSSLALETIQIPASLGLGFISRV

SEQ ID NO: 54641 - protein, 1458 aa, Homo sapiens
MCHWLCHRKLATATETYIKPISKLQATNARDALAKHIYAKLFNWIVDNVNQALHSAVKQHSFIGVLDIYGFETFEINSFEQFCINYANEKLQQQFNMHVFKLEQEEYMKEQIPWTLIDFYDNQPCINLIESKLGILDLLDEECKMPKGTDDTWAQKLYNTHLNKCALFEKPRLSNKAFIIQHFADKVEYQCEGFLEKNKDTVFEEQIKVLKSSKFKMLPELFQDDEKAISPTSATSSGRTPLTRTPAKPTKGRPGQMAKEHKKTVGHQFRNSLHLLMETLNATTPHYVRCIKPNDFKFPFTFDEKRAVQQLRACGVLETIRISAAGFPSRWTYQEFFSRYRVLMKQKDVLSDRKQTCKNVLEKLILDKDKYQFGKTKIFFRAGQVAYLEKLRADKLRAACIRIQKTIRGWLLRKKYLRMRKAAITMQRYVRGYQARCYAKFLRRTKAATIIQKYWRMYVVRRRYKIRRAATIVLQSYLRGFLARNRYRKILREHKAVIIQKRVRGWLARTHYKRSMHAIIYLQCCFRRMMAKRELKKLKIEARSVERYKKLHIGMENKIMQLQRKVDEQNKDYKCLVEKLTNLEGIYNSETEKLRSDLERLQLSEEEAKVATGRVLSLQEEIAKLRKDLEQTRSEKKCIEEHADRYKQETEQLVSNLKEENTLLKQEKEALNHRIVQQAKEMTETMEKKLVEETKQLELDLNDERLRYQNLLNEFSRLEERYDDLKEEMTLMVHVPKPGHKRTDSTHSSNESEYIFSSEIAEMEDIPSRTEEPSEKKVPLDMSLFLKLQKRVTELEQEKQVMQDELDRKEEQVLRSKAKEEERPQIRGAELEYESLKRQELESENKKLKNELNELRKALSEKSAPEVTAPGAPAYRVLMEQLTSVSEELDVRKEEVLILRSQLVSQKEAIQPKLHENTMTDSTILLEDVQKMKDKGEIAQAYIGLKETNRLLESQLQSQKRSHENEAEALRGEIQSLKEENNRQQQLLAQNLQLPPEARIEASLQHEITRLTNENLDLMEQLEKQDKTVRKLKKQLKVFAKKIGELEVGQMENISPGQIIDEPIRPVNIPRKEKDFQGMLEYKKEDEQKLVKNLILELKPRGVAVNLIPGLPAYILFMCVRHADYLNDDQKVRSLLTSTINSIKKVLKKRGDDFETVSFWLSNTCRFLHCLKQYSGEEGFMKHNTSRQNEHCLTNFDLAEYRQVLSDLAIQIYQQLVRVLENILQPMIVSGMLEHETIQGVSGVKPTGLRKRTSSIADEGTYTLDSILRQLNSFHSVMCQHGMDPELIKQVVKQMFYIIGAITLNNLLLRKDMCSWSKGMQIRYNVSQLEEWLRDKNLMNSGAKETLEPLIQAAQLLQVKKKTDDDAEAICSMCNALTTAQIVKVLNLYTPVNEFEERVSVSFIRTIQMRLRDRKDSPQLLMDAKHIFPVTFPFNPSSLALETIQIPASLGLGFISRV

SEQ ID NO: 54642 - protein, 1853 aa, Homo sapiens
MAASELYTKFARVWIPDPEEVWKSAELLKDYKPGDKVLLLHLEEGKDLEYHLDPKTKELPHLRNPDILVGENDLTALSYLHEPAVLHNLRVRFIDSKLIYTYCGIVLVAINPYEQLPIYGEDIINAYSGQNMGDMDPHIFAVAEEAYKQMARDERNQSIIVSGESGAGKTVSAKYAMRYFATVSGSASEANVEEKVLASNPIMESIGNAKTTRNDNSSRFGKYIEIGFDKRYRIIGANMRTYLLEKSRVVFQAEEERNYHIFYQLCASAKLPEFKMLRLGNADNFNYTKQGGSPVIEGVDDAKEMAHTRQACTLLGISESHQMGIFRILAGILHLGNVGFTSRDADSCTIPPKHEPLCIFCELMGVDYEEMCHWLCHRKLATATETYIKPISKLQATNARDALAKHIYAKLFNWIVDNVNQALHSAVKQHSFIGVLDIYGFETFEINSFEQFCINYANEKLQQQFNMHVFKLEQEEYMKEQIPWTLIDFYDNQPCINLIESKLGILDLLDEECKMPKGTDDTWAQKLYNTHLNKCALFEKPRLSNKAFIIQHFADKVEYQCEGFLEKNKDTVFEEQIKVLKSSKFKMLPELFQDDEKAISPTSATSSGRTPLTRTPAKPTKGRPGQMAKEHKKTVGHQFRNSLHLLMETLNATTPHYVRCIKPNDFKFPFTFDEKRAVQQLRACGVLETIRISAAGFPSRWTYQEFFSRYRVLMKQKDVLSDRKQTCKNVLEKLILDKDKYQFGKTKIFFRAGQVAYLEKLRADKLRAACIRIQKTIRGWLLRKKYLRMRKAAITMQRYVRGYQARCYAKFLRRTKAATIIQKYWRMYVVRRRYKIRRAATIVLQSYLRGFLARNRYRKILREHKAVIIQKRVRGWLARTHYKRSMHAIIYLQCCFRRMMAKRELKKLKIEARSVERYKKLHIGMENKIMQLQRKVDEQNKDYKCLVEKLTNLEGIYNSETEKLRSDLERLQLSEEEAKVATGRVLSLQEEIAKLRKDLEQTRSEKKCIEEHADRYKQETEQLVSNLKEENTLLKQEKEALNHRIVQQAKEMTETMEKKLVEETKQLELDLNDERLRYQNLLNEFSRLEERYDDLKEEMTLMVHVPKPGHKRTDSTHSSNESEYIFSSEIAEMEDIPSRTEEPSEKKVPLDMSLFLKLQKRVTELEQEKQVMQDELDRKEEQVLRSKAKEEERPQIRGAELEYESLKRQELESENKKLKNELNELRKALSEKSAPEVTAPGAPAYRVLMEQLTSVSEELDVRKEEVLILRSQLVSQKEAIQPKDDKNTMTDSTILLEDVQKMKDKGEIAQAYIGLKETNRLLESQLQSQKRSHENEAEALRGEIQSLKEENNRQQQLLAQNLQLPPEARIEASLQHEITRLTNENLYFEELYADDPKKYQSYRISLYKRMIDLMEQLEKQDKTVRKLKKQLKVFAKKIGELEVGQMENISPGQIIDEPIRPVNIPRKEKDFQGMLEYKKEDEQKLVKNLILELKPRGVAVNLIPGLPAYILFMCVRHADYLNDDQKVRSLLTSTINSIKKVLKKRGDDFETVSFWLSNTCRFLHCLKQYSGEEGFMKHNTSRQNEHCLTNFDLAEYRQVLSDLAIQIYQQLVRVLENILQPMIVSGMLEHETIQGVSGVKPTGLRKRTSSIADEGTYTLDSILRQLNSFHSVMCQHGMDPELIKQVVKQMFYIIGAITLNNLLLRKDMCSWSKGMQIRYNVSQLEEWLRDKNLMNSGAKETLEPLIQAAQLLQVKKKTDDDAEAICSMCNALTTAQIVKVLNLYTPVNEFEERVSVSFIRTIQMRLRDRKDSPQLLMDAKHIFPVTFPFNPSSLALETIQIPASLGLGFISRV

SEQ ID NO: 54643 - protein, 1848 aa, Homo sapiens
MSVGELYSQCTRVWIPDPDEVWRSAELTKDYKEGDKSLQLRLEDETILEYPIDVQRNQLPFLRNPDILVGENDLTALSYLHEPAVLHNLKVRFLESNHIYTYCGIVLVAINPYEQLPIYGQDVIYTYSGQNMGDMDPHIFAVAEEAYKQMARDEKNQSIIVSGESGAGKTVSAKYAMRYFATVGGSASETNIEEKVLASSPIMEAIGNAKTTRNDNSSRFGKYIQIGFDKRYHIIGANMRTYLLEKSRVVFQADDERNYHIFYQLCAAAGLPEFKELALTSAEDFFYTSQGGDTSIEGVDDAEDFEKTRQAFTLLGVKESHQMSIFKIIASILHLGSVAIQAERDGDSCSISPQDVYLSNFCRLLGVEHSQMEHWLCHRKLVTTSETYVKTMSLQQVINARNALAKHIYAQLFGWIVEHINKALHTSLKQHSFIGVLDIYGFETFEVNSFEQFCINYANEKLQQQFNSHVFKLEQEEYMKEQIPWTLIDFYDNQPCIDLIEAKLGILDLLDEECKVPKGTDQNWAQKLYDRHSSSQHFQKPRMSNTAFIIVHFADKVEYLSDGFLEKNRDTVYEEQINILKASKFPLVADLFHDDKDPVPATTPGKGSSSKISVRSARPPMKVSNKEHKKTVGHQFRTSLHLLMETLNATTPHYVRCIKPNDEKLPFHFDPKRAVQQLRACGVLETIRISAAGYPSRWAYHDFFNRYRVLVKKRELANTDKKAICRSVLENLIKDPDKFQFGRTKIFFRAGQVAYLEKLRADKFRTATIMIQKTVRGWLQKVKYHRLKGATLTLQRYCRGHLARRLAEHLRRIRAAVVLQKHYRMQRARQAYQRVRRAAVVIQAFTRAMFVRRTYRQVLMEHKATTIQKHVRGWMARRHFQRLRDAAIVIQCAFRMLKARRELKALRIEARSAEHLKRLNVGMENKVVQLQRKIDEQNKEFKTLSEQLSVTTSTYTMEVERLKKELVHYQQSPGEDTSLRLQEEVESLRTELQRAHSERKILEDAHSREKDELRKRVADLEQENALLKDEKEQLNNQILCQSKDEFAQNSVKENLMKKELEEERSRYQNLVKEYSQLEQRYDNLRDEMTIIKQTPGHRRNPSNQSSLESDSNYPSISTSEIGDTEDALQQVEEIGLEKAAMDMTVFLKLQKRVRELEQERKKLQVQLEKREQQDSKKVQAEPPQTDIDLDPNADLAYNSLKRQELESENKKLKNDLNELRKAVADQATQNNSSHGSPDSYSLLLNQLKLAHEELEVRKEEVLILRTQIVSADQRRLAGRNAEPNINARSSWPNSEKHVDQEDAIEAYHGVCQTNSKTEDWGYLNEDGELGLAYQGLKQVARLLEAQLQAQSLEHEEEVEHLKAQLEALKEEMDKQQQTFCQTLLLSPEAQVEFGVQQEISRLTNENLDLKELVEKLEKNERKLKKQLKIYMKKAQDLEAAQALAQSERKRHELNRQVTVQRKEKDFQGMLEYHKEDEALLIRNLVTDLKPQMLSGTVPCLPAYILYMCIRHADYTNDDLKVHSLLTSTINGIKKVLKKHNDDFEMTSFWLSNTCRLLHCLKQYSGDEGFMTQNTAKQNEHCLKNFDLTEYRQVLSDLSIQIYQQLIKIAEGVLQPMIVSAMLENESIQGLSGVKPTGYRKRSSSMADGDNSYCLEAIIRQMNAFHTVMCDQGLDPEIILQVFKQLFYMINAVTLNNLLLRKDVCSWSTGMQLRYNISQLEEWLRGRNLHQSGAVQTMEPLIQAAQLLQLKKKTQEDAEAICSLCTSLSTQQIVKILNLYTPLNEFEERVTVAFIRTIQAQLQERNDPQQLLLDAKHMFPVLFPFNPSSLTMDSIHIPACLNLEFLNEV

SEQ ID NO: 54644 - protein, 963 aa, Homo sapiens
MEHKATTIQKHVRGWMARRHFQRLRDAAIVIQCAFRMLKARRELKALRIEARSAEHLKRLNVGMENKVVQLQRKIDEQNKEFKTLSEQLSVTTSTYTMEVERLKKELVHYQQSPGEDTSLRLQEEVESLRTELQRAHSERKILEDAHSREKDELRKRVADLEQENALLKDEKEQLNNQILCQSKDEFAQNSVKENLMKKELEEERSRYQNLVKEYSQLEQRYDNLRDEMTIIKQTPGHRRNPSNQSSLESDSNYPSISTSEIGDTEDALQQVEEIGLEKAAMDMTVFLKLQKRVRELEQERKKLQVQLEKREQQDSKKVQAEPPQTDIDLDPNADLAYNSLKRQELESENKKLKNDLNELRKAVADQATQNNSSHGSPDSYSLLLNQLKLAHEELEVRKEEVLILRTQIVSADQRRLAGRNAEPNINARSSWPNSEKHVDQEDAIEAYHGVCQTNRLLEAQLQAQSLEHEEEVEHLKAQLEALKEEMDKQQQTFCQTLLLSPEAQVEFGVQQEISRLTNENLDLKELVEKLEKNERKLKKQLKIYMKKAQDLEAAQALAQSERKRHELNRQVTVQRKEKDFQGMLEYHKEDEALLIRNLVTDLKPQMLSGTVPCLPAYILYMCIRHADYTNDDLKVHSLLTSTINGIKKVLKKHNDDFEMTSFWLSNTCRLLHCLKQYSGDEGFMTQNTAKQNEHCLKNFDLTEYRQVLSDLSIQIYQQLIKIAEGVLQPMIVSAMLENESIQGLSGVKPTGYRKRSSSMADGDNSYCLEAIIRQMNAFHTVMCDQGLDPEIILQVFKQLFYMINAVTLNNLLLRKDVCSWSTGMQLRYNISQLEEWLRGRNLHQSGAVQTMEPLIQAAQLLQLKKKTQEDAEAICSLCTSLSTQQIVKILNLYTPLNEFEERVTVAFIRTIQAQLQERNDPQQLLLDAKHMFPVLFPFNPSSLTMDSIHIPACLNLEFLNEV

SEQ ID NO: 54645 - protein, 720 aa, Homo sapiens
MHWPVTRECTRVWIPDPDEVWRSAELTKDYKEGDKSLQLRLEDETILEYPIDVQRNQLPFLRNPDILVGENDLTALSYLHEPAVLHNLKVRFLESNHIYTYCGIVLVAINPYEQLPIYGQDVIYTYSGQNMGDMDPHIFAVAEEAYKQMARDEKNQSIIVSGESGAGKTVSAKYAMRYFATVGGSASETNIEEKVLASSPIMEAIGNAKTTRNDNSSRFGKYIQIGFDKRYHIIGANMRTYLLEKSRVVFQADDERNYHIFYQLCAAAGLPEFKELALTSAEDFFYTSQGGDTSIEGVDDAEDFEKTRQAFTLLGVKESHQMSIFKIIASILHLGSVAIQAERDGDSCSISPQDVYLSNFCRLLGVEHSQMEHWLCHRKLVTTSETYVKTMSLQQVINARNALAKHIYAQLFGWIVEHINKALHTSLKQHSFIGVLDIYGFETFEVNSFEQFCINYANEKLQQQFNSHVFKLEQEEYMKEQIPWTLIDFYDNQPCIDLIEAKLGILDLLDEECKVPKGTDQNWAQKLYDRHSSSQHFQKPRMSNTAFIIVHFADKVEYLSDGFLEKNRDTVYEEQINILKASKFPLVADLFHDDKDPVPATTPGKGSSSKISVRSARPPMKVSNKEHKKTVGHQFRTSLSTQQIVKILNLYTPLNEFEERVTVAFIRTIQAQLQERNDPQQLLLDAKHMFPVLFPFNPSSLTMDSIHIPACLNLEFLNEV

SEQ ID NO: 54646 - protein, 1742 aa, Homo sapiens
MAVAELYTQYNRVWIPDPEEVWKSAEIAKDYRVGDKVLRLLLEDGTELDYSVNPESLPPLRNPDILVGENDLTALSYLHEPAVLHNLRIRFAESKLIYTYSGIILVAMNPYKQLPIYGDAIIHAYSGQNMGDMDPHIFAVAEEAYKQMARNNRNQSIIVSGESGAGKTVSARYAMRYFATVSKSGSNAHVEDKVLASNPITEAVGNAKTTRNDNSSRFGKYTEISFDEQNQIIGANMSTYLLEKSRVVFQSENERNYHIFYQLCASAQQSEFKHLKLGSAEEFNYTRMGGNTVIEGVNDRAEMVETQKTFTLLGFKEDFQMDVFKILAAILHLGNVQITAVGNERSSVSEDDSHLKVFCELLGLESGRVAQWLCNRKIVTSSETVVKPMTRPQAVNARDALAKKIYAHLFDFIVERINQALQFSGKQHTFIGVLDIYGFETFDVNSFEQFCINYANEKLQQQFNMHVFKLEQEEYMKEDIPWTLIDFYDNQPVIDLIEAKMGILELLDEECLLPHGTDENWLQKLYNNFVNRNPLFEKPRMSNTSFVIQHFADKVEYKCEGFLEKNRDTVYDMLVEILRASKFHLCANFFQENPTPPSPFGSMITVKSAKQVIKPNSKHFRTTVGSKFRSSLYLLMETLNATTPHYVRCIKPNDEKLPFEFDSKRIVQQLRACGVLETIRISAQSYPSRWTYIEFYSRYGILMTKQELSFSDKKEVCKVVLHRLIQDSNQYQFGKTKIFFRAGQVAYLEKLRLDKLRQSCVMVQKHMRGWLQRKKFLRERRAALIIQQYFRGQQTVRKAITAVALKEAWAAIIIQKHCRGYLVRSLYQLIRMATITMQAYSRGFLARRRYRKMLEEHKAVILQKYARAWLARRRFQSIRRFVLNIQLTYRVQRLQKKLEDQNKENHGLVEKLTSLAALRAGDVEKIQKLEAELEKAATHRRNYEEKGKRYRDAVEEKLAKLQKHNSELETQKEQIQLKLQEKTEELKEKMDNLTKQLFDDVQKEERQRMLLEKSFELKTQDYEKQIQSLKEEIKALKDEKMQLQHLVEGEHVTSDGLKAEVARLSKQVKTISEFEKEIELLQAQKIDVEKHVQSQKREMREKMSEITKQLLESYDIEDVRSRLSVEDLEHLNEDGELWFAYEGLKKATRVLESHFQSQKDCYEKEIEALNFKVVHLSQEINHLQKLFREENDINESIRHEVTRLTSENMMIPDFKQQISELEKQKQDLEIRLNEQAEKMKGKLEELSNQLHRSQEEEGTQRKALEAQNEIHTKEKEKLIDKIQEMQEASDHLKKQFETESEVKCNFRQEASRLTLENRDLEEELDMKDRVIKKLQDQVKTLSKTIGKANDVHSSSGPKEYLGMLQYKREDEAKLIQNLILDLKPRGVVVNMIPGLPAHILFMCVRYADSLNDANMLKSLMNSTINGIKQVVKEHLEDFEMLSFWLSNTCHFLNCLKQYSGEEEFMKHNSPQQNKNCLNNFDLSEYRQILSDVAIRIYHQFIIIMEKNIQPIIVPGMLEYESLQGISGLKPTGFRKRSSSIDDTDGYTMTSVLQQLSYFYTTMCQNGLDPELVRQAVKQLFFLIGAVTLNSLFLRKDMCSCRKGMQIRCNISYLEEWLKDKNLQNSLAKETLEPLSQAAWLLQVKKTTDSDAKEIYERCTSLSAVQIIKILNSYTPIDDFEKRVTPSFVRKVQALLNSREDSSQLMLDTKYLFQVTFPFTPSPHALEMIQIPSSFKLGFLNRL

SEQ ID NO: 54647 - protein, 373 aa, Homo sapiens
MPSSTPTAGRTWAIWTHTYLPWQKRHTSRWPDGKSEAQDLDLLTLYLNLYCITPAAAPELPPLYVFVCELDSQRAPIPGSDAYNEGAGGAYMRNNRNQSIIVSGESGAGKTVSARYAMRYFATVSKSGSNAHVEDKVLASNPITEAVGNAKTTRNDNSSRFGKYTEISFDEQNQIIGANMSTYLLEKSRVVFQSENERNYHIFYQLCASAQQSEFKHLKLGSAEEFNYTRMGGNTVIEGVNDRAEMVETQKTFTLLGFKEDFQMDVFKILAAILHLGNVQITAVGNERSSVSEDDSHLKVFCELLGLESGRVAQWLCNRKIVTSSETVVKPMTRPQAVNARDALAKKIYAHLFDFIVERINQALQFSVLKPLM

SEQ ID NO: 54648 - protein, 106 aa, Homo sapiens
MNPYKQLPIYGDAIIHAYSGQNMGDMDPHIFAVAEEAYKQMARNNRNQSIIVSGESGAGKTVSARYAMRYFATVSKSGSNAHVEDKVLASNPITEAVGNAKTTRND

SEQ ID NO: 54649 - protein, 430 aa, Homo sapiens
MAVAELYTQYNRVWIPDPEEVWKSAEIAKDYRVGDKVLRLLLEDGTELDYSVNPESLPPLRNPDILVGENDLTALSYLHEPAVLHNLRIRFAESKLIYTYSGIILVAMNPYKQLPIYGDAIIHAYSGQNMGDMDPHIFAVAEEAYKQMARNNRNQSIIVSGESGAGKTVSARYAMRYFATVSKSGSNAHVEDKVLASNPITEAVGNAKTTRNDNSSRFGKYTEISFDEQNQIIGANMSTYLLEKSRVVFQSENERNYHIFYQLCASAQQSEFKHLKLGSAEEFNYTRMGGNTVIEGVNDRAEMVETQKTFTLLGFKEDFQMDVFKILAAILHLGNVQITAVGNERSSVSEDDSHLKVFCELLGLESGRVAQWLCNRKIVTSSETVVKPMTRPQAVNARDALAKKIYAHLFDFIVERINQALQFSVLKPLM

SEQ ID NO: 54650 - protein, 269 aa, Homo sapiens
MAVAELYTQYNRVWIPDPEEVWKSAEIAKDYRVGDKVLRLLLEDGTELDYSVNPESLPPLRNPDILVGENDLTALSYLHEPAVLHNLRIRFAESKLIYTYSGIILVAMNPYKQLPIYGDAIIHAYSGQNMGDMDPHIFAVAEEAYKQMARNNRNQSIIVSGESGAGKTVSARYAMRYFATVSKSGSNAHVEDKVLASNPITEAVGNAKTTRNDNSSRFGKYTEISFDEQNQIIGANMSTYLLEKSRVVFQGVPKNLIIQEWEAILSLRV

SEQ ID NO: 54651 - protein, 1253 aa, Homo sapiens
MEDGKPVWAPHPTDGFQMGNIVDIGPDSLTIEPLNQKGKTFLALINQVFPAEEDSKKDVEDNCSLMYLNEATLLHNIKVRYSKDRIYTYVANILIAVNPYFDIPKIYSSEAIKSYQGKSLGTRPPHVFAIADKAFRDMKVLKMSQSIIVSGESGAGKTENTKFVLRYLTESYGTGQDIDDRIVEANPLLEAFGNAKTVRNNNSSRFGKFVEIHFNEKSSVVGGFVSHYLLEKSRICVQGKEERNYHIFYRLCAGASEDIREKLHLSSPDNFRYLNRGCTRYFANKETDKQILQNRKSPEYLKAGSMKDPLLDDHGDFIRMCTAMKKIGLDDEEKLDLFRVVAGVLHLGNIDFEEAGSTSGGCNLKNKSAQSLEYCAELLGLDQDDLRVSLTTRVMLTTAGGTKGTVIKVPLKVEQANNARDALAKTVYSHLFDHVVNRVNQCFPFETSSYFIGVLDIAGFEYFEHNSFEQFCINYCNEKLQQFFNERILKEEQELYQKEGLGVNEVHYVDNQDCIDLIEAKLVGILDILDEENRLPQPSDQHFTSAVHQKHKDHFRLTIPRKSKLAVHRNIRDDEGFIIRHFAGAVCYETTQFVEKNNDALHMSLESLICESRDKFIRELFESSTNNNKDTKQKAGKLSFISVGNKFKTQLNLLLDKLRSTGASFIRCIKPNLKMTSHHFEGAQILSQLQCSGMVSVLDLMQGGYPSRASFHELYNMYKKYMPDKLARLDPRLFCKALFKALGLNENDYKFGLTKVFFRPGKFAEFDQIMKSDPDHLAELVKRVNHWLTCSRWKKVQWCSLSVIKLKNKIKYRAEACIKMQKTIRMWLCKRRHKPRIDGLVKVGTLKKRLDKFNEVVSVLKDGKPEMNKQIKNLEISIDTLMAKIKSTMMTQEQIQKEYDALVKSSEELLSALQKKKQQEEEAERLRRIQEEMEKERKRREEDEKRRRKEEEERRMKLEMEAKRKQEEEERKKREDDEKRIQAEVEAQLARQKEEESQQQAVLEQERRDRELALRIAQSEAELISDEAQADLALRRGPAVLATKAAAGTKKYDLSKWKYAELRDTINTSCDIELLAACREEFHRRLKVYHAWKSKNKKRNTETEQRAPKSVTDYAQQNPAAQIPARQREIEMNRQQRFFRIPFIRPADQYKDPQSKKKGWWYAHFDGPWIARQMELHPDKPPILLVAGKDDMEMCELNLEETGLTRKRGAEILPRQFEEIWERCGGIQYLQNAIESRQARPTYATAMLQSLLK

SEQ ID NO: 54652 - protein, 1285 aa, Homo sapiens
MEDGKPVWAPHPTDGFQMGNIVDIGPDSLTIEPLNQKGKTFLALINQVFPAEEDSKKDVEDNCSLMYLNEATLLHNIKVRYSKDRIYTYVANILIAVNPYFDIPKIYSSEAIKSYQGKSLGTRPPHVFAIADKAFRDMKVLKMSQSIIVSGESGAGKTENTKFVLRYLTESYGTGQDIDDRIVEANPLLEAFGNAKTVRNNNSSRFGKFVEIHFNEKSSVVGGFVSHYLLEKSRICVQGKEERNYHIFYRLCAGASEDIREKLHLSSPDNFRYLNRGCTRYFANKETDKQILQNRKSPEYLKAGSMKDPLLDDHGDFIRMCTAMKKIGLDDEEKLDLFRVVAGVLHLGNIDFEEAGSTSGGCNLKNKSAQSLEYCAELLGLDQDDLRVSLTTRVMLTTAGGTKGTVIKVPLKVEQANNARDALAKTVYSHLFDHVVNRVNQCFPFETSSYFIGVLDIAGFEYFEHNSFEQFCINYCNEKLQQFFNERILKEEQELYQKEGLGVNEVHYVDNQDCIDLIEAKLVGILDILDEENRLPQPSDQHFTSAVHQKHKDHFRLTIPRKSKLAVHRNIRDDEGFIIRHFAGAVCYETTQFVEKNNDALHMSLESLICESRDKFIRELFESSTNNNKDTKQKAGKLSFISVGNKFKTQLNLLLDKLRSTGASFIRCIKPNLKMTSHHFEGAQILSQLQCSGMVSVLDLMQGGYPSRASFHELYNMYKKYMPDKLARLDPRLFCKALFKALGLNENDYKFGLTKVFFRPGKFAEFDQIMKSDPDHLAELVKRVNHWLTCSRWKKVQWCSLSVIKLKNKIKYRAEACIKMQKTIRMWLCKRRHKPRIDGLVKVGTLKKRLDKFNEVVSVLKDGKPEMNKQIKNLEISIDTLMAKIKSTMMTQEQIQKEYDALVKSSEELLSALQKKKQQEEEAERLRRIQEEMEKERKRREEDEKRRRKEEEERRMKLEMEAKRKQEEEERKKREDDEKRIQAEVEAQLARQKEEESQQQAVLEQERRDRELALRIAQSEAELISDEAQADLALRRNDGTRPKMTPEQMAKEMSEFLSRGPAVLATKAAAGTKKYDLSKWKYAELRDTINTSCDIELLAACREEFHRRLKVYHAWKSKNKKRNTETEQRAPKSVTDYDFAPFLNNSPQQNPAAQIPARQREIEMNRQQRFFRIPFIRPADQYKDPQSKKKGWWYAHFDGPWIARQMELHPDKPPILLVAGKDDMEMCELNLEETGLTRKRGAEILPRQFEEIWERCGGIQYLQNAIESRQARPTYATAMLQSLLK

SEQ ID NO: 54653 - protein, 1286 aa, Homo sapiens
MEDGKPVWAPHPTDGFQMGNIVDIGPDSLTIEPLNQKGKTFLALINQVFPAEEDSKKDVEDNCSLMYLNEATLLHNIKVRYSKDRIYTYVANILIAVNPYFDIPKIYSSEAIKSYQGKSLGTRPPHVFAIADKAFRDMKVLKMSQSIIVSGESGAGKTENTKFVLRYLTESYGTGQDIDDRIVEANPLLEAFGNAKTVRNNNSSRFGKFVEIHFNEKSSVVGGFVSHYLLEKSRICVQGKEERNYHIFYRLCAGASEDIREKLHLSSPDNFRYLNRGCTRYFANKETDKQILQNRKSPEYLKAGSMKDPLLDDHGDFIRMCTAMKKIGLDDEEKLDLFRVVAGVLHLGNIDFEEAGSTSGGCNLKNKSAQSLEYCAELLGLDQDDLRVSLTTRVMLTTAGGTKGTVIKVPLKVEQANNARDALAKTVYSHLFDHVVNRVNQCFPFETSSYFIGVLDIAGFEYFEHNSFEQFCINYCNEKLQQFFNERILKEEQELYQKEGLGVNEVHYVDNQDCIDLIEAKLVGILDILDEENRLPQPSDQHFTSAVHQKHKDHFRLTIPRKSKLAVHRNIRDDEGFIIRHFAGAVCYETTQFVEKNNDALHMSLESLICESRDKFIRELFESSTNNNKDTKQKAGKLSFISVGNKFKTQLNLLLDKLRSTGASFIRCIKPNLKMTSHHFEGAQILSQLQCSGMVSVLDLMQGGYPSRASFHELYNMYKKYMPDKLARLDPRLFCKALFKALGLNENDYKFGLTKVFFRPGKFAEFDQIMKSDPDHLAELVKRVNHWLTCSRWKKVQWCSLSVIKLKNKIKYRAEACIKMQKTIRMWLCKRRHKPRIDGLVKVGTLKKRLDKFNEVVSVLKDGKPEMNKQIKNLEISIDTLMAKIKSTMMTQEQIQKEYDALVKSSEELLSALQKKKQQEEEAERLRRIQEEMEKERKRREEDEKRRRKEEEERRMKLEMEAKRKQEEEERKKREDDEKRIQAEVEAQLARQKEEESQQQAVLEQERRDRELALRIAQSEAELISDEAQADLALRRYLDSYPVTSKNDGTRPKMTPEQMAKEMSEFLSRGPAVLATKAAAGTKKYDLSKWKYAELRDTINTSCDIELLAACREEFHRRLKVYHAWKSKNKKRNTETEQRAPKSVTDYAQQNPAAQIPARQREIEMNRQQRFFRIPFIRPADQYKDPQSKKKGWWYAHFDGPWIARQMELHPDKPPILLVAGKDDMEMCELNLEETGLTRKRGAEILPRQFEEIWERCGGIQYLQNAIESRQARPTYATAMLQSLLK

SEQ ID NO: 54654 - protein, 1262 aa, Homo sapiens
MEDGKPVWAPHPTDGFQMGNIVDIGPDSLTIEPLNQKGKTFLALINQVFPAEEDSKKDVEDNCSLMYLNEATLLHNIKVRYSKDRIYTYVANILIAVNPYFDIPKIYSSEAIKSYQGKSLGTRPPHVFAIADKAFRDMKVLKMSQSIIVSGESGAGKTENTKFVLRYLTESYGTGQDIDDRIVEANPLLEAFGNAKTVRNNNSSRFGKFVEIHFNEKSSVVGGFVSHYLLEKSRICVQGKEERNYHIFYRLCAGASEDIREKLHLSSPDNFRYLNRGCTRYFANKETDKQILQNRKSPEYLKAGSMKDPLLDDHGDFIRMCTAMKKIGLDDEEKLDLFRVVAGVLHLGNIDFEEAGSTSGGCNLKNKSAQSLEYCAELLGLDQDDLRVSLTTRVMLTTAGGTKGTVIKVPLKVEQANNARDALAKTVYSHLFDHVVNRVNQCFPFETSSYFIGVLDIAGFEYFEHNSFEQFCINYCNEKLQQFFNERILKEEQELYQKEGLGVNEVHYVDNQDCIDLIEAKLVGILDILDEENRLPQPSDQHFTSAVHQKHKDHFRLTIPRKSKLAVHRNIRDDEGFIIRHFAGAVCYETTQFVEKNNDALHMSLESLICESRDKFIRELFESSTNNNKDTKQKAGKLSFISVGNKFKTQLNLLLDKLRSTGASFIRCIKPNLKMTSHHFEGAQILSQLQCSGMVSVLDLMQGGYPSRASFHELYNMYKKYMPDKLARLDPRLFCKALFKALGLNENDYKFGLTKVFFRPGKFAEFDQIMKSDPDHLAELVKRVNHWLTCSRWKKVQWCSLSVIKLKNKIKYRAEACIKMQKTIRMWLCKRRHKPRIDGLVKVGTLKKRLDKFNEVVSVLKDGKPEMNKQIKNLEISIDTLMAKIKSTMMTQEQIQKEYDALVKSSEELLSALQKKKQQEEEAERLRRIQEEMEKERKRREEDEKRRRKEEEERRMKLEMEAKRKQEEEERKKREDDEKRIQAEVEAQLARQKEEESQQQAVLEQERRDRELALRIAQSEAELISDEAQADLALRRGPAVLATKAAAGTKKYDLSKWKYAELRDTINTSCDIELLAACREEFHRRLKVYHAWKSKNKKRNTETEQRAPKSVTDYDFAPFLNNSPQQNPAAQIPARQREIEMNRQQRFFRIPFIRPADQYKDPQSKKKGWWYAHFDGPWIARQMELHPDKPPILLVAGKDDMEMCELNLEETGLTRKRGAEILPRQFEEIWERCGGIQYLQNAIESRQARPTYATAMLQSLLK

SEQ ID NO: 54655 - protein, 1295 aa, Homo sapiens [sequence omitted]

SEQ ID NO: 54656 - protein, 174 aa, Homo sapiens
KRREEDEKRRRKEEEERRMKLEMEAKRKQEEEERKKREDDEKRIQAEVEAQLARQKEEESQQQAVLEQERRDRELALRIAQSEAELISDEAQADLALRSLDSYPVTSKNDGTRPKMTPGPAVLATKAAAGTKKYDLSKWKYAELRDTINTSCDIELLAACREEFHRRLKVYHAW

SEQ ID NO: 54657 - protein, 2091 aa, Homo sapiens
ALLQKGDHVWMDLRLGQEFDVPIGAVVKLCDSGQVQVVDDEDNEHWISPQNATHIKPMHPTSVHGVEDMIRLGDLNEAGILRNLLIRYRDHLIYTYTGSILVAVNPYQLLSIYSPEHIRQYTNKKIGEMPPHIFAIADNCYFNMKRNSRDQCCIISGESGAGKTESTKLILQFLAAISGQHSWIEQQVLEATPILEAFGNAKTIRNDNSSRFGKYIDIHFNKRGAIEGAKIEQYLLEKSRVCRQALDERNYHVFYCMLEGMSEDQKKKLGLGQASDYNYLAMVNPPDLMSCLTSRTLITRGETVSTPLSREQALDVRDAFVKGIYGRLFVWIVDKINAAIYKPPSQDVKNSRRSIGLLDIFGFENFAVNSFEQLCINFANEHLQQFFVRHVFKLEQEEYDLESIDWLHIEFTDNQDALDMIANKPMNIISLIDEESKFPKFLEKNRDTLHGDIIQLVHSSRNKFIKQIFQADVAMGAETRKRSPTLSSQFKRSLELLMRTLGACQPFFVRCIKPNEFKKPMLFDRHLCVRQLRYSGMMETIRIRRAGYPIRYSFVEFVERYRVLLPGVKPAYKQGDLRGTCQRMAEAVLGTHDDWQIGKTKIFLKDHHDMLLEVERDKAITDRVILLQKVIRGFKDRSNFLKLKNAATLIQRHWRGHNCRKNYGLMRLGFLRLQALHRSRKLHQQYRLARQRIIQFQARCRAYLVRKAFRHRLWAVLTVQAYARGMIARRLHQRLRAEYLWRLEAEKMRLAEEEKLRKEMSAKKAKEEAERKHQERLAQLAREDAERELKEKEAARRKKELLEQMERARHEPVNHSDMVDKMFGFLGTSGGLPGQEGQAPSGFEDLERGRREMVEEDLDAALPLPDEDEEDLSEYKFAKFAATYFQGTTTHSYTRRPLKQPLLYHDDEGDQLAALAVWITILRFMGDLPEPKYHTAMSDGSEKIPVMTKIYETLGKKTYKRELQALQGEGEAQLPEGQKKSSVRHKLVHLTLKKKSKLTEEVTKRLHDGESTVQGNSMLEDRPTSNLEKLHFIIGNGILRPALRDEIYCQISKQLTHNPSKSSYARGWILVSLCVGCFAPSEKFVKYLRNFIHGGPPGYAPYCEERLRRTFVNGTRTQPPSWLELQATKSKKPIMLPVTFMDGTTKTLLTDSATTAKELCNALADKISLKDRFGFSLYIALFDKVSSLGSGSDHVMDAISQCEQYAKEQGAQERNAPWRLFFRKEVFTPWHSPSEDNVATNLIYQQVVRGVKFGEYRCEKEDDLAELASQQYFVDYGSEMILERLLNLVPTYIPDREITPLKTLEKWAQLAIAAHKKGIYAQRRTDAQKVKEDVVSYARFKWPLLFSRFYEAYKFSGPSLPKNDVIVAVNWTGVYFVDEQEQVLLELSFPEIMAVSSSRECRVWLSLGCSDLGCAAPHSGWAGLTPAGPCSPCWSCRGAKTTAPSFTLATIKGDEYTFTSSNAEDIRDLVVTFLEGLRKRSKYVVALQDNPNPAGEESGFLSFAKGDLIILDHDTGEQVMNSGWANGINERTKQRGDFPTDSVYVMPTVTMPPREIVALVTMTPDQRQDVVRLLQLRTAEPEVRAKPYTLEEFSYDYFRPPPKHTLSRVMVSKARGKDRLWSHTREPLKQALLKKLLGSEELSQEACLAFIAVLKYMGDYPSKRTRSVNELTDQIFEGPLKAEPLKDEAYVQILKQLTDNHIRYSEERGWELLWLCTGLFPPSNILLPHVQRFLQSRKHCPLAIDCLQRLQKALRNGSRKYPPHLVEVEAIQHKTTQIFHKVYFPDDTDEAFEVESSTKAKDFCQNIATRLLLKSSEGFSLFVKIADKVLSVPENDFFFDFVRHLTDWIKKARPIKDGIVPSLTYQVFFMKKLWTTTVPGKDPMADSIFHYYQELPKYLRGYHKCTREEVLQLGALIYRVKFEEDKSYFPSIPKLLRELVPQDLIRQVSPDDWKRSIVAYFNKHAGKSKEEAKLAFLKLIFKWPTFGSAFFEVKQTTEPNFPEILLIAINKYGVSLIDPKTKDILTTHPFTKISNWSSGNTYFHITIGNLVRGSKLLCETSLGYKMDDLLTSYISQMLTAMSKQRGSRSGK

SEQ ID NO: 54658 - protein, 2184 aa, Homo sapiens
ALLQKGDHVWMDLRLGQEFDVPIGAVVKLCDSGQVQVVDDEDNEHWISPQNATHIKPMHPTSVHGVEDMIRLGDLNEAGILRNLLIRYRDHLIYTYTGSILVAVNPYQLLSIYSPEHIRQYTNKKIGEMPPHIFAIADNCYFNMKRNSRDQCCIISGESGAGKTESTKLILQFLAAISGQHSWIEQQVLEATPILEAFGNAKTIRNDNSSRFGKYIDIHFNKRGAIEGAKIEQYLLEKSRVCRQALDERNYHVFYCMLEGMSEDQKKKLGLGQASDYNYLAMGNCITCEGRVDSQEYANIRSAMKVLMFTDTENWEISKLLAAILHLGNLQYEARTFENLDACEVLFSPSLATAASLLEVNPPDLMSCLTSRTLITRGETVSTPLSREQALDVRDAFVKGIYGRLFVWIVDKINAAIYKPPSQDVKNSRRSIGLLDIFGFENFAVNSFEQLCINFANEHLQQFFVRHVFKLEQEEYDLESIDWLHIEFTDNQDALDMIANKPMNIISLIDEESKFPKGTDTTMLHKLNSQHKLNANYIPPKNNHETQFGINHFAGIVYYETQGFLEKNRDTLHGDIIQLVHSSRNKFIKQIFQADVAMGAETRKRSPTLSSQFKRSLELLMRTLGACQPFFVRCIKPNEFKKPMLFDRHLCVRQLRYSGMMETIRIRRAGYPIRYSFVEFVERYRVLLPGVKPAYKQGDLRGTCQRMAEAVLGTHDDWQIGKTKIFLKDHHDMLLEVERDKAITDRVILLQKVIRGFKDRSNFLKLKNAATLIQRHWRGHNCRKNYGLMRLGFLRLQALHRSRKLHQQYRLARQRIIQFQARCRAYLVRKAFRHRLWAVLTVQAYARGMIARRLHQRLRAEYLWRLEAEKMRLAEEEKLRKEMSAKKAKEEAERKHQERLAQLAREDAERELKEKEAARRKKELLEQMERARHEPVNHSDMVDKMFGFLGTSGGLPGQEGQAPSGFEDLERGRREMVEEDLDAALPLPDEDEEDLSEYKFAKFAATYFQGTTTHSYTRRPLKQPLLYHDDEGDQLAALAVWITILRFMGDLPEPKYHTAMSDGSEKIPVMTKIYETLGKKTYKRELQALQGEGEVTKRLHDGESTVQGNSMLEDRPTSNLEKLHFIIGNGILRPALRDEIYCQISKQLTHNPSKSSYARGWILVSLCVGCFAPSEKFVKYLRNFIHGGPPGYAPYCEERLRRTFVNGTRTQPPSWLELQATKSKKPIMLPVTFMDGTTKTLLTDSATTAKELCNALADKISLKDRFGFSLYIALFDKVSSLGSGSDHVMDAISQCEQYAKEQGAQERNAPWRLFFRKEVFTPWHSPSEDNVATNLIYQQVVRGVKFGEYRCEKEDDLAELASQQYFVDYGSEMILERLLNLVPTYIPDREITPLKTLEKWAQLAIAAHKKGIYAQRRTDAQKVKEDVVSYARFKWPLLFSRFYEAYKFSGPSLPKNDVIVAVNWTGVYFVDEQEQVLLELSFPEIMAVSSSRECRVWLSLGCSDLGCAAPHSGWAGLTPAGPCSPCWSCRGAKTTAPSFTLATIKGDEYTFTSSNAEDIRDLVVTFLEGLRKRSKYVVALQDNPNPAGEESGFLSFAKGDLIILDHDTGEQVMNSGWANGINERTKQRGDFPTDSVYVMPTVTMPPREIVALVTMTPDQRQDVVRLLQLRTAEPEVRAKPYTLEEFSYDYFRPPPKHTLSRVMVSKARGKDRLWSHTREPLKQALLKKLLGSEELSQEACLAFIAVLKYMGDYPSKRTRSVNELTDQIFEGPLKAEPLKDEAYVQILKQLTDNHIRYSEERGWELLWLCTGLFPPSNILLPHVQRFLQSRKHCPLAIDCLQRLQKALRNGSRKYPPHLVEVEAIQHKTTQIFHKVYFPDDTDEAFEVESSTKAKDFCQNIATRLLLKSSEGFSLFVKIADKVLSVPENDFFFDFVRHLTDWIKKARPIKDGIVPSLTYQVFFMKKLWTTTVPGKDPMADSIFHYYQELPKYLRGYHKCTREEVLQLGALIYRVKFEEDKSYFPSIPKLLRELVPQDLIRQVSPDDWKRSIVAYFNKHAGKSKEEAKLAFLKLIFKWPTFGSAFFEVKQTTEPNFPEILLIAINKYGVSLIDPKTKDILTTHPFTKISNWSSGNTYFHITIGNLVRGSKLLCETSLGYKMDDLLTSYISQMLTAMSKQRGSRSGK

SEQ ID NO: 54659 - protein, 1202 aa, Homo sapiens
ALLQKGDHVWMDLRLGQEFDVPIGAVVKLCDSGQVQVVDDEDNEHWISPQNATHIKPMHPTSVHGVEDMIRLGDLNEAGILRNLLIRYRDHLIYTYTGSILVAVNPYQLLSIYSPEHIRQYTNKKIGEMPPHIFAIADNCYFNMKRNSRDQCCIISGESGAGKTESTKLILQFLAAISGQHSWIEQQVLEATPILEAFGNAKTIRNDNSSRFGKYIDIHFNKRGAIEGAKIEQYLLEKSRVCRQALDERNYHVFYCMLEGMSEDQKKKLGLGQASDYNYLAMGNCITCEGRVDSQEYANIRSAMKVLMFTDTENWEISKLLAAILHLGNLQYEARTFENLDACEVLFSPSLATAASLLEVNPPDLMSCLTSRTLITRGETVSTPLSREQALDVRDAFVKGIYGRLFVWIVDKINAAIYKPPSQDVKNSRRSIGLLDIFGFENFAVNSFEQLCINFANEHLQQFFVRHVFKLEQEEYDLESIDWLHIEFTDNQDALDMIANKPMNIISLIDEESKFPKGTDTTMLHKLNSQHKLNANYIPPKNNHETQFGINHFAGIVYYETQGFLEKNRDTLHGDIIQLVHSSRNKFIKQIFQADVAMGAETRKRSPTLSSQFKRSLELLMRTLGACQPFFVRCIKPNEFKKPMLFDRHLCVRQLRYSGMMETIRIRRAGYPIRYSFVEFVERYRVLLPGVKPAYKQGDLRGTCQRMAEAVLGTHDDWQIGKTKIFLKDHHDMLLEVERDKAITDRVILLQKVIRGFKDRSNFLKLKNAATLIQRHWRGHNCRKNYGLMRLGFLRLQALHRSRKLHQQYRLARQRIIQFQARCRAYLVRKAFRHRLWAVLTVQAYARGMIARRLHQRLRAEYLWRLEAEKMRLAEEEKLRKEMSAKKAKEEAERKHQERLAQLAREDAERELKEKEAARRKKELLEQMERARHEPVNHSDMVDKMFGFLGTSGGLPGQEGQAPSGFEDLERGRREMVEEDLDAALPLPDEDEEDLSEYKFAKFAATYFQGTTTHSYTRRPLKQPLLYHDDEGDQLAALAVWITILRFMGDLPEPKYHTAMSDGSEKIPVMTKIYETLGKKTYKRELQALQGEGEVLQAQLPEGQKKSSVRHKLVHLTLKKKSKLTEEVTKRLHDGESTVQGNSMLEDRPTSNLEKLHFIIGNGILRPALRSVPPESLLVAEWCLCQPSKRLSQAPGFGFAAS

SEQ ID NO: 54660 - protein, 2214 aa, Homo sapiens
ALLQKGDHVWMDLRLGQEFDVPIGAVVKLCDSGQVQVVDDEDNEHWISPQNATHIKPMHPTSVHGVEDMIRLGDLNEAGILRNLLIRYRDHLIYTYTGSILVAVNPYQLLSIYSPEHIRQYTNKKIGEMPPHIFAIADNCYFNMKRNSRDQCCIISGESGAGKTESTKLILQFLAAISGQHSWIEQQVLEATPILEAFGNAKTIRNDNSSRFGKYIDIHFNKRGAIEGAKIEQYLLEKSRVCRQALDERNYHVFYCMLEGMSEDQKKKLGLGQASDYNYLAMGNCITCEGRVDSQEYANIRSAMKVLMFTDTENWEISKLLAAILHLGNLQYEARTFENLDACEVLFSPSLATAASLLEVNPPDLMSCLTSRTLITRGETVSTPLSREQALDVRDAFVKGIYGRLFVWIVDKINAAIYKPPSQDVKNSRRSIGLLDIFGFENFAVNSFEQLCINFANEHLQQFFVRHVFKLEQEEYDLESIDWLHIEFTDNQDALDMIANKPMNIISLIDEESKFPKGTDTTMLHKLNSQHKLNANYIPPKNNHETQFGINHFAGIVYYETQGFLEKNRDTLHGDIIQLVHSSRNKFIKQIFQADVAMGAETRKRSPTLSSQFKRSLELLMRTLGACQPFFVRCIKPNEFKKPMLFDRHLCVRQLRYSGMMETIRIRRAGYPIRYSFVEFVERYRVLLPGVKPAYKQGDLRGTCQRMAEAVLGTHDDWQIGKTKIFLKDHHDMLLEVERDKAITDRVILLQKVIRGFKDRSNFLKLKNAATLIQRHWRGHNCRKNYGLMRLGFLRLQALHRSRKLHQQYRLARQRIIQFQARCRAYLVRKAFRHRLWAVLTVQAYARGMIARRLHQRLRAEYLWRLEAEKMRLAEEEKLRKEMSAKKAKEEAERKHQERLAQLAREDAERELKEKEAARRKKELLEQMERARHEPVNHSDMVDKMFGFLGTSGGLPGQEGQAPSGFEDLERGRREMVEEDLDAALPLPDEDEEDLSEYKFAKFAATYFQGTTTHSYTRRPLKQPLLYHDDEGDQLAALAVWITILRFMGDLPEPKYHTAMSDGSEKIPVMTKIYETLGKKTYKRELQALQGEGEAQLPEGQKKSSVRHKLVHLTLKKKSKLTEEVTKRLHDGESTVQGNSMLEDRPTSNLEKLHFIIGNGILRPALRDEIYCQISKQLTHNPSKSSYARGWILVSLCVGCFAPSEKFVKYLRNFIHGGPPGYAPYCEERLRRTFVNGTRTQPPSWLELQATKSKKPIMLPVTFMDGTTKTLLTDSATTAKELCNALADKISLKDRFGFSLYIALFDKVSSLGSGSDHVMDAISQCEQYAKEQGAQERNAPWRLFFRKEVFTPWHSPSEDNVATNLIYQQVVRGVKFGEYRCEKEDDLAELASQQYFVDYGSEMILERLLNLVPTYIPDREITPLKTLEKWAQLAIAAHKKGIYAQRRTDAQKVKEDVVSYARFKWPLLFSRFYEAYKFSGPSLPKNDVIVAVNWTGVYFVDEQEQVLLELSFPEIMAVSSSRECRVWLSLGCSDLGCAAPHSGWAGLTPAGPCSPCWSCRGAKTTAPSFTLATIKGDEYTFTSSNAEDIRDLVVTFLEGLRKRSKYVVALQDNPNPAGEESGFLSFAKGDLIILDHDTGEQVMNSGWANGINERTKQRGDFPTDSVYVMPTVTMPPREIVALVTMTPDQRQDVVRLLQLRTAEPEVRAKPYTLEEFSYDYFRPPPKHTLSRVMVSKARGKDRLWSHTREPLKQALLKKLLGSEELSQEACLAFIAVLKYMGDYPSKRTRSVNELTDQIFEGPLKAEPLKDEAYVQILKQLTDNHIRYSEERGWELLWLCTGLFPPSNILLPHVQRFLQSRKHCPLAIDCLQRLQKALRNGSRKYPPHLVEVEAIQHKTTQIFHKVYFPDDTDEAFEVESSTKAKDFCQNIATRLLLKSSEGFSLFVKIADKVLSVPENDFFFDFVRHLTDWIKKARPIKDGIVPSLTYQVFFMKKLWTTTVPGKDPMADSIFHYYQELPKYLRGYHKCTREEVLQLGALIYRVKFEEDKSYFPSIPKLLRELVPQDLIRQVSPDDWKRSIVAYFNKHAGKSKEEAKLAFLKLIFKWPTFGSAFFEVKQTTEPNFPEILLIAINKYGVSLIDPKTKDILTTHPFTKISNWSSGNTYFHITIGNLVRGSKLLCETSLGYKMDDLLTSYISQMLTAMSKQRGSRSGK

SEQ ID NO: 54661 - protein, 2215 aa, Homo sapiens
MVILQQGDHVWMDLRLGQEFDVPIGAVVKLCDSGQVQVVDDEDNEHWISPQNATHIKPMHPTSVHGVEDMIRLGDLNEAGILRNLLIRYRDHLIYTYTGSILVAVNPYQLLSIYSPEHIRQYTNKKIGEMPPHIFAIADNCYFNMKRNSRDQCCIISGESGAGKTESTKLILQFLAAISGQHSWIEQQVLEATPILEAFGNAKTIRNDNSSRFGKYIDIHFNKRGAIEGAKIEQYLLEKSRVCRQALDERNYHVFYCMLEGMSEDQKKKLGLGQASDYNYLAMGNCITCEGRVDSQEYANIRSAMKVLMFTDTENWEISKLLAAILHLGNLQYEARTFENLDACEVLFSPSLATAASLLEVNPPDLMSCLTSRTLITRGETVSTPLSREQALDVRDAFVKGIYGRLFVWIVDKINAAIYKPPSQDVKNSRRSIGLLDIFGFENFAVNSFEQLCINFANEHLQQFFVRHVFKLEQEEYDLESIDWLHIEFTDNQDALDMIANKPMNIISLIDEESKFPKGTDTTMLHKLNSQHKLNANYIPPKNNHETQFGINHFAGIVYYETQGFLEKNRDTLHGDIIQLVHSSRNKFIKQIFQADVAMGAETRKRSPTLSSQFKRSLELLMRTLGACQPFFVRCIKPNEFKKPMLFDRHLCVRQLRYSGMMETIRIRRAGYPIRYSFVEFVERYRVLLPGVKPAYKQGDLRGTCQRMAEAVLGTHDDWQIGKTKIFLKDHHDMLLEVERDKAITDRVILLQKVIRGFKDRSNFLKLKNAATLIQRHWRGHNCRKNYGLMRLGFLRLQALHRSRKLHQQYRLARQRIIQFQARCRAYLVRKAFRHRLWAVLTVQAYARGMIARRLHQRLRAEYLWRLEAEKMRLAEEEKLRKEMSAKKAKEEAERKHQERLAQLAREDAERELKEKEAARRKKELLEQMERARHEPVNHSDMVDKMFGFLGTSGGLPGQEGQAPSGFEDLERGRREMVEEDLDAALPLPDEDEEDLSEYKFAKFAATYFQGTTTHSYTRRPLKQPLLYHDDEGDQLAALAVWITILRFMGDLPEPKYHTAMSDGSEKIPVMTKIYETLGKKTYKRELQALQGEGEAQLPEGQKKSSVRHKLVHLTLKKKSKLTEEVTKRLHDGESTVQGNSMLEDRPTSNLEKLHFIIGNGILRPALRDEIYCQISKQLTHNPSKSSYARGWILVSLCVGCFAPSEKFVKYLRNFIHGGPPGYAPYCEERLRRTFVNGTRTQPPSWLELQATKSKKPIMLPVTFMDGTTKTLLTDSATTAKELCNALADKISLKDRFGFSLYIALFDKVSSLGSGSDHVMDAISQCEQYAKEQGAQERNAPWRLFFRKEVFTPWHSPSEDNVATNLIYQQVVRGVKFGEYRCEKEDDLAELASQQYFVDYGSEMILERLLNLVPTYIPDREITPLKTLEKWAQLAIAAHKKGIYAQRRTDAQKVKEDVVSYARFKWPLLFSRFYEAYKFSGPSLPKNDVIVAVNWTGVYFVDEQEQVLLELSFPEIMAVSSSRECRVWLSLGCSDLGCAAPHSGWAGLTPAGPCSPCWSCRGAKTTAPSFTLATIKGDEYTFTSSNAEDIRDLVVTFLEGLRKRSKYVVALQDNPNPAGEESGFLSFAKGDLIILDHDTGEQVMNSGWANGINERTKQRGDFPTDSVYVMPTVTMPPREIVALVTMTPDQRQDVVRLLQLRTAEPEVRAKPYTLEEFSYDYFRPPPKHTLSRVMVSKARGKDRLWSHTREPLKQALLKKLLGSEELSQEACLAFIAVLKYMGDYPSKRTRSVNELTDQIFEGPLKAEPLKDEAYVQILKQLTDNHIRYSEERGWELLWLCTGLFPPSNILLPHVQRFLQSRKHCPLAIDCLQRLQKALRNGSRKYPPHLVEVEAIQHKTTQIFHKVYFPDDTDEAFEVESSTKAKDFCQNIATRLLLKSSEGFSLFVKIADKVLSVPENDFFFDFVRHLTDWIKKARPIKDGIVPSLTYQVFFMKKLWTTTVPGKDPMADSIFHYYQELPKYLRGYHKCTREEVLQLGALIYRVKFEEDKSYFPSIPKLLRELVPQDLIRQVSPDDWKRSIVAYFNKHAGKSKEEAKLAFLKLIFKWPTFGSAFFEVKQTTEPNFPEILLIAINKYGVSLIDPKTKDILTTHPFTKISNWSSGNTYFHITIGNLVRGSKLLCETSLGYKMDDLLTSYISQMLTAMSKQRGSRSGK

SEQ ID NO: 54662 - protein, 1178 aa, Homo sapiens
MVILQQGDHVWMDLRLGQEFDVPIGAVVKLCDSGQVQVVDDEDNEHWISPQNATHIKPMHPTSVHGVEDMIRLGDLNEAGILRNLLIRYRDHLIYTYTGSILVAVNPYQLLSIYSPEHIRQYTNKKIGEMPPHIFAIADNCYFNMKRNSRDQCCIISGESGAGKTESTKLILQFLAAISGQHSWIEQQVLEATPILEAFGNAKTIRNDNSSRFGKYIDIHFNKRGAIEGAKIEQYLLEKSRVCRQALDERNYHVFYCMLEGMSEDQKKKLGLGQASDYNYLAMGNCITCEGRVDSQEYANIRSAMKVLMFTDTENWEISKLLAAILHLGNLQYEARTFENLDACEVLFSPSLATAASLLEVNPPDLMSCLTSRTLITRGETVSTPLSREQALDVRDAFVKGIYGRLFVWIVDKINAAIYKPPSQDVKNSRRSIGLLDIFGFENFAVNSFEQLCINFANEHLQQFFVRHVFKLEQEEYDLESIDWLHIEFTDNQDALDMIANKPMNIISLIDEESKFPKGTDTTMLHKLNSQHKLNANYIPPKNNHETQFGINHFAGIVYYETQGFLEKNRDTLHGDIIQLVHSSRNKFIKQIFQADVAMGAETRKRSPTLSSQFKRSLELLMRTLGACQPFFVRCIKPNEFKKPMLFDRHLCVRQLRYSGMMETIRIRRAGYPIRYSFVEFVERYRVLLPGVKPAYKQGDLRGTCQRMAEAVLGTHDDWQIGKTKIFLKDHHDMLLEVERDKAITDRVILLQKVIRGFKDRSNFLKLKNAATLIQRHWRGHNCRKNYGLMRLGFLRLQALHRSRKLHQQYRLARQRIIQFQARCRAYLVRKAFRHRLWAVLTVQAYARGMIARRLHQRLRAEYLWRLEAEKMRLAEEEKLRKEMSAKKAKEEAERKHQERLAQLAREDAERELKEKEAARRKKELLEQMERARHEPVNHSDMVDKMFGFLGTSGGLPGQEGQAPSGFEDLERGRREMVEEDLDAALPLPDEDEEDLSEYKFAKFAATYFQGTTTHSYTRRPLKQPLLYHDDEGDQLAALAVWITILRFMGDLPEPKYHTAMSDGSEKIPVMTKIYETLGKKTYKRELQALQGEGEAQLPEGQKKSSVRHKLVHLTLKKKSKLTEEVTKRLHDGESTVQGNSMLEDRPTSNLEKLHFIIGNGILRPALRSVPGGGDTRA

SEQ ID NO: 54663 - protein, 2175 aa, Homo sapiens
MVILQQGDHVWMDLRLGQEFDVPIGAVVKLCDSGQVQVVDDEDNEHWISPQNATHIKPMHPTSVHGVEDMIRLGDLNEAGILRNLLIRYRDHLIYTYTGSILVAVNPYQLLSIYSPEHIRQYTNKKIGEMPPHIFAIADNCYFNMKRNSRDQCCIISGESGAGKTESTKLILQFLAAISGQHSWIEQQVLEATPILEAFGNAKTIRNDNSSRFGKYIDIHFNKRGAIEGAKIEQYLLEKSRVCRQALDERNYHVFYCMLEGMSEDQKKKLGLGQASDYNYLAMGNCITCEGRVDSQEYANIRSAMKVLMFTDTENWEISKLLAAILHLGNLQYEARTFENLDACEVLFSPSLATAASLLEVNPPDLMSCLTSRTLITRGETVSTPLSREQALDVRDAFVKGIYGRLFVWIVDKINAAIYKPPSQDVKNSRRSIGLLDIFGFENFAVNSFEQLCINFANEHLQQFFVRHVFKLEQEEYDLESIDWLHIEFTDNQDALDMIANKPMNIISLIDEESKFPKGTDTTMLHKLNSQHKLNANYIPPKNNHETQFGINHFAGIVYYETQGFLEKNRDTLHGDIIQLVHSSRNKFIKQIFQADVAMGAETRKRSPTLSSQFKRSLELLMRTLGACQPFFVRCIKPNEFKKPMLFDRHLCVRQLRYSGMMETIRIRRAGYPIRYSFVEFVERYRVLLPGVKPAYKQGDLRGTCQRMAEAVLGTHDDWQIGKTKIFLKDHHDMLLEVERDKAITDRVILLQKVIRGFKDRSNFLKLKNAATLIQRHWRGHNCRKNYGLMRLGFLRLQALHRSRKLHQQYRLARQRIIQFQARCRAYLVRKAFRHRLWAVLTVQAYARGMIARRLHQRLRAEYLWRLEAEKMRLAEEEKLRKEMSAKKAKEEAERKHQERLAQLAREDAERELKEKEAARRKKELLEQMERARHEPVNHSDMVDKMFGFLGTSGGLPGQEGQAPSGFEDLERGRREMVEEDLDAALPLPDEDEEDLSEYKFAKFAATYFQGTTTHSYTRRPLKQPLLYHDDEGDQLAALAVWITILRFMGDLPEPKYHTAMSDGSEKIPVMTKIYETLGKKTYKRELQALQGEGEAQLPEGQKKSSVRHKLVHLTLKKKSKLTEEVTKRLHDGESTVQGNSMLEDRPTSNLEKLHFIIGNGILRPALRDEIYCQISKQLTHNPSKSSYARGWILVSLCVGCFAPSEKFVKYLRNFIHGGPPGYAPYCEERLRRTFVNGTRTQPPSWLELQATKSKKPIMLPVTFMDGTTKTLLTDSATTAKELCNALADKISLKDRFGFSLYIALFDKVSSLGSGSDHVMDAISQCEQYAKEQGAQERNAPWRLFFRKEVFTPWHSPSEDNVATNLIYQQVVRGVKFGEYRCEKEDDLAELASQQYFVDYGSEMILERLLNLVPTYIPDREITPLKTLEKWAQLAIAAHKKGIYAQRRTDAQKVKEDVVSYARFKWPLLFSRFYEAYKFSGPSLPKNDVIVAVNWTGVYFVDEQEQVLLELSFPEIMAVSSSRGAKTTAPSFTLATIKGDEYTFTSSNAEDIRDLVVTFLEGLRKRSKYVVALQDNPNPAGEESGFLSFAKGDLIILDHDTGEQVMNSGWANGINERTKQRGDFPTDSVYVMPTVTMPPREIVALVTMTPDQRQDVVRLLQLRTAEPEVRAKPYTLEEFSYDYFRPPPKHTLSRVMVSKARGKDRLWSHTREPLKQALLKKLLGSEELSQEACLAFIAVLKYMGDYPSKRTRSVNELTDQIFEGPLKAEPLKDEAYVQILKQLTDNHIRYSEERGWELLWLCTGLFPPSNILLPHVQRFLQSRKHCPLAIDCLQRLQKALRNGSRKYPPHLVEVEAIQHKTTQIFHKVYFPDDTDEAFEVESSTKAKDFCQNIATRLLLKSSEGFSLFVKIADKVLSVPENDFFFDFVRHLTDWIKKARPIKDGIVPSLTYQVFFMKKLWTTTVPGKDPMADSIFHYYQELPKYLRGYHKCTREEVLQLGALIYRVKFEEDKSYFPSIPKLLRELVPQDLIRQVSPDDWKRSIVAYFNKHAGKSKEEAKLAFLKLIFKWPTFGSAFFEQTTEPNFPEILLIAINKYGVSLIDPKTKDILTTHPFTKISNWSSGNTYFHITIGNLVRGSKLLCETSLGYKMDDLLTSYISQMLTAMSKQRGSRSGK

SEQ ID NO: 54664 - protein, 843 aa, Homo sapiens
GLSVQWLLDGLACFFASLHVPLGRVQLHASARGIQEKEDDLAELASQQYFVDYGSEMILERLLNLVPTYIPDREITPLKTLEKWAQLAIAAHKKGIYAQRRTDAQKVKEDVVSYARFKWPLLFSRFYEAYKFSGPSLPKNDVIVAVNWTGVYFVDEQEQVLLELSFPEIMAVSSSRGAKTTAPSFTLATIKGDEYTFTSSNAEDIRDLVVTFLEGLRKRSKYVVALQDNPNPAGEESGFLSFAKGDLIILDHDTGEQVMNSGWANGINERTKQRGDFPTDSVYVMPTVTMPPREIVALVTMTPDQRQDVVRLLQLRTAEPEVRAKPYTLEEFSYDYFRPPPKHTLSRVMVSKARGKDRLWSHTREPLKQALLKKLLGSEELSQEACLAFIAVLKYMGDYPSKRTRSVNELTDQIFEGPLKAEPLKDEAYVQILKQLTDNHIRYSEERGWELLWLCTGLFPPSNILLPHVQRFLQSRKHCPLAIDCLQRLQKALRNGSRKYPPHLVEVEAIQHKTTQIFHKVYFPDDTDEAFEVESSTKAKDFCQNIATRLLLKSSEGFSLFVKIADKVLSVPENDFFFDFVRHLTDWIKKARPIKDGIVPSLTYQVFFMKKLWTTTVPGKDPMADSIFHYYQELPKYLRGYHKCTREEVLQLGALIYRVKFEEDKSYFPSIPKLLRELVPQDLIRQVSPDDWKRSIVAYFNKHAGKSKEEAKLAFLKLIFKWPTFGSAFFEVKVHHGLLRAEEEGNRALIKHRDSSLGLWERAMALDTCPGEGRRAAPSALSQLSVLAGVSPGDRGTRRSSAWQWRQTCKQAGVMEDGLCSDTGEPSPRWQSSGGSAGCEKAS

SEQ ID NO: 54665 - protein, 1388 aa, Homo sapiens
MRLGFLRLQALHRSRKLHQQYRLARQRIIQFQARCRAYLVRKAFRHRLWAVLTVQAYARGMIARRLHQRLRAEYLWRLEAEKMRLAEEEKLRKEMSAKKAKEEAERKHQERLAQLAREDAERELKEKEAARRKKELLEQMERARHEPVNHSDMVDKMFGFLGTSGGLPGQEGQAPSGFEDLERGRREMVEEDLDAALPLPDEDEEDLSEYKFAKFAATYFQGTTTHSYTRRPLKQPLLYHDDEGDQLAALAVWITILRFMGDLPEPKYHTAMSDGSEKIPVMTKIYETLGKKTYKRELQALQGEGEAQLPEGQKKSSVRHKLVHLTLKKKSKLTEEVTKRLHDGESTVQGNSMLEDRPTSNLEKLHFIIGNGILRPALRDEIYCQISKQLTHNPSKSSYARGWILVSLCVGCFAPSEKFVKYLRNFIHGGPPGYAPYCEERLRRTFVNGTRTQPPSWLELQATKSKKPIMLPVTFMDGTTKTLLTDSATTAKELCNALADKISLKDRFGFSLYIALFDKVSSLGSGSDHVMDAISQCEQYAKEQGAQERNAPWRLFFRKEVFTPWHSPSEDNVATNLIYQQVVRGVKFGEYRCEKEDDLAELASQQYFVDYGSEMILERLLNLVPTYIPDREITPLKTLEKWAQLAIAAHKKGIYAQRRTDAQKVKEDVVSYARFKWPLLFSRFYEAYKFSGPSLPKNDVIVAVNWTGVYFVDEQEQVLLELSFPEIMAVSSSRGAKTTAPSFTLATIKGDEYTFTSSNAEDIRDLVVTFLEGLRKRSKYVVALQDNPNPAGEESGFLSFAKGDLIILDHDTGEQVMNSGWANGINERTKQRGDFPTDSVYVMPTVTMPPREIVALVTMTPDQRQDVVRLLQLRTAEPEVRAKPYTLEEFSYDYFRPPPKHTLSRVMVSKARGKDRLWSHTREPLKQALLKKLLGSEELSQEACLAFIAVLKYMGDYPSKRTRSVNELTDQIFEGPLKAEPLKDEAYVQILKQLTDNHIRYSEERGWELLWLCTGLFPPSNILLPHVQRFLQSRKHCPLAIDCLQRLQKALRNGSRKYPPHLVEVEAIQHKTTQIFHKVYFPDDTDEAFEVESSTKAKDFCQNIATRLLLKSSEGFSLFVKIADKVLSVPENDFFFDFVRHLTDWIKKARPIKDGIVPSLTYQVFFMKKLWTTTVPGKDPMADSIFHYYQELPKYLRGYHKCTREEVLQLGALIYRVKFEEDKSYFPSIPKLLRELVPQDLIRQVSPDDWKRSIVAYFNKHAGKSKEEAKLAFLKLIFKWPTFGSAFFEVKQTTEPNFPEILLIAINKYGVSLIDPKTKDILTTHPFTKISNWSSGNTYFHITIGNLVRGSKLLCETSLGYKMDDLLTSYISQMLTAMSKQRGSRSGK

SEQ ID NO: 54666 - protein, 859 aa, Homo sapiens
MGRKLDLSGLTDDETEHVLQVVQRDFNLRKKEEERLSELKQKLDEEGSKCSILSKHQQFVEHCCMRCCSPFTFLVNTKRQCGDCKFNVCKSCCSYQKHEKAWVCCVCQQARLLRAQSLEWFYNNVKSRFKRFGSAKVLKNLYRKHRLESGACFDILGGSLFESNLENEGSISGSDSTFYRQSEGHSVMDTLAVALRVAEEAIEEAISKAEAYGDSLDKQNEASYLRDHKEELTEELATTILQKIIRKQKSKSEQQVEEEPGWPHPQSCSTKVADEGTSASPGGYRAPAALWRSQSAFSITGEEALKTPPVEAPSRQPRDQGQHPRAESALPSWKSVDRLDETNLAPVLQSPDGNWVALKDGAPPPTRLLAKPKSGTFQALEVASSVASAYDEMGSDSEEDFDWSEALSKLCPRSRALPRNPQPQPTQAQSSDQGPIAASPSSALSPNPEAMCSDSETSSAGSSREVGHQARLSWLQRKAPRNPAAEKMRLHGELDVNFNPQLASRETSDSSEPEEAPHTTDRRARRWRRARLGSEEPSKEPSSPSAQLRDLDTHQVSDDLSETDISNEARDPQTLTDTTEEKRRNRLYELAMKMSEKETSSGEDQESEPKTESENQKESLSSEDNSQSVQEELKKKFSAVSLCNISTEVLKVINATEELIAGSTGPWESPQVPPDRQKGMFPRGTDQVRLDEQLTSLEENVYLAAGTVYGLETQLTELEDAARCIHSGTDETHLADLEDQVATAAAQVHHAELQISDIESRISALTIAGLNIAPCVRFTRRRDQKQRTQVQTIDTSRQQRRKLPAPPVKAEKIETSSVTTIKTFNHNFILQGSSTNRTKERKGTTKDLMEPALESAVMY

SEQ ID NO: 54667 - protein, 770 aa, Homo sapiens
MRKAASAASSRSTSSLWSTAACAAARPSPSSSTPSASVEIANSMSARAAAPTRSTKRPGSAASASKRGGSLFESNLENEGSISGSDSTFYRQSEGHSVMDTLAVALRVAEEAIEEAISKAEAYGDSLDKQNEASYLRDHKEELTEELATTILQKIIRKQKSKSEQQVEEEPGWPHPQSCSTKVADEGTSASPGGYRAPAALWRSQSAFSITGEEALKTPPVEAPSRQPRDQGQHPRAESALPSWKSVDRLDETNLAPVLQSPDGNWVALKDGAPPPTRLLAKPKSGTFQALEVASSVASAYDEMGSDSEEDFDWSEALSKLCPRSRALPRNPQPQPTQAQSSDQGPIAASPSSALSPNPEAMCSDSETSSAGSSREVGHQARLSWLQRKAPRNPAAEKMRLHGELDVNFNPQLASRETSDSSEPEEAPHTTDRRARRWRRARLGSEEPSKEPSSPSAQLRDLDTHQVSDDLSETDISNEARDPQTLTDTTEEKRRNRLYELAMKMSEKETSSGEDQESEPKTESENQKESLSSEDNSQSVQEELKKKFSAVSLCNISTEVLKVINATEELIAGSTGPWESPQVPPDRQKGMFPRGTDQVRLDEQLTSLEENVYLAAGTVYGLETQLTELEDAARCIHSGTDETHLADLEDQVATAAAQVHHAELQISDIESRISALTIAGLNIAPCVRFTRRRDQKQRTQVQTIDTSRQQRRKLPAPPVKAEKIETSSVTTIKTFNHNFILQGSSTNRTKERKGTTKDLMEPALESAVMY

SEQ ID NO: 54668 - protein, 859 aa, Homo sapiens; identical to SEQ ID NO: 54666

SEQ ID NO: 54669 - protein, 672 aa, Homo sapiens
MDTLAVALRVAEEAIEEAISKAEAYGDSLDKQNEASYLRDHKEELTEELATTILQKIIRKQKSKSEQQVEEEPGWPHPQSCSTKVADEGTSASPGGYRAPAALWRSQSAFSITGEEALKTPPVEAPSRQPRDQGQHPRAESALPSWKSVDRLDETNLAPVLQSPDGNWVALKDGAPPPTRLLAKPKSGTFQALEVASSVASAYDEMGSDSEEDFDWSEALSKLCPRSRALPRNPQPQPTQAQSSDQGPIAASPSSALSPNPEAMCSDSETSSAGSSREVGHQARLSWLQRKAPRNPAAEKMRLHGELDVNFNPQLASRETSDSSEPEEAPHTTDRRARRWRRARLGSEEPSKEPSSPSAQLRDLDTHQVSDDLSETDISNEARDPQTLTDTTEEKRRNRLYELAMKMSEKETSSGEDQESEPKTESENQKESLSSEDNSQSVQEELKKKFSAVSLCNISTEVLKVINATEELIAGSTGPWESPQVPPDRQKGMFPRGTDQVRLDEQLTSLEENVYLAAGTVYGLETQLTELEDAARCIHSGTDETHLADLEDQVATAAAQVHHAELQISDIESRISALTIAGLNIAPCVRFTRRRDQKQRTQVQTIDTSRQQRRKLPAPPVKAEKIETSSVTTIKTFNHNFILQGSSTNRTKERKGTTKDLMEPALESAVMY

SEQ ID NO: 54670 - protein, 961 aa, Homo sapiens
MKYLLNFIGQGPATYGPFCAERLRRTYANGVRAEPPTWLELQAVKSKKHIPIQVILATGESLTVPVDSASTSREMCMHIAHKQGLSDHLGFSLQVAVYDKFWSLGSGRDHMMDAIARCEQMAQERGESQRQSPWRIYFRKEFFTPWHDSREDPVSTELIYRQVLRGVWSGEYSFEKEEELVELLARHCYVQLGASAESKAVQELLPSCIPHKLYRTKPPDRWASLVTAACAKAPYTQKQVTPLAVREQVVDAARLQWPLLFSRLFEVITLSAFTLPSLLARPPPAQDAGPAGEDAAGTLFPRGHGSGHQQVRALREDLFLHTEPHPPAPGRTAHEVLHWGITRCTGSFSLKPRSTRKGQGSVQPLAGTYLEGSFLCHGRELVAWRVQVVWEGDKGQCLAGADPHSHGSPWISLTGNFSMPFGKSTQQSGTCISGLCQVYSGHHSPLATSPRSTDSITHSADERMSKLKHAEVRWLRVSTWQSRQLISALTFAVSLRCHCTPATSLSAHSQPHTWAAPLSASERPTVVSGLVLALAEQLCVLIRWRGLLVTLSFISREAQGGQRLLLSTMHEEYEFVSPSSVAIAELVALFLEGLKERSIFAMALQDRKATDDTTLLAFKKGDLLVLTKKQGLLASENWTLGQNDRTGKTGLVPMACLYTIPTVTKPSAQLLSLLAMSPEKRKLAAQEGQFTEPRPEEPPKEKLHTLEEFSYEFFRAPEKDMVSMAVLPLARARGHLWAYSCEPLRQPLLKRVHANVDLWDIACQIFATPILRYMGDYPSRQAWPTLELTDQIFTLALQHPALQDEVYCQILKQLTHNSNRHSEERGWQLLWLCTGLFPPSKGLLPHAQKFIDTRRGKLLAPDCSRRIQKVLRTGPRKQPPHQVEVEAAEQNVSRICHKIYFPNDTSEMLEVVANTRVRDVCDSIATRLQLASWEGCSLFIKISDKVISQKEGDFFFDSLRE

SEQ ID NO: 54671 - protein, 2117 aa, Homo sapiens
MSGFRLGDHVWLEPPSTHKTGVAIGGIIKEAKPGKVLVEDDEGKEHWIRAEDFGVLSPMHPNSVQGVDDMIRLGDLNEAGMVHNLLIRYQQHKIYTYTGSILVAVNPFQVLPLYTLEQVQLYYSRHMGELPPHVFAIANNCYFSMKRNKRDQCCIISGESGAGKTETTKLILQFLATISGQHSWIEQQVLEANPILEAFGNAKTIRNDNSSRFGKYIDIYFNPSGVIEGARIEQFLLEKSRVCRQAPEERNYHIFYCMLMGVSAEDKQLLSLGTPSEYHYLTMGNCTSCEGLNDAKDYAHIRSAMKILQFSDSESWDVIKLLAAILHLGNVGFMASVFENLDASDVMETPAFPTVMKLLEVQHQELRDCLIKHTILIRGEFVTRSLNIAQAADRRDAFVKGIYGHLFLWIVKKINAAIFTPPAQDPKNVRRAIGLLDIFGFENFENNSFEQLCINFANEHLQQFFVQHVFTMEQEEYRSENISWDYIHYTDNRPTLDLLALKPMSIISLLDEESRFPQGTDLTMLQKLNSVHANNKAFLQPKNIHDARFGIAHFAGEVYYQAEGFLEKNRDVLSTDILTLVYSSKNKFLREIFNLELAETKLGHGTIRQAKAGNHLFKSADSNKRPSTLGSQFKQSLDQLMKILTNCQPYFIRCIKPNEYKKPLLFDRELCLRQLRYSGMMETVHIRKSGFPIRYTFEEFSQRFGVLLPNAMRMQLQGKLRQMTLGITDVWLRTDKDWKAGKTKIFLRDHQDTLLEVQRSQVLDRAALSIQKVLRGYRYRKEFLRQRRAAVTLQAWWRGYCNRRNFKLILVGFERLQAIARSQPLARQYQAMRQRTVQLQALCRGYLVRQQVQAKRRAVVVIQAHARGMAARRNFQQRKANAPLVIPAEGQKSQGALPAKKRRSIYDTVTDTEMVEKVFGFLPAMIGGQEGQASPHFEDLESKTQKLLEVDLDTVPMAEEPEEDVDGLAEYTFPKFAVTYFQKSASHTHIRRPLRYPLLYHEDDTDCLAALVIWNVILRFMGDLPEPVLYARSSQQGSSVMRQIHDTLGREHGAQVPQHSRSAQVASQLNIGEEALEPDGLGADRPMSNLEKVHFIVGYAILRPSLRDEIYCQICKQLSENFKTSSLARGWILLSLCLGCFPPSERFMKYLLNFIGQGPATYGPFCAERLRRTYANGVRAEPPTWLELQAVKSKKHIPIQVILATGESLTVPVDSASTSREMCMHIAHKQGLSDHLGFSLQVAVYDKFWSLGSGRDHMMDAIARCEQMAQERGESQRQSPWRIYFRKEFFTPWHDSREDPVSTELIYRQVLRGVWSGEYSFEKEEELVELLARHCYVQLGASAESKAVQELLPSCIPHKLYRTKPPDRWASLVTAACAKAPYTQKQVTPLAVREQVVDAARLQWPLLFSRLFEVITLSGPRLPKTQLILAVNWKGLCFLDQQEKMLLELSFPEVMGLATNREAQGGQRLLLSTMHEEYEFVSPSSVAIAELVALFLEGLKERSIFAMALQDRKATDDTTLLAFKKGDLLVLTKKQGLLASENWTLGQNDRTGKTGLVPMACLYTIPTVTKPSAQLLSLLAMSPEKRKLAAQEGQFTEPRPEEPPKEKLHTLEEFSYEFFRAPEKDMVSMAVLPLARARGHLWAYSCEPLRQPLLKRVHANVDLWDIACQIFATPILRYMGDYPSRQAWPTLELTDQIFTLALQHPALQDEVYCQILKQLTHNSNRHSEERGWQLLWLCTGLFPPSKGLLPHAQKFIDTRRGKLLAPDCSRRIQKVLRTGPRKQPPHQVEVEAAEQNVSRICHKIYFPNDTSEMLEVVANTRVRDVCDSIATRLQLASWEGCSLFIKISDKVISQKEGDFFFDSLREVSDWVKKNKPQKEGAPVTLPYQVYFMRKLWLNISPGKDVNADTILHYHQELPKYLRGFHKCSREDAIHLAGLIYKAQFNNDRSQLASVPKILRELVPENLTRLMSSEEWKKSILLAYDKHKDKTVEEAKVAFLKWICRWPTFGSAFFEVKQTSEPSYPDVILIAINRHGVLLIHPKTKDLLTTYPFTKISSWSSGSTYFHMALGSLGRGSRLLCETSLGYKMDDLLTSYVQQLLSAMNKQRGSKAPALAST

SEQ ID NO: 54672 - protein, 2116 aa, Homo sapiens
MSGFRLGDHVWLEPPSTHKTGVAIGGIIKEAKPGKVLVEDDEGKEHWIRAEDFGVLSPMHPNSVQGVDDMIRLGDLNEAGMVHNLLIRYQQHKIYTYTGSILVAVNPFQVLPLYTLEQVQLYYSRHMGELPPHVFAIANNCYFSMKRNKRDQCCIISGESGAGKTETTKLILQFLATISGQHSWIEQQVLEANPILEAFGNAKTIRNDNSSRFGKYIDIYFNPSGVIEGARIEQFLLEKSRVCRQAPEERNYHIFYCMLMGVSAEDKQLLSLGTPSEYHYLTMGNCTSCEGLNDAKDYAHIRSAMKILQFSDSESWDVIKLLAAILHLGNVGFMASVFENLDASDVMETPAFPTVMKLLEVQHQELRDCLIKHTILIRGEFVTRSLNIAQAADRRDAFVKGIYGHLFLWIVKKINAAIFTPPAQDPKNVRRAIGLLDIFGFENFENNSFEQLCINFANEHLQQFFVQHVFTMEQEEYRSENISWDYIHYTDNRPTLDLLALKPMSIISLLDEESRFPQGTDLTMLQKLNSVHANNKAFLQPKNIHDARFGIAHFAGEVYYQAEGFLEKNRDVLSTDILTLVYSSKNKFLREIFNLELAETKLGHGTIRQAKAGNHLFKSADSNKRPSTLGSQFKQSLDQLMKILTNCQPYFIRCIKPNEYKKPLLFDRELCLRQLRYSGMMETVHIRKSGFPIRYTFEEFSQRFGVLLPNAMRMQLQGKLRQMTLGITDVWLRTDKDWKAGKTKIFLRDHQDTLLEVQRSQVLDRAALSIQKVLRGYRYRKEFLRQRRAAVTLQAWWRGYCNRRNFKLILVGFERLQAIARSQPLARQYQAMRQRTVQLQALCRGYLVRQQVQAKRRAVVVIQAHARGMAARRNFQQRKANAPLVIPAEGQKSQGALPAKKRRSIYDTVTDTEMVEKVFGFLPAMIGGQEGQASPHFEDLESKTQKLLEVDLDTVPMAEEPEEDVDGLAEYTFPKFAVTYFQKSASHTHIRRPLRYPLLYHEDDTDCLAALVIWNVILRFMGDLPEPVLYARSSQQGSSVMRQIHDTLGREHGAQVPQHSRSAQVASQLNIGEEALEPDGLGADRPMSNLEKVHFIVGYAILRPSLRDEIYCQICKQLSENFKTSSLARGWILLSLCLGCFPPSERFMKYLLNFIGQGPATYGPFCAERLRRTYANGVRAEPPTWLELQAVKSKKHIPIQVILATGESLTVPVDSASTSREMCMHIAHKQGLSDHLGFSLQVAVYDKFWSLGSGRDHMMDAIARCEQMAQERGESQRQSPWRIYFRKEFFTPWHDSREDPVSTELIYRQVLRGVWSGEYSFEKEEELVELLARHCYVQLGASAESKAVQELLPSCIPHKLYRTKPPDRWASLVTAACAKAPYTQKQVTPLAVREQVVDAARLQWPLLFSRLFEVITLSGPRLPKTQLILAVNWKGLCFLDQQEKMLLELSFPEVMGLATNREAQGGQRLLLSTMHEEYEFVSPSSVAIAELVALFLEGLKERSIFAMALQDRKATDDTTLLAFKKGDLLVLTKKQGLLASENWTLGQNDRTGKTGLVPMACLYTIPTVTKPSAQLLSLLAMSPEKRKLAAQEGQFTEPRPEEPPKEKLHTLEEFSYEFFRAPEKDMVSMAVLPLARARGHLWAYSCEPLRQPLLKRVHANVDLWDIACQIFVAILRYMGDYPSRQAWPTLELTDQIFTLALQHPALQDEVYCQILKQLTHNSNRHSEERGWQLLWLCTGLFPPSKGLLPHAQKFIDTRRGKLLAPDCSRRIQKVLRTGPRKQPPHQVEVEAAEQNVSRICHKIYFPNDTSEMLEVVANTRVRDVCDSIATRLQLASWEGCSLFIKISDKVISQKEGDFFFDSLREVSDWVKKNKPQKEGAPVTLPYQVYFMRKLWLNISPGKDVNADTILHYHQELPKYLRGFHKCSREDAIHLAGLIYKAQFNNDRSQLASVPKILRELVPENLTRLMSSEEWKKSILLAYDKHKDKTVEEAKVAFLKWICRWPTFGSAFFEVKQTSEPSYPDVILIAINRHGVLLIHPKTKDLLTTYPFTKISSWSSGSTYFHMALGSLGRGSRLLCETSLGYKMDDLLTSYVQQLLSAMNKQRGSKAPALAST

SEQ ID NO: 54673 - protein, 2116 aa, Homo sapiens; identical to SEQ ID NO: 54672

SEQ ID NO: 54674 - protein, 1415 aa, Homo sapiens
MPDQFDQAVVLNQLRYSGMLETVRIRKAGYAVRRPFQDFYKRYKVLMRNLALPEDVRGKCTSLLQLYDASNSEWQLGKTKVFLRESLEQKLEKRREEEVSHAAMVIRAHVLGFLARKQYRKVLYCVVIIQKNYRAFLLRRRFLHLKKAAIVFQKQLRGQIARRVYRQLLAEKREQEEKKKQEEEEKKKREEEERERERERREAELRAQQEEETRKQQELEALQKSQKEAELTRELEKQKENKQVEEILRLEKEIEDLQRMKEQQELSLTEASLQKLQERRDQELRRLEEEACRAAQEFLESLNFDEIDECVRNIERSLSVGSEFSSELAESACEEKPNFNFSQPYPEEEVDEGFEADDDAFKDSPNPSEHGHSDQRTSGIRTSDDSSEEDPYMNDTVVPTSPSADSTVLLAPSVQDSGSLHNSSSGESTYCMPQNAGDLPSPDGDYDYDQDDYEDGAITSGSSVTFSNSYGSQWSPDYRCSVGTYNSSGAYRFSSEGAQSSFEDSEEDFDSRFDTDDELSYRRDSVYSCVTLPYFHSFLYMKGGLMNSWKRRWCVLKDETFLWFRSKQEALKQGWLHKKGGGSSTLSRRNWKKRWFVLRQSKLMYFENDSEEKLKGTVEVRTAKEIIDNTTKENGIDIIMADRTFHLIAESPEDASQWFSVLSQVHASTDQEIQEMHDEQANPQNAVGTLDVGLIDSVCASDSPDRPNSFVIITANRVLHCNADTPEEMHHWITLLQRSKGDTRVEGQEFIVRGWLHKEVKNSPKMSSLKLKKRWFVLTHNSLDYYKSSEKNALKLGTLVLNSLCSVVPPDEKIFKETGYWNVTVYGRKHCYRLYTKLLNEATRWSSAIQNVTDTKAPIDTPTQQLIQDIKENCLNSDVVEQIYKRNPILRYTHHPLHSPLLPLPYGDINLNLLKDKGYTTLQDEAIKIFNSLQQLESMSDPIPIIQGILQTGHDLRPLRDELYCQLIKQTNKVPHPGSVGNLYSWQILTCLSCTFLPSRGILKYLKFHLKRIREQFPGSEMEKYALFTYESLKKTKCREFVPSRDEIEALIHRQEMTSTVYCHGGGSCKITINSHTTAGEVVEKLIRGLAMEDSRNMFALFEYNGHVDKAIESRTVVADVLAKFEKLAATSEVGDLPWKFYFKLYCFLDTDNVPKDSVEFAFMFEQAHEAVIHGHHPAPEENLQVLAALRLQYLQGDYTLHAAIPPLEEVYSLQRLKARISQSTKTFTPCERLEKRRTSFLEGTLRRSFRTGSVVRQKVEEEQMLDMWIKEEVSSARASIIDKWRKFQGMNQEQAMAKYMALIKEWPGYGSTLFDVECKEGGFPQELWLGVSADAVSVYKRGEGRPLEVFQYEHILSFGAPLANTYKIVVDERELLFETSEVVDVAKLMKAYISMIVKKRYSTTRSASSQGSSR

SEQ ID NO: 54675 - protein, 1415 aa, Homo sapiens; identical to SEQ ID NO: 54674

SEQ ID NO: 54676 - protein, 1397 aa, Homo sapiens
MLETVRIRKAGYAVRRPFQDFYKRYKVLMRNLALPEDVRGKCTSLLQLYDASNSEWQLGKTKVFLRESLEQKLEKRREEEVSHAAMVIRAHVLGFLARKQYRKVLYCVVIIQKNYRAFLLRRRFLHLKKAAIVFQKQLRGQIARRVYRQLLAEKREQEEKKKQEEEEKKKREEEERERERERREAELRAQQEEETRKQQELEALQKSQKEAELTRELEKQKENKQVEEILRLEKEIEDLQRMKEQQELSLTEASLQKLQERRDQELRRLEEEACRAAQEFLESLNFDEIDECVRNIERSLSVGSEFSSELAESACEEKPNFNFSQPYPEEEVDEGFEADDDAFKDSPNPSEHGHSDQRTSGIRTSDDSSEEDPYMNDTVVPTSPSADSTVLLAPSVQDSGSLHNSSSGESTYCMPQNAGDLPSPDGDYDYDQDDYEDGAITSGSSVTFSNSYGSQWSPDYRCSVGTYNSSGAYRFSSEGAQSSFEDSEEDFDSRFDTDDELSYRRDSVYSCVTLPYFHSFLYMKGGLMNSWKRRWCVLKDETFLWFRSKQEALKQGWLHKKGGGSSTLSRRNWKKRWFVLRQSKLMYFENDSEEKLKGTVEVRTAKEIIDNTTKENGIDIIMADRTFHLIAESPEDASQWFSVLSQVHASTDQEIQEMHDEQANPQNAVGTLDVGLIDSVCASDSPDRPNSFVIITANRVLHCNADTPEEMHHWITLLQRSKGDTRVEGQEFIVRGWLHKEVKNSPKMSSLKLKKRWFVLTHNSLDYYKSSEKNALKLGTLVLNSLCSVVPPDEKIFKETGYWNVTVYGRKHCYRLYTKLLNEATRWSSAIQNVTDTKAPIDTPTQQLIQDIKENCLNSDVVEQIYKRNPILRYTHHPLHSPLLPLPYGDINLNLLKDKGYTTLQDEAIKIFNSLQQLESMSDPIPIIQGILQTGHDLRPLRDELYCQLIKQTNKVPHPGSVGNLYSWQILTCLSCTFLPSRGILKYLKFHLKRIREQFPGSEMEKYALFTYESLKKTKCREFVPSRDEIEALIHRQEMTSTVYCHGGGSCKITINSHTTAGEVVEKLIRGLAMEDSRNMFALFEYNGHVDKAIESRTVVADVLAKFEKLAATSEVGDLPWKFYFKLYCFLDTDNVPKDSVEFAFMFEQAHEAVIHGHHPAPEENLQVLAALRLQYLQGDYTLHAAIPPLEEVYSLQRLKARISQSTKTFTPCERLEKRRTSFLEGTLRRSFRTGSVVRQKVEEEQMLDMWIKEEVSSARASIIDKWRKFQGMNQEQAMAKYMALIKEWPGYGSTLFDVECKEGGFPQELWLGVSADAVSVYKRGEGRPLEVFQYEHILSFGAPLANTYKIVVDERELLFETSEVVDVAKLMKAYISMIVKKRYSTTRSASSQGSSR

SEQ ID NO: 54677 - protein, 2058 aa, Homo sapiens
MDNFFTEGTRVWLRENGQHFPSTVNSCAEGIVVFRTDYGQVFTYKQSTITHQKVTAMHPTNEEGVDDMASLTELHGGSIMYNLFQRYKRNQIYTYIGSILASVNPYQPIAGLYEPATMEQYSRRHLGELPPHIFAIANECYRCLWKRHDNQCILISGESGAGKTESTKLILKFLSVISQQSLELSLKEKTSCVERAILESSPIMEAFGNAKTVYNNNSSRFGKFVQLNICQKGNIQGGRIVDYLLEKNRVVRQNPGERNYHIFYALLAGLEHEEREEFYLSTPENYHYLNQSGCVEDKTISDQESFREVITAMDVMQFSKEEVREVSRLLAGILHLGNIEFITAGGAQVSFKTALGRSAELLGLDPTQLTDALTQRSMFLRGEEILTPLNVQQAVDSRDSLAMALYACCFEWVIKKINSRIKGNEDFKSIGILDIFGFENFEVNHFEQFNINYANEKLQEYFNKHIFSLEQLEYSREGLVWEDIDWIDNGECLDLIEKKLGLLALINEESHFPQATDSTLLEKLHSQHANNHFYVKPRVAVNNFGVKHYAGEVQYDVRGILEKNRDTFRDDLLNLLRESRFDFIYDLFEHVSSRNNQDTLKCGSKHRRPTVSSQFKDSLHSLMATLSSSNPFFVRCIKPNMQKMPDQFDQAVVLNQLRYSGMLETVRIRKAGYAVRRPFQDFYKRYKVLMRNLALPEDVRGKCTSLLQLYDASNSEWQLGKTKVFLRESLEQKLEKRREEEVSHAAMVIRAHVLGFLARKQYRKVLYCVVIIQKNYRAFLLRRRFLHLKKAAIVFQKQLRGQIARRVYRQLLAEKREQEEKKKQEEEEKKKREEEERERERERREAELRAQQEEETRKQQELEALQKSQKEAELTRELEKQKENKQVEEILRLEKEIEDLQRMKEQQELSLTEASLQKLQERRDQELRRLEEEACRAAQEFLESLNFDEIDECVRNIERSLSVGSEFSSELAESACEEKPNFNFSQPYPEEEVDEGFEADDDAFKDSPNPSEHGHSDQRTSGIRTSDDSSEEDPYMNDTVVPTSPSADSTVLLAPSVQDSGSLHNSSSGESTYCMPQNAGDLPSPDGDYDYDQDDYEDGAITSGSSVTFSNSYGSQWSPDYRCSVGTYNSSGAYRFSSEGAQSSFEDSEEDFDSRFDTDDELSYRRDSVYSCVTLPYFHSFLYMKGGLMNSWKRRWCVLKDETFLWFRSKQEALKQGWLHKKGGGSSTLSRRNWKKRWFVLRQSKLMYFENDSEEKLKGTVEVRTAKEIIDNTTKENGIDIIMADRTFHLIAESPEDASQWFSVLSQVHASTDQEIQEMHDEQANPQNAVGTLDVGLIDSVCASDSPDRPNSFVIITANRVLHCNADTPEEMHHWITLLQRSKGDTRVEGQEFIVRGWLHKEVKNSPKMSSLKLKKRWFVLTHNSLDYYKSSEKNALKLGTLVLNSLCSVVPPDEKIFKETGYWNVTVYGRKHCYRLYTKLLNEATRWSSAIQNVTDTKAPIDTPTQQLIQDIKENCLNSDVVEQIYKRNPILRYTHHPLHSPLLPLPYGDINLNLLKDKGYTTLQDEAIKIFNSLQQLESMSDPIPIIQGILQTGHDLRPLRDELYCQLIKQTNKVPHPGSVGNLYSWQILTCLSCTFLPSRGILKYLKFHLKRIREQFPGSEMEKYALFTYESLKKTKCREFVPSRDEIEALIHRQEMTSTVYCHGGGSCKITINSHTTAGEVVEKLIRGLAMEDSRNMFALFEYNGHVDKAIESRTVVADVLAKFEKLAATSEVGDLPWKFYFKLYCFLDTDNVPKDSVEFAFMFEQAHEAVIHGHHPAPEENLQVLAALRLQYLQGDYTLHAAIPPLEEVYSLQRLKARISQSTKTFTPCERLEKRRTSFLEGTLRRSFRTGSVVRQKVEEEQMLDMWIKEEVSSARASIIDKWRKFQGMNQEQAMAKYMALIKEWPGYGSTLFDVECKEGGFPQELWLGVSADAVSVYKRGEGRPLEVFQYEHILSFGAPLANTYKIVVDERELLFETSEVVDVAKLMKAYISMIVKKRYSTTRSASSQGSSR

SEQ ID NO: 54678 - protein, 1397 aa, Homo sapiens; identical to SEQ ID NO: 54676

SEQ ID NO: 54679 - protein, 3530 aa, Homo sapiens
MAKEEDEEKKAKKGKKGKKAPEPEKPKRSLKGTSRLFMGFRDRTPKISKKGQFRSASAFFWGLHTGPQKTKRKRKARTVLKSTSKLMTQMRMGKKKRAMKGKKPSFMVIRFPGRRGYGRLRPRARSLSKASTAINWLTKKFLLKKAEESGSEQATVDAWLQRSSSRMGSRKLPFPSGAEILRPGGRLRRFPRSRSIYASGEPLGFLPFEDEAPFHHSGSRKSLYGLEGFQDLGEYYDYHRDGDDYYDRQSLHRYEEQEPYLAGLGPYSPAWPPYGDHYYGYPPEDPYDYYHPDYYGGPFDPGYTYGYGYDDYEPPYAPPSGYSSPYSYHDGYEGEAHPYGYYLDPYAPYDAPYPPYDLPYHTPYDVPYFDPYGVHYTVPYAEGVYGGGDEAIYPPEVPYFYPEESASAFVYPWVPPPIPSPHNPYAHAMDDIAELEEPEDAGVERQGTSFRLPSAAFFEQQGMDKPARSKLSLIRKFRLFPRPQVKLFGKEKLEVPLPPSLDIPLPLGDADEEEDEEELPPVSAVPYGHPFWGFLTPRQRNLQRALSAFGAHRGLGFGPEFGRPVPRPATSLARFLKKTLSEKKPIARLRGSQKARAGGPAVREAAYKRFGYKLAGMDPEKPGTPIVLRRAQPRARSSNDARRPPAPQPAPRTLSHWSALLSPPVPPRPPSSGPPPAPPLSPALSGLPRPASPYGSLRRHPPPWAAPAHVPPAPQASWWAFVEPPAVSPEVPPDLLAFPGPRPSFRGSRRRGAAFGFPGASPRASRRRAWSPLASPQPSLRSSPGLGYCSPLAPPSPQLSLRTGPFQPPFLPPARRPRSLQESPAPRRAAGRLGPPGSPLPGSPRPPSPPLGLCHSPRRSSLNLPSRLPHTWRRLSEPPTRAVKPQVRLPFHRPPRAGAWRAPLEHRESPREPEDSETPWTVPPLAPSWDVDMPPTQRPPSPWPGGAGSRRGFSRPPPVPENPFLQLLGPVPSPTLQPEDPAADMTRVFLGRHHEPGPGQLTKSAGPTPEKPEEEATLGDPQLPAETKPPTPAPPKDVTPPKDITPPKDVLPEQKTLRPSLSYPLAACDQTRATWPPWHRWGTLPQAAAPLAPIRAPEPLPKGGERRQAAPGRFAVVMPRVQKLSSFQRVGPATLKPQVQPIQDPKPRACSLRWSCLWLRADAYGPWPRVHTHPQSCHLGPGAACLSLRGSWEEVGPPSWRNKMHSIRNLPSMRFREQHGEDGVEDMTQLEDLQETTVLSNLKIRFERNLIYTYIGSILVSVNPYQMFGIYGPEQVQQYNGRALGENPPHLFAVANLAFAKMLDAKQNQCIIISGESGSGKTEATKLILRYLAAMNQKREVMQQIKILEATPLLESFGNAKTVRNDNSSRFGKFVEIFLEGGVISGAITSQYLLEKSRIVFQAKNERNYHIFYELLAGLPAQLRQAFSLQEAETYYYLNQGGNCEIAGKSDADDFRRLLAAMEVLGFSSEDQDSIFRILASILHLGNVYFEKYETDAQEVASVVSAREIQAVAELLQISPEGLQKAITFKVTETMREKIFTPLTVESAVDARDAIAKVLYALLFSWLITRVNALVSPRQDTLSIAILDIYGFEDLSFNSFEQLCINYANENLQYLFNKIVFQEEQEEYIREQIDWQEITFADNQPCINLISLKPYGILRILDDQCCFPQATDHTFLQKCHYHHGANPLYSKPKMPLPEFTIKHYAGKVTYQVHKFLDKNHDQVRQDVLDLFVRSRTRVVAHLFSSHAPQAAPQRLGKSSSVTRLYKAHTVAAKFQQSLLDLVEKMERCNPLFMRCLKPNHKKEPGLFEPDVVMAQLRYSGVLETVRIRKEGFPVRLPFQGFIDRYCCLVALKHDLPANGDMCVSVLSRLCKVMPNMYRVGVSKLFLKEHLYQLLESMREHVLNLAALTLQRCLRGFFIKRRFRSLRHKIILLQSRARGYLARQRYQQMRRSLVKFRSLVHAYVSRRRYLKLRAEWRCQVEGALLWEQEELSKREVVAVGHLEVPAELAGLLQAVAGLGLAQVPQVAPVRTPRLQAEPRVTLPLDINNYPMAKFVQCHFKEPAFGMLTVPLRTPLTQLPAEHHAEAVSIFKLILRFMGDPHLHGARENIFGNYIVQKGLAVPELRDEILAQLANQVWHNHNAHNAERGWLLLAACLSGFAPSPCFNKYLLKFVSDYGRNGFQAVCQHRLMQAMGRAQQQGSGAARTLPPTQLEWTATYEKASMALDVGCFNGDQFSCPVHSWSTGEEVAGDILRHRGLADGWRGWTVAMKNGVQWAELAGHDYVLDLVSDLELLRDFPRQKSYFIVGTEGPAASRGGPKVVFGNSWDSDEDMSTRPQPQEHMPKVLDSDGYSSHNQDGTNGETEAQRGTATHQESDSLGEPAVPHKGLDCYLDSLFDPVLSYGDADLEKPTAIAYRMKGGGQPGGGSSSGTEDTPRRPPEPKPIPGLDASTLALQQAFIHKQAVLLAREMTLQATALQQQPLSAALRSLPAEKPPAPEAQPTSVGTGPPAKPVLLRATPKPLAPAPLAKAPRLPIKPVAAPVLAQDQASPETTSPSPELVRYSTLNSEHFPQPTQQIKNIVRQYQQPFRGGRPEALRKDGGKVFMKRPDPHEEALMILKGQMTHLAAAPGTQVSREAVALVKPVTSAPRPSMAPTSALPSRSLEPPEELTQTRLHRLINPNFYGYQDAPWKIFLRKEVFYPKDSYSHPVQLDLLFRQILHDTLSEACLRISEDERLRMKALFAQNQLDTQKPLVTESVKRAVVSTARDTWEVYFSRIFPATGSVGTGVQLLAVSHVGIKLLRMVKGGQEAGGQLRVLRAYSFADILFVTMPSQNMLEFNLASEKVILFSARAHQVKTLVDDFILELKKDSDYVVAVRNFLPEDPALLAFHKGDIIHLQPLEPPRVGYSAGCVVRRKVVYLEELRRRGPDFGWRFGTIHGRVGRFPSELVQPAAAPDFLQLPTEPGRGRAAAVAAAVASAAAAQEVGRRREGPPVRARSADHGEDALALPPYTMLEFAQKYFRDPQRRPQDGLRLKSKEPRESRTLEDMLCFTKTPLQESLIELSDSSLSKMATDMFLAVMRFMGDAPLKGQSDLDVLCNLLKLCGDHEVMRDECYCQVVKQITDNTSSKQDSCQRGWRLLYIVTAYHSCSEVLHPHLTRFLQDVSRTPGLPFQGIAKACEQNLQKTLRFGGRLELPSSIELRAMLAGRSSKRQLFLLPGGLERHLKIKTCTVALDVVEEICAEMALTRPEAFNEYVIFVVTNRGQHVCPLSRRAYILDVASEMEQVDGGYMLWFRRVLWDQPLKFENELYVTMHYNQVLPDYLKGLFSSVPASRPSEQLLQQVSKLASLQHRAKDHFYLPSVREVQEYIPAQLYRTTAGSTWLNLVSQHRQQTQALSPHQARAQFLGLLSALPMFGSSFFFIQSCSNIAVPAPCILAINHNGLNFLSTETHELMVKFPLKEIQSTRTQRPTANSSYPYVEIALGDVAAQRTLQLQLEQGLELCRVVAVHVENLLSAHEKRLTLPPSEITLL

SEQ ID NO: 54680 - protein, 478 aa, Homo sapiens
MLEFAQKYFRDPQRRPQDGLRLKSKEPRESRTLEDMLCFTKTPLQESLIELSDSSLSKMATDMFLAVMRFMGDAPLKGQSDLDVLCNLLKLCGDHEVMRDECYCQVVKQITDNTSSKQDSCQRGWRLLYIVTAYHSCSEVLHPHLTRFLQDVSRTPGLPFQGIAKACEQNLQKTLRFGGRLELPSSIELRAMLAGRSSKRQLFLLPGGLERHLKIKTCTVALDVVEEICAEMALTRPEAFNEYVIFVVTNRGQHVCPLSRRAYILDVASEMEQVDGGYMLWFRRVLWDQPLKFENELYVTMHYNQVLPDYLKGLFSSVPASRPSEQLLQQVSKLASLQHRAKDHFYLPSVREVQEYIPAQLYRTTAGSTWLNLVSQHRQQTQALSPHQARAQFLGLLSALPMFGSSFFFIQSCSNIAVPAPCILAINHNGLNFLSTETHVSGLSLALPSPPSVPWSPTPSKRPRPPAAEAQFHCLPPS

SEQ ID NO: 54681 - protein, 184 aa, Homo sapiens
MNMLSSLSPTVVLPDYLKGLFSSVPASRPSEQLLQQVSKLASLQHRAKDHFYLPSVREVQEYIPAQLYRTTAGSTWLNLVSQHRQQTQALSPHQARAQFLGLLSALPMFGSSFFFIQSCSNIAVPAPCILAINHNGLNFLSTETHVSGLSLALPSPPSVPWSPTPSKRPRPPAAEAQFHCLPPS

SEQ ID NO: 54682 - protein, 244 aa, Homo sapiens
MRDECYCQVVKQITDNTSSKQDSCQRGWRLLYIVTAYHSCSEVLHPHLTRFLQDVSRTPGLPFQGIAKACEQNLQKTLRFGGRLELPSSIELRAMLAGRSSKRQLFLLPGGLERHLKIKTCTVALDVVEEICAEMALTRPEAFNEYVIFVVTNRGGKSRSTSQPSSTVQRQARPGSTWSASTGSRHRRSAPTRPVPSFWASSAPYLCSAPPSSSSRAAATLLCQPLASLPSTTMASTFSAQRLM

SEQ ID NO: 54683 - protein, 142 aa, Homo sapiens
MVKGGQEAGGQLRVLRAYSFADILFVTMPSQNMLEFNLASEKVILFSARAHQVKTLVDDFILELKKDSDYVVAVRNFLPEDPALLAFHKGDIIHLQPLEPPRVGYSAGCVVRRKVVYLEELRRRGPDFGVCPRTWNPIRGAS

SEQ ID NO: 54684 - protein, 2054 aa, Homo sapiens
MFNLMKKDKDKDGGRKEKKEKKEKKERMSAAELRSLEEMSLRRGFFNLNRSSKRESKTRLEISNPIPIKVASGSDLHLTDIDSDSNRGSVILDSGHLSTASSSDDLKGEEGSFRGSVLQRAAKFGSLAKQNSQMIVKRFSFSQRSRDESASETSTPSEHSAAPSPQVEVRTLEGQLVQHPGPGIPRPGHRSRAPELVTKKFPVDLRLPPVVPLPPPTLRELELQRRPTGDFGFSLRRTTMLDRGPEGQACRRVVHFAEPGAGTKDLALGLVPGDRLVEINGHNVESKSRDEIVEMIRQSGDSVRLKVQPIPELSELSRSWLRSGEGPRREPSDAKTEEQIAAEEAWNETEKVWLVHRDGFSLASQLKSEELNLPEGKVRVKLDHDGAILDVDEDDVEKANAPSCDRLEDLASLVYLNESSVLHTLRQRYGASLLHTYAGPSLLVLGPRGAPAVYSEKVMHMFKGCRREDMAPHIYAVAQTAYRAMLMSRQDQSIILLGSSGSGKTTSCQHLVQYLATIAGISGNKVFSVEKWQALYTLLEAFGNSPTIINGNATRFSQILSLDFDQAGQVASASIQTMLLEKLRVARRPASEATFNVFYYLLACGDGTLRTELHLNHLAENNVFGIVPLAKPEEKQKAAQQFSKLQAAMKVLGISPDEQKACWFILAAIYHLGAAGATKVHSTAGRKQFARHEWAQKAAYLLGCSLEELSSAIFKHQHKGGTLQRSTSFRQGPEESGLGDGTGPKLSALECLEGMAAGLYSELFTLLVSLVNRALKSSQHSLCSMMIVDTPGFQNPEQGGSARGASFEELCHNYTQDRLQRLFHERTFVQELERYKEENIELAFDDLEPPTDDSVAAVDQASHQSLVRSLARTDEARGLLWLLEEEALVPGASEDTLLERLFSYYGPQEGDKKGQSPLLHSSKPHHFLLGHSHGTNWVEYNVTGWLNYTKQNPATQNAPRLLQDSQKKIISNLFLGRAGSATVLSGSIAGLEGGSQLALRRATSMRKTFTTGMAAVKKKSLCIQMKLQVDALIDTIKKSKLHFVHCFLPVAEGWAGEPRSASSRRVSSSSELDLPSGDHCEAGLLQLDVPLLRTQLRGSRLLDAMRMYRQGYPDHMVFSEFRRRFDVLAPHLTKKHGRNYIVVDERRAVEELLECLDLEKSSCCMGLSRVFFRAGTLARLEEQRDEQTSRNLTLFQAACRGYLARQHFKKRKIQDLAIRCVQKNIKKNKGVKDWPWWKLFTTVRPLIEVQLSEEQIRNKDEEIQQLRSKLEKAEKERNELRLNSDRLESRISELTSELTDERNTGESASQLLDAETAERLRAEKEMKELQTQYDALKKQMEVMEMEVMEARLIRAAEINGEVDDDDAGGEWRLKYERAVREVDFTKKRLQQEFEDKLEVEQQNKRQLERRLGDLQADSEESQRALQQLKKKCQRLTAELQDTKLHLEGQQVRNHELEKKQRRFDSELSQAHEEAQREKLQREKLQREKDMLLAEAFSLKQQLEEKDMDIAGFTQKVVSLEAELQDISSQESKDEASLAKVKKQLRDLEAKVKDQEEELDEQAGTIQMLEQAKLRLEMEMERMRQTHSKEMESRDEEVEEARQSCQKKLKQMEVQLEEEYEDKQKVLREKRELEGKLATLSDQVNRRDFESEKRLRKDLKRTKALLADAQLMLDHLKNSAPSKREIAQLKNQLEESEFTCAAAVKARKAMEVEIEDLHLQIDDIAKAKTALEEQLSRLQREKNEIQNRLEEDQEDMNELMKKHKAAVAQASRDLAQINDLQAQLEEANKEKQELQEKLQALQSQVEFLEQSMVDKSLVSRQEAKIRELETRLEFERTQVKRLESLASRLKENMEKLTEERDQRIAAENREKEQNKRLQRQLRDTKEEMGELARKEAEASRKKHELEMDLESLEAANQSLQADLKLAFKRIGDLQAAIEDEMESDENEDLINSLQDMVTKYQKRKNKLEGDSDVDSELEDRVDGVKSWLSKNKGPSKAASDDGSLKSSSPTSYWKSLAPDRSDDEHDPLDNTSRPRYSHSYLSDSDTEAKLTETNA

SEQ ID NO: 54685 - protein, 2002 aa, Homo sapiens
MFNLMKKDKDKDGGRKEKKEKKEKKERMSAAELRSLEEMSLRRGFFNLNRSSKRESKTRLEISNPIPIKVASGSDLHLTDIDSDSNRGSVILDSGHLSTASSSDDLKGEEGSFRGSVLQRAAKFGSLAKQNSQMIVKRFSFSQRSRDESASETSTPSEHSAAPSPQVEVRTLEGQLVQHPGPGIPRPGHRSRAPELVTKKFPVDLRLPPVVPLPPPTLRELELQRRPTGDFGFSLRRTTMLDRGPEGQACRRVVHFAEPGAGTKDLALGLVPGDRLVEINGHNVESKSRDEIVEMIRQSGDSVRLKVQPIPELSELSRSWLRSGEGPRREPSDAKTEEQIAAEEAWNETEKVWLVHRDGFSLASQLKSEELNLPEGKVRVKLDHDGAILDVDEDDVEKANAPSCDRLEDLASLVYLNESSVLHTLRQRYGASLLHTYAGPSLLVLGPRGAPAVYSEKVMHMFKGCRREDMAPHIYAVAQTAYRAMLMSRQDQSIILLGSSGSGKTTSCQHLVQYLATIAGISGNKVFSVEKWQALYTLLEAFGNSPTIINGNATRFSQILSLDFDQAGQVASASIQTMLLEKLRVARRPASEATFNVFYYLLACGDGTLRTELHLNHLAENNVFGIVPLAKPEEKQKAAQQFSKLQAAMKVLGISPDEQKACWFILAAIYHLGAAGATKVHSTAGRKQFARHEWAQKAAYLLGCSLEELSSAIFKHQHKGGTLQRSTSFRQGPEESGLGDGTGPKLSALECLEGMAAGLYSELFTLLVSLVNRALKSSQHSLCSMMIVDTPGFQNPEQGGSARGASFEELCHNYTQDRLQRLFHERTFVQELERYKEENIELAFDDLEPPTDDSVAAVDQASHQSLVRSLARTDEARGLLWLLEEEALVPGASEDTLLERLFSYYGPQEGDKKGQSPLLHSSKPHHFLLGHSHGTNWVEYNVTGWLNYTKQNPATQNAPRLLQDSQKKIISNLFLGRAGSATVLSGSIAGLEGGSQLALRRATSMRKTFTTGMAAVKKKSLCIQMKLQVDALIDTIKKSKLHFVHCFLPVAEGWAGEPRSASSRRVSSSSELDLPSGDHCEAGLLQLDVPLLRTQLRGSRLLDAMRMYRQGYPDHMVFSEFRRRFDVLAPHLTKKHGRNYIVVDERRAVEELLECLDLEKSSCCMGLSRVFFRAGTLARLEEQRDEQTSRNLTLFQAACRGYLARQHFKKRKIQDLAIRCVQKNIKKNKGVKDWPWWKLFTTVRPLIEVQLSEEQIRNKDEEIQQLRSKLEKAEKERNELRLNSDRLESRISELTSELTDERNTGESASQLLDAETAERLRAEKEMKELQTQYDALKKQMEVMEMEVMEARLIRAAEINGEVDDDDAGGEWRLKYERAVREVDFTKKRLQQEFEDKLEVEQQNKRQLERRLGDLQADSEESQRALQQLKKKCQRLTAELQDTKLHLEGQQVRNHELEKKQRRFDSELSQAHEEAQREKLQREKLQREKDMLLAEAFSLKQQLEEKDMDIAGFTQKVVSLEAELQDISSQESKDEASLAKVKKQLRDLEAKVKDQEEELDEQAGTIQMLEQLKQMEVQLEEEYEDKQKVLREKRELEGKLATLSDQVNRRDFESEKRLRKDLKRTKALLADAQLMLDHLKNSAPSKREIAQLKNQLEESEFTCAAAVKARKAMEVEIEDLHLQIDDIAKAKTALEEQLSRLQREKNEIQNRLEEDQEDMNELMKKHKAAVAQASRDLAQINDLQAQLEEANKEKQELQEKLQALQSQVEFLEQSMVDKSLVSRQEAKIRELETRLEFERTQVKRLESLASRLKENMEKLTEERDQRIAAENREKEQNKRLQRQLRDTKEEMGELARKEAEASRKKHELEMDLESLEAANQSLQADLKLAFKRIGDLQAAIEDEMESDENEDLINSEGDSDVDSELEDRVDGVKSWLSKNKGPSKAASDDGSLKSSSPTSYWKSLAPDRSDDEHDPLDNTSRPRYSHSYLSDSDTEAKLTETNA

SEQ ID NO: 54686 - protein, 1642 aa, Homo sapiens
MEGPRTTKLEGSSKEGSGPSRSPQPPTSPIPPETSQRARSPAPTLAMNGPGAATAEGLSEEAPAVYSEKVMHMFKGCRREDMAPHIYAVAQTAYRAMLMSRQDQSIILLGSSGSGKTTSCQHLVQYLATIAGISGNKVFSVEKWQALYTLLEAFGNSPTIINGNATRFSQILSLDFDQAGQVASASIQTMLLEKLRVARRPASEATFNVFYYLLACGDGTLRTELHLNHLAENNVFGIVPLAKPEEKQKAAQQFSKLQAAMKVLGISPDEQKACWFILAAIYHLGAAGATKEAAEAGRKQFARHEWAQKAAYLLGCSLEELSSAIFKHQHKGGTLQRSTSFRQGPEESGLGDGTGPKLSALECLEGMAAGLYSELFTLLVSLVNRALKSSQHSLCSMMIVDTPGFQNPEQGGSARGASFEELCHNYTQDRLQRLFHERTFVQELERYKEENIELAFDDLEPPTDDSVAAVDQASHQSLVRSLARTDEARGLLWLLEEEALVPGASEDTLLERLFSYYGPQEGDKKGQSPLLHSSKPHHFLLGHSHGTNWVEYNVTGWLNYTKQNPATQNAPRLLQDSQKKIISNLFLGRAGSATVLSGSIAGLEGGSQLALRRATSMRKTFTTGMAAVKKKSLCIQMKLQVDALIDTIKKSKLHFVHCFLPVAEGWAGEPRSASSRRVSSSSELDLPSGDHCEAGLLQLDVPLLRTQLRGSRLLDAMRMYRQGYPDHMVFSEFRRRFDVLAPHLTKKHGRNYIVVDERRAVEELLECLDLEKSSCCMGLSRVFFRAGTLARLEEQRDEQTSRNLTLFQAACRGYLARQHFKKRKIQDLAIRCVQKNIKKNKGVKDWPWWKLFTTVRPLIEVQLSEEQIRNKDEEIQQLRSKLEKAEKERNELRLNSDRLESRISELTSELTDERNTGESASQLLDAETAERLRAEKEMKELQTQYDALKKQMEVMEMEVMEARLIRAAEINGEVDDDDAGGEWRLKYERAVREVDFTKKRLQQEFEDKLEVEQQNKRQLERRLGDLQADSEESQRALQQLKKKCQRLTAELQDTKLHLEGQQVRNHELEKKQRRFDSELSQAHEEAQREKLQREKLQREKDMLLAEAFSLKQQLEEKDMDIAGFTQKVVSLEAELQDISSQESKDEASLAKVKKQLRDLEAKVKDQEEELDEQAKLRLEMEMERMRQTHSKEMESRDEEVEEARQSCQKKLKQMEVQLEEEYEDKQKVLREKRELEGKLATLSDQVNRRDFESEKRLRKDLKRTKALLADAQLMLDHLKNSAPSKREIAQLKNQLEESEFTCAAAVKARKAMEVEIEDLHLQIDDIAKAKTALEEQLSRLQREKNEIQNRLEEDQEDMNELMKKHKAAVAQASRDLAQINDLQAQLEEANKEKQELQEKLQALQSQVEFLEQSMVDKSLVSRQEAKIRELETRLEFERTQVKRLESLASRLKENMEKLTEERDQRIAAENREKEQNKRLQRQLRDTKEEMGELARKEAEASRKKHELEMDLESLEAANQSLQADLKLAFKRIGDLQAAIEDEMESDENEDLINSEGDSDVDSELEDRVDGVKSWLSKNKGPSKAASDDGSLKSSSPTSYWKSLAPDRSDDEHDPLDNTSRPRYSHSYLSDSDTEAKLTETNA

SEQ ID NO: 54687 - protein, 2054 aa, Homo sapiens
MFNLMKKDKDKDGGRKEKKEKKEKKERMSAAELRSLEEMSLRRGFFNLNRSSKRESKTRLEISNPIPIKVASGSDLHLTDIDSDSNRGSVILDSGHLSTASSSDDLKGEEGSFRGSVLQRAAKFGSLAKQNSQMIVKRFSFSQRSRDESASETSTPSEHSAAPSPQVEVRTLEGQLVQHPGPGIPRPGHRSRAPELVTKKFPVDLRLPPVVPLPPPTLRELELQRRPTGDFGFSLRRTTMLDRGPEGQACRRVVHFAEPGAGTKDLALGLVPGDRLVEINGHNVESKSRDEIVEMIRQSGDSVRLKVQPIPELSELSRSWLRSGEGPRREPSDAKTEEQIAAEEAWNETEKVWLVHRDGFSLASQLKSEELNLPEGKVRVKLDHDGAILDVDEDDVEKANAPSCDRLEDLASLVYLNESSVLHTLRQRYGASLLHTYAGPSLLVLGPRGAPAVYSEKVMHMFKGCRREDMAPHIYAVAQTAYRAMLMSRQDQSIILLGSSGSGKTTSCQHLVQYLATIAGISGNKVFSVEKWQALYTLLEAFGNSPTIINGNATRFSQILSLDFDQAGQVASASIQTMLLEKLRVARRPASEATFNVFYYLLACGDGTLRTELHLNHLAENNVFGIVPLAKPEEKQKAAQQFSKLQAAMKVLGISPDEQKACWFILAAIYHLGAAGATKEAAEAGRKQFARHEWAQKAAYLLGCSLEELSSAIFKHQHKGGTLQRSTSFRQGPEESGLGDGTGPKLSALECLEGMAAGLYSELFTLLVSLVNRALKSSQHSLCSMMIVDTPGFQNPEQGGSARGASFEELCHNYTQDRLQRLFHERTFVQELERYKEENIELAFDDLEPPTDDSVAAVDQASHQSLVRSLARTDEARGLLWLLEEEALVPGASEDTLLERLFSYYGPQEGDKKGQSPLLHSSKPHHFLLGHSHGTNWVEYNVTGWLNYTKQNPATQNAPRLLQDSQKKIISNLFLGRAGSATVLSGSIAGLEGGSQLALRRATSMRKTFTTGMAAVKKKSLCIQMKLQVDALIDTIKKSKLHFVHCFLPVAEGWAGEPRSASSRRVSSSSELDLPSGDHCEAGLLQLDVPLLRTQLRGSRLLDAMRMYRQGYPDHMVFSEFRRRFDVLAPHLTKKHGRNYIVVDERRAVEELLECLDLEKSSCCMGLSRVFFRAGTLARLEEQRDEQTSRNLTLFQAACRGYLARQHFKKRKIQDLAIRCVQKNIKKNKGVKDWPWWKLFTTVRPLIEVQLSEEQIRNKDEEIQQLRSKLEKAEKERNELRLNSDRLESRISELTSELTDERNTGESASQLLDAETAERLRAEKEMKELQTQYDALKKQMEVMEMEVMEARLIRAAEINGEVDDDDAGGEWRLKYERAVREVDFTKKRLQQEFEDKLEVEQQNKRQLERRLGDLQADSEESQRALQQLKKKCQRLTAELQDTKLHLEGQQVRNHELEKKQRRFDSELSQAHEEAQREKLQREKLQREKDMLLAEAFSLKQQLEEKDMDIAGFTQKVVSLEAELQDISSQESKDEASLAKVKKQLRDLEAKVKDQEEELDEQAGTIQMLEQAKLRLEMEMERMRQTHSKEMESRDEEVEEARQSCQKKLKQMEVQLEEEYEDKQKVLREKRELEGKLATLSDQVNRRDFESEKRLRKDLKRTKALLADAQLMLDHLKNSAPSKREIAQLKNQLEESEFTCAAAVKARKAMEVEIEDLHLQIDDIAKAKTALEEQLSRLQREKNEIQNRLEEDQEDMNELMKKHKAAVAQASRDLAQINDLQAQLEEANKEKQELQEKLQALQSQVEFLEQSMVDKSLVSRQEAKIRELETRLEFERTQVKRLESLASRLKENMEKLTEERDQRIAAENREKEQNKRLQRQLRDTKEEMGELARKEAEASRKKHELEMDLESLEAANQSLQADLKLAFKRIGDLQAAIEDEMESDENEDLINSLQDMVTKYQKRKNKLEGDSDVDSELEDRVDGVKSWLSKNKGPSKAASDDGSLKSSSPTSYWKSLAPDRSDDEHDPLDNTSRPRYSHSYLSDSDTEAKLTETNA

SEQ ID NO: 54688 - protein, 935 aa, Homo sapiens
MRMYRQGYPDHMVFSEFRRRFDVLAPHLTKKHGRNYIVVDERRAVEELLECLDLEKSSCCMGLSRVFFRAGTLARLEEQRDEQTSRNLTLFQAACRGYLARQHFKKRKIQDLAIRCVQKNIKKNKGVKDWPWWKLFTTVRPLIEVQLSEEQIRNKDEEIQQLRSKLEKAEKERNELRLNSDRLESRISELTSELTDERNTGESASQLLDAETAERLRAEKEMKELQTQYDALKKQMEVMEMEVMEARLIRAAEINGEVDDDDAGGEWRLKYERAVREVDFTKKRLQQEFEDKLEVEQQNKRQLERRLGDLQADSEESQRALQQLKKKCQRLTAELQDTKLHLEGQQVRNHELEKKQRRFDSELSQAHEEAQREKLQREKLQREKDMLLAEAFSLKQQLEEKDMDIAGFTQKVVSLEAELQDISSQESKDEASLAKVKKQLRDLEAKVKDQEEELDEQAGTIQMLEQAKLRLEMEMERMRQTHSKEMESRDEEVEEARQSCQKKLKQMEVQLEEEYEDKQKVLREKRELEGKLATLSDQVNRRDFESEKRLRKDLKRTKALLADAQLMLDHLKNSAPSKREIAQLKNQLEESEFTCAAAVKARKAMEVEIEDLHLQIDDIAKAKTALEEQLSRLQREKNEIQNRLEEDQEDMNELMKKHKAAVAQASRDLAQINDLQAQLEEANKEKQELQEKLQALQSQVEFLEQSMVDKSLVSRQEAKIRELETRLEFERTQVKRLESLASRLKENMEKLTEERDQRIAAENREKEQNKRLQRQLRDTKEEMGELARKEAEASRKKHELEMDLESLEAANQSLQADLKLAFKRIGDLQAAIEDEMESDENEDLINSEGDSDVDSELEDRVDGVKSWLSKNKGPSKAASDDGSLKSSSPTSYWKSLAPDRSDDEHDPLDNTSRPRYSHSYLSDSDTEAKLTETNA

SEQ ID NO: 54689 - protein, 2039 aa, Homo sapiens
MFNLMKKDKDKDGGRKEKKEKKEKKERMSAAELRSLEEMSLRRGFFNLNRSSKRESKTRLEISNPIPIKVASGSDLHLTDIDSDSNRGSVILDSGHLSTASSSDDLKGEEGSFRGSVLQRAAKFGSLAKQNSQMIVKRFSFSQRSRDESASETSTPSEHSAAPSPQVEVRTLEGQLVQHPGPGIPRPGHRSRAPELVTKKFPVDLRLPPVVPLPPPTLRELELQRRPTGDFGFSLRRTTMLDRGPEGQACRRVVHFAEPGAGTKDLALGLVPGDRLVEINGHNVESKSRDEIVEMIRQSGDSVRLKVQPIPELSELSRSWLRSGEGPRREPSDAKTEEQIAAEEAWNETEKVWLVHRDGFSLASQLKSEELNLPEGKVRVKLDHDGAILDVDEDDVEKANAPSCDRLEDLASLVYLNESSVLHTLRQRYGASLLHTYAGPSLLVLGPRGAPAVYSEKVMHMFKGCRREDMAPHIYAVAQTAYRAMLMSRQDQSIILLGSSGSGKTTSCQHLVQYLATIAGISGNKVFSVEKWQALYTLLEAFGNSPTIINGNATRFSQILSLDFDQAGQVASASIQTMLLEKLRVARRPASEATFNVFYYLLACGDGTLRTELHLNHLAENNVFGIVPLAKPEEKQKAAQQFSKLQAAMKVLGISPDEQKACWFILAAIYHLGAAGATKEAAEAGRKQFARHEWAQKAAYLLGCSLEELSSAIFKHQHKGGTLQRSTSFRQGPEESGLGDGTGPKLSALECLEGMAAGLYSELFTLLVSLVNRALKSSQHSLCSMMIVDTPGFQNPEQGGSARGASFEELCHNYTQDRLQRLFHERTFVQELERYKEENIELAFDDLEPPTDDSVAAVDQASHQSLVRSLARTDEARGLLWLLEEEALVPGASEDTLLERLFSYYGPQEGDKKGQSPLLHSSKPHHFLLGHSHGTNWVEYNVTGWLNYTKQNPATQNAPRLLQDSQKKIISNLFLGRAGSATVLSGSIAGLEGGSQLALRRATSMRKTFTTGMAAVKKKSLCIQMKLQVDALIDTIKKSKLHFVHCFLPVAEGWAGEPRSASSRRVSSSSELDLPSGDHCEAGLLQLDVPLLRTQLRGSRLLDAMRMYRQGYPDHMVFSEFRRRFDVLAPHLTKKHGRNYIVVDERRAVEELLECLDLEKSSCCMGLSRVFFRAGTLARLEEQRDEQTSRNLTLFQAACRGYLARQHFKKRKIQDLAIRCVQKNIKKNKGVKDWPWWKLFTTVRPLIEVQLSEEQIRNKDEEIQQLRSKLEKAEKERNELRLNSDRLESRISELTSELTDERNTGESASQLLDAETAERLRAEKEMKELQTQYDALKKQMEVMEMEVMEARLIRAAEINGEVDDDDAGGEWRLKYERAVREVDFTKKRLQQEFEDKLEVEQQNKRQLERRLGDLQADSEESQRALQQLKKKCQRLTAELQDTKLHLEGQQVRNHELEKKQRRFDSELSQAHEEAQREKLQREKLQREKDMLLAEAFSLKQQLEEKDMDIAGFTQKVVSLEAELQDISSQESKDEASLAKVKKQLRDLEAKVKDQEEELDEQAGTIQMLEQAKLRLEMEMERMRQTHSKEMESRDEEVEEARQSCQKKLKQMEVQLEEEYEDKQKVLREKRELEGKLATLSDQVNRRDFESEKRLRKDLKRTKALLADAQLMLDHLKNSAPSKREIAQLKNQLEESEFTCAAAVKARKAMEVEIEDLHLQIDDIAKAKTALEEQLSRLQREKNEIQNRLEEDQEDMNELMKKHKAAVAQASRDLAQINDLQAQLEEANKEKQELQEKLQALQSQVEFLEQSMVDKSLVSRQEAKIRELETRLEFERTQVKRLESLASRLKENMEKLTEERDQRIAAENREKEQNKRLQRQLRDTKEEMGELARKEAEASRKKHELEMDLESLEAANQSLQADLKLAFKRIGDLQAAIEDEMESDENEDLINSEGDSDVDSELEDRVDGVKSWLSKNKGPSKAASDDGSLKSSSPTSYWKSLAPDRSDDEHDPLDNTSRPRYSHSYLSDSDTEAKLTETNA

SEQ ID NO: 54690 - protein, 2002 aa, Homo sapiens
MFNLMKKDKDKDGGRKEKKEKKEKKERMSAAELRSLEEMSLRRGFFNLNRSSKRESKTRLEISNPIPIKVASGSDLHLTDIDSDSNRGSVILDSGHLSTASSSDDLKGEEGSFRGSVLQRAAKFGSLAKQNSQMIVKRFSFSQRSRDESASETSTPSEHSAAPSPQVEVRTLEGQLVQHPGPGIPRPGHRSRAPELVTKKFPVDLRLPPVVPLPPPTLRELELQRRPTGDFGFSLRRTTMLDRGPEGQACRRVVHFAEPGAGTKDLALGLVPGDRLVEINGHNVESKSRDEIVEMIRQSGDSVRLKVQPIPELSELSRSWLRSGEGPRREPSDAKTEEQIAAEEAWNETEKVWLVHRDGFSLASQLKSEELNLPEGKVRVKLDHDGAILDVDEDDVEKANAPSCDRLEDLASLVYLNESSVLHTLRQRYGASLLHTYAGPSLLVLGPRGAPAVYSEKVMHMFKGCRREDMAPHIYAVAQTAYRAMLMSRQDQSIILLGSSGSGKTTSCQHLVQYLATIAGISGNKVFSVEKWQALYTLLEAFGNSPTIINGNATRFSQILSLDFDQAGQVASASIQTMLLEKLRVARRPASEATFNVFYYLLACGDGTLRTELHLNHLAENNVFGIVPLAKPEEKQKAAQQFSKLQAAMKVLGISPDEQKACWFILAAIYHLGAAGATKEAAEAGRKQFARHEWAQKAAYLLGCSLEELSSAIFKHQHKGGTLQRSTSFRQGPEESGLGDGTGPKLSALECLEGMAAGLYSELFTLLVSLVNRALKSSQHSLCSMMIVDTPGFQNPEQGGSARGASFEELCHNYTQDRLQRLFHERTFVQELERYKEENIELAFDDLEPPTDDSVAAVDQASHQSLVRSLARTDEARGLLWLLEEEALVPGASEDTLLERLFSYYGPQEGDKKGQSPLLHSSKPHHFLLGHSHGTNWVEYNVTGWLNYTKQNPATQNAPRLLQDSQKKIISNLFLGRAGSATVLSGSIAGLEGGSQLALRRATSMRKTFTTGMAAVKKKSLCIQMKLQVDALIDTIKKSKLHFVHCFLPVAEGWAGEPRSASSRRVSSSSELDLPSGDHCEAGLLQLDVPLLRTQLRGSRLLDAMRMYRQGYPDHMVFSEFRRRFDVLAPHLTKKHGRNYIVVDERRAVEELLECLDLEKSSCCMGLSRVFFRAGTLARLEEQRDEQTSRNLTLFQAACRGYLARQHFKKRKIQDLAIRCVQKNIKKNKGVKDWPWWKLFTTVRPLIEVQLSEEQIRNKDEEIQQLRSKLEKAEKERNELRLNSDRLESRISELTSELTDERNTGESASQLLDAETAERLRAEKEMKELQTQYDALKKQMEVMEMEVMEARLIRAAEINGEVDDDDAGGEWRLKYERAVREVDFTKKRLQQEFEDKLEVEQQNKRQLERRLGDLQADSEESQRALQQLKKKCQRLTAELQDTKLHLEGQQVRNHELEKKQRRFDSELSQAHEEAQREKLQREKLQREKDMLLAEAFSLKQQLEEKDMDIAGFTQKVVSLEAELQDISSQESKDEASLAKVKKQLRDLEAKVKDQEEELDEQAGTIQMLEQLKQMEVQLEEEYEDKQKVLREKRELEGKLATLSDQVNRRDFESEKRLRKDLKRTKALLADAQLMLDHLKNSAPSKREIAQLKNQLEESEFTCAAAVKARKAMEVEIEDLHLQIDDIAKAKTALEEQLSRLQREKNEIQNRLEEDQEDMNELMKKHKAAVAQASRDLAQINDLQAQLEEANKEKQELQEKLQALQSQVEFLEQSMVDKSLVSRQEAKIRELETRLEFERTQVKRLESLASRLKENMEKLTEERDQRIAAENREKEQNKRLQRQLRDTKEEMGELARKEAEASRKKHELEMDLESLEAANQSLQADLKLAFKRIGDLQAAIEDEMESDENEDLINSEGDSDVDSELEDRVDGVKSWLSKNKGPSKAASDDGSLKSSSPTSYWKSLAPDRSDDEHDPLDNTSRPRYSHSYLSDSDTEAKLTETNA

SEQ ID NO: 54691 - protein, 935 aa, Homo sapiens; identical to SEQ ID NO: 54688

SEQ ID NO: 54692 - protein, 320 aa, Homo sapiens
MTFVLLSSSQLEEQLSRLQREKNEIQNRLEEDQEDMNELMKKHKAAVAQASRDLAQINDLQAQLEEANKEKQELQEKLQALQSQVEFLEQSMVDKSLVSRQEAKIRELETRLEFERTQVKRLESLASRLKENMEKLTEERDQRIAAENREKEQNKRLQRQLRDTKEEMGELARKEAEASRKKHELEMDLESLEAANQSLQADLKLAFKRIGDLQAAIEDEMESDENEDLINSEGDSDVDSELEDRVDGVKSWLSKNKGPSKAASDDGSLKSSSPTSYWKSLAPDRSDDEHDPLDNTSRPRYSHSYLSDSDTEAKLTETNA

SEQ ID NO: 54693 - protein, 2567 aa, Homo sapiens
MAISSRLALWEQKIREEDKSPPPSSPPPLFSVIPGGFIKQLVRGTEKEAKEARQRKQLAVASPEREIPEISISQPNSKSSSGTRSGSQQISQDDQSSSPGSSDILGKESEGSRSPDPEQMTSINGEKAQELGSSATPTKKTVPFKRGVRRGDVLLMVAKLDPDSAKPEKTHPHDAPPCKTSPPATDTGKEKKGETSRTPCGSQASTEILAPKAEKTRTGGLGDPGQGTVALKKGEEGQSIVGKGLGTPKTTELKEAEPQGKDRQGTRPQAQGPGEGVRPGKAEKEGAEPTNTVEKGNVSKDVGSEGKHVRPQIPGRKWGGFLGRRSKWDGPQNKKDKEGVLLSKAEKTGEPQTQMEKTSQVQGELGDDLRMGEKAGELRSTTGKAGESWDKKEKMGQPQGKSGNAGEARSQTEKGCEAPKEVSTMVESPAAPGKGGWPGSRGQEAEEPCSRAGDGAGALETELEGPSQPALEKDAERPRIRKENQDGPAPQEEGKGGQSRDSDQAPEDRWYEAEKVWLAQKDGFTLATVLKPDEGTADLPAGRVRLWIDADKTITEVDEEHVHRANPPELDQVEDLASLISVNESSVLNTLLQRYKAQLLHTCTGPDLIVLQPRGPSVPSAGKVPKGRRDGLPAHIGSMAQRAYWALLNQRRDQSIVALGWSGAGKTTCCEQVLEHLVGMAGSVDGRVSVEKIRATFTVLRAFGSVSMAHSRSATRFSMVMSLDFNATGRITAAQLQTMLLEKSRVARQPEGESNFLVFSQMLAGLDLDLRTELNLHQMADSSSFGMGVWSKPEDKQKAAAAFAQLQGAMEMLGISESEQRAVWRVLAAIYHLGAAGACKVGRKQFMRFEWANYAAEALGCEYEELNTATFKHHLRQIIQQMTFGPSRWGLEDEETSSGLKMTGVDCVEGMASGLYQELFAAVVSLINRSFSSHHLSMASIMVVDSPGFQNPRHQGKDRAATFEELCHNYAHERLQLLFYQRTFVSTLQRYQEEGVPVQFDLPDPSPGTTVAVVDQNPSQVRLPAGGGAQDARGLFWVLDEEVHVEGSSDSVVLERLCAAFEKKGAGTEGSSALRTCEQPLQCEIFHQLGWDPVRYDLTGWLHRAKPNLSALDAPQVLHQSKREELRSLFQARAKLPPVCRAVAGLEGTSQQALQRSRMVRRTFASSLAAVRRKAPCSQIKLQMDALTSMIKRSRLHFIHCLVPNPVVESRSGQESPPPPQPGRDKPGAGGPLALDIPALRVQLAGFHILEALRLHRTGYADHMGLTRFRRQFQVLDAPLLKKLMSTSEGIDERKAVEELLETLDLEKKAVAVGHSQVFLKAGVISRLEKQREKLVSQSIVLFQAACKGFLSRQEFKKLKIRRLAAQCIQKNVAVFLAVKDWPWWQLLGSLQPLLSATIGTEQLRAKEEELTTLRRKLEKSEKLRNELRQNTDLLESKIADLTSDLADERFKGDVACQVLESERAERLQAFREVQELKSKHEQVQKKLGDVNKQLEEAQQKIQLNDLERNPTGGADEWQMRFDCAQMENEFLRKRLQQCEERLDSELTARKELEQKLGELQSAYDGAKKMAHQLKRKCHHLTCDLEDTCVLLENQQSRNHELEKKQKKFDLQLAQALGESVFEKGLREKVTQENTSVRWELGQLQQQLKQKEQEASQLKQQVEMLQDHKRELLGSPSLGENCVAGLKERLWKLESSALEQQKIQSQQENTIKQLEQLRQRFELEIERMKQMHQKDREDQEEELEDVRQSCQKRLHQLEMQLEQEYEEKQMVLHEKQDLEGLIGTLCDQIGHRDFDVEKRLRRDLRRTHALLSDVQLLLGTMEDGKTSVSKEELEKVHSQLEQSEAKCEEALKTQKVLTADLESMHSELENMTRNKSLVDEQLYRLQFEKADLLKRIDEDQDDLNELMQKHKDLIAQSAADIGQIQELQLQLEEAKKEKHKLQEQLQVAQMRIEYLEQSTVDRAIVSRQEAVICDLENKTEFQKVQIKRFEVLVIRLRDSLIKMGEELSQAATSESQQRESSQYYQRRLEELKADMEELVQREAEASRRCMELEKYVEELAAVRQTLQTDLETSIRRIADLQAALEEVASSDSDTESVQTAVDCGSSGRKEMDNVSILSSQPEGSLQSWLSCTLSLATDTMRTPSRQSATSSRILSPRINEEAGDTERTQSALALSRARSTNVHSKTSGDKPVSPHFVRRQKYCHFGDGEVLAVQRKSTERLEPASSPLASRSTNTSPLSREKLPSPSAALSEFVEGLRRKRAQRGQGSTLGLEDWPTLPIYQTTGASTLRRGRAGSDEGNLSLRVGAKSPLEIEGAAGGLLRSTSLKCISSDGVGGTTLLPEKSKTQFSSCESLLESRPSMGRKLSSPTTPRDMLLSPTLRPRRRCLESSVDDAGCPDLGKEPLVFQNRQFAHLMEEPLGSDPFSWKLPSLDYERKTKVDFDDFLPAIRKPQTPTSLAGSAKGGQDGSQRSSIHFETEEANRSFLSGIKTILKKSPEPKEDPAHLSDSSSSSGSIVSFKSADSIKSRPGIPRLAGDGGERTSPERREPGTGRKDDDVASIMKKYLQK

SEQ ID NO: 54694 - protein, 2568 aa, Homo sapiens
MAISSRLALWEQKIREEDKSPPPSSPPPLFSVIPGGFIKQLVRGTEKEAKEARQRKQLAVASPEREIPEISISQPNSKSSSGTRSGSQQISQDDQSSSPGSSDILGKESEGSRSPDPEQMTSINGEKAQELGSSATPTKKTVPFKRGVRRGDVLLMVAKLDPDSAKPEKTHPHDAPPCKTSPPATDTGKEKKGETSRTPCGSQASTEILAPKAEKTRTGGLGDPGQGTVALKKGEEGQSIVGKGLGTPKTTELKEAEPQGKDRQGTRPQAQGPGEGVRPGKAEKEGAEPTNTVEKGNVSKDVGSEGKHVRPQIPGRKWGGFLGRRSKWDGPQNKKDKEGVLLSKAEKTGEPQTQMEKTSQVQGELGDDLRMGEKAGELRSTTGKAGESWDKKEKMGQPQGKSGNAGEARSQTEKGCEAPKEVSTMVESPAAPGKGGWPGSRGQEAEEPCSRAGDGAGALETELEGPSQPALEKDAERPRIRKENQDGPAPQEEGKGGQSRDSDQAPEDRWYEAEKVWLAQKDGFTLATVLKPDEGTADLPAGRVRLWIDADKTITEVDEEHVHRANPPELDQVEDLASLISVNESSVLNTLLQRYKAQLLHTCTGPDLIVLQPRGPSVPSAGKVPKGRRDGLPAHIGSMAQRAYWALLNQRRDQSIVALGWSGAGKTTCCEQVLEHLVGMAGSVDGRVSVEKIRATFTVLRAFGSVSMAHSRSATRFSMVMSLDFNATGRITAAQLQTMLLEKSRVARQPEGESNFLVFSQMLAGLDLDLRTELNLHQMADSSSFGMGVWSKPEDKQKAAAAFAQLQGAMEMLGISESEQRAVWRVLAAIYHLGAAGACKVGRKQFMRFEWANYAAEALGCEYEELNTATFKHHLRQIIQQMTFGPSRWGLEDEETSSGLKMTGVDCVEGMASGLYQELFAAVVSLINRSFSSHHLSMASIMVVDSPGFQNPRHQGKDRAATFEELCHNYAHERLQLLFYQRTFVSTLQRYQEEGVPVQFDLPDPSPGTTVAVVDQNPSQQVRLPAGGGAQDARGLFWVLDEEVHVEGSSDSVVLERLCAAFEKKGAGTEGSSALRTCEQPLQCEIFHQLGWDPVRYDLTGWLHRAKPNLSALDAPQVLHQSKREELRSLFQARAKLPPVCRAVAGLEGTSQQALQRSRMVRRTFASSLAAVRRKAPCSQIKLQMDALTSMIKRSRLHFIHCLVPNPVVESRSGQESPPPPQPGRDKPGAGGPLALDIPALRVQLAGFHILEALRLHRTGYADHMGLTRFRRQFQVLDAPLLKKLMSTSEGIDERKAVEELLETLDLEKKAVAVGHSQVFLKAGVISRLEKQREKLVSQSIVLFQAACKGFLSRQEFKKLKIRRLAAQCIQKNVAVFLAVKDWPWWQLLGSLQPLLSATIGTEQLRAKEEELTTLRRKLEKSEKLRNELRQNTDLLESKIADLTSDLADERFKGDVACQVLESERAERLQAFREVQELKSKHEQVQKKLGDVNKQLEEAQQKIQLNDLERNPTGGADEWQMRFDCAQMENEFLRKRLQQCEERLDSELTARKELEQKLGELQSAYDGAKKMAHQLKRKCHHLTCDLEDTCVLLENQQSRNHELEKKQKKFDLQLAQALGESVFEKGLREKVTQENTSVRWELGQLQQQLKQKEQEASQLKQQVEMLQDHKRELLGSPSLGENCVAGLKERLWKLESSALEQQKIQSQQENTIKQLEQLRQRFELEIERMKQMHQKDREDQEEELEDVRQSCQKRLHQLEMQLEQEYEEKQMVLHEKQDLEGLIGTLCDQIGHRDFDVEKRLRRDLRRTHALLSDVQLLLGTMEDGKTSVSKEELEKVHSQLEQSEAKCEEALKTQKVLTADLESMHSELENMTRNKSLVDEQLYRLQFEKADLLKRIDEDQDDLNELMQKHKDLIAQSAADIGQIQELQLQLEEAKKEKHKLQEQLQVAQMRIEYLEQSTVDRAIVSRQEAVICDLENKTEFQKVQIKRFEVLVIRLRDSLIKMGEELSQAATSESQQRESSQYYQRRLEELKADMEELVQREAEASRRCMELEKYVEELAAVRQTLQTDLETSIRRIADLQAALEEVASSDSDTESVQTAVDCGSSGRKEMDNVSILSSQPEGSLQSWLSCTLSLATDTMRTPSRQSATSSRILSPRINEEAGDTERTQSALALSRARSTNVHSKTSGDKPVSPHFVRRQKYCHFGDGEVLAVQRKSTERLEPASSPLASRSTNTSPLSREKLPSPSAALSEFVEGLRRKRAQRGQGSTLGLEDWPTLPIYQTTGASTLRRGRAGSDEGNLSLRVGAKSPLEIEGAAGGLLRSTSLKCISSDGVGGTTLLPEKSKTQFSSCESLLESRPSMGRKLSSPTTPRDMLLSPTLRPRRRCLESSVDDAGCPDLGKEPLVFQNRQFAHLMEEPLGSDPFSWKLPSLDYERKTKVDFDDFLPAIRKPQTPTSLAGSAKGGQDGSQRSSIHFETEEANRSFLSGIKTILKKSPEPKEDPAHLSDSSSSSGSIVSFKSADSIKSRPGIPRLAGDGGERTSPERREPGTGRKDDDVASIMKKYLQK

SEQ ID NO: 54695 - protein, 2567 aa, Homo sapiens; identical to SEQ ID NO: 54693

SEQ ID NO: 54696 - protein, 1939 aa, Homo sapiens
MSSDSEMAIFGEAAPFLRKSERERIEAQNKPFDAKTSVFVVDPKESFVKATVQSREGGKVTAKTEAGATVTVKDDQVFPMNPPKYDKIEDMAMMTHLHEPAVLYNLKERYAAWMIYTYSGLFCVTVNPYKWLPVYNAEVVTAYRGKKRQEAPPHIFSISDNAYQFMLTDRENQSILITGESGAGKTVNTKRVIQYFATIAVTGEKKKEEVTSGKMQGTLEDQIISANPLLEAFGNAKTVRNDNSSRFGKFIRIHFGTTGKLASADIETYLLEKSRVTFQLKAERSYHIFYQIMSNKKPDLIEMLLITTNPYDYAFVSQGEITVPSIDDQEELMATDSAIEILGFTSDERVSIYKLTGAVMHYGNMKFKQKQREEQAEPDGTEVADKAAYLQNLNSADLLKALCYPRVKVGNEYVTKGQTVQQVYNAVGALAKAVYDKMFLWMVTRINQQLDTKQPRQYFIGVLDIAGFEIFDFNSLEQLCINFTNEKLQQFFNHHMFVLEQEEYKKEGIEWTFIDFGMDLAACIELIEKPMGIFSILEEECMFPKATDTSFKNKLYEQHLGKSNNFQKPKPAKGKPEAHFSLIHYAGTVDYNIAGWLDKNKDPLNETVVGLYQKSAMKTLALLFVGATGAEAEAGGGKKGGKKKGSSFQTVSALFRENLNKLMTNLRSTHPHFVRCIIPNETKTPGAMEHELVLHQLRCNGVLEGIRICRKGFPSRILYADFKQRYKVLNASAIPEGQFIDSKKASEKLLGSIDIDHTQYKFGHTKVFFKAGLLGLLEEMRDEKLAQLITRTQAMCRGFLARVEYQKMVERRESIFCIQYNVRAFMNVKHWPWMKLYFKIKPLLKSAETEKEMANMKEEFEKTKEELAKTEAKRKELEEKMVTLMQEKNDLQLQVQAEADSLADAEERCDQLIKTKIQLEAKIKEVTERAEDEEEINAELTAKKRKLEDECSELKKDIDDLELTLAKVEKEKHATENKVKNLTEEMAGLDETIAKLTKEKKALQEAHQQTLDDLQAEEDKVNTLTKAKIKLEQQVDDLEGSLEQEKKIRMDLERAKRKLEGDLKLAQESTMDIENDKQQLDEKLKKKEFEMSGLQSKIEDEQALGMQLQKKIKELQARIEELEEEIEAERASRAKAEKQRSDLSRELEEISERLEEAGGATSAQIEMNKKREAEFQKMRRDLEEATLQHEATAATLRKKHADSVAELGEQIDNLQRVKQKLEKEKSEMKMEIDDLASNMETVSKAKGNLEKMCRALEDQLSEIKTKEEEQQRLINDLTAQRARLQTESGEYSRQLDEKDTLVSQLSRGKQAFTQQIEELKRQLEEEIKAKSALAHALQSSRHDCDLLREQYEEEQEAKAELQRAMSKANSEVAQWRTKYETDAIQRTEELEEAKKKLAQRLQDAEEHVEAVNAKCASLEKTKQRLQNEVEDLMIDVERTNAACAALDKKQRNFDKILAEWKQKCEETHAELEASQKESRSLSTELFKIKNAYEESLDQLETLKRENKNLQQEISDLTEQIAEGGKRIHELEKIKKQVEQEKSELQAALEEAEASLEHEEGKILRIQLELNQVKSEVDRKIAEKDEEIDQMKRNHIRIVESMQSTLDAEIRSRNDAIRLKKKMEGDLNEMEIQLNHANRMAAEALRNYRNTQAILKDTQLHLDDALRSQEDLKEQLAMVERRANLLQAEIEELRATLEQTERSRKIAEQELLDASERVQLLHTQNTSLINTKKKLETDISQIQGEMEDIIQEARNAEEKAKKAITDAAMMAEELKKEQDTSAHLERMKKNLEQTVKDLQHRLDEAEQLALKGGKKQIQKLEARVRELEGEVESEQKRNVEAVKGLRKHERKVKELTYQTEEDRKNILRLQDLVDKLQAKVKSYKRQAEEAEEQSNVNLSKFRRIQHELEEAEERADIAESQVNKLRVKSREVHTKIISEE

SEQ ID NO: 54697 - protein, 627 aa, Homo sapiens
MSSDSEMAIFGEAAPFLRKSERERIEAQNKPFDAKTSVFVVDPKESFVKATVQSREGGKVTAKTEAGATVTVKDDQVFPMNPPKYDKIEDMAMMTHLHEPAVLYNLKERYAAWMIYTYSGLFCVTVNPYKWLPVYNAEVVTAYRGKKRQEAPPHIFSISDNAYQFMLTDRENQSILITGESGAGKTVNTKRVIQYFATIAVTGEKKKEEVTSGKMQGTLEDQIISANPLLEAFGNAKTVRNDNSSRFGKFIRIHFGTTGKLASADIETYLLEKSRVTFQLKAERSYHIFYQIMSNKKPDLIEMLLITTNPYDYAFVSQGEITVPSIDDQEELMATDSAIEILGFTSDERVSIYKLTGAVMHYGNMKFKQKQREEQAEPDGTEVADKAAYLQNLNSADLLKALCYPRVKVGNEYVTKGQTVQQVYNAVGALAKAVYDKMFLWMVTRINQQLDTKQPRANSEVAQWRTKYETDAIQRTEELEEAKKKLAQRLQDAEEHVEAVNAKCASLEKTKQRLQNEVEDLMIDVERTNAACAALDKKQRNFDKILAEWKQKCEETHAELEASQKESRSLSTELFKIKNAYEESLDQLETLKRENKNLQQEISDLTEQIAEGGKRIHELEKIKKQVE

SEQ ID NO: 54698 - protein, 1972 aa, Homo sapiens
MAQKGQLSDDEKFLFVDKNFINSPVAQADWAAKRLVWVPSEKQGFEAASIKEEKGDEVVVELVENGKKVTVGKDDIQKMNPPKFSKVEDMAELTCLNEASVLHNLRERYFSGLIYTYSGLFCVVVNPYKHLPIYSEKIVDMYKGKKRHEMPPHIYAIADTAYRSMLQDREDQSILCTGESGAGKTENTKKVIQYLAVVASSHKGKKDTSITGELEKQLLQANPILEAFGNAKTVKNDNSSRFGKFIRINFDVTGYIVGANIETYLLEKSRAIRQARDERTFHIFYYMIAGAKEKMRSDLLLEGFNNYTFLSNGFVPIPAAQDDEMFQETVEAMAIMGFSEEEQLSILKVVSSVLQLGNIVFKKERNTDQASMPDNTAAQKVCHLMGINVTDFTRSILTPRIKVGRDVVQKAQTKEQADFAVEALAKATYERLFRWILTRVNKALDKTHRQGASFLGILDIAGFEIFEVNSFEQLCINYTNEKLQQLFNHTMFILEQEEYQREGIEWNFIDFGLDLQPCIELIERPNNPPGVLALLDEECWFPKATDKSFVEKLCTEQGSHPKFQKPKQLKDKTEFSIIHYAGKVDYNASAWLTKNMDPLNDNVTSLLNASSDKFVADLWKDVDRIVGLDQMAKMTESSLPSASKTKKGMFRTVGQLYKEQLGKLMTTLRNTTPNFVRCIIPNHEKRSGKLDAFLVLEQLRCNGVLEGIRICRQGFPNRIVFQEFRQRYEILAANAIPKGFMDGKQACILMIKALELDPNLYRIGQSKIFFRTGVLAHLEEERDLKITDVIMAFQAMCRGYLARKAFAKRQQQLTAMKVIQRNCAAYLKLRNWQWWRLFTKVKPLLQVTRQEEEMQAKEDELQKTKERQQKAENELKELEQKHSQLTEEKNLLQEQLQAETELYAEAEEMRVRLAAKKQELEEILHEMEARLEEEEDRGQQLQAERKKMAQQMLDLEEQLEEEEAARQKLQLEKVTAEAKIKKLEDEILVMDDQNNKLSKERKLLEERISDLTTNLAEEEEKAKNLTKLKNKHESMISELEVRLKKEEKSRQELEKLKRKLEGDASDFHEQIADLQAQIAELKMQLAKKEEELQAALARLDDEIAQKNNALKKIRELEGHISDLQEDLDSERAARNKAEKQKRDLGEELEALKTELEDTLDSTATQQELRAKREQEVTVLKKALDEETRSHEAQVQEMRQKHAQAVEELTEQLEQFKRAKANLDKNKQTLEKENADLAGELRVLGQAKQEVEHKKKKLEAQVQELQSKCSDGERARAELNDKVHKLQNEVESVTGMLNEAEGKAIKLAKDVASLSSQLQDTQELLQEETRQKLNVSTKLRQLEEERNSLQDQLDEEMEAKQNLERHISTLNIQLSDSKKKLQDFASTVEALEEGKKRFQKEIENLTQQYEEKAAAYDKLEKTKNRLQQELDDLVVDLDNQRQLVSNLEKKQRKFDQLLAEEKNISSKYADERDRAEAEAREKETKALSLARALEEALEAKEELERTNKMLKAEMEDLVSSKDDVGKNVHELEKSKRALETQMEEMKTQLEELEDELQATEDAKLRLEVNMQALKGQFERDLQARDEQNEEKRRQLQRQLHEYETELEDERKQRALAAAAKKKLEGDLKDLELQADSAIKGREEAIKQLRKLQAQMKDFQRELEDARASRDEIFATAKENEKKAKSLEADLMQLQEDLAAAERARKQADLEKEELAEELASSLSGRNALQDEKRRLEARIAQLEEELEEEQGNMEAMSDRVRKATQQAEQLSNELATERSTAQKNESARQQLERQNKELRSKLHEMEGAVKSKFKSTIAALEAKIAQLEEQVEQEAREKQAATKSLKQKDKKLKEILLQVEDERKMAEQYKEQAEKGNARVKQLKRQLEEAEEESQRINANRRKLQRELDEATESNEAMGREVNALKSKLRRGNETSFVPSRRSGGRRVIENADGSEEETDTRDADFNGTKASE

SEQ ID NO: 54699 - protein, 1938 aa, Homo sapiens
MAQKGQLSDDEKFLFVDKNFINSPVAQADWAAKRLVWVPSEKQGFEAASIKEEKGDEVVVELVENGKKVTVGKDDIQKMNPPKFSKVEDMAELTCLNEASVLHNLRERYFSGLIYTYSGLFCVVVNPYKHLPIYSEKIVDMYKGKKRHEMPPHIYAIADTAYRSMLQDREDQSILCTGESGAGKTENTKKVIQYLAVVASSHKGKKDTSITGELEKQLLQANPILEAFGNAKTVKNDNSSRFGKFIRINFDVTGYIVGANIETYLLEKSRAIRQARDERTFHIFYYMIAGAKEKMRSDLLLEGFNNYTFLSNGFVPIPAAQDDEMFQETVEAMAIMGFSEEEQLSILKVVSSVLQLGNIVFKKERNTDQASMPDNTAAQKVCHLMGINVTDFTRSILTPRIKVGRDVVQKAQTKEQADFAVEALAKATYERLFRWILTRVNKALDKTHRQGASFLGILDIAGFEIFEVNSFEQLCINYTNEKLQQLFNHTMFILEQEEYQREGIEWNFIDFGLDLQPCIELIERPNNPPGVLALLDEECWFPKATDKSFVEKLCTEQGSHPKFQKPKQLKDKTEFSIIHYAGKVDYNASAWLTKNMDPLNDNVTSLLNASSDKFVADLWKDVDRIVGLDQMAKMTESSLPSASKTKKGMFRTVGQLYKEQLGKLMTTLRNTTPNFVRCIIPNHEKRSGKLDAFLVLEQLRCNGVLEGIRICRQGFPNRIVFQEFRQRYEILAANAIPKGFMDGKQACILMIKALELDPNLYRIGQSKIFFRTGVLAHLEEERDLKITDVIMAFQAMCRGYLARKAFAKRQQQLTAMKVIQRNCAAYLKLRNWQWWRLFTKVKPLLQVTRQEEEMQAKEDELQKTKERQQKAENELKELEQKHSQLTEEKNLLQEQLQAETELYAEAEEMRVRLAAKKQELEEILHEMEARLEEEEDRGQQLQAERKKMAQQMLDLEEQLEEEEAARQKLQLEKVTAEAKIKKLEDEILVMDDQNNKLSKERKLLEERISDLTTNLAEEEEKAKNLTKLKNKHESMISELEVRLKKEEKSRQELEKLKRKLEGDASDFHEQIADLQAQIAELKMQLAKKEEELQAALARLDDEIAQKNNALKKIRELEGHISDLQEDLDSERAARNKAEKQKRDLGEELEALKTELEDTLDSTATQQELRAKREQEVTVLKKALDEETRSHEAQVQEMRQKHAQAVEELTEQLEQFKRAKANLDKNKQTLEKENADLAGELRVLGQAKQEVEHKKKKLEAQVQELQSKCSDGERARAELNDKVHKLQNEVESVTGMLNEAEGKAIKLAKDVASLSSQLQDTQELLQEETRQKLNVSTKLRQLEEERNSLQDQLDEEMEAKQNLERHISTLNIQLSDSKKKLQDFASTVEALEEGKKRFQKEIENLTQQYEEKAAAYDKLEKTKNRLQQELDDLVVDLDNQRQLVSNLEKKQRKFDQLLAEEKNISSKYADERDRAEAEAREKETKALSLARALEEALEAKEELERTNKMLKAEMEDLVSSKDDVGKNVHELEKSKRALETQMEEMKTQLEELEDELQATEDAKLRLEVNMQALKGQFERDLQARDEQNEEKRRQLQRQLHEYETELEDERKQRALAAAAKKKLEGDLKDLELQADSAIKGREEAIKQLRKLQAQMKDFQRELEDARASRDEIFATAKENEKKAKSLEADLMQLQEDLAAAERARKQADLEKEELAEELASSLSGRNALQDEKRRLEARIAQLEEELEEEQGNMEAMSDRVRKATQQAEQLSNELATERSTAQKNESARQQLERQNKELRSKLHEMEGAVKSKFKSTIAALEAKIAQLEEQVEQEAREKQAATKSLKQKDKKLKEILLQVEDERKMAEQYKEQAEKGNARVKQLKRQLEEAEEESQRINANRRKLQRELDEATESNEAMGREVNALKSKLRGPPPQETSQ

SEQ ID NO: 54700 - protein, 2029 aa, Homo sapiens
MAQKGQLSDDEKFLFVDKNFINSPVAQADWAAKRLVWVPSEKQGFEAASIKEEKGDEVVVELVENGKKVTVGKDDIQKMNPPKFSKVEDMAELTCLNEASVLHNLRERYFSGLIYTYSGLFCVVVNPYKHLPIYSEKIVDMYKGKKRHEMPPHIYAIADTAYRSMLQDREDQSILCTGESGAGKTENTKKVIQYLAVVASSHKGKKDTSITEGPSFWRGELEKQLLQANPILEAFGNAKTVKNDNSSRFGKFIRINFDVTGYIVGANIETYLLEKSRAIRQARDERTFHIFYYMIAGAKEKMRSDLLLEGFNNYTFLSNGFVPIPAAQDDEMFQETVEAMAIMGFSEEEQLSILKVVSSVLQLGNIVFKKERNTDQASMPDNTAAQKVCHLMGINVTDFTRSILTPRIKVGRDVVQKAQTKEQADFAVEALAKATYERLFRWILTRVNKALDKTHRQGASFLGILDIAGFEIFEVNSFEQLCINYTNEKLQQLFNHTMFILEQEEYQREGIEWNFIDFGLDLQPCIELIERPNNPPGVLALLDEECWFPKATDKSFVEKLCTEQGSHPKFQKPKQLKDKTEFSIIHYAGKVDYNASAWLTKNMDPLNDNVTSLLNASSDKFVADLWKDVDRIVGLDQMAKMTESSLPSASKTKKGMFRTVGQLYKEQLGKLMTTLRNTTPNFVRCIIPNHEKRSGKLDAFLVLEQLRCNGVLEGIRICRQGFPNRIVFQEFRQRYEILAANAIPKGFMDGKQACILMIKALELDPNLYRIGQSKIFFRTGVLAHLEEERDLKITDVIMAFQAMCRGYLARKAFAKRQQQLTAMKVIQRNCAAYLKLRNWQWWRLFTKVKPLLQVTRQEEEMQAKEDELQKTKERQQKAENELKELEQKHSQLTEEKNLLQEQLQAETELYAEAEEMRVRLAAKKQELEEILHEMEARLEEEEDRGQQLQAERKKMAQQMLDLEEQLEEEEAARQKLQLEKVTAEAKIKKLEDEILVMDDQNNKLSKERKLLEERISDLTTNLAEEEEKAKNLTKLKNKHESMISELEVRLKKEEKSRQELEKLKRKLEGDASDFHEQIADLQAQIAELKMQLAKKEEELQAALARLDDEIAQKNNALKKIRELEGHISDLQEDLDSERAARNKAEKQKRDLGEELEALKTELEDTLDSTATQQELRAKREQEVTVLKKALDEETRSHEAQVQEMRQKHAQAVEELTEQLEQFKRAKANLDKNKQTLEKENADLAGELRVLGQAKQEVEHKKKKLEAQVQELQSKCSDGERARAELNDKVHKLQNEVESVTGMLNEAEGKAIKLAKDVASLSSQLQDTQELLQEETRQKLNVSTKLRQLEEERNSLQDQLDEEMEAKQNLERHISTLNIQLSDSKKKLQDFASTVEALEEGKKRFQKEIENLTQQYEEKAAAYDKLEKTKNRLQQELDDLVVDLDNQRQLVSNLEKKQRKFDQLLAEEKNISSKYADERDRAEAEAREKETKALSLARALEEALEAKEELERTNKMLKAEMEDLVSSKDDVGKNVHELEKSKRALETQMEEMKTQLEELEDELQATEDAKLRLEVNMQALKGQFERDLQARDEQNEEKRRQLQRQLHEYETELEDERKQRALAAAAKKKLEGDLKDLELQADSAIKGREEAIKQLRKLQAQMKDFQRELEDARASRDEIFATAKENEKKAKSLEADLMQLQEDLAAAERARKQADLEKEELAEELASSLSGRNALQDEKRRLEARIAQLEEELEEEQGNMEAMSDRVRKATQQAEQLSNELATERSTAQKNESARQQLERQNKELRSKLHEMEGAVKSKFKSTIAALEAKIAQLEEQVEQEAREKQAATKSLKQKDKKLKEILLQVEDERKMAEQYKEQAEKGNARVKQLKRQLEEAEEESQRINANRRKLQRELDEATESNEAMGREVNALKSKLRGPPHRKLRSDAPGEETRPLSFLLEGLEDVELLKMQMVLRRKRTLETQTSMEPRPVNKQLSTVLHHGKKTKNQNKQTKKTQQQPRTKQNPADCT

SEQ ID NO: 54701 - protein, 1979 aa, Homo sapiens
MAQKGQLSDDEKFLFVDKNFINSPVAQADWAAKRLVWVPSEKQGFEAASIKEEKGDEVVVELVENGKKVTVGKDDIQKMNPPKFSKVEDMAELTCLNEASVLHNLRERYFSGLIYTYSGLFCVVVNPYKHLPIYSEKIVDMYKGKKRHEMPPHIYAIADTAYRSMLQDREDQSILCTGESGAGKTENTKKVIQYLAVVASSHKGKKDTSITQGPSFAYGELEKQLLQANPILEAFGNAKTVKNDNSSRFGKFIRINFDVTGYIVGANIETYLLEKSRAIRQARDERTFHIFYYMIAGAKEKMRSDLLLEGFNNYTFLSNGFVPIPAAQDDEMFQETVEAMAIMGFSEEEQLSILKVVSSVLQLGNIVFKKERNTDQASMPDNTAAQKVCHLMGINVTDFTRSILTPRIKVGRDVVQKAQTKEQADFAVEALAKATYERLFRWILTRVNKALDKTHRQGASFLGILDIAGFEIFEVNSFEQLCINYTNEKLQQLFNHTMFILEQEEYQREGIEWNFIDFGLDLQPCIELIERPNNPPGVLALLDEECWFPKATDKSFVEKLCTEQGSHPKFQKPKQLKDKTEFSIIHYAGKVDYNASAWLTKNMDPLNDNVTSLLNASSDKFVADLWKDVDRIVGLDQMAKMTESSLPSASKTKKGMFRTVGQLYKEQLGKLMTTLRNTTPNFVRCIIPNHEKRSGKLDAFLVLEQLRCNGVLEGIRICRQGFPNRIVFQEFRQRYEILAANAIPKGFMDGKQACILMIKALELDPNLYRIGQSKIFFRTGVLAHLEEERDLKITDVIMAFQAMCRGYLARKAFAKRQQQLTAMKVIQRNCAAYLKLRNWQWWRLFTKVKPLLQVTRQEEEMQAKEDELQKTKERQQKAENELKELEQKHSQLTEEKNLLQEQLQAETELYAEAEEMRVRLAAKKQELEEILHEMEARLEEEEDRGQQLQAERKKMAQQMLDLEEQLEEEEAARQKLQLEKVTAEAKIKKLEDEILVMDDQNNKLSKERKLLEERISDLTTNLAEEEEKAKNLTKLKNKHESMISELEVRLKKEEKSRQELEKLKRKLEGDASDFHEQIADLQAQIAELKMQLAKKEEELQAALARLDDEIAQKNNALKKIRELEGHISDLQEDLDSERAARNKAEKQKRDLGEELEALKTELEDTLDSTATQQELRAKREQEVTVLKKALDEETRSHEAQVQEMRQKHAQAVEELTEQLEQFKRAKANLDKNKQTLEKENADLAGELRVLGQAKQEVEHKKKKLEAQVQELQSKCSDGERARAELNDKVHKLQNEVESVTGMLNEAEGKAIKLAKDVASLSSQLQDTQELLQEETRQKLNVSTKLRQLEEERNSLQDQLDEEMEAKQNLERHISTLNIQLSDSKKKLQDFASTVEALEEGKKRFQKEIENLTQQYEEKAAAYDKLEKTKNRLQQELDDLVVDLDNQRQLVSNLEKKQRKFDQLLAEEKNISSKYADERDRAEAEAREKETKALSLARALEEALEAKEELERTNKMLKAEMEDLVSSKDDVGKNVHELEKSKRALETQMEEMKTQLEELEDELQATEDAKLRLEVNMQALKGQFERDLQARDEQNEEKRRQLQRQLHEYETELEDERKQRALAAAAKKKLEGDLKDLELQADSAIKGREEAIKQLRKLQAQMKDFQRELEDARASRDEIFATAKENEKKAKSLEADLMQLQEDLAAAERARKQADLEKEELAEELASSLSGRNALQDEKRRLEARIAQLEEELEEEQGNMEAMSDRVRKATQQAEQLSNELATERSTAQKNESARQQLERQNKELRSKLHEMEGAVKSKFKSTIAALEAKIAQLEEQVEQEAREKQAATKSLKQKDKKLKEILLQVEDERKMAEQYKEQAEKGNARVKQLKRQLEEAEEESQRINANRRKLQRELDEATESNEAMGREVNALKSKLRRGNETSFVPSRRSGGRRVIENADGSEEETDTRDADFNGTKASE

SEQ ID NO: 54702 - protein, 1945 aa, Homo sapiens
MAQKGQLSDDEKFLFVDKNFINSPVAQADWAAKRLVWVPSEKQGFEAASIKEEKGDEVVVELVENGKKVTVGKDDIQKMNPPKFSKVEDMAELTCLNEASVLHNLRERYFSGLIYTYSGLFCVVVNPYKHLPIYSEKIVDMYKGKKRHEMPPHIYAIADTAYRSMLQDREDQSILCTGESGAGKTENTKKVIQYLAVVASSHKGKKDTSITQGPSFAYGELEKQLLQANPILEAFGNAKTVKNDNSSRFGKFIRINFDVTGYIVGANIETYLLEKSRAIRQARDERTFHIFYYMIAGAKEKMRSDLLLEGFNNYTFLSNGFVPIPAAQDDEMFQETVEAMAIMGFSEEEQLSILKVVSSVLQLGNIVFKKERNTDQASMPDNTAAQKVCHLMGINVTDFTRSILTPRIKVGRDVVQKAQTKEQADFAVEALAKATYERLFRWILTRVNKALDKTHRQGASFLGILDIAGFEIFEVNSFEQLCINYTNEKLQQLFNHTMFILEQEEYQREGIEWNFIDFGLDLQPCIELIERPNNPPGVLALLDEECWFPKATDKSFVEKLCTEQGSHPKFQKPKQLKDKTEFSIIHYAGKVDYNASAWLTKNMDPLNDNVTSLLNASSDKFVADLWKDVDRIVGLDQMAKMTESSLPSASKTKKGMFRTVGQLYKEQLGKLMTTLRNTTPNFVRCIIPNHEKRSGKLDAFLVLEQLRCNGVLEGIRICRQGFPNRIVFQEFRQRYEILAANAIPKGFMDGKQACILMIKALELDPNLYRIGQSKIFFRTGVLAHLEEERDLKITDVIMAFQAMCRGYLARKAFAKRQQQLTAMKVIQRNCAAYLKLRNWQWWRLFTKVKPLLQVTRQEEEMQAKEDELQKTKERQQKAENELKELEQKHSQLTEEKNLLQEQLQAETELYAEAEEMRVRLAAKKQELEEILHEMEARLEEEEDRGQQLQAERKKMAQQMLDLEEQLEEEEAARQKLQLEKVTAEAKIKKLEDEILVMDDQNNKLSKERKLLEERISDLTTNLAEEEEKAKNLTKLKNKHESMISELEVRLKKEEKSRQELEKLKRKLEGDASDFHEQIADLQAQIAELKMQLAKKEEELQAALARLDDEIAQKNNALKKIRELEGHISDLQEDLDSERAARNKAEKQKRDLGEELEALKTELEDTLDSTATQQELRAKREQEVTVLKKALDEETRSHEAQVQEMRQKHAQAVEELTEQLEQFKRAKANLDKNKQTLEKENADLAGELRVLGQAKQEVEHKKKKLEAQVQELQSKCSDGERARAELNDKVHKLQNEVESVTGMLNEAEGKAIKLAKDVASLSSQLQDTQELLQEETRQKLNVSTKLRQLEEERNSLQDQLDEEMEAKQNLERHISTLNIQLSDSKKKLQDFASTVEALEEGKKRFQKEIENLTQQYEEKAAAYDKLEKTKNRLQQELDDLVVDLDNQRQLVSNLEKKQRKFDQLLAEEKNISSKYADERDRAEAEAREKETKALSLARALEEALEAKEELERTNKMLKAEMEDLVSSKDDVGKNVHELEKSKRALETQMEEMKTQLEELEDELQATEDAKLRLEVNMQALKGQFERDLQARDEQNEEKRRQLQRQLHEYETELEDERKQRALAAAAKKKLEGDLKDLELQADSAIKGREEAIKQLRKLQAQMKDFQRELEDARASRDEIFATAKENEKKAKSLEADLMQLQEDLAAAERARKQADLEKEELAEELASSLSGRNALQDEKRRLEARIAQLEEELEEEQGNMEAMSDRVRKATQQAEQLSNELATERSTAQKNESARQQLERQNKELRSKLHEMEGAVKSKFKSTIAALEAKIAQLEEQVEQEAREKQAATKSLKQKDKKLKEILLQVEDERKMAEQYKEQAEKGNARVKQLKRQLEEAEEESQRINANRRKLQRELDEATESNEAMGREVNALKSKLRGPPPQETSQ

SEQ ID NO: 54703 - protein, 1938 aa, Homo sapiens; identical to SEQ ID NO: 54574

SEQ ID NO: 54704 - protein, 666 aa, Homo sapiens [sequence omitted]

SEQ ID NO: 54705 - protein, 2036 aa, Homo sapiens; identical to SEQ ID NO: 54575

SEQ ID NO: 54706 - protein, 1478 aa, Homo sapiens
MAAVTMSVPGRKAPPRPGPVPEAAQPFLFTPRGPSAGGGPGSGTSPQVEWTARRLVWVPSELHGFEAAALRDEGEEEAEVELAESGRRLRLPRDQIQRMNPPKFSKAEDMAELTCLNEASVLHNLRERYYSGLIYTYSGLFCVVINPYKQLPIYTEAIVEMYRGKKRHEVPPHVYAVTEGAYRSMLQDREDQSILCTGESGAGKTENTKKVIQYLAHVASSPKGRKEPGVPGELERQLLQANPILEAFGNAKTVKNDNSSRFGKFIRINFDVAGYIVGANIETYLLEKSRAIRQAKDECSFHIFYQLLGGAGEQLKADLLLEPCSHYRFLTNGPSSSPGQERELFQETLESLRVLGFSHEEIISMLRMVSAVLQFGNIALKRERNTDQATMPDNTAAQKLCRLLGLGVTDFSRALLTPRIKVGRDYVQKAQTKEQADFALEALAKATYERLFRWLVLRLNRALDRSPRQGASFLGILDIAGFEIFQLNSFEQLCINYTNEKLQQLFNHTMFVLEQEEYQREGIPWTFLDFGLDLQPCIDLIERPANPPGLLALLDEECWFPKATDKSFVEKVAQEQGGHPKFQRPRHLRDQADFSVLHYAGKVDYKANEWLMKNMDPLNDNVAALLHQSTDRLTAEIWKDVEGIVGLEQVSSLGDGPPGGRPRRGMFRTVGQLYKESLSRLMATLSNTNPSFVRCIVPNHEKRAGKLEPRLVLDQLRCNGVLEGIRICRQGFPNRILFQEFRQRYEILTPNAIPKGFMDGKQACEKMIQALELDPNLYRVGQSKIFFRAGVLAQLEEERDLKVTDIIVSFQAAARGYLARRAFQKRQQQQSALRVMQRNCAAYLKLRHWQWWRLFTKVKPLLQVTRQDEVLQARAQELQKVQELQQQSAREVGELQGRVAQLEEERARLAEQLRAEAELCAEAEETRGRLAARKQELELVVSELEARVGEEEECSRQMQTEKKRLQQHIQELEAHLEAEEGARQKLQLEKVTTEAKMKKFEEDLLLLEDQNSKLSKSGSCWKIVWPSSHPRQLRRRRRSRASISYGSNMRPQSQTWRDRLRKEEKGRQELEKLKRRLDGESSELQEQMVEQQQRAEELRAQLGRKEEELQAALARAEDEGGARAQLLKSLREAQAALAEAQEDLESERVARTKAEKQRRDLGEELEALRGELEDTLDSTNAQQELRSKREQEVTELKKTLEEETRIHEAAVQELRQRHGQALGELAEQLEQARRGKGAWEKTRLALEAEVSELRAELSSLQTARQEGEQRRRRLELQLQEVQGRAGDGERARAEAAEKLQRAQAELENVSGALNEAESKTIRLSKELSSTEAQLHDAQELLQEETRAKLALGSRVRAMEAEAAGLREQLEEEAAARERAGRELQTAQAQLSEWRRRQEEEAGALEAGEEARRRAAREAEALTQRLAEKTETVDRLERGRRRLQQELDDATLSPDALTDGAQPPSSLDPTGPCPRNPAL

SEQ ID NO: 54707 - protein, 1779 aa, Homo sapiens
MAAVTMSVPGRKAPPRPGPVPEAAQPFLFTPRGPSAGGGPGSGTSPQVEWTARRLVWVPSELHGFEAAALRDEGEEEAEVELAESGRRLRLPRDQIQRMNPPKFSKAEDMAELTCLNEASVLHNLRERYYSGLIYTYSGLFCVVINPYKQLPIYTEAIVEMYRGKKRHEVPPHVYAVTEGAYRSMLQDREDQSILCTGESGAGKTENTKKVIQYLAHVASSPKGRKEPGVPGELERQLLQANPILEAFGNAKTVKNDNSSRFGKFIRINFDVAGYIVGANIETYLLEKSRAIRQAKDECSFHIFYQLLGGAGEQLKADLLLEPCSHYRFLTNGPSSSPGQERELFQETLESLRVLGFSHEEIISMLRMVSAVLQFGNIALKRERNTDQATMPDNTAAQKLCRLLGLGVTDFSRALLTPRIKVGRDYVQKAQTKEQADFALEALAKATYERLFRWLVLRLNRALDRSPRQGASFLGILDIAGFEIFQLNSFEQLCINYTNEKLQQLFNHTMFVLEQEEYQREGIPWTFLDFGLDLQPCIDLIERPANPPGLLALLDEECWFPKATDKSFVEKVAQEQGGHPKFQRPRHLRDQADFSVLHYAGKVDYKANEWLMKNMDPLNDNVAALLHQSTDRLTAEIWKDVEGIVGLEQVSSLGDGPPGGRPRRGMFRTVGQLYKESLSRLMATLSNTNPSFVRCIVPNHEKRAGKLEPRLVLDQLRCNGVLEGIRICRQGFPNRILFQEFRQRYEILTPNAIPKGFMDGKQACEKMIQALELDPNLYRVGQSKIFFRAGVLAQLEEERDLKVTDIIVSFQAAARGYLARRAFQKRQQQQSALRVMQRNCAAYLKLRHWQWWRLFTKVKPLLQVTRQDEVLQARAQELQKVQELQQQSAREVGELQGRVAQLEEERARLAEQLRAEAELCAEAEETRGRLAARKQELELVVSELEARVGEEEECSRQMQTEKKRLQQHIQELEAHLEAEEGARQKLQLEKVTTEAKMKKFEEDLLLLEDQNSKLSKSGSCWKIVWPSSHPRQLRRRRRSRASISYGSNMRPQSQTWRDRLRKEEKGRQELEKLKRRLDGESSELQEQMVEQQQRAEELRAQLGRKEEELQAALARAEDEGGARAQLLKSLREAQAALAEAQEDLESERVARTKAEKQRRDLGEELEALRGELEDTLDSTNAQQELRSKREQEVTELKKTLEEETRIHEAAVQELRQRHGQALGELAEQLEQARRGKGAWEKTRLALEAEVSELRAELSSLQTARQEGEQRRRRLELQLQEVQGRAGDGERARAEAAEKLQRAQAELENVSGALNEALLSSKDDVGKSVHELERACRVAEQAANDLRAQVTELEDELTAAEDAKLRLEVTVQALKTQHERDLQGRDEAGEERRRQLAKQLRDAEVERDEERKQRTLAVAARKKLEGELEELKAQMASAGQGKEEAVKQLRKMQAQMKELWREVEETRTSREEIFSQNRESEKRLKGLEAEVLRLQEELAASDRARRQAQQDRDEMADEVANGNLSKAAILEEKRQLEGRLGQLEEELEEEQSNSELLNDRYRKLLLQVESLTTELSAERSFSAKAESGRQQLERQIQELRGRLGEEDAGARARHKMTIAALESKLAQAEEQLEQETRERILSGKLVRRAEKRLKEVVLQVEEERRVADQLRDQLEKGNLRVKQLKRQLEEAEEEASRAQAGRRRLQRELEDVTESAESMNREVTTLRNRLRRGPLTFTTRTVRQVFRLEEGVASDEEAEEAQPGSGPSPEPEGSPPAHPQ

SEQ ID NO: 54708 - protein, 2028 aa, Homo sapiens
MAAVTMSVPGRKAPPRPGPVPEAAQPFLFTPRGPSAGGGPGSGTSPQVEWTARRLVWVPSELHGFEAAALRDEGEEEAEVELAESGRRLRLPRDQIQRMNPPKFSKAEDMAELTCLNEASVLHNLRERYYSGLIYTYSGLFCVVINPYKQLPIYTEAIVEMYRGKKRHEVPPHVYAVTEGAYRSMLQDREDQSILCTGESGAGKTENTKKVIQYLAHVASSPKGRKEPGVPGELERQLLQANPILEAFGNAKTVKNDNSSRFGKFIRINFDVAGYIVGANIETYLLEKSRAIRQAKDECSFHIFYQLLGGAGEQLKADLLLEPCSHYRFLTNGPSSSPGQERELFQETLESLRVLGFSHEEIISMLRMVSAVLQFGNIALKRERNTDQATMPDNTAAQKLCRLLGLGVTDFSRALLTPRIKVGRDYVQKAQTKEQADFALEALAKATYERLFRWLVLRLNRALDRSPRQGASFLGILDIAGFEIFQLNSFEQLCINYTNEKLQQLFNHTMFVLEQEEYQREGIPWTFLDFGLDLQPCIDLIERPANPPGLLALLDEECWFPKATDKSFVEKVAQEQGGHPKFQRPRHLRDQADFSVLHYAGKVDYKANEWLMKNMDPLNDNVAALLHQSTDRLTAEIWKDEHGGFQQFSFLGSFPPSPPGSAERCSSAISPPGVEGIVGLEQVSSLGDGPPGGRPRRGMFRTVGQLYKESLSRLMATLSNTNPSFVRCIVPNHEKRAGKLEPRLVLDQLRCNGVLEGIRICRQGFPNRILFQEFRQRYEILTPNAIPKGFMDGKQACEKMIQALELDPNLYRVGQSKIFFRAGVLAQLEEERDLKVTDIIVSFQAAARGYLARRAFQKRQQQQSALRVMQRNCAAYLKLRHWQWWRLFTKVKPLLQVTRQDEVLQARAQELQKVQELQQQSAREVGELQGRVAQLEEERARLAEQLRAEAELCAEAEETRGRLAARKQELELVVSELEARVGEEEECSRQMQTEKKRLQQHIQELEAHLEAEEGARQKLQLEKVTTEAKMKKFEEDLLLLEDQNSKLSKERKLLEDRLAEFSSQAAEEEEKVKSLNKLRLKYEATIADMEDRLRKEEKGRQELEKLKRRLDGESSELQEQMVEQQQRAEELRAQLGRKEEELQAALARAEDEGGARAQLLKSLREAQAALAEAQEDLESERVARTKAEKQRRDLGEELEALRGELEDTLDSTNAQQELRSKREQEVTELKKTLEEETRIHEAAVQELRQRHGQALGELAEQLEQARRGKGAWEKTRLALEAEVSELRAELSSLQTARQEGEQRRRRLELQLQEVQGRAGDGERARAEAAEKLQRAQAELENVSGALNEAESKTIRLSKELSSTEAQLHDAQELLQEETRAKLALGSRVRAMEAEAAGLREQLEEEAAARERAGRELQTAQAQLSEWRRRQEEEAGALEAGEEARRRAAREAEALTQRLAEKTETVDRLERGRRRLQQELDDATMDLEQQRQLVSTLEKKQRKFDQLLAEEKAAVLRAVEERERAEAEGREREARALSLTRALEEEQEAREELERQNRALRAELEALLSSKDDVGKSVHELERACRVAEQAANDLRAQVTELEDELTAAEDAKLRLEVTVQALKTQHERDLQGRDEAGEERRRQLAKQLRDAEVERDEERKQRTLAVAARKKLEGELEELKAQMASAGQGKEEAVKQLRKMQAQMKELWREVEETRTSREEIFSQNRESEKRLKGLEAEVLRLQEELAASDRARRQAQQDRDEMADEVANGNLSKAAILEEKRQLEGRLGQLEEELEEEQSNSELLNDRYRKLLLQVESLTTELSAERSFSAKAESGRQQLERQIQELRGRLGEEDAGARARHKMTIAALESKLAQAEEQLEQETRERILSGKLVRRAEKRLKEVVLQVEEERRVADQLRDQLEKGNLRVKQLKRQLEEAEEEASRAQAGRRRLQRELEDVTESAESMNREVTTLRNRLRRGPLTFTTRTVRQVFRLEEGVASDEEAEEAQPGSGPSPEPEGSPPAHPQ

SEQ ID NO: 54709 - protein, 2003 aa, Homo sapiens
MAAVTMSVPGRKAPPRPGPVPEAAQPFLFTPRGPSAGGGPGSGTSPQVEWTARRLVWVPSELHGFEAAALRDEGEEEAEVELAESGRRLRLPRDQIQRMNPPKFSKAEDMAELTCLNEASVLHNLRERYYSGLIYTYSGLFCVVINPYKQLPIYTEAIVEMYRGKKRHEVPPHVYAVTEGAYRSMLQDREDQSILCTGESGAGKTENTKKVIQYLAHVASSPKGRKEPGVPASVSTVSYGELERQLLQANPILEAFGNAKTVKNDNSSRFGKFIRINFDVAGYIVGANIETYLLEKSRAIRQAKDECSFHIFYQLLGGAGEQLKADLLLEPCSHYRFLTNGPSSSPGQERELFQETLESLRVLGFSHEEIISMLRMVSAVLQFGNIALKRERNTDQATMPDNTAAQKLCRLLGLGVTDFSRALLTPRIKVGRDYVQKAQTKEQADFALEALAKATYERLFRWLVLRLNRALDRSPRQGASFLGILDIAGFEIFQLNSFEQLCINYTNEKLQQLFNHTMFVLEQEEYQREGIPWTFLDFGLDLQPCIDLIERPANPPGLLALLDEECWFPKATDKSFVEKVAQEQGGHPKFQRPRHLRDQADFSVLHYAGKVDYKANEWLMKNMDPLNDNVAALLHQSTDRLTAEIWKDVEGIVGLEQVSSLGDGPPGGRPRRGMFRTVGQLYKESLSRLMATLSNTNPSFVRCIVPNHEKRAGKLEPRLVLDQLRCNGVLEGIRICRQGFPNRILFQEFRQRYEILTPNAIPKGFMDGKQACEKMIQALELDPNLYRVGQSKIFFRAGVLAQLEEERDLKVTDIIVSFQAAARGYLARRAFQKRQQQQSALRVMQRNCAAYLKLRHWQWWRLFTKVKPLLQVTRQDEVLQARAQELQKVQELQQQSAREVGELQGRVAQLEEERARLAEQLRAEAELCAEAEETRGRLAARKQELELVVSELEARVGEEEECSRQMQTEKKRLQQHIQELEAHLEAEEGARQKLQLEKVTTEAKMKKFEEDLLLLEDQNSKLSKERKLLEDRLAEFSSQAAEEEEKVKSLNKLRLKYEATIADMEDRLRKEEKGRQELEKLKRRLDGESSELQEQMVEQQQRAEELRAQLGRKEEELQAALARAEDEGGARAQLLKSLREAQAALAEAQEDLESERVARTKAEKQRRDLGEELEALRGELEDTLDSTNAQQELRSKREQEVTELKKTLEEETRIHEAAVQELRQRHGQALGELAEQLEQARRGKGAWEKTRLALEAEVSELRAELSSLQTARQEGEQRRRRLELQLQEVQGRAGDGERARAEAAEKLQRAQAELENVSGALNEAESKTIRLSKELSSTEAQLHDAQELLQEETRAKLALGSRVRAMEAEAAGLREQLEEEAAARERAGRELQTAQAQLSEWRRRQEEEAGALEAGEEARRRAAREAEALTQRLAEKTETVDRLERGRRRLQQELDDATMDLEQQRQLVSTLEKKQRKFDQLLAEEKAAVLRAVEERERAEAEGREREARALSLTRALEEEQEAREELERQNRALRAELEALLSSKDDVGKSVHELERACRVAEQAANDLRAQVTELEDELTAAEDAKLRLEVTVQALKTQHERDLQGRDEAGEERRRQLAKQLRDAEVERDEERKQRTLAVAARKKLEGELEELKAQMASAGQGKEEAVKQLRKMQAQMKELWREVEETRTSREEIFSQNRESEKRLKGLEAEVLRLQEELAASDRARRQAQQDRDEMADEVANGNLSKAAILEEKRQLEGRLGQLEEELEEEQSNSELLNDRYRKLLLQVESLTTELSAERSFSAKAESGRQQLERQIQELRGRLGEEDAGARARHKMTIAALESKLAQAEEQLEQETRERILSGKLVRRAEKRLKEVVLQVEEERRVADQLRDQLEKGNLRVKQLKRQLEEAEEEASRAQAGRRRLQRELEDVTESAESMNREVTTLRNRLRRGPLTFTTRTVRQVFRLEEGVASDEEAEEAQPGSGPSPEPEGSPPAHPQ

SEQ ID NO: 54710 - protein, 2036 aa, Homo sapiens
MAAVTMSVPGRKAPPRPGPVPEAAQPFLFTPRGPSAGGGPGSGTSPQVEWTARRLVWVPSELHGFEAAALRDEGEEEAEVELAESGRRLRLPRDQIQRMNPPKFSKAEDMAELTCLNEASVLHNLRERYYSGLIYTYSGLFCVVINPYKQLPIYTEAIVEMYRGKKRHEVPPHVYAVTEGAYRSMLQDREDQSILCTGESGAGKTENTKKVIQYLAHVASSPKGRKEPGVPVSNPALGWGELERQLLQANPILEAFGNAKTVKNDNSSRFGKFIRINFDVAGYIVGANIETYLLEKSRAIRQAKDECSFHIFYQLLGGAGEQLKADLLLEPCSHYRFLTNGPSSSPGQERELFQETLESLRVLGFSHEEIISMLRMVSAVLQFGNIALKRERNTDQATMPDNTAAQKLCRLLGLGVTDFSRALLTPRIKVGRDYVQKAQTKEQADFALEALAKATYERLFRWLVLRLNRALDRSPRQGASFLGILDIAGFEIFQLNSFEQLCINYTNEKLQQLFNHTMFVLEQEEYQREGIPWTFLDFGLDLQPCIDLIERPANPPGLLALLDEECWFPKATDKSFVEKVAQEQGGHPKFQRPRHLRDQADFSVLHYAGKVDYKANEWLMKNMDPLNDNVAALLHQSTDRLTAEIWKDEHGGFQQFSFLGSFPPSPPGSAERCSSAISPPGVEGIVGLEQVSSLGDGPPGGRPRRGMFRTVGQLYKESLSRLMATLSNTNPSFVRCIVPNHEKRAGKLEPRLVLDQLRCNGVLEGIRICRQGFPNRILFQEFRQRYEILTPNAIPKGFMDGKQACEKMIQALELDPNLYRVGQSKIFFRAGVLAQLEEERDLKVTDIIVSFQAAARGYLARRAFQKRQQQQSALRVMQRNCAAYLKLRHWQWWRLFTKVKPLLQVTRQDEVLQARAQELQKVQELQQQSAREVGELQGRVAQLEEERARLAEQLRAEAELCAEAEETRGRLAARKQELELVVSELEARVGEEEECSRQMQTEKKRLQQHIQELEAHLEAEEGARQKLQLEKVTTEAKMKKFEEDLLLLEDQNSKLSKERKLLEDRLAEFSSQAAEEEEKVKSLNKLRLKYEATIADMEDRLRKEEKGRQELEKLKRRLDGESSELQEQMVEQQQRAEELRAQLGRKEEELQAALARAEDEGGARAQLLKSLREAQAALAEAQEDLESERVARTKAEKQRRDLGEELEALRGELEDTLDSTNAQQELRSKREQEVTELKKTLEEETRIHEAAVQELRQRHGQALGELAEQLEQARRGKGAWEKTRLALEAEVSELRAELSSLQTARQEGEQRRRRLELQLQEVQGRAGDGERARAEAAEKLQRAQAELENVSGALNEAESKTIRLSKELSSTEAQLHDAQELLQEETRAKLALGSRVRAMEAEAAGLREQLEEEAAARERAGRELQTAQAQLSEWRRRQEEEAGALEAGEEARRRAAREAEALTQRLAEKTETVDRLERGRRRLQQELDDATMDLEQQRQLVSTLEKKQRKFDQLLAEEKAAVLRAVEERERAEAEGREREARALSLTRALEEEQEAREELERQNRALRAELEALLSSKDDVGKSVHELERACRVAEQAANDLRAQVTELEDELTAAEDAKLRLEVTVQALKTQHERDLQGRDEAGEERRRQLAKQLRDAEVERDEERKQRTLAVAARKKLEGELEELKAQMASAGQGKEEAVKQLRKMQAQMKELWREVEETRTSREEIFSQNRESEKRLKGLEAEVLRLQEELAASDRARRQAQQDRDEMADEVANGNLSKAAILEEKRQLEGRLGQLEEELEEEQSNSELLNDRYRKLLLQVESLTTELSAERSFSAKAESGRQQLERQIQELRGRLGEEDAGARARHKMTIAALESKLAQAEEQLEQETRERILSGKLVRRAEKRLKEVVLQVEEERRVADQLRDQLEKGNLRVKQLKRQLEEAEEEASRAQAGRRRLQRELEDVTESAESMNREVTTLRNRLRRGPLTFTTRTVRQVFRLEEGVASDEEAEEAQPGSGPSPEPEGSPPAHPQ

SEQ ID NO: 54711 - protein, 1946 aa, Homo sapiens
MVESCLLTFRAFFWWIALIKMDLSDLGEAAAFLRRSEAELLLLQATALDGKKKCWIPDGENAYIEAEVKGSEDDGTVIVETADGESLSIKEDKIQQMNPPEFEMIEDMAMLTHLNEASVLHTLKRRYGQWMIYTYSGLFCVTINPYKWLPVYQKEVMAAYKGKRRSEAPPHIFAVANNAFQDMLHNRENQSILFTGESGAGKTVNSKHIIQYFATIAAMIESRKKQGALEDQIMQANTILEAFGNAKTLRNDNSSRFGKFIRMHFGARGMLSSVDIDIYLLEKSRVIFQQAGERNYHIFYQILSGQKELHDLLLVSANPSDFHFCSCGAVTVESLDDAEELLATEQAMDILGFLPDEKYGCYKLTGAIMHFGNMKFKQKPREEQLEADGTENADKAAFLMGINSSELVKCLIHPRIKVGNEYVTRGQTIEQVTCAVGALSKSMYERMFKWLVARINRALDAKLSRQFFIGILDITGFEILEYNSLEQLCINFTNEKLQQFFNWHMFVLEQEEYKKESIEWVSIGFGLDLQACIDLIEKPMGILSILEEECMFPKATDLTFKTKLFDNHFGKSVHLQKPKPDKKKFEAHFELVHYAGVVPYNISGWLEKNKDLLNETVVAVFQKSSNRLLASLFENYMSTDSAIPFGEKKRKKGASFQTVASLHKENLNKLMTNLKSTAPHFVRCINPNVNKIPGILDPYLVLQQLRCNGVLEGTRICREGFPNRLQYADFKQRYCILNPRTFPKSKFVSSRKAAEELLGSLEIDHTQYRFGITKVFFKAGFLGQLEAIRDERLSKVFTLFQARAQGKLMRIKFQKILEERDALILIQWNIRAFMAVKNWPWMRLFFKIKPLVKSSEVGEEVAGLKEECAQLQKALEKSEFQREELKAKQVSLTQEKNDLILQLQAEQETLANVEEQCEWLIKSKIQLEARVKELSERVEEEEEINSELTARGRKLEDECFELKKEIDDLETMLVKSEKEKRTTEHKVKNLTEEVEFLNEDISKLNRAAKVVQEAHQQTLDDLHMEEEKLSSLSKANLKLEQQVDELEGALEQERKARMNCERELHKLEGNLKLNRESMENLESSQRHLAEELRKKELELSQMNSKVENEKGLVAQLQKTVKELQTQIKDLKEKLEAERTTRAKMERERADLTQDLADLNERLEEVGGSSLAQLEITKKQETKFQKLHRDMEEATLHFETTSASLKKRHADSLAELEGQVENLQQVKQKLEKDKSDLQLEVDDLLTRVEQMTRAKANAEKLCTLYEERLHEATAKLDKVTQLANDLAAQKTKLWSESGEFLRRLEEKEALINQLSREKSNFTRQIEDLRGQLEKETKSQSALAHALQKAQRDCDLLREQYEEEQEVKAELHRTLSKVNAEMVQWRMKYENNVIQRTEDLEDAKKELAIRLQEAAEAMGVANARNASLERARHQLQLELGDALSDLGKVRSAAARLDQKQLQSGKALADWKQKHEESQALLDASQKEVQALSTELLKLKNTYEESIVGQETLRRENKNLQEEISNLTNQVREGTKNLTEMEKVKKLIEEEKTEVQVTLEETEGALERNESKILHFQLELLEAKAELERKLSEKDEEIENFRRKQQCTIDSLQSSLDSEAKSRIEVTRLKKKMEEDLNEMELQLSCANRQVSEATKSLGQLQIQIKDLQMQLDDSTQLNSDLKEQVAVAERRNSLLQSELEDLRSLQEQTERGRRLSEEELLEATERINLFYTQNTSLLSQKKKLEADVARMQKEAEEVVQECQNAEEKAKKAAIEAANLSEELKKKQDTIAHLERTRENMEQTITDLQKRLAEAEQMALMGSRKQIQKLESRVRELEGELEGEIRRSAEAQRGARRLERCIKELTYQAEEDKKNLSRMQTQMDKLQLKVQNYKQQVEVAETQANQYLSKYKKQQHELNEVKERAEVAESQVNKLKIKAREFGKKVQEE

SEQ ID NO: 54712 - protein, 1941 aa, Homo sapiens
MSSDSELAVFGEAAPFLRKSERERIEAQNRPFDAKTSVFVAEPKESFVKGTIQSREGGKVTVKTEGGATLTVKDDQVFPMNPPKYDKIEDMAMMTHLHEPAVLYNLKERYAAWMIYTYSGLFCVTVNPYKWLPVYKPEVVTAYRGKKRQEAPPHIFSISDNAYQFMLTDRENQSILITGESGAGKTVNTKRVIQYFATIAVTGEKKKEEITSGKIQGTLEDQIISANPLLEAFGNAKTVRNDNSSRFGKFIRIHFGTTGKLASADIETYLLEKSRVVFQLKAERSYHIFYQITSNKKPELIEMLLITTNPYDYPFVSQGEISVASIDDQEELMATDSAIDILGFTNEEKVSIYKLTGAVMHYGNLKFKQKQREEQAEPDGTEVADKAAYLQSLNSADLLKALCYPRVKVGNEYVTKGQTVEQVSNAVGALAKAVYEKMFLWMVARINQQLDTKQPRQYFIGVLDIAGFEIFDFNSLEQLCINFTNEKLQQFFNHHMFVLEQEEYKKEGIEWTFIDFGMDLAACIELIEKPMGIFSILEEECMFPKATDTSFKNKLYDQHLGKSANFQKPKVVKGKAEAHFALIHYAGVVDYNITGWLEKNKDPLNETVVGLYQKSAMKTLAQLFSGAQTAEGEGAGGGAKKGGKKKGSSFQTVSALFRENLNKLMTNLRSTHPHFVRCIIPNETKTPGAMEHELVLHQLRCNGVLEGIRICRKGFPSRILYADFKQRYKVLNASAIPEGQFIDSKKASEKLLASIDIDHTQYKFGHTKVFFKAGLLGLLEEMRDDKLAQLITRTQARCRGFLARVEYQRMVERREAIFCIQYNIRSFMNVKHWPWMKLFFKIKPLLKSAETEKEMATMKEEFQKIKDELAKSEAKRKELEEKMVTLLKEKNDLQLQVQAEAEGLADAEERCDQLIKTKIQLEAKIKEVTERAEDEEEINAELTAKKRKLEDECSELKKDIDDLELTLAKVEKEKHATENKVKNLTEEMAGLDETIAKLTKEKKALQEAHQQTLDDLQAEEDKVNTLTKAKIKLEQQVDDLEGSLEQEKKLRMDLERAKRKLEGDLKLAQESIMDIENEKQQLDEKLKKKEFEISNLQSKIEDEQALGIQLQKKIKELQARIEELEEEIEAERASRAKAEKQRSDLSRELEEISERLEEAGGATSAQIEMNKKREAEFQKMRRDLEEATLQHEATAATLRKKHADSVAELGEQIDNLQRVKQKLEKEKSEMKMEIDDLASNVETVSKAKGNLEKMCRTLEDQLSELKSKEEEQQRLINDLTAQRGRLQTESGEFSRQLDEKEALVSQLSRGKQAFTQQIEELKRQLEEEIKAKNALAHALQSSRHDCDLLREQYEEEQESKAELQRALSKANTEVAQWRTKYETDAIQRTEELEEAKKKLAQRLQAAEEHVEAVNAKCASLEKTKQRLQNEVEDLMLDVERTNAACAALDKKQRNFDKILAEWKQKCEETHAELEASQKEARSLGTELFKIKNAYEESLDQLETLKRENKNLQQEISDLTEQIAEGGKRIHELEKIKKQVEQEKCELQAALEEAEASLEHEEGKILRIQLELNQVKSEVDRKIAEKDEEIDQLKRNHIRIVESMQSTLDAEIRSRNDAIRLKKKMEGDLNEMEIQLNHANRMAAEALRNYRNTQGILKDTQIHLDDALRSQEDLKEQLAMVERRANLLQAEIEELRATLEQTERSRKIAEQELLDASERVQLLHTQNTSLINTKKKLETDISQMQGEMEDILQEARNAEEKAKKAITDAAMMAEELKKEQDTSAHLERMKKNMEQTVKDLQLRLDEAEQLALKGGKKQIQKLEARVRELEGEVESEQKRNAEAVKGLRKHERRVKELTYQTEEDRKNILRLQDLVDKLQAKVKSYKRQAEEAEEQSNTNLAKFRKLQHELEEAEERADIAESQVNKLRVKSREVHTKVISEE

SEQ ID NO: 54713 - protein, 1941 aa, Homo sapiens; identical to SEQ ID NO: 54712

SEQ ID NO: 54714 - protein, 182 aa, Homo sapiens
MSSDSELAVFGEAAPFLRKSERERIEAQNRPFDAKTSVFVAEPKESFVKGTIQSREGGKVTVKTEGGATLTVKDDQVFPMNPPKYDKIEDMAMMTHLHEPAVLYNLKERYAAWMIYTYSGLFCVTVNPYKWLPVYKPEVVTAYRGKKRQEAPPHIFSISDNAYQFMLTDRENQSILITGESG

SEQ ID NO: 54715 - protein, 134 aa, Homo sapiens
MSSDSELAVFGEAAPFLRKSERERIEAQNRPFDAKTSVFVAEPKESFVKGTIQSREGGKVTVKTEGGATLTVKDDQVFPMNPPKYDKIEDMAMMTHLHEPAVLYNLKERYAAWMIYTYSGLFCVTVNPYKWLPV

SEQ ID NO: 54716 - protein, 708 aa, Homo sapiens
MSSDSELAVFGEAAPFLRKSERERIEAQNRPFDAKTSVFVAEPKESFVKGTIQSREGGKVTVKTEGGATLTVKDDQVFPMNPPKYDKIEDMAMMTHLHEPAVLYNLKERYAAWMIYTYSGLFCVTVNPYKWLPVYKPEVVTAYRGKKRQEAPPHIFSISDNAYQFMLTDRENQSILITGESGAGKTVNTKRVIQYFATIAVTGEKKKEEITSGKIQGTLEDQIISANPLLEAFGNAKTVRNDNSSRFGKFIRIHFGTTGKLASADIETYLLEKSRVVFQLKAERSYHIFYQITSNKKPELIEMLLITTNPYDYPFVSQGEISVASIDDQEELMATDSAIDILGFTNEEKVSIYKLTGAVMHYGNLKFKQKQREEQAEPDGTEVADKAAYLQSLNSADLLKALCYPRVKVGNEYVTKGQTVEQVSNAVGALAKAVYEKMFLWMVARINQQLDTKQPRQYFIGVLDIAGFEIFDFNSLEQLCINFTNEKLQQFFNHHMFVLEQEEYKKEGIEWTFIDFGMDLAACIELIEKPMGIFSILEEECMFPKATDTSFKNKLYDQHLGKSANFQKPKVVKGKAEAHFALIHYAGVVDYNITGWLEKNKDPLNETVVGLYQKSAMKTLAQLFSGAQTAEGEGAGGGAKKGGKKKGSSFQTVSALFREEQSNTNLAKFRKLQHELEEAEERADIAESQVNKLRVKSREVHTKVISEE

SEQ ID NO: 54717 - protein, 1940 aa, Homo sapiens; identical to SEQ ID NO: 54576

SEQ ID NO: 54718 - protein, 1939 aa, Homo sapiens
MSSDSEMAIFGEAAPFLRKSEKERIEAQNKPFDAKTSVFVVDPKESYVKAIVQSREGGKVTAKTEAGATVTVKEDQVFSMNPPKYDKIEDMAMMTHLHEPAVLYNLKERYAAWMIYTYSGLFCVTVNPYKWLPVYNPEVVTAYRGKKRQEAPPHIFSISDNAYQFMLTDRENQSILITGESGAGKTVNTKRVIQYFATIAVTGEKKKEEPASGKMQGTLEDQIISANPLLEAFGNAKTVRNDNSSRFGKFIRIHFGATGKLASADIETYLLEKSRVTFQLKAERSYHIFYQILSNKKPELIEMLLITTNPYDFAFVSQGEITVPSIDDQEELMATDSAVDILGFTADEKVAIYKLTGAVMHYGNMKFKQKQREEQAEPDGTEVADKAAYLTSLNSADLLKSLCYPRVKVGNEFVTKGQTVQQVYNAVGALAKAIYEKMFLWMVTRINQQLDTKQPRQYFIGVLDIAGFEIFDFNSLEQLCINFTNEKLQQFFNHHMFVLEQEEYKKEGIEWEFIDFGMDLAACIELIEKPMGIFSILEEECMFPKATDTSFKNKLYEQHLGKSNNFQKPKPAKGKPEAHFSLVHYAGTVDYNIAGWLDKNKDPLNETVVGLYQKSAMKTLAFLFSGAQTAEAEGGGGKKGGKKKGSSFQTVSALFRENLNKLMTNLRSTHPHFVRCIIPNETKTPGAMEHELVLHQLRCNGVLEGIRICRKGFPSRILYADFKQRYKVLNASAIPEGQFIDSKKASEKLLGSIEIDHTQYKFGHTKVFFKAGLLGTLEEMRDEKLAQLITRTQAICRGFLMRVEFRKMMERRESIFCIQYNIRAFMNVKHWPWMKLYFKIKPLLKSAETEKEMANMKEEFEKTKEELAKTEAKRKELEEKMVTLMQEKNDLQLQVQAEADALADAEERCDQLIKTKIQLEAKIKEVTERAEDEEEINAELTAKKRKLEDECSELKKDIDDLELTLAKVEKEKHATENKVKNLTEEMAGLDETIAKLTKEKKALQEAHQQTLDDLQMEEDKVNTLTKAKTKLEQQVDDLEGSLEQEKKLCMDLERAKRKLEGDLKLAQESTMDTENDKQQLNEKLKKKEFEMSNLQGKIEDEQALAIQLQKKIKELQARIEELEEEIEAERASRAKAEKQRSDLSRELEEISERLEEAGGATSAQIEMNKKREAEFQKMRRDLEESTLQHEATAAALRKKHADSVAELGEQIDSLQRVKQKLEKEKSELKMEINDLASNMETVSKAKANFEKMCRTLEDQLSEIKTKEEEQQRLINELSAQKARLHTESGEFSRQLDEKDAMVSQLSRGKQAFTQQIEELKRQLEEETKAKSTLAHALQSARHDCDLLREQYEEEQEAKAELQRGMSKANSEVAQWRTKYETDAIQRTEELEEAKKKLAQRLQDAEEHVEAVNSKCASLEKTKQRLQNEVEDLMIDVERSNAACIALDKKQRNFDKVLAEWKQKYEETQAELEASQKESRSLSTELFKVKNAYEESLDHLETLKRENKNLQQEISDLTEQIAEGGKHIHELEKVKKQLDHEKSELQTSLEEAEASLEHEEGKILRIQLELNQVKSEIDRKIAEKDEELDQLKRNHLRVVESMQSTLDAEIRSRNDALRIKKKMEGDLNEMEIQLNHANRQAAEALRNLRNTQGILKDTQLHLDDAIRGQDDLKEQLAMVERRANLMQAEVEELRASLERTERGRKMAEQELLDASERVQLLHTQNTSLINTKKKLETDISQIQGEMEDIVQEARNAEEKAKKAITDAAMMAEELKKEQDTSAHLERMKKNMEQTVKDLQLRLDEAEQLALKGGKKQIQKLEARVRELESEVESEQKHNVEAVKGLRKHERRVKELTYQTEEDRKNILRLQDLVDKLQTKVKAYKRQAEEAEEQSNVNLAKFRKLQHELEEAKERADIAESQVNKLRVKSREVHTKVISEE

SEQ ID NO: 54719 - protein, 1939 aa, Homo sapiens
MTDAQMADFGAAAQYLRKSEKERLEAQTRPFDIRTECFVPDDKEEFVKAKILSREGGKVIAETENGKTVTVKEDQVLQQNPPKFDKIEDMAMLTFLHEPAVLFNLKERYAAWMIYTYSGLFCVTVNPYKWLPVYNAEVVAAYRGKKRSEAPPHIFSISDNAYQYMLTDRENQSILITGESGAGKTVNTKRVIQYFASIAAIGDRGKKDNANANKGTLEDQIIQANPALEAFGNAKTVRNDNSSRFGKFIRIHFGATGKLASADIETYLLEKSRVIFQLKAERNYHIFYQILSNKKPELLDMLLVTNNPYDYAFVSQGEVSVASIDDSEELMATDSAFDVLGFTSEEKAGVYKLTGAIMHYGNMKFKQKQREEQAEPDGTEDADKSAYLMGLNSADLLKGLCHPRVKVGNEYVTKGQSVQQVYYSIGALAKAVYEKMFNWMVTRINATLETKQPRQYFIGVLDIAGFEIFDFNSFEQLCINFTNEKLQQFFNHHMFVLEQEEYKKEGIEWTFIDFGMDLQACIDLIEKPMGIMSILEEECMFPKATDMTFKAKLYDNHLGKSNNFQKPRNIKGKQEAHFSLIHYAGTVDYNILGWLEKNKDPLNETVVALYQKSSLKLMATLFSSYATADTGDSGKSKGGKKKGSSFQTVSALHRENLNKLMTNLRTTHPHFVRCIIPNERKAPGVMDNPLVMHQLRCNGVLEGIRICRKGFPNRILYGDFRQRYRILNPVAIPEGQFIDSRKGTEKLLSSLDIDHNQYKFGHTKVFFKAGLLGLLEEMRDERLSRIITRMQAQARGQLMRIEFKKIVERRDALLVIQWNIRAFMGVKNWPWMKLYFKIKPLLKSAETEKEMATMKEEFGRIKETLEKSEARRKELEEKMVSLLQEKNDLQLQVQAEQDNLNDAEERCDQLIKNKIQLEAKVKEMNERLEDEEEMNAELTAKKRKLEDECSELKKDIDDLELTLAKVEKEKHATENKVKNLTEEMAGLDEIIAKLTKEKKALQEAHQQALDDLQVEEDKVNSLSKSKVKLEQQVDDLEGSLEQEKKVRMDLERAKRKLEGDLKLTQESIMDLENDKLQLEEKLKKKEFDINQQNSKIEDEQVLALQLQKKLKENQARIEELEEELEAERTARAKVEKLRSDLSRELEEISERLEEAGGATSVQIEMNKKREAEFQKMRRDLEEATLQHEATAAALRKKHADSVAELGEQIDNLQRVKQKLEKEKSEFKLELDDVTSNMEQIIKAKANLEKVSRTLEDQANEYRVKLEEAQRSLNDFTTQRAKLQTENGELARQLEEKEALISQLTRGKLSYTQQMEDLKRQLEEEGKAKNALAHALQSARHDCDLLREQYEEETEAKAELQRVLSKANSEVAQWRTKYETDAIQRTEELEEAKKKLAQRLQDAEEAVEAVNAKCSSLEKTKHRLQNEIEDLMVDVERSNAAAAALDKKQRNFDKILAEWKQKYEESQSELESSQKEARSLSTELFKLKNAYEESLEHLETFKRENKNLQEEISDLTEQLGEGGKNVHELEKVRKQLEVEKLELQSALEEAEASLEHEEGKILRAQLEFNQIKAEIERKLAEKDEEMEQAKRNHQRVVDSLQTSLDAETRSRNEVLRVKKKMEGDLNEMEIQLSHANRMAAEAQKQVKSLQSLLKDTQIQLDDAVRANDDLKENIAIVERRNNLLQAELEELRAVVEQTERSRKLAEQELIETSERVQLLHSQNTSLINQKKKMESDLTQLQSEVEEAVQECRNAEEKAKKAITDAAMMAEELKKEQDTSAHLERMKKNMEQTIKDLQHRLDEAEQIALKGGKKQLQKLEARVRELEGELEAEQKRNAESVKGMRKSERRIKELTYQTEEDKKNLLRLQDLVDKLQLKVKAYKRQAEEAEEQANTNLSKFRKVQHELDEAEERADIAESQVNKLRAKSRDIGAKQKMHDEE

SEQ ID NO: 54720 - protein, 1939 aa, Homo sapiens; identical to SEQ ID NO: 54719

SEQ ID NO: 54721 - protein, 1935 aa, Homo sapiens
MGDSEMAVFGAAAPYLRKSEKERLEAQTRPFDLKKDVFVPDDKQEFVKAKIVSREGGKVTAETEYGKTVTVKEDQVMQQNPPKFDKIEDMAMLTFLHEPAVLYNLKDRYGSWMIYTYSGLFCVTVNPYKWLPVYTPEVVAAYRGKKRSEAPPHIFSISDNAYQYMLTDRENQSILITGESGAGKTVNTKRVIQYFAVIAAIGDRSKKDQSPGKGTLEDQIIQANPALEAFGNAKTVRNDNSSRFGKFIRIHFGATGKLASADIETYLLEKSRVIFQLKAERDYHIFYQILSNKKPELLDMLLITNNPYDYAFISQGETTVASIDDAEELMATDNAFDVLGFTSEEKNSMYKLTGAIMHFGNMKFKLKQREEQAEPDGTEEADKSAYLMGLNSADLLKGLCHPRVKVGNEYVTKGQNVQQVIYATGALAKAVYERMFNWMVTRINATLETKQPRQYFIGVLDIAGFEIFDFNSFEQLCINFTNEKLQQFFNHHMFVLEQEEYKKEGIEWTFIDFGMDLQACIDLIEKPMGIMSILEEECMFPKATDMTFKAKLFDNHLGKSANFQKPRNIKGKPEAHFSLIHYAGIVDYNIIGWLQKNKDPLNETVVGLYQKSSLKLLSTLFANYAGADAPIEKGKGKAKKGSSFQTVSALHRENLNKLMTNLRSTHPHFVRCIIPNETKSPGVMDNPLVMHQLRCNGVLEGIRICRKGFPNRILYGDFRQRYRILNPAAIPEGQFIDSRKGAEKLLSSLDIDHNQYKFGHTKVFFKAGLLGLLEEMRDERLSRIITRIQAQSRGVLARMEYKKLLERRDSLLVIQWNIRAFMGVKNWPWMKLYFKIKPLLKSAEREKEMASMKEEFTRLKEALEKSEARRKELEEKMVSLLQEKNDLQLQVQAEQDNLADAEERCDQLIKNKIQLEAKVKEMNERLEDEEEMNAELTAKKRKLEDECSELKRDIDDLELTLAKVEKEKHATENKVKNLTEEMAGLDEIIAKLTKEKKALQEAHQQALDDLQAEEDKVNTLTKAKVKLEQQVDDLEGSLEQEKKVRMDLERAKRKLEGDLKLTQESIMDLENDKQQLDERLKKKDFELNALNARIEDEQALGSQLQKKLKELQARIEELEEELEAERTARAKVEKLRSDLSRELEEISERLEEAGGATSVQIEMNKKREAEFQKMRRDLEEATLQHEATAAALRKKHADSVAELGEQIDNLQRVKQKLEKEKSEFKLELDDVTSNMEQIIKAKANLEKMCRTLEDQMNEHRSKAEETQRSVNDLTSQRAKLQTENGELSRQLDEKEALISQLTRGKLTYTQQLEDLKRQLEEEVKAKNALAHALQSARHDCDLLREQYEEETEAKAELQRVLSKANSEVAQWRTKYETDAIQRTEELEEAKKKLAQRLQEAEEAVEAVNAKCSSLEKTKHRLQNEIEDLMVDVERSNAAAAALDKKQRNFDKILAEWKQKYEESQSELESSQKEARSLSTELFKLKNAYEESLEHLETFKRENKNLQEEISDLTEQLGSSGKTIHELEKVRKQLEAEKMELQSALEEAEASLEHEEGKILRAQLEFNQIKAEIERKLAEKDEEMEQAKRNHLRVVDSLQTSLDAETRSRNEALRVKKKMEGDLNEMEIQLSHANRMAAEAQKQVKSLQSLLKDTQIQLDDAVRANDDLKENIAIVERRNNLLQAELEELRAVVEQTERSRKLAEQELIETSERVQLLHSQNTSLINQKKKMDADLSQLQTEVEEAVQECRNAEEKAKKAITDAAMMAEELKKEQDTSAHLERMKKNMEQTIKDLQHRLDEAEQIALKGGKKQLQKLEARVRELENELEAEQKRNAESVKGMRKSERRIKELTYQTEEDRKNLLRLQDLVDKLQLKVKAYKRQAEEAEEQANTNLSKFRKVQHELDEAEERADIAESQVNKLRAKSRDIGTKGLNEE

SEQ ID NO: 54722 - protein, 1940 aa, Homo sapiens
MGDSEMAVFGAAAPYLRKSEKERLEAQTRPFDLKKDVFVPDDKQEFVKAKIVSREGGKVTAETEYGKTVTVKEDQVMQQNPPKFDKIEDMAMLTFLHEPAVLYNLKDRYGSWMIYTYSGLFCVTVNPYKWLPVYTPEVVAAYRGKKRSEAPPHIFSISDNAYQYMLTDRENQSILITGESGAGKTVNTKRVIQYFAVIAAIGDRSKKDQSPGKGTLEDQIIQANPALEAFGNAKTVRNDNSSRFGKFIRIHFGATGKLASADIETYLLEKSRVIFQLKAERDYHIFYQILSNKKPELLDMLLITNNPYDYAFISQGETTVASIDDAEELMATDNAFDVLGFTSEEKNSMYKLTGAIMHFGNMKFKLKQREEQAEPDGTEEADKSAYLMGLNSADLLKGLCHPRVKVGNEYVTKGQNVQQVIYATGALAKAVYERMFNWMVTRINATLETKQPRQYFIGVLDIAGFEIFDFNSFEQLCINFTNEKLQQFFNHHMFVLEQEEYKKEGIEWTFIDFGMDLQACIDLIEKPMGIMSILEEECMFPKATDMTFKAKLFDNHLGKSANFQKPRNIKGKPEAHFSLIHYAGIVDYNIIGWLQKNKDPLNETVVGLYQKSSLKLLSTLFANYAGADAPIEKGKGKAKKGSSFQTVSALHRENLNKLMTNLRSTHPHFVRCIIPNETKSPGVMDNPLVMHQLRCNGVLEGIRICRKGFPNRILYGDFRQRYRILNPAAIPEGQFIDSRKGAEKLLSSLDIDHNQYKFGHTKVFFKAGLLGLLEEMRDERLSRIITRIQAQSRGVLARMEYKKLLERRDSLLVIQWNIRAFMGVKNWPWMKLYFKIKPLLKSAEREKEMASMKEEFTRLKEALEKSEARRKELEEKMVSLLQEKNDLQLQVQAEQDNLADAEERCDQLIKNKIQLEAKVKEMNERLEDEEEMNAELTAKKRKLEDECSELKRDIDDLELTLAKVEKEKHATENKVKNLTEEMAGLDEIIAKLTKEKKALQEAHQQALDDLQAEEDKVNTLTKAKVKLEQQVDDLEGSLEQEKKVRMDLERAKRKLEGDLKLTQESIMDLENDKQQLDERLKKKDFELNALNARIEDEQALGSQLQKKLKELQARIEELEEELEAERTARAKVEKLRSDLSRELEEISERLEEAGGATSVQIEMNKKREAEFQKMRRDLEEATLQHEATAAALRKKHADSVAELGEQIDNLQRVKQKLEKEKSEFKLELDDALLGLPSSNFLLPPPLSANLEKMCRTLEDQMNEHRSKAEETQRSVNDLTSQRAKLQTENGELSRQLDEKEALISQLTRGKLTYTQQLEDLKRQLEEEVKAKNALAHALQSARHDCDLLREQYEEETEAKAELQRVLSKANSEVAQWRTKYETDAIQRTEELEEAKKKLAQRLQEAEEAVEAVNAKCSSLEKTKHRLQNEIEDLMVDVERSNAAAAALDKKQRNFDKILAEWKQKYEESQSELESSQKEARSLSTELFKLKNAYEESLEHLETFKRENKNLQEEISDLTEQLGSSGKTIHELEKVRKQLEAEKMELQSALEEAEASLEHEEGKILRAQLEFNQIKAEIERKLAEKDEEMEQAKRNHLRVVDSLQTSLDAETRSRNEALRVKKKMEGDLNEMEIQLSHANRMAAEAQKQVKSLQSLLKDTQIQLDDAVRANDDLKENIAIVERRNNLLQAELEELRAVVEQTERSRKLAEQELIETSERVQLLHSQNTSLINQKKKMDADLSQLQTEVEEAVQECRNAEEKAKKAITDAAMMAEELKKEQDTSAHLERMKKNMEQTIKDLQHRLDEAEQIALKGGKKQLQKLEARVRELENELEAEQKRNAESVKGMRKSERRIKELTYQTEEDRKNLLRLQDLVDKLQLKVKAYKRQAEEAEEQANTNLSKFRKVQHELDEAEERADIAESQVNKLRAKSRDIGTKGLNEE

SEQ ID NO: 54723 - protein, 1937 aa, Homo sapiens
MSASSDAEMAVFGEAAPYLRKSEKERIEAQNKPFDAKTSVFVAEPKESYVKSTIQSKEGGKVTVKTEGGATLTVREDQVFPMNPPKYDKIEDMAMMTHLHEPGVLYNLKERYAAWMIYTYSGLFCVTVNPYKWLPVYKPEVVAAYRGKKRQEAPPHIFSISDNAYQFMLTDRENQSILITGESGAGKTVNTKRVIQYFATIAVTGEKKKDESGKMQGTLEDQIISANPLLEAFGNAKTVRNDNSSRFGKFIRIHFGTTGKLASADIETYLLEKSRVTFQLKAERSYHIFYQITSNKKPDLIEMLLITTNPYDYAFVSQGEITVPSIDDQEELMATDSAIDILGFTPEEKVSIYKLTGAVMHYGNMKFKQKQREEQAEPDGTEVADKAAYLQSLNSADLLKALCYPRVKVGNEYVTKGQTVQQVYNAVGALAKAVYEKMFLWMVTRINQQLDTKQPRQYFIGVLDIAGFEIFDFNSLEQLCINFTNEKLQQFFNHHMFVLEQEEYKKEGIEWTFIDFGMDLAACIELIEKPLGIFSILEEECMFPKATDTSFKNKLYDQHLGKSANFQKPKVVKGKAEAHFSLIHYAGTVDYNITGWLDKNKDPLNDTVVGLYQKSAMKTLASLFSTYASAEADSSAKKGAKKKGSSFQTVSALFRENLNKLMTNLRSTHPHFVRCIIPNETKTPGAMEHELVLHQLRCNGVLEGIRICRKGFPSRILYGDFKQRYKVLNASAIPEGQFIDSKKASEKLLASIDIDHTQYKFGHTKVFFKAGLLGLLEEMRDEKLAQIITRTQAVCRGFLMRVEYQKMLQRREALFCIQYNVRAFMNVKHWPWMKLFFKIKPLLKSAETEKEMATMKEEFQKTKDELAKSEAKRKELEEKMVTLLKEKNDLQLQVQSEADSLADAEERCEQLIKNKIQLEAKIKEVTERAEEEEEINAELTAKKRKLEDECSELKKDIDDLELTLAKVEKEKHATENKVKNLTEEMAGLDETIAKLSKEKKALQETHQQTLDDLQAEEDKVNILTKAKTKLEQQVDDLEGSLEQEKKLRMDLERAKRKLEGDLKLAQESTMDMENDKQQLDEKLEKKEFEISNLISKIEDEQAVEIQLQKKIKELQARIEELGEEIEAERASRAKAEKQRSDLSRELEEISERLEEAGGATSAQVELNKKREAEFQKLRRDLEEATLQHEAMVAALRKKHADSMAELGEQIDNLQRVKQKLEKEKSELKMETDDLSSNAEAISKAKGNLEKMCRSLEDQVSELKTKEEEQQRLINDLTAQRARLQTEAGEYSRQLDEKDALVSQLSRSKQASTQQIEELKHQLEEETKAKNALAHALQSSRHDCDLLREQYEEEQEGKAELQRALSKANSEVAQWRTKYETDAIQRTEELEEAKKKLAQRLQEAEEHVEAVNAKCASLEKTKQRLQNEVEDLMLDVERSNAACAALDKKQRNFDKVLSEWKQKYEETQAELEASQKESRSLSTELFKVKNVYEESLDQLETLRRENKNLQQEISDLTEQIAEGGKQIHELEKIKKQVEQEKCEIQAALEEAEASLEHEEGKILRIQLELNQVKSEVDRKIAEKDEEIDQLKRNHTRVVETMQSTLDAEIRSRNDALRVKKKMEGDLNEMEIQLNHANRLAAESLRNYRNTQGILKETQLHLDDALRGQEDLKEQLAIVERRANLLQAEIEELWATLEQTERSRKIAEQELLDASERVQLLHTQNTSLINTKKKLENDVSQLQSEVEEVIQESRNAEEKAKKAITDAAMMAEELKKEQDTSAHLERMKKNLEQTVKDLQHRLDEAEQLALKGGKKQIQKLEARVRELEGEVENEQKRNAEAVKGLRKHERRVKELTYQTEEDRKNVLRLQDLVDKLQAKVKSYKRQAEEAEEQSNANLSKFRKLQHELEEAEERADIAESQVNKLRVKSREVHTKISAE

SEQ ID NO: 54724 - protein, 1937 aa, Homo sapiens; identical to SEQ ID NO: 54723

SEQ ID NO: 54725 - protein, 150 aa, Homo sapiens
MSFSADQIAEFKEAFLLFDRTGDSKITLSQVGDVLRALGTNPTNAEVRKVLGNPSNEELNAKKIEFEQFLPMMQAISNNKDQATYEDFVEGLRVFDKEGNGTVMGAELRHVLATLGEKMKEEEVEALMAGQEDSNGCINYEAFVKHIMSI

SEQ ID NO: 54726 - protein, 194 aa, Homo sapiens
MAPKKDVKKPVAAAAAAPAPAPAPAPAPAPAKPKEEKIDLSAIKIEFSKEQQDEFKEAFLLFDRTGDSKITLSQVGDVLRALGTNPTNAEVRKVLGNPSNEELNAKKIEFEQFLPMMQAISNNKDQATYEDFVEGLRVFDKEGNGTVMGAELRHVLATLGEKMKEEEVEALMAGQEDSNGCINYEAFVKHIMSI

SEQ ID NO: 54727 - protein, 172 aa, Homo sapiens; identical to SEQ ID NO: 54619

SEQ ID NO: 54728 - protein, 172 aa, Homo sapiens; identical to SEQ ID NO: 54619

SEQ ID NO: 54729 - protein, 172 aa, Homo sapiens; identical to SEQ ID NO: 54619

SEQ ID NO: 54730 - protein, 172 aa, Homo sapiens; identical to SEQ ID NO: 54619

SEQ ID NO: 54731 - protein, 166 aa, Homo sapiens
MAPKKAKKRAGGANSNVFSMFEQTQIQEFKEAFTIMDQNRDGFIDKNDLRDTFAALGRVNVKNEEIDEMIKEAPGPINFTVFLTMFGEKLKGADPEETILNAFKVFDPEGKGVLKADYVREMLTTQAERFSKEEVDQMFAAFPPDVTGNLDYKNLVHIITHGEEKD

SEQ ID NO: 54732 - protein, 195 aa, Homo sapiens
MAPKKPEPKKDDAKAAPKAAPAPAPPPEPERPKEVEFDASKIKIEFTPEQIEEFKEAFMLFDRTPKCEMKITYGQCGDVLRALGQNPTQAEVLRVLGKPRQEELNTKMMDFETFLPMLQHISKNKDTGTYEDFVEGLRVFDKEGNGTVMGAELRHVLATLGERLTEDEVEKLMAGQEDSNGCINYEAFVKHIMSS

SEQ ID NO: 54733 - protein, 195 aa, Homo sapiens; identical to SEQ ID NO: 54732

SEQ ID NO: 54734 - protein, 46 aa, Homo sapiens
MAPKKPEPKKDDAKAAPKAAPAPAPPPEPERPKEVEFDASKIKIEF

SEQ ID NO: 54735 - protein, 197 aa, Homo sapiens
MAPKKPEPKKEAAKPAPAPAPAPAPAPAPAPEAPKEPAFDPKSVKIDFTADQIEEFKEAFSLFDRTPTGEMKITYGQCGDVLRALGQNPTNAEVLRVLGKPKPEEMNVKMLDFETFLPILQHISRNKEQGTYEDFVEGLRVFDKESNGTVMGAELRHVLATLGEKMTEAEVEQLLAGQEDANGCINYEAFVKHIMSG

SEQ ID NO: 54736 - protein, 197 aa, Homo sapiens; identical to SEQ ID NO: 54735

SEQ ID NO: 54737 - protein, 87 aa, Homo sapiens
PEAPKEPAFDPKSVKVIGCPCPRSQSHGAVIDFTADQIEEFKEAFMGAELRHVLATLVIKSAPPPKPTAGEKMTEAEVEQLLAGQED

SEQ ID NO: 54738 - protein, 173 aa, Homo sapiens
MASRKTKKKEGGALRAQRASSNVFSNFEQTQIQEFKEAFTLMDQNRDGFIDKEDLKDTYASLGKTNVKDDELDAMLKEASGPINFTMFLNLFGEKLSGTDAEETILNAFKMLDPDGKGKINKEYIKRLLMSQADKMTAEEVDQMFQFASIDVAGNLDYKALSYVITHGEEKEE

SEQ ID NO: 54739 - protein, 132 aa, Homo sapiens
MDQNRDGFIDKEDLKDTYASLGKTNVKDDELDAMLKEASGPINFTMFLNLFGEKLSGTDAEETILNAFKMLDPDGKGKINKEYIKRLLMSQADKMTAEEVDQMFQFASIDVAGNLDYKALSYVITHGEEKEE

SEQ ID NO: 54740 - protein, 132 aa, Homo sapiens; identical to SEQ ID NO: 54739

SEQ ID NO: 54741 - protein, 132 aa, Homo sapiens; identical to SEQ ID NO: 54739

SEQ ID NO: 54742 - protein, 151 aa, Homo sapiens
MCDFTEDQTAEFKEAFQLFDRTGDGKILYSQCGDVMRALGQNPTNAEVLKVLGNPKSDEMNVKVLDFEHFLPMLQTVAKNKDQGTYEDYVEGLRVFDKEGNGTVMGAEIRHVLVTLGEKMTEEEVEMLVAGHEDSNGCINYEELVRMVLNG

SEQ ID NO: 54743 - protein, 151 aa, Homo sapiens
MCDFTEDQTAEFKEAFQLFDRTGDGKILYSQCGDVMRALGQNPTNAEVLKVLGNPKSDEMNVKVLDFEHFLPMLQTVAKNKDQGTYEDYVEGLRVFDKEGNGTVMGAEIRHVLVTLGEKMTEEEVEMLVAGHEDSNGCINYEAFVRHILSG

SEQ ID NO: 54744 - protein, 151 aa, Homo sapiens; identical to SEQ ID NO: 54743

SEQ ID NO: 54745 - protein, 208 aa, Homo sapiens
MPPKKDVPVKKPAGPSISKPAAKPAAAGAPPAKTKAEPAVPQAPQKTQEPPVDLSKVVIEFNKDQLEEFKEAFELFDRVGDGKILYSQCGDVMRALGQNPTNAEVLKVLGNPKSDELKSRRVDFETFLPMLQAVAKNRGQGTYEDYLEGFRVFDKEGNGKVMGAELRHVLTTLGEKMTEEEVETVLAGHEDSNGCINYEAFLKHILSV

SEQ ID NO: 54746 - protein, 208 aa, Homo sapiens; identical to SEQ ID NO: 54745

SEQ ID NO: 54747 - protein, 29 aa, Homo sapiens
MPPKKDVPVKKPAGPSISKPAAKPAAAGA

SEQ ID NO: 54748 - protein, 208 aa, Homo sapiens; identical to SEQ ID NO: 54745

SEQ ID NO: 54749 - protein, 175 aa, Homo sapiens
MASRKAGTRGKVAATKQAQRGSSNVFSMFEQAQIQEFKEAFSCIDQNRDGIICKADLRETYSQLGKVSVPEEELDAMLQEGKGPINFTVFLTLFGEKLNGTDPEEAILSAFRMFDPSGKGVVNKDEFKQLLLTQADKFSPAEVEQMFALTPMDLAGNIDYKSLCYIITHGDEKEE

SEQ ID NO: 54750 - protein, 148 aa, Homo sapiens
MFEQAQIQEFKEAFSCIDQNRDGIICKADLRETYSQLGKVSVPEEELDAMLQEGKGPINFTVFLTLFGEKLNGTDPEEAILSAFRMFDPSGKGVVNKDEFKQLLLTQADKFSPAEVEQMFALTPMDLAGNIDYKSLCYIITHGDEKEE

SEQ ID NO: 54751 - protein, 375 aa, Homo sapiens
MQKLQLCVYIYLFMLIVAGPVDLNENSEQKENVEKEGLCNACTWRQNTKSSRIEAIKIQILSKLRLETAPNISKDVIRQLLPKAPPLRELIDQYDVQRDDSSDGSLEDDDYHATTETIITMPTESDFLMQVDGKPKCCFFKFSSKIQYNKVVKAQLWIYLRPVETPTTVFVQILRLIKPMKDGTRYTGIRSLKLDMNPGTGIWQSIDVKTVLQNWLKQPESNLGIEIKALDENGHDLAVTFPGPGEDGLNPFLEVKVTDTPKRSRRDFGLDCDEHSTESRCCRYPLTVDFEAFGWDWIIAPKRYKANYCSGECEFVFLQKYPHTHLVHQANPRGSAGPCCTPTKMSPINMLYFNGKEQIIYGKIPAMVVDRCGCS

SEQ ID NO: 54752 - protein, 498 aa, Homo sapiens
MFNYERPKHFIQSQNPCGSRLQPPGPETSSFSSQTKQSSIIIQPRQCTEQRFSASSTLSSHITMSSSAFPASPKQHAGSNPGQRVTTTYNQSPASFLSSILPSQPDYNSSKIPSAMDSNYQQSSAGQPINAKPSQTANAKPIPRTPDHEIQGSKEALIQDLERKLKCKDTLLHNGNQRLTYEEKMARRLLGPQNAAAVFQAQDDSGAQDSQQHNSEHARLQVPTSQVRSRSTSRGDVNDQDAIQEKFYPPRFIQVPENMSIDEGRFCRMDFKVSGLPAPDVSWYLNGRTVQSDDLHKMIVSEKGLHSLIFEVVRASDAGAYACVAKNRAGEATFTVQLDVLAKEHKRAPMFIYKPQSKKVLEGDSVKLECQISAIPPPKLFWKRNNEMVQFNTDRISLYQDNTGRVTLLIKDVNKKDAGWYTVSAVNEAGVTTCNTRLDVTARPNQTLPAPKQLRVRPTFSKYLALNGKGLNVKQAFNPEGEFQRLAAQSGLYESEEL

SEQ ID NO: 54753 - protein, 314 aa, Homo sapiens
MARRLLGPQNAAAVFQAQDDSGAQDSQQHNSEHARLQVPTSQVRSRSTSRGDVNDQDAIQEKFYPPRFIQVPENMSIDEGRFCRMDFKVSGLPAPDVSWYLNGRTVQSDDLHKMIVSEKGLHSLIFEVVRASDAGAYACVAKNRAGEATFTVQLDVLAKEHKRAPMFIYKPQSKKVLEGDSVKLECQISAIPPPKLFWKRNNEMVQFNTDRISLYQDNTGRVTLLIKDVNKKDAGWYTVSAVNEAGVTTCNTRLDVTARPNQTLPAPKQLRVRPTFSKYLALNGKGLNVKQAFNPEGEFQRLAAQSGLYESEEL

SEQ ID NO: 54754 - protein, 118 aa, Homo sapiens
MCDKEFMWALKNGDLDEVKDYVAKGEDVNRTLEGGRKPLHYAADCGQLEILEFLLLKGADINAPDKHHITPLLSAVYEGHVSCVKLLLSKGADKTVKGPDGLTAFEATDNQAIKALLQ

SEQ ID NO: 54755 - protein, 603 aa, Homo sapiens
MASASTSKYNSHSLENESIKRTSRDGVNRDLTEAVPRLPGETLITDKEVIYICPFNGPIKGRVYITNYRLYLRSLETDSSLILDVPLGVISRIEKMGGATSRGENSYGLDITCKDMRNLRFALKQEGHSRRDMFEILTRYAFPLAHSLPLFAFLNEEKFNVDGWTVYNPVEEYRRQGLPNHHWRITFINKCYELCDTYPALLVVPYRASDDDLRRVATFRSRNRIPVLSWIHPENKTVIVRCSQPLVGMSGKRNKDDEKYLDVIRETNKQISKLTIYDARPSVNAVANKATGGGYESDDAYHNAELFFLDIHNIHVMRESLKKVKDIVYPNVEESHWLSSLESTHWLEHIKLVLTGAIQVADKVSSGKSSVLVHCSDGWDRTAQLTSLAMLMLDSFYRSIEGFEILVQKEWISFGHKFASRIGHGDKNHTDADRSPIFLQFIDCVWQMSKQFPTAFEFNEQFLIIILDHLYSCRFGTFLFNCESARERQKVTERTVSLWSLINSNKEKFKNPFYTKEINRVLYPVASMRHLELWVNYYIRWNPRIKQQQPNPVEQRYMELLALRDEYIKRLEELQLANSAKLSDPPTSPSSPSQMMPHVQTHF

SEQ ID NO: 54756 - protein, 566 aa, Homo sapiens
MASASTSKYNSHSLENESIKRTSRDGVNRDLTEAVPRLPGETLITDKEVIYICPFNGPIKGRVYITNYRLYLRSLETDMRNLRFALKQEGHSRRDMFEILTRYAFPLAHSLPLFAFLNEEKFNVDGWTVYNPVEEYRRQGLPNHHWRITFINKCYELCDTYPALLVVPYRASDDDLRRVATFRSRNRIPVLSWIHPENKTVIVRCSQPLVGMSGKRNKDDEKYLDVIRETNKQISKLTIYDARPSVNAVANKATGGGYESDDAYHNAELFFLDIHNIHVMRESLKKVKDIVYPNVEESHWLSSLESTHWLEHIKLVLTGAIQVADKVSSGKSSVLVHCSDGWDRTAQLTSLAMLMLDSFYRSIEGFEILVQKEWISFGHKFASRIGHGDKNHTDADRSPIFLQFIDCVWQMSKQFPTAFEFNEQFLIIILDHLYSCRFGTFLFNCESARERQKVTERTVSLWSLINSNKEKFKNPFYTKEINRVLYPVASMRHLELWVNYYIRWNPRIKQQQPNPVEQRYMELLALRDEYIKRLEELQLANSAKLSDPPTSPSSPSQMMPHVQTHF

SEQ ID NO: 54757 - protein, 416 aa, Homo sapiens
MGGATSRGENSYGLDITCKDMRNLRFALKQEGHSRRDMFEILTRYAFPLAHSLPLFAFLNEEKFNVDGWTVYNPVEEYRRQGLPNHHWRITFINKCYELCDTYPALLVVPYRASDDDLRRVATFRSRNRIPVLSWIHPENKTVIVRCSQPLVGMSGKRNKDDEKYLDVIRETNKQISKLTIYDARPSVNAVANKATGGGYESDDAYHNAELFFLDIHNIHVMRESLKKVKDIVYPNVEESHWLSSLESTHWLEHIKLVLTGAIQVADKVSSGKSSVLVHCSDGWDRTAQLTSLAMLMLDSFYRSIEGFEILVQKEWISFGHKFASRIGHGDKNHTDADRSPIFLQFIDCVWQMSKQFPTAFEFNEQFLIIILDHLYSCRFGTFLFNCESARERQALHFLSLSLCRRLQKGLFLYGH

SEQ ID NO: 54758 - protein, 488 aa, Homo sapiens
MRNLRFALKQEGHSRRDMFEILTRYAFPLAHSLPLFAFLNEEKFNVDGWTVYNPVEEYRRQGLPNHHWRITFINKCYELCDTYPALLVVPYRASDDDLRRVATFRSRNRIPVLSWIHPENKTVIVRCSQPLVGMSGKRNKDDEKYLDVIRETNKQISKLTIYDARPSVNAVANKATGGGYESDDAYHNAELFFLDIHNIHVMRESLKKVKDIVYPNVEESHWLSSLESTHWLEHIKLVLTGAIQVADKVSSGKSSVLVHCSDGWDRTAQLTSLAMLMLDSFYRSIEGFEILVQKEWISFGHKFASRIGHGDKNHTDADRSPIFLQFIDCVWQMSKQFPTAFEFNEQFLIIILDHLYSCRFGTFLFNCESARERQKVTERTVSLWSLINSNKEKFKNPFYTKEINRVLYPVASMRHLELWVNYYIRWNPRIKQQQPNPVEQRYMELLALRDEYIKRLEELQLANSAKLSDPPTSPSSPSQMMPHVQTHF

SEQ ID NO: 54759 - protein, 665 aa, Homo sapiens
MDRPAAAAAAGCEGGGGPNPGPAGGRRPPRAAGGATAGSRQPSVETLDSPTGSHVEWCKQLIAATISSQISGSVTSENVSRDYKALRDGNKLAQMEEAPLFPGESIKAIVKDVMYICPFMGAVSGTLTVTDFKLYFKNVERDPHFILDVPLGVISRVEKIGAQSHGDNSCGIEIVCKDMRNLRLAYKQEEQSKLGIFENLNKHAFPLSNGQALFAFSYKEKFPINGWKVYDPVSEYKRQGLPNESWKISKINSNYEFCDTYPAIIVVPTSVKDDDLSKVAAFRAKGRVPVLSWIHPESQATITRCSQPLVGPNDKRCKEDEKYLQTIMDANAQSHKLIIFDARQNSVADTNKTKGGGYESESAYPNAELVFLEIHNIHVMRESLRKLKEIVYPSIDEARWLSNVDGTHWLEYIRMLLAGAVRIADKIESGKTSVVVHCSDGWDRTAQLTSLAMLMLDSYYRTIKGFETLVEKEWISFGHRFALRVGHGNDNHADADRSPIFLQFVDCVWQMTRQFPSAFEFNELFLITILDHLYSCLFGTFLCNCEQQRFKEDVYTKTISLWSYINSQLDEFSNPFFVNYENHVLYPVASLSHLELWVNYYVRWNPRMRPQMPIHQNLKELLAVRAELQKRVEGLQREVATRAVSSSSERGSSPSHSATSVHTSV

SEQ ID NO: 54760 - protein, 87 aa, Homo sapiens
MEEAPLFPGESIKAIVKDVMYICPFMGAVSGTLTVTDFKLYFKNVERDPHFILDVPLGVISRVEKIGAQSHGDNSCGIEIVCKDMRN

SEQ ID NO: 54761 - protein, 87 aa, Homo sapiens; identical to SEQ ID NO: 54760

SEQ ID NO: 54762 - protein, 90 aa, Homo sapiens
MEEAPLFPGESIKAIVKDVMYICPFMGAVSGTLTVTDFKLYFKNVERDPHFILDVPLGVISRVEKIGAQSHGDNSCGIEIVCKDMRNLRL

SEQ ID NO: 54763 - protein, 673 aa, Homo sapiens
MDRPAAAAAAGCEGGGGPNPGPAGGRRPPRAAGGATAGSRQPSVETLDSPTGSHVEWCKQLIAATISSQISGSVTSENVSRDYKVFRRPDLRALRDGNKLAQMEEAPLFPGESIKAIVKDVMYICPFMGAVSGTLTVTDFKLYFKNVERDPHFILDVPLGVISRVEKIGAQSHGDNSCGIEIVCKDMRNLRLAYKQEEQSKLGIFENLNKHAFPLSNGQALFAFSYKEKFPINGWKVYDPVSEYKRQGLPNESWKISKINSNYEFCDTYPAIIVVPTSVKDDDLSKVAAFRAKGRVPVLSWIHPESQATITRCSQPLVGPNDKRCKEDEKYLQTIMDANAQSHKLIIFDARQNSVADTNKTKGGGYESESAYPNAELVFLEIHNIHVMRESLRKLKEIVYPSIDEARWLSNVDGTHWLEYIRMLLAGAVRIADKIESGKTSVVVHCSDGWDRTAQLTSLAMLMLDSYYRTIKGFETLVEKEWISFGHRFALRVGHGNDNHADADRSPIFLQFVDCVWQMTRQFPSAFEFNELFLITILDHLYSCLFGTFLCNCEQQRFKEDVYTKTISLWSYINSQLDEFSNPFFVNYENHVLYPVASLSHLELWVNYYVRWNPRMRPQMPIHQNLKELLAVRAELQKRVEGLQREVATRAVSSSSERGSSPSHSATSVHTSV

SEQ ID NO: 54764 - protein, 568 aa, Homo sapiens
MDRPAAAAAAGCEGGGGPNPGPAGGRRPPRAAGGATAGSRQPSVETLDSPTGSHVEWCKQLIAATISSQISGSVTSENVSRDYKALRDGNKLAQMEEAPLFPGESIKAIVKDVMYICPFMGAVSGTLTVTDFKLYFKNVERDPHFILDVPLGVISRVEKIGAQSHGDNSCGIEIVCKDMRNLRLAYKQEEQSKLGIFENLNKHAFPLSNGQALFAFSYKEKFPINGWKVYDPVSEYKRQGLPNESWKISKINSNYEFCDTYPAIIVVPTSVKDDDLSKVAAFRAKGRVPVLSWIHPESQATITRCSQPLVGPNDKRCKEDEKYLQTIMDANAQSHKLIIFDARQNSVADTNKTKGGGYESESAYPNAELVFLEIHNIHVMRESLRKLKEIVYPSIDEARWLSNVDGTHWLEYIRMLLAGAVRIADKIESGKTSVVVHCSDGWDRTAQLTSLAMLMLDSYYRTIKGFETLVEKEWISFGHRFALRVGHGNDNHADADRSPIFLQFVDCVWQMTRQFPSAFEFNELFLITILDHLYSCLFGTFLCNCEQQRFKEAWGAGTQRARGSLRSR

SEQ ID NO: 54765 - protein, 147 aa, Homo sapiens
MEEAPLFPGESIKAIVKDVMYICPFMGAVSGTLTVTDFKLYFKNVERDPHFILDVPLGVISRVEKIGAQSHGDNSCGIEIVCKDMRNLRLAYKQEEQSKLGIFENLNKHAFPLSNGQALFAFSYKEKFPINGWKVYDPVSEYKRQGL

SEQ ID NO: 54766 - protein, 393 aa, Homo sapiens
MYICPFMGAVSGTLTVTDFKLYFKNVERDPHFILDVPLGVISRVEKIGAQSHGDNSCGIEIVCKDMRNLRLAYKQEEQSKLGIFENLNKHAFPLSNGQALFAFSYKEKFPINGWKVYDPVSEYKRQGLPNESWKISKINSNYEFCDTYPAIIVVPTSVKDDDLSKVAAFRAKGRVPVLSWIHPESQATITRCSQPLVGPNDKRCKEDEKYLQTIMDANAQSHKLIIFDARQNSVADTNKMLLAGAVRIADKIESGKTSVVVHCSDGWDRTAQLTSLAMLMLDSYYRTIKGFETLVEKEWISFGHRFALRVGHGNDNHADADRSPIFLQFVDCVWQMTRQFPSAFEFNELFLITILDHLYSCLFGTFLCNCEQQRFKEAWGAGTQRARGSLRSR

SEQ ID NO: 54767 - protein, 571 aa, Homo sapiens
MEEAPLFPGESIKAIVKDVMYICPFMGAVSGTLTVTDFKLYFKNVERDPHFILDVPLGVISRVEKIGAQSHGDNSCGIEIVCKDMRNLRLAYKQEEQSKLGIFENLNKHAFPLSNGQALFAFSYKEKFPINGWKVYDPVSEYKRQGLPNESWKISKINSNYEFCDTYPAIIVVPTSVKDDDLSKVAAFRAKGRVPVLSWIHPESQATITRCSQPLVGPNDKRCKEDEKYLQTIMDANAQSHKLIIFDARQNSVADTNKTKGGGYESESAYPNAELVFLEIHNIHVMRESLRKLKEIVYPSIDEARWLSNVDGTHWLEYIRMLLAGAVRIADKIESGKTSVVVHCSDGWDRTAQLTSLAMLMLDSYYRTIKGFETLVEKEWISFGHRFALRVGHGNDNHADADRSPIFLQFVDCVWQMTRQFPSAFEFNELFLITILDHLYSCLFGTFLCNCEQQRFKEDVYTKTISLWSYINSQLDEFSNPFFVNYENHVLYPVASLSHLELWVNYYVRWNPRMRPQMPIHQNLKELLAVRAELQKRVEGLQREVATRAVSSSSERGSSPSHSATSVHTSV

SEQ ID NO: 54768 - protein, 363 aa, Homo sapiens
MDRPAAAAAAGCEGGGGPNPGPAGGRRPPRAAGGATAGSRQPSVETLDSPTGSHVEWCKQLIAATISSQISGSVTSENVSRDYKALRDGNKLAQMEEAPLFPGESIKAIVKDVMYICPFMGAVSGTLTVTDFKLYFKNVERDPHFILDVPLGVISRVEKIGAQSHGDNSCGIEIVCKDMRNLRLAYKQEEQSKLGIFENLNKHAFPLSNGQALFAFSYKEKFPINGWKVYDPVSEYKRQGLPNESWKISKINSNYEFCDTYPAIIVVPTSVKDDDLSKVAAFRAKGRVPVLSWIHPESQATITRCSQPLVGPNDKRCKEDEKYLQTIMDANAQSHKLIIFDARQNSVADTNKLWYQDTASLME

SEQ ID NO: 54769 - protein, 665 aa, Homo sapiens; identical to SEQ ID NO: 54759

SEQ ID NO: 54770 - protein, 637 aa, Homo sapiens
MLGKGVVGGGGGTKAPKPSFVSYVRPEEIHTNEKEVTEKEVTLHLLPGEQLLCEASTVLKYVQEDSCQHGVYGRLVCTDFKIAFLGDDESALDNDETQFKNKVIGENDITLHCVDQIYGVFDEKKKTLFGQLKKYPEKLIIHCKDLRVFQFCLRYTKEEEVKRIVSGIIHHTQAPKLLKRLFLFSYATAAQNNTVTDPKNHTVMFDTLKDWCWELERTKGNMKYKAVSVNEGYKVCERLPAYFVVPTPLPEENVQRFQGHGIPIWCWSCHNGSALLKMSALPKEQDDGILQIQKSFLDGIYKTIHRPPYEIVKTEDLSSNFLSLQEIQTAYSKFKQLFLIDNSTEFWDTDIKWFSLLESSSWLDIIRRCLKKAIEITECMEAQNMNVLLLEENASDLCCLISSLVQLMMDPHCRTRIGFQSLIQKEWVMGGHCFLDRCNHLRQNDKEEHQRQLSLPLTQSKSSPKRGFFREETDHLIKNLLGKRISKLINSSDELQDNFREFYDSWHSKSTDYHGLLLPHIEGPEIKVWAQRYLRWIPEAQILGGGQVATLSKLLEMMEEVQSLQEKIDERHHSQQAPQAEAPCLLRNSARLSSLFPFALLQRHSSKPVLPTSGWKALGDEDDLAKREDEFVDLGDV

SEQ ID NO: 54771 - protein, 693 aa, Homo sapiens
MLGKGVVGGGGGTKAPKPSFVSYVRPEEIHTNEKEVTEKEVTLHLLPGEQLLCEASTVLKYVQEDSCQHGVYGRLVCTDFKIAFLGDDESALDNDETQFKNKVIGENDITLHCVDQIYGVFDEKKKTLFGQLKKYPEKLIIHCKDLRVFQFCLRYTKEEEVKRIVSGIIHHTQAPKLLKRLFLFSYATAAQNNTVTDPKNHTVMFDTLKDWCWELERTKGNMKYKAVSVNEGYKVCERLPAYFVVPTPLPEENVQRFQGHGIPIWCWSCHNGSALLKMSALPKEQDDGILQIQKSFLDGIYKTIHRPPYEIVKTEDLSSNFLSLQEIQTAYSKFKQLFLIDNSTEFWDTDIKWFSLLESSSWLDIIRRCLKKAIEITECMEAQNMNVLLLEENASDLCCLISSLVQLMMDPHCRTRIGFQSLIQKEWVMGGHCFLDRCNHLRQNDKEEVPVFLLFLDCVWQLVHQHPPAFEFTETYLTVLSDSLYIPIFSTFFFNSPHQKDTNMHQRQLSLPLTQSKSSPKRGFFREETDHLIKNLLGKRISKLINSSDELQDNFREFYDSWHSKSTDYHGLLLPHIEGPEIKVWAQRYLRWIPEAQILGGGQVATLSKLLEMMEEVQSLQEKIDERHHSQQAPQAEAPCLLRNSARLSSLFPFALLQRHSSKPVLPTSGWKALGDEDDLAKREDEFVDLGDV

SEQ ID NO: 54772 - protein, 747 aa, Homo sapiens
MLGKGVVGGGGGTKAPKPSFVSYVRPEEIHTNEKEVTEKEVTLHLLPGEQLLCEASTVLKYVQEDSCQHGVYGRLVCTDFKIAFLGDDESALDNDETQFKNKVIGENDITLHCVDQIYGVFDEKKKTLFGQLKKYPEKLIIHCKDLRVFQFCLRYTKEEEVKRIVSGIIHHTQAPKLLKRLFLFSYATAAQNNTVTDPKNHTVMFDTLKDWCWELERTKGNMKYKAVSVNEGYKVCERLPAYFVVPTPLPEENVQRFQGHGIPIWCWSCHNGSALLKMSALPKEQDDGILQIQKSFLDGIYKTIHRPPYEIVKTEDLSSNFLSLQEIQTAYSKFKQLFLIDNSTEFWDTDIKWFSLLESSSWLDIIRRCLKKAIEITECMEAQNMNVLLLEENASDLCCLISSLVQLMMDPHCRTRIGFQSLIQKEWVMGGHCFLDRCNHLRQNDKEEVPVFLLFLDCVWQLVHQHPPAFEFTETYLTVLSDSLYIPIFSTFFFNSPHQKDTNMGREGQDTQSKPLNLLTVWDWSVQFEPKAQTLLKNPLYVEKPKLDKGQRKGMRFKHQRQLSLPLTQSKSSPKRGFFREETDHLIKNLLGKRISKLINSSDELQDNFREFYDSWHSKSTDYHGLLLPHIEGPEIKVWAQRYLRWIPEAQILGGGQVATLSKLLEMMEEVQSLQEKIDERHHSQQAPQAEAPCLLRNSARLSSLFPFALLQRHSSKPVLPTSGWKALGDEDDLAKREDEFVDLGDV

SEQ ID NO: 54773 - protein, 650 aa, Homo sapiens
MAGARAAAAAASAGSSASSGNQPPQELGLGELLEEFSRTQYRAKDGSGTGGSKVERIEKRCLELFGRDYCFSVIPNTNGDICGHYPRHIVFLEYESSEKEKDTFESTVQVSKLQDLIHRSKMARCRGRFVCPVILFKGKHICRSATLAGWGELYGRSGYNYFFSGGADDAWADVEDVTEEDCALRSGDTHLFDKVRGYDIKLLRYLSVKYICDLMVENKKVKFGMNVTSSEKVDKAQRYADFTLLSIPYPGCEFFKEYKDRDYMAEGLIFNWKQDYVDAPLSIPDFLTHSLNIDWSQYQCWDLVQQTQNYLKLLLSLVNSDDDSGLLVHCISGWDRTPLFISLLRLSLWADGLIHTSLKPTEILYLTVAYDWFLFGHMLVDRLSKGEEIFFFCFNFLKHITSEEFSALKTQRRKSLPARDGGFTLEDICMLRRKDRGSTTSLGSDFSLVMESSPGATGSFTYEAVELVPAGAPTQAAWRKSHSSSPQSVLWNRPQPSEDRLPSQQGLAEARSSSSSSSNHSDNFFRMGSSPLEVPKPRSVDHPLPGSSLSTDYGSWQMVTGCGSIQERAVLHTDSSLPFSFPDELPNSCLLAALSDRETRLQEVRSAFLAAYSSTVGLRAVAPSPSGAIGGLLEQFARGVGLRSISSNAL

SEQ ID NO: 54774 - protein, 538 aa, Homo sapiens
MAGARAAAAAASAGSSASSGNQPPQELGLGELLEEFSRTQYRAKDGSGTGGSKVERIEKRCLELFGRDYCFSVIPNTNGDICGHYPRHIVFLEYESSEKEKDTFESTVQVSKLQDLIHRSKMARCRGRFVCPVILFKGKHICRSATLAGWGELYGRSGYNYFFSGGADDAWADVEDVTEEDCALRSGDTHLFDKVRGYDIKLLRYLSVKYICDLMVENKKVKFGMNVTSSEKVDKAQRYADFTLLSIPYPGCEFFKEYKDRDYMAEGLIFNWKQDYVDAPLSIPDFLTHSLNIDWSQYQCWDLVQQTQNYLKLLLSLVNSDDDSGLLVHCISGWDRTPLFISLLRLSLWADGLIHTSLKPTEILYLTVAYDWFLFGHMLVDRLSKGEEIFFFCFNFLKHITSEEFSALKTQRRKSLPARDGGFTLEDICMLRRKDRGSTTSLGSDFSLVMESSPGATGSFTYEAVELVPAGAPTQAAWLAALSDRETRLQEVRSAFLAAYSSTVGLRAVAPSPSGAIGGLLEQFARGVGLRSISSNAL

SEQ ID NO: 54775 - protein, 598 aa, Homo sapiens
MAGARAAAAAASAGSSASSGNQPPQELGLGELLEEFSRTQYRAKDGSGTGGSKVERIEKRCLELFGRDYCFSVIPNTNGDICGHYPRHIVFLEYESSEKEKDTFESTVQVSKLQDLIHRSKMARCRGRFVCPVILFKGKHICRSATLAGWGELYGRSGYNYFFSGGADDAWADVEDVTEEDCALRSGDTHLFDKVRGYDIKLLRYLSVKYICDLMVENKKVKFGMNVTSSEKVDKAQRYADFTLLSIPYPGCEFFKEYKDRDYMAEGLIFNWKQDYVDAPLSIPDFLTHSLNIDWSQYQCWDLVQQTQNYLKLLLSLVNSDDDSGLLVHCISGWDRTPLFISLLRLSLWADGLIHTSLKPTEILYLTVAYDWFLFGHMLVDRLSKGEEIFFFCFNFLKHITSEEFSALKTQRRKSLPARDGGFTLEDICMLRRKDRGSTTSLGSDFSLVMESSPGATGSFTYEAVELVPAGAPTQAAWRKSHSSSPQSVLWNRPQPSEDRLPSQQGLAEARSSSSSSSNHSDNFFRMGSSPLEVPKPRLAALSDRETRLQEVRSAFLAAYSSTVGLRAVAPSPSGAIGGLLEQFARGVGLRSISSNAL

SEQ ID NO: 54776 - protein, 520 aa, Homo sapiens
MAGARAAAAAASAGSSASSGNQPPQELGLGELLEEFSRTQYRAKDGSGTGGSKVERIEKRCLELFGRDYCFSVIPNTNGDICGHYPRHIVFLEYESSEKEKDTFESTVQVSKLQDLIHRSKMARCRGRFVCPVILFKGKHICRSATLAGWGELYGRSGYNYFFSGGADDAWADVEDVTEEDCALRSGDTHLFDKVRGYDIKLLRYLSVKYICDLMVENKKVKFGMNVTSSEKVDKAQRYADFTLLSIPYPGCEFFKEYKDRDYMAEGLIFNWKQDYVDAPLSIPDFLTHSLNIDWSQYQCWDLVQQTQNYLKLLLSLVNSDDDSGLLVHCISGWDRTPLFISLLRLSLWADGLIHTSLKPTEILYLTVAYDWFLFGHMLVDRLSKGEEIFFFCFNFLKHITSEEFSALKTQRRKSLPARDGGFTLEDICMLRRKDRGSTTSLGSDFSLVMESSPGATGSFTYERGAGPSRSANSGSLEEEPLILSTECPLEPATTLRGPLAFPAGAGGSQVFQLLFLKPF

SEQ ID NO: 54777 - protein, 643 aa, Homo sapiens
MEKSSSCESLGSQPAAARPPSVDSLSSASTSHSENSVHTKSASVVSSDSISTSADNFSPDLRVLRESNKLAEMEEPPLLPGENIKDMAKDVTYICPFTGAVRGTLTVTNYRLYFKSMERDPPFVLDASLGVINRVEKIGGASSRGENSYGLETVCKDIRNLRFAHKPEGRTRRSIFENLMKYAFPVSNNLPLFAFEYKEVFPENGWKLYDPLLEYRRQGIPNESWRITKINERYELCDTYPALLVVPANIPDEELKRVASFRSRGRIPVLSWIHPESQATITRCSQPMVGVSGKRSKEDEKYLQAIMDSNAQSHKIFIFDARPSVNAVANKAKGGGYESEDAYQNAELVFLDIHNIHVMRESLRKLKEIVYPNIEETHWLSNLESTHWLEHIKLILAGALRIADKVESGKTSVVVHCSDGWDRTAQLTSLAMLMLDGYYRTIRGFEVLVEKEWLSFGHRFQLRVGHGDKNHADADRSPVFLQFIDCVWQMTRQFPTAFEFNEYFLITILDHLYSCLFGTFLCNSEQQRGKENLPKRTVSLWSYINSQLEDFTNPLYGSYSNHVLYPVASMRHLELWVGYYIRWNPRMKPQEPIHNRYKELLAKRAELQKKVEELQREISNRSTSSSERASSPAQCVTPVQTVV

SEQ ID NO: 54778 - protein, 571 aa, Homo sapiens
MEEPPLLPGENIKDMAKDVTYICPFTGAVRGTLTVTNYRLYFKSMERDPPFVLDASLGVINRVEKIGGASSRGENSYGLETVCKDIRNLRFAHKPEGRTRRSIFENLMKYAFPVSNNLPLFAFEYKEVFPENGWKLYDPLLEYRRQGIPNESWRITKINERYELCDTYPALLVVPANIPDEELKRVASFRSRGRIPVLSWIHPESQATITRCSQPMVGVSGKRSKEDEKYLQAIMDSNAQSHKIFIFDARPSVNAVANKAKGGGYESEDAYQNAELVFLDIHNIHVMRESLRKLKEIVYPNIEETHWLSNLESTHWLEHIKLILAGALRIADKVESGKTSVVVHCSDGWDRTAQLTSLAMLMLDGYYRTIRGFEVLVEKEWLSFGHRFQLRVGHGDKNHADADRSPVFLQFIDCVWQMTRQFPTAFEFNEYFLITILDHLYSCLFGTFLCNSEQQRGKENLPKRTVSLWSYINSQLEDFTNPLYGSYSNHVLYPVASMRHLELWVGYYIRWNPRMKPQEPIHNRYKELLAKRAELQKKVEELQREISNRSTSSSERASSPAQCVTPVQTVV

SEQ ID NO: 54779 - protein, 571 aa, Homo sapiens; identical to SEQ ID NO: 54778

SEQ ID NO: 54780 - protein, 571 aa, Homo sapiens; identical to SEQ ID NO: 54778

SEQ ID NO: 54781 - protein, 326 aa, Homo sapiens
MLAVALTILSASTSHSENSVHTKSASVVSSDSISTSADNFSPDLRVLRESNKLAEMEEPPLLPGENIKDMAKDVTYICPFTGAVRGTLTVTNYRLYFKSMERDPPFVLDASLGVINRVEKIGGASSRGENSYGLETVCKDIRNLRFAHKPEGRTRRSIFENLMKYAFPVSNNLPLFAFEYKEVFPENGWKLYDPLLEYRRQGIPNESWRITKINERYELCDTYPALLVVPANIPDEELKRVASFRSRGRIPVLSWIHPESQATITRCSQPMVGVSGKRSKEDEKYLQAIMDSNAQSHKIFIFDARPSVNAVANKAKGGGYESEDAY

SEQ ID NO: 54782 - protein, 1170 aa, Homo sapiens
MDEETRHSLECIQANQIFPRKQLIREDENLQVPFLELHGESTEFVGRAEDAIIALSNYRLHIKFKESLVNVPLQLIESVECRDIFQLHLTCKDCKVIRCQFSTFEQCQEWLKRLNNAIRPPAKIEDLFSFAYHAWCMEVYASEKEQHGDLCRPGEHVTSRFKNEVERMGFDMNNAWRISNINEKYKLCGSYPQELIVPAWITDKELESVSSFRSWKRIPAVIYRHQSNGAVIARCGQPEVSWWGWRNADDEHLVQSVAKACASDSRSSGSKLSTRNTSRDFPNGGDLSDVEFDSSLSNASGAESLAIQPQKLLILDARSYAAAVANRAKGGGCECPEYYPNCEVVFMGMANIHSIRRSFQSLRLLCTQMPDPGNWLSALESTKWLHHLSVLLKSALLVVHAVDQDQRPVLVHCSDGWDRTPQIVALAKLLLDPYYRTIEGFQVLVEMEWLDFGHKFADRCGHGENSDDLNERCPVFLQWLDCVHQLQRQFPCSFEFNEAFLVKLVQHTYSCLFGTFLCNNAKERGEKHTQERTCSVWSLLRAGNKAFKNLLYSSQSEAVLYPVCHVRNLMLWSAVYLPCPSPTTPVDDSCAPYPAPGTSPDDPPLSRLPKTRSYDNLTTACDNTVPLASRRCSDPSLNEKWQEHRRSLELSSLAGPGEDPLSADSLGKPTRVPGGAELSVAAGVAEGQMENILQEATKEESGVEEPAHRAGIEIQEGKEDPLLEKESRRKTPEASAIGLHQDPELGDAALRSHLDMSWPLFSQGISEQQSGLSVLLSSLQVPPRGEDSLEVPVEQFRIEEIAEGREEAVLPIPVDAKVGYGTSQSCSLLPSQVPFETRGPNVDSSTDMLVEDKVKSVSGPQGHHRSCLVNSGKDRLPQTMEPSPSETSLVERPQVGSVVHRTSLGSTLSLTRSPCALPLAECKEGLVCNGAPETENRASEQPPGLSTLQMYPTPNGHCANGEAGRSKDSLSRQLSAMSCSSAHLHSRNLHHKWLHSHSGRPSATSSPDQPSRSHLDDDGMSVYTDTIQQRLRQIESGHQQEVETLKKQVQELKSRLESQYLTSSLHFNGDFGDEVMTRWLPDHLAAHCYACDSAFWLASRKHHCRDTDRVDQTWNCGNVFCSSCCNQKVPVPSQQLFEPSRVCKSCYSSLHPTSSSIDLELDKPIAATSN

SEQ ID NO: 54783 - protein, 1161 aa, Homo sapiens
MDEETRHSLECIQANQIFPRKQLIREDENLQVPFLELHGESTEFVGRAEDAIIALSNYRLHIKFKESLVNVPLQLIESVECRDIFQLHLTCKDCKVIRCQFSTFEQCQEWLKRLNNAIRPPAKIEDLFSFAYHAWCMEVYASEKEQHGDLCRPGEHVTSRFKNEVERMGFDMNNAWRISNINEKYKLCGSYPQELIVPAWITDKELESVSSFRSWKRIPAVIYRHQSNGAVIARCGQPEVSWWGWRNADDEHLVQSVAKACASDSRSSGSKLSTRNTSRDFPNGGDLSDVEFDSSLSNASGAESLAIQPQKLLILDARSYAAAVANRAKGGGCECPEYYPNCEVVFMGMANIHSIRRSFQSLRLLCTQMPDPGNWLSALESTKWLHHLSVLLKSALLVVHAVDQDQRPVLVHCSDGWDRTPQIVALAKLLLDPYYRTIEGFQVLVEMEWLDFGHKFADRCGHGENSDDLNERCPVFLQWLDCVHQLQRQFPCSFEFNEAFLVKLVQHTYSCLFGTFLCNNAKERGEKHTQERTCSVWSLLRAGNKAFKNLLYSSQSEAVLYPVCHVRNLMLWSAVYLPCPSPTTPVDDSCAPYPAPGTSPDDPPLSRLPKTRSYDNLTTACDNTVPLASRRCSDPSLNEKWQEHRRSLELSSLAGPGEDPLSADSLGKPTRVPGGAELSVAAGVAEGQMENILQEATKEESGVEEPAHRAGIEIQEGKEDPLLEKESRRKTPEASAIGLHQDPELGDAALRSHLDMSWPLFSQGISEQQSGLSVLLSSLQVPPRGEDSLEVPVEQFRIEEIAEGREEAVLPIPVDAKVGYGTSQSCSLLPSQVPFETRGPNVDSSTDMLVEDKVKSVSGPQGHHRSCLVNSGKDRLPQTMEPSPSETSLVERPQVGSVVHRTSLGSTLSLTRSPCALPLAECKEGLVCNGAPETENRASEQPPGLSTLQMYPTPNGHCANGEAGRSKDSLSRQLSAMSCSSAHLHSRNLHHKWLHSHSGRPSATSSPDQPSRSHLDDDGMSVYTDTIQQRLRQIESGHQQEVETLKKQVQELKSRLESQYLTSSLHFNGDFGDEVMTRWLPDHLAAHCYACDSAFWLASRKHHCRNCGNVFCSSCCNQKVPVPSQQLFEPSRVCKSCYSSLHPTSSSIDLELDKPIAATSN

SEQ ID NO: 54784 - protein, 1198 aa, Homo sapiens
MDEETRHSLECIQANQIFPRKQLIREDENLQVPFLELHGESTEFVGRAEDAIIALSNYRLHIKFKESLVNVPLQLIESVECRDIFQLHLTCKDCKVIRCQFSTFEQCQEWLKRLNNAIRPPAKIEDLFSFAYHAWCMEVYASEKEQHGDLCRPGEHVTSRFKNEVERMGFDMNNAWRISNINEKYKLCGSYPQELIVPAWITDKELESVSSFRSWKRIPAVIYRHQSNGAVIARCGQPEVSWWGWRNADDEHLVQSVAKACASDSRSSGSKLSTRNTSRDFPNGGDLSDVEFDSSLSNASGAESLAIQPQKLLILDARSYAAAVANRAKGGGCECPEYYPNCEVVFMGMANIHSIRRSFQSLRLLCTQMPDPGNWLSALESTKWLHHLSVLLKSALLVVHAVDQDQRPVLVHCSDGWDRTPQIVALAKLLLDPYYRTIEGFQVLVEMEWLDFGHKFADRCGHGENSDDLNERCPVFLQWLDCVHQLQRQFPCSFEFNEAFLVKLVQHTYSCLFGTFLCNNAKERGEKHTQERTCSVWSLLRAGNKAFKNLLYSSQSEAVLYPVCHVRNLMLWSAVYLPCPSPTTPVDDSCAPYPAPGTSPDDPPLSRLPKTRSYDNLTTACDNTVPLASRRCSDPSLNEKWQEHRRSLELSSLAGPGEDPLSADSLGKPTRVPGGAELSVAAGVAEGQMENILQEATKEESGVEEPAHRAGIEIQEGKEDPLLEKESRRKTPEASAIGLHQDPELGDAALRSHLDMSWPLFSQGISEQQSGLSVLLSSLQVPPRGEDSLEVPVEQFRIEEIAEGREEAVLPIPVDAKVGYGTSQSCSLLPSQVPFETRGPNVDSSTDMLVEDKVKSVSGPQGHHRSCLVNSGKDRLPQTMEPSPSETSLVERPQVGSVVHRTSLGSTLSLTRSPCALPLAECKEGLVCNGAPETENRASEQPPGLSTLQMYPTPNGHCANGEAGRSKDSLSRQLSAMSCSSAHLHSRNLHHKWLHSHSGRPSATSSPDQPSRSHLDDDGMSVYTDTIQQRLRQIESGHQQEVETLKKQVQELKSRLESQYLTSSLHFNGDFGDEVTSIPDSESNLDQNCLSRCSTEIFSEASWEQVDKQDTEMTRWLPDHLAAHCYACDSAFWLASRKHHCRNCGNVFCSSCCNQKVPVPSQQLFEPSRVCKSCYSSLHPTSSSIDLELDKPIAATSN

SEQ ID NO: 54785 - protein, 1170 aa, Homo sapiens; identical to SEQ ID NO: 54782

SEQ ID NO: 54786 - protein, 139 aa, Homo sapiens
MDEETRHSLECIQANQIFPRKQLIREDENLQVPFLELHGESTEFVGRAEDAIIALSNYRLHIKFKESLVNVPLQLIESVECRDIFQLHLTCKDCKVIRCQFSTFEQCQEWLKRLNNAIRPPAKIEDLFSFAYHAWCMEV

SEQ ID NO: 54787 - protein, 1195 aa, Homo sapiens
MGEEGPPSLEYIQAKDLFPPKELVKEEENLQVPFTVLQGEGVEFLGRAADALIAISNYRLHIKFKDSVINVPLRMIDSVESRDMFQLHISCKDSKVVRCHFSTFKQCQEWLSRLSRATARPAKPEDLFAFAYHAWCLGLTEEDQHTHLCQPGEHIRCRQEAELARMGFDLQNVWRVSHINSNYKLCPSYPQKLLVPVWITDKELENVASFRSWKRIPVVVYRHLRNGAAIARCSQPEISWWGWRNADDEYLVTSIAKACALDPGTRATGGSLSTGNNDTSEACDADFDSSLTACSGVESTAAPQKLLILDARSYTAAVANRAKGGGCECEEYYPNCEVVFMGMANIHAIRNSFQYLRAVCSQMPDPSNWLSALESTKWLQHLSVMLKAAVLVANTVDREGRPVLVHCSDGWDRTPQIVALAKILLDPYYRTLEGFQVLVESDWLDFGHKFGDRCGHQENVEDQNEQCPVFLQWLDSVHQLLKQFPCLFEFNEAFLVKLVQHTYSCLYGTFLANNPCEREKRNIYKRTCSVWALLRAGNKNFHNFLYTPSSDMVLHPVCHVRALHLWTAVYLPASSPCTLGEENMDLYLSPVAQSQEFSGRSLDRLPKTRSMDDLLSACDTSSPLTRTSSDPNLNNHCQEVRVGLEPWHSNPEGSETSFVDSGVGGPQQTVGEVGLPPPLPSSQKDYLSNKPFKSHKSCSPSYKLLNTAVPREMKSNTSDPEIKVLEETKGPAPDPSAQDELGRTLDGIGEPPEHCPETEAVSALSKVISNKCDGVCNFPESSQNSPTGTPQQAQPDSMLGVPSKCVLDHSLSTVCNPPSAACQTPLDPSTDFLNQDPSGSVASISHQEQLSSVPDLTHGEEDIGKRGNNRNGQLLENPRFGKMPLELVRKPISQSQISEFSFLGSNWDSFQGMVTSFPSGEATPRRLLSYGCCSKRPNSKQMRATGPCFGGQWAQREGVKSPVCSSHSNGHCTGPGGKNQMWLSSHPKQVSSTKPVPLNCPSPVPPLYLDDDGLPFPTDVIQHRLRQIEAGYKQEVEQLRRQVRELQMRLDIRHCCAPPAEPPMDYEDDFTCLKESDGSDTEDFGSDHSEDCLSEASWEPVDKKETEVTRWVPDHMASHCYNCDCEFWLAKRRHHCRNCGNVFCAGCCHLKLPIPDQQLYDPVLVCNSCYEHIQVSRARELMSQQLKKPIATASS

SEQ ID NO: 54788 - protein, 189 aa, Homo sapiens
MPVWKLPWKLSEGKRRAQVEGEDLFPVAISFGRPKEVLPLYSSESHRFTVLEPNTVSFNFKFWRNMYHQFDRTLHPRQSVFNIIMNMNEQNKQLEKDIKDLESKIKQRKNKQTDGILTKELLHSVHPESPNLKTSLCFKEQTLLPVNDALRTIEGSSPADNRYSEYAEEFSKSEPAVVSLEYGVARMTC

SEQ ID NO: 54789 - protein, 621 aa, Homo sapiens
MEHIRTTKVEQVKLLDRFSTSNKSLTGTLYLTATHLLFIDSHQKETWILHHHIASVEKLALTTSGCPLVIQCKNFRTVHFIVPRERDCHDIYNSLLQLSKQAKYEDLYAFSYNPKQNDSERLQGWQLIDLAEEYKRMGVPNSHWQLSDANRDYKICETYPRELYVPRIASKPIIVGSSKFRSKGRFPVLSYYHQDKEAAICRCSQPLSGFSARCLEDEHLLQAISKANPVNRYMYVMDTRPKLNAMANRAAGKGYENEDNYSNIRFQFVGIENIHVMRSSLQKLLEVNGTKGLSVNDFYSGLESSGWLRHIKAVMDAAIFLAKAITVENASVLVHCSDGWDRTSQVCSLGSLLLDSYYRTIKGFMVLIEKDWISFGHKFSERCGQLDGDPKEVSPVFTQFLECVWHLTEQFPQAFEFSEAFLLQIHEHIHSCQFGNFLGNCQKEREELKLKEKTYSLWPFLLEDQKKYLNPLYSSESHRFTVLEPNTVSFNFKFWRNMYHQFDRTLHPRQSVFNIIMNMNEQNKQLEKDIKDLESKIKQRKNKQTDGILTKELLHSVHPESPNLKTSLCFKEQTLLPVNDALRTIEGSSPADNRYSEYAEEFSKSEPAVVSLEYGVARMTC

SEQ ID NO: 54790 - protein, 548 aa, Homo sapiens
MEHIRTTKVEQVKLLDRFSTSNKSLTGTLYLTATHLLFIDSHQKETWILHHHIASVEKLALTTSGCPLVIQCKNFRTVHFIVPRERDCHDIYNSLLQLSKQAKYEDLYAFSYNPKQNDSERLQGWQLIDLAEEYKRMGVPNSHWQLSDANRDYKICETYPRELYVPRIASKPIIVGSSKFRSKGRFPVLSYYHQDKEAAICRCSQPLSGFSARCLEDEHLLQAISKANPVNRYMYVMDTRPKLNAMANRAAGKGYENEDNYSNIRFQFVGIENIHVMRSSLQKLLEVNGTKGLSVNDFYSGLESSGWLRHIKAVMDAAIFLAKAITVENASVLVHCSDGWDRTSQVCSLGSLLLDSYYRTIKGFMVLIEKDWISFGHKFSERCGQLDGDPKEVSPVFTQFLECVWHLTEQFPQAFEFSEAFLLQIHEHIHSCQFGNFLGNCQKEREELKLKEKTYSLWPFLLEDQKKYLNPLYSSESHRFTVLEPNTVSFNFKFWRNMYHQFDRTLHPRQSVFNIIMNMNEQNKQLEKDIKDLESLTSYSSFKIIVGQ

SEQ ID NO: 54791 - protein, 548 aa, Homo sapiens
MEHIRTTKVEQVKLLDRFSTSNKSLTGTLYLTATHLLFIDSHQKETWILHHHIASVEKLALTTSGCPLVIQCKNFRTVHFIVPRERDCHDIYNSLLQLSKQAKYEDLYAFSYNPKQNDSERLQGWQLIDLAEEYKRMGVPNSHWQLSDANRDYKICETYPRELYVPRIASKPIIVGSSKFRSKGRFPVLSYYHQDKEAAICRCSQPLSGFSARCLEDEHLLQAISKANPVNRYMYVMDTRPKLNAMANRAAGKGYENEDNYSNIRFQFVGIENIHVMRSSLQKLLEVNGTKGLSVNDFYSGLESSGWLRHIKAVMDAAIFLAKAITVENASVLVHCSDGWDRTSQVCSLGSLLLDSYYRTIKGFMVLIEKDWISFGHKFSERCGQLDGDPKEVSPVFTQFLECVWHLTEQFPQAFEFSEAFLLQIHEHIHSCQFGNFLGNCQKEREELKLKEKTYSLWPFLLEDQKKYLNPLYSSESHRFTVLEPNTVSFNFKFWRNMYHQFDRTLHPRQSVFNIIMNMNEQNKQLEKDIKDLESFTSFAAARVIQGQ

SEQ ID NO: 54792 - protein, 660 aa, Homo sapiens
MEHIRTPKVENVRLVDRVSPKKAALGTLYLTATHVIFVENSPDPRKETWILHSQISTIEKQATTATGCPLLIRCKNFQIIQLIIPQERDCHDVYISLIRLARPVKYEELYCFSFNPMLDKEEREQGWVLIDLSEEYTRMGLPNHYWQLSDVNRDYRVCDSYPTELYVPKSATAHIIVGSSKFRSRRRFPVLSYYYKDNHASICRSSQPLSGFSARCLEDEQMLQAIRKANPGSDFVYVVDTRPKLNAMANRAAGKGYENEDNYSNIKFQFIGIENIHVMRNSLQKMLEVCELKSPSMSDFLWGLENSGWLRHIKAIMDAGIFIAKAVSEEGASVLVHCSDGWDRTAQVCSVASLLLDPHYRTLKGFMVLIEKDWISFGHKFNHRYGNLDGDPKEISPVIDQFIECVWQLMEQFPCAFEFNERFLIHIQHHIYSCQFGNFLCNSQKERRELKIQERTYSLWAHLWKNRADYLNPLFRADHSQTQGTLHLPTTPCNFMYKFWSGMYNRFEKGMQPRQSVTDYLMAVKEETQQLEEELEALEERLEKIQKVQLNCTKVKSKQSEPSKHSGFSTSDNSIANTPQDYSGNMKSFPSRSPSQGDEDSALILTQDNLKSSDPDLSANSDQESGVEDLSCRSPSGGEHAPSEDSGKDRDSDEAVFLTA

SEQ ID NO: 54793 - protein, 251 aa, Homo sapiens
MEQFPCAFEFNERFLIHIQHHIYSCQFGNFLCNSQKERRELKIQERTYSLWAHLWKNRADYLNPLFRADHSQTQGTLHLPTTPCNFMYKFWSGMYNRFEKGMQPRQSVTDYLMAVKEETQQLEEELEALEERLEKIQKVQLNCTKVKSKQSEPSKHSGFSTSDNSIANTPQDYSGNMKSFPSRSPSQGDEDSALILTQDNLKSSDPDLSANSDQESGVEDLSCRSPSGGEHAPSEDSGKDRDSDEAVFLTA

SEQ ID NO: 54794 - protein, 555 aa, Homo sapiens
MEHIRTPKVENVRLVDRVSPKKAALGTLYLTATHVIFVENSPDPRKETWILHSQISTIEKQATTATGCPLLIRCKNFQIIQLIIPQERDCHDVYISLIRLARPVKYEELYCFSFNPMLDKEEREQGWVLIDLSEEYTRMGLPNHYWQLSDVNRDYRVCDSYPTELYVPKSATAHIIVGSSKFRSRRRFPVLSYYYKDNHASICRSSQPLSGFSARCLEDEQMLQAIRKANPGSDFVYVVDTRPKLNAMANRAAGKGYENEDNYSNIKFQFIGIENIHVMRNSLQKMLEVCELKSPSMSDFLWGLENSGWLRHIKAIMDAGIFIAKAVSEEGASVLVHCSDGWDRTAQVCSVASLLLDPHYRTLKGFMVLIEKDWISFGHKFNHRYGNLDGDPKEISPVIDQFIECVWQLMEQFPCAFEFNERFLIHIQHHIYSCQFGNFLCNSQKERRELKIQERTYSLWAHLWKNRADYLNPLFRADHSQTQGTLHLPTTPCNFMYKFWSGMYNRFEKGMQPRQSVTDYLMAVKEETQQLEEELEALEEVRHTCFVNLFSVLIS

SEQ ID NO: 54795 - protein, 590 aa, Homo sapiens
LDLLVPKVENVKLVDRYVSKKPANGILYLTATHLIYVEASGAARKETWIALHHIATVEKLPITSLGCPLTLRCKNFRVAHFVLDSDLVCHEVYISLLKLSQPALPEDLYAFSYNPKSSKEMRESGWKLIDPISDFGRMGIPNRNWTITDANIRFRFMGIENIHVMRSSLQKLLEVCELKTPTMSEFLSGLESSGWLRHIKAIMDAGIFITKAVKVEKASVLVHCSDGWDRTAQVCSVASILLDPFYRTFKGLMILIEKEWISMGHKFSQRCGHLDGDSKEVSPIFTQFLDCIWQLMEQFPCAFEFNENFLLEIHDHVFSCQFGNFLGNCQKDREDLRVYEKTHSVWPFLVQRKPDFRNPLYKGFTMYGVLNPSTVPYNIQFWCGMYNRFDKGLQPKQSMLESLLEIKKQRAMLETDVHELEKKLKVRDEPPEEICTCSQLGNILSQHLGSPLTNPLGFMGINGDLNTLMENGTLSREGGLRAQMDQVKSQGADLHHNCCEIVGSLRAINISGDVGISEAMGISGDMCTFEATGFSKDLGICGAMDISEATGISGNLGISEARGFSGDMGILGDTGISKASTKEADYSKHQ

SEQ ID NO: 54796 - protein, 704 aa, Homo sapiens
MDHITVPKVENVKLVDRYVSKKPANGILYLTATHLIYVEASGAARKETWIALHHIATVEKLPITSLGCPLTLRCKNFRVAHFVLDSDLVCHEVYISLLKLSQPALPEDLYAFSYNPKSSKEMRESGWKLIDPISDFGRMGIPNRNWTITDANRNYEICSTYPPEIVVPKSVTLGTVVGSSKFRSKERVPVLSYLYKENNAAICRCSQPLSGFYTRCVDDELLLEAISQTNPGSQFMYVVDTRPKLNAMANRAAGKGYENEDNYANIRFRFMGIENIHVMRSSLQKLLEVCELKTPTMSEFLSGLESSGWLRHIKAIMDAGIFITKAVKVEKASVLVHCSDGWDRTAQVCSVASILLDPFYRTFKGLMILIEKEWISMGHKFSQRCGHLDGDSKEVSPIFTQFLDCIWQLMEQFPCAFEFNENFLLEIHDHVFSCQFGNFLGNCQKDREDLRVYEKTHSVWPFLVQRKPDFRNPLYKGFTMYGVLNPSTVPYNIQFWCGMYNRFDKGLQPKQSMLESLLEIKKQRAMLETDVHELEKKLKVRDEPPEEICTCSQLGNILSQHLGSPLTNPLGFMGINGDLNTLMENGTLSREGGLRAQMDQVKSQGADLHHNCCEIVGSLRAINISGDVGISEAMGISGDMCTFEATGFSKDLGICGAMDISEATGISGNLGISEARGFSGDMGILGDTGISKASTKEADYSKHQ

SEQ ID NO: 54797 - protein, 508 aa, Homo sapiens
  VARIANT 1: note = MOD_RES - Any amino acid
XDSDLVCHEVYISLLKLSQPALPEDLYAFSYNPKSSKEMRESGWKLIDPISDFGRMGIPNRNWTITDANIRFRFMGIENIHVMRSSLQKLLEVCELKTPTMSEFLSGLESSGWLRHIKAIMDAGIFITKAVKVEKASVLVHCSDGWDRTAQVCSVASILLDPFYRTFKGLMILIEKEWISMGHKFSQRCGHLDGDSKEVSPIFTQFLDCIWQLMEQFPCAFEFNENFLLEIHDHVFSCQFGNFLGNCQKDREDLRVYEKTHSVWPFLVQRKPDFRNPLYKGFTMYGVLNPSTVPYNIQFWCGMYNRFDKGLQPKQSMLESLLEIKKQRAMLETDVHELEKKLKVRDEPPEEICTCSQLGNILSQHLGSPLTNPLGFMGINGDLNTLMENGTLSREGGLRAQMDQVKSQGADLHHNCCEIVGSLRAINISGDVGISEAMGISGDMCTFEATGFSKDLGICGAMDISEATGISGNLGISEARGFSGDMGILGDTGISKASTKEADYSKHQ

SEQ ID NO: 54798 - protein, 693 aa, Homo sapiens
MDHITVPKVENVKLVDRYVSKKPANGILYLTATHLIYVEASGAARKETWIALHHIATVEKLPITSLGCPLTLRCKNFRVAHFVLDSDLVCHEVYISLLKLSQPALPEDLYAFSYNPKSSKEMRESGWKLIDPISDFGRMGIPNRNWTITDANRNYEICSTYPPEIVVPKSVTLGTVVGSSKFRSKERVPVLSYLYKENNAAICRCSQPLSGFYTRCVDDELLLEAISQTNPGSQFMYVVDTRPKLNAMANRAAGKGYENEDNYANIRFRFMGIENIHVMRSSLQKLLEVCELKTPTMSEFLSGLESSGWLRHIKAIMDAGIFITKAVKVEKASVLVHCSDGWDRTAQVCSVASILLDPFYRTFKGLMIWHFLVLIMRIVLQLAKMNLMDITKIFSLLQPDKEEEDTDTEEKQALNQAVYDNDSYTLDQLLRQERYKRFINSRSGWGVPGTPLRLAASYGHLSCLQVLLAHGADVDSLDVKAQTPLFTAVSHGHLDCVRVLLEAGASPGGSIYNNCSPVLTAARDGAVAILQELLDHGAEANVKAKLPVWASNIASCSGPLYLAAVYGHLDCFRLLLLHGADPDYNCTDQGLLARVPRPRTLLEICLHHNCEPEYIQLLIDFGANIYLPSLSLDLTSQDDKGIALLLQARATPRSLLSQVRLVVRRALCQAGQPQAINQLDIPPMLISYLKHQL

SEQ ID NO: 54799 - protein, 549 aa, Homo sapiens
MEFAELIKTPRVDNVVLHRPFYPAVEGTLCLTGHHLILSSRQDNTEELWLLHSNIDAIDKRFVGSLGTIIIKCKDFRIIQLDIPGMEECLNIASSIEALSTLDSITLMYPFFYRPMFEVIEDGWHSFLPEQEFELYSSATSEWRLSYVNKEFAVCPSYPPIVTVPKSIDDEALRKVATFRHGGRFPVLSYYHKKNGMVIMRSGQPLTGTNGRRCKEDEKLINATLRAGKRGYIIDTRSLNVAQQTRAKGGGFEQEAHYPQWRRIHKSIERYHILQESLIKLVEACNDQTHNMDRWLSKLEASNWLTHIKEILTTACLAAQCIDREGASILIHGTEGTDSTLQVTSLAQIILEPRSRTIRGFEALIEREWLQAGHPFQQRCAQSAYCNTKQKWEAPVFLLFLDCVWQILRQFPCSFEFNENFLIMLFEHAYASQFGTFLGNNESERCKLKLQQKTMSLWSWVNQPSELSKFTNPLFEANNLVIWPSVAPQSLPLWEGIFLRWNRSSKYLDEAYEEMVNIIEYNKELQAKVNILRRQLAELETEDGMQESP

SEQ ID NO: 54800 - protein, 299 aa, Homo sapiens
MPLSGTPAPNKKRKSSKLIMELTGGGQESSGLNLGKKISVPRDVMLEELSLLTNRGSKMFKLRQMRVEKFIYENHPDVFSDSSMDHFQKFLPTVGGQLGTAGQGFSYSKSNGRGGSQAGGSGSAGQYGSDQQHHLGSGSGAGGTGGPAGQAGRGGAAGTAGVGETGSGDQAGGEGKHITVFKTYISPWERAMGVDPQQKMELGIDLLAYGAKAELPKYKSFNRTAMPYGGYEKASKRMTFQMPKFDLGPLLSEPLVLYNQNLSNRPSFNRTPIPWLSSGEPVDYNVDIGIPLDGETEEL

SEQ ID NO: 54801 - protein, 264 aa, Homo sapiens
MLSHNTMMKQRKQQATAIMKEVHGNDVDGMDLGKKVSIPRDIMLEELSHLSNRGARLFKMRQRRSDKYTFENFQYQSRAQINHSIAMQNGKVDGSNLEGGSQQAPLTPPNTPDPRSPPNPDNIAPGYSGPLKEIPPEKFNTTAVPKYYQSPWEQAISNDPELLEALYPKLFKPEGKAELPDYRSFNRVATPFGGFEKASRMVKFKVPDFELLLLTDPRFMSFVNPLSGRRSFNRTPKGWISENIPIVITTEPTDDTTVPESEDL

SEQ ID NO: 54802 - protein, 251 aa, Homo sapiens
MIPKEQKGPVMAAMGDLTEPVPTLDLGKKLSVPQDLMMEELSLRNNRGSLLFQKRQRRVQKFTFELAASQRAMLAGSARRKVTGTAESGTVANANGPEGPNYRSELHIFPASPGASLGGPEGAHPAAAPAGCVPSPSALAPGYAEPLKGVPPEKFNHTAISKGYRCPWQEFVSYRDYQSDGRSHTPSPNDYRNFNKTPVPFGGPLVGGTFPRPGTPFIPEPLSGLELLRLRPSFNRVAQGWVRNLPESEEL

SEQ ID NO: 54803 - protein, 251 aa, Homo sapiens; identical to SEQ ID NO: 54802

SEQ ID NO: 54804 - protein, 662 aa, Homo sapiens
MVVSEVDIAKADPAAASHPLLLNGDATVAQKNPGSVAENNLCSQYEEKVRPCIDLIDSLRALGVEQDLALPAIAVIGDQSSGKSSVLEALSGVALPRGSGIVTRCPLVLKLKKLVNEDKWRGKVSYQDYEIEISDASEVEKEINKAQNAIAGEGMGISHELITLEISSRDVPDLTLIDLPGITRVAVGNQPADIGYKIKTLIKKYIQRQETISLVVVPSNVDIATTEALSMAQEVDPEGDRTIGILTKPDLVDKGTEDKVVDVVRNLVFHLKKGYMIVKCRGQQEIQDQLSLSEALQREKIFFENHPYFRDLLEEGKATVPCLAEKLTSELITHICKSLPLLENQIKETHQRITEELQKYGVDIPEDENEKMFFLIDKVNAFNQDITALMQGEETVGEEDIRLFTRLRHEFHKWSTIIENNFQEGHKILSRKIQKFENQYRGRELPGFVNYRTFETIVKQQIKALEEPAVDMLHTVTDMVRLAFTDVSIKNFEEFFNLHRTAKSKIEDIRAEQEREGEKLIRLHFQMEQIVYCQDQVYRGALQKVREKELEEEKKKKSWDFGAFQSSSATDSSMEEIFQHLMAYHQEASKRISSHIPLIIQFFMLQTYGQQLQKAMLQLLQDKDTYSWLLKERSDTSDKRKFLKERLARLTQARRRLAQFPG

SEQ ID NO: 54805 - protein, 662 aa, Homo sapiens; identical to SEQ ID NO: 54804

SEQ ID NO: 54806 - protein, 68 aa, Homo sapiens
MVVSEVDIAKADPAAASHPLLLNGDATVAQKNPGSVAENNLCSQYEEKVRPCIDLIDSLRALGVEQDL

SEQ ID NO: 54807 - protein, 201 aa, Homo sapiens
MVVSEVDIAKADPAAASHPLLLNGDATVAQKNPGSVAENNLCSQYEEKVRPCIDLIDSLRALGVEQDLALPAIAVIGDQSSGKSSVLEALSGVALPRGSGIVTRCPLVLKLKKLVNEDKWRGKVSYQDYEIEISDASEVEKEINKAQNAIAGEGMGISHELITLEISSRDVPDLTLIDLPGITRVAVGNQPADIGYKIKTL

SEQ ID NO: 54808 - protein, 26 aa, Homo sapiens
MVVSEVDIAKADPAAASHPLLLNGDA

SEQ ID NO: 54809 - protein, 197 aa, Homo sapiens
MVVSEVDIAKADPAAASHPLLLNGDATVAQKNPGSVAENNLCSQYEEKVRPCIDLIDSLRALGVEQDLALPAIAVIGDQSSGKSSVLEALSGVALPRGSGIVTRCPLVLKLKKLVNEDKWRGKVSYQDYEIEISDASEVEKEINKAQNAIAGEGMGISHELITLEISSRDVPDLTLIDLPGITRVAVGNQPADIGYK

SEQ ID NO: 54810 - protein, 35 aa, Homo sapiens
MVVSEVDIAKADPAAASHPLLLNGDATVAQKNPGS

SEQ ID NO: 54811 - protein, 77 aa, Homo sapiens
MVVSEVDIAKADPAAASHPLLLNGDATVAQKNPGSVAENNLCSQYEEKVRPCIDLIDSLRALGVEQDLALPAIAVIG

SEQ ID NO: 54812 - protein, 662 aa, Homo sapiens; identical to SEQ ID NO: 54804

SEQ ID NO: 54813 - protein, 715 aa, Homo sapiens
MSKAHKPWPYRRRSQFSSRKYLKKEMNSFQQQPPPFGTVPPQMMFPPNWQGAEKDAAFLAKDFNFLTLNNQPPPGNRSQPRAMGPENNLYSQYEQKVRPCIDLIDSLRALGVEQDLALPAIAVIGDQSSGKSSVLEALSGVALPRGSGIVTRCPLVLKLKKQPCEAWAGRISYRNTELELQDPGQVEKEIHKAQNVMAGNGRGISHELISLEITSPEVPDLTIIDLPGITRVAVDNQPRDIGLQIKALIKKYIQRQQTINLVVVPCNVDIATTEALSMAHEVDPEGDRTIGILTKPDLMDRGTEKSVMNVVRNLTYPLKKGYMIVKCRGQQEITNRLSLAEATKKEITFFQTHPYFRVLLEEGSATVPRLAERLTTELIMHIQKSLPLLEGQIRESHQKATEELRRCGADIPSQEADKMFFLIEKIKMFNQDIEKLVEGEEVVRENETRLYNKIREDFKNWVGILATNTQKVKNIIHEEVEKYEKQYRGKELLGFVNYKTFEIIVHQYIQQLVEPALSMLQKAMEIIQQAFINVAKKHFGEFFNLNQTVQSTIEDIKVKHTAKAENMIQLQFRMEQMVFCQDQIYSVVLKKVREEIFNPLGTPSQNMKLNSHFPSNESSVSSFTEIGIHLNAYFLETSKRLANQIPFIIQYFMLRENGDSLQKAMMQILQEKNRYSWLLQEQSETATKRRILKERIYRLTQARHALCQFSSKEIH

SEQ ID NO: 54814 - protein, 14 aa, Homo sapiens
MSKAHKPWPYRRRS

SEQ ID NO: 54815 - protein, 134 aa, Homo sapiens
MSKAHKPWPYRRRSQFSSRKYLKKEMNSFQQQPPPFGTVPPQMMFPPNWQGAEKDAAFLAKDFNFLTLNNQPPPGNRSQPRAMGPENNLYSQYEQKVRPCIDLIDSLRALGVEQDLALPAIAVIGDQSSGKSSV

SEQ ID NO: 54816 - protein, 125 aa, Homo sapiens
MSKAHKPWPYRRRSQFSSRKYLKKEMNSFQQQPPPFGTVPPQMMFPPNWQGAEKDAAFLAKDFNFLTLNNQPPPGNRSQPRAMGPENNLYSQYEQKVRPCIDLIDSLRALGVEQDLALPAIAVIG

SEQ ID NO: 54817 - protein, 129 aa, Homo sapiens
MSKAHKPWPYRRRSQFSSRKYLKKEMNSFQQQPPPFGTVPPQMMFPPNWQGAEKDAAFLAKDFNFLTLNNQPPPGNRSQPRAMGPENNLYSQYEQKVRPCIDLIDSLRALGVEQDLALPAIAVIGDQSS

SEQ ID NO: 54818 - protein, 201 aa, Homo sapiens
MSKAHKPWPYRRRSQFSSRKYLKKEMNSFQQQPPPFGTVPPQMMFPPNWQGAEKDAAFLAKDFNFLTLNNQPPPGNRSQPRAMGPENNLYSQYEQKVRPCIDLIDSLRALGVEQDLALPAIAVIGDQSSGKSSVLEALSGVALPRGSAQNVMAGNGRGISHELISLEITSPEVPDLTIIDLPGITRVAVDNQPRDIGLQVS

SEQ ID NO: 54819 - protein, 220 aa, Homo sapiens
MNIRNARPEDLMNMQHCNLLCLPENYQMKYYFYHGLSWPQLSYIAEDENGKIVGYVLAKMEEDPDDVPHGHITSLAVKRSHRRLGLAQKLMDQASRAMIENFNAKYVSLHVRKRISEVEPKYYADGEDAYAMKRDLTQMADELRRHLELKEKGRHVVLGAIENKVESKGNSPPSSGEACREEKGLAAEDSGGDSKDLSEVSETTESTDVKDSSEASDSAS

SEQ ID NO: 54820 - protein, 235 aa, Homo sapiens
MNIRNARPEDLMNMQHCNLLCLPENYQMKYYFYHGLSWPQLSYIAEDENGKIVGYVLAKMEEDPDDVPHGHITSLAVKRSHRRLGLAQKLMDQASRAMIENFNAKYVSLHVRKSNRAALHLYSNTLNFQISEVEPKYYADGEDAYAMKRDLTQMADELRRHLELKEKGRHVVLGAIENKVESKGNSPPSSGEACREEKGLAAEDSGGDSKDLSEVSETTESTDVKDSSEASDSAS

SEQ ID NO: 54821 - protein, 131 aa, Homo sapiens
MNIRNARPEDLMNMQHCNLLCLPENYQMKYYFYHGLSWPQLSYIAEDENGKIVGYVLAKMEEDPDDVPHGHITSLAVKRSHRRLGLAQKLMDQASRAMIENFNAKYVSLHVRKRSVKWSPNTMQMGRTPMP

SEQ ID NO: 54822 - protein, 177 aa, Homo sapiens
MIVAEIKNRTKIHKEDGDILASNFSVDTQVAYILSLGVVKEFRKHGIGSLLLESLKDHISTTAQDHCKAIYLHVLTTNNTAINFYENRDFKQHHYLPYYYSIRGVLKDGFTYVLYINGGHPPWTILDYIQHLGSALASLSPCSIPHRVYRQAHSLLCSFLPWSGISSKSGIEYSRTM

SEQ ID NO: 54823 - protein, 242 aa, Homo sapiens
MTEVVPSSALSEVSLRLLCHDDIDTVKHLCGDWFPIEYPDSWYRDITSNKKFFSLAATYRGAIVGMIVAEIKNRTKIHKEDGDILASNFSVDTQVAYILSLGVVKEFRKHGIGSLLLESLKDHISTTAQDHCKAIYLHVLTTNNTAINFYENRDFKQHHYLPYYYSIRGVLKDGFTYVLYINGGHPPWTILDYIQHLGSALASLSPCSIPHRVYRQAHSLLCSFLPWSGISSKSGIEYSRTM

SEQ ID NO: 54824 - protein, 242 aa, Homo sapiens; identical to SEQ ID NO: 54823

SEQ ID NO: 54825 - protein, 190 aa, Homo sapiens
MTEVVPSSALSEVSLRLLCHDDIDTVKHLCGDWFPIEYPDSWYRDITSNKKFFSLAATYRGAIVGMIVAEIKNRTKIHKEDGDILASNFSVDTQVAYILSLGVVKEFRKHGIEPHGLHPAPGLCTSQPEPLLHSAQSLPPGPQPALQLPAMVGHLFQEWHRVQPDHVMSAGQPPPGPTLRPPAEPAFLSI

SEQ ID NO: 54826 - protein, 249 aa, Homo sapiens
MFPRRRTERRLGDTGTRKKIAYRKAVPGGRKCGASLSWEKSSREYPDSWYRDITSNKKFFSLAATYRGAIVGMIVAEIKNRTKIHKEDGDILASNFSVDTQVAYILSLGVVKEFRKHGIGSLLLESLKDHISTTAQDHCKAIYLHVLTTNNTAINFYENRDFKQHHYLPYYYSIRGVLKDGFTYVLYINGGHPPWTILDYIQHLGSALASLSPCSIPHRVYRQAHSLLCSFLPWSGISSKSGIEYSRTM

SEQ ID NO: 54827 - protein, 163 aa, Homo sapiens
MAVILGIFGTVQYRSRYLILYAAWLVLWVGWNAFIICFYLEVGQLSQDRDFIMTFNTSLHRSWWMENGPGCLVTPVLNSRLALEDHHVISVTGCLLDYPYIEALSSALQIFLALFGFVFACYVSKVFLEEEDSFDFIGGFDSYGYQAPQKTSHLQLQPLYTSG

SEQ ID NO: 54828 - protein, 207 aa, Homo sapiens
MGKCSGRCTLVAFCCLQLVAALERQIFDFLGYQWAPILANFLHIMAVILGIFGTVQYRSRYLILYAAWLVLWVGWNAFIICFYLEVGQLSQDRDFIMTFNTSLHRSWWMENGPGCLVTPVLNSRLALEDHHVISVTGCLLDYPYIEALSSALQIFLALFGFVFACYVSKVFLEEEDSFDFIGGFDSYGYQAPQKTSHLQLQPLYTSG

SEQ ID NO: 54829 - protein, 136 aa, Homo sapiens
MAVILGIFGTVQYRSRYLILDRDFIMTFNTSLHRSWWMENGPGCLVTPVLNSRLALEDHHVISVTGCLLDYPYIEALSSALQIFLALFGFVFACYVSKVFLEEEDSFDFIGGFDSYGYQAPQKTSHLQLQPLYTSG

SEQ ID NO: 54830 - protein, 188 aa, Homo sapiens
MGYCSGRCTLIFICGMQLVCVLERQIFDFLGYQWAPILANFVHIIIVILGLFGTIQYRPRYITGYAVWLVLWVTWNVFVICFYLEAGDLSKETDLILTFNISMHRSWWMENGPGCTVTSVTPAPDWAPEDHRYITVSGCLLEYQYIEVAHSSLQIVLAVSVGSQPLLLVPLGLFYFCANSVHTNGICG

SEQ ID NO: 54831 - protein, 208 aa, Homo sapiens
MGYCSGRCTLIFICGMQLVCVLERQIFDFLGYQWAPILANFVHIIIVILGLFGTIQYRPRYITGYAVWLVLWVTWNVFVICFYLEAGDLSKETDLILTFNISMHRSWWMENGPGCTVTSVTPAPDWAPEDHRYITVSGCLLEYQYIEVAHSSLQIVLALAGFIYACYVVKCITEEEDSFDFIGGFDSYGYQGPQKTSHLQLQPMYMSK

SEQ ID NO: 54832 - protein, 207 aa, Homo sapiens
MGIIRFLLLYCPTNILTVCVLERQIFDFLGYQWAPILANFVHIIIVILGLFGTIQYRPRYITGYAVWLVLWVTWNVFVICFYLEAGDLSKETDLILTFNISMHRSWWMENGPGCTVTSVTPAPDWAPEDHRYITVSGCLLEYQYIEVAHSSLQIVLALAGFIYACYVVKCITEEEDSFDFIGGFDSYGYQGPQKTSHLQLQPMYMSK

SEQ ID NO: 54833 - protein, 191 aa, Homo sapiens
MKIVCVLERQIFDFLGYQWAPILANFVHIIIVILGLFGTIQYRPRYITGYAVWLVLWVTWNVFVICFYLEAGDLSKETDLILTFNISMHRSWWMENGPGCTVTSVTPAPDWAPEDHRYITVSGCLLEYQYIEVAHSSLQIVLALAGFIYACYVVKCITEEEDSFDFIGGFDSYGYQGPQKTSHLQLQPMYM

SEQ ID NO: 54834 - protein, 139 aa, Homo sapiens
MGYCSGRCTLIFICGMQLVCVLERQIFDFLGYQWAPILANFVHIIIVILGLFGTIQYRPRYITGYAVWLVLWVTWNVFVICFYLEAGDLSKLAGFIYACYVVKCITEEEDSFDFIGGFDSYGYQGPQKTSHLQLQPMYM

SEQ ID NO: 54835 - protein, 197 aa, Homo sapiens
MGCCTGRCSLICLCALQLVSALERQIFDFLGFQWAPILGNFLHIIVVILGLFGTIQYRPRYIMVYTVWTALWVTWNVFIICFYLEVGGLSKDTDLMTFNISVHRSWWREHGPGCVRRVLPPSAHGMMDDYTYVSVTGCIVDFQYLEVIHSAVQILLSLVGFVYACYVISISMEEEDTYSCDLQVCKHLFIQMLQIIE

SEQ ID NO: 54836 - protein, 197 aa, Homo sapiens; identical to SEQ ID NO: 54835

SEQ ID NO: 54837 - protein, 161 aa, Homo sapiens
MGCCTGRCSLICLCALQLVSWVFDRQIFLLSFQWAPILGNFLHIIVVILGLFGTIQYRPRYIMVYTVWTALWVTWNVFIICFYLEVGGLSKDTDLMTFNISVHRSWWREHGPGCVRRVLPPSAHGMMDDYTYVSVTGCIVDFQYLEVIHSAVQILLSIFFL

SEQ ID NO: 54838 - protein, 208 aa, Homo sapiens
MGSCSGRCALVVLCAFQLVAALERQVFDFLGYQWAPILANFVHIIIVILGLFGTIQYRLRYVMVYTLWAAVWVTWNVFIICFYLEVGGLLKDSELLTFSLSRHRSWWRERWPGCLHEEVPAVGLGAPHGQALVSGAGCALEPSYVEALHSCLQILIALLGFVCGCQVVSVFTEEEDSFDFIGGFDPFPLYHVNEKPSSLLSKQVYLPA

SEQ ID NO: 54839 - protein, 88 aa, Homo sapiens
MAESRGRLYLWMCLAAALASFLMGFMVGWFIKPLKETTTSVRYHQSIRWKLVSEMKAENIKSFLRSFTKLPHLAGTEQNFLLAKKIQT

SEQ ID NO: 54840 - protein, 740 aa, Homo sapiens
MAESRGRLYLWMCLAAALASFLMGFMVGWFIKPLKETTTSVRYHQSIRWKLVSEMKAENIKSFLRSFTKLPHLAGTEQNFLLAKKIQTQWKKFGLDSAKLVHYDVLLSYPNETNANYISIVDEHETEIFKTSYLEPPPDGYENVTNIVPPYNAFSAQGMPEGDLVYVNYARTEDFFKLEREMGINCTGKIVIARYGKIFRGNKVKNAMLAGAIGIILYSDPADYFAPEVQPYPKGWNLPGTAAQRGNVLNLNGAGDPLTPGYPAKEYTFRLDVEEGVGIPRIPVHPIGYNDAEILLRYLGGIAPPDKSWKGALNVSYSIGPGFTGSDSFRKVRMHVYNINKITRIYNVVGTIRGSVEPDRYVILGGHRDSWVFGAIDPTSGVAVLQEIARSFGKLMSKGWRPRRTIIFASWDAEEFGLLGSTEWAEENVKILQERSIAYINSDSSIEGNYTLRVDCTPLLYQLVYKLTKEIPSPDDGFESKSLYESWLEKDPSPENKNLPRINKLGSGSDFEAYFQRLGIASGRARYTKNKKTDKYSSYPVYHTIYETFELVEKFYDPTFKKQLSVAQLRGALVYELVDSKIIPFNIQDYAEALKNYAASIYNLSKKHDQQLTDHGVSFDSLFSAVKNFSEAASDFHKRLIQVDLNNPIAVRMMNDQLMLLERAFIDPLGLPGKLFYRHIIFAPSSHNKYAGESFPGIYDAIFDIENKANSRLAWKEVKKHISIAAFTIQAAAGTLKEVL

SEQ ID NO: 54841 - protein, 544 aa, Homo sapiens
MQWTKVLGLGLGAAALLGLGIILGHFAIPKKANSLAPQDLDLEILETVMGQLDAHRIRENLRELSREPHLASSPRDEDLVQLLLQRWKDPESGLDSAEASTYEVLLSFPSQEQPNVVDIVGPTGGIIHSCHRTEENVTGEQGGPDVVQPYAAYAPSGTPQGLLVYANRGAEEDFKELQTQGIKLEGTIALTRYGGVGRGAKAVNAAKHGVAGVLVYTDPADINDGLSSPDETFPNSWYLPPSGVERGSYYEYFGDPLTPYLPAVPSSFRVDLANVSGFPPIPTQPIGFQDARDLLCNLNGTLAPATWQGALGCHYRLGPGFRPDGDFPADSQVNVSVYNRLELRNSSNVLGIIRGAVEPDRYVLYGNHRDSWVHGAVDPSSGTAVLLELSRVLGTLLKKGTWRPRRSIVFASWGAEEFGLIGSTEFTEEFFNKLQERTVAYINVDISVFANATLRVQGTPPVQSVVFSATKEIRSPGPGDLSIYDNWIRYFNRSSPVYGLVPRARLQPGSTPPTTQPLTPLTMWTSFWTRASAAIRLWPGQRGV

SEQ ID NO: 54842 - protein, 522 aa, Homo sapiens
MQWTKVLGLGLGAAALLGLGIILGHFAIPKKANSLAPQDLDLEILETVMGQLDAHRIRENLRELSREPHLASSPRDEDLVQLLLQRWKDPESGLDSAEASTYEVLLSFPSQEQPNVVDIVGPTGGIIHSCHRTEENVTGEQGGPDVVQPYAAYAPSGTPQGLLVYANRGAEEDFKELQTQGIKLEGTIALTRYGGVGRGAKAVNAAKHGVAGVLVYTDPADINDGLSSPDETFPNSWYLPPSGVERGSYYEYFGDPLTPYLPAVPSSFRVDLANVSGFPPIPTQPIGFQDARDLLCNLNGTLAPATWQGALGCHYRLGPGFRPDGDFPADSQVNVSVYNRLELRNSSNVLGIIRGAVEPDRYVLYGNHRDSWVHGAVDPSSGTAVLLELSRVLGTLLKKGTWRPRRSIVFASWGAEEFGLIGSTEFTEEFFNKLQERTVAYINVDISVFANATLRVQGTPPVQSVVFSATKEIRSPGPGDLSIYDNWIRYFNRSSPVYGLVPRLQQPSGCGPDSGECDSPAQ

SEQ ID NO: 54843 - protein, 740 aa, Homo sapiens
MQWTKVLGLGLGAAALLGLGIILGHFAIPKKANSLAPQDLDLEILETVMGQLDAHRIRENLRELSREPHLASSPRDEDLVQLLLQRWKDPESGLDSAEASTYEVLLSFPSQEQPNVVDIVGPTGGIIHSCHRTEENVTGEQGGPDVVQPYAAYAPSGTPQGLLVYANRGAEEDFKELQTQGIKLEGTIALTRYGGVGRGAKAVNAAKHGVAGVLVYTDPADINDGLSSPDETFPNSWYLPPSGVERGSYYEYFGDPLTPYLPAVPSSFRVDLANVSGFPPIPTQPIGFQDARDLLCNLNGTLAPATWQGALGCHYRLGPGFRPDGDFPADSQVNVSVYNRLELRNSSNVLGIIRGAVEPDRYVLYGNHRDSWVHGAVDPSSGTAVLLELSRVLGTLLKKGTWRPRRSIVFASWGAEEFGLIGSTEFTEEFFNKLQERTVAYINVDISVFANATLRVQGTPPVQSVVFSATKEIRSPGPGDLSIYDNWIRYFNRSSPVYGLVPSLGSLGAGSDYAPFVHFLGISSMDIAYTYDRSKTSARIYPTYHTAFDTFDYVDKFLDPGFSSHQAVARTAGSVILRLSDSFFLPLKVSDYSETLRSFLQAAQQDLGALLEQHSISLGPLVTAVEKFEAEAAALGQRISTLQKGSPDPLQVRMLNDQLMLLERTFLNPRAFPEERYYSHVLWAPRTGSVVTFPGLSNACSRARDTASGSEAWAEVQRQLSIVVTALEGAAATLRPVADL

SEQ ID NO: 54844 - protein, 739 aa, Homo sapiens
MQWTKVLGLGLGAAALLGLGIILGHFAIPKKANSLAPQDLDLEILETVMGQLDAHRIRENLRELSREPHLASSPRDEDLVQLLLQRWKDPESGLDSAEASTYEVLLSFPSQEQPNVVDIVGPTGGIIHSCHRTEENVTGEQGGPDVVQPYAAYAPSGTPQGLLVYANRGAEEDFKELQTQGIKLEGTIALTRYGGVGRGAKAVNAAKHGVAGVLVYTDPADINDGLSSPDETFPNSWYLPPSGVERGSYYEYFGDPLTPYLPAVPSSFRVDLANVSGFPPIPTQPIGFQDARDLLCNLNGTLAPATWQGALGCHYRLGPGFRPDGDFPADSQVNVSVYNRLELRNSSNVLGIIRGAVEPDRYVLYGNHRDSWVHGAVDPSSGTAVLLELSRVLGTLLKKGTWRPRRSIVFASWGAEEFGLIGSTEFTEEFFNKLQERTVAYINVDISVFANATLRVQGTPPVQSVVFSATKEIRSPGPGDLSIYDNWIRYFNRSSPVYGLVPSLGSLGAGSDYAPFVHFLGISSMDIAYTYDRSKTSARIYPTYHTAFDTFDYVDKFLDPGFSSHQAVARTAGSVILRLSDSFFLPLKVSDYSETLRSFLQAAQQDLGALLEQHSISLGPLVTAVEKFEAEAAALGQRISTLQKGSPDPLQVRMLNDQLMLLERTFLNPRAFPEERYYSHVLWAPRGLRSHIPGLSNACSRARDTASGSEAWAEVQRQLSIVVTALEGAAATLRPVADL

SEQ ID NO: 54845 - protein, 134 aa, Homo sapiens
MEISKKIKTQWTSLGLEDVQFVNYSVLLDLPGPSPSTVTLSSSGQCFHPNGQPCSEEARKDSSQDLLYSYAAYSAKGTLKAEVIDVSYGMADDLKRIRKIKNVTNQIALLKLGKLPLLYKMKVLDKADQTSPLY

SEQ ID NO: 54846 - protein, 795 aa, Homo sapiens
MGENEASLPNTSLQGKKMAYQKVHADQRAPGHSQYLDNDDLQATALDLEWDMEKELEESGFDQFQLDGAENQNLGHSETIDLNLDSIQPATSPKGRFQRLQEESDYITHYTRSAPKSNRCNFCHVLKILCTATILFIFGILIGYYVHTNCPSDAPSSGTVDPQLYQEILKTIQAEDIKKSFRNLVQLYKNEDDMEISKKIKTQWTSLGLEDVQFVNYSVLLDLPGPSPSTVTLSSSGQCFHPNGQPCSEEARKDSSQDLLYSYAAYSAKGTLKAEVIDVSYGMADDLKRIRKIKNVTNQIALLKLGKLPLLYKLSSLEKAGFGGVLLYIDPCDLPKTVNPSHDTFMVSLNPGGDPSTPGYPSVDESFRQSRSNLTSLLVQPISAPLVAKLISSPKARTKNEACSSLELPNNEIRVVSMQVQTVTKLKTVTNVVGFVMGLTSPDRYIIVGSHHHTAHSYNGQEWASSTAIITAFIRALMSKVKRGWRPDRTIVFCSWGGTAFGNIGSYEWGEDFKKVLQKNVVAYISLHSPIRGNSSLYPVASPSLQQLVVEKNNFNCTRRAQCPETNISSIQIQGDADYFINHLGVPIVQFAYEDIKTLEGPSFLSEARFSTRATKIEEMDPSFNLHETITKLSGEVILQIANEPVLPFNALDIALEVQNNLKGDQPNTHQLLAMALRLRESAELFQSDEMRPANDPKERAPIRIRMLNDILQDMEKSFLVKQAPPGFYRNILYHLDEKTSRFSILIEAWEHCKPLASNETLQEALSEVLNSINSAQVYFKAGLDVFKSVLDGKN

SEQ ID NO: 54847 - protein, 411 aa, Homo sapiens
MLLKTVLLLGHVAQVLMLDNGLLQTPPMGWLAWERFRCNINCDEDPKNCISEQLFMEMADRMAQDGWRDMGYTYLNIDDCWIGGRDASGRLMPDPKRFPHGIPFLADYVHSLGLKLGIYADMGNFTCMGYPGTTLDKVVQDAQTFAEWKVDMLKLDGCFSTPEERAQGYPKMAAALNATGRPIAFSCSWPAYEGGLPPRVNYSLLADICNLWRNYDDIQDSWWSVLSILNWFVEHQDILQPVAGPGHWNDPDMLLIGNFGLSLEQSRAQMALWTVLAAPLLMSTDLRTISAQNMDILQNPLMIKINQDPLGIQGRRIHKEKSLIEVYMRPLSNKASALVFFSCRTDMPYRYHSSLGQLNFTGSVIYEAQDVYSGDIISGLRDETNFTVIINPSGVVMWYLYPIKNLEMSQQ

SEQ ID NO: 54848 - protein, 411 aa, Homo sapiens; identical to SEQ ID NO: 54847

SEQ ID NO: 54849 - protein, 411 aa, Homo sapiens; identical to SEQ ID NO: 54847

SEQ ID NO: 54850 - protein, 344 aa, Homo sapiens
MAAIYGGVEGGGTRSEVLLVSEDGKILAEADGLSTNHWLIGTDKCVERINEMVNRAKRKAGVDPLVPLRSLGLSLSGGDQEDAGRILIEELRDRFPYLSESYLITTDAAGSIATATPDGGVVLISGTGSNCRLINPDGSESGCGGWGHMMGDEGSAYWIAHQAVKIVFDSIDNLEAAPHDIGYVKQAMFHYFQVPDRLGILTHLYRDFDKCRFAGFCRKIAEGAQQGDPLSRYIFRKAGEMLGRHIVAVLPEIDPVLFQGKIGLPILCVGSVWKSWELLKEGFLLALTQGREIQAQNFFSSFTLMKLRHSSALGGASLGARHIGHLLPMDYSANAIAFYSYTFS

SEQ ID NO: 54851 - protein, 390 aa, Homo sapiens
MRTRTGSQLAAREVTGSGAVPRQLEGRRCQAGRDANGGTSSDGSSSMAAIYGGVEGGGTRSEVLLVSEDGKILAEADGLSTNHWLIGTDKCVERINEMVNRAKRKAGVDPLVPLRSLGLSLSGGDQEDAGRILIEELRDRFPYLSESYLITTDAAGSIATATPDGGVVLISGTGSNCRLINPDGSESGCGGWGHMMGDEGSAYWIAHQAVKIVFDSIDNLEAAPHDIGYVKQAMFHYFQVPDRLGILTHLYRDFDKCRFAGFCRKIAEGAQQGDPLSRYIFRKAGEMLGRHIVAVLPEIDPVLFQGKIGLPILCVGSVWKSWELLKEGFLLALTQGREIQAQNFFSSFTLMKLRHSSALGGASLGARHIGHLLPMDYSANAIAFYSYTFS

SEQ ID NO: 54852 - protein, 515 aa, Homo sapiens
MATSTGRWLLLRLALFGFLWEASGGLDSGASRDDDLLLPYPRARARLPRDCTRVRAGNREHESWPPPPATPGAGGLAVRTFVSHFRDRAVAGHLTRAVEPLRTFSVLEPGGPGGCAARRRATVEETARAADCRVAQNGGFFRMNSGECLGNVVSDERRVSSSGGLQNAQFGIRRDGTLVTGYLSEEEVLDTENPFVQLLSGVVWLIRNGSIYINESQATECDETQETGSFSKFVNVISARTAIGHDRKGQLVLFHADGQTEQRGINLWEMAEFLLKQDVVNAINLDGGGSATFVLNGTLASYPSDHCQDNMWRCPRQVSTVVCVHEPRCQPPDCHGHGTCVDGHCQCTGHFWRGPGCDELDCGPSNCSQHGLCTETGCRCDAGWTGSNCSEECPLGWHGPGCQRPCKCEHHCPCDPKTGNCSVSRVKQCLQPPEATLRAGELSFFTRTAWLALTLALAFLLLISTAANLSLLLSRAERNRRLHGDYAYHPLQEMNGEPLAAEKEQPGGAHNPFKD

SEQ ID NO: 54853 - protein, 481 aa, Homo sapiens
MATSTGRWLLLRLALFGFLWEASGGLDSGASRDDDLLLPYPRARARLPRDCTRVRAGNREHESWPPPPATPGAGGLAVRTFVSHFRDRAVAGHLTRAVEPLRTFSVLEPGGPGGCAARRRATVEETARAADCRVAQNGGFFRMNSGECLGNVVSDERRVSSSGGLQNAQFGIRRDGTLVTGYLSEEEVLDTENPFVQLLSGVVWLIRNGSIYINESQATECDETQETGSFSKFVNVISARTAIGHDRKGQLVLFHADGQTEQRGINLWEMAEFLLKQDVVNAINLDGGGSATFVLNGTLASYPSDHCQDNMWRCPRQVSTVVCVHEPRCQPPDCHGHGTCVDGHCQCTGHFWRGPGCDELDCGPSNCSQHGLCTETGCRCDAGWTGSNCSEVKQCLQPPEATLRAGELSFFTRTAWLALTLALAFLLLISTAANLSLLLSRAERNRRLHGDYAYHPLQEMNGEPLAAEKEQPGGAHNPFKD

SEQ ID NO: 54854 - protein, 743 aa, Homo sapiens
MEAVAVAAAVGVLLLAGAGGAAGDEAREAAAVRALVARLLGPGPAADFSVSVERALAAKPGLDTYSLGGGGAARVRVRGSTGVAAAAGLHRYLRDFCGCHVAWSGSQLRLPRPLPAVPGELTEATPNRYRYYQNVCTQSYSFVWWDWARWEREIDWMALNGINLALAWSGQEAIWQRVYLALGLTQAEINEFFTGPAFLAWGRMGNLHTWDGPLPPSWHIKQLYLQHRVLDQMRSFGMTPVLPAFAGHVPEAVTRVFPQVNVTKMGSWGHFNCSYSCSFLLAPEDPIFPIIGSLFLRELIKEFGTDHIYGADTFNEMQPPSSEPSYLAAATTAVYEAMTAVDTEAVWLLQGWLFQHQPQFWGPAQIRAVLGAVPRGRLLVLDLFAESQPVYTRTASFQGQPFIWCMLHNFGGNHGLFGALEAVNGGPEAARLFPNSTMVGTGMAPEGISQNEVVYSLMAELGWRKDPVPDLAAWVTSFAARRYGVSHPDAGAAWRLLLRSVYNCSGEACRGHNRSPLVRRPSLQMNTSIWYNRSDVFEAWRLLLTSAPSLATSPAFRYDLLDLTRQAVQELVSLYYEEARSAYLSKELASLLRAGGVLAYELLPALDEVLASDSRFLLGSWLEQARAAAVSEAEADFYEQNSRYQLTLWGPEGNILDYANKQLAGLVANYYTPRWRLFLEALVDSVAQGIPFQQHQFDKNVFQLEQAFVLSKQRYPSQPRGDTVDLAKKIFLKYYPRWVAGSW

SEQ ID NO: 54855 - protein, 419 aa, Homo sapiens
PQCCLHSRGMFPRLSPVDTEAVWLLQGWLFQHQPQFWGPAQIRAVLGAVPRGRLLVLDLFAESQPVYTRTASFQGQPFIWCMLHNFGGNHGLFGALEAVNGGPEAARLFPNSTMVGTGMAPEGISQNEVVYSLMAELGWRKDPVPDLAAWVTSFAARRYGVSHPDAGAAWRLLLRSVYNCSGEACRGHNRSPLVRRPSLQMNTSIWYNRSDVFEAWRLLLTSAPSLATSPAFRYDLLDLTRQAVQELVSLYYEEARSAYLSKELASLLRAGGVLAYELLPALDEVLASDSRFLLGSWLEQARAAAVSEAEADFYEQNSRYQLTLWGPEGNILDYANKQLAGLVANYYTPRWRLFLEALVDSVAQGIPFQQHQFDKNVFQLEQAFVLSKQRYPSQPRGDTVDLAKKIFLKYYPRWVAGSW

SEQ ID NO: 54856 - protein, 320 aa, Homo sapiens
MAFPKKKLQGLVAATITPMTENGEINFSVIGQYVDYLVKEQGVKNIFVNGTTGEGLSLSVSERRQVAEEWVTKGKDKLDQVIIHVGALSLKESQELAQHAAEIGADGIAVIAPFFLKPWTKDILINFLKEVAAAAPALPFYYYHIPALTGVKIRAEELLDGILDKIPTFQGLKFSDTDLLDFGQCVDQNRQQQFAFLFGVDEQLLSALVMGATGAVGSTYNYLGKKTNQMLEAFEQKDFSLALNYQFCIQRFINFVVKLGFGVSQTKAIMTLVSGIPMGPPRLPLQKASREFTDSAEAKLKSLDFLSFTDLKDGNLEAGS

SEQ ID NO: 54857 - protein, 109 aa, Homo sapiens
MAFPKKKLQGLVAATITPMTENGEINFSVIGQYVDYLVKEQGVKNIFVNGTTGEGLSLSVSERRQVAEEWVTKGKDKSNHHKLGTIRTTQSRRSSFRRQLKAWHSGSHL

SEQ ID NO: 54858 - protein, 185 aa, Homo sapiens
MSRAPGILASWRRAPSLSVQKGSQTARHTCHPEVPLGNCFLPVYKASPLTVTRLWAERLDQVIIHVGALSLKESQELAQHAAEIGADGIAVIAPFFLKPWTKDILINFLKEVAAAAPALPFYYYHIPALTGVKIRAEELLDGILDKIPTFQGLKFSDTDLLDFGQCVDQNRQQQFAFLFGVDEHL

SEQ ID NO: 54859 - protein, 240 aa, Homo sapiens
MAFPKKKLQGLVAATITPMTENGEINFSVIGQYVDYLVKEQGVKNIFVNGTTGEGLSLSVSERRQVAEEWVTKGKDKLDQVIIHVGALSLKESQELAQHAAEIGADGIAVIAPFFLKPWTKDILINFLKEVAAAAPALPFYYYHIPALTGVKIRAEELLDGILDKIPTFQGLKFSDTDLLDFGQCVDQNRQQQFAFLFGVDEFCIQRFINFVVKLENSKLKVSKNQRTLPLGTTNFPFLH

SEQ ID NO: 54860 - protein, 320 aa, Homo sapiens; identical to SEQ ID NO: 54856

SEQ ID NO: 54861 - protein, 301 aa, Homo sapiens
MSRAPGILASWRRAPSLSVQKGSQTARHTCHPEVPLGNCFLPVYKASPLTVTRLWAERLDQVIIHVGALSLKESQELAQHAAEIGADGIAVIAPFFLKPWTKDILINFLKEVAAAAPALPFYYYHIPALTGVKIRAEELLDGILDKIPTFQGLKFSDTDLLDFGQCVDQNRQQQFAFLFGVDEQLLSALVMGATGAVGSTYNYLGKKTNQMLEAFEQKDFSLALNYQFCIQRFINFVVKLGFGVSQTKAIMTLVSGIPMGPPRLPLQKASREFTDSAEAKLKSLDFLSFTDLKDGNLEAGS

SEQ ID NO: 54862 - protein, 240 aa, Homo sapiens; identical to SEQ ID NO: 54859

SEQ ID NO: 54863 - protein, 207 aa, Homo sapiens
REGQKGSQTARHTCHPEVPLGNCFLPVYKASPLTVTRLWAERLDQVIIHVGALSLKESQELAQHAAEIGADGIAVIAPFFLKPWTKDILINFLKEVAAAAPALPFYYYHIPALTGVKTTVECSGDGSNWSSGQFCIQRFINFVVKLGFGVSQTKAIMTLVSGIPMGPPRLPLQKASREFTDSAEAKLKSLDFLSFTDLKDGNLEAGS

SEQ ID NO: 54864 - protein, 248 aa, Homo sapiens
MGLSRVRAVFFDLDNTLIDTAGASRRGMLEVIKLLQSKYHYKEEAEIICDKVQVKLSKECFHPYNTCITDLRTSHWEEAIQETKGGAANRKLAEECYFLWKSTRLQHMTLAEDVKAMLTELRKEVRLLLLTNGDRQTQREKIEACACQSYFDAVVVGGEQREEKPAPSIFYYCCNLLGVQPGDCVMVGDTLETDIQGGLNAGLKATVWINKNGIVPLKSSPVPHYMVSSVLELPALLQSIDCKVSMST

SEQ ID NO: 54865 - protein, 359 aa, Homo sapiens
MPLELELCPGRWVGGQHPCFIIAEIGQNHQGDLDVAKRMIRMAKECGADCAKFQKSELEFKFNRKALERPYTSKHSWGKTYGEHKRHLEFSHDQYRELQRYAEEVGIFFTASGMDEMAVEFLHELNVPFFKVGSGDTNNFPYLEKTAKKGRPMVISSGMQSMDTMKQVYQIVKPLNPNFCFLQCTSAYPLQPEDVNLRVISEYQKLFPDIPIGYSGHETGIAISVAAVALGAKVLERHITLDKTWKGSDHSASLEPGELAELVRSVRLVERALGSPTKQLLPCEMACNEKLGKSVVAKVKIPEGTILTMDMLTVKVGEPKGYPPEDIFNLVGKKVLVTVEEDDTIMEELVDNHGKKIKS

SEQ ID NO: 54866 - protein, 140 aa, Homo sapiens
MVLVLDYSGRPMVISSGMQSMDTMKQVYQIVKPLNPNFCFLQCTSAYPLQPEDVNLRVISEYQKLFPDIPIGYSGHETGIAISVAAVALGAKVLERHITLDKTWKGSDHSASLEPGELAELVRSVRLVERALGSPTKQLL

SEQ ID NO: 54867 - protein, 115 aa, Homo sapiens
EDVNLRVISEYQKLFPDIPIGYSGHETGIAISVAAVALGAKVLERHITLDKTWKGSDHSASLEPGELAELVRSVRLVERALGSPTKQLLPCEMACNEKVCPAGLYSVLLPCVEKG

SEQ ID NO: 54868 - protein, 290 aa, Homo sapiens
MDIEAYLERIGYKKSRNKLDLETLTDILQHQIRAVPFENLNIHCGDAMDLGLEAIFDQVVRRNRGGWCLQVNHLLYWALTTIGFETTMLGGYVYSTPAKKYSTGMIHLLLQVTIDGRNYIVDAGFGRSYQMWQPLELISGKDQPQVPCVFRLTEENGFWYLDQIRREQYIPNEEFLHSDLLEDSKYRKIYSFTLKPRTIEDFESMNTYLQTSPSSVFTSKSFCSLQTPDGVHCLVGFTLTHRRFNYKDNTDLIEFKTLSEEEIEKVLKNIFNISLQRKLVPKHGDRFFTI

SEQ ID NO: 54869 - protein, 290 aa, Homo sapiens; identical to SEQ ID NO: 54868

SEQ ID NO: 54870 - protein, 290 aa, Homo sapiens; identical to SEQ ID NO: 54868

SEQ ID NO: 54871 - protein, 290 aa, Homo sapiens; identical to SEQ ID NO: 54868

SEQ ID NO: 54872 - protein, 290 aa, Homo sapiens; identical to SEQ ID NO: 54868

SEQ ID NO: 54873 - protein, 290 aa, Homo sapiens; identical to SEQ ID NO: 54868

SEQ ID NO: 54874 - protein, 290 aa, Homo sapiens; identical to SEQ ID NO: 54868

SEQ ID NO: 54875 - protein, 352 aa, Homo sapiens
MLLLLLHKEAALEPQGPAVGYNSLPVSDDHHVSGIQARKKQQSVFWIKTEDQPTFNLLRKGIMDIEAYLERIGYKKSRNKLDLETLTDILQHQIRAVPFENLNIHCGDAMDLGLEAIFDQVVRRNRGGWCLQVNHLLYWALTTIGFETTMLGGYVYSTPAKKYSTGMIHLLLQVTIDGRNYIVDAGFGRSYQMWQPLELISGKDQPQVPCVFRLTEENGFWYLDQIRREQYIPNEEFLHSDLLEDSKYRKIYSFTLKPRTIEDFESMNTYLQTSPSSVFTSKSFCSLQTPDGVHCLVGFTLTHRRFNYKDNTDLIEFKTLSEEEIEKVLKNIFNISLQRKLVPKHGDRFFTI

SEQ ID NO: 54876 - protein, 290 aa, Homo sapiens
MDIEAYFERIGYKNSRNKLDLETLTDILEHQIRAVPFENLNMHCGQAMELGLEAIFDHIVRRNRGGWCLQVNQLLYWALTTIGFQTTMLGGYFYIPPVNKYSTGMVHLLLQVTIDGRNYIVDAGSGSSSQMWQPLELISGKDQPQVPCIFCLTEERGIWYLDQIRREQYITNKEFLNSHLLPKKKHQKIYLFTLEPRTIEDFESMNTYLQTSPTSSFITTSFCSLQTPEGVYCLVGFILTYRKFNYKDNTDLVEFKTLTEEEVEEVLRNIFKISLGRNLVPKPGDGSLTI

SEQ ID NO: 54877 - protein, 227 aa, Homo sapiens
MAPCHIRKYQESDRQWVVGLLSRGMAEHAPATFRQLLKLPRTLILLLGGPLALLLVSGSWLLALVFSISLFPALWFLAKKPWTEYVDMTLCTDMSDITKSYLSERGSCFWVAESEEKVVGMVGALPVDDPTLREKRLQLFHLFVDSEHRRQGIAKALVRTVLQFARDQGYSEVILDTGTIQLSAMALYQSMGFKKTGQSFFCVWARLVALHTVHFIYHLPSSKVGSL

SEQ ID NO: 54878 - protein, 134 aa, Homo sapiens
MADIEQYYMKPPGSCFWVAVLDGNVVGIVAARAHEEDNTVELLRMSVDSRFRGKGIAKALGRKVLEFAVVHNYSAVVLGTTAVKVAAHKLYESLGFRHMGASDHYVLPGMTLSLAERLFFQVRYHRYRLQLREE

SEQ ID NO: 54879 - protein, 302 aa, Homo sapiens
MHCGPPDMVCETKIVAAEDHEALPGAKKDALLAAAGAMWPPLPAAPGPAAAPPAPPPAPVAQPHGGAGGAGPPGGRGVCIREFRAAEQEAARRIFYDGIMERIPNTAFRGLRQHPRAQLLYALLAALCFAVSRSLLLTCLVPAALLGLRYYYSRKVIRAYLECALHTDMADIEQYYMKPPGSCFWVAVLDGNVVGIVAARAHEEDNTVELLRMSVDSRFRGKGIAKALGRKVLEFAVVHNYSAVVLGTTAVKVAAHKLYESLGFRHMGASDHYVLPGMTLSLAERLFFQVRYHRYRLQLREE

SEQ ID NO: 54880 - protein, 393 aa, Homo sapiens
MDENESNQSLMTSSQYPKEAVRKRQNSARNSGASDSSRFSRKSFKLDYRLEEDVTKSKKGKDGRFVNPWPTWKNPSIPNVLRWLIMEKDHSSVPSSKEELDKELPVLKPYFITNPEEAGVREAGLRVTWLGHATVMVEMDELIFLTDPIFSSRASPSQYMGPKRFRRSPCTISELPPIDAVLISHNHYDHLDYNSVIALNERFGNELRWFVPLGLLDWMQKCGCENVIELDWWEENCVPGHDKVTFVFTPSQHWCKRTLMDDNKVLWGSWSVLGPWNRFFFAGDTGYCPAFEEIGKRFGPFDLAAIPIGAYEPRWFMKYQHVDPEEAVRIHTDVQTKKSMAIHWGTFALANEHYLEPPVKLNEALERYGLNAEDFFVLKHGESRYLNNDDENF

SEQ ID NO: 54881 - protein, 124 aa, Homo sapiens
MDENESNQSLMTSSQYPKEAVRKRQNSARNSGASDSSRFSRKSFKLDYRLEEDVTKSKKGKDGRFVNPWPTWKNPSIPNVLRWLIMEKDHSSVPSSKEELDKELPVLKPYFITNPEEAGVREAG

SEQ ID NO: 54882 - protein, 393 aa, Homo sapiens; identical to SEQ ID NO: 54880

SEQ ID NO: 54883 - protein, 5 aa, Homo sapiens
MDENE

SEQ ID NO: 54884 - protein, 393 aa, Homo sapiens; identical to SEQ ID NO: 54880

SEQ ID NO: 54885 - protein, 466 aa, Homo sapiens
MARRRELKRCLQLLASSAEPARRARVRKNPSACRGRPSRYAAALCAGTLWPEAAELRRRALPATPSASSSPKDMDENESNQSLMTSSQYPKEAVRKRQNSARNSGASDSSRFSRKSFKLDYRLEEDVTKSKKGKDGRFVNPWPTWKNPSIPNVLRWLIMEKDHSSVPSSKEELDKELPVLKPYFITNPEEAGVREAGLRVTWLGHATVMVEMDELIFLTDPIFSSRASPSQYMGPKRFRRSPCTISELPPIDAVLISHNHYDHLDYNSVIALNERFGNELRWFVPLGLLDWMQKCGCENVIELDWWEENCVPGHDKVTFVFTPSQHWCKRTLMDDNKVLWGSWSVLGPWNRFFFAGDTGYCPAFEEIGKRFGPFDLAAIPIGAYEPRWFMKYQHVDPEEAVRIHTDVQTKKSMAIHWGTFALANEHYLEPPVKLNEALERYGLNAEDFFVLKHGESRYLNNDDENF

SEQ ID NO: 54886 - protein, 393 aa, Homo sapiens; identical to SEQ ID NO: 54880

SEQ ID NO: 54887 - protein, 732 aa, Homo sapiens
MERQVLLSEPEEAAALYRGLSRQPALSAACLGPEVTTQYGGQYRTVHTEWTQRDLERMENIRFCRQYLVFHDGDSVVFAGPAGNSVETRGELLSRESPSGTMKAVLRKAGGTGPGEEKQFLEVWEKNRKLKSFNLSALEKHGPVYEDDCFGCLSWSHSETHLLYVAEKKRPKAESFFQTKALDVSASDDEIARLKKPDQAIKGDQFVFYEDWGENMVSKSIPVLCVLDVESGNISVLEGVPENVSPGQAFWAPGDAGVVFVGWWHEPFRLGIRFCTNRRSALYYVDLIGGKCELLSDDSLAVSSPRLSPDQCRIVYLQYPSLIPHHQCSQLCLYDWYTKVTSVVVDVVPRQLGENFSGIYCSLLPLGCWSADSQRVVFDSAQRSRQDLFAVDTQVGTVTSLTAGGSGGSWKLLTIDQDLMVAQFSTPSLPPTLKVGFLPSAGKEQSVLWVSLEEAEPIPDIHWGIRVLQPPPEQENVQYAGLDFEAILLQPGSPPDKTQVPMVVMPHGGPHSSFVTAWMLFPAMLCKMGFAVLLVNYRGSTGFGQDSILSLPGNVGHQDVKDVQFAVEQVLQEEHFDASHVALMGGSHGGFISCHLIGQYPETYRACVARNPVINIASMLGSTDIPDWCVVEAGFPFSSDCLPDLSVWAEMLDKSPIRYIPQVKTPLLLMLGQEDRRVPFKQGMEYYRALKTRNVPVRLLLYPKSTHALSEVEVESDSFMNAVLWLRTHLGS

SEQ ID NO: 54888 - protein, 610 aa, Homo sapiens
VLNRLQSKYGSLYRRDNVILSGTHTHSGPAGYFQYTVFVIASEGFSNQTFQHMVTGILKSIDIAHTNMKPGKIFINKGNVDGVQINRSPYSYLQNPQSERARYSSNTDKEMIVLKMVDLNGDDLGLISWFAIHPVSMNNSNHLVNSDNVGYASYLLEQEKNKGYLPGQGPFVAAFSSSNLGDVSPNILGPRCINTGESCDNANSTCPIGGPSMCIAKGPGQDMFDSTQIIGRAMYQRAKELYASASQEVTGPLASAHQWVDMTDVTVWLNSTHASKTCKPALGYSFAAGTIDGVGGLNFTQGKTEGDPFWDTIRDQILGKPSEEIKECHKPKPILLHTGELSKPHPWHPDIVDVQIITLGSLAITAIPGEFTTMSGRRLREAVQAEFASHGMQNMTVVISGLCNVYTHYITTYEEYQAQRYEAASTIYGPHTLSAYIQLFRNLAKAIATDTVANLSRGPEPPFFKQLIVPLIPSIVDRAPKGRTFGDVLQPAKPEYRVGEVAEVIFVGANPKNSVQNQNHQTFLTVEKYEATSTSWQIVCNDASWETRFYWHKGLLGLSNATVEWHIPDTAQPGIYRIRYFGHNRKQDILKPAVILSFEGTSPAFEVVTI

SEQ ID NO: 54889 - protein, 622 aa, Homo sapiens
MDSEKSSEWRSDVLNRLQSKYGSLYRRDNVILSGTHTHSGPAGYFQYTVFVIASEGFSNQTFQHMVTGILKSIDIAHTNMKPGKIFINKGNVDGVQINRSPYSYLQNPQSERARYSSNTDKEMIVLKMVDLNGDDLGLISWFAIHPVSMNNSNHLVNSDNVGYASYLLEQEKNKGYLPGQGPFVAAFSSSNLGDVSPNILGPRCINTGESCDNANSTCPIGGPSMCIAKGPGQDMFDSTQIIGRAMYQRAKELYASASQEVTGPLASAHQWVDMTDVTVWLNSTHASKTCKPALGYSFAAGTIDGVGGLNFTQGKTEGDPFWDTIRDQILGKPSEEIKECHKPKPILLHTGELSKPHPWHPDIVDVQIITLGSLAITAIPGEFTTMSGRRLREAVQAEFASHGMQNMTVVISGLCNVYTHYITTYEEYQAQRYEAASTIYGPHTLSAYIQLFRNLAKAIATDTVANLSRGPEPPFFKQLIVPLIPSIVDRAPKGRTFGDVLQPAKPEYRVGEVAEVIFVGANPKNSVQNQNHQTFLTVEKYEATSTSWQIVCNDASWETRFYWHKGLLGLSNATVEWHIPDTAQPGIYRIRYFGHNRKQDILKPAVILSFEGTSPAFEVVTI

SEQ ID NO: 54890 - protein, 446 aa, Homo sapiens
MEMEQEKMTMNKELSPDAAAYCCSACHGDETWSYNHPIRGRAKSRSLSASPALGSTKEFRRTRSLHGPCPVTTFGPKACVLQNPQTIMHIQDPASQRLTWNKSPKSVLVIKKMRDASLLQPFKELCTHLMEENMIVYVEKKVLEDPAIASDESFGAVKKKFCTFREDYDDISNQIDFIICLGGDGTLLYASSLFQGSVPPVMAFHLGSLGFLTPFSFENFQSQVTQVIEGNAAVVLRSRLKVRVVKELRGKKTAVHNGLGENGSQAAGLDMDVGKQAMQYQVLNEVVIDRGPSSYLSNVDVYLDGHLITTVQGDGVIVSTPTGSTAYAAAAGASMIHPNVPAIMITPICPHSLSFRPIVVPAGVELKIMLSPEARNTAWVSFDGRKRQEIRHGDSISITTSCYPLPSICVRDPVSDWFESLAQCLHWNVRKKQAHFEEEEEEEEEG

SEQ ID NO: 54891 - protein, 446 aa, Homo sapiens; identical to SEQ ID NO: 54890

SEQ ID NO: 54892 - protein, 414 aa, Homo sapiens
MGRPRVRQAWPGCCGHTGRLPAGRGYLASHMCDPAGAELIGDGMSDPTPPSNACTGHIQDPASQRLTWNKSPKSVLVIKKMRDASLLQPFKELCTHLMEENMIVYVEKKVLEDPAIASDESFGAVKKKFCTFREDYDDISNQIDFIICLGGDGTLLYASSLFQGSVPPVMAFHLGSLGFLTPFSFENFQSQVTQVIEGNAAVVLRSRLKVRVVKELRGKKTAVHNGLGENGSQAAGLDMDVGKQAMQYQVLNEVVIDRGPSSYLSNVDVYLDGHLITTVQGDGVIVSTPTGSTAYAAAAGASMIHPNVPAIMITPICPHSLSFRPIVVPAGVELKIMLSPEARNTAWVSFDGRKRQEIRHGDSISITTSCYPLPSICVRDPVSDWFESLAQCLHWNVRKKQAHFEEEEEEEEEG

SEQ ID NO: 54893 - protein, 591 aa, Homo sapiens
MEMEQEKMTMNKELSPDAAAYCCSACHGDETWSYNHPIRGRAKSRSLSASPALGSTKEFRRTRSLHGPCPVTTFGPKACVLQNPQTIIATPLSLASQLLPSPAVSHSGQGGVTGQVHVLPQPSDQGVLSGPRAARGQTAPQEEAVTQEEVEALVCGHTQRWVPGPVYDAAAGGSGWAQLSLRAGMGVGQATGHIQDPASQRLTWNKSPKSVLVIKKMRDASLLQPFKELCTHLMEARGAGGKGAWGAHGVGGASIHITAPRVGSAGGMSRLALCFQENMIVYVEKKVLEDPAIASDESFGAVKKKFCTFREDYDDISNQIDFIICLGGDGTLLYASSLFQGSVPPVMAFHLGSLGFLTPFSFENFQSQVTQVIEGNAAVVLRSRLKVRVVKELRGKKTAVHNGLGENGSQAAGLDMDVGKQAMQYQVLNEVVIDRGPSSYLSNVDVYLDGHLITTVQGDGVIVSTPTGSTAYAAAAGASMIHPNVPAIMITPICPHSLSFRPIVVPAGVELKIMLSPEARNTAWVSFDGRKRQEIRHGDSISITTSCYPLPSICVRDPVSDWFESLAQCLHWNVRKKQAHFEEEEEEEEEG

SEQ ID NO: 54894 - protein, 591 aa, Homo sapiens; identical to SEQ ID NO: 54893

SEQ ID NO: 54895 - protein, 206 aa, Homo sapiens
MGRPRVRQAWPGCCGHTGRLPAGRGYLASHMCDPAGAELIGDGMSDPTPPSNACTGHIQDPASQRLTWNKSPKSVLVIKKMRDASLLQPFKELCTHLMEENMIVYVEKKVLEDPAIASDESFGAVKKKFCTFREDYDDISNQIDFIICLGGDGTLLYASSLFQGSVPPVMAFHLGSLGFLTPFSFENFQSQVTQVIEGNAAVVLRS

SEQ ID NO: 54896 - protein, 706 aa, Homo sapiens
MGRKVTVATCALNQWALDFEGNLQRILKSIEIAKNRGARYRLGPELEICGYGCWDHYYESDTLLHSFQVLAALVESPVTQDIICDVGMPVMHRNVRYNCRVIFLNRKILLIRPKMALANEGNYRELRWFTPWSRSRHTEEYFLPRMIQDLTKQETVPFGDAVLVTWDTCIGSEICEELWTPHSPHIDMGLDGVEIITNASGSHQVLRKANTRVDLVTMVTSKNGGIYLLANQKGCDGDRLYYDGCAMIAMNGSVFAQGSQFSLDDVEVLTATLDLEDVRSYRAEISSRNLAASRASPYPRVKVDFALSCHEDLLAPISEPIEWKYHSPEEEISLGPACWLWDFLRRSQQAGFLLPLSGGVDSAATACLIYSMCCQVCEAVRSGNEEVLADVRTIVNQISYTPQDPRDLCGRILTTCYMASKNSSQETCTRARELAQQIGSHHISLNIDPAVKAVMGIFSLVTGKSPLFAAHGGSSRENLALQNVQARIRMVLAYLFAQLSLWSRGVHGGLLVLGSANVDESLLGYLTKYDCSSADINPIGGISKTDLRAFVQFCIQRFQLPALQSILLAPATAELEPLADGQVSQTDEEDMGMTYAELSVYGKLRKVAKMGPYSMFCKLLGMWRHICTPRQVADKVKRFFSKYSMNRHKMTTLTPAYHAENYSPEDNRFDLRPFLYNTSWPWQFRCIENQVLQLERAEPQSLDGVD

SEQ ID NO: 54897 - protein, 446 aa, Homo sapiens
MGISGQEVLTATLDLEDVRSYRAEISSRNLAASRASPYPRVKVDFALSCHEDLLAPISEPIEWKYHSPEEEISLGPACWLWDFLRRSQQAGFLLPLSGGVDSAATACLIYSMCCQVCEAVRSGNEEVLADVRTIVNQISYTPQDPRDLCGRILTTCYMASKNSSQETCTRARELAQQIGSHHISLNIDPAVKAVMGIFSLVTGKSPLFAAHGGSSRENLALQNVQARIRMVLAYLFAQLSLWSRGVHGGLLVLGSANVDESLLGYLTKYDCSSADINPIGGISKTDLRAFVQFCIQRFQLPALQSILLAPATAELEPLADGQVSQTDEEDMGMTYAELSVYGKLRKVAKMGPYSMFCKLLGMWRHICTPRQVADKVKRFFSKYSMNRHKMTTLTPAYHAENYSPEDNRFDLRPFLYNTSWPWQFRCIENQVLQLERAEPQSLDGVD

SEQ ID NO: 54898 - protein, 373 aa, Homo sapiens
MEPAVSEPMRDQVARTHLTEDTPKVNADIEKVNQNQAKRCTVIGGSGFLGQHMVEQLLARGYAVNVFDIQQGFDNPQVRFFLGDLCSRQDLYPALKGVNTVFHCASPPPSSNNKELFYRVNYIGTKNVIETCKEAGVQKLILTSSASVIFEGVDIKNGTEDLPYAMKPIDYYTETKILQERAVLGANDPEKNFLTTAIRPHGIFGPRDPQLVPILIEAARNGKMKFVIGNGKNLVDFTFVENVVHGHILAAEQLSRDSTLGGKAFHITNDEPIPFWTFLSRILTGLNYEAPKYHIPYWVAYYLALLLSLLVMVISPVIQLQPTFTPMRVALAGTFHYYSCERAKKAMGYQPLVTMDDAMERTVQSFRHLRRVK

SEQ ID NO: 54899 - protein, 254 aa, Homo sapiens
MEPAVSEPMRDQVARTHLTEDTPKVNADIEKVNQNQAKRCTVIGGSGFLGQHMVEQLLARGYAVNVFDIQQGFDNPQVRFFLGDLCSRQDLYPALKGVNTVFHCASPPPSSNNKELFYRVNYIGTKNVIETCKEAGVQKLILTSSASVIFEGVDIKNGTEDLPYAMKPIDYYTETKILQERAVLGANDPEKNFLTTAIRPHGIFGPRDPQLVPILIEAARNGKMKFVIGNGKNLVDFTFVENVVHGHILAAEQL

SEQ ID NO: 54900 - protein, 373 aa, Homo sapiens; identical to SEQ ID NO: 54898

SEQ ID NO: 54901 - protein, 274 aa, Homo sapiens
MVGRRALIVLAHSERTSFNYAMKEAAAAALKKKGWEVVESDLYAMNFNPIISRKDITGKLKDPANFQYPAESVLAYKEGHLSPDIVAEQKKLEAADLVIFQFPLQWFGVPAILKGWFERVFIGEFAYTYAAMYDKGPFRSKKAVLSITTGGSGSMYSLQGIHGDMNVILWPIQSGILHFCGFQVLEPQLTYSIGHTPADARIQILEGWKKRLENIWDETPLYFAPSSLFDLNFQAGFLMKKEVQDEEKNKKFGLSVGHHLGKSIPTDNQIKARK

SEQ ID NO: 54902 - protein, 236 aa, Homo sapiens
MVGRRALIVLAHSERTSFNYAMKEAAAAALKKKGWEVVESDLYAMNFNPIISRKDITGKLKDPANFQYPAESVLAYKEGHLSPDIVAEQKKLEAADLVIFQSKKAVLSITTGGSGSMYSLQGIHGDMNVILWPIQSGILHFCGFQVLEPQLTYSIGHTPADARIQILEGWKKRLENIWDETPLYFAPSSLFDLNFQAGFLMKKEVQDEEKNKKFGLSVGHHLGKSIPTDNQIKARK

SEQ ID NO: 54903 - protein, 240 aa, Homo sapiens
MVGRRALIVLAHSERTSFNYAMKEAAAAALKKKGWEVVESDLYAMNFNPIISRKDITGKLKDPANFQYPAESVLAYKEGHLSPDIVAEQKKLEAADLVIFQFPLQWFGVPAILKGWFERVFIGEFAYTYAAMYDKGPFRSGILHFCGFQVLEPQLTYSIGHTPADARIQILEGWKKRLENIWDETPLYFAPSSLFDLNFQAGFLMKKEVQDEEKNKKFGLSVGHHLGKSIPTDNQIKARK

SEQ ID NO: 54904 - protein, 202 aa, Homo sapiens
MVGRRALIVLAHSERTSFNYAMKEAAAAALKKKGWEVVESDLYAMNFNPIISRKDITGKLKDPANFQYPAESVLAYKEGHLSPDIVAEQKKLEAADLVIFQSGILHFCGFQVLEPQLTYSIGHTPADARIQILEGWKKRLENIWDETPLYFAPSSLFDLNFQAGFLMKKEVQDEEKNKKFGLSVGHHLGKSIPTDNQIKARK

SEQ ID NO: 54905 - protein, 231 aa, Homo sapiens
MAGKKVLIVYAHQEPKSFNGSLKNVAVDELSRQGCTVTVSDLYAMNLEPRATDKDITGTLSNPEVFNYGVETHEAYKQRSLASDITDEQKKVREADLVIFQFPLYWFSVPAILKGWMDRVLCQGFAFDIPGFYDSGLLQGKLALLSVTTGGTAEMYTKTGVNGDSRYFLWPLQHGTLHFCGFKVLAPQISFAPEIASEEERKGMVAAWSQRLQTIWKEEPIPCTAHWHFGQ

SEQ ID NO: 54906 - protein, 231 aa, Homo sapiens; identical to SEQ ID NO: 54905

SEQ ID NO: 54907 - protein, 193 aa, Homo sapiens
MAGKKVLIVYAHQEPKSFNGSLKNVAVDELSRQGCTVTVSDLYAMNLEPRATDKDITGTLSNPEVFNYGVETHEAYKQRSLASDITDEQKKVREADLVIFQGKLALLSVTTGGTAEMYTKTGVNGDSRYFLWPLQHGTLHFCGFKVLAPQISFAPEIASEEERKGMVAAWSQRLQTIWKEEPIPCTAHWHFGQ

SEQ ID NO: 54908 - protein, 193 aa, Homo sapiens; identical to SEQ ID NO: 54907

SEQ ID NO: 54909 - protein, 231 aa, Homo sapiens; identical to SEQ ID NO: 54905

SEQ ID NO: 54910 - protein, 139 aa, Homo sapiens
MAGKKVLIVYAHQEPKSFNGSLKNVAVDELSRQGCTVTVSDLYAMNLEPRATDKDITGTLSNPEVFNYGVETHEAYKQRSLASDITDEQKKVREADLVIFQFPLYWFSVPAILKGWMDRVLCQGFAFDIPGFYDSGLLQ

SEQ ID NO: 54911 - protein, 139 aa, Homo sapiens; identical to SEQ ID NO: 54910

SEQ ID NO: 54912 - protein, 63 aa, Homo sapiens
MAGKKVLIVYAHQEPKSFNGSLKNVAVDELSRQGCTVTVSDLYAMNLEPRATDKDITGTLSNP

SEQ ID NO: 54913 - protein, 160 aa, Homo sapiens
TPGLKQSSHLSLWSSWDYRLLDSLKRDYAGKPQPPIKSERRNPPSYAMAGKKVLIVYAHQEPKSFNGSLKNVAVDELSRQGCTVTVSDLYAMNLEPRATDKDITGTLSNPEVFNYGVETHEAYKQRSLASDITDEQKKVREADLVIFQMLSTELSLTSRC

SEQ ID NO: 54914 - protein, 76 aa, Homo sapiens
MAAAAASRGVGAKLGLREIRIHLCQRSPGSQGVRDFIEKRYVELKKANPDLPILIRECSDVQPKLWARYASRVQNS

SEQ ID NO: 54915 - protein, 70 aa, Homo sapiens
MWFEILPGLSVMGVCLLIPGLATAYIHRFTNGGKEKRVAHFGYHWSLMERDRRISGVDRYYVSKGLENID

SEQ ID NO: 54916 - protein, 355 aa, Homo sapiens
MALRLLKLAATSASARVVAAGAQRVRGIHSSVQCKLRYGMWHFLLGDKASKRLTERSRVITVDGNICTGKGKLAKEIAEKLGFKHFPEAGIHYPDSTTGDGKPLATDYNGNCSLEKFYDDPRSNDGNSYRLQSWLYSSRLLQYSDALEHLLTTGQGVVLERSIFSDFVFLEAMYNQGFIRKQCVDHYNEVKSVTICDYLPPHLVIYIDVPVPEVQRRIQKKGDPHEMKITSAYLQDIENAYKKTFLPEMSEKCEVLQYSAREAQDSKKVVEDIEYLKFDKGPWLKQDNRTLYHLRLLVQDKFEVLNYTSIPIFLPEVTIGAHQTDRVLHQFRELPGRKYSPGYNTEVGDKWIWLK

SEQ ID NO: 54917 - protein, 355 aa, Homo sapiens
MALRLLKLAATSASARVVARAPSAWRGIHSSVQCKLRYGMWHFLLGDKASKRLTERSRVITVDGNICTGKGKLAKEIAEKLGFKHFPEAGIHYPDSTTGDGKPLATDYNGNCSLEKFYDDPRSNDGNSYRLQSWLYSSRLLQYSDALEHLLTTGQGVVLERSIFSDFVFLEAMYNQGFIRKQCVDHYNEVKSVTICDYLPPHLVIYIDVPVPEVQRRIQKKGDPHEMKITSAYLQDIENAYKKTFLPEMSEKCEVLQYSAREAQDSKKVVEDIEYLKFDKGPWLKQDNRTLYHLRLLVQDKFEVLNYTSIPIFLPEVTIGAHQTDRVLHQFRELPGRKYSPGYNTEVGDKWIWLK

SEQ ID NO: 54918 - protein, 141 aa, Homo sapiens
MAPKVFRQYWDIPDGTDCHRKAYSTTSIASVAGLTAAAYRVTLNPPGTFLEGVAKVGQYTFTAAAVGAVFGLTTCISAHVREKPDDPLNYFLGGCAGGLTLGARTHNYGIGAAACVYFGIAASLVKMGRLEGWEVFAKPKV

SEQ ID NO: 54919 - protein, 228 aa, Homo sapiens
MAPKVFRQYWDIPDGTDCHRKAYSTTSIASVAGLTAAAYRVTLNPPGTFLEGVAKVGQYTFTAAAVGAVFGLTTCISAHVREKPDDPLNYFLGGCAGGLTLGARKTGSHCVVQAGLKLLASSSPHTSASQSAGIIGMSHCVQRFWVPSSSACLEVLSGESTDVHACSSTRGACNSSGSRPLPELGARASGSLRKGGHTHPAPRGAGALTPVQALIESLLNTLGSNPRT

SEQ ID NO: 54920 - protein, 227 aa, Homo sapiens
MQEPRRVTPCLGKRGVKTPQLQPGSAFLPRVRRQSFPARSDSYTTVRDFLAVPRTISSASATLIMAVAVSHFRPGPEVWDTASMAASKVKQDMPPPGGYGPIDYKRNLPRRGLSGYSMLAIGIGTLIYGHWSIMKWNRERRRLQIEDFEARIALLPLLQAETDRRTLQMLRENLEEEAIIMKDVPDWKVGESVFHTTRWVPPLIGELYGLRTTEEALHASHGFMWYT

SEQ ID NO: 54921 - protein, 144 aa, Homo sapiens
MAASKVKQDMPPPGGYGPIDYKRNLPRRGLSGYSMLAIGIGTLIYGHWSIMKWNRERRRLQIEDFEARIALLPLLQAETDRRTLQMLRENLEEEAIIMKDVPDWKVGESVFHTTRWVPPLIGELYGLRTTEEALHASHGFMWYT

SEQ ID NO: 54922 - protein, 99 aa, Homo sapiens
MAAAAASRGVGAKLGLREIRIHLCQRSPGSQGVRDFIEKRYVELKKANPDLPILIRECSDVQPKLWARYAFGQETNVPLNNFSADQVTRALENVLSGKA

SEQ ID NO: 54923 - protein, 239 aa, Homo sapiens
MAGVLKKTTGLVGLAVCNTPHEVCTFVLSSFLNSQGRLNSCHFAYCRVNGIQMFQALNYKPRELLRHGRCPPTSLIRCHIFIYFCHDLFIKPVFLLTFSLTFSWLHLCLLLSAPSQIYISVFHLFSLPYRFCLGALDYIYLGLLKVLPPFPSVRSFPSVFTNVFIKKTHKFFILLVPSIITPFLCFTLQITQKSYLYFLQFLSYSPLNALSHPWRFSSSPIISMLPNPMVSSYFSPSLT

SEQ ID NO: 54924 - protein, 116 aa, Homo sapiens
MAGVLKKTTGLVGLAVCNTPHERLRILYTKILDVLEEIPKNAAYRKYTEQITNEKLAMVKAEPDVKKLEDQLQGGQLEEVILQAEHELNLARKMREWKLWEPLVEEPPADQWKWPI

SEQ ID NO: 54925 - protein, 116 aa, Homo sapiens
MPYRVGQTTGLVGLAVCNTPHERLRILYTKILDVLEEIPKNAAYRKYTEQITNEKLAMVKAEPDVKKLEDQLQGGQLEEVILQAEHELNLARKMREWKLWEPLVEEPPADQWKWPI

SEQ ID NO: 54926 - protein, 154 aa, Homo sapiens
MGKDIRPRSARAACKGVGLWSGCFGKMAGSGVRQATSTASTFVKPIFSRDMNEAKRRVRELYRAWYREVPNTVHQFQLDITVKMGRDKVREMFMKNAHVTDPRVVDLLVIKGKIELEETIKVWKQRTHVMRFFHETEAPRPKDFLSKFYVGHDP

SEQ ID NO: 54927 - protein, 113 aa, Homo sapiens
MASATRLIQRLRNWASGHDLQGKLQLRYQEISKRTQPPPKLPVGPSHKLSNNYYCTRDGRRESVPPSIIMSSQKALVSGKPAESSAVAATEKKAVTPAPPIKRWELSSDQPYL

SEQ ID NO: 54928 - protein, 172 aa, Homo sapiens
MPGIVELPTLEELKVDEVKISSAVLKAAAHHYGAQCDKPNKEFMLCRWEEKDPRRCLEEGKLVNKCALDFFRQIKRHCAEPFTEYWTCIDYTGQQLFRHCRKQQAKFDECVLDKLGWVRPDLGELSKVTKVKTDRPLPENPYHSRPRPDPSPEIEGDLQPATHGSRFYFWTK

SEQ ID NO: 54929 - protein, 128 aa, Homo sapiens
MPGIVELPTLEELKVDEVKISSAVLKAAAHHYGAQCDKPNKEFMLCRWEEKDPRRCLEEGKLVNKCALDFFRQIKRHCAEPFTEYWTCIDYTGQQLFRHCRKQQAKFDECVLDKLGWVRPDLGELSKG

SEQ ID NO: 54930 - protein, 377 aa, Homo sapiens
MAAAAQSRVVRVLSMSRSAITAIATSVCHGPPCRQLHHALMPHGKGGRSSVSGIVATVFGATGFLGRYVVNHLGRMGSQVIIPYRCDKYDIMHLRPMGDLGQLLFLEWDARDKDSIRRVVQHSNVVINLIGRDWETKNFDFEDVFVKIPQAIAQLSKEAGVEKFIHVSHLNANIKSSSRYLRNKAVGEKVVRDAFPEAIIVKPSDIFGREDRFLNSFASMHRFGPIPLGSLGWKTVKQPVYVVDVSKGIVNAVKDPDANGKSFAFVGPSRYLLFHLVKYIFAVAHRLFLPFPLPLFAYRWVARVFEISPFEPWITRDKVERMHITDMKLPHLPGLEDLGIQATPLELKAIEVLRRHRTYRWLSAEIEDVKPAKTVNI

SEQ ID NO: 54931 - protein, 327 aa, Homo sapiens
MALVHKLLRGTYFLRKFSKPTSALYPFLGIRFAEYSSSLQKPVASPGKASSQRKTEGDLQGDHQKEVALDITSSEEKPDVSFDKAIRDEAIYHFRLLKDEIVDHWRGPEGHPLHEVLLEQAKVVWQFRGKEDLDKWTVTSDKTIGGRSEVFLKMGKNNQSALLYGTLSSEAPQDGESTRSGYCAMISRIPRGAFERKMSYDWSQFNTLYLRVRGDGRPWMVNIKEDTDFFQRTNQMYSYFMFTRGGPYWQEVKIPFSKFFFSNRGRIRDVQHELPLDKISSIGFTLADKVDGPFFLEIDFIGVFTDPAHTEEFAYENSPELNPRLFK

SEQ ID NO: 54932 - protein, 191 aa, Homo sapiens
MALVHKLLRGTYFLRKFSKPTSALYPFLGIRFAEYSSSLQKPVASPGKASSQRKTEGDLQGDHQKEVALDITSSEEKPDVSFDKAIRDEAIYHFRLLKDEIVDHWRGPEGHPLHEVLLEQAKVVWQFRGKEDLDKWTVTSDKTIGGRSEVFLKMGKNNQSALLYGTLSSEAPQDGESTRSGYCAMISRIPR

SEQ ID NO: 54933 - protein, 209 aa, Homo sapiens
MALVHKLLRGTYFLRKFSKPTSALYPFLGIRFAEYSSSLQKPVASPGKASSQRKTEGDLQGDHQKEVALDITSSEEKPDVSFDKAIRDEAIYHFRLLKDEIVDHWRGPEGHPLHEVLLEQAKVVWQFRGKEDLDKWTVTSDKTIGGRSEVFLKMGKNNQSALLYGTLSSEAPQDGESTRSGYCAMISRIPRGAFERKMSYDWSQFNTLY

SEQ ID NO: 54934 - protein, 169 aa, Homo sapiens
MGWSQDLFRALWRSLSREVKEHVGTDQFGNKYYYIPQYKNWRGQTIREKRIVEAANKKEVDYEAGDIPTEWEAWIRRTRKTPPTMEEILKNEKHREEIKIKSQDFYEKEKLLSKETSEELLPPPVQTQIKGHASAPYFGKEEPSVAPSSTGKTFQPGSWMPRDGKSHNQ

SEQ ID NO: 54935 - protein, 127 aa, Homo sapiens
MYIDSYNSRGFMINGNRVLGPCALLPHSVVQWNVGSHQDITEDSFSLFWLLEPRIEIVVVGTGDRTERLQSQVLQAMRQRGIAVEVQDTPNACATFNFLCHEGRVTGAALIPPPGGTSLTSLGQAAQ

SEQ ID NO: 54936 - protein, 184 aa, Homo sapiens
MATALALRSLYRARPSLRCPPVELPWAPRRGHRLSPADDELYQRTRISLLQREAAQAMYIDSYNSRGFMINGNRVLGPCALLPHSVVQWNVGSHQDITEDSFSLFWLLEPRIEIVVVGTGDRTERLQSQVLQAMRQRGIAVEVQDTPNACATFNFLCHEGRVTGAALIPPPGGTSLTSLGQAAQ

SEQ ID NO: 54937 - protein, 127 aa, Homo sapiens; identical to SEQ ID NO: 54935

SEQ ID NO: 54938 - protein, 127 aa, Homo sapiens; identical to SEQ ID NO: 54935

SEQ ID NO: 54939 - protein, 175 aa, Homo sapiens
MGALVIRGIRNFNLENRAEREISKMKPSVAPRHPSTNSLLREQISLYPEVKGEIARKDEKLLSFLKDVYVDSKDPVSSLQVKAAETCQEPKEFRLPKDHHFDMINIKSIPKGKISIVEALTLLNNHKLFPETWTAEKIMQEYQLEQKDVNSLLKYFVTFEVEIFPPEDKKAIRSK

SEQ ID NO: 54940 - protein, 172 aa, Homo sapiens
MPDSWDKDVYPEPPRRTPVQPNPIVYMMKAFDLIVDRPVTLVREFIERQHAKNRYYYYHRQYRRVPDITECKEEDIMCMYEAEMQWKRDYKVDQEIINIMQDRLKACQQREGQNYQQNCIKEVEQFTQVAKAYQDRYQDLGAYSSARKCLAKQRQRMLQERKAAKEAAAATS

SEQ ID NO: 54941 - protein, 168 aa, Homo sapiens
MPDSWDKDVYPEPPRRTPVQPNPIVYMMKAFDLIVDRPVTLVREFIERQHAKNRYYYYHRQYRRVPDITECKEEDIMCMYEAEMQWKRDYKVDQEIINIMQDRLKACQQREGQNYQQNCIKEVEQFTQVAKAYQDRCACPTHPQPPTILLRPGGQNHCKSSLPSLVLT

SEQ ID NO: 54942 - protein, 163 aa, Homo sapiens
MAAGLFGLSARRLLAAAATRGLPAARVRWESSFSRTVVAPSAVAGKRPPEPTTPWQEDPEPEDENLYEKNPDSHGYDKDPVLDVWNMRLVFFFGVSIILVLGSTFVAYLPDYRCTGCPRAWDGMKEWSRREAERLVKYREANGLPIMESNCFDPSKIQLPEDE

SEQ ID NO: 54943 - protein, 153 aa, Homo sapiens
MAAGLFGLSARRLLAAAATRGLPAARVRWESSFSRTVVAPSAVAGKRPPEPTTPWQEDPEPEDENLYEKNPDSHGYDKDPVLDVWNMRLVFFFGVSIILVLGSTFVAYLPDYRMKEWSRREAERLVKYREANGLPIMESNCFDPSKIQLPEDE

SEQ ID NO: 54944 - protein, 157 aa, Homo sapiens
AAPSVMAAGLFGLSARRLLAARRRGLPAARVRWESSFSRTVVAPSAVAGKRPPEPTTPWQEDPEPEDENLYEKNPDSHGYDKDPVLDVWNMRLVFFFGVSIILVLGSTFVAYLPDYRMKEWSRREAERLVKYREANGLPIMESNCFDPSKIQLPEDE

SEQ ID NO: 54945 - protein, 98 aa, Homo sapiens
MAHEHGHEHGHHKMELPDYRQWKIEGTPLETIQKKLAAKGLRDPWGRNEAWRYMGGFAKSVSFSDVFFKGFKWGFAAFVVAVGAEYYLESLNKDKKHH

SEQ ID NO: 54946 - protein, 98 aa, Homo sapiens; identical to SEQ ID NO: 54945

SEQ ID NO: 54947 - protein, 65 aa, Homo sapiens
MAHEHGHEHGHHKMELPDYRQWKIEGTPLETIQKKLAAKGLRDPWGRNEAWRYMGGFAKSVSFSD

SEQ ID NO: 54948 - protein, 98 aa, Homo sapiens; identical to SEQ ID NO: 54945

SEQ ID NO: 54949 - protein, 137 aa, Homo sapiens
MGAHLVRRYLGDASVEPDPLQMPTFPPDYGFPERKEREMVATQQEMMDAQLRLQLRDYCAHHLIRLLKCKRDSFPNFLACKQERHDWDYCEHRDYVMRMKEFERERRLLQRKKRREKKAAELAKGQGPGEVDPKVAL

SEQ ID NO: 54950 - protein, 186 aa, Homo sapiens
MAVARAGVLGVQWLQRASRNVMPLGARTASHMTKDMFPGPYPRTPEERAAAAKKYNMRVEDYEPYPDDGMGYGDYPKLPDRSQHERDPWYSWDQPGLRLNWGEPMHWHLDMYNRNRVDTSPTPVSWHVMCMQLFGFLAFMIFMCWVGDVYPVYQPVGPKQYPYNNLYLERGGDPSKEPERVVHYEI

SEQ ID NO: 54951 - protein, 172 aa, Homo sapiens
MAVARAGVLGVQWLQRASRNVMPLGARTASHMTKDMFPGPYPRTPEERAAAAKKYNMRVEDYEPYPDDGMGYGDYPKLPDRSQHERDPWYSWDQPGLRLNWGEPMHWHLDMYNRNRVDTSPTPVSWHVMCMQLFGFLAFMIFMCWVGDVYPVYQPVCRHHFSYNLGFLSALG

SEQ ID NO: 54952 - protein, 155 aa, Homo sapiens
MTKDMFPGPYPRTPEERAAAAKKYNMRVEDYEPYPDDGMGYGDYPKLPDRSQHERDPWYSWDQPGLRLNWGEPMHWHLDMYNRNRVDTSPTPVSWHVMCMQLFGFLAFMIFMCWVGDVYPVYQPVGPKQYPYNNLYLERGGDPSKEPERVVHYEI

SEQ ID NO: 54953 - protein, 172 aa, Homo sapiens; identical to SEQ ID NO: 54951

SEQ ID NO: 54954 - protein, 179 aa, Homo sapiens
MAFLASGPYLTHQQKVLRLYKRALRHLESWCVQRDKYRYFACLMRARFEEHKNEKDMAKATQLLKEAEEEFWYRQHPQPYIFPDSPGGTSYERYDCYKVPEWCLDDWHPSEKAMYPDYFAKREQWKKLRRESWEREVKQLQEETPPGGPLTEALPPARKEGDLPPLWWYIVTRPRERPM

SEQ ID NO: 54955 - protein, 156 aa, Homo sapiens
MASRVLSAYVSRLPAAFAPLPRVRMLAVARPLSTALCSAGTQTRLGTLQPALVLAQVPGRVTQLCRQYSDMPPLTLEGIQDRVLYVLKLYDKIDPEKLSVNSHFMKDLGLDSLDQVEIIMAMEDEFGFEIPDIDAEKLMCPQEIVDYIADKKDVYE

SEQ ID NO: 54956 - protein, 76 aa, Homo sapiens
MAPSALLRPLSRLLAPARLPSGPSVRSKFYVREPPNAKPDWLKVGFTLGTTVFLWIYLIKQHNEDILEYKRRNGLE

SEQ ID NO: 54957 - protein, 76 aa, Homo sapiens; identical to SEQ ID NO: 54956

SEQ ID NO: 54958 - protein, 76 aa, Homo sapiens; identical to SEQ ID NO: 54956

SEQ ID NO: 54959 - protein, 76 aa, Homo sapiens; identical to SEQ ID NO: 54956

SEQ ID NO: 54960 - protein, 76 aa, Homo sapiens; identical to SEQ ID NO: 54956

SEQ ID NO: 54961 - protein, 76 aa, Homo sapiens; identical to SEQ ID NO: 54956

SEQ ID NO: 54962 - protein, 76 aa, Homo sapiens; identical to SEQ ID NO: 54956

SEQ ID NO: 54963 - protein, 76 aa, Homo sapiens; identical to SEQ ID NO: 54956

SEQ ID NO: 54964 - protein, 727 aa, Homo sapiens
MLRIPVRKALVGLSKSPKGCVRTTATAASNLIEVFVDGQSVMVEPGTTVLQACEKVGMQIPRFCYHERLSVAGNCRMCLVEIEKAPKVVAACAMPVMKGWNILTNSEKSKKAREGVMEFLLANHPLDCPICDQGGECDLQDQSMMFGNDRSRFLEGKRAVEDKNIGPLVKTIMTRCIQCTRCIRFASEIAGVDDLGTTGRGNDMQVGTYIEKMFMSELSGNIIDICPVGALTSKPYAFTARPWETRKTESIDVMDAVGSNIVVSTRTGEVMRILPRMHEDINEEWISDKTRFAYDGLKRQRLTEPMVRNEKGLLTYTSWEDALSRVAGMLQSFQGKDVAAIAGGLVDAEALVALKDLLNRVDSDTLCTEEVFPTAGAGTDLRSNYLLNTTIAGVEEADVVLLVGTNPRFEAPLFNARIRKSWLHNDLKVALIGSPVDLTYTYDHLGDSPKILQDIASGSHPFSQVLKEAKKPMVVLGSSALQRNDGAAILAAVSSIAQKIRMTSGVTGDWKVMNILHRIASQVAALDLGYKPGVEAIRKNPPKVLFLLGADGGCITRQDLPKDCFIIYQGHHGDVGAPIADVILPGAAYTEKSATYVNTEGRAQQTKVAVTPPGLAREDWKIIRALSEIAGMTLPYDTLDQVRNRLEEVSPNLVRYDDIEGANYFQQANELSKLVNQQLLADPLVPPQLTIKDFYMTDSISRASQTMAKCVKAVTEGAQAVEEPSIC

SEQ ID NO: 54965 - protein, 670 aa, Homo sapiens
MQIPRFCYHERLSVAGNCRMCLVEIEKAPKVVAACAMPVMKGWNILTNSEKSKKAREGVMEFLLANHPLDCPICDQGGECDLQDQSMMFGNDRSRFLEGKRAVEDKNIGPLVKTIMTRCIQCTRCIRFASEIAGVDDLGTTGRGNDMQVGTYIEKMFMSELSGNIIDICPVGALTSKPYAFTARPWETRKTESIDVMDAVGSNIVVSTRTGEVMRILPRMHEDINEEWISDKTRFAYDGLKRQRLTEPMVRNEKGLLTYTSWEDALSRVAGMLQSFQGKDVAAIAGGLVDAEALVALKDLLNRVDSDTLCTEEVFPTAGAGTDLRSNYLLNTTIAGVEEADVVLLVGTNPRFEAPLFNARIRKSWLHNDLKVALIGSPVDLTYTYDHLGDSPKILQDIASGSHPFSQVLKEAKKPMVVLGSSALQRNDGAAILAAVSSIAQKIRMTSGVTGDWKVMNILHRIASQVAALDLGYKPGVEAIRKNPPKVLFLLGADGGCITRQDLPKDCFIIYQGHHGDVGAPIADVILPGAAYTEKSATYVNTEGRAQQTKVAVTPPGLAREDWKIIRALSEIAGMTLPYDTLDQVRNRLEEVSPNLVRYDDIEGANYFQQANELSKLVNQQLLADPLVPPQLTIKDFYMTDSISRASQTMAKCVKAVTEGAQAVEEPSIC

SEQ ID NO: 54966 - protein, 616 aa, Homo sapiens
MWEGVMEFLLANHPLDCPICDQGGECDLQDQSMMFGNDRSRFLEGKRAVEDKNIGPLVKTIMTRCIQCTRCIRFASEIAGVDDLGTTGRGNDMQVGTYIEKMFMSELSGNIIDICPVGALTSKPYAFTARPWETRKTESIDVMDAVGSNIVVSTRTGEVMRILPRMHEDINEEWISDKTRFAYDGLKRQRLTEPMVRNEKGLLTYTSWEDALSRVAGMLQSFQGKDVAAIAGGLVDAEALVALKDLLNRVDSDTLCTEEVFPTAGAGTDLRSNYLLNTTIAGVEEADVVLLVGTNPRFEAPLFNARIRKSWLHNDLKVALIGSPVDLTYTYDHLGDSPKILQDIASGSHPFSQVLKEAKKPMVVLGSSALQRNDGAAILAAVSSIAQKIRMTSGVTGDWKVMNILHRIASQVAALDLGYKPGVEAIRKNPPKVLFLLGADGGCITRQDLPKDCFIIYQGHHGDVGAPIADVILPGAAYTEKSATYVNTEGRAQQTKVAVTPPGLAREDWKIIRALSEIAGMTLPYDTLDQVRNRLEEVSPNLVRYDDIEGANYFQQANELSKLVNQQLLADPLVPPQLTIKDFYMTDSISRASQTMAKCVKAVTEGAQAVEEPSIC

SEQ ID NO: 54967 - protein, 691 aa, Homo sapiens
MLRIPVRKALVGLSKSPKGCVRTTATAASNLIEVFVDGQSVMVEPGTTVLQVVAACAMPVMKGWNILTNSEKSKKAREGVMEFLLANHPLDCPICDQGGECDLQDQSMMFGNDRSRFLEGKRAVEDKNIGPLVKTIMTRCIQCTRCIRFASEIAGVDDLGTTGRGNDMQVGTYIEKMFMSELSGNIIDICPVGALTSKPYAFTARPWETRKTESIDVMDAVGSNIVVSTRTGEVMRILPRMHEDINEEWISDKTRFAYDGLKRQRLTEPMVRNEKGLLTYTSWEDALSRVAGMLQSFQGKDVAAIAGGLVDAEALVALKDLLNRVDSDTLCTEEVFPTAGAGTDLRSNYLLNTTIAGVEEADVVLLVGTNPRFEAPLFNARIRKSWLHNDLKVALIGSPVDLTYTYDHLGDSPKILQDIASGSHPFSQVLKEAKKPMVVLGSSALQRNDGAAILAAVSSIAQKIRMTSGVTGDWKVMNILHRIASQVAALDLGYKPGVEAIRKNPPKVLFLLGADGGCITRQDLPKDCFIIYQGHHGDVGAPIADVILPGAAYTEKSATYVNTEGRAQQTKVAVTPPGLAREDWKIIRALSEIAGMTLPYDTLDQVRNRLEEVSPNLVRYDDIEGANYFQQANELSKLVNQQLLADPLVPPQLTIKDFYMTDSISRASQTMAKCVKAVTEGAQAVEEPSIC

SEQ ID NO: 54968 - protein, 727 aa, Homo sapiens; identical to SEQ ID NO: 54964

SEQ ID NO: 54969 - protein, 130 aa, Homo sapiens
MLRIPVRKALVGLSKSPKGCVRTTATAASNLIEVFVDGQSVMVEPGTTVLQACEKVGMQIPRFCYHERLSVAGNCRMCLVEIEKAPKVVAACAMPVMKGWNILTNSEKSKKAREGVMEFLLANHPLDCPI

SEQ ID NO: 54970 - protein, 741 aa, Homo sapiens
MRIRGSSGTLSRINMLRIPVRKALVGLSKSPKGCVRTTATAASNLIEVFVDGQSVMVEPGTTVLQACEKVGMQIPRFCYHERLSVAGNCRMCLVEIEKAPKVVAACAMPVMKGWNILTNSEKSKKAREGVMEFLLANHPLDCPICDQGGECDLQDQSMMFGNDRSRFLEGKRAVEDKNIGPLVKTIMTRCIQCTRCIRFASEIAGVDDLGTTGRGNDMQVGTYIEKMFMSELSGNIIDICPVGALTSKPYAFTARPWETRKTESIDVMDAVGSNIVVSTRTGEVMRILPRMHEDINEEWISDKTRFAYDGLKRQRLTEPMVRNEKGLLTYTSWEDALSRVAGMLQSFQGKDVAAIAGGLVDAEALVALKDLLNRVDSDTLCTEEVFPTAGAGTDLRSNYLLNTTIAGVEEADVVLLVGTNPRFEAPLFNARIRKSWLHNDLKVALIGSPVDLTYTYDHLGDSPKILQDIASGSHPFSQVLKEAKKPMVVLGSSALQRNDGAAILAAVSSIAQKIRMTSGVTGDWKVMNILHRIASQVAALDLGYKPGVEAIRKNPPKVLFLLGADGGCITRQDLPKDCFIIYQGHHGDVGAPIADVILPGAAYTEKSATYVNTEGRAQQTKVAVTPPGLAREDWKIIRALSEIAGMTLPYDTLDQVRNRLEEVSPNLVRYDDIEGANYFQQANELSKLVNQQLLADPLVPPQLTIKDFYMTDSISRASQTMAKCVKAVTEGAQAVEEPSIC

SEQ ID NO: 54971 - protein, 611 aa, Homo sapiens
MEFLLANHPLDCPICDQGGECDLQDQSMMFGNDRSRFLEGKRAVEDKNIGPLVKTIMTRCIQCTRCIRFASEIAGVDDLGTTGRGNDMQVGTYIEKMFMSELSGNIIDICPVGALTSKPYAFTARPWETRKTESIDVMDAVGSNIVVSTRTGEVMRILPRMHEDINEEWISDKTRFAYDGLKRQRLTEPMVRNEKGLLTYTSWEDALSRVAGMLQSFQGKDVAAIAGGLVDAEALVALKDLLNRVDSDTLCTEEVFPTAGAGTDLRSNYLLNTTIAGVEEADVVLLVGTNPRFEAPLFNARIRKSWLHNDLKVALIGSPVDLTYTYDHLGDSPKILQDIASGSHPFSQVLKEAKKPMVVLGSSALQRNDGAAILAAVSSIAQKIRMTSGVTGDWKVMNILHRIASQVAALDLGYKPGVEAIRKNPPKVLFLLGADGGCITRQDLPKDCFIIYQGHHGDVGAPIADVILPGAAYTEKSATYVNTEGRAQQTKVAVTPPGLAREDWKIIRALSEIAGMTLPYDTLDQVRNRLEEVSPNLVRYDDIEGANYFQQANELSKLVNQQLLADPLVPPQLTIKDFYMTDSISRASQTMAKCVKAVTEGAQAVEEPSIC

SEQ ID NO: 54972 - protein, 463 aa, Homo sapiens
MAALRALCGFRGVAAQVLRPGAGVRLPIQPSRGVRQWQPDVEWAQQFGGAVMYPSKETAHWKPPPWNDVDPPKDTIVKNITLNFGPQHPAAHGVLRLVMELSGEMVRKCDPHIGLLHRGTEKLIEYKTYLQALPYFDRLDYVSMMCNEQAYSLAVEKLLNIRPPPRAQWIRVLFGEITRLLNHIMAVTTHALDLGAMTPFFWLFEEREKMFEFYERVSGARMHAAYIRPGGVHQDLPLGLMDDIYQFSKNFSLRLDELEELLTNNRIWRNRTIDIGVVTAEEALNYGFSGVMLRGSGIQWDLRKTQPYDVYDQVEFDVPVGSRGDCYDRYLCRVEEMRQSLRIIAQCLNKMPPGEIKVDDAKVSPPKRAEMKTSMESLIHHFKLYTEGYQVPPGATYTAIEAPKGEFGVYLVSDGSSRPYRCKIKAPGFAHLAGLDKMSKGHMLADVVAIIGTQDIVFGEVDR

SEQ ID NO: 54973 - protein, 457 aa, Homo sapiens
MAALRALCGFRGVAAQVLRPGAGVRLPIQPSRGVRQWQPDVEWAQQFGGAVMYPSKETAHWKPPPWNDVDPPKDTIVKNITLNFGPQHPAAHGVLRLVMELSGEMVRKCDPHIGLLHRGTEKLIEYKTYLQALPYFDRLDYVSMMCNEQAYSLAVEKLLNIRPPPRAQWIRVLFGEITRLLNHIMAVTTHALDLGAMTPFFWLFEEREKMFEFYERVSGARMHAAYIRPGGVHQDLPLGLMDDIYQFSKNFSLRLDELEELLTNNRIWRNRTIDIGVVTAEEALNYGFSGVMLRGSGIQWDLRKTQPYDVYDQVEFDVPVGSRGDCYDRYLCRVEEMRQSLRIIAQCLNKMPPGEIKVDDAKVSPPKRAEMKTSMESLIHHFKLYTEGYQVPPGATYTAIEAPKGEFGVYLVSDGSSRPYRCKIKAPGFAHLAGLDKMSKGHMLADVVAIIGTRPIV

SEQ ID NO: 54974 - protein, 231 aa, Homo sapiens
MELSGEMVRKCDPHIGLLHRGTEKLIEYKTYLQALPYFDRLDYVSMMCNEQAYSLAVEKLLNIRPPPRAQWIRVLFGEITRLLNHIMAVTTHALDLGAMTPFFWLFEEREKMFEFYERVSGARMHAAYIRPGGVHQDLPLGLMDDIYQFSKNFSLRLDELEELLTNNRIWRNRTIDIGVVTAEEALNYGFSGVMLRGSGIQWDLRKTQPYDVYDQVEFDVPVGSRGDCYDR

SEQ ID NO: 54975 - protein, 53 aa, Homo sapiens
MFEFYERVSGARMHAAYIRPGGVHQDLPLGLMDDIYQFSKNFSLRLDELEEVS

SEQ ID NO: 54976 - protein, 264 aa, Homo sapiens
MAAAAVARLWWRGILGASALTRGTGRPSVLLLPVRRESAGADTRPTVRPRNDVAHKQLSAFGEYVAEILPKYVQQVQVSCFNELEVCIHPDGVIPVLTFLRDHTNAQFKSLVDLTAVDVPTRQNRFEIVYNLLSLRFNSRIRVKTYTDELTPIESAVSVFKAANWYEREIWDMFGVFFANHPDLRRILTDYGFEGHPFRKDFPLSGYVELRYDDEVKRVVAEPVELAQEFRKFDLNSPWEAFPVYRQPPESLKLEAGDKKPDAK

SEQ ID NO: 54977 - protein, 175 aa, Homo sapiens
MAAVSMSVVLRQTLWRRRAVAVAALSVSRVPTRSLRTSTWRLAQDQTQDTQLITVDEKLDITTLTGVPEEHIKTRKVRIFVPARNNMQSGVNNTKKWKMEFDTRERWENPLMGWASTADPLSNMVLTFSTKEDAVSFAEKNGWSYDIEERKVPKPKSKSYGANFSWNKRTRVSTK

SEQ ID NO: 54978 - protein, 106 aa, Homo sapiens
MPFLDIQKRFGLNIDRWLTIQSGEQPYKMAGRCHAFEKEWIECAHGIGYTRAEKECKIEYDDFVECLLRQKTMRRAGTIRKQRDKLIKEGKYTPPPHHIGKGEPRP

SEQ ID NO: 54979 - protein, 106 aa, Homo sapiens; identical to SEQ ID NO: 54978

SEQ ID NO: 54980 - protein, 124 aa, Homo sapiens
MAAAMTFCRLLNRCGEAARSLPLGARCFGVRVSPTGEKVTHTGQVYDDKDYRRIRFVGRQKEVNENFAIDLIAEQPVSEVETRVIACDGGGGALGHPKVYINLDKETKTGTCGYCGLQFRQHHH

SEQ ID NO: 54981 - protein, 213 aa, Homo sapiens
MAVLSAPGLRGFRILGLRSSVGPAVQARGVHQSVATDGPSSTQPALPKARAVAPKPSSRGEYVVAKLDDLVNWARRSSLWPMTFGLACCAVEMMHMAAPRYDMDRFGVVFRASPRQSDVMIVAGTLTNKMAPALRKVYDQMPEPRYVVSMGSCANGGGYYHYSYSVVRGCDRIVPVDIYIPGCPPTAEALLYGILQLQRKIKRERRLQIWYRR

SEQ ID NO: 54982 - protein, 206 aa, Homo sapiens
MAVLSAPGLRGFRILGLRSSVGPAVQARGVHQSVATDGPSSTQPALPKARAVAPKPSSRGEYVVAKLDDLVNWARRSSLWPMTFGLACCAVEMMHMAAPRYDMDRFGVVFRASPRQSDVMIVAGTLTNKMAPALRKVYDQMPEPRYVVSMGSCANGGGYYHYSYSVVRGCDRIVPVDIYIPGRAGTAPPTRELETGPAPHGARRPL

SEQ ID NO: 54983 - protein, 294 aa, Homo sapiens
MAVLSAPGLRGFRILGLRSSVGPAVQARGVHQSVATDGPSSTQPALPKARAVAPKPSSRGEYVVAKLDDLVNWARRVSTMSCRPSSSARASLHTHRHTHTHTNVQTRTHTTHACTLTCAHVHASSHVWTDVYTDHTHTHAHNAHMHTRTHAHLHTHAHTSTCAHTLAHIHTCTLALMHTHAHIYTCTRTLAHTCTYMHSHAHTCTLTHMHTRPCVDTCMCACWHACTQAHSLMHTHPCGRGAGRTLPEAPVLAWWPVVPSEDSDPAGDDPSVSVILFLASVCSSCFSFKVKAVF

SEQ ID NO: 54984 - protein, 214 aa, Homo sapiens
MAVLSAPGLRGFRILGLRSSVGPAVQARGVHQSVATDGPSSTQPALPKARAVAPKPSSRGEYVVAKLDDLVNWARRSSLWPMTFGLACCAVEMMHMAAPRYDMDRFGVVFRASPRQSDVMIVAGTLTNKMAPALRKSSLRPDAGAALRGLHGELRQRRRLLPLFLLGGEGLRPHRARGHLHPRLPTTAEALLYGILQLQRKIKRERRLQIWYRR

SEQ ID NO: 54985 - protein, 206 aa, Homo sapiens; identical to SEQ ID NO: 54982

SEQ ID NO: 54986 - protein, 210 aa, Homo sapiens
MRCLTTPMLLRALAQAARAGPPGGRSLHSSAVAATYKYVNMQDPEMDMKSVTDRAARTLLWTELFRGLGMTLSYLFREPATINYPFEKGPLSPRFRGEHALRRYPSGEERCIACKLCEAICPAQAITIEAEPRADGSRRTTRYDIDMTKCIYCGFCQEACPVDAIVEGPNFEFSTETHEELLYNKEKLLNNGDKWEAEIAANIQADYLYR

SEQ ID NO: 54987 - protein, 124 aa, Homo sapiens
MRCLTTPMLLRALAQAARAGPPGGRSLHSSAVAATYKYVNMQDPEMDMKSVTDRAARTLLWTELFRGLGMTLSYLFREPATINYPFEKGPLSPRFRGEHALRRYPSGEERCIACKLCEAICPAQ

SEQ ID NO: 54988 - protein, 110 aa, Homo sapiens
MRCLTTPMLLRALAQAARAGPPGGRSLHSSAVAATYKYVNMQDPEMDMKSVTDRAARTLLWTELFRGLGMTLSYLFREPATINYPFEKGPLSPRFRGEHALRRYPSGEER

SEQ ID NO: 54989 - protein, 184 aa, Homo sapiens
MRCLTTPMLLRALAQAARAGPPGGRSLHSSAVAATYKYVNMQDPEMDMKSVTDRAARTLLWTELFRGLGMTLSYLFREPATINYPFEKGPLSPRFRGEHALRRYPSGEERCIACKLCEAICPAQAITIEAEPRADGSRRTTRYDIDMTKCIYCGFCQEACPVDAIVEGPNFEFSTETHEELLYN

SEQ ID NO: 54990 - protein, 64 aa, Homo sapiens
MTKCIYCGFCQEACPVDAIVEGPNFEFSTETHEELLYNKEKLLNNGDKWEAEIAANIQADYLYR

SEQ ID NO: 54991 - protein, 464 aa, Homo sapiens
MLATRRLLGWSLPARVSVRFSGDTTAPKKTSFGSLKDEDRIFTNLYGRHDWRLKGSLSRGDWYKTKEILLKGPDWILGEIKTSGLRGRGGAGFPTGLKWSFMNKPSDGRPKYLVVNADEGEPGTCKDREILRHDPHKLLEGCLVGGRAMGARAAYIYIRGEFYNEASNLQVAIREAYEAGLIGKNACGSGYDFDVFVVRGAGAYICGEETALIESIEGKQGKPRLKPPFPADVGVFGCPTTVANVETVAVSPTICRRGGTWFAGFGRERNSGTKLFNISGHVNHPCTVEEEMSVPLKELIEKHAGGVTGGWDNLLAVIPGGSSTPLIPKSVCETVLMDFDALVQAQTGLGTAAVIVMDRSTDIVKAIARLIEFYKHESCGQCTPCREGVDWMNKVMARFVRGDARPAEIDSLWEISKQIEGHTICALGDGAAWPVQGLIRHFRPELEERMQRFAQQHQARQAAS

SEQ ID NO: 54992 - protein, 457 aa, Homo sapiens
MLATRRLLGWSLPARVSTAPKKTSFGSLKDEDRIFTNLYGRHDWRLKGSLSRGDWYKTKEILLKGPDWILGEIKTSGLRGRGGAGFPTGLKWSFMNKPSDGRPKYLVVNADEGEPGTCKDREILRHDPHKLLEGCLVGGRAMGARAAYIYIRGEFYNEASNLQVAIREAYEAGLIGKNACGSGYDFDVFVVRGAGAYICGEETALIESIEGKQGKPRLKPPFPADVGVFGCPTTVANVETVAVSPTICRRGGTWFAGFGRERNSGTKLFNISGHVNHPCTVEEEMSVPLKELIEKHAGGVTGGWDNLLAVIPGGSSTPLIPKSVCETVLMDFDALVQAQTGLGTAAVIVMDRSTDIVKAIARLIEFYKHESCGQCTPCREGVDWMNKVMARFVRGDARPAEIDSLWEISKQIEGHTICALGDGAAWPVQGLIRHFRPELEERMQRFAQQHQARQAAS

SEQ ID NO: 54993 - protein, 335 aa, Homo sapiens
MLATRRLLGWSLPARVSVRFSGDTTAPKKTSFGSLKDEDRIFTNLYGRHDWRLKGSLSRGDWYKTKEILLKGPDWILGEIKTSGLRGRGGAGFPTGLKWSFMNKPSDGSPTTVANVETVAVSPTICRRGGTWFAGFGRERNSGTKLFNISGHVNHPCTVEEEMSVPLKELIEKHAGGVTGGWDNLLAVIPGGSSTPLIPKSVCETVLMDFDALVQAQTGLGTAAVIVMDRSTDIVKAIARLIEFYKHESCGQCTPCREGVDWMNKVMARFVRGDARPAEIDSLWEISKQIEGHTICALGDGAAWPVQGLIRHFRPELEERMQRFAQQHQARQAAS

SEQ ID NO: 54994 - protein, 455 aa, Homo sapiens
MLATRRLLGWSLPARTAPKKTSFGSLKDEDRIFTNLYGRHDWRLKGSLSRGDWYKTKEILLKGPDWILGEIKTSGLRGRGGAGFPTGLKWSFMNKPSDGRPKYLVVNADEGEPGTCKDREILRHDPHKLLEGCLVGGRAMGARAAYIYIRGEFYNEASNLQVAIREAYEAGLIGKNACGSGYDFDVFVVRGAGAYICGEETALIESIEGKQGKPRLKPPFPADVGVFGCPTTVANVETVAVSPTICRRGGTWFAGFGRERNSGTKLFNISGHVNHPCTVEEEMSVPLKELIEKHAGGVTGGWDNLLAVIPGGSSTPLIPKSVCETVLMDFDALVQAQTGLGTAAVIVMDRSTDIVKAIARLIEFYKHESCGQCTPCREGVDWMNKVMARFVRGDARPAEIDSLWEISKQIEGHTICALGDGAAWPVQGLIRHFRPELEERMQRFAQQHQARQAAS

SEQ ID NO: 54995 - protein, 363 aa, Homo sapiens
MNKPSDGRPKYLVVNADEGEPGTCKDREILRHDPHKLLEGCLVGGRAMGARAAYIYIRGEFYNEASNLQVAIREAYEAGLIGKNACGSGYDFDVFVVRGAGAYICGEETALIESIEGKQGKPRLKPPFPADVGVFGCPTTVANVETVAVSPTICRRGGTWFAGFGRERNSGTKLFNISGHVNHPCTVEEEMSVPLKELIEKHAGGVTGGWDNLLAVIPGGSSTPLIPKSVCETVLMDFDALVQAQTGLGTAAVIVMDRSTDIVKAIARLIEFYKHESCGQCTPCREGVDWMNKVMARFVRGDARPAEIDSLWEISKQIEGHTICALGDGAAWPVQGLIRHFRPELEERMQRFAQQHQARQAAS

SEQ ID NO: 54996 - protein, 249 aa, Homo sapiens
MFFSAALRARAAGLTAHWGRHVRNLHKTVMQNGAGGALFVHRDTPENNPDTPFDFTPENYKRIEAIVKNYPEGHKAAAVLPVLDLAQRQNGWLPISAMNKVAEVLQVPPMRVYEVATFYTMYNRKPVGKYHIQVCTTTPCMLRNSDSILEAIQKKLGIKVGETTPDKLFTLIEVECLGACVNAPMVQINDNYYEDLTAKDIEEIIDELKAGKIPKPGPRSGRFSCEPAGGLTSLTEPPKGPGFGVQAGL

SEQ ID NO: 54997 - protein, 108 aa, Homo sapiens
MAAPCLLRQGRAGALKTMLQEAQVFRGLASTVSLSAESGKSEKGQPQNSKKQSPPKKPAPVPAEPFDNTTYKNLQHHDYSTYTFLDLNLELSKFRMPQPSSGRESPRH

SEQ ID NO: 54998 - protein, 473 aa, Homo sapiens
MAAPCLLRQGRAGALKTMLQEAQVFRGLASTVSLSAESGKSEKGQPQNSKKQSPPKNVVEPKERGKLLATQTAAELSKNLSSPSSYPPAVNKGRKVASPSPSGSVLFTDEGVPKFLSRKTLVEFPQKVLSPFRKQGSDSEARQVGRKVTSPSSSSSSSSSDSESDDEADVSEVTPRVVSKGRGGLRKPEASHSFENRAPRVTVSAKEKTLLQKPHVDITDPEKPHQPKKKGSPAKPSEGRENARPKTTMPRSQVDEEFLKQSLKEKQLQKTFRLNEIDKESQKPFEVKGPLPVHTKSGLSAPPKGSPAPAVLAEEARAEGQLQASPPGAAEGHLEKPVPEPQRKAAPPLPRKETSGTQGIEGHLKGGQAIVEDQIPPSNLETVPVENNHGFHEKTAALKLEAEGEAMEDAAAPGDDRGGTQEPAPVPAEPFDNTTYKNLQHHDYSTYTFLDLNLELSKFRMPQPSSGRESPRH

SEQ ID NO: 54999 - protein, 112 aa, Homo sapiens
MLQEAQVFRGLASTVSLSAESGKSEKGQPQNSKKQSPPKSVPTPHRRYSPCGDWKDASSLKPAPVPAEPFDNTTYKNLQHHDYSTYTFLDLNLELSKFRMPQPSSGRESPRH

SEQ ID NO: 55000 - protein, 515 aa, Homo sapiens
MGNWVVNHWFSVLFLVVWLGLNVFLFVDAFLKYEKADKYYYTRKILGSTLACARASALCLNFNSTLILLPVCRNLLSFLRGTCSFCSRTLRKQLDHNLTFHKLVAYMICLHTAIHIIAHLFNFDCYSRSRQATDGSLASILSSLSHDEKKGGSWLNPIQSRNTTVEYVTFTSIAGLTGVIMTIALILMVTSATEFIRRSYFEVFWYTHHLFIFYILGLGIHGIGGIVRGQTEESMNESHPRKCAESFEMWDDRDSHCRRPKFEGHPPESWKWILAPVILYICERILRFYRSQQKVVITKVVMHPSKVLELQMNKRGFSMEVGQYIFVNCPSISLLEWHPFTLTSAPEEDFFSIHIRAAGDWTENLIRAFEQQYSPIPRIEVDGPFGTASEDVFQYEVAVLVGAGIGVTPFASILKSIWYKFQCADHNLKTKKVGHAALNFDKATDIVTGLKQKTSFGRPMWDNEFSTIATSHPKSVVGVFLCGPRTLAKSLRKCCHRYSSLDPRKVQFYFNKENF

SEQ ID NO: 55001 - protein, 179 aa, Homo sapiens
MNKRGFSMEVGQYIFVNCPSISLLEWHPFTLTSAPEEDFFSIHIRAAGDWTENLIRAFEQQYSPIPRIEVDGPFGTASEDVFQYEVAVLVGAGIGVTPFASILKSIWYKFQCADHNLKTKKIYFYWICRETGAFSWFNNLLTSLEQEMEELGKSLRKCCHRYSSLDPRKVQFYFNKENF

SEQ ID NO: 55002 - protein, 527 aa, Homo sapiens
MGNWVVNHWFSVLFLVVWLGLNVFLFVDAFLKYEKADKYYYTRKILGFCSRTLRKQLDHNLTFHKLVAYMICLHTAIHIIAHLFNFDCYSRSRQATDGSLASILSSLSHDEKKGGSWLNPIQSRNTTVEYVTFTSIAGLTGVIMTIALILMVTSATEFIRRSYFEVFWYTHHLFIFYILGLGIHGIGGIVRGQTEESMNESHPRKCAESFEMWDDRDSHCRRPKFEGHPPESWKWILAPVILYICERILRFYRSQQKVVITKVVMHPSKVLELQMNKRGFSMEVGQYIFVNCPSISLLEWHPFTLTSAPEEDFFSIHIRAAGDWTENLIRAFEQQYSPIPRIEVDGPFGTASEDVFQYEVAVLVGAGIGVTPFASILKSIWYKFQCADHNLKTKKIYFYWICRETGAFSWFNNLLTSLEQEMEELGKVGFLNYRLFLTGWDSNIVGHAALNFDKATDIVTGLKQKTSFGRPMWDNEFSTIATSHPKSVVGVFLCGPRTLAKSLRKCCHRYSSLDPRKVQFYFNKENF

SEQ ID NO: 55003 - protein, 192 aa, Homo sapiens
MGNWVVNHWFSVLFLVVWLGLNVFLFVDAFLKYEKADKYYYTRKILGSTLACARASALCLNFNSTLILLPVCRNLLSFLRGTCSFCSRTLRKQLDHNLTFHKLVAYMICLHTAIHIIAHLFNFDCYSRSRQATDGSLASILSSLSHDEKKGGSWLNPIHPHITPTVYMFTVTFDMVLSSVNSNLFLFLLIKK

SEQ ID NO: 55004 - protein, 192 aa, Homo sapiens; identical to SEQ ID NO: 55003

SEQ ID NO: 55005 - protein, 564 aa, Homo sapiens
MGNWVVNHWFSVLFLVVWLGLNVFLFVDAFLKYEKADKYYYTRKILGSTLACARASALCLNFNSTLILLPVCRNLLSFLRGTCSFCSRTLRKQLDHNLTFHKLVAYMICLHTAIHIIAHLFNFDCYSRSRQATDGSLASILSSLSHDEKKGGSWLNPIQSRNTTVEYVTFTSIAGLTGVIMTIALILMVTSATEFIRRSYFEVFWYTHHLFIFYILGLGIHGIGGIVRGQTEESMNESHPRKCAESFEMWDDRDSHCRRPKFEGHPPESWKWILAPVILYICERILRFYRSQQKVVITKVVMHPSKVLELQMNKRGFSMEVGQYIFVNCPSISLLEWHPFTLTSAPEEDFFSIHIRAAGDWTENLIRAFEQQYSPIPRIEVDGPFGTASEDVFQYEVAVLVGAGIGVTPFASILKSIWYKFQCADHNLKTKKIYFYWICRETGAFSWFNNLLTSLEQEMEELGKVGFLNYRLFLTGWDSNIVGHAALNFDKATDIVTGLKQKTSFGRPMWDNEFSTIATSHPKSVVGVFLCGPRTLAKSLRKCCHRYSSLDPRKVQFYFNKENF

SEQ ID NO: 55006 - protein, 175 aa, Homo sapiens
  VARIANT 1: note = MOD_RES - Any amino acid
XFSMEVGQYIFVNCPSISLLEWHPFTLTSAPEEDFFSIHIRAAGDWTENLIRAFEQQYSPIPRIEVDGPFGTASEDVFQYEVAVLVGAGIGVTPFASILKSIWYKFQCADHNLKTKKIYFYWICRETGAFSWFNNLLTSLEQEMEELGKSLRKCCHRYSSLDPRKVQFYFNKENF

SEQ ID NO: 55007 - protein, 568 aa, Homo sapiens
MMGCWILNEGLSTILVLSWLGINFYLFIDTFYWYEEEESFHYTRVILGSTLAWARASALCLNFNCMLILIPVSRNLISFIRGTSICCRGPWRRQLDKNLRFHKLVAYGIAVNATIHIVAHFFNLERYHWSQSEEAQGLLAALSKLGNTPNESYLNPVRTFPTNTTTELLRTIAGVTGLVISLALVLIMTSSTEFIRQASYELFWYTHHVFIVFFLSLAIHGTGRIVRGQTQDSLSLHNITFCRDRYAEWQTVAQCPVPQFSGKEPSAWKWILGPVVLYACERIIRFWRFQQEVVITKVVSHPSGVLELHMKKRGFKMAPGQYILVQCPAISSLEWHPFTLTSAPQEDFFSVHIRAAGDWTAALLEAFGAEGQALQEPWSLPRLAVDGPFGTALTDVFHYPVCVCVAAGIGVTPFAALLKSIWYKCSEAQTPLKLSKVYFYWICRDARAFEWFADLLLSLETRMSEQGKTHFLSYHIFLTGWDENQALHIALHWDENTDVITGLKQKTFYGRPNWNNEFKQIAYNHPSSSIGVFFCGPKALSRTLQKMCHLYSSADPRGVHFYYNKESF

SEQ ID NO: 55008 - protein, 578 aa, Homo sapiens
MAVSWRSWLANEGVKHLCLFIWLSMNVLLFWKTFLLYNQGPEYHYLHQMLGLGLCLSRASASVLNLNCSLILLPMCRTLLAYLRGSQKVPSRRTRRLLDKSRTFHITCGVTICIFSGVHVAAHLVNALNFSVNYSEDFVELNAARYRDEDPRKLLFTTVPGLTGVCMVVVLFLMITASTYAIRVSNYDIFWYTHNLFFVFYMLLTLHVSGGLLKYQTNLDTHPPGCISLNRTSSQNISLPEYFSEHFHEPFPEGFSKPAEFTQHKFVKICMEEPRFQANFPQTWLWISGPLCLYCAERLYRYIRSNKPVTIISVMSHPSDVMEIRMVKENFKARPGQYITLHCPSVSALENHPFTLTMCPTETKATFGVHLKIVGDWTERFRDLLLPPSSQDSEILPFIQSRNYPKLYIDGPFGSPFEESLNYEVSLCVAGGIGVTPFASILNTLLDDWKPYKLRRLYFIWVCRDIQSFRWFADLLCMLHNKFWQENRPDYVNIQLYLSQTDGIQKIIGEKYHALNSRLFIGRPRWKLLFDEIAKYNRGKTVGVFCCGPNSLSKTLHKLSNQNNSYGTRFEYNKESFS

SEQ ID NO: 55009 - protein, 554 aa, Homo sapiens
MNVLLFWKTFLLYNQGPEYHYLHQMLGLGLCLSRASASVLNLNCSLILLPMCRTLLAYLRGSQKVPSRRTRRLLDKSRTFHITCGVTICIFSGVHVAAHLVNALNFSVNYSEDFVELNAARYRDEDPRKLLFTTVPGLTGVCMVVVLFLMITASTYAIRVSNYDIFWYTHNLFFVFYMLLTLHVSGGLLKYQTNLDTHPPGCISLNRTSSQNISLPEYFSEHFHEPFPEGFSKPAEFTQHKFVKICMEEPRFQANFPQTWLWISGPLCLYCAERLYRYIRSNKPVTIISVMSHPSDVMEIRMVKENFKARPGQYITLHCPSVSALENHPFTLTMCPTETKATFGVHLKIVGDWTERFRDLLLPPSSQDSEILPFIQSRNYPKLYIDGPFGSPFEESLNYEVSLCVAGGIGVTPFASILNTLLDDWKPYKLRRLYFIWVCRDIQSFRWFADLLCMLHNKFWQENRPDYVNIQLYLSQTDGIQKIIGEKYHALNSRLFIGRPRWKLLFDEIAKYNRGKTVGVFCCGPNSLSKTLHKLSNQNNSYGTRFEYNKESFS

SEQ ID NO: 55010 - protein, 271 aa, Homo sapiens
MAVSWRSWLANEGVKHLCLFIWLSMNVLLFWKTFLLYNQGPEYHYLHQMLGCPTETKATFGVHLKIVGDWTERFRDLLLPPSSQDSEILPFIQSRNYPKLYIDGPFGSPFEESLNYEVSLCVAGGIGVTPFASILNTLLDDWKPYKLRRLYFIWVCRDIQSFRWFADLLCMLHNKFWQENRPDYVNIQLYLSQTDGIQKIIGEKYHALNSRLFIGRPRWKLLFDEIAKYNRGKTVGVFCCGPNSLSKTLHKLSNQNNSYGTRFEYNKESFS

SEQ ID NO: 55011 - protein, 54 aa, Homo sapiens
MAVSWRSWLANEGVKHLCLFIWLSMNVLLFWKTFLLYNQGPEYHYLHQMLGELS

SEQ ID NO: 55012 - protein, 599 aa, Homo sapiens
MGEMWRKREEVIFREYSFSFYPLNIFAPFVLFPDYFCLLGFIWLSMNVLLFWKTFLLYNQGPEYHYLHQMLGLGLCLSRASASVLNLNCSLILLPMCRTLLAYLRGSQKVPSRRTRRLLDKSRTFHITCGVTICIFSGVHVAAHLVNALNFSVNYSEDFVELNAARYRDEDPRKLLFTTVPGLTGVCMVVVLFLMITASTYAIRVSNYDIFWYTHNLFFVFYMLLTLHVSGGLLKYQTNLDTHPPGCISLNRTSSQNISLPEYFSEHFHEPFPEGFSKPAEFTQHKFVKICMEEPRFQANFPQTWLWISGPLCLYCAERLYRYIRSNKPVTIISVMSHPSDVMEIRMVKENFKARPGQYITLHCPSVSALENHPFTLTMCPTETKATFGVHLKIVGDWTERFRDLLLPPSSQDSEILPFIQSRNYPKLYIDGPFGSPFEESLNYEVSLCVAGGIGVTPFASILNTLLDDWKPYKLRRLYFIWVCRDIQSFRWFADLLCMLHNKFWQENRPDYVNIQLYLSQTDGIQKIIGEKYHALNSRLFIGRPRWKLLFDEIAKYNRGKTVGVFCCGPNSLSKTLHKLSNQNNSYGTRFEYNKESFS

SEQ ID NO: 55013 - protein, 554 aa, Homo sapiens; identical to SEQ ID NO: 55009

SEQ ID NO: 55014 - protein, 554 aa, Homo sapiens; identical to SEQ ID NO: 55009

SEQ ID NO: 55015 - protein, 231 aa, Homo sapiens
MAVSWRSWLANEGVKHLCLFIWLSMNVLLFWKTFLLYNQGPEYHYLHQMLGCPTETKATFGVHLKIVGDWTERFRDLLLPPSSQDSEILPFIQSRNYPKDDWKPYKLRRLYFIWVCRDIQSFRWFADLLCMLHNKFWQENRPDYVNIQLYLSQTDGIQKIIGEKYHALNSRLFIGRPRWKLLFDEIAKYNRGKTVGVFCCGPNSLSKTLHKLSNQNNSYGTRFEYNKESFS

SEQ ID NO: 55016 - protein, 538 aa, Homo sapiens
MAVSWRSWLANEGVKHLCLFIWLSMNVLLFWKTFLLYNQGPEYHYLHQMLGLGLCLSRASASVLNLNCSLILLPMCRTLLAYLRGSQKVPSRRTRRLLDKSRTFHITCGVTICIFSGVHVAAHLVNALNFSVNYSEDFVELNAARYRDEDPRKLLFTTVPGLTGVCMVVVLFLMITASTYAIRVSNYDIFWYTHNLFFVFYMLLTLHVSGGLLKYQTNLDTHPPGCISLNRTSSQNISLPEYFSEHFHEPFPEGFSKPAEFTQHKFVKICMEEPRFQANFPQTWLWISGPLCLYCAERLYRYIRSNKPVTIISVMSHPSDVMEIRMVKENFKARPGQYITLHCPSVSALENHPFTLTMCPTETKATFGVHLKIVGDWTERFRDLLLPPSSQDSEILPFIQSRNYPKDDWKPYKLRRLYFIWVCRDIQSFRWFADLLCMLHNKFWQENRPDYVNIQLYLSQTDGIQKIIGEKYHALNSRLFIGRPRWKLLFDEIAKYNRGKTVGVFCCGPNSLSKTLHKLSNQNNSYGTRFEYNKESFS

SEQ ID NO: 55017 - protein, 554 aa, Homo sapiens; identical to SEQ ID NO: 55009

SEQ ID NO: 55018 - protein, 554 aa, Homo sapiens; identical to SEQ ID NO: 55009

SEQ ID NO: 55019 - protein, 730 aa, Homo sapiens
MAFVCAGLSDTMSAEEDARWLRWVTQQFKTIAGEDGEISLQEFKAALHVKESFFAERFFALFDSDRSGTITLQELQEALTLLIHGSPMDKLKFLFQVYDIDGSGSIDPDELRTVLQSCLRESAISLPDEKLDQLTLALFESADADGNGAITFEELRDELQRFPGVMENLTISAAHWLTAPAPRPRPRRPRQLTRAYWHNHRSQLFCLATYAGLHVLLFGLAASAHRDLGASVMVAKGCGQCLNFDCSFIAVLMLRRCLTWLRATWLAQVLPLDQNIQFHQLMGYVVVGLSLVHTVAHTVNFVLQAQAEASPFQFWELLLTTRPGIGWVHGSASPTGVALLLLLLLMFICSSSCIRRSGHFEVFYWTHLSYLLVWLLLIFHGPNFWKWLLVPGILFFLEKAIGLAVSRMAAVCIMEVNLLPSKVTHLLIKRPPFFHYRPGDYLYLNIPTIARYEWHPFTISSAPEQKDTIWLHIRSQGQWTNRLYESFKASDPLGRGSKRLSRSVTMRKSQRSSKGSEILLEKHKFCNIKCYIDGPYGTPTRRIFASEHAVLIGAGIGITPFASILQSIMYRHQKRKHTCPSCQHSWIEGVQDNMKLHKVDFIWINRDQRSFEWFVSLLTKLEMDQAEEAQYGRFLELHMYMTSALGKNDMKAIGLQMALDLLANKEKKDSITGLQTRTQPGRPDWSKVFQKVAAEKKGKVQVFFCGSPALAKVLKGHCEKFGFRFFQENF

SEQ ID NO: 55020 - protein, 765 aa, Homo sapiens
MNTSGDPAQTGPEGCRGTMSAEEDARWLRWVTQQFKTIAGEDGEISLQEFKAALHVKESFFAERFFALFDSDRSGTITLQELQEALTLLIHGSPMDKLKFLFQVYDIDVCARQGASAGTEWGAGAGPHWASSPLGTGSGSIDPDELRTVLQSCLRESAISLPDEKLDQLTLALFESADADGNGAITFEELRDELQRFPGVMENLTISAAHWLTAPAPRPRPRRPRQLTRAYWHNHRSQLFCLATYAGLHVLLFGLAASAHRDLGASVMVAKGCGQCLNFDCSFIAVLMLRRCLTWLRATWLAQVLPLDQNIQFHQLMGYVVVGLSLVHTVAHTVNFVLQAQAEASPFQFWELLLTTRPGIGWVHGSASPTGVALLLLLLLMFICSSSCIRRSGHFEVFYWTHLSYLLVWLLLIFHGPNFWKWLLVPGILFFLEKAIGLAVSRMAAVCIMEVNLLPSKVTHLLIKRPPFFHYRPGDYLYLNIPTIARYEWHPFTISSAPEQKDTIWLHIRSQGQWTNRLYESFKASDPLGRGSKRLSRSVTMRKSQRSSKGSEILLEKHKFCNIKCYIDGPYGTPTRRIFASEHAVLIGAGIGITPFASILQSIMYRHQKRKHTCPSCQHSWIEGVQDNMKLHKVDFIWINRDQRSFEWFVSLLTKLEMDQAEEAQYGRFLELHMYMTSALGKNDMKAIGLQMALDLLANKEKKDSITGLQTRTQPGRPDWSKVFQKVAAEKKGKVQVFFCGSPALAKVLKGHCEKFGFRFFQENF

SEQ ID NO: 55021 - protein, 737 aa, Homo sapiens
MNTSGDPAQTGPEGCRGTMSAEEDARWLRWVTQQFKTIAGEDGEISLQEFKAALHVKESFFAERFFALFDSDRSGTITLQELQEALTLLIHGSPMDKLKFLFQVYDIDGSGSIDPDELRTVLQSCLRESAISLPDEKLDQLTLALFESADADGNGAITFEELRDELQRFPGVMENLTISAAHWLTAPAPRPRPRRPRQLTRAYWHNHRSQLFCLATYAGLHVLLFGLAASAHRDLGASVMVAKGCGQCLNFDCSFIAVLMLRRCLTWLRATWLAQVLPLDQNIQFHQLMGYVVVGLSLVHTVAHTVNFVLQAQAEASPFQFWELLLTTRPGIGWVHGSASPTGVALLLLLLLMFICSSSCIRRSGHFEVFYWTHLSYLLVWLLLIFHGPNFWKWLLVPGILFFLEKAIGLAVSRMAAVCIMEVNLLPSKVTHLLIKRPPFFHYRPGDYLYLNIPTIARYEWHPFTISSAPEQKDTIWLHIRSQGQWTNRLYESFKASDPLGRGSKRLSRSVTMRKSQRSSKGSEILLEKHKFCNIKCYIDGPYGTPTRRIFASEHAVLIGAGIGITPFASILQSIMYRHQKRKHTCPSCQHSWIEGVQDNMKLHKVDFIWINRDQRSFEWFVSLLTKLEMDQAEEAQYGRFLELHMYMTSALGKNDMKAIGLQMALDLLANKEKKDSITGLQTRTQPGRPDWSKVFQKVAAEKKGKVQVFFCGSPALAKVLKGHCEKFGFRFFQENF

SEQ ID NO: 55022 - protein, 1472 aa, Homo sapiens
MDNALFCLAAVSNLDIESKLSVYYRAPWHQQRNIFLPATRPPCVEELHRHARQSLQALRREHRSRSDRREQRAAAPLSIAAPPLPAYPPAHSQRRREFKDRHFLTFNSTRSPSPTECCHMTPWSRKSHPPEDEDTDVMLGQRPKNPIHNIPSTLDKQTNWSKALPLPTPEEKMKQDAQVISSCIIPINVTGVGFDREASIRCSLVHSQSVLQRRRKLRRRKTISGIPRRVQQEIDSDESPVARERNVIVHTNPDPSNTVNRISGTRDSECQTEDILIAAPSRRRIRAQRGQSIAASLSHSAGNISALADKGDTMFTPAVSSRTRSRSLPREGNRGGDAEPKVGAKPSAYEEGESFVGDHERTPNDFSEAPSSPSAQDHQPTLGLACSQHLHSPQHKLSERGRSRLSRMAADSGSCDISSNSDTFGSPIHCISTAGVLLSSHMDQKDDHQSSSGNWSGSSSTCPSQTSETIPPAASPPLTGSSHCDSELSLNTAPHANEDASVFVTEQYNDHLDKVRGHRANSFTSTVADLLDDPNNSNTSDSEWNYLHHHHDASCRQDFSPERPKADSLGCPSFTSMATYDSFLEKSPSDKADTSSHFSVDTEGYYTSMHFDCGLKGNKSYVCHYAALGPENGQGVGASPGLPDCAWQDYLDHKRQGRPSISFRKPKAKPTPPKRSSSLRKSDGNADISEKKEPKISSGQHLPHSSREMKLPLDFANTPSRMENANLPTKQEPSWINQSEQGIKEPQLDASDIPPFKDEVAESTHYADLWLLNDLKTNDPYRSLSNSSTATGTTVIECIKSPESSESQTSQSESRATTPSLPSVDNEFKLASPEKLAGLASPSSGYSSQSETPTSSFPTAFFSGPLSPGGSKRKPKVPERKSSLQQPSLKDGTISLSKDLELPIIPPTHLDLSALHNVLNKPFHHRHPLHVFTHNKQNTVGETLRSNPPPSLAITPTILKSVNLRSINKSEEVKQKEENNTDLPYLEESTLTTAALSPSKIRPHTANKSVSRQYSTEDTILSFLDSSAVEMGPDKLHLEKNSTFDVKNRCDPETITSAGSSLLDSNVTKDQVRTETEPIPENTPTKNCAFPTEGFQRVSAARPNDLDGKIIQYGPGPDETLEQVQKAPSAGLEEVAQPESVDVITSQSDSPTRATDVSNQFKHQFVMSRHHDKVPGTISYESEITSVNSFPEKCSKQENIASGISAKSASDNSKAEETQGNVDEASLKESSPSDDSIISPLSEDSQAEAEGVFVSPNKPRTTEDLFAVIHRSKRKVLGRKDSGDMSVRSKSRAPLSSSSSSASSITSPSSNVTTPNSQRSPGLIYRNAKKSNTSNEEFKLLLLKKGSRSDSSYRMSATEILKSPILPKPPGELTAESPQSTDDAHQGSQGAEALSPLSPCSPRVNAEGFSSKSFATSASARVGRSRAPPAASSSRYSVRCRLYNTPMQAISEGETENSDGSPHDDRSSQSST

SEQ ID NO: 55023 - protein, 1630 aa, Homo sapiens
MPFAKRIVEPQWLCRQRRPAPGPAVDASGGSAEPPPPLQPPGRRDLDEVEAPGPEEPARAVPAPSGLPPPPPPLPAPADQTQPPHGEASVAGEESTAGIPEAAPAAGEASSAAAAAAVLLMLDLCAVSNAALARVLRQLSDVARHACSLFQELESDIQLTHRRVWALQGKLGGVQRVLSTLDPKQEAVPVSNLDIESKLSVYYRAPWHQQRNIFLPATRPPCVEELHRHARQSLQALRREHRSRSDRREQRAAAPLSIAAPPLPAYPPAHSQRRREFKDRHFLTSHPPEDEDTDVMLGQRPKNPIHNIPSTLDKQTNWSKALPLPTPEEKMKQDAQVISSCIIPINVTGVGFDREASIRCSLVHSQSVLQRRRKLRRRKTISGIPRRVQQEIDSDESPVARERNVIVHTNPDPSNTVNRISGTRDSECQTEDILIAAPSRRRIRAQRGQSIAASLSHSAGNISALADKGDTMFTPAVSSRTRSRSLPREGNRGGDAEPKVGAKPSAYEEGESFVGDHERTPNDFSEAPSSPSAQDHQPTLGLACSQHLHSPQHKLSERGRSRLSRMAADSGSCDISSNSDTFGSPIHCISTAGVLLSSHMDQKDDHQSSSGNWSGSSSTCPSQTSETIPPAASPPLTGSSHCDSELSLNTAPHANEDASVFVTEQYNDHLDKVRGHRANSFTSTVADLLDDPNNSNTSDSEWNYLHHHHDASCRQDFSPERPKADSLGCPSFTSMATYDSFLEKSPSDKADTSSHFSVDTEGYYTSMHFDCGLKGNKSYVCHYAALGPENGQGVGASPGLPDCAWQDYLDHKRQGRPSISFRKPKAKPTPPKRSSSLRKSDGNADISEKKEPKISSGQHLPHSSREMKLPLDFANTPSRMENANLPTKQEPSWINQSEQGIKEPQLDASDIPPFKDEVAESTHYADLWLLNDLKTNDPYRSLSNSSTATGTTVIECIKSPESSESQTSQSESRATTPSLPSVDNEFKLASPEKLAGLASPSSGYSSQSETPTSSFPTAFFSGPLSPGGSKRKPKVPERKSSLQQPSLKDGTISLSKDLELPIIPPTHLDLSALHNVLNKPFHHRHPLHVFTHNKQNTVGETLRSNPPPSLAITPTILKSVNLRSINKSEEVKQKEENNTDLPYLEESTLTTAALSPSKIRPHTANKSVSRQYSTEDTILSFLDSSAVEMGPDKLHLEKNSTFDVKNRCDPETITSAGSSLLDSNVTKDQVRTETEPIPENTPTKNCAFPTEGFQRVSAARPNDLDGKIIQYGPGPDETLEQVQKAPSAGLEEVAQPESVDVITSQSDSPTRATDVSNQFKHQFVMSRHHDKVPGTISYESEITSVNSFPEKCSKQENIASGISAKSASDNSKAEETQGNVDEASLKESSPSDDSIISPLSEDSQAEAEGVFVSPNKPRTTEDLFAVIHRSKRKVLGRKDSGDMSVRSKSRAPLSSSSSSASSITSPSSNVTTPNSQRSPGLIYRNAKKSNTSNEEFKLLLLKKGSRSDSSYRMSATEILKSPILPKPPGELTAESPQSTDDAHQGSQGAEALSPLSPCSPRVNAEGFSSKSFATSASARVGRSRAPPAASSSRYSVRCRLYNTPMQAISEGETENSDGSPHDDRSSQSST

SEQ ID NO: 55024 - protein, 1474 aa, Homo sapiens
MALACCMPKNAAVSNLDIESKLSVYYRAPWHQQRNIFLPATRPPCVEELHRHARQSLQALRREHRSRSDRREQRAAAPLSIAAPPLPAYPPAHSQRRREFKDRHFLTFNSTRSPSPTECCHMTPWSRKSHPPEDEDTDVMLGQRPKNPIHNIPSTLDKQTNWSKALPLPTPEEKMKQDAQVISSCIIPINVTGVGFDREASIRCSLVHSQSVLQRRRKLRRRKTISGIPRRVQQEIDSDESPVARERNVIVHTNPDPSNTVNRISGTRDSECQTEDILIAAPSRRRIRAQRGQSIAASLSHSAGNISALADKGDTMFTPAVSSRTRSRSLPREGNRGGDAEPKVGAKPSAYEEGESFVGDHERTPNDFSEAPSSPSAQDHQPTLGLACSQHLHSPQHKLSERGRSRLSRMAADSGSCDISSNSDTFGSPIHCISTAGVLLSSHMDQKDDHQSSSGNWSGSSSTCPSQTSETIPPAASPPLTGSSHCDSELSLNTAPHANEDASVFVTEQYNDHLDKVRGHRANSFTSTVADLLDDPNNSNTSDSEWNYLHHHHDASCRQDFSPERPKADSLGCPSFTSMATYDSFLEKSPSDKADTSSHFSVDTEGYYTSMHFDCGLKGNKSYVCHYAALGPENGQGVGASPGLPDCAWQDYLDHKRQGRPSISFRKPKAKPTPPKRSSSLRKSDGNADISEKKEPKISSGQHLPHSSREMKLPLDFANTPSRMENANLPTKQEPSWINQSEQGIKEPQLDASDIPPFKDEVAESTHYADLWLLNDLKTNDPYRSLSNSSTATGTTVIECIKSPESSESQTSQSESRATTPSLPSVDNEFKLASPEKLAGLASPSSGYSSQSETPTSSFPTAFFSGPLSPGGSKRKPKVPERKSSLQQPSLKDGTISLSKDLELPIIPPTHLDLSALHNVLNKPFHHRHPLHVFTHNKQNTVGETLRSNPPPSLAITPTILKSVNLRSINKSEEVKQKEENNTDLPYLEESTLTTAALSPSKIRPHTANKSVSRQYSTEDTILSFLDSSAVEMGPDKLHLEKNSTFDVKNRCDPETITSAGSSLLDSNVTKDQVRTETEPIPENTPTKNCAFPTEGFQRVSAARPNDLDGKIIQYGPGPDETLEQVQKAPSAGLEEVAQPESVDVITSQSDSPTRATDVSNQFKHQFVMSRHHDKVPGTISYESEITSVNSFPEKCSKQENIASGISAKSASDNSKAEETQGNVDEASLKESSPSDDSIISPLSEDSQAEAEGVFVSPNKPRTTEDLFAVIHRSKRKVLGRKDSGDMSVRSKSRAPLSSSSSSASSITSPSSNVTTPNSQRSPGLIYRNAKKSNTSNEEFKLLLLKKGSRSDSSYRMSATEILKSPILPKPPGELTAESPQSTDDAHQGSQGAEALSPLSPCSPRVNAEGFSSKSFATSASARVGRSRAPPAASSSRYSVRCRLYNTPMQAISEGETENSDGSPHDDRSSQSST

SEQ ID NO: 55025 - protein, 84 aa, Homo sapiens
PELQVCVFCRNNKEAMALYTTHILKGPDGRVLCPVLRRYTCPLCGASGDNAHTIKYCPLSKVPPPPARPPPRSARDGPPGKKLR

SEQ ID NO: 55026 - protein, 292 aa, Homo sapiens
MEAFPWAPRSPRRGRAPPPMALVPSARYVSAPGPAHPQPFSSWNDYLGLATLITKAVDGEPRFGCARGGNGGGGSPPSSSSSSCCSPHTGAGPGALGPALGPPDYDEDDDDDSDEPGSRGRYLGSALELRALELCAGPAEAGLLEERFAELSPFAGRAAAVLLGCAPAAAAAATTTSEATPREERAPAWAAEPRLHAASGAAAARLLKPELQVCVFCRNNKEAMALYTTHILKGPDGRVLCPVLRRYTCPLCGASGDNAHTIKYCPLSKVPPPPARPPPRSARDGPPGKKLR

SEQ ID NO: 55027 - protein, 1151 aa, Homo sapiens
MLRRVTVAAVCATRRKLCEAGRELAALWGIETRGRCEDSAAARPFPILAMPGRNKAKSTCSCPDLQPNGQDLGENSRVARLGADESEEEGRRGSLSNAGDPEIVKSPSDPKQYRYIKLQNGLQALLISDLSNMEGKTGNTTDDEEEEEVEEEEEDDDEDSGAEIEDDDEEGFDDEDEFDDEHDDDLDTEDNELEELEERAEARKKTTEKQSAAALCVGVGSFADPDDLPGLAHFLEHMVFMGSLKYPDENGFDAFLKKHGGSDNASTDCERTVFQFDVQRKYFKEALDRWAQFFIHPLMIRDAIDREVEAVDSEYQLARPSDANRKEMLFGSLARPGHPMGKFFWGNAETLKHEPRKNNIDTHARLREFWMRYYSSHYMTLVVQSKETLDTLEKWVTEIFSQIPNNGLPRPNFGHLTDPFDTPAFNKLYRVVPIRKIHALTITWALPPQQQHYRVKPLHYISWLVGHEGKGSILSFLRKKCWALALFGGNGETGFEQNSTYSVFSISITLTDEGYEHFYEVAYTVFQYLKMLQKLGPEKRIFEEIRKIEDNEFHYQEQTDPVEYVENMCENMQLYPLQDILTGDQLLFEYKPEVIGEALNQLVPQKANLVLLSGANEGKCDLKEKWFGTQYSIEDIENSWAELWNSNFELNPDLHLPAENKYIATDFTLKAFDCPETEYPVKIVNTPQGCLWYKKDNKFKIPKAYIRFHLISPLIQKSAANVVLFDIFVNILTHNLAEPAYEADVAQLEYKLVAGEHGLIIRVKGFNHKLPLLFQLIIDYLAEFNSTPAVFTMITEQLKKTYFNILIKPETLAKDVRLLILEYARWSMIDKYQALMDGLSLESLLSFVKEFKSQLFVEGLVQGNVTSTESMDFLKYVVDKLNFKPLEQEMPVQFQVVELPSGHHLCKVKALNKGDANSEVTVYYQSGTRSLREYTLMELLVMHMEEPCFDFLRTKQTLGYHVYPTCRNTSGILGFSVTVGTQATKYNSEVVDKKIEEFLSSFEEKIENLTEEAFNTQVTALIKLKECEDTHLGEEVDRNWNEVVTQQYLFDRLAHEIEALKSFSKSDLVNWFKAHRGPGSKMLSVHVVGYGKYELEEDGTPSSEDSNSSCEVMQLTYLPTSPLLADCIIPITDIRAFTTTLNLLPYHKIVK

SEQ ID NO: 55028 - protein, 1219 aa, Homo sapiens
MLRRVTVAAVCATRRKLCEAGRELAALWGIETRGRCEDSAAARPFPILAMPGRNKAKSTCSCPDLQPNGQDLGENSRVARLGADESEEEGRRGSLSNAGDPEIVKSPSDPKQYRYIKLQNGLQALLISDLSNMEGKTGNTTDDEEEEEVEEEEEDDDEDSGAEIEDDDEEGFDDEDEFDDEHDDDLDTEDNELEELEERAEARKKTTEKQQLQSLFLLWSKLTDRLWFKSTYSKMSSTLLVETRNLYGVVGAESRSAPVQHLAGWQAEEQQGETDTVLSAAALCVGVGSFADPDDLPGLAHFLEHMVFMGSLKYPDENGFDAFLKKHGGSDNASTDCERTVFQFDVQRKYFKEALDRWAQFFIHPLMIRDAIDREVEAVDSEYQLARPSDANRKEMLFGSLARPGHPMGKFFWGNAETLKHEPRKNNIDTHARLREFWMRYYSSHYMTLVVQSKETLDTLEKWVTEIFSQIPNNGLPRPNFGHLTDPFDTPAFNKLYRVVPIRKIHALTITWALPPQQQHYRVKPLHYISWLVGHEGKGSILSFLRKKCWALALFGGNGETGFEQNSTYSVFSISITLTDEGYEHFYEVAYTVFQYLKMLQKLGPEKRIFEEIRKIEDNEFHYQEQTDPVEYVENMCENMQLYPLQDILTGDQLLFEYKPEVIGEALNQLVPQKANLVLLSGANEGKCDLKEKWFGTQYSIEDIENSWAELWNSNFELNPDLHLPAENKYIATDFTLKAFDCPETEYPVKIVNTPQGCLWYKKDNKFKIPKAYIRFHLISPLIQKSAANVVLFDIFVNILTHNLAEPAYEADVAQLEYKLVAGEHGLIIRVKGFNHKLPLLFQLIIDYLAEFNSTPAVFTMITEQLKKTYFNILIKPETLAKDVRLLILEYARWSMIDKYQALMDGLSLESLLSFVKEFKSQLFVEGLVQGNVTSTESMDFLKYVVDKLNFKPLEQEMPVQFQVVELPSGHHLCKVKALNKGDANSEVTVYYQSGTRSLREYTLMELLVMHMEEPCFDFLRTKQTLGYHVYPTCRNTSGILGFSVTVGTQATKYNSEVVDKKIEEFLSSFEEKIENLTEEAFNTQVTALIKLKECEDTHLGEEVDRNWNEVVTQQYLFDRLAHEIEALKSFSKSDLVNWFKAHRGPGSKMLSVHVVGYGKYELEEDGTPSSEDSNSSCEVMQLTYLPTSPLLADCIIPITDIRAFTTTLNLLPYHKIVK

SEQ ID NO: 55029 - protein, 553 aa, Homo sapiens
MLQKLGPEKRIFEEIRKIEDNEFHYQEQTDPVEYVENMCENMQLYPLQDILTGDQLLFEYKPEVIGEALNQLVPQKANLVLLSGANEGKCDLKEKWFGTQYSIEDIENSWAELWNSNFELNPDLHLPAENKYIAYIRFHLISPLIQKSAANVVLFDIFVNILTHNLAEPAYEADVAQLEYKLVAGEHGLIIRVKGFNHKLPLLFQLIIDYLAEFNSTPAVFTMITEQLKKTYFNILIKPETLAKDVRLLILEYARWSMIDKYQALMDGLSLESLLSFVKEFKSQLFVEGLVQGNVTSTESMDFLKYVVDKLNFKPLEQEMPVQFQVVELPSGHHLCKVKALNKGDANSEVTVYYQSGTRSLREYTLMELLVMHMEEPCFDFLRTKQTLGSEVVDKKIEEFLSSFEEKIENLTEEAFNTQVTALIKLKECEDTHLGEEVDRNWNEVVTQQYLFDRLAHEIEALKSFSKSDLVNWFKAHRGPGSKMLSVHVVGYGKYELEEDGTPSSEDSNSSCEVMQLTYLPTSPLLADCIIPITDIRAFTTTLNLLPYHKIVK

SEQ ID NO: 55030 - protein, 538 aa, Homo sapiens
  VARIANT 1: note = MOD_RES - Any amino acid
XKIEDNEFHYQEQTDPVEYVENMCENMQLYPLQDILTGDQLLFEYKPEVIGEALNQLVPQKANLVLLSGANEGKCDLKEKWFGTQYSIEDIENSWAELWNSNFELNPDLHLPAENKYIAYIRFHLISPLIQKSAANVVLFDIFVNILTHNLAEPAYEADVAQLEYKLVAGEHGLIIRVKGFNHKLPLLFQLIIDYLAEFNSTPAVFTMITEQLKKTYFNILIKPETLAKDVRLLILEYARWSMIDKYQALMDGLSLESLLSFVKEFKSQLFVEGLVQGNVTSTESMDFLKYVVDKLNFKPLEQEMPVQFQVVELPSGHHLCKVKALNKGDANSEVTVYYQSGTRSLREYTLMELLVMHMEEPCFDFLRTKQTLGSEVVDKKIEEFLSSFEEKIENLTEEAFNTQVTALIKLKECEDTHLGEEVDRNWNEVVTQQYLFDRLAHEIEALKSFSKSDLVNWFKAHRGPGSKMLSVHVVGYGKYELEEDGTPSSEDSNSSCEVMQLTYLPTSPLLADCIIPITDIRAFTTTLNLLPYHKIVK

SEQ ID NO: 55031 - protein, 1087 aa, Homo sapiens
MEGKTGNTTDDEEEEEVEEEEEDDDEDSGAEIEDDDEEGFDDEDEFDDEHDDDLDTEDNELEELEERAEARKKTTEKQQLQSLFLLWSKLTDRLWFKSTYSKMSSTLLVETRNLYGVVGAESRSAPVQHLAGWQAEEQQGETDTVLSAAALCVGVGSFADPDDLPGLAHFLEHMVFMGSLKYPDENGFDAFLKKHGGSDNASTDCERTVFQFDVQRKYFKEALDRWAQFFIHPLMIRDAIDREVEAVDSEYQLARPSDANRKEMLFGSLARPGHPMGKFFWGNAETLKHEPRKNNIDTHARLREFWMRYYSSHYMTLVVQSKETLDTLEKWVTEIFSQIPNNGLPRPNFGHLTDPFDTPAFNKLYRVVPIRKIHALTITWALPPQQQHYRVKPLHYISWLVGHEGKGSILSFLRKKCWALALFGGNGETGFEQNSTYSVFSISITLTDEGYEHFYEVAYTVFQYLKMLQKLGPEKRIFEEIRKIEDNEFHYQEQTDPVEYVENMCENMQLYPLQDILTGDQLLFEYKPEVIGEALNQLVPQKANLVLLSGANEGKCDLKEKWFGTQYSIEDIENSWAELWNSNFELNPDLHLPAENKYIATDFTLKAFDCPETEYPVKIVNTPQGCLWYKKDNKFKIPKAYIRFHLISPLIQKSAANVVLFDIFVNILTHNLAEPAYEADVAQLEYKLVAGEHGLIIRVKGFNHKLPLLFQLIIDYLAEFNSTPAVFTMITEQLKKTYFNILIKPETLAKDVRLLILEYARWSMIDKYQALMDGLSLESLLSFVKEFKSQLFVEGLVQGNVTSTESMDFLKYVVDKLNFKPLEQEMPVQFQVVELPSGHHLCKVKALNKGDANSEVTVYYQSGTRSLREYTLMELLVMHMEEPCFDFLRTKQTLGYHVYPTCRNTSGILGFSVTVGTQATKYNSEVVDKKIEEFLSSFEEKIENLTEEAFNTQVTALIKLKECEDTHLGEEVDRNWNEVVTQQYLFDRLAHEIEALKSFSKSDLVNWFKAHRGPGSKMLSVHVVGYGKYELEEDGTPSSEDSNSSCEVMQLTYLPTSPLLADCIIPITDIRAFTTTLNLLPYHKIVK

SEQ ID NO: 55032 - protein, 747 aa, Homo sapiens
MEGKTGNTTDDEEEEEVEEEEEDDDEDSGAEIEDDDEEGFDDEDEFDDEHDDDLDTEDNELEELEERAEARKKTTEKQSAAALCVGVGSFADPDDLPGLAHFLEHMVFMGSLKYPDENGFDAFLKKHGGSDNASTDCERTVFQFDVQRKYFKEALDRWAQFFIHPLMIRDAIDREVEAVDSEYQLARPSDANRKEMLFGSLARPGHPMGKFFWGNAETLKHEPRKNNIDTHARLREFWMRYYSSHYMTLVVQSKETLDTLEKWVTEIFSQIPNNGLPRPNFGHLTDPFDTPAFNKLYRVVPIRKIHALTITWALPPQQQHYRVKPLHYISWLVGHEGKGSILSFLRKKCWALALFGGNGETGFEQNSTYSVFSISITLTDEGYEHFYEVAYTVFQYLKMLQKLGPEKRIFEEIRKIEDNEFHYQEQTDPVEYVENMCENMQLYPLQDILTGDQLLFEYKPEVIGEALNQLVPQKANLVLLSGANEGKCDLKEKWFGTQYSIEDIENSWAELWNSNFELNPDLHLPAENKYIATDFTLKAFDCPETEYPVKIVNTPQGCLWYKKDNKFKIPKAYIRFHLISPLIQKSAANVVLFDIFVNILTHNLAEPAYEADVAQLEYKLVAGEHGLIIRVKGFNHKLPLLFQLIIDYLAEFNSTPAVFTMITEQLKKTYFNILIKPETLAKDVRLLILEYARWSMIDKYQALMDGLSLESLLSFVKEFKSQLFVEGLVQGNVTSTVLCQWAQDSET

SEQ ID NO: 55033 - protein, 1148 aa, Homo sapiens
MLRRVTVAAVCATRRKLCEAGRELAALWGIETRGRCEDSAAARPFPILAMPGRNKAKSTCSCPDLQPNGQDLGENSRVARLGADESEEEGRRGSLSNAGDPEIVKSPSDPKQYRYIKLQNGLQALLISDLSNMEGKTGNTTDDEEEEEVEEEEEDDDEDSGAEIEDDDEEGFDDEDEFDDEHDDDLDTEDNELEELEERAEARKKTTEKQSAAALCVGVGSFADPDDLPGLAHFLEHMVFMGSLKYPDENGFDAFLKKHGGSDNASTDCERTVFQFDVQRKYFKEALDRWAQFFIHPLMIRDAIDREVEAVDSEYQLARPSDANRKEMLFGSLARPGHPMGKFFWGNAETLKHEPRKNNIDTHARLREFWMRYYSSHYMTLVVQSKETLDTLEKWVTEIFSQIPNNGLPRPNFGHLTDPFDTPAFNKLYRVVPIRKIHALTITWALPPQQQHYRVKPLHYISWLVGHEGKGSILSFLRKKCWALALFGGNGETGFEQNSTYSVFSISITLTDEGYEHFYEVAYTVFQYLKMLQKLGPEKRIFEEIRKIEDNEFHYQEQTDPVEYVENMCENMQLYPLQDILTGDQLLFEYKPEVIGEALNQLVPQKANLVLLSGANEGKCDLKEKWFGTQYSIEDIENSWAELWNSNFELNPDLHLPAENKYIATDFTLKAFDCPETEYPVKIVNTPQGCLWYKKDNKFKIPKAYIRFHLISPLIQKSAANVVLFDIFVNILTHNLAEPAYEADVAQLEYKLVAGEHGLIIRVKGFNHKLPLLFQLIIDYLAEFNSTPAVFTMITEQLKKTYFNILIKPETLAKDVRLLILEYARWSMIDKYQALMDGLSLESLLSFVKEFKSQLFVEGLVQGNVTSTESMDFLKYVVDKLNFKPLEQEMPVQFQVVELPSGHHLCKVKALNKGDANSEVTVYYQSGTRSLREYTLMELLVMHMEEPCFDFLRTKQTLGYHVYPTCRNTSGILGFSVTVGTQATKYNSEVVDKKIEEFLSSFEEKIENLTEEAFNTQVTALIKLKECEDTHLGEEVDRNWNEVVTQQYLFDRLAHEIEALKSFSKSDLVNWFKAHRGPGSKMLSVHVVGYGKYELEEDGTPSSEDSNSSCEVMQLTYLPTSPLLAIVSSPLLISGLSQQHSTFSPTIK

SEQ ID NO: 55034 - protein, 528 aa, Homo sapiens
MGAAASRRRALRSEAMSSVAAKVRAARAFGEYLSQSHPENRNGADHLLADAYSGHDGSPEMQPAPQNKRRLSLVSNGCYEGSLSEEPSIRKPAGEGPQPRVYTISGEPALLPSPEAEAIELAVVKGRRQRHPHHHSQPLRASPGGSREDVSRPCQSWAGSRQGSKECPGCAQLAPGPTPRAFGLDQPPLPETSGRRKKLERMYSVDRVSDDIPIRTWFPKENLFSFQTATTTMQAVFRGYAERKRRKRENDSASVIQRNFRKHLRMVGSRRVKAQTFAERRERSFSRSWSDPTPMKADTSHDSRDSSDLQSSHCTLDEAFEDLDWDTEKGLEAVACDTEGFVPPKVMLISSKVPKAEYIPTIIRRDDPSIIPILYDHEHATFEDILEEIERKLNVYHKGAKIWKMLIFCQGGPGHLYLLKNKVATFAKVEKEEDMIHFWKRLSRLMSKVNPEPNVIHIMGCYILGNPNGEKLFQNLRTLMTPYRVTFESPLELSAQGKQMIETYFDFRLYRLWKSRQHSKLLDFDDVL

SEQ ID NO: 55035 - protein, 327 aa, Homo sapiens
MYSVDRVSDDIPIRTWFPKENLFSFQTATTTMQAVFRGYAERKRRKRENDSASVIQRNFRKHLRMVGSRRVKAQTFAERRERSFSRSWSDPTPMKADTSHDSRDSSDLQSSHCTLDEAFEDLDWDTEKGLEAVACDTEGFVPPKVMLISSKVPKAEYIPTIIRRDDPSIIPILYDHEHATFEDILEEIERKLNVYHKGAKIWKMLIFCQGGPGHLYLLKNKVATFAKVEKEEDMIHFWKRLSRLMSKVNPEPNVIHIMGCYILGNPNGEKLFQNLRTLMTPYRVTFESPLELSAQGKQMIETYFDFRLYRLWKSRQHSKLLDFDDVL

SEQ ID NO: 55036 - protein, 145 aa, Homo sapiens
MVGSRRVKAQTFAERRERSFSRSWSDPTPMKADTSHDSRDSSDLQSSHCTLDEAFEDLDWDTEKGLEAVACDTEGFVPPKVMLISSKVPKAEYIPTIIRRDDPSIIPILYVSPAPGLPPTDALLRPHPGPAPAPQVPRVLWRCWL

SEQ ID NO: 55037 - protein, 528 aa, Homo sapiens; identical to SEQ ID NO: 55034

SEQ ID NO: 55038 - protein, 500 aa, Homo sapiens
MGAAASRRRALRSEAMSSVAAKVRAARAFGEYLSQSHPENRNGADHLLADAYSGHDGSPEMQPAPQNKRRLSLVSNGCYEGSLSEEPSIRKPAGEGPQPRVYTISGEPALLPSPEAEAIELAVVKGRRQRHPHHHSQPLRASPGGSREDVSRPCQSWAGSRQGSKECPGCAQLAPGPTPRAFGLDQPPLPETSGRRKKLERMYSVDRVSDDIPIRTWFPKENLFSFQTATTTMQAISVFRGYAERKRRKRENDSASVIQRNFRKHLRMVGSRRVKAQSSDLQSSHCTLDEAFEDLDWDTEKGLEAVACDTEGFVPPKVMLISSKVPKAEYIPTIIRRDDPSIIPILYDHEHATFEDILEEIERKLNVYHKGAKIWKMLIFCQGGPGHLYLLKNKVATFAKVEKEEDMIHFWKRLSRLMSKVNPEPNVIHIMGCYILGNPNGEKLFQNLRTLMTPYRVTFESPLELSAQGKQMIETYFDFRLYRLWKSRQHSKLLDFDDVL

SEQ ID NO: 55039 - protein, 505 aa, Homo sapiens
MGAAASRRRALRSEAMSSVAAKVRAARAFGEYLSQSHPENRNGADHLLADAYSGHDGSPEMQPAPQNKRRLSLVSNGCYEGSLSEEPSIRKPAGEGPQPRVYTISGEPALLPSPEAEAIELAVVKGRRQRHPHHHSQPLRASPGGSREDVSRPCQSWAGSRQGSKECPGCAQLAPGPTPRAFGLDQPPLPETSGRRKKLERMYSVDRVSDDIPIRTWFPKENLFSFQTATTTMQANFRKHLRMVGSRRVKAQTFAERRERSFSRSWSDPTPMKADTSHDSRDSSDLQSSHCTLDEAFEDLDWDTEKGLEAVACDTEGFVPPKVMLISSKVPKAEYIPTIIRRDDPSIIPILYDHEHATFEDILEEIERKLNVYHKGAKIWKMLIFCQGGPGHLYLLKNKVATFAKVEKEEDMIHFWKRLSRLMSKVNPEPNVIHIMGCYILGNPNGEKLFQNLRTLMTPYRVTFESPLELSAQGKQMIETYFDFRLYRLWKSRQHSKLLDFDDVL

SEQ ID NO: 55040 - protein, 530 aa, Homo sapiens
MGAAASRRRALRSEAMSSVAAKVRAARAFGEYLSQSHPENRNGADHLLADAYSGHDGSPEMQPAPQNKRRLSLVSNGCYEGSLSEEPSIRKPAGEGPQPRVYTISGEPALLPSPEAEAIELAVVKGRRQRHPHHHSQPLRASPGGSREDVSRPCQSWAGSRQGSKECPGCAQLAPGPTPRAFGLDQPPLPETSGRRKKLERMYSVDRVSDDIPIRTWFPKENLFSFQTATTTMQAISVFRGYAERKRRKRENDSASVIQRNFRKHLRMVGSRRVKAQTFAERRERSFSRSWSDPTPMKADTSHDSRDSSDLQSSHCTLDEAFEDLDWDTEKGLEAVACDTEGFVPPKVMLISSKVPKAEYIPTIIRRDDPSIIPILYDHEHATFEDILEEIERKLNVYHKGAKIWKMLIFCQGGPGHLYLLKNKVATFAKVEKEEDMIHFWKRLSRLMSKVNPEPNVIHIMGCYILGNPNGEKLFQNLRTLMTPYRVTFESPLELSAQGKQMIETYFDFRLYRLWKSRQHSKLLDFDDVL

SEQ ID NO: 55041 - protein, 194 aa, Homo sapiens
MGLGPLSSSLSPQLISSKVPKAEYIPTIIRRDDPSIIPILYDHEHATFEDILEEIERKLNVYHKGAKIWKMLIFCQGGPGHLYLLKNKVATFAKVEKEEDMIHFWKRLSRLMSKVNPEPNVIHIMGCYILGNPNGEKLFQNLRTLMTPYRVTFESPLELSAQGKQMIETYFDFRLYRLWKSRQHSKLLDFDDVL

SEQ ID NO: 55042 - protein, 507 aa, Homo sapiens
MGAAASRRRALRSEAMSSVAAKVRAARAFGEYLSQSHPENRNGADHLLADAYSGHDGSPEMQPAPQNKRRLSLVSNGCYEGSLSEEPSIRKPAGEGPQPRVYTISGEPALLPSPEAEAIELAVVKGRRQRHPHHHSQPLRASPGGSREDVSRPCQSWAGSRQGSKECPGCAQLAPGPTPRAFGLDQPPLPETSGRRKKLERMYSVDRVSDDIPIRTWFPKENLFSFQTATTTMQAVGNFRKHLRMVGSRRVKAQTFAERRERSFSRSWSDPTPMKADTSHDSRDSSDLQSSHCTLDEAFEDLDWDTEKGLEAVACDTEGFVPPKVMLISSKVPKAEYIPTIIRRDDPSIIPILYDHEHATFEDILEEIERKLNVYHKGAKIWKMLIFCQGGPGHLYLLKNKVATFAKVEKEEDMIHFWKRLSRLMSKVNPEPNVIHIMGCYILGNPNGEKLFQNLRTLMTPYRVTFESPLELSAQGKQMIETYFDFRLYRLWKSRQHSKLLDFDDVL

SEQ ID NO: 55043 - protein, 507 aa, Homo sapiens
MGAAASRRRALRSEAMSSVAAKVRAARAFGEYLSQSHPENRNGADHLLADAYSGHDGSPEMQPAPQNKRRLSLVSNGCYEGSLSEEPSIRKPAGEGPQPRVYTISGEPALLPSPEAEAIELAVVKGRRQRHPHHHSQPLRASPGGSREDVSRPCQSWAGSRQGSKECPGCAQLAPGPTPRAFGLDQPPLPETSGRRKKLERMYSVDRVSDDIPIRTWFPKENLFSFQTATTTMQAISNFRKHLRMVGSRRVKAQTFAERRERSFSRSWSDPTPMKADTSHDSRDSSDLQSSHCTLDEAFEDLDWDTEKGLEAVACDTEGFVPPKVMLISSKVPKAEYIPTIIRRDDPSIIPILYDHEHATFEDILEEIERKLNVYHKGAKIWKMLIFCQGGPGHLYLLKNKVATFAKVEKEEDMIHFWKRLSRLMSKVNPEPNVIHIMGCYILGNPNGEKLFQNLRTLMTPYRVTFESPLELSAQGKQMIETYFDFRLYRLWKSRQHSKLLDFDDVL

SEQ ID NO: 55044 - protein, 327 aa, Homo sapiens
MQLGRRLDPERQALHLCSGVEGEPWKAVAGRALGGICLWVGGGARSQGEHWLPTPKGNFRKHLRMVGSRRVKAQTFAERRERSFSRSWSDPTPMKADTSHDSRDSSDLQSSHCTLDEAFEDLDWDTEKGLEAVACDTEGFVPPKVMLISSKVPKAEYIPTIIRRDDPSIIPILYDHEHATFEDILEEIERKLNVYHKGAKIWKMLIFCQGGPGHLYLLKNKVATFAKVEKEEDMIHFWKRLSRLMSKVNPEPNVIHIMGCYILGNPNGEKLFQNLRTLMTPYRVTFESPLELSAQGKQMIETYFDFRLYRLWKSRQHSKLLDFDDVL

SEQ ID NO: 55045 - protein, 215 aa, Homo sapiens
MPGEATETVPATEQELPQPQAETGSGTESDSDESVPELEEQDSTQATTQQAQLAAAAEIDEEPVSKAKQSRSEKKARKAMSKLGLRQVTGVTRVTIRKSKNILFVITKPDVYKSPASDTYIVFGEAKIEDLSQQAQLAAAEKFKVQGEAVSNIQENTQTPTVQEESEEEEVDETGVEVKDIELVMSQANVSRAKAVRALKNNSNDIVNAIMELTM

SEQ ID NO: 55046 - protein, 215 aa, Homo sapiens; identical to SEQ ID NO: 55045

SEQ ID NO: 55047 - protein, 2078 aa, Homo sapiens
MPGEATETVPATEQELPQPQAETAVLPMSSALSVTAALGQPGPTLPPPCSPAPQQCPLSAANQASPFPSPSTIASTPLEVPFPQSSSGTALPLGTAPEAPTFLPNLIGPPISPAALALASPMIAPTLKGTPSSSAPLALVALAPHSVQKSSAFPPNLLTSPPSVAVAESGSVITLSAPIAPSEPKTNLNKVPSEVVPNPKGTPSPPCIVSTVPYHCVTPMASIQSGVASLPQTTPTTTLAIASPQVKDTTISSVLISPQNPGSLSLKGPVSPPAALSLSTQSLPVVTSSQKTAGPNTPPDFPISLGSHLAPLHQSSFGSVQLLGQTGPSALSDPTVKTISVDHSSTGASYPSQRSVIPPLPSRNEVVPATVAAFPVVAPSVDKGPSTISSITCSPSGSLNVATSFSLSPTTSLILKSSPNATYHYPLVAQMPVSSVGTTPLVVTNPCTIAAAPTTTFEVATCVSPPMSSGPISNIEPTSPAALVMAPVAPKEPSTQVATTLRIPVSPPLPDPEDLKNLPSSVLVKFPTQKDLQTVPASLEGAPFSPAQAGLTTKKDPTVLPLVQAAPKNSPSFQSTSSSPEIPLSPEATLAKKSLGEPLPIGKPASSMTSPLGVNSSASVIKTDSYAGPDSAGPLLKSSLITPTVAAFPLESADPAGVAPTTAKGTSTYTTTASPFLEGTVSLAPKNHPVKEGTLTTLPLVPTASENCPVAPSPQNTCAPLATLVLAPEIPKSVPSPSLPPAGTPPGTKKVDGISHTSALAPVASSPKECPTEDSGASATASSKGTLTYLADSPSPLGVSVSPQTKRPPTKKGSAGPDTPIGNLSSPVSPVEASFLPENSLSFQGSKDSPATTHSPTPPSPKGAPTPSAVTPLSPKGVTLPPKETPTPSVVNLPFPKEGPATPAPKQAPALSMTSSSPKKARATPAPKGIPASPSPKGAPTPPAATPPSPKGGPATPSPKWAPTPPAATPPSPKGGPATPSPKGAPTPPAATPPSPKGGPATPSPKGAPTPPAVTPPSPKGSPAATPFPKGASTPPAATPPSPKGSPAATPLPKGAPTTPAATLPSPKGGPATPSLKGAPTPPAATPPSPKGGPATPSPKGAPMPPAATPPSPKGGLATPPHKGAPTTPAATPPSPKGGLATPPPKGAPTTPAATPPSPKGGLATPPPKGAPTTPAATPPSPKGGLATPSPKGAPTTPAATPPSPKGGLATPSPKGAPTTPAATPPSPKGGLATPSPKGAPTTPAATPPSPKGGPATPPPKGAPTPPAATPPSLKGGLATPPHKGAPNPAVVTPPSPKGGPATSPPKGAPTPPAATPPSPKGSPGTPPPKGAPTPPAVTPPSPKGTPTLPATTPSSKGGPTTPSSKEGPTPPAATPSHKGGPAMTPPSPKRGPAIPSPKGDPTSPAVIPLSPKKAPATPVTREGAATPSKGDLTPPAVTPVSLKKAPATSAPKGGPATPSSKGDPTLPAVTPPSPKEPPAPKQVATSSSPKKAPATPAPMGAPTLPAVIPSSPKEVPATPSSRRDPIAPTATLLSKKTPATLAPKEALIPPAMTVPSPKKTPAIPTPKEAPATPSSKEASSPPAVTPSTYKGAPSPKELLIPPAVTSPSPKEAPTPPAVTPPSPEKGPATPAPKGTPTSPPVTPSSLKDSPTSPASVTCKMGATVPQASKGLPAKKGPTALKEVLVAPAPESTPIITAPTRKGPQTKKSSATSPPICPDPSAKNGSKGPLSTVAPAPLLPVQKDSSKTAKGKDASHSPKGPLAPPESKASTPLTAAAFEKVLPKPESASVSAAPSPPVSLPLAPSPVPTLPPKQQFLPSSPGLVLESPSKPLAPADEDELLPLIPPEPISGGVPFQSVLVNMPTPKSAGIPVPTPSAKQPVTKNNKGSGTESDSDESVPELEEQDSTQATTQQAQLAAAAEIDEEPVSKAKQSRSEKKARKAMSKLGLRQVTGVTRVTIRKSKNILFVITKPDVYKSPASDTYIVFGEAKIEDLSQQAQLAAAEKFKVQGEAVSNIQENTQTPTVQEESEEEEVDETGVEVKDIELVMSQANVSRAKAVRALKNNSNDIVNAIMELTM

SEQ ID NO: 55048 - protein, 215 aa, Homo sapiens; identical to SEQ ID NO: 55045

SEQ ID NO: 55049 - protein, 6 aa, Homo sapiens
MPGEAT

SEQ ID NO: 55050 - protein, 198 aa, Homo sapiens
MPGEATETVPATEQELPQPQAETGSGTESDSDESVPELEEQDSTQATTQQAQLAAAAEIDEEPVSKAKQSRSEKKARKAMSKLGLRQVTGVTRVTIRKSKNILFVITKPDVYKSPASDTYIVFGEAKIEDLSQQAQLAAAEKFKVQGEAVSNIQENTQTPTVQEESEEEEVDETGVEVKDIELVMSQANVSRAKAVRA

SEQ ID NO: 55051 - protein, 126 aa, Homo sapiens
MPGEATETVPATEQELPQPQAETGSGTESDSDESVPELEEQDSTQATTQQAQLAAAAEIDEEPVSKAKQSRSEKKARKAMSKLGLRQVTGVTRVTIRKSKNILFVITKPDVYKSPASDTYIVFGEA

SEQ ID NO: 55052 - protein, 215 aa, Homo sapiens; identical to SEQ ID NO: 55045

SEQ ID NO: 55053 - protein, 925 aa, Homo sapiens
MPGEATETVPATEQELPQPQAETAVLPMSSALSVTAALGQPGPTLPPPCSPAPQQCPLSAANQASPFPSPSTIASTPLEVPFPQSSSGTALPLGTAPEAPTFLPNLIGPPISPAALALASPMIAPTLKGTPSSSAPLALVALAPHSVQKSSAFPPNLLTSPPSVAVAESGSVITLSAPIAPSEPKTNLNKVPSEVVPNPKGTPSPPCIVSTVPYHCVTPMASIQSGVASLPQTTPTTTLAIASPQVKDTTISSVLISPQNPGSLSLKGPVSPPAALSLSTQSLPVVTSSQKTAGPNTPPDFPISLGSHLAPLHQSSFGSVQLLGQTGPSALSDPTVKTISVDHSSTGASYPSQRSVIPPLPSRNEVVPATVAAFPVVAPSVDKGPSTISSITCSPSGSLNVATSFSLSPTTSLILKSSPNATYHYPLVAQMPVSSVGTTPLVVTNPCTIAAAPTTTFEVATCVSPPMSSGPISNIEPTSPAALVMAPVAPKEPSTQVATTLRIPVSPPLPDPEDLKNLPSSVLVKFPTQKDLQTVPASLEGAPFSPAQAGLTTKKDPTVLPLVQAAPKNSPSFQSTSSSPEIPLSPEATLAKKSLGEPLPIVAAFPLESADPAGVAPTTAKAAAFEKVLPKPESASVSAAPSPPVSLPLAPSPVPTLPPKQQFLPSSPGLVLESPSKPLAPADEDELLPLIPPEPISGGVPFQSVLVNMPTPKSAGIPVPTPSAKQPVTKNNKGSGTESDSDESVPELEEQDSTQATTQQAQLAAAAEIDEEPVSKAKQSRSEKKARKAMSKLGLRQVTGVTRVTIRKSKNILFVITKPDVYKSPASDTYIVFGEAKIEDLSQQAQLAAAEKFKVQGEAVSNIQENTQTPTVQEESEEEEVDETGVEVKDIELVMSQANVSRAKAVRALKNNSNDIVNAIMELTM

SEQ ID NO: 55054 - protein, 101 aa, Homo sapiens
MPLEDEVVPPQVLSEPNEEAGAALSPLPEVPPWTGEVSPAQRDGGALGRGPWDSSDRSALLKSKLRALLTAPRSLRRSSCFGGRMDRIGAQSGLGCNSFRY

SEQ ID NO: 55055 - protein, 151 aa, Homo sapiens
MSSFSTTTVSFLLLLAFQLLGQTRANPMYNAVSNADLMDFKNLLDHLEEKMPLEDEVVPPQVLSEPNEEAGAALSPLPEVPPWTGEVSPAQRDGGALGRGPWDSSDRSALLKSKLRALLTAPRSLRRSSCFGGRMDRIGAQSGLGCNSFRY

SEQ ID NO: 55056 - protein, 255 aa, Homo sapiens
MEQYANNLEELVEERTQAYLEEKRKAEALLYQILPHSVAEQLKRGETVQAEAFDSVTIYFSDIVGFTALSAESTPMQVVTLLNDLYTCFDAVIDNFDVYKVETIGDAYMVVSGLPVRNGRLHACEVARMALALLDAVRSFRIRHRPQEQLRLRIGIHTGPVCAGVVGLKMPRYCLFGDTVNTASRMESNGEALKIHLSSETKAVLEEFGGFELELRGDVEMKVEGEASALPTFWGPRGSYPSQAANATPIPKALI

SEQ ID NO: 55057 - protein, 1061 aa, Homo sapiens
MPGPRRPAGSRLRLLLLLLLPPLLLLLRGSHAGNLTVAVVLPLANTSYPWSWARVGPAVELALAQVKARPDLLPGWTVRTVLGSSENALGVCSDTAAPLAAVDLKWEHNPAVFLGPGCVYAAAPVGRFTAHWRVPLLTAGAPALGFGVKDEYALTTRAGPSYAKLGDFVAALHRRLGWERQALMLYAYRPGDEEHCFFLVEGLFMRVRDRLNITVDHLEFAEDDLSHYTRLLRTMPRKGRVIYICSSPDAFRTLMLLALEAGLCGEDYVFFHLDIFGQSLQGGQGPAPRRPWERGDGQDVSARQAFQAAKIITYKDPDNPEYLEFLKQLKHLAYEQFNFTMEDGLVNTIPASFHDGLLLYIQAVTETLAHGGTVTDGENITQRMWNRSFQGVTGYLKIDSSGDRETDFSLWDMDPENGAFRVVLNYNGTSQELVAVSGRKLNWPLGYPPPDIPKCGFDNEDPACNQDHLSTLEVLALVGSLSLLGILIVSFFIYRKMQLEKELASELWRVRWEDVEPSSLERHLRSAGSRLTLSGRGSNYGSLLTTEGQFQVFAKTAYYKGNLVAVKRVNRKRIELTRKVLFELKHMRDVQNEHLTRFVGACTDPPNICILTEYCPRGSLQDILENESITLDWMFRYSLTNDIVKGMLFLHNGAICSHGNLKSSNCVVDGRFVLKITDYGLESFRDLDPEQGHTVYAKKLWTAPELLRMASPPVRGSQAGDVYSFGIILQEIALRSGVFHVEGLDLSPKEIIERVTRGEQPPFRPSLALQSHLEELGLLMQRCWAEDPQERPPFQQIRLTLRKFNRENSSNILDNLLSRMEQYANNLEELVEERTQAYLEEKRKAEALLYQILPHSVAEQLKRGETVQAEAFDSVTIYFSDIVGFTALSAESTPMQVVTLLNDLYTCFDAVIDNFDVYKVETIGDAYMVVSGLPVRNGRLHACEVARMALALLDAVRSFRIRHRPQEQLRLRIGIHTGPVCAGVVGLKMPRYCLFGDTVNTASRMESNGEALKIHLSSETKAVLEEFGGFELELRGDVEMKGKGKVRTYWLLGERGSSTRG

SEQ ID NO: 55058 - protein, 540 aa, Homo sapiens
KMQLEKELASELWRVRWEDVEPSSLERHLRSAGSRLTLSGRGSNYGSLLTTEGQFQVFAKTAYYKMRDVQNEHLTRFVGACTDPPNICILTEYCPRGSLQDILENESITLDWMFRYSLTNDIVKGMLFLHNGAICSHGNLKSSNCVVDGRFVLKITDYGLESFRDLDPEQGHTVYAKKLWTAPELLRMASPPVRGSQAGDVYSFGIILQEIALRSGVFHVEGLDLSPKEIIERVTRGEQPPFRPSLALQSHLEELGLLMQRCWAEDPQERPPFQQIRLTLRKFNRENSSNILDNLLSRMEQYANNLEELVEERTQAYLEEKRKAEALLYQILPHSVAEQLKRGETVQAEAFDSVTIYFSDIVGFTALSAESTPMQVVTLLNDLYTCFDAVIDNFDVYKVETIGDAYMVVSGLPVRNGRLHACEVARMALALLDAVRSFRIRHRPQEQLRLRIGIHTGPVCAGVVGLKMPRYCLFGDTVNTASRMESNGEALKIHLSSETKAVLEEFGGFELELRGDVEMKGKGKVRTYWLLGERGSSTRG

SEQ ID NO: 55059 - protein, 1047 aa, Homo sapiens
MALPSLLLLVAALAGGVRPPGARNLTLAVVLPEHNLSYAWAWPRVGPAVALAVEALGRALPVDLRFVSSELEGACSEYLAPLSAVDLKLYHDPDLLLGPGCVYPAASVARFASHWRLPLLTAGAVASGFSAKNDHYRTLVRTGPSAPKLGEFVVTLHGHFNWTARAALLYLDARTDDRPHYFTIEGVFEALQGSNLSVQHQVYAREPGGPEQATHFIRANGRIVYICGPLEMLHEILLQAQRENLTNGDYVFFYLDVFGESLRAGPTRATGRPWQDNRTREQAQALREAFQTVLVITYREPPNPEYQEFQNRLLIRAREDFGVELGPSLMNLIAGCFYDGILLYAEVLNETIQEGGTREDGLRIVEKMQGRRYHGVTGLVVMDKNNDRETDFVLWAMGDLDSGDFQPAAHYSGAEKQIWWTGRPIPWVKGAPPSDNPPCAFDLDDPSCDKTPLSTLAIVALGTGITFIMFGVSSFLIFRKLMLEKELASMLWRIRWEELQFGNSERYHKGAGSRLTLSLRGSSYGSLMTAHGKYQIFANTGHFKGNVVAIKHVNKKRIELTRQVLFELKHMRDVQFNHLTRFIGACIDPPNICIVTEYCPRGSLQDILENDSINLDWMFRYSLINDLVKGMAFLHNSIISSHGSLKSSNCVVDSRFVLKITDYGLASFRSTAEPDDSHALYAKKLWTAPELLSGNPLPTTGMQKADVYSFGIILQEIALRSGPFYLEGLDLSPKEIVQKVRNGQRPYFRPSIDRTQLNEELVLLMERCWAQDPAERPDFGQIKGFIRRFNKEGGTSILDNLLLRMEQYANNLEKLVEERTQAYLEEKRKAEALLYQILPHSVAEQLKRGETVQAEAFDSVTIYFSDIVGFTALSAESTPMQVVTLLNDLYTCFDAIIDNFDVYKVETIGDAYMVVSGLPGRNGQRHAPEIARMALALLDAVSSFRIRHRPHDQLRLRIGVHTGPVCAGVVGLKMPRYCLFGDTVNTASRMESNGQALKIHVSSTTKDALDELGCFQLELRGDVEMKGKGKMRTYWLLGERKGPPGLL

SEQ ID NO: 55060 - protein, 541 aa, Homo sapiens
MPSLLVLTFSPCVLLGWALLAGGTGGGGVGGGGGGAGIGGGRQEREALPPQKIEVLVLLPQDDSYLFSLTRVRPAIEYALRSVEGNGTGRRLLPPGTRFQVAYEDSDCGNRALFSLVDRVAAARGAKPDLILGPVCEYAAAPVARLASHWDLPMLSAGALAAGFQHKDSEYSHLTRVAPAYAKMGEMMLALFRHHHWSRAALVYSDDKLERNCYFTLEGVHEVFQEEGLHTSIYSFDETKDLDLEDIVRNIQASERVVIMCASSDTIRSIMLVAHRHGMTSGDYAFFNIELFNSSSYGDGSWKRGDKHDFEAKQAYSSLQTVTLLRTVKPEFEKFSMEVKSSVEKQGLNMEDYVNMFVEGFHDAILLYVLALHEVLRAGYSKKDGGKIIQQTWNRTFEGIAGQVSIDANGDRYGDFSVIAMTDVEAGTQEVIGDYFGKEGRFEMRPNVKYPWGPLKLRIDENRIVEHTNSSPCKSSGGLEESAVTGIVVGALLGAGLLMAFYFFRKKYRITIERRTQQEESNLGKHRELREDSIRSHFSVA

SEQ ID NO: 55061 - protein, 540 aa, Homo sapiens
MPSLLVLTFSPCVLLGWALLAGGTGGGGVGGGGGGAGIGGGRQEREALPPQKIEVLVLLPQDDSYLFSLTRVRPAIEYALRSVEGNGTGRRLLPPGTRFQVAYEDSDCGNRALFSLVDRVAAARGAKPDLILGPVCEYAAAPVARLASHWDLPMLSAGALAAGFQHKDSEYSHLTRVAPAYAKMGEMMLALFRHHHWSRAALVYSDDKLERNCYFTLEGVHEVFQEEGLHTSIYSFDETKDLDLEDIVRNIQASERVVIMCASSDTIRSIMLVAHRHGMTSGDYAFFNIELFNSSSYGDGSWKRGDKHDFEAKQAYSSLQTVTLLRTVKPEFEKFSMEVKSSVEKQGLNMEDYVNMFVEGFHDAILLYVLALHEVLRAGYSKKDGGKIIQQTWNRTFEGIAGQVSIDANGDRYGDFSVIAMTDVEAGTQEVIGDYFGKEGRFEMRPNVKYPWGPLKLRIDENRIVEHTNSSPCKSCGLEESAVTGIVVGALLGAGLLMAFYFFRKKYRITIERRTQQEESNLGKHRELREDSIRSHFSVA

SEQ ID NO: 55062 - protein, 324 aa, Homo sapiens
MEPSALGPWSLFPDLAPRDQEGQVLAPRRCFRRECGQNEKVVIMCASSDTIRSIMLVAHRHGMTSGDYAFFNIELFNSSSYGDGSWKRGDKHDFEAKQAYSSLQTVTLLRTVKPEFEKFSMEVKSSVEKQGLNMEDYVNMFVEGFHDAILLYVLALHEVLRAGYSKKDGGKIIQQTWNRTFEGIAGQVSIDANGDRYGDFSVIAMTDVEAGTQEVIGDYFGKEGRFEMRPNVKYPWGPLKLRIDENRIVEHTNSSPCKSCGLEESAVTGIVVGALLGAGLLMAFYFFRKKYRITIERRTQQEESNLGKHRELREDSIRSHFSVA

SEQ ID NO: 55063 - protein, 304 aa, Homo sapiens
MSSTLPALLCVGLCLSQRISAQQQTLPKPFIWAEPHFMVPKEKQVTICCQGNYGAVEYQLHFEGSLFAVDRPKPPERINKVKFYIPDMNSRMAGQYSCIYRVGELWSEPSNLLDLVVTEMYDTPTLSVHPGPEVISGEKVTFYCRLDTATSMFLLLKEGRSSHVQRGYGKVQAEFPLGPVTTAHRGTYRCFGSYNNHAWSFPSEPVKLLVTGDIENTSLAPEDPTFPADTWGTYLLTTETGLQKDHALWDHTAQNLLRMGLAFLVLVALVWFLVEDWLSRKRTRERASRASTWEGRRRLNTQTL

SEQ ID NO: 55064 - protein, 287 aa, Homo sapiens
MSSTLPALLCVGLCLSQRISAQQQTLPKPFIWAEPHFMVPKEKQVTICCQGNYGAVEYQLHFEGSLFAVDRPKPPERINKVKFYIPDMNSRMAGQYSCIYRVGELWSEPSNLLDLVVTEMYDTPTLSVHPGPEVISGEKVTFYCRLDTATSMFLLLKEGRSSHVQRGYGKVQAEFPLGPVTTAHRGTYRCFGSYNNHAWSFPSEPVKLLVTGDIENTSLAPEDPTFPDHALWDHTAQNLLRMGLAFLVLVALVWFLVEDWLSRKRTRERASRASTWEGRRRLNTQTL

SEQ ID NO: 55065 - protein, 209 aa, Homo sapiens
MSSTLPALLCVGLCLSQRISAQQQMYDTPTLSVHPGPEVISGEKVTFYCRLDTATSMFLLLKEGRSSHVQRGYGKVQAEFPLGPVTTAHRGTYRCFGSYNNHAWSFPSEPVKLLVTGDIENTSLAPEDPTFPADTWGTYLLTTETGLQKDHALWDHTAQNLLRMGLAFLVLVALVWFLVEDWLSRKRTRERASRASTWEGRRRLNTQTL

SEQ ID NO: 55066 - protein, 197 aa, Homo sapiens
MSSTLPALLCVEMYDTPTLSVHPGPEVISGEKVTFYCRLDTATSMFLLLKEGRSSHVQRGYGKVQAEFPLGPVTTAHRGTYRCFGSYNNHAWSFPSEPVKLLVTGDIENTSLAPEDPTFPADTWGTYLLTTETGLQKDHALWDHTAQNLLRMGLAFLVLVALVWFLVEDWLSRKRTRERASRASTWEGRRRLNTQTL

SEQ ID NO: 55067 - protein, 303 aa, Homo sapiens
MSSTLPALLCVGLCLSQRISAQQQTLPKPFIWAEPHFMVPKEKQVTICCQGNYGAVEYQLHFEGSLFAVDRPKPPERINKVKFYIPDMNSRMAGQYSCIYRVGELWSEPSNLLDLVVTEMYDTPTLSVHPGPEVISGEKVTFYCRLDTATSMFLLLKEGRSSHVQRGYGKVQAEFPLGPVTTAHRGTYRCFGSYNNHAWSFPSEPVKLLVTGDIENTSLAPEDPTFPDTWGTYLLTTETGLQKDHALWDHTAQNLLRMGLAFLVLVALVWFLVEDWLSRKRTRERASRASTWEGRRRLNTQTL

SEQ ID NO: 55068 - protein, 258 aa, Homo sapiens
MAWRALHPLLLLLLLFPGSQAQSKAQVLQSVAGQTLTVRCQYPPTGSLYEKKGWCKEASALVCIRLVTSSKPRTMAWTSRFTIWDDPDAGFFTVTMTDLREEDSGHYWCRIYRPSDNSVSKSVRFYLVVSPASASTQTSWTPRDLVSSQTQTQSCVPPTAGARQAPESPSTIPVPSQPQNSTLRPGPAAPIALVPVFCGLLVAKSLVLSALLVWWVLRNRHMQHQGRSLLHPAQPRPQAHRHFPLSHRAPGGTYGGKP

SEQ ID NO: 55069 - protein, 270 aa, Homo sapiens
MAWRALHPLLLLLLLFPGSQAQSKAQVLQSVAGQTLTVRCQYPPTGSLYEKKGWCKEASALVCIRLVTSSKPRTMAWTSRFTIWDDPDAGFFTVTMTDLREEDSGHYWCRIYRPSDNSVSKSVRFYLVVSPASASTQTSWTPRDLVSSQTQTQSCVPPTAGARQAPESPSTIPVPSHPSSPLPVPLPSRPQNSTLRPGPAAPIALVPVFCGLLVAKSLVLSALLVWWVLRNRHMQHQGRSLLHPAQPRPQAHRHFPLSHRAPGGTYGGKP

SEQ ID NO: 55070 - protein, 276 aa, Homo sapiens
MAWRALHPLLLLLLLFPGSQAQSKAQVLQSVAGQTLTVRCQYPPTGSLYEKKGWCKEASALVCIRLVTSSKPRTMAWTSRFTIWDDPDAGFFTVTMTDLREEDSGHYWCRIYRPSDNSVSKSVRFYLVVSPASASTQTSWTPRDLVSSQTQTQSCVPPTAGARQAPESPSTIPVPSQPQNSTLRPGPAAPIALVPVFCGLLVAKSLVLSALLVWWGDIWWKTMMELRSLDTQKATCHLQQVTDLPWTSVSSPVEREILYHTVARTKISDDDDEHTL

SEQ ID NO: 55071 - protein, 201 aa, Homo sapiens
MAWMLLLILIMVHPGSCALWVSQPPEIRTLEGSSAFLPCSFNASQGRLAIGSVTWFRDEVVPGKEVRNGTPEFRGRLAPLASSRFLHDHQAELHIRDVRGHDASIYVCRVEVLGLGVGTGNGTRLVVEKEHPQLGAGTVLLLRAGFYAVSFLSVAVGSTVYYQGKCLTWKGPRRQLPAVVPAPLPPPCGSSAHLLPPVPGG

SEQ ID NO: 55072 - protein, 165 aa, Homo sapiens
MAWMLLLILIMVHPGSCALWVSQPPEIRTLEGSSAFLPCSFNASQGRLAIGSVTWFRDEVVPGKEAELHIRDVRGHDASIYVCRVEVLGLGVGTGNGTRLVVEKEHPQLGAGTVLLLRAGFYAVSFLSVAVGSTVYYQGKCHCHMGTHCHSSDGPRGVIPEPRCP

SEQ ID NO: 55073 - protein, 190 aa, Homo sapiens
MAWMLLLILIMVHPGSCALWVSQPPEIRTLEGSSAFLPCSFNASQGRLAIGSVTWFRDEVVPGKEVRNGTPEFRGRLAPLASSRFLHDHQAELHIRDVRGHDASIYVCRVEVLGLGVGTGNGTRLVVEKEHPQLGAGTVLLLRAGFYAVSFLSVAVGSTVYYQGKCHCHMGTHCHSSDGPRGVIPEPRCP

SEQ ID NO: 55074 - protein, 177 aa, Homo sapiens
MAWMLLLILIMVHPGSCALWVSQPPEIRTLEGSSAFLPCSFNASQGRLAIGSVTWFRDEVVPGKEVRNGTPEFRGRLAPLASSRFLHDHQAELHIRDVRGHDASIYVCRVEVLGLGVGTGNGTRLVVEKEHPQLGAGTVLLLRAGFYAVSFLSVAVGSTVYYQGKYAKSTLSGFPQL

SEQ ID NO: 55075 - protein, 190 aa, Homo sapiens; identical to SEQ ID NO: 55073

SEQ ID NO: 55076 - protein, 201 aa, Homo sapiens; identical to SEQ ID NO: 55071

SEQ ID NO: 55077 - protein, 177 aa, Homo sapiens; identical to SEQ ID NO: 55074

SEQ ID NO: 55078 - protein, 165 aa, Homo sapiens; identical to SEQ ID NO: 55072

SEQ ID NO: 55079 - protein, 190 aa, Homo sapiens; identical to SEQ ID NO: 55073

SEQ ID NO: 55080 - protein, 201 aa, Homo sapiens; identical to SEQ ID NO: 55071

SEQ ID NO: 55081 - protein, 190 aa, Homo sapiens; identical to SEQ ID NO: 55073

SEQ ID NO: 55082 - protein, 165 aa, Homo sapiens; identical to SEQ ID NO: 55072

SEQ ID NO: 55083 - protein, 165 aa, Homo sapiens; identical to SEQ ID NO: 55072

SEQ ID NO: 55084 - protein, 165 aa, Homo sapiens; identical to SEQ ID NO: 55072

SEQ ID NO: 55085 - protein, 201 aa, Homo sapiens; identical to SEQ ID NO: 55071

SEQ ID NO: 55086 - protein, 201 aa, Homo sapiens; identical to SEQ ID NO: 55071

SEQ ID NO: 55087 - protein, 177 aa, Homo sapiens; identical to SEQ ID NO: 55074

SEQ ID NO: 55088 - protein, 177 aa, Homo sapiens; identical to SEQ ID NO: 55074

SEQ ID NO: 55089 - protein, 201 aa, Homo sapiens; identical to SEQ ID NO: 55071

SEQ ID NO: 55090 - protein, 177 aa, Homo sapiens; identical to SEQ ID NO: 55074

SEQ ID NO: 55091 - protein, 190 aa, Homo sapiens; identical to SEQ ID NO: 55073

SEQ ID NO: 55092 - protein, 201 aa, Homo sapiens; identical to SEQ ID NO: 55071

SEQ ID NO: 55093 - protein, 165 aa, Homo sapiens; identical to SEQ ID NO: 55072

SEQ ID NO: 55094 - protein, 177 aa, Homo sapiens; identical to SEQ ID NO: 55074

SEQ ID NO: 55095 - protein, 190 aa, Homo sapiens; identical to SEQ ID NO: 55073

SEQ ID NO: 55096 - protein, 177 aa, Homo sapiens; identical to SEQ ID NO: 55074

SEQ ID NO: 55097 - protein, 201 aa, Homo sapiens; identical to SEQ ID NO: 55071

SEQ ID NO: 55098 - protein, 190 aa, Homo sapiens; identical to SEQ ID NO: 55073

SEQ ID NO: 55099 - protein, 165 aa, Homo sapiens; identical to SEQ ID NO: 55072

SEQ ID NO: 55100 - protein, 165 aa, Homo sapiens; identical to SEQ ID NO: 55072

SEQ ID NO: 55101 - protein, 177 aa, Homo sapiens; identical to SEQ ID NO: 55074

SEQ ID NO: 55102 - protein, 190 aa, Homo sapiens; identical to SEQ ID NO: 55073

SEQ ID NO: 55103 - protein, 1462 aa, Homo sapiens
MGAQDRPQCHFDIEINREPVGRIMFQLFSDICPKTCKNFLCLCSGEKGLGKTTGKKLCYKGSTFHRVVKNFMIQGGDFSEGNGKGGESIYGGYFKDENFILKHDRAFLLSMANRGKHTNGSQFFITTKPAPHLDGVHVVFGLVISGFEVIEQIENLKTDAASRPYADVRVIDCGVLATKSIKDVFEKKRKKPTHSEGSDSSSNSSSSSESSSESELEHERSRRRKHKRRPKVKRSKKRRKEASSSEEPRNKHAMNPKGHSERSDTNEKRSVDSSAKREKPVVRPEEIPPVPENRFLLRRDMPVVTAEPEPKIPDVAPIVSDQKPSVSKSGRKIKGRGTIRYHTPPRSRSCSESDDDDSSETPPHWKEEMQRLRAYRPPSGEKWSKGDKLSDPCSSRWDERSLSQRSRSWSYNGYYSDLSTARHSGHHKKRRKEKKVKHKKKGKKQKHCRRHKQTKKRRILIPSDIESSKSSTRRMKSSCDRERSSRSSSLSSHHSSKRDWSKSDKDVQSSLTHSSRDSYRSKSHSQSYSRGSSRSRTASKSSSHSRSRSKSRSSSKSGHRKRASKSPRKTASQLSENKPVKTEPLRATMAQNENVVVQPVVAENIPVIPLSDSPPPSRWKPGQKPWKPSYERIQEMKAKTTHLLPIQSTYSLANIKETGSSSSYHKREKNSESDQSTYSKYSDRSSESSPRSRSRSSRSRSYSRSYTRSRSLASSHSRSRSPSSRSHSRNKYSDHSQCSRSSSYTSISSDDGRRAKRRLRSSGKKNSVSHKKHSSSSEKTLHSKYVKGRDRSSCVRKYSESRSSLDYSSDSEQSSVQATQSAQEKEKQGQMERTHNKQEKNRGEEKSKSERECPHSKKRTLKENLSDHLRNGSKPKRKNYAGSKWDSESNSERDVTKNSKNDSHPSSDKEEGEATSDSESEVSEIHIKVKPTTKSSTNTSLPDDNGAWKSSKQRTSTSDSEGSCSNSENNRGKPQKHKHGSKENLKREHTKKVKEKLKGKKDKKHKAPKRKQAFHWQPPLEFGEEEEEEIDDKQVTQESKEKKVSENNETIKDNILKTEKSSEEDLSGKHDTVTVSSDLDQFTKDDSKLSISPTALNTEENVACLQNIQHVEESVPNGVEDVLQTDDNMEICTPDRSSPAKVEETSPLGNARLDTPDINIVLKQDMATEHPQAEVVKQESSMSESKVLGEVGKQDSSSASLASAGESTGKKEVAEKSQINLIDKKWKPLQGVGNLAAPNAATSSAVEVKVLTTVPEMKPQGLRIEIKSKNKVRPGSLFDEVRKTARLNRRPRNQESSSDEQTPSRDDDSQSRSPSRSRSKSETKSRHRTRSVSYSHSRSRSRSSTSSYRSRSYSRSRSRGWYSRGRTRSRSSSYRSYKSHRTSSRSRSRSSSYDPHSRSRSYTYDSYYSRSRSRSRSQRSDSYHRGRSYNRRSRSCRSYGSDSESDRSYSHHRSPSESSRYS

SEQ ID NO: 55104 - protein, 104 aa, Homo sapiens
MGAQDRPQCHFDIEINREPVGRIMFQLFSDICPKTCKNFLCLCSGEKGLGKTTGKKLCYKGSTFHRVVKNFMIQGGDFSEGNGKGGESIYGGYFKENVVFCKMK

SEQ ID NO: 55105 - protein, 380 aa, Homo sapiens
MTEEVIVIAKWDYTAQQDQELDIKKNERLWLLDDSKTWWRVRNAANRTGYVPSNYVERKNSLKKGSLVKNLKDTLGLGKTRRKTSARDASPTPSTDAEYPANGSGADRIYDLNIPAFVKFAYVAEREDELSLVKGSRVTVMEKCSDGWWRGSYNGQIGWFPSNYVLEEVDEAAAESPSFLSLRKGASLSNGQGSRVLHVVQTLYPFSSVTEEELNFEKGETMEVIEKPENDPEWWKCKNARGQVGLVPKNYVVVLSDGPALHPAHAPQISYTGPSSSGRFAGREWYYGNVTRHQAECALNERGVEGDFLIRDSESSPSDFSVSLKASGKNKHFKVQLVDNVYCIGQRRFHTMDELVEHYKKAPIFTSEHGEKLYLVRALQ

SEQ ID NO: 55106 - protein, 144 aa, Homo sapiens
MTEEVIVIAKWDYTAQQDQELDIKKNERLWLLDDSKTWWRVRNAANRTGYVPSNYVERKNSLKKGSLVKNLKDTLGLGKTRRKTSARDASPTPSTDAEYPANGSGADRIYDLNIPAFVKFAYVAEREDELSLVKGSRVTVMEKC

SEQ ID NO: 55107 - protein, 380 aa, Homo sapiens; identical to SEQ ID NO: 55105

SEQ ID NO: 55108 - protein, 110 aa, Homo sapiens
MTEEVIVIAKWDYTAQQDQELDIKKNERLWLLDDSKTWWRVRNAANRTGYVPSNYVERKNSLKKGSLVKNLKDTLGLGKTRRKTSARDASPTPSTDAEYPANGSGADRIY

SEQ ID NO: 55109 - protein, 83 aa, Homo sapiens
MTEEVIVIAKWDYTAQQDQELDIKKNERLWLLDDSKTWWRVRNAANRTGYVPSNYVERKNSLKKGSLVKNLKDTLAQRLLRVP

SEQ ID NO: 55110 - protein, 83 aa, Homo sapiens; identical to SEQ ID NO: 55109

SEQ ID NO: 55111 - protein, 722 aa, Homo sapiens
MYRALYAFRSAEPNALAFAAGETFLVLERSSAHWWLAARARSGETGYVPPAYLRRLQGLEQDVLQAIDRAIEAVHNTAMRDGGKYSLEQRGVLQKLIHHRKETLSRRGPSASSVAVMTSSTSDHHLDAAAARQPNGVCRAGFERQHSLPSSEHLGADGGLYQIPLPSSQIPPQPRRAAPTTPPPPVKRRDREALMASGSGGHNTMPSGGNSVSSGSSVSSTSLDTLYTSSSPSEPGSSCSPTPPPVPRRGTHTTVSQVQPPPSKASAPEPPAEEEVATGTTSASDDLEALGTLSLGTTEEKAAAEAAVPRTIGAELMELVRRNTGLSHELCRVAIGIIVGHIQASVPASSPVMEQVLLSLVEGKDLSMALPSGQVCHDQQRLEVIFADLARRKDDAQQRSWALYEDEGVIRCYLEELLHILTDADPEVCKKMCKRNEFESVLALVAYYQMEHRASLRLLLLKCFGAMCSLDAAIISTLVSSVLPVELARDMQTDTQDHQKLCYSALILAMVFSMGEAVPYAHYEHLGTPFAQFLLNIVEDGLPLDTTEQLPDLCVNLLLALNLHLPAADQNVIMAALSKHANVKIFSEKLLLLLNRGDDPVRIFKHEPQPPHSVLKFLQDVFGSPATAAIFYHTDMMALIDITVRHIADLSPGDKLRMEYLSLMHAIVRTTPYLQHRHRLPDLQAILRRILNEEETSPQCQMDRMIVREMCKEFLVLGEAPS

SEQ ID NO: 55112 - protein, 722 aa, Homo sapiens
MYRALYAFRSAEPNALAFAAGETFLVLERSSAHWWLAARARSGETGYVPPAYLRRLQGLEQDVLQAIDRAIEAVHNTAMRDGGKYSLEQRGVLQKLIHHRKETLSRRGPSASSVAVMTSSTSDHHLDAAAARQPNGVCRAGFERQHSLPSSEHLGADGGLYQIPLPSSQIPPQPRRAAPTTPPPPVKRRDREALMASGSGGHNTMPSGGNSVSSGSSVSSTSLDTLYTSSSPSEPGSSCSPTPPPVPRRGTHTTVSQVQPPPSKASAPEPPAEEEVATGTTSASDDLEALGTLSLGTTEEKAAAEAAVPRTIGAELMELVRRNTGLSHELCRVAIGIIVGHIQASVPASSPVMEQVLLSLVEGKDLSMALPSGQVCHDQQRLEVIFADLARRKDDAQQRSWALYEDEGVIRCYLEELLHILTDADPEVCKKMCKRNEFESVLALVAYYQMEHRASLRLLLLKCFGAMCSLDAAIISTLVSSVLPVELARDMQTDTQDHQKLCYSALILAMVFSMGEAVPYAHYEHLGTPFAQFLLNIVEDGLPLDTTEQLPDLCVNLLLALNLHLPAADQNVIMAALSKHANVKIFSEKLLLLLNRGDDPVRIFKHEPQPPHSVLKFLQDVFGSPATAAIFYHTDMMALIDITVRHIADLSPGDKGPFGAGQRPWPGVPRLLEPGSTPSREPHPVERSGVPALTSSWASGCPRPLHPALQLVIDSAFGGRSV

SEQ ID NO: 55113 - protein, 715 aa, Homo sapiens
MYRALYAFRSAEPNALAFAAGETFLVLERSSAHWWLAARARSGETGYVPPAYLRRLQGLEQDVLQAIDRAIEAVHNTAMRDGGKYSLEQRGVLQKLIHHRKETLSRRGPSASSVAVMTSSTSDHHLDAAAARQPNGVCRAGFERQHSLPSSEHLGADGGLYQIPPQPRRAAPTTPPPPVKRRDREALMASGSGGHNTMPSGGNSVSSGSSVSSTSLDTLYTSSSPSEPGSSCSPTPPPVPRRGTHTTVSQVQPPPSKASAPEPPAEEEVATGTTSASDDLEALGTLSLGTTEEKAAAEAAVPRTIGAELMELVRRNTGLSHELCRVAIGIIVGHIQASVPASSPVMEQVLLSLVEGKDLSMALPSGQVCHDQQRLEVIFADLARRKDDAQQRSWALYEDEGVIRCYLEELLHILTDADPEVCKKMCKRNEFESVLALVAYYQMEHRASLRLLLLKCFGAMCSLDAAIISTLVSSVLPVELARDMQTDTQDHQKLCYSALILAMVFSMGEAVPYAHYEHLGTPFAQFLLNIVEDGLPLDTTEQLPDLCVNLLLALNLHLPAADQNVIMAALSKHANVKIFSEKLLLLLNRGDDPVRIFKHEPQPPHSVLKFLQDVFGSPATAAIFYHTDMMALIDITVRHIADLSPGDKLRMEYLSLMHAIVRTTPYLQHRHRLPDLQAILRRILNEEETSPQCQMDRMIVREMCKEFLVLGEAPS

SEQ ID NO: 55114 - protein, 1134 aa, Homo sapiens
MSRSVLQPSQQKLAEKLTILNDRGVGMLTRLYNIKKQGQVWKACGDPKAKPSYLIDKNLESAVKFIVRKFPAVETRNNNQQLAQLQKEKSEILKNLALYYFTFVDVMEFKDHVCELLNTIDVCQVFFDITVNFDLTKNYLDLIITYTTLMILLSRIEERKAIIGLYNYAHEMTHGASDREYPRLGQMIVDYENPLKKMMEEFVPHSKSLSDALISLQMVYPRRNLSADQWRNAQLLSLISAPSTMLNPAQSDTMPCEYLSLDAMEKWIIFGFILCHGILNTDATALNLWKLALQSSSCLSLFRDEVFHIHKAAEDLFVNIRGYNKRINDIRECKEAAVSHAGSMHRERRKFLRSALKELATVLSDQPGLLGPKALFVFMALSFARDEIIWLLRHADNMPKKSADDFIDKHIAELIFYMEELRAHVRKYGPVMQRYYVQYLSGFDAVVLNELVQNLSVCPEDESIIMSSFVNTMTSLSVKQVEDGEVFDFRGMRLDWFRLQAYTSVSKASLGLADHRELGKMMNTIIFHTKMVDSLVEMLVETSDLSIFCFYSRAFEKMFQQCLELPSQSRYSIAFPLLCTHFMSCTHELCPEERHHIGDRSLSLCNMFLDEMAKQARNLITDICTEQCTLSDQLLPKHCAKTISQAVNKKSKKQTGKKGEPEREKPGVESMRKNRLVVTNLDKLHTALSELCFSINYVPNMVVWEHTFTPREYLTSHLEIRFTKSIVGMTMYNQATQEIAKPSELLTSVRAYMTVLQSIENYVQIDITRVFNNVLLQQTQHLDSHGEPTITSLYTNWYLETLLRQVSNGHIAYFPAMKAFVNLPTENELTFNAEEYSDISEMRSLSELLGPYGMKFLSESLMWHISSQVAELKKLVVENVDVLTQMRTSFDKPDQMAALFKRLSSVDSVLKRMTIIGVILSFRSLAQEALRDVLSYHIPFLVSSIEDFKDHIPRETDMKVAMNVYELSSAAGLPCEIDPALVVALSSQKSENISPEEEYKIACLLMVFVAVSLPTLASNVMSQYSPAIEGHCNNIHCLAKAINQIAAALFTIHKGSIEDRLKEFLALASSSLLKIGQETDKTTTRNRESVYLLLDMIVQESPFLTMDLLESCFPYVLLRNAYHAVYKQSVTSSA

SEQ ID NO: 55115 - protein, 1128 aa, Homo sapiens
MSRSVLQPSQQKLAEKLTILNDRGVGMLTRLYNIKKACGDPKAKPSYLIDKNLESAVKFIVRKFPAVETRNNNQQLAQLQKEKSEILKNLALYYFTFVDVMEFKDHVCELLNTIDVCQVFFDITVNFDLTKNYLDLIITYTTLMILLSRIEERKAIIGLYNYAHEMTHGASDREYPRLGQMIVDYENPLKKMMEEFVPHSKSLSDALISLQMVYPRRNLSADQWRNAQLLSLISAPSTMLNPAQSDTMPCEYLSLDAMEKWIIFGFILCHGILNTDATALNLWKLALQSSSCLSLFRDEVFHIHKAAEDLFVNIRGYNKRINDIRECKEAAVSHAGSMHRERRKFLRSALKELATVLSDQPGLLGPKALFVFMALSFARDEIIWLLRHADNMPKKSADDFIDKHIAELIFYMEELRAHVRKYGPVMQRYYVQYLSGFDAVVLNELVQNLSVCPEDESIIMSSFVNTMTSLSVKQVEDGEVFDFRGMRLDWFRLQAYTSVSKASLGLADHRELGKMMNTIIFHTKMVDSLVEMLVETSDLSIFCFYSRAFEKMFQQCLELPSQSRYSIAFPLLCTHFMSCTHELCPEERHHIGDRSLSLCNMFLDEMAKQARNLITDICTEQCTLSDQLLPKHCAKTISQAVNKKSKKQTGKKGEPEREKPGVESMRKNRLVVTNLDKLHTALSELCFSINYVPNMVVWEHTFTPREYLTSHLEIRFTKSIVGMTMYNQATQEIAKPSELLTSVRAYMTVLQSIENYVQIDITRVFNNVLLQQTQHLDSHGEPTITSLYTNWYLETLLRQVSNGHIAYFPAMKAFVNLPTENELTFNAEEYSDISEMRSLSELLGPYGMKFLSESLMWHISSQVAELKKLVVENVDVLTQMRTSFDKPDQMAALFKRLSSVDSVLKRMTIIGVILSFRSLAQEALRDVLSYHIPFLVSSIEDFKDHIPRETDMKVAMNVYELSSAAGLPCEIDPALVVALSSQKSENISPEEEYKIACLLMVFVAVSLPTLASNVMSQYSPAIEGHCNNIHCLAKAINQIAAALFTIHKGSIEDRLKEFLALASSSLLKIGQETDKTTTRNRESVYLLLDMIVQESPFLTMDLLESCFPYVLLRNAYHAVYKQSVTSSA

SEQ ID NO: 55116 - protein, 882 aa, Homo sapiens
MPALACLRRLCRHVSPQAVLFLLFIFCLFSVFISAYYLYGWKRGLEPSADAPEPDCGDPPPVAPSRLLPLKPVQAATPSRTDPLVLVFVESLYSQLGQEVVAILESSRFKYRTEIAPGKGDMPTLTDKGRGRFALIIYENILKYVNLDAWNRELLDKYCVAYGVGIIGFFKANENSLLSAQLKGFPLFLHSNLGLKDCSINPKSPLLYVTRPSEVEKGVLPGEDWTVFQSNHSTYEPVLLAKTRSSESIPHLGADAGLHAALHATVVQDLGLHDGIQRVLFGNNLNFWLHKLVFVDAVAFLTGKRLSLPLDRYILVDIDDIFVGKEGTRMKVEDVKALFDTQNELRAHIPNFTFNLGYSGKFFHTGTNAEDAGDDLLLSYVKEFWWFPHMWSHMQPHLFHNQSVLAEQMALNKKFAVEHGIPTDMGYAVAPHHSGVYPVHVQLYEAWKQVWSIRVTSTEEYPHLKPARYRRGFIHNGIMVLPRQTCGLFTHTIFYNEYPGGSSELDKIINGGELFLTVLLNPISIFMTHLSNYGNDRLGLYTFKHLVRFLHSWTNLRLQTLPPVQLAQKYFQIFSEEKDPLWQDPCEDKRHKDIWSKEKTCDRFPKLLIIGPQKTGTTALYLFLGMHPDLSSNYPSSETFEEIQFFNGHNYHKGIDWYMEFFPIPSNTTSDFYFEKSANYFDSEVAPRRAAALLPKAKVLTILINPADRAYSWYQHQRAHDDPVALKYTFHEVITAGSDASSKLRALQNRCLVPGWYATHIERWLSAYHANQILVLDGKLLRTEPAKVMDMVQKFLGVTNTIDYHKTLAFDPKKGFWCQLLEGGKTKCLGKSKGRKYPEMDLDSRAFLKDYYRDHNIELSKLLYKMGQTLPTWLREDLQNTR

SEQ ID NO: 55117 - protein, 23 aa, Homo sapiens
MPALACLRRLCRHVSPQAVLFLL

SEQ ID NO: 55118 - protein, 159 aa, Homo sapiens
MPALACLRRLCRHVSPQAVLFLLFIFCLFSVFISAYYLYGWKRGLEPSADAPEPDCGDPPPVAPSRLLPLKPVQAATPSRTDPLVLVFVESLYSQLGQEVVAILESSRFKYRTEIAPGKGDMPTLTDKGRGRFALIIYENILKYVNLDAWNRELLDKYC

SEQ ID NO: 55119 - protein, 68 aa, Homo sapiens
MPALACLRRLCRHVSPQAVLFLLFIFCLFSVFISAYYLYGWKRGLEPSADAPEPDCGDPPPVAPSRLL

SEQ ID NO: 55120 - protein, 760 aa, Homo sapiens
MPTLTDNTHGRYVLVIYENLLKYVNLDAWSRELLDRYCVEYGVGIIGFFRAHEHSLLSAQLKGFPLFLHSNLGLRDYQVNPSAPLLHLTRPSRLEPGPLPGDDWTIFQSNHSTYEPVLLASLRPAEPAVPGPVLRRARLPTVVQDLGLHDGIQRVLFGHGLSFWLHKLIFVDAVAYLTGKRLCLDLDRYILVDIDDIFVGKEGTRMKVADVEALLTTQNKLRTLVPNFTFNLGFSGKFYHTGTEEEDAGDDMLLKHRKEFWWFPHMWSHMQPHLFHNRSVLADQMRLNKQFALEHGIPTDLGYAVAPHHSGVYPIHTQLYEAWKSVWGIQVTSTEEYPHLRPARYRRGFIHNGIMVLPRQTCGLFTHTIFYNEYPGGSRELDRSIRGGELFLTVLLNPISIFMTHLSNYGNDRLGLYTFESLVRFLQCWTRLRLQTLPPVPLAQKYFELFPQERSPLWQNPCDDKRHKDIWSKEKTCDRLPKFLIVGPQKTGTTAIHFFLSLHPAVTSSFPSPSTFEEIQFFNSPNYHKGIDWYMDFFPVPSNASTDFLFEKSATYFDSEVVPRRGAALLPRAKIITVLTNPADRAYSWYQHQRAHGDPVALNYTFYQVISASSQTPLALRSLQNRCLVPGYYSTHLQRWLTYYPSGQLLIVDGQELRTNPAASMESIQKFLGITPFLNYTRTLRFDDDKGFWCQGLEGGKTRCLGRSKGRRYPDMDTESRLFLTDFFRNHNLELSKLLSRLGQPVPSWLREELQHSSLG

SEQ ID NO: 55121 - protein, 883 aa, Homo sapiens
MLQLWKVVRPARQLELHRLILLLIAFSLGSMGFLAYYVSTSPKAKEPLPLPLGDCSSGGAAGPGPARPPVPPRPPRPPETARTEPVVLVFVESAYSQLGQEIVAILESSRFRYSTELAPGRGDMPTLTDNTHGRYVLVIYENLLKYVNLDAWSRELLDRYCVEYGVGIIGFFRAHEHSLLSAQLKGFPLFLHSNLGLRDYQVNPSAPLLHLTRPSRLEPGPLPGDDWTIFQSNHSTYEPVLLASLRPAEPAVPGPVLRRARLPTVVQDLGLHDGIQRVLFGHGLSFWLHKLIFVDAVAYLTGKRLCLDLDRYILVDIDDIFVGKEGTRMKVADVEALLTTQNKLRTLVPNFTFNLGFSGKFYHTGTEEEDAGDDMLLKHRKEFWWFPHMWSHMQPHLFHNRSVLADQMRLNKQFALEHGIPTDLGYAVAPHHSGVYPIHTQLYEAWKSVWGIQVTSTEEYPHLRPARYRRGFIHNGIMVLPRQTCGLFTHTIFYNEYPGGSRELDRSIRGGELFLTVLLNPISIFMTHLSNYGNDRLGLYTFESLVRFLQCWTRLRLQTLPPVPLAQKYFELFPQERSPLWQNPCDDKRHKDIWSKEKTCDRLPKFLIVGPQKTGTTAIHFFLSLHPAVTSSFPSPSTFEEIQFFNSPNYHKGIDWYMDFFPVPSNASTDFLFEKSATYFDSEVVPRRGAALLPRAKIITVLTNPADRAYSWYQHQRAHGDPVALNYTFYQVISASSQTPLALRSLQNRCLVPGYYSTHLQRWLTYYPSGQLLIVDGQELRTNPAASMESIQKFLGITPFLNYTRTLRFDDDKGFWCQGLEGGKTRCLGRSKGRRYPDMDTESRLFLTDFFRNHNLELSKLLSRLGQPVPSWLREELQHSSLG

SEQ ID NO: 55122 - protein, 149 aa, Homo sapiens
GDPVALNYTFYQVISASSQTPLALRSLQNRCLVPGYYSTHLQRWLTYYPSGQLLIVDGQELRTNPAASMESIQKFLGITPFLNYTRTLRFDDDKGFWCQGLEGGKTRCLGRSKGRRYPDMDTEVSKARGRGIPLHFQDLILCPTSYHFC

SEQ ID NO: 55123 - protein, 231 aa, Homo sapiens
MRVPVFEDIKDETEEEKIGEEENEEDQVFYKPVIEDLSMELARKCTELISDIRYKEEFKKSKDKCTFVTDSPMLNHVKNIGAFISEAKYKGTIKADLSNSLYKRMPATIDSVFAGEVTQLQSEVAYKQKHDAAKGFSDYAHMKEPPEVKHAMEVNKHQSNISYRKDVQDTHTYSAELDRPDIKMATQISKIISNAEYKKGQGIMNKEPAVIGRPDFEHAVEASKLSSQVRL

SEQ ID NO: 55124 - protein, 1014 aa, Homo sapiens
MRVPVFEDIKDETEEEKIGEEENEEDQVFYKPVIEDLSMELARKCTELISDIRYKEEFKKSKDKCTFVTDSPMLNHVKNIGAFISEAKYKGTIKADLSNSLYKRMPATIDSVFAGEVTQLQSEVAYKQKHDAAKGFSDYAHMKEPPEVKHAMEVNKHQSNISYRKDVQDTHTYSAELDRPDIKMATQISKIISNAEYKKGQGIMNKEPAVIGRPDFEHAVEASKLSSQIKYKEKFDNEMKDKKHHYNPLESASFRQNQLAATLASNVKYKKDIQNMHDPVSDLPNLLFLDHVLKASKMLSGREYKKLFEENKGMYHFDADAVEHLHHKGNAVLQSQVKYKEEYEKNKGKPMLEFVETPSYQASKEAQKMQSEKVYKEDFEKEIKGRSSLDLDKTPEFLHVKYITNLLREKEYKKDLENEIKGKGMELNSEVLDIQRAKRASEMASEKEYKKDLESIIKGKGMQAGTDTLEMQHAKKAAEIASEKDYKRDLETEIKGKGMQVSTDTLDVQRAKKASEMASQKQYKKDLENEIKGKGMQVSMDIPDILRAKRTSEIYSQRKYKDEAEKMLSNYSTIADTPEIQRIKTTQQNISAVFYKKEVGAGTAVKDSPEIERVKKNQQNISSVKYKEEIKHATAISDPPELKRVKENQKNISNLQYKEQNYKATPVSMTPEIERVRRNQEQLSAVKYKGELQRGTAISDPPELKRAKENQKNISNVYYRGQLGRATTLSVTPEMERVKKNQENISSVKYTQDHKQMKGRPSLILDTPAMRHVKEAQNHISMVKYHEDFEKTKGRGFTPVVDDPVTERVRKNTQVVSDAAYKGVHPHIVEMDRRPGIIVDLKVWRTDPGSIFDLDPLEDNIQSRSLHMLSEKASHYRRHWSRSHSSSTFGTGLGDDRSEISEIYPSFSCCSEVTRPSDEGAPVLPGAYQQSHSQGYGYMHQTSVSSMRSMQHSPNLRTYRAMYDYSAQDEDEVSFRDGDYIVNVQPIDDGWMYGTVQRTGRTGMLPANYIEFVN

SEQ ID NO: 55125 - protein, 236 aa, Homo sapiens
MLHFYYEWLHSGSRGAVPKPLHYPKQSFTTVADTPENLRLKQQSELQSQVKYKRDFEESKGRGFSIVTDTPELQRLKRTQEQISNVKYHEDFEKTKGRGFTPVVDDPVTERVRKNTQVVSDAAYKGVHPHIVEMDRRPGIIVAPVLPGAYQQSHSQGYGYMHQTSVSSMRSMQHSPNLRTYRAMYDYSAQDEDEVSFRDGDYIVNVQPIDDGWMYGTVQRTGRTGMLPANYIEFVN

SEQ ID NO: 55126 - protein, 270 aa, Homo sapiens
MNPQCARCGKVVYPTEKVNCLDKYWHKGCFHCEVCKMALNMNNYKGYEKKPYCNAHYPKQSFTTVADTPENLRLKQQSELQSQVKYKRDFEESKGRGFSIVTDTPELQRLKRTQEQISNVKYHEDFEKTKGRGFTPVVDDPVTERVRKNTQVVSDAAYKGVHPHIVEMDRRPGIIVAPVLPGAYQQSHSQGYGYMHQTSVSSMRSMQHSPNLRTYRAMYDYSAQDEDEVSFRDGDYIVNVQPIDDGWMYGTVQRTGRTGMLPANYIEFVN

SEQ ID NO: 55127 - protein, 117 aa, Homo sapiens
MRNNCTASLMKVFYKPVIEDLSMELARKCTELISDIRYKEEFKKSKDKCTFVTDSPMLNHVKNIGAFISEAKYKGTIKADLSNSLYKRMPATIDSVFAGEVTQLQSEVAYKQKHDAA

SEQ ID NO: 55128 - protein, 6669 aa, Homo sapiens
MADDEDYEEVVEYYTEEVVYEEVPGETITKIYETTTTRTSDYEQSETSKPALAQPALAQPASAKPVERRKVIRKKVDPSKFMTPYIAHSQKMQDLFSPNKYKEKFEKTKGQPYASTTDTPELRRIKKVQDQLSEVKYRMDGDVAKTICHVDEKAKDIEHAKKVSQQVSKVLYKQNWEDTKDKYLLPPDAPELVQAVKNTAMFSKKLYTEDWEADKSLFYPYNDSPELRRVAQAQKALSDVAYKKGLAEQQAQFTPLADPPDIEFAKKVTNQVSKQKYKEDYENKIKGKWSETPCFEVANARMNADNISTRKYQEDFENMKDQIYFMQTETPEYKMNKKAGVAASKVKYKEDYEKNKGKADYNVLPASENPQLRQLKAAGDALSDKLYKENYEKTKAKSINYCETPKFKLDTVLQNFSSDKKYKDSYLKDILGHYVGSFEDPYHSHCMKVTAQNSDKNYKAEYEEDRGKGFFPQTITQEYEAIKKLDQCKDHTYKVHPDKTKFTQVTDSPVLLQAQVNSKQLSDLNYKAKHESEKFKCHIPPDTPAFIQHKVNAYNLSDNLYKQDWEKSKAKKFDIKVDAIPLLAAKANTKNTSDVMYKKDYEKNKGKMIGVLSINDDPKMLHSLKVAKNQSDRLYKENYEKTKAKSMNYCETPKYQLDTQLKNFSEARYKDLYVKDVLGHYVGSMEDPYHTHCMKVAAQNSDKSYKAEYEEDKGKCYFPQTITQEYEAIKKLDQCKDHTYKVHPDKTKFTAVTDSPVLLQAQLNTKQLSDLNYKAKHEGEKFKCHIPADAPQFIQHRVNAYNLSDNVYKQDWEKSKAKKFDIKVDAIPLLAAKANTKNTSDVMYKKDYEKSKGKMIGALSINDDPKMLHSLKTAKNQSDREYRKDYEKSKTIYTAPLDMLQVTQAKKSQAIASDVDYKHILHSYSYPPDSINVDLAKKAYALQSDVEYKADYNSWMKGCGWVPFGSLEMEKAKRASDILNEKKYRQHPDTLKFTSIEDAPITVQSKINQAQRSDIAYKAKGEEIIHKYNLPPDLPQFIQAKVNAYNISENMYKADLKDLSKKGYDLRTDAIPIRAAKAARQAASDVQYKKDYEKAKGKMVGFQSLQDDPKLVHYMNVAKIQSDREYKKDYEKTKSKYNTPHDMFNVVAAKKAQDVVSNVNYKHSLHHYTYLPDAMDLELSKNMMQIQSDNVYKEDYNNWMKGIGWIPIGSLDVEKVKKAGDALNEKKYRQHPDTLKFTSIVDSPVMVQAKQNTKQVSDILYKAKGEDVKHKYTMSPDLPQFLQAKCNAYNISDVCYKRDWYDLIAKGNNVLGDAIPITAAKASRNIASDYKYKEAYEKSKGKHVGFRSLQDDPKLVHYMNVAKLQSDREYKKNYENTKTSYHTPGDMVSITAAKMAQDVATNVNYKQPLHHYTYLPDAMSLEHTRNVNQIQSDNVYKDEYNSFLKGIGWIPIGSLEVEKVKKAGDALNERKYRQHPDTVKFTSVPDSMGMVLAQHNTKQLSDLNYKVEGEKLKHKYTIDPELPQFIQAKVNALNMSDAHYKADWKKTIAKGYDLRPDAIPIVAAKSSRNIASDCKYKEAYEKAKGKQVGFLSLQDDPKLVHYMNVAKIQSDREYKKGYEASKTKYHTPLDMVSVTAAKKSQEVATNANYRQSYHHYTLLPDALNVEHSRNAMQIQSDNLYKSDFTNWMKGIGWVPIESLEVEKAKKAGEILSEKKYRQHPEKLKFTYAMDTMEQALNKSNKLNMDKRLYTEKWNKDKTTIHVMPDTPDILLSRVNQITMSDKLYKAGWEEEKKKGYDLRPDAIAIKAARASRDIASDYKYKKAYEQAKGKHIGFRSLEDDPKLVHFMQVAKMQSDREYKKGYEKSKTSFHTPVDMLSVVAAKKSQEVATNANYRNVIHTYNMLPDAMSFELAKNMMQIQSDNQYKADYADFMKGIGWLPLGSLEAEKNKKAMEIISEKKYRQHPDTLKYSTLMDSMNMVLAQNNAKIMNEHLYKQAWEADKTKVHIMPDIPQIILAKANAINMSDKLYKLSLEESKKKGYDLRPDAIPIKAAKASRDIASDYKYKYNYEKGKGKMVGFRSLEDDPKLVHSMQVAKMQSDREYKKNYENTKTSYHTPADMLSVTAAKDAQANITNTNYKHLIHKYILLPDAMNIELTRNMNRIQSDNEYKQDYNEWYKGLGWSPAGSLEVEKAKKATEYASDQKYRQHPSNFQFKKLTDSMDMVLAKQNAHTMNKHLYTIDWNKDKTKIHVMPDTPDILQAKQNQTLYSQKLYKLGWEEALKKGYDLPVDAISVQLAKASRDIASDYKYKQGYRKQLGHHVGFRSLQDDPKLVLSMNVAKMQSEREYKKDFEKWKTKFSSPVDMLGVVLAKKCQELVSDVDYKNYLHQWTCLPDQNDVVQAKKVYELQSENLYKSDLEWLRGIGWSPLGSLEAEKNKRASEIISEKKYRQPPDRNKFTSIPDAMDIVLAKTNAKNRSDRLYREAWDKDKTQIHIMPDTPDIVLAKANLINTSDKLYRMGYEELKRKGYDLPVDAIPIKAAKASREIASEYKYKEGFRKQLGHHIGARNIEDDPKMMWSMHVAKIQSDREYKKDFEKWKTKFSSPVDMLGVVLAKKCQTLVSDVDYKNYLHQWTCLPDQSDVIHARQAYDLQSDNLYKSDLQWLKGIGWMTSGSLEDEKNKRATQILSDHVYRQHPDQFKFSSLMDSIPMVLAKNNAITMNHRLYTEAWDKDKTTVHIMPDTPEVLLAKQNKVNYSEKLYKLGLEEAKRKGYDMRVDAIPIKAAKASRDIASEFKYKEGYRKQLGHHIGARAIRDDPKMMWSMHVAKIQSDREYKKDFEKWKTKFSSPVDMLGVVLAKKCQTLVSDVDYKNYLHQWTCLPDQSDVIHARQAYDLQSDNMYKSDLQWMRGIGWVSIGSLDVEKCKRATEILSDKIYRQPPDRFKFTSVTDSLEQVLAKNNAITMNKRLYTEAWDKDKTQIHIMPDTPEIMLARQNKINYSETLYKLANEEAKKKGYDLRSDAIPIVAAKASRDVISDYKYKDGYRKQLGHHIGARNIEDDPKMMWSMHVAKIQSDREYKKDFEKWKTKFSSPVDMLGVVLAKKCQTLVSDVDYKNYLHEWTCLPDQNDVIHARQAYDLQSDNIYKSDLQWLRGIGWVPIGSMDVVKCKRAAEILSDNIYRQPPDKLKFTSVTDSLEQVLAKNNALNMNKRLYTEAWDKDKTQVHIMPDTPEIMLARQNKINYSESLYRQAMEEAKKEGYDLRSDAIPIVAAKASRDIASDYKYKEAYRKQLGHHIGARAVHDDPKIMWSLHIAKVQSDREYKKDFEKYKTRYSSPVDMLGIVLAKKCQTLVSDVDYKHPLHEWICLPDQNDIIHARKAYDLQSDNLYKSDLEWMKGIGWVPIDSLEVVRAKRAGELLSDTIYRQRPETLKFTSITDTPEQVLAKNNALNMNKRLYTEAWDNDKKTIHVMPDTPEIMLAKLNRINYSDKLYKLALEESKKEGYDLRLDAIPIQAAKASRDIASDYKYKEGYRKQLGHHIGARNIKDDPKMMWSIHVAKIQSDREYKKEFEKWKTKFSSPVDMLGVVLAKKCQILVSDIDYKHPLHEWTCLPDQNDVIQARKAYDLQSDAIYKSDLEWLRGIGWVPIGSVEVEKVKRAGEILSDRKYRQPADQLKFTCITDTPEIVLAKNNALTMSKHLYTEAWDADKTSIHVMPDTPDILLAKSNSANISQKLYTKGWDESKMKDYDLRADAISIKSAKASRDIASDYKYKEAYEKQKGHHIGAQSIEDDPKIMCAIHAGKIQSEREYKKEFQKWKTKFSSPVDMLSILLAKKCQTLVTDIDYRNYLHEWTCMPDQNDIIQAKKAYDLQSDALYKADLEWLRGIGWMPQGSPEVLRVKNAQNIFCDSVYRTPVVNLKYTSIVDTPEVVLAKSNAENISIPKYREVWDKDKTSIHIMPDTPEINLARANALNVSNKLYREGWDEMKAGCDVRLDAIPIQAAKASREIASDYKYKLDHEKQKGHYVGTLTARDDNKIRWALIADKLQNEREYRLDWAKWKAKIQSPVDMLSILHSKNSQALVSDMDYRNYLHQWTCMPDQNDVIQAKKAYELQSDNVYKADLEWLRGIGWMPNDSVSVNHAKHAADIFSEKKYRTKIETLNFTPVDDRVDYVTAKQSGEILDDIKYRKDWNATKSKYTLTETPLLHTAQEAARILDQYLYKEGWERQKATGYILPPDAVPFVHAHHCNDVQSELKYKAEHVKQKGHYVGVPTMRDDPKLVWFEHAGQIQNERLYKEDYHKTKAKINIPADMVSVLAAKQGQTLVSDIDYRNYLHQWMCHPDQNDVIQARKAYDLQSDNVYRADLEWLRGIGWIPLDSVDHVRVTKNQEMMSQIKYKKNALENYPNFRSVVDPPEIVLAKINSVNQSDVKYKETFNKAKGKYTFSPDTPHISHSKDMGKLYSTILYKGAWEGTKAYGYTLDERYIPIVGAKHADLVNSELKYKETYEKQKGHYLAGKVIGEFPGVVHCLDFQKMRSALNYRKHYEDTKANVHIPNDMMNHVLAKRCQYILSDLEYRHYFHQWTSLLEEPNVIRVRNAQEILSDNVYKDDLNWLKGIGCYVWDTPQILHAKKSYDLQSQLQYTAAGKENLQNYNLVTDTPLYVTAVQSGINASEVKYKENYHQIKDKYTTVLETVDYDRTRNLKNLYSSNLYKEAWDRVKATSYILPSSTLSLTHAKNQKHLASHIKYREEYEKFKALYTLPRSVDDDPNTARCLRVGKLNIDRLYRSVYEKNKMKIHIVPDMVEMVTAKDSQKKVSEIDYRLRLHEWICHPDLQVNDHVRKVTDQISDIVYKDDLNWLKGIGCYVWDTPEILHAKHAYDLRDDIKYKAHMLKTRNDYKLVTDTPVYVQAVKSGKQLSDAVYHYDYVHSVRGKVAPTTKTVDLDRALHAYKLQSSNLYKTSLRTLPTGYRLPGDTPHFKHIKDTRYMSSYFKYKEAYEHTKAYGYTLGPKDVPFVHVRRVNNVTSERLYRELYHKLKDKIHTTPDTPEIRQVKKTQEAVSELIYKSDFFKMQGHMISLPYTPQVIHCRYVGDITSDIKYKEDLQVLKGFGCFLYDTPDMVRSRHLRKLWSNYLYTDKARKMRDKYKVVLDTPEYRKVQELKTHLSELVYRAAGKKQKSIFTSVPDTPDLLRAKRGQKLQSQYLYVELATKERPHHHAGNQTTALKHAKDVKDMVSEKKYKIQYEKMKDKYTPVPDTPILIRAKRAYWNASDLRYKETFQKTKGKYHTVKDALDIVYHRKVTDDISKIKYKENYMSQLGIWRSIPDRPEHFHHRAVTDTVSDVKYKEDLTWLKGIGCYAYDTPDFTLAEKNKTLYSKYKYKEVFERTKSDFKYVADSPINRHFKYATQLMNEKKYRADYEQRKDKYHLVVDEPRHLLAKTAGDQISQIKYRKNYEKSKDKFTSIVDTPEHLRTTKVNKQISDILYKLEYNKAKPRGYTTIHDTPMLLHVRKVKDEVSDLKYKEVYQRNKSNCTIEPDAVHIKAAKDAYKVNTNLDYKKQYEANKAHWKWTPDRPDFLQAAKSSLQQSDFEYKLDREFLKGCKLSVTDDKNTVLALRNTLIESDLKYKEKHVKERGTCHAVPDTPQILLAKTVSNLVSENKYKDHVKKHLAQGSYTTLPETRDTVHVKEVTKHVSDTNYKKKFVKEKGKSNYSIMLEPPEVKHAMEVAKKQSDVAYRKDAKENLHYTTVADRPDIKKATQAAKQASEVEYRAKHRKEGSHGLSMLGRPDIEMAKKAAKLSSQVKYRENFDKEKGKTPKYNPKDSQLYKVMKDANNLASEVKYKADLKKLHKPVTDMKESLIMNHVLNTSQLASSYQYKKKYEKSKGHYHTIPDNLEQLHLKEATELQSIVKYKEKYEKERGKPMLDFETPTYITAKESQQMQSGKEYRKDYEESIKGRNLTGLEVTPALLHVKYATKIASEKEYRKDLEESIRGKGLTEMEDTPDMLRAKNATQILNEKEYKRDLELEVKGRGLNAMANETPDFMRARNATDIASQIKYKQSAEMEKANFTSVVDTPEIIHAQQVKNLSSQKKYKEDAEKSMSYYETVLDTPEIQRVRENQKNFSLLQYQCDLKNSKGKITVVQDTPEILRVKENQKNFSSVLYKEDVSPGTAIGKTPEMMRVKQTQDHISSVKYKEAIGQGTPIPDLPEVKRVKETQKHISSVMYKENLGTGIPTTVTPEIERVKRNQENFSSVLYKENLGKGIPTPITPEMERVKRNQENFSSVLYKENMGKGTPLAVTPEMERVKHNQENISSVLYKENVGKATATPVTPEMQRVKRNQENISSVLYKENLGKATPTPFTPEMERVKRNQENFSSVLYKENMRKATPTPVTPEMERAKRNQENISSVLYSDSFRKQIQGKAAYVLDTPEMRRVRETQRHISTVKYHEDFEKHKGCFTPVVTDPITERVKKNMQDFSDINYRGIQRKVVEMEQKRNDQDQETITGLRVWRTNPGSVFDYDPAEDNIQSRSLHMINVQAQRRSREQSRSASALSISGGEEKSEHSEAPDHHLSTYSDGGVFAVSTAYKHAKTTELPQQRSSSVATQQTTVSSIPSHPSTAGKIFRAMYDYMAADADEVSFKDGDAIINVQAIDEGWMYGTVQRTGRTGMLPANYVEAI

SEQ ID NO: 55129 - protein, 500 aa, Homo sapiens
MERVKRNQENFSSVLYKENLGTGIPIPITPEMQRVKHNQENLSSVLYKENMGKGTPLPVTPEMERVKHNQENISSVLYKENMGKGTPLPVTPEMERVKHNQENISSVLYKENMGKGTPLAVTPEMERVKHNQENISSVLYKENVGKATATPVTPEMQRVKRNQENISSVLYKENLGKATPTPFTPEMERVKRNQENFSSVLYKENMRKATPTPVTPEMERAKRNQENISSVLYSDSFRKQIQGKAAYVLDTPEMRRVRETQRHISTVKYHEDFEKHKGCFTPVVTDPITERVKKNMQDFSDINYRGIQRKVVEMEQKRNDQDQETITGLRVWRTNPGSVFDYDPAEDNIQSRSLHMINVQAQRRSREQSRSASALSISGGEEKSEHSEAPDHHLSTYSDGGVFAVSTAYKHAKTTELPQQRSSSVATQQTTVSSIPSHPSTAGKIFRAMYDYMAADADEVSFKDGDAIINVQAIDEGWMYGTVQRTGRTGMLPANYVEAI

SEQ ID NO: 55130 - protein, 2625 aa, Homo sapiens
MPDTPEINLARANALNVSNKLYREGWDEMKAGCDVRLDAIPIQAAKASREIASDYKYKLDHEKQKGHYVGTLTARDDNKIRWALIADKLQNEREYRLDWAKWKAKIQSPVDMLSILHSKNSQALVSDMDYRNYLHQWTCMPDQNDVIQAKKAYELQSDNVYKADLEWLRGIGWMPNDSVSVNHAKHAADIFSEKKYRTKIETLNFTPVDDRVDYVTAKQSGEILDDIKYRKDWNATKSKYTLTETPLLHTAQEAARILDQYLYKEGWERQKATGYILPPDAVPFVHAHHCNDVQSELKYKAEHVKQKGHYVGVPTMRDDPKLVWFEHAGQIQNERLYKEDYHKTKAKINIPADMVSVLAAKQGQTLVSDIDYRNYLHQWMCHPDQNDVIQARKAYDLQSDNVYRADLEWLRGIGWIPLDSVDHVRVTKNQEMMSQIKYKKNALENYPNFRSVVDPPEIVLAKINSVNQSDVKYKETFNKAKGKYTFSPDTPHISHSKDMGKLYSTILYKGAWEGTKAYGYTLDERYIPIVGAKHADLVNSELKYKETYEKQKGHYLAGKVIGEFPGVVHCLDFQKMRSALNYRKHYEDTKANVHIPNDMMNHVLAKRCQYILSDLEYRHYFHQWTSLLEEPNVIRVRNAQEILSDNVYKDDLNWLKGIGCYVWDTPQILHAKKSYDLQSQLQYTAAGKENLQNYNLVTDTPLYVTAVQSGINASEVKYKENYHQIKDKYTTVLETVDYDRTRNLKNLYSSNLYKEAWDRVKATSYILPSSTLSLTHAKNQKHLASHIKYREEYEKFKALYTLPRSVDDDPNTARCLRVGKLNIDRLYRSVYEKNKMKIHIVPDMVEMVTAKDSQKKVSEIDYRLRLHEWICHPDLQVNDHVRKVTDQISDIVYKDDLNWLKGIGCYVWDTPEILHAKHAYDLRDDIKYKAHMLKTRNDYKLVTDTPVYVQAVKSGKQLSDAVYHYDYVHSVRGKVAPTTKTVDLDRALHAYKLQSSNLYKTSLRTLPTGYRLPGDTPHFKHIKDTRYMSSYFKYKEAYEHTKAYGYTLGPKDVPFVHVRRVNNVTSERLYRELYHKLKDKIHTTPDTPEIRQVKKTQEAVSELIYKSDFFKMQGHMISLPYTPQVIHCRYVGDITSDIKYKEDLQVLKGFGCFLYDTPDMVRSRHLRKLWSNYLYTDKARKMRDKYKVVLDTPEYRKVQELKTHLSELVYRAAGKKQKSIFTSVPDTPDLLRAKRGQKLQSQYLYVELATKERPHHHAGNQTTALKHAKDVKDMVSEKKYKIQYEKMKDKYTPVPDTPILIRAKRAYWNASDLRYKETFQKTKGKYHTVKDALDIVYHRKVTDDISKIKYKENYMSQLGIWRSIPDRPEHFHHRAVTDTVSDVKYKEDLTWLKGIGCYAYDTPDFTLAEKNKTLYSKYKYKEVFERTKSDFKYVADSPINRHFKYATQLMNEKKYRADYEQRKDKYHLVVDEPRHLLAKTAGDQISQIKYRKNYEKSKDKFTSIVDTPEHLRTTKVNKQISDILYKLEYNKAKPRGYTTIHDTPMLLHVRKVKDEVSDLKYKEVYQRNKSNCTIEPDAVHIKAAKDAYKVNTNLDYKKQYEANKAHWKWTPDRPDFLQAAKSSLQQSDFEYKLDREFLKGCKLSVTDDKNTVLALRNTLIESDLKYKEKHVKERGTCHAVPDTPQILLAKTVSNLVSENKYKDHVKKHLAQGSYTTLPETRDTVHVKEVTKHVSDTNYKKKFVKEKGKSNYSIMLEPPEVKHAMEVAKKQSDVAYRKDAKENLHYTTVADRPDIKKATQAAKQASEVEYRAKHRKEGSHGLSMLGRPDIEMAKKAAKLSSQVKYRENFDKEKGKTPKYNPKDSQLYKVMKDANNLASEVKYKADLKKLHKPVTDMKESLIMNHVLNTSQLASSYQYKKKYEKSKGHYHTIPDNLEQLHLKEATELQSIVKYKEKYEKERGKPMLDFETPTYITAKESQQMQSGKEYRKDYEESIKGRNLTGLEVTPALLHVKYATKIASEKEYRKDLEESIRGKGLTEMEDTPDMLRAKNATQILNEKEYKRDLELEVKGRGLNAMANETPDFMRARNATDIASQIKYKQSAEMEKANFTSVVDTPEIIHAQQVKNLSSQKKYKEDAEKSMSYYETVLDTPEIQRVRENQKNFSLLQYQCDLKNSKGKITVVQDTPEILRVKENQKNFSSVLYKEDVSPGTAIGKTPEMMRVKQTQDHISSVKYKEAIGQGTPIPDLPEVKRVKETQKHISSVMYKENLGTGIPTTVTPEIERVKRNQENFSSVLYKENMGKGTPLPVTPEMERVKHNQENISSVLYKENVGKATATPVTPEMQRVKRNQENISSVLYSDSFRKQIQGKAAYVLDTPEMRRVRETQRHISTVKYHEDFEKHKGCFTPVVTDPITERVKKNMQDFSDINYRGIQRKVVEMEQKRNDQDQETITGLRVWRTNPGSVFDYDPAEDNIQSRSLHMINVQAQRRSREQSRSASALSISGGEEKSEHSEAPDHHLSTYSDGGVFAVSTAYKHAKTTELPQQRSSSVATQQTTVSSIPSHPSTAGKIFRAMYDYMAADADEVSFKDGDAIINVQAIDEGWMYGTVQRTGRTGMLPANYVEAI

SEQ ID NO: 55131 - protein, 8525 aa, Homo sapiens
MADDEDYEEVVEYYTEEVVYEEVPGETITKIYETTTTRTSDYEQSETSKPALAQPALAQPASAKPVERRKVIRKKVDPSKFMTPYIAHSQKMQDLFSPNKYKEKFEKTKGQPYASTTDTPELRRIKKVQDQLSEVKYRMDGDVAKTICHVDEKAKDIEHAKKVSQQVSKVLYKQNWEDTKDKYLLPPDAPELVQAVKNTAMFSKKLYTEDWEADKSLFYPYNDSPELRRVAQAQKALSDVAYKKGLAEQQAQFTPLADPPDIEFAKKVTNQVSKQKYKEDYENKIKGKWSETPCFEVANARMNADNISTRKYQEDFENMKDQIYFMQTETPEYKMNKKAGVAASKVKYKEDYEKNKGKADYNVLPASENPQLRQLKAAGDALSDKLYKENYEKTKAKSINYCETPKFKLDTVLQNFSSDKKYKDSYLKDILGHYVGSFEDPYHSHCMKVTAQNSDKNYKAEYEEDRGKGFFPQTITQEYEAIKKLDQCKDHTYKVHPDKTKFTQVTDSPVLLQAQVNSKQLSDLNYKAKHESEKFKCHIPPDTPAFIQHKVNAYNLSDNLYKQDWEKSKAKKFDIKVDAIPLLAAKANTKNTSDVMYKKDYEKNKGKMIGVLSINDDPKMLHSLKVAKNQSDRLYKENYEKTKAKSMNYCETPKYQLDTQLKNFSEARYKDLYVKDVLGHYVGSMEDPYHTHCMKVAAQNSDKSYKAEYEEDKGKCYFPQTITQEYEAIKKLDQCKDHTYKVHPDKTKFTAVTDSPVLLQAQLNTKQLSDLNYKAKHEGEKFKCHIPADAPQFIQHRVNAYNLSDNVYKQDWEKSKAKKFDIKVDAIPLLAAKANTKNTSDVMYKKDYEKSKGKMIGALSINDDPKMLHSLKTAKNQSDREYRKDYEKSKTIYTAPLDMLQVTQAKKSQAIASDVDYKHILHSYSYPPDSINVDLAKKAYALQSDVEYKADYNSWMKGCGWVPFGSLEMEKAKRASDILNEKKYRQHPDTLKFTSIEDAPITVQSKINQAQRSDIAYKAKGEEIIHKYNLPPDLPQFIQAKVNAYNISENMYKADLKDLSKKGYDLRTDAIPIRAAKAARQAASDVQYKKDYEKAKGKMVGFQSLQDDPKLVHYMNVAKIQSDREYKKDYEKTKSKYNTPHDMFNVVAAKKAQDVVSNVNYKHSLHHYTYLPDAMDLELSKNMMQIQSDNVYKEDYNNWMKGIGWIPIGSLDVEKVKKAGDALNEKKYRQHPDTLKFTSIVDSPVMVQAKQNTKQVSDILYKAKGEDVKHKYTMSPDLPQFLQAKCNAYNISDVCYKRDWYDLIAKGNNVLGDAIPITAAKASRNIASDYKYKEAYEKSKGKHVGFRSLQDDPKLVHYMNVAKLQSDREYKKNYENTKTSYHTPGDMVSITAAKMAQDVATNVNYKQPLHHYTYLPDAMSLEHTRNVNQIQSDNVYKDEYNSFLKGIGWIPIGSLEVEKVKKAGDALNERKYRQHPDTVKFTSVPDSMGMVLAQHNTKQLSDLNYKVEGEKLKHKYTIDPELPQFIQAKVNALNMSDAHYKADWKKTIAKGYDLRPDAIPIVAAKSSRNIASDCKYKEAYEKAKGKQVGFLSLQDDPKLVHYMNVAKIQSDREYKKGYEASKTKYHTPLDMVSVTAAKKSQEVATNANYRQSYHHYTLLPDALNVEHSRNAMQIQSDNLYKSDFTNWMKGIGWVPIESLEVEKAKKAGEILSEKKYRQHPEKLKFTYAMDTMEQALNKSNKLNMDKRLYTEKWNKDKTTIHVMPDTPDILLSRVNQITMSDKLYKAGWEEEKKKGYDLRPDAIAIKAARASRDIASDYKYKKAYEQAKGKHIGFRSLEDDPKLVHFMQVAKMQSDREYKKGYEKSKTSFHTPVDMLSVVAAKKSQEVATNANYRNVIHTYNMLPDAMSFELAKNMMQIQSDNQYKADYADFMKGIGWLPLGSLEAEKNKKAMEIISEKKYRQHPDTLKYSTLMDSMNMVLAQNNAKIMNEHLYKQAWEADKTKVHIMPDIPQIILAKANAINMSDKLYKLSLEESKKKGYDLRPDAIPIKAAKASRDIASDYKYKYNYEKGKGKMVGFRSLEDDPKLVHSMQVAKMQSDREYKKNYENTKTSYHTPADMLSVTAAKDAQANITNTNYKHLIHKYILLPDAMNIELTRNMNRIQSDNEYKQDYNEWYKGLGWSPAGSLEVEKAKKATEYASDQKYRQHPSNFQFKKLTDSMDMVLAKQNAHTMNKHLYTIDWNKDKTKIHVMPDTPDILQAKQNQTLYSQKLYKLGWEEALKKGYDLPVDAISVQLAKASRDIASDYKYKQGYRKQLGHHVGFRSLQDDPKLVLSMNVAKMQSEREYKKDFEKWKTKFSSPVDMLGVVLAKKCQELVSDVDYKNYLHQWTCLPDQNDVVQAKKVYELQSENLYKSDLEWLRGIGWSPLGSLEAEKNKRASEIISEKKYRQPPDRNKFTSIPDAMDIVLAKTNAKNRSDRLYREAWDKDKTQIHIMPDTPDIVLAKANLINTSDKLYRMGYEELKRKGYDLPVDAIPIKAAKASREIASEYKYKEGFRKQLGHHIGARNIEDDPKMMWSMHVAKIQSDREYKKDFEKWKTKFSSPVDMLGVVLAKKCQTLVSDVDYKNYLHQWTCLPDQSDVIHARQAYDLQSDNLYKSDLQWLKGIGWMTSGSLEDEKNKRATQILSDHVYRQHPDQFKFSSLMDSIPMVLAKNNAITMNHRLYTEAWDKDKTTVHIMPDTPEVLLAKQNKVNYSEKLYKLGLEEAKRKGYDMRVDAIPIKAAKASRDIASEFKYKEGYRKQLGHHIGARAIRDDPKMMWSMHVAKIQSDREYKKDFEKWKTKFSSPVDMLGVVLAKKCQTLVSDVDYKNYLHQWTCLPDQSDVIHARQAYDLQSDNMYKSDLQWMRGIGWVSIGSLDVEKCKRATEILSDKIYRQPPDRFKFTSVTDSLEQVLAKNNAITMNKRLYTEAWDKDKTQIHIMPDTPEIMLARMNKINYSESLYKLANEEAKKKGYDLRSDAIPIVAAKASRDIISDYKYKDGYCKQLGHHIGARNIEDDPKMMWSMHVAKIQSDREYKKDFEKWKTKFSSPVDMLGVVLAKKCQTLVSDVDYKNYLHEWTCLPDQSDVIHARQAYDLQSDNIYKSDLQWLRGIGWVPIGSMDVVKCKRATEILSDNIYRQPPDKLKFTSVTDSLEQVLAKNNALNMNKRLYTEAWDKDKTQIHIMPDTPEIMLARQNKINYSETLYKLANEEAKKKGYDLRSDAIPIVAAKASRDVISDYKYKDGYRKQLGHHIGARNIEDDPKMMWSMHVAKIQSDREYKKDFEKWKTKFSSPVDMLGVVLAKKCQTLVSDVDYKNYLHEWTCLPDQNDVIHARQAYDLQSDNIYKSDLQWLRGIGWVPIGSMDVVKCKRAAEILSDNIYRQPPDKLKFTSVTDSLEQVLAKNNALNMNKRLYTEAWDKDKTQVHIMPDTPEIMLARQNKINYSESLYRQAMEEAKKEGYDLRSDAIPIVAAKASRDIASDYKYKEAYRKQLGHHIGARAVHDDPKIMWSLHIAKVQSDREYKKDFEKYKTRYSSPVDMLGIVLAKKCQTLVSDVDYKHPLHEWICLPDQNDIIHARKAYDLQSDNLYKSDLEWMKGIGWVPIDSLEVVRAKRAGELLSDTIYRQRPETLKFTSITDTPEQVLAKNNALNMNKRLYTEAWDNDKKTIHVMPDTPEIMLAKLNRINYSDKLYKLALEESKKEGYDLRLDAIPIQAAKASRDIASDYKYKEGYRKQLGHHIGARNIKDDPKMMWSIHVAKIQSDREYKKEFEKWKTKFSSPVDMLGVVLAKKCQILVSDIDYKHPLHEWTCLPDQNDVIQARKAYDLQSDAIYKSDLEWLRGIGWVPIGSVEVEKVKRAGEILSDRKYRQPADQLKFTCITDTPEIVLAKNNALTMSKHLYTEAWDADKTSIHVMPDTPDILLAKSNSANISQKLYTKGWDESKMKDYDLRADAISIKSAKASRDIASDYKYKEAYEKQKGHHIGAQSIEDDPKIMCAIHAGKIQSEREYKKEFQKWKTKFSSPVDMLSILLAKKCQTLVTDIDYRNYLHEWTCMPDQNDIIQAKKAYDLQSDSVYKADLEWLRGIGWMPEGSVEMNRVKVAQDLVNERLYRTRPEALSFTSIVDTPEVVLAKANSLQISEKLYQEAWNKDKSNITIPSDTPEMLQAHINALQISNKLYQKDWNDAKQKGYDIRADAIEIKHAKASREIASEYKYKEGYRKQLGHHMGFRTLQDDPKSVWAIHAAKIQSDREYKKAYEKSKGIHNTPLDMMSIVQAKKCQVLVSDIDYRNYLHQWTCLPDQNDVIQAKKAYDLQSDNLYKSDLEWLKGIGWLPEGSVEVMRVKNAQNLLNERLYRIKPEALKFTSIVDTPEVIQAKINAVQISEPLYRDAWEKEKANVNVPADTPLMLQSKINALQISNKRYQQAWEDVKMTGYDLRADAIGIQHAKASRDIASDYLYKTAYEKQKGHYIGCRSAKEDPKLVWAANVLKMQNDRLYKKAYNDHKAKISIPVDMVSISAAKEGQALASDVDYRHYLHHWSCFPDQNDVIQARKAYDLQSDSVYKADLEWLRGIGWMPEGSVEMNRVKVAQDLVNERLYRTRPEALSFTSIVDTPEVVLAKANSLQISEKLYQEAWNKDKSNITIPSDTPEMLQAHINALQISNKLYQKDWNDTKQKGYDIRADAIEIKHAKASREIASEYKYKEGYRKQLGHHMGFRTLQDDPKSVWAIHAAKIQSDREYKKAYEKSKGIHNTPLDMMSIVQAKKCQVLVSDIDYRNYLHQWTCLPDQNDVIQAKKAYDLQSDNLYKSDLEWLKGIGWLPEGSVEVMRVKNAQNLLNERLYRIKPEALKFTSIVDTPEVIQAKINAVQISEPLYRNAWEKEKANVNVPADTPLMLQSKINALQISNKRYQQAWEDVKMTGYDLRADAIGIQHAKASRDIASDYLYKTAYEKQKGHYIGCRSAKEDPKLVWAANVLKMQNDRLYKKAYNDHKAKISIPVDMVSISAAKEGQALASDVDYRHYLHHWSCFPDQNDVIQARKAYDLQSDSVYKADLEWLRGIGWMPEGSVEMNRVKVAQDLVNERLYRTRPEALSFTSIVDTPEVVLAKANSLQISEKLYQEAWNKDKSNITIPSDTPEMLQAHINALQISNKLYQKDWNDTKQKGYDIRADAIEIKHAKASREIASEYKYKEGYRKQLGHHMGFRTLQDDPKSVWAIHAAKIQSDREYKKAYEKSKGIHNTPLDMMSIVQAKKCQVLVSDIDYRNYLHQWTCLPDQNDVIQAKKAYDLQSDNLYKSDLEWLKGIGWLPEGSVEVMRVKNAQNLLNERLYRIKPEALKFTSIVDTPEVIQAKINAVQISEPLYRDAWEKEKANVNVPADTPLMLQSKINALQISNKRYQQAWEDVKMTGYDLRADAIGIQHAKASRDIASDYLYKTAYEKQKGHYIGCRSAKEDPKLVWAANVLKMQNDRLYKKAYNDHKAKISIPVDMVSISAAKEGQALASDVDYRHYLHRWSCFPDQNDVIQARKAYDLQSDALYKADLEWLRGIGWMPQGSPEVLRVKNAQNIFCDSVYRTPVVNLKYTSIVDTPEVVLAKSNAENISIPKYREVWDKDKTSIHIMPDTPEINLARANALNVSNKLYREGWDEMKAGCDVRLDAIPIQAAKASREIASDYKYKLDHEKQKGHYVGTLTARDDNKIRWALIADKLQNEREYRLDWAKWKAKIQSPVDMLSILHSKNSQALVSDMDYRNYLHQWTCMPDQNDVIQAKKAYELQSDNVYKADLEWLRGIGWMPNDSVSVNHAKHAADIFSEKKYRTKIETLNFTPVDDRVDYVTAKQSGEILDDIKYRKDWNATKSKYTLTETPLLHTAQEAARILDQYLYKEGWERQKATGYILPPDAVPFVHAHHCNDVQSELKYKAEHVKQKGHYVGVPTMRDDPKLVWFEHAGQIQNERLYKEDYHKTKAKINIPADMVSVLAAKQGQTLVSDIDYRNYLHQWMCHPDQNDVIQARKAYDLQSDNVYRADLEWLRGIGWIPLDSVDHVRVTKNQEMMSQIKYKKNALENYPNFRSVVDPPEIVLAKINSVNQSDVKYKETFNKAKGKYTFSPDTPHISHSKDMGKLYSTILYKGAWEGTKAYGYTLDERYIPIVGAKHADLVNSELKYKETYEKQKGHYLAGKVIGEFPGVVHCLDFQKMRSALNYRKHYEDTKANVHIPNDMMNHVLAKRCQYILSDLEYRHYFHQWTSLLEEPNVIRVRNAQEILSDNVYKDDLNWLKGIGCYVWDTPQILHAKKSYDLQSQLQYTAAGKENLQNYNLVTDTPLYVTAVQSGINASEVKYKENYHQIKDKYTTVLETVDYDRTRNLKNLYSSNLYKEAWDRVKATSYILPSSTLSLTHAKNQKHLASHIKYREEYEKFKALYTLPRSVDDDPNTARCLRVGKLNIDRLYRSVYEKNKMKIHIVPDMVEMVTAKDSQKKVSEIDYRLRLHEWICHPDLQVNDHVRKVTDQISDIVYKDDLNWLKGIGCYVWDTPEILHAKHAYDLRDDIKYKAHMLKTRNDYKLVTDTPVYVQAVKSGKQLSDAVYHYDYVHSVRGKVAPTTKTVDLDRALHAYKLQSSNLYKTSLRTLPTGYRLPGDTPHFKHIKDTRYMSSYFKYKEAYEHTKAYGYTLGPKDVPFVHVRRVNNVTSERLYRELYHKLKDKIHTTPDTPEIRQVKKTQEAVSELIYKSDFFKMQGHMISLPYTPQVIHCRYVGDITSDIKYKEDLQVLKGFGCFLYDTPDMVRSRHLRKLWSNYLYTDKARKMRDKYKVVLDTPEYRKVQELKTHLSELVYRAAGKKQKSIFTSVPDTPDLLRAKRGQKLQSQYLYVELATKERPHHHAGNQTTALKHAKDVKDMVSEKKYKIQYEKMKDKYTPVPDTPILIRAKRAYWNASDLRYKETFQKTKGKYHTVKDALDIVYHRKVTDDISKIKYKENYMSQLGIWRSIPDRPEHFHHRAVTDTVSDVKYKEDLTWLKGIGCYAYDTPDFTLAEKNKTLYSKYKYKEVFERTKSDFKYVADSPINRHFKYATQLMNERKYKSSAKMFLQHGCNEILRPDMLTALYNSHMWSQIKYRKNYEKSKDKFTSIVDTPEHLRTTKVNKQISDILYKLEYNKAKPRGYTTIHDTPMLLHVRKVKDEVSDLKYKEVYQRNKSNCTIEPDAVHIKAAKDAYKVNTNLDYKKQYEANKAHWKWTPDRPDFLQAAKSSLQQSDFEYKLDREFLKGCKLSVTDDKNTVLALRNTLIESDLKYKEKHVKERGTCHAVPDTPQILLAKTVSNLVSENKYKDHVKKHLAQGSYTTLPETRDTVHVKEVTKHVSDTNYKKKFVKEKGKSNYSIMLEPPEVKHAMEVAKKQSDVAYRKDAKENLHYTTVADRPDIKKATQAAKQASEVEYRAKHRKEGSHGLSMLGRPDIEMAKKAAKLSSQVKYRENFDKEKGKTPKYNPKDSQLYKVMKDANNLASEVKYKADLKKLHKPVTDMKESLIMNHVLNTSQLASSYQYKKKYEKSKGHYHTIPDNLEQLHLKEATELQSIVKYKEKYEKERGKPMLDFETPTYITAKESQQMQSGKEYRKDYEESIKGRNLTGLEVTPALLHVKYATKIASEKEYRKDLEESIRGKGLTEMEDTPDMLRAKNATQILNEKEYKRDLELEVKGRGLNAMANETPDFMRARNATDIASQIKYKQSAEMEKANFTSVVDTPEIIHAQQVKNLSSQKKYKEDAEKSMSYYETVLDTPEIQRVRENQKNFSLLQYQCDLKNSKGKITVVQDTPEILRVKENQKNFSSVLYKEDVSPGTAIGKTPEMMRVKQTQDHISSVKYKEAIGQGTPIPDLPEVKRVKETQKHISSVMYKENLGTGIPTTVTPEIERVKRNQENFSSVLYKENLGKGIPTPITPEMERVKRNQENFSSILYKENLSKGTPLPVTPEMERVKLNQENFSSVLYKENVGKGIPIPITPEMERVKHNQENFSSVLYKENLGTGIPIPITPEMQRVKHNQENLSSVLYKENMGKGTPLPVTPEMERVKHNQENISSVLYKENMGKGTPLPVTPEMERVKHNQENISSVLYKENMGKGTPLAVTPEMERVKHNQENISSVLYKENVGKATATPVTPEMQRVKRNQENISSVLYKENLGKATPTPFTPEMERVKRNQENFSSVLYKENMRKATPTPVTPEMERAKRNQENISSVLYSDSFRKQIQGKAAYVLDTPEMRRVRETQRHISTVKYHEDFEKHKGCFTPVVTDPITERVKKNMQDFSDINYRGIQRKVVEMEQKRNDQDQETITGLRVWRTNPGSVFDYDPAEDNIQSRSLHMINVQAQRRSREQSRSASALSISGGEEKSEHSEAPDHHLSTYSDGGVFAVSTAYKHAKTTELPQQRSSSVATQQTTVSSIPSHPSTAGKIFRAMYDYMAADADEVSFKDGDAIINVQAIDEGWMYGTVQRTGRTGMLPANYVEAI

SEQ ID NO: 55132 - protein, 6669 aa, Homo sapiens
MADDEDYEEVVEYYTEEVVYEEVPGETITKIYETTTTRTSDYEQSETSKPALAQPALAQPASAKPVERRKVIRKKVDPSKFMTPYIAHSQKMQDLFSPNKYKEKFEKTKGQPYASTTDTPELRRIKKVQDQLSEVKYRMDGDVAKTICHVDEKAKDIEHAKKVSQQVSKVLYKQNWEDTKDKYLLPPDAPELVQAVKNTAMFSKKLYTEDWEADKSLFYPYNDSPELRRVAQAQKALSDVAYKKGLAEQQAQFTPLADPPDIEFAKKVTNQVSKQKYKEDYENKIKGKWSETPCFEVANARMNADNISTRKYQEDFENMKDQIYFMQTETPEYKMNKKAGVAASKVKYKEDYEKNKGKADYNVLPASENPQLRQLKAAGDALSDKLYKENYEKTKAKSINYCETPKFKLDTVLQNFSSDKKYKDSYLKDILGHYVGSFEDPYHSHCMKVTAQNSDKNYKAEYEEDRGKGFFPQTITQEYEAIKKLDQCKDHTYKVHPDKTKFTQVTDSPVLLQAQVNSKQLSDLNYKAKHESEKFKCHIPPDTPAFIQHKVNAYNLSDNLYKQDWEKSKAKKFDIKVDAIPLLAAKANTKNTSDVMYKKDYEKNKGKMIGVLSINDDPKMLHSLKVAKNQSDRLYKENYEKTKAKSMNYCETPKYQLDTQLKNFSEARYKDLYVKDVLGHYVGSMEDPYHTHCMKVAAQNSDKSYKAEYEEDKGKCYFPQTITQEYEAIKKLDQCKDHTYKVHPDKTKFTAVTDSPVLLQAQLNTKQLSDLNYKAKHEGEKFKCHIPADAPQFIQHRVNAYNLSDNVYKQDWEKSKAKKFDIKVDAIPLLAAKANTKNTSDVMYKKDYEKSKGKMIGALSINDDPKMLHSLKTAKNQSDREYRKDYEKSKTIYTAPLDMLQVTQAKKSQAIASDVDYKHILHSYSYPPDSINVDLAKKAYALQSDVEYKADYNSWMKGCGWVPFGSLEMEKAKRASDILNEKKYRQHPDTLKFTSIEDAPITVQSKINQAQRSDIAYKAKGEEIIHKYNLPPDLPQFIQAKVNAYNISENMYKADLKDLSKKGYDLRTDAIPIRAAKAARQAASDVQYKKDYEKAKGKMVGFQSLQDDPKLVHYMNVAKIQSDREYKKDYEKTKSKYNTPHDMFNVVAAKKAQDVVSNVNYKHSLHHYTYLPDAMDLELSKNMMQIQSDNVYKEDYNNWMKGIGWIPIGSLDVEKVKKAGDALNEKKYRQHPDTLKFTSIVDSPVMVQAKQNTKQVSDILYKAKGEDVKHKYTMSPDLPQFLQAKCNAYNISDVCYKRDWYDLIAKGNNVLGDAIPITAAKASRNIASDYKYKEAYEKSKGKHVGFRSLQDDPKLVHYMNVAKLQSDREYKKNYENTKTSYHTPGDMVSITAAKMAQDVATNVNYKQPLHHYTYLPDAMSLEHTRNVNQIQSDNVYKDEYNSFLKGIGWIPIGSLEVEKVKKAGDALNERKYRQHPDTVKFTSVPDSMGMVLAQHNTKQLSDLNYKVEGEKLKHKYTIDPELPQFIQAKVNALNMSDAHYKADWKKTIAKGYDLRPDAIPIVAAKSSRNIASDCKYKEAYEKAKGKQVGFLSLQDDPKLVHYMNVAKIQSDREYKKGYEASKTKYHTPLDMVSVTAAKKSQEVATNANYRQSYHHYTLLPDALNVEHSRNAMQIQSDNLYKSDFTNWMKGIGWVPIESLEVEKAKKAGEILSEKKYRQHPEKLKFTYAMDTMEQALNKSNKLNMDKRLYTEKWNKDKTTIHVMPDTPDILLSRVNQITMSDKLYKAGWEEEKKKGYDLRPDAIAIKAARASRDIASDYKYKKAYEQAKGKHIGFRSLEDDPKLVHFMQVAKMQSDREYKKGYEKSKTSFHTPVDMLSVVAAKKSQEVATNANYRNVIHTYNMLPDAMSFELAKNMMQIQSDNQYKADYADFMKGIGWLPLGSLEAEKNKKAMEIISEKKYRQHPDTLKYSTLMDSMNMVLAQNNAKIMNEHLYKQAWEADKTKVHIMPDIPQIILAKANAINMSDKLYKLSLEESKKKGYDLRPDAIPIKAAKASRDIASDYKYKYNYEKGKGKMVGFRSLEDDPKLVHSMQVAKMQSDREYKKNYENTKTSYHTPADMLSVTAAKDAQANITNTNYKHLIHKYILLPDAMNIELTRNMNRIQSDNEYKQDYNEWYKGLGWSPAGSLEVEKAKKATEYASDQKYRQHPSNFQFKKLTDSMDMVLAKQNAHTMNKHLYTIDWNKDKTKIHVMPDTPDILQAKQNQTLYSQKLYKLGWEEALKKGYDLPVDAISVQLAKASRDIASDYKYKQGYRKQLGHHVGFRSLQDDPKLVLSMNVAKMQSEREYKKDFEKWKTKFSSPVDMLGVVLAKKCQELVSDVDYKNYLHQWTCLPDQNDVVQAKKVYELQSENLYKSDLEWLRGIGWSPLGSLEAEKNKRASEIISEKKYRQPPDRNKFTSIPDAMDIVLAKTNAKNRSDRLYREAWDKDKTQIHIMPDTPDIVLAKANLINTSDKLYRMGYEELKRKGYDLPVDAIPIKAAKASREIASEYKYKEGFRKQLGHHIGARNIEDDPKMMWSMHVAKIQSDREYKKDFEKWKTKFSSPVDMLGVVLAKKCQTLVSDVDYKNYLHQWTCLPDQSDVIHARQAYDLQSDNLYKSDLQWLKGIGWMTSGSLEDEKNKRATQILSDHVYRQHPDQFKFSSLMDSIPMVLAKNNAITMNHRLYTEAWDKDKTTVHIMPDTPEVLLAKQNKVNYSEKLYKLGLEEAKRKGYDMRVDAIPIKAAKASRDIASEFKYKEGYRKQLGHHIGARAIRDDPKMMWSMHVAKIQSDREYKKDFEKWKTKFSSPVDMLGVVLAKKCQTLVSDVDYKNYLHQWTCLPDQSDVIHARQAYDLQSDNMYKSDLQWMRGIGWVSIGSLDVEKCKRATEILSDKIYRQPPDRFKFTSVTDSLEQVLAKNNALNMNKRLYTEAWDKDKTQIHIMPDTPEIMLARQNKINYSETLYKLANEEAKKKGYDLRSDAIPIVAAKASRDVISDYKYKDGYRKQLGHHIGARNIEDDPKMMWSMHVAKIQSDREYKKDFEKWKTKFSSPVDMLGVVLAKKCQTLVSDVDYKNYLHEWTCLPDQNDVIHARQAYDLQSDNIYKSDLQWLRGIGWVPIGSMDVVKCKRAAEILSDNIYRQPPDKLKFTSVTDSLEQVLAKNNALNMNKRLYTEAWDKDKTQVHIMPDTPEIMLARQNKINYSESLYRQAMEEAKKEGYDLRSDAIPIVAAKASRDIASDYKYKEAYRKQLGHHIGARAVHDDPKIMWSLHIAKVQSDREYKKDFEKYKTRYSSPVDMLGIVLAKKCQTLVSDVDYKHPLHEWICLPDQNDIIHARKAYDLQSDNLYKSDLEWMKGIGWVPIDSLEVVRAKRAGELLSDTIYRQRPETLKFTSITDTPEQVLAKNNALNMNKRLYTEAWDNDKKTIHVMPDTPEIMLAKLNRINYSDKLYKLALEESKKEGYDLRLDAIPIQAAKASRDIASDYKYKEGYRKQLGHHIGARNIKDDPKMMWSIHVAKIQSDREYKKEFEKWKTKFSSPVDMLGVVLAKKCQILVSDIDYKHPLHEWTCLPDQNDVIQARKAYDLQSDAIYKSDLEWLRGIGWVPIGSVEVEKVKRAGEILSDRKYRQPADQLKFTCITDTPEIVLAKNNALTMSKHLYTEAWDADKTSIHVMPDTPDILLAKSNSANISQKLYTKGWDESKMKDYDLRADAISIKSAKASRDIASDYKYKEAYEKQKGHHIGAQSIEDDPKIMCAIHAGKIQSEREYKKEFQKWKTKFSSPVDMLSILLAKKCQTLVTDIDYRNYLHEWTCMPDQNDIIQAKKAYDLQSDALYKADLEWLRGIGWMPQGSPEVLRVKNAQNIFCDSVYRTPVVNLKYTSIVDTPEVVLAKSNAENISIPKYREVWDKDKTSIHIMPDTPEINLARANALNVSNKLYREGWDEMKAGCDVRLDAIPIQAAKASREIASDYKYKLDHEKQKGHYVGTLTARDDNKIRWALIADKLQNEREYRLDWAKWKAKIQSPVDMLSILHSKNSQALVSDMDYRNYLHQWTCMPDQNDVIQAKKAYELQSDNVYKADLEWLRGIGWMPNDSVSVNHAKHAADIFSEKKYRTKIETLNFTPVDDRVDYVTAKQSGEILDDIKYRKDWNATKSKYTLTETPLLHTAQEAARILDQYLYKEGWERQKATGYILPPDAVPFVHAHHCNDVQSELKYKAEHVKQKGHYVGVPTMRDDPKLVWFEHAGQIQNERLYKEDYHKTKAKINIPADMVSVLAAKQGQTLVSDIDYRNYLHQWMCHPDQNDVIQARKAYDLQSDNVYRADLEWLRGIGWIPLDSVDHVRVTKNQEMMSQIKYKKNALENYPNFRSVVDPPEIVLAKINSVNQSDVKYKETFNKAKGKYTFSPDTPHISHSKDMGKLYSTILYKGAWEGTKAYGYTLDERYIPIVGAKHADLVNSELKYKETYEKQKGHYLAGKVIGEFPGVVHCLDFQKMRSALNYRKHYEDTKANVHIPNDMMNHVLAKRCQYILSDLEYRHYFHQWTSLLEEPNVIRVRNAQEILSDNVYKDDLNWLKGIGCYVWDTPQILHAKKSYDLQSQLQYTAAGKENLQNYNLVTDTPLYVTAVQSGINASEVKYKENYHQIKDKYTTVLETVDYDRTRNLKNLYSSNLYKEAWDRVKATSYILPSSTLSLTHAKNQKHLASHIKYREEYEKFKALYTLPRSVDDDPNTARCLRVGKLNIDRLYRSVYEKNKMKIHIVPDMVEMVTAKDSQKKVSEIDYRLRLHEWICHPDLQVNDHVRKVTDQISDIVYKDDLNWLKGIGCYVWDTPEILHAKHAYDLRDDIKYKAHMLKTRNDYKLVTDTPVYVQAVKSGKQLSDAVYHYDYVHSVRGKVAPTTKTVDLDRALHAYKLQSSNLYKTSLRTLPTGYRLPGDTPHFKHIKDTRYMSSYFKYKEAYEHTKAYGYTLGPKDVPFVHVRRVNNVTSERLYRELYHKLKDKIHTTPDTPEIRQVKKTQEAVSELIYKSDFFKMQGHMISLPYTPQVIHCRYVGDITSDIKYKEDLQVLKGFGCFLYDTPDMVRSRHLRKLWSNYLYTDKARKMRDKYKVVLDTPEYRKVQELKTHLSELVYRAAGKKQKSIFTSVPDTPDLLRAKRGQKLQSQYLYVELATKERPHHHAGNQTTALKHAKDVKDMVSEKKYKIQYEKMKDKYTPVPDTPILIRAKRAYWNASDLRYKETFQKTKGKYHTVKDALDIVYHRKVTDDISKIKYKENYMSQLGIWRSIPDRPEHFHHRAVTDTVSDVKYKEDLTWLKGIGCYAYDTPDFTLAEKNKTLYSKYKYKEVFERTKSDFKYVADSPINRHFKYATQLMNEKKYRADYEQRKDKYHLVVDEPRHLLAKTAGDQISQIKYRKNYEKSKDKFTSIVDTPEHLRTTKVNKQISDILYKLEYNKAKPRGYTTIHDTPMLLHVRKVKDEVSDLKYKEVYQRNKSNCTIEPDAVHIKAAKDAYKVNTNLDYKKQYEANKAHWKWTPDRPDFLQAAKSSLQQSDFEYKLDREFLKGCKLSVTDDKNTVLALRNTLIESDLKYKEKHVKERGTCHAVPDTPQILLAKTVSNLVSENKYKDHVKKHLAQGSYTTLPETRDTVHVKEVTKHVSDTNYKKKFVKEKGKSNYSIMLEPPEVKHAMEVAKKQSDVAYRKDAKENLHYTTVADRPDIKKATQAAKQASEVEYRAKHRKEGSHGLSMLGRPDIEMAKKAAKLSSQVKYRENFDKEKGKTPKYNPKDSQLYKVMKDANNLASEVKYKADLKKLHKPVTDMKESLIMNHVLNTSQLASSYQYKKKYEKSKGHYHTIPDNLEQLHLKEATELQSIVKYKEKYEKERGKPMLDFETPTYITAKESQQMQSGKEYRKDYEESIKGRNLTGLEVTPALLHVKYATKIASEKEYRKDLEESIRGKGLTEMEDTPDMLRAKNATQILNEKEYKRDLELEVKGRGLNAMANETPDFMRARNATDIASQIKYKQSAEMEKANFTSVVDTPEIIHAQQVKNLSSQKKYKEDAEKSMSYYETVLDTPEIQRVRENQKNFSLLQYQCDLKNSKGKITVVQDTPEILRVKENQKNFSSVLYKEDVSPGTAIGKTPEMMRVKQTQDHISSVKYKEAIGQGTPIPDLPEVKRVKETQKHISSVMYKENLGTGIPTTVTPEIERVKRNQENFSSVLYKENLGKGIPTPITPEMERVKRNQENFSSVLYKENMGKGTPLAVTPEMERVKHNQENISSVLYKENVGKATATPVTPEMQRVKRNQENISSVLYKENLGKATPTPFTPEMERVKRNQENFSSVLYKENMRKATPTPVTPEMERAKRNQENISSVLYSDSFRKQIQGKAAYVLDTPEMRRVRETQRHISTVKYHEDFEKHKGCFTPVVTDPITERVKKNMQDFSDINYRGIQRKVVEMEQKRNDQDQETITGLRVWRTNPGSVFDYDPAEDNIQSRSLHMINVQAQRRSREQSRSASALSISGGEEKSEHSEAPDHHLSTYSDGGVFAVSTAYKHAKTTELPQQRSSSVATQQTTVSSIPSHPSTAGKIFRAMYDYMAADADEVSFKDGDAIINVQAIDEGWMYGTVQRTGRTGMLPANYVEAI

SEQ ID NO: 55133 - protein, 8525 aa, Homo sapiens
MADDEDYEEVVEYYTEEVVYEEVPGETITKIYETTTTRTSDYEQSETSKPALAQPALAQPASAKPVERRKVIRKKVDPSKFMTPYIAHSQKMQDLFSPNKYKEKFEKTKGQPYASTTDTPELRRIKKVQDQLSEVKYRMDGDVAKTICHVDEKAKDIEHAKKVSQQVSKVLYKQNWEDTKDKYLLPPDAPELVQAVKNTAMFSKKLYTEDWEADKSLFYPYNDSPELRRVAQAQKALSDVAYKKGLAEQQAQFTPLADPPDIEFAKKVTNQVSKQKYKEDYENKIKGKWSETPCFEVANARMNADNISTRKYQEDFENMKDQIYFMQTETPEYKMNKKAGVAASKVKYKEDYEKNKGKADYNVLPASENPQLRQLKAAGDALSDKLYKENYEKTKAKSINYCETPKFKLDTVLQNFSSDKKYKDSYLKDILGHYVGSFEDPYHSHCMKVTAQNSDKNYKAEYEEDRGKGFFPQTITQEYEAIKKLDQCKDHTYKVHPDKTKFTQVTDSPVLLQAQVNSKQLSDLNYKAKHESEKFKCHIPPDTPAFIQHKVNAYNLSDNLYKQDWEKSKAKKFDIKVDAIPLLAAKANTKNTSDVMYKKDYEKNKGKMIGVLSINDDPKMLHSLKVAKNQSDRLYKENYEKTKAKSMNYCETPKYQLDTQLKNFSEARYKDLYVKDVLGHYVGSMEDPYHTHCMKVAAQNSDKSYKAEYEEDKGKCYFPQTITQEYEAIKKLDQCKDHTYKVHPDKTKFTAVTDSPVLLQAQLNTKQLSDLNYKAKHEGEKFKCHIPADAPQFIQHRVNAYNLSDNVYKQDWEKSKAKKFDIKVDAIPLLAAKANTKNTSDVMYKKDYEKSKGKMIGALSINDDPKMLHSLKTAKNQSDREYRKDYEKSKTIYTAPLDMLQVTQAKKSQAIASDVDYKHILHSYSYPPDSINVDLAKKAYALQSDVEYKADYNSWMKGCGWVPFGSLEMEKAKRASDILNEKKYRQHPDTLKFTSIEDAPITVQSKINQAQRSDIAYKAKGEEIIHKYNLPPDLPQFIQAKVNAYNISENMYKADLKDLSKKGYDLRTDAIPIRAAKAARQAASDVQYKKDYEKAKGKMVGFQSLQDDPKLVHYMNVAKIQSDREYKKDYEKTKSKYNTPHDMFNVVAAKKAQDVVSNVNYKHSLHHYTYLPDAMDLELSKNMMQIQSDNVYKEDYNNWMKGIGWIPIGSLDVEKVKKAGDALNEKKYRQHPDTLKFTSIVDSPVMVQAKQNTKQVSDILYKAKGEDVKHKYTMSPDLPQFLQAKCNAYNISDVCYKRDWYDLIAKGNNVLGDAIPITAAKASRNIASDYKYKEAYEKSKGKHVGFRSLQDDPKLVHYMNVAKLQSDREYKKNYENTKTSYHTPGDMVSITAAKMAQDVATNVNYKQPLHHYTYLPDAMSLEHTRNVNQIQSDNVYKDEYNSFLKGIGWIPIGSLEVEKVKKAGDALNERKYRQHPDTVKFTSVPDSMGMVLAQHNTKQLSDLNYKVEGEKLKHKYTIDPELPQFIQAKVNALNMSDAHYKADWKKTIAKGYDLRPDAIPIVAAKSSRNIASDCKYKEAYEKAKGKQVGFLSLQDDPKLVHYMNVAKIQSDREYKKGYEASKTKYHTPLDMVSVTAAKKSQEVATNANYRQSYHHYTLLPDALNVEHSRNAMQIQSDNLYKSDFTNWMKGIGWVPIESLEVEKAKKAGEILSEKKYRQHPEKLKFTYAMDTMEQALNKSNKLNMDKRLYTEKWNKDKTTIHVMPDTPDILLSRVNQITMSDKLYKAGWEEEKKKGYDLRPDAIAIKAARASRDIASDYKYKKAYEQAKGKHIGFRSLEDDPKLVHFMQVAKMQSDREYKKGYEKSKTSFHTPVDMLSVVAAKKSQEVATNANYRNVIHTYNMLPDAMSFELAKNMMQIQSDNQYKADYADFMKGIGWLPLGSLEAEKNKKAMEIISEKKYRQHPDTLKYSTLMDSMNMVLAQNNAKIMNEHLYKQAWEADKTKVHIMPDIPQIILAKANAINMSDKLYKLSLEESKKKGYDLRPDAIPIKAAKASRDIASDYKYKYNYEKGKGKMVGFRSLEDDPKLVHSMQVAKMQSDREYKKNYENTKTSYHTPADMLSVTAAKDAQANITNTNYKHLIHKYILLPDAMNIELTRNMNRIQSDNEYKQDYNEWYKGLGWSPAGSLEVEKAKKATEYASDQKYRQHPSNFQFKKLTDSMDMVLAKQNAHTMNKHLYTIDWNKDKTKIHVMPDTPDILQAKQNQTLYSQKLYKLGWEEALKKGYDLPVDAISVQLAKASRDIASDYKYKQGYRKQLGHHVGFRSLQDDPKLVLSMNVAKMQSEREYKKDFEKWKTKFSSPVDMLGVVLAKKCQELVSDVDYKNYLHQWTCLPDQNDVVQAKKVYELQSENLYKSDLEWLRGIGWSPLGSLEAEKNKRASEIISEKKYRQPPDRNKFTSIPDAMDIVLAKTNAKNRSDRLYREAWDKDKTQIHIMPDTPDIVLAKANLINTSDKLYRMGYEELKRKGYDLPVDAIPIKAAKASREIASEYKYKEGFRKQLGHHIGARNIEDDPKMMWSMHVAKIQSDREYKKDFEKWKTKFSSPVDMLGVVLAKKCQTLVSDVDYKNYLHQWTCLPDQSDVIHARQAYDLQSDNLYKSDLQWLKGIGWMTSGSLEDEKNKRATQILSDHVYRQHPDQFKFSSLMDSIPMVLAKNNAITMNHRLYTEAWDKDKTTVHIMPDTPEVLLAKQNKVNYSEKLYKLGLEEAKRKGYDMRVDAIPIKAAKASRDIASEFKYKEGYRKQLGHHIGARAIRDDPKMMWSMHVAKIQSDREYKKDFEKWKTKFSSPVDMLGVVLAKKCQTLVSDVDYKNYLHQWTCLPDQSDVIHARQAYDLQSDNMYKSDLQWMRGIGWVSIGSLDVEKCKRATEILSDKIYRQPPDRFKFTSVTDSLEQVLAKNNAITMNKRLYTEAWDKDKTQIHIMPDTPEIMLARMNKINYSESLYKLANEEAKKKGYDLRSDAIPIVAAKASRDIISDYKYKDGYCKQLGHHIGARNIEDDPKMMWSMHVAKIQSDREYKKDFEKWKTKFSSPVDMLGVVLAKKCQTLVSDVDYKNYLHEWTCLPDQSDVIHARQAYDLQSDNIYKSDLQWLRGIGWVPIGSMDVVKCKRATEILSDNIYRQPPDKLKFTSVTDSLEQVLAKNNALNMNKRLYTEAWDKDKTQIHIMPDTPEIMLARQNKINYSETLYKLANEEAKKKGYDLRSDAIPIVAAKASRDVISDYKYKDGYRKQLGHHIGARNIEDDPKMMWSMHVAKIQSDREYKKDFEKWKTKFSSPVDMLGVVLAKKCQTLVSDVDYKNYLHEWTCLPDQNDVIHARQAYDLQSDNIYKSDLQWLRGIGWVPIGSMDVVKCKRAAEILSDNIYRQPPDKLKFTSVTDSLEQVLAKNNALNMNKRLYTEAWDKDKTQVHIMPDTPEIMLARQNKINYSESLYRQAMEEAKKEGYDLRSDAIPIVAAKASRDIASDYKYKEAYRKQLGHHIGARAVHDDPKIMWSLHIAKVQSDREYKKDFEKYKTRYSSPVDMLGIVLAKKCQTLVSDVDYKHPLHEWICLPDQNDIIHARKAYDLQSDNLYKSDLEWMKGIGWVPIDSLEVVRAKRAGELLSDTIYRQRPETLKFTSITDTPEQVLAKNNALNMNKRLYTEAWDNDKKTIHVMPDTPEIMLAKLNRINYSDKLYKLALEESKKEGYDLRLDAIPIQAAKASRDIASDYKYKEGYRKQLGHHIGARNIKDDPKMMWSIHVAKIQSDREYKKEFEKWKTKFSSPVDMLGVVLAKKCQILVSDIDYKHPLHEWTCLPDQNDVIQARKAYDLQSDAIYKSDLEWLRGIGWVPIGSVEVEKVKRAGEILSDRKYRQPADQLKFTCITDTPEIVLAKNNALTMSKHLYTEAWDADKTSIHVMPDTPDILLAKSNSANISQKLYTKGWDESKMKDYDLRADAISIKSAKASRDIASDYKYKEAYEKQKGHHIGAQSIEDDPKIMCAIHAGKIQSEREYKKEFQKWKTKFSSPVDMLSILLAKKCQTLVTDIDYRNYLHEWTCMPDQNDIIQAKKAYDLQSDSVYKADLEWLRGIGWMPEGSVEMNRVKVAQDLVNERLYRTRPEALSFTSIVDTPEVVLAKANSLQISEKLYQEAWNKDKSNITIPSDTPEMLQAHINALQISNKLYQKDWNDAKQKGYDIRADAIEIKHAKASREIASEYKYKEGYRKQLGHHMGFRTLQDDPKSVWAIHAAKIQSDREYKKAYEKSKGIHNTPLDMMSIVQAKKCQVLVSDIDYRNYLHQWTCLPDQNDVIQAKKAYDLQSDNLYKSDLEWLKGIGWLPEGSVEVMRVKNAQNLLNERLYRIKPEALKFTSIVDTPEVIQAKINAVQISEPLYRDAWEKEKANVNVPADTPLMLQSKINALQISNKRYQQAWEDVKMTGYDLRADAIGIQHAKASRDIASDYLYKTAYEKQKGHYIGCRSAKEDPKLVWAANVLKMQNDRLYKKAYNDHKAKISIPVDMVSISAAKEGQALASDVDYRHYLHHWSCFPDQNDVIQARKAYDLQSDSVYKADLEWLRGIGWMPEGSVEMNRVKVAQDLVNERLYRTRPEALSFTSIVDTPEVVLAKANSLQISEKLYQEAWNKDKSNITIPSDTPEMLQAHINALQISNKLYQKDWNDTKQKGYDIRADAIEIKHAKASREIASEYKYKEGYRKQLGHHMGFRTLQDDPKSVWAIHAAKIQSDREYKKAYEKSKGIHNTPLDMMSIVQAKKCQVLVSDIDYRNYLHQWTCLPDQNDVIQAKKAYDLQSDNLYKSDLEWLKGIGWLPEGSVEVMRVKNAQNLLNERLYRIKPEALKFTSIVDTPEVIQAKINAVQISEPLYRNAWEKEKANVNVPADTPLMLQSKINALQISNKRYQQAWEDVKMTGYDLRADAIGIQHAKASRDIASDYLYKTAYEKQKGHYIGCRSAKEDPKLVWAANVLKMQNDRLYKKAYNDHKAKISIPVDMVSISAAKEGQALASDVDYRHYLHHWSCFPDQNDVIQARKAYDLQSDSVYKADLEWLRGIGWMPEGSVEMNRVKVAQDLVNERLYRTRPEALSFTSIVDTPEVVLAKANSLQISEKLYQEAWNKDKSNITIPSDTPEMLQAHINALQISNKLYQKDWNDTKQKGYDIRADAIEIKHAKASREIASEYKYKEGYRKQLGHHMGFRTLQDDPKSVWAIHAAKIQSDREYKKAYEKSKGIHNTPLDMMSIVQAKKCQVLVSDIDYRNYLHQWTCLPDQNDVIQAKKAYDLQSDNLYKSDLEWLKGIGWLPEGSVEVMRVKNAQNLLNERLYRIKPEALKFTSIVDTPEVIQAKINAVQISEPLYRDAWEKEKANVNVPADTPLMLQSKINALQISNKRYQQAWEDVKMTGYDLRADAIGIQHAKASRDIASDYLYKTAYEKQKGHYIGCRSAKEDPKLVWAANVLKMQNDRLYKKAYNDHKAKISIPVDMVSISAAKEGQALASDVDYRHYLHRWSCFPDQNDVIQARKAYDLQSDALYKADLEWLRGIGWMPQGSPEVLRVKNAQNIFCDSVYRTPVVNLKYTSIVDTPEVVLAKSNAENISIPKYREVWDKDKTSIHIMPDTPEINLARANALNVSNKLYREGWDEMKAGCDVRLDAIPIQAAKASREIASDYKYKLDHEKQKGHYVGTLTARDDNKIRWALIADKLQNEREYRLDWAKWKAKIQSPVDMLSILHSKNSQALVSDMDYRNYLHQWTCMPDQNDVIQAKKAYELQSDNVYKADLEWLRGIGWMPNDSVSVNHAKHAADIFSEKKYRTKIETLNFTPVDDRVDYVTAKQSGEILDDIKYRKDWNATKSKYTLTETPLLHTAQEAARILDQYLYKEGWERQKATGYILPPDAVPFVHAHHCNDVQSELKYKAEHVKQKGHYVGVPTMRDDPKLVWFEHAGQIQNERLYKEDYHKTKAKINIPADMVSVLAAKQGQTLVSDIDYRNYLHQWMCHPDQNDVIQARKAYDLQSDNVYRADLEWLRGIGWIPLDSVDHVRVTKNQEMMSQIKYKKNALENYPNFRSVVDPPEIVLAKINSVNQSDVKYKETFNKAKGKYTFSPDTPHISHSKDMGKLYSTILYKGAWEGTKAYGYTLDERYIPIVGAKHADLVNSELKYKETYEKQKGHYLAGKVIGEFPGVVHCLDFQKMRSALNYRKHYEDTKANVHIPNDMMNHVLAKRCQYILSDLEYRHYFHQWTSLLEEPNVIRVRNAQEILSDNVYKDDLNWLKGIGCYVWDTPQILHAKKSYDLQSQLQYTAAGKENLQNYNLVTDTPLYVTAVQSGINASEVKYKENYHQIKDKYTTVLETVDYDRTRNLKNLYSSNLYKEAWDRVKATSYILPSSTLSLTHAKNQKHLASHIKYREEYEKFKALYTLPRSVDDDPNTARCLRVGKLNIDRLYRSVYEKNKMKIHIVPDMVEMVTAKDSQKKVSEIDYRLRLHEWICHPDLQVNDHVRKVTDQISDIVYKDDLNWLKGIGCYVWDTPEILHAKHAYDLRDDIKYKAHMLKTRNDYKLVTDTPVYVQAVKSGKQLSDAVYHYDYVHSVRGKVAPTTKTVDLDRALHAYKLQSSNLYKTSLRTLPTGYRLPGDTPHFKHIKDTRYMSSYFKYKEAYEHTKAYGYTLGPKDVPFVHVRRVNNVTSERLYRELYHKLKDKIHTTPDTPEIRQVKKTQEAVSELIYKSDFFKMQGHMISLPYTPQVIHCRYVGDITSDIKYKEDLQVLKGFGCFLYDTPDMVRSRHLRKLWSNYLYTDKARKMRDKYKVVLDTPEYRKVQELKTHLSELVYRAAGKKQKSIFTSVPDTPDLLRAKRGQKLQSQYLYVELATKERPHHHAGNQTTALKHAKDVKDMVSEKKYKIQYEKMKDKYTPVPDTPILIRAKRAYWNASDLRYKETFQKTKGKYHTVKDALDIVYHRKVTDDISKIKYKENYMSQLGIWRSIPDRPEHFHHRAVTDTVSDVKYKEDLTWLKGIGCYAYDTPDFTLAEKNKTLYSKYKYKEVFERTKSDFKYVADSPINRHFKYATQLMNEKKYRADYEQRKDKYHLVVDEPRHLLAKTAGDQISQIKYRKNYEKSKDKFTSIVDTPEHLRTTKVNKQISDILYKLEYNKAKPRGYTTIHDTPMLLHVRKVKDEVSDLKYKEVYQRNKSNCTIEPDAVHIKAAKDAYKVNTNLDYKKQYEANKAHWKWTPDRPDFLQAAKSSLQQSDFEYKLDREFLKGCKLSVTDDKNTVLALRNTLIESDLKYKEKHVKERGTCHAVPDTPQILLAKTVSNLVSENKYKDHVKKHLAQGSYTTLPETRDTVHVKEVTKHVSDTNYKKKFVKEKGKSNYSIMLEPPEVKHAMEVAKKQSDVAYRKDAKENLHYTTVADRPDIKKATQAAKQASEVEYRAKHRKEGSHGLSMLGRPDIEMAKKAAKLSSQVKYRENFDKEKGKTPKYNPKDSQLYKVMKDANNLASEVKYKADLKKLHKPVTDMKESLIMNHVLNTSQLASSYQYKKKYEKSKGHYHTIPDNLEQLHLKEATELQSIVKYKEKYEKERGKPMLDFETPTYITAKESQQMQSGKEYRKDYEESIKGRNLTGLEVTPALLHVKYATKIASEKEYRKDLEESIRGKGLTEMEDTPDMLRAKNATQILNEKEYKRDLELEVKGRGLNAMANETPDFMRARNATDIASQIKYKQSAEMEKANFTSVVDTPEIIHAQQVKNLSSQKKYKEDAEKSMSYYETVLDTPEIQRVRENQKNFSLLQYQCDLKNSKGKITVVQDTPEILRVKENQKNFSSVLYKEDVSPGTAIGKTPEMMRVKQTQDHISSVKYKEAIGQGTPIPDLPEVKRVKETQKHISSVMYKENLGTGIPTTVTPEIERVKRNQENFSSVLYKENLGKGIPTPITPEMERVKRNQENFSSILYKENLSKGTPLPVTPEMERVKLNQENFSSVLYKENVGKGIPIPITPEMERVKHNQENFSSVLYKENLGTGIPIPITPEMQRVKHNQENLSSVLYKENMGKGTPLPVTPEMERVKHNQENISSVLYKENMGKGTPLPVTPEMERVKHNQENISSVLYKENMGKGTPLAVTPEMERVKHNQENISSVLYKENVGKATATPVTPEMQRVKRNQENISSVLYKENLGKATPTPFTPEMERVKRNQENFSSVLYKENMRKATPTPVTPEMERAKRNQENISSVLYSDSFRKQIQGKAAYVLDTPEMRRVRETQRHISTVKYHEDFEKHKGCFTPVVTDPITERVKKNMQDFSDINYRGIQRKVVEMEQKRNDQDQETITGLRVWRTNPGSVFDYDPAEDNIQSRSLHMINVQAQRRSREQSRSASALSISGGEEKSEHSEAPDHHLSTYSDGGVFAVSTAYKHAKTTELPQQRSSSVATQQTTVSSIPSHPSTAGKIFRAMYDYMAADADEVSFKDGDAIINVQAIDEGWMYGTVQRTGRTGMLPANYVEAI

SEQ ID NO: 55134 - protein, 287 aa, Homo sapiens
MADDEDYEEVVEYYTEEVVYEEVPGETITKIYETTTTRTSDYEQSETSKPALAQPALAQPASAKPVERRKVIRKKVDPSKFMTPYIAHSQKMQDLFSPNKYKEKFEKTKGQPYASTTDTPELRRIKKVQDQLSEVKYRMDGDVAKTICHVDEKAKDIEHAKKVSQQVSKVLYKQNWEDTKDKYLLPPDAPELVQAVKNTAMFSKKLYTEDWEADKSLFYPYNDSPELRRVAQAQKALSDVAYKKGLAEQQAQFTPLADPPDIEFAKKVTNQVSKQKEKKRKKKRKKV

SEQ ID NO: 55135 - protein, 438 aa, Homo sapiens
MMRVKQTQDHISSVKYKEAIGQGTPIPDLPEVKRVKETQKHISSVMYKENLGTGIPTTVTPEIERVKRNQENFSSVLYKENMGKGTPLAVTPEMERVKHNQENISSVLYKENVGKATATPVTPEMQRVKRNQENISSVLYKENMRKATPTPVTPEMERAKRNQENISSVLYSDSFRKQIQGKAAYVLDTPEMRRVRETQRHISTVKYHEDFEKHKGCFTPVVTDPITERVKKNMQDFSDINYRGIQRKVVEMEQKRNDQDQETITGLRVWRTNPGSVFDYDPAEDNIQSRSLHMINVQAQRRSREQSRSASALSISGGEEKSEHSEAPDHHLSTYSDGGVFAVSTAYKHAKTTELPQQRSSSVATQQTTVSSIPSHPSTAGKIFRAMYDYMAADADEVSFKDGDAIINVQAIDEGWMYGTVQRTGRTGMLPANYVEAI

SEQ ID NO: 55136 - protein, 337 aa, Homo sapiens
QKYKEDYENKIKGKWSETPCFEVANARMNADNISTRKYQEDFENMKDQIYFMQTETPEYKMNKKAGVAASKVKYKEDYEKNKGKADYNVLPASENPQLRQLKAAGDALSDKLYKENYEKTKAKSINYCETPKFKLDTVLQNFSSDKKYKDSYLKDILGHYVGSFEDPYHSHCMKVTAQNSDKNYKAEYEEDRGKGFFPQTITQEYEAIKKLDQCKDHTYKVHPDKTKFTQVTDSPVLLQAQVNSKQLSDLNYKAKHESEKFKCHIPPDTPAFIQHKVNAYNLSDNLYKQDWEKSKAKKFDIKVDAIPLLAAKANTKNTSDVMYKKDYEKNKVKVQQR

SEQ ID NO: 55137 - protein, 1730 aa, Homo sapiens
MNVQPCSRCGYGVYPAEKISCIDQIWHKACFHCEVCKMMLSVNNFVSHQKKPYCHAHNPKNNTFTSVYHTPLNLNVRTFPEAISGIHDQEDGEQCKSVFHWDMKSKDKEGAPNRQPLANERAYWTGYGEGNAWCPGALPDPEIVRMVEARKSLGEEYTEDYEQPRGKGSFPAMITPAYQRAKKANQLASQVEYKRGHDERISRFSTVVDTPELLRSKAGAQLQSDVRYTEDYEQQRGKGSFPAMITPAYQIAKRANELASDVRYHQQYQKEMRGMAGPAIGAEGILTRECADQYGQGYPEEYEEHRGKGSFPAMITPAYQNAKKAHELASDIKYRQDFNKMKGAAHYHSLPAQDNLVLKQAQSVNKLVSEVEYKKDLESSRGHSINYCETPQFRNVSKISKFTSDNKYKENYQNHMRGRYEGVGMDRRTLHAMKVGSLASNVAYKADYKHDIVDYNYPATLTPSYQTAMKLVPLKDANYRQSIDKLKYSSVTDTPQIVQAKINAQQLSHVNYRADYEKNKLNYTLPQDVPQLVKAKTNAKLFSEVKYKEGWEKTKGKGFEMKLDAMSLLAAKASGELASNIKYKEEYEKTKGKAMGTADSRLLHSLQIAKMSSEVEYKKGFEESKTRFHLPMDMVNIRHAKKAQTLASDLDYRKKLHEYTVLPEDMKTQWAKKAYGLQSELQYKADLAWMKGVGWLTEGSLNLEQAKKAGQLVSEKNYRQRVDELKFTSVTDSSQMEHAKKSQELQSGVAYKAGNEQSVHQYTISKDEPLFLQARANAANLSEKLYKSSWENQKAKGFELRLDSLTFLAAKAKRDLASEVKYKEDYERSRGKLIGAKDVQGDSQMSHSLQMSKLQSELEYKKGFEDTKSQCHVSLDMVHLVHARKAQHLATDVGYKTAEHHFTALPTDMKVEWAKKAYGLQSDNQYRADVKWMKGMGWVATGSLNVEQAKKAGELISEKKYRQHPDALKFTSIKDTPEMVQARISYTQAVDRLYREQGENIKHHYTPTADLPEVLLAKLNAMNISETRYKESWSKLRDGGYKLRLDALPFQAAKASGEIISDYKYKEAFEKMKGQMLGSRSLEDDISLAHSVYATSLQSDVNYKKGFEHSKAQFHLPLDMAALVHAKKAQTLASNQDYKHPLPQYTSLAEDLRLSCAKKAHKLQSENLYRSDLNFMRGVACVIPGTLEIEGRKKASELISESKYRQHPHSFKYTAVTDTPNLLHAKFSNQITNERLYKAAGEDARHEYTMTLGLPEFIRAKTNAANLSDARYKESWRNLRAQGYKLTIEALPFQAARASGDIASDFLYRHDFVKERGKLIGPQSVRDDPRIQHCRRMGQLQSELQYRRGATSSQAQFHLPMDMVHLVHAKNAQALASDHDYRTQYHKFTALPEDLKMAWAKKAHALQSELRYKSDLIGMKGIGWLALRSPQMESAKKAGELISETKYRKKPDSIKFTTVVDSPDLVHAKNSYMHCNERMYRSGDAESLHRYTLIPDHPDFTRARLNALHLSDKVYRNSWEQTRAGSYDFRLDAIPFQTARASREIASDFRYKEAFLRDRGLQIGYRSVDDDPRMKHFLNVGRLQSDNEYKKDFAKSRSQFHSSTDQPGLLQAKRSQQLASDVHYRQPLPQPTCDPEQLGLRHAQKAHQLQSDVKYKSDLNLTRGVGWTPPGSYKVEMARRAAELANARGLGLQGAYRGAEAVEAGDHQSGEVNPDATEILHVKKKKALLL

SEQ ID NO: 55138 - protein, 1695 aa, Homo sapiens
MNVQPCSRCGYGVYPAEKISCIDQIWHKACFHCEVCKMMLSVNNFVSHQKKPYCHAHNPKNNTFTSVYHTPLNLNVRTFPEAISGIHDQEDGEQCKSVFHWDMKSKDKEGAPNRQPLANERAYWTGYGEGNAWCPGALPDPEIVRMVEARKSLGEEYTEDYEQPRGKGSFPAMITPAYQRAKKANQLASQVEYKRGHDERISRFSTVVDTPELLRSKAGAQLQSDVRYTEDYEQQRGKGSFPAMITPAYQIAKRANELASDVRYHQQYQKEMRGMAGPAIGAEGILTRECADQYGQGYPEEYEEHRGKGSFPAMITPAYQNAKKAHELASDIKYRQDFNKMKGAAHYHSLPAQDNLVLKQAQSVNKLVSENKYKENYQNHMRGRYEGVGMDRRTLHAMKVGSLASNVAYKADYKHDIVDYNYPATLTPSYQTAMKLVPLKDANYRQSIDKLKYSSVTDTPQIVQAKINAQQLSHVNYRADYEKNKLNYTLPQDVPQLVKAKTNAKLFSEVKYKEGWEKTKGKGFEMKLDAMSLLAAKASGELASNIKYKEEYEKTKGKAMGTADSRLLHSLQIAKMSSEVEYKKGFEESKTRFHLPMDMVNIRHAKKAQTLASDLDYRKKLHEYTVLPEDMKTQWAKKAYGLQSELQYKADLAWMKGVGWLTEGSLNLEQAKKAGQLVSEKNYRQRVDELKFTSVTDSSQMEHAKKSQELQSGVAYKAGNEQSVHQYTISKDEPLFLQARANAANLSEKLYKSSWENQKAKGFELRLDSLTFLAAKAKRDLASEVKYKEDYERSRGKLIGAKDVQGDSQMSHSLQMSKLQSELEYKKGFEDTKSQCHVSLDMVHLVHARKAQHLATDVGYKTAEHHFTALPTDMKVEWAKKAYGLQSDNQYRADVKWMKGMGWVATGSLNVEQAKKAGELISEKKYRQHPDALKFTSIKDTPEMVQARISYTQAVDRLYREQGENIKHHYTPTADLPEVLLAKLNAMNISETRYKESWSKLRDGGYKLRLDALPFQAAKASGEIISDYKYKEAFEKMKGQMLGSRSLEDDISLAHSVYATSLQSDVNYKKGFEHSKAQFHLPLDMAALVHAKKAQTLASNQDYKHPLPQYTSLAEDLRLSCAKKAHKLQSENLYRSDLNFMRGVACVIPGTLEIEGRKKASELISESKYRQHPHSFKYTAVTDTPNLLHAKFSNQITNERLYKAAGEDARHEYTMTLGLPEFIRAKTNAANLSDARYKESWRNLRAQGYKLTIEALPFQAARASGDIASDFLYRHDFVKERGKLIGPQSVRDDPRIQHCRRMGQLQSELQYRRGATSSQAQFHLPMDMVHLVHAKNAQALASDHDYRTQYHKFTALPEDLKMAWAKKAHALQSELRYKSDLIGMKGIGWLALRSPQMESAKKAGELISETKYRKKPDSIKFTTVVDSPDLVHAKNSYMHCNERMYRSGDAESLHRYTLIPDHPDFTRARLNALHLSDKVYRNSWEQTRAGSYDFRLDAIPFQTARASREIASDFRYKEAFLRDRGLQIGYRSVDDDPRMKHFLNVGRLQSDNEYKKDFAKSRSQFHSSTDQPGLLQAKRSQQLASDVHYRQPLPQPTCDPEQLGLRHAQKAHQLQSDVKYKSDLNLTRGVGWTPPGSYKVEMARRAAELANARGLGLQGAYRGAEAVEAGDHQSGEVNPDATEILHVKKKKALLL

SEQ ID NO: 55139 - protein, 852 aa, Homo sapiens
MRGMAGPAIGAEGILTRECADQYGQGYPEEYEEHRGKGSFPAMITPAYQNAKKAHELASDIKYRQDFNKMKGAAHYHSLPAQDNLVLKQAQSVNKLVSEVEYKKDLESSRGHSINYCETPQFRNVSKISKFTSDNKYKENYQNHMRGRYEGVGMDRRTLHAMKVGSLASNVAYKADYKHDIVDYNYPATLTPSYQTAMKLVPLKDANYRQSIDKLKYSSVTDTPQIVQAKINAQQLSHVNYRADYEKNKLNYTLPQDVPQLVKAKTNAKLFSEVKYKEGWEKTKGKGFEMKLDAMSLLAAKASGELASNVHLLLSLKIKYKEEYEKTKGKAMGTADSRLLHSLQIAKMSSEVEYKKGFEESKTRFHLPMDMGVGWLTEGSLNLEQAKKAGQLVSEKNYRQRVDELKFTSVTDSSQMEHAKKSQELQSGVAYKAGNEQSVHQYTISKDEPLFLQARANAANLSEFLYRHDFVKERGKLIGPQSVRDDPRIQHCRRMGQLQSELQYRRGATSSQAQFHLPMDMVHLVHAKNAQALASDHDYRTQYHKFTALPEDLKMAWAKKAHALQSELRYKSDLIGMKGIGWLALRSPQMESAKKAGELISETKYRKKPDSIKFTTVVDSPDLVHAKNSYMHCNERMYRSGDAESLHRYTLIPDHPDFTRARLNALHLSDFRYKEAFLRDRGLQIGYRSVDDDPRMKHFLNVGRLQSDNEYKKDFAKSRSQFHSSTDQPGLLQAKRSQQLASDVHYRQPLPQPTCDPEQLGLRHAQKAHQLQSDVKYKSDLNLTRGVGWTPPGSYKVEMARRAAELANARGLGLQGAYRGAEAVEAGDHQSGEVNPDATEILHVKKKKALLL

SEQ ID NO: 55140 - protein, 1738 aa, Homo sapiens
MNVQPCSRCGYGVYPAEKISCIDQIWHKACFHCEVCKMMLSVNNFVSHQKKPYCHAHNPKNNTFTSVYHTPLNLNVRTFPEAISGIHDQEDGEQCKSVFHWDMKSKDKEGAPNRQPLANERAYWTGYGEGNAWCPGALPDPEIVRMVEARKSLGEEYTEDYEQPRGKGSFPAMITPAYQRAKKANQLASQVEYKRGHDERISRFSTVVDTPELLRSKAGAQLQSDVRYTEDYEQQRGKGSFPAMITPAYQIAKRANELASDVRYHQQYQKEMRGMAGPAIGAEGILTRECADQYGQGYPEEYEEHRGKGSFPAMITPAYQNAKKAHELASDIKYRQDFNKMKGAAHYHSLPAQDNLVLKQAQSVNKLVSEVEYKKDLESSRGHSINYCETPQFRNVSKISKFTSDNKYKENYQNHMRGRYEGVGMDRRTLHAMKVGSLASNVAYKADYKHDIVDYNYPATLTPSYQTAMKLVPLKDANYRQSIDKLKYSSVTDTPQIVQAKINAQQLSHVNYRADYEKNKLNYTLPQDVPQLVKAKTNAKLFSEVKYKEGWEKTKGKGFEMKLDAMSLLAAKASGELASNVHLLLSLKIKYKEEYEKTKGKAMGTADSRLLHSLQIAKMSSEVEYKKGFEESKTRFHLPMDMVNIRHAKKAQTLASDLDYRKKLHEYTVLPEDMKTQWAKKAYGLQSELQYKADLAWMKGVGWLTEGSLNLEQAKKAGQLVSEKNYRQRVDELKFTSVTDSSQMEHAKKSQELQSGVAYKAGNEQSVHQYTISKDEPLFLQARANAANLSEKLYKSSWENQKAKGFELRLDSLTFLAAKAKRDLASEVKYKEDYERSRGKLIGAKDVQGDSQMSHSLQMSKLQSELEYKKGFEDTKSQCHVSLDMVHLVHARKAQHLATDVGYKTAEHHFTALPTDMKVEWAKKAYGLQSDNQYRADVKWMKGMGWVATGSLNVEQAKKAGELISEKKYRQHPDALKFTSIKDTPEMVQARISYTQAVDRLYREQGENIKHHYTPTADLPEVLLAKLNAMNISETRYKESWSKLRDGGYKLRLDALPFQAAKASGEIISDYKYKEAFEKMKGQMLGSRSLEDDISLAHSVYATSLQSDVNYKKGFEHSKAQFHLPLDMAALVHAKKAQTLASNQDYKHPLPQYTSLAEDLRLSCAKKAHKLQSENLYRSDLNFMRGVACVIPGTLEIEGRKKASELISESKYRQHPHSFKYTAVTDTPNLLHAKFSNQITNERLYKAAGEDARHEYTMTLGLPEFIRAKTNAANLSDARYKESWRNLRAQGYKLTIEALPFQAARASGDIASDFLYRHDFVKERGKLIGPQSVRDDPRIQHCRRMGQLQSELQYRRGATSSQAQFHLPMDMVHLVHAKNAQALASDHDYRTQYHKFTALPEDLKMAWAKKAHALQSELRYKSDLIGMKGIGWLALRSPQMESAKKAGELISETKYRKKPDSIKFTTVVDSPDLVHAKNSYMHCNERMYRSGDAESLHRYTLIPDHPDFTRARLNALHLSDKVYRNSWEQTRAGSYDFRLDAIPFQTARASREIASDFRYKEAFLRDRGLQIGYRSVDDDPRMKHFLNVGRLQSDNEYKKDFAKSRSQFHSSTDQPGLLQAKRSQQLASDVHYRQPLPQPTCDPEQLGLRHAQKAHQLQSDVKYKSDLNLTRGVGWTPPGSYKVEMARRAAELANARGLGLQGAYRGAEAVEAGDHQSGEVNPDATEILHVKKKKALLL

SEQ ID NO: 55141 - protein, 1703 aa, Homo sapiens
MNVQPCSRCGYGVYPAEKISCIDQIWHKACFHCEVCKMMLSVNNFVSHQKKPYCHAHNPKNNTFTSVYHTPLNLNVRTFPEAISGIHDQEDGEQCKSVFHWDMKSKDKEGAPNRQPLANERAYWTGYGEGNAWCPGALPDPEIVRMVEARKSLGEEYTEDYEQPRGKGSFPAMITPAYQRAKKANQLASQVEYKRGHDERISRFSTVVDTPELLRSKAGAQLQSDVRYTEDYEQQRGKGSFPAMITPAYQIAKRANELASDVRYHQQYQKEMRGMAGPAIGAEGILTRECADQYGQGYPEEYEEHRGKGSFPAMITPAYQNAKKAHELASDIKYRQDFNKMKGAAHYHSLPAQDNLVLKQAQSVNKLVSENKYKENYQNHMRGRYEGVGMDRRTLHAMKVGSLASNVAYKADYKHDIVDYNYPATLTPSYQTAMKLVPLKDANYRQSIDKLKYSSVTDTPQIVQAKINAQQLSHVNYRADYEKNKLNYTLPQDVPQLVKAKTNAKLFSEVKYKEGWEKTKGKGFEMKLDAMSLLAAKASGELASNVHLLLSLKIKYKEEYEKTKGKAMGTADSRLLHSLQIAKMSSEVEYKKGFEESKTRFHLPMDMVNIRHAKKAQTLASDLDYRKKLHEYTVLPEDMKTQWAKKAYGLQSELQYKADLAWMKGVGWLTEGSLNLEQAKKAGQLVSEKNYRQRVDELKFTSVTDSSQMEHAKKSQELQSGVAYKAGNEQSVHQYTISKDEPLFLQARANAANLSEKLYKSSWENQKAKGFELRLDSLTFLAAKAKRDLASEVKYKEDYERSRGKLIGAKDVQGDSQMSHSLQMSKLQSELEYKKGFEDTKSQCHVSLDMVHLVHARKAQHLATDVGYKTAEHHFTALPTDMKVEWAKKAYGLQSDNQYRADVKWMKGMGWVATGSLNVEQAKKAGELISEKKYRQHPDALKFTSIKDTPEMVQARISYTQAVDRLYREQGENIKHHYTPTADLPEVLLAKLNAMNISETRYKESWSKLRDGGYKLRLDALPFQAAKASGEIISDYKYKEAFEKMKGQMLGSRSLEDDISLAHSVYATSLQSDVNYKKGFEHSKAQFHLPLDMAALVHAKKAQTLASNQDYKHPLPQYTSLAEDLRLSCAKKAHKLQSENLYRSDLNFMRGVACVIPGTLEIEGRKKASELISESKYRQHPHSFKYTAVTDTPNLLHAKFSNQITNERLYKAAGEDARHEYTMTLGLPEFIRAKTNAANLSDARYKESWRNLRAQGYKLTIEALPFQAARASGDIASDFLYRHDFVKERGKLIGPQSVRDDPRIQHCRRMGQLQSELQYRRGATSSQAQFHLPMDMVHLVHAKNAQALASDHDYRTQYHKFTALPEDLKMAWAKKAHALQSELRYKSDLIGMKGIGWLALRSPQMESAKKAGELISETKYRKKPDSIKFTTVVDSPDLVHAKNSYMHCNERMYRSGDAESLHRYTLIPDHPDFTRARLNALHLSDKVYRNSWEQTRAGSYDFRLDAIPFQTARASREIASDFRYKEAFLRDRGLQIGYRSVDDDPRMKHFLNVGRLQSDNEYKKDFAKSRSQFHSSTDQPGLLQAKRSQQLASDVHYRQPLPQPTCDPEQLGLRHAQKAHQLQSDVKYKSDLNLTRGVGWTPPGSYKVEMARRAAELANARGLGLQGAYRGAEAVEAGDHQSGEVNPDATEILHVKKKKALLL

SEQ ID NO: 55142 - protein, 275 aa, Homo sapiens
MATELEYESVLCVKPDVSVYRIPPRASNRGYRASDWKLDQPDWTGRLRITSKGKTAYIKLEDKVSGELFAQAPVEQYPGIAVETVTDSSRYFVIRIQDGTGRSAFIGIGFTDRGDAFDFNVSLQDHFKWVKQESEISKESQEMDARPKLDLGFKEGQTIKLCIGNITNKKGGASKPRTARGGGLSLLPPPPGGKVTIPPPSSSVAISNHVTPPPIPKSNHGGSDADILLDLDSPAPVTTPAPTPVSVSNDLWGDFSTASSSVPNQAPQPSNWVQF

SEQ ID NO: 55143 - protein, 133 aa, Homo sapiens [sequence omitted]

SEQ ID NO: 55144 - protein, 275 aa, Homo sapiens; identical to SEQ ID NO: 55142

SEQ ID NO: 55145 - protein, 185 aa, Homo sapiens
MEESGYESVLCVKPDVHVYRIPPRATNRGYRAAEWQLDQPSWSGRLRITAKGQMAYIKLEDRTSGELFAQAPVDQFPGTAVESVTDSSRYFVIRIEDGNGRRAFIGIGFGDRGDAFDFNVALQDHFKWVKQQCEFAKQAQNPDQGPKLDLGFKEGQTIKLNIAVGLGNINRRCSCTLATAQSCHC

SEQ ID NO: 55146 - protein, 263 aa, Homo sapiens
MEESGYESVLCVKPDVHVYRIPPRATNRGYRAAEWQLDQPSWSGRLRITAKGQMAYIKLEDRTSGELFAQAPVDQFPGTAVESVTDSSRYFVIRIEDGNGRRAFIGIGFGDRGDAFDFNVALQDHFKWVKQQCEFAKQAQNPDQGPKLDLGFKEGQTIKLNIANMKKKEGAAGNPRVRPASTGGLSLLPPPPGGKTSTLIPPPGEQLAVGGSLVQPAVAPSSGGAPVPWPQPNPATADIWGDFTKSTGSTSSQTQPGTGWVQF

SEQ ID NO: 55147 - protein, 263 aa, Homo sapiens; identical to SEQ ID NO: 55146

SEQ ID NO: 55148 - protein, 273 aa, Homo sapiens
MEESGYESVLCVKPDVHVYRIPPRATNRGYRAAEWQLDQPSWSGRLRITAKGQMAYIKLEDRTSGELFAQAPVDQFPGTAVESVTDSSRYFVIRIEDGNGRRAFIGIGFGDRGDAFDFNVALQDHFKWVKQQCEFAKQAQNPDQGPKLDLGFKEGQTIKLNIANMKKKEGAAGNPRVRPASTGGLSLLPPPPGGKTSTLIPPPGEQLAVGGSLVQPAVAPSSDQLPARPSQAQAGSSSDLSTVFPHVTSGKALPHLGQRKEDEALLSWPVFGA

SEQ ID NO: 55149 - protein, 237 aa, Homo sapiens
MEESGAAEWQLDQPSWSGRLRITAKGQMAYIKLEDRTSGELFAQAPVDQFPGTAVESVTDSSRYFVIRIEDGNGRRAFIGIGFGDRGDAFDFNVALQDHFKWVKQQCEFAKQAQNPDQGPKLDLGFKEGQTIKLNIANMKKKEGAAGNPRVRPASTGGLSLLPPPPGGKTSTLIPPPGEQLAVGGSLVQPAVAPSSGGAPVPWPQPNPATADIWGDFTKSTGSTSSQTQPGTGWVQF

SEQ ID NO: 55150 - protein, 263 aa, Homo sapiens; identical to SEQ ID NO: 55146

SEQ ID NO: 55151 - protein, 321 aa, Homo sapiens
MSEQSKDLSDPNFAAEAPNSEVHSSPGVSEGVPPSATLAEPQSPPLGPTAAPQAAPPPQAPNDEGDPKALQQAAEEGRAHQAPSAAQPGPAPPAPAQLVQKAHELMWYVLVKDQKKMIIWFPDMVKDVIGSYKKWCRSILRRTSLILARVFGLHLRLTSLHTMEFALVKALEPEELDRVALSNRMPMTGLLLMILSLIYVKGRGARESAVWNVLRILGLRPWKKHSTFGDVRKLITEEFVQMNYLKYQRVPYVEPPEYEFFWGSRASREITKMQIMEFLARVFKKDPQAWPSRYREALEEARALREANPTAHYPRSSVSED

SEQ ID NO: 55152 - protein, 304 aa, Homo sapiens
MLQKPRNRGRSGGQAERDRDWSHSGNPGASRAGEDARVLRDGFAEEAPSTSRGPGGSQGSQGPSPQGARRAQAAPAVGPRSQKQLELKVSELVQFLLIKDQKKIPIKRADILKHVIGDYKDIFPDLFKRAAERLQYVFGYKLVELEPKSNTYILINTLEPVEEDAEMRGDQGTPTTGLLMIVLGLIFMKGNTIKETEAWDFLRRLGVYPTKKHLIFGDPKKLITEDFVRQRYLEYRRIPHTDPVDYEFQWGPRTNLETSKMKVLKFVAKVHNQDPKDWPAQYCEALADEENRARPQPSGPAPSS

SEQ ID NO: 55153 - protein, 221 aa, Homo sapiens
MALALAALAAVEPACGSRYQQLQNEEESGEPEQAAGDAPPPYSSISAESAAYFDYKDESGFPKPPSYNVATTLPSYDEAERTKAEATIPLVPGRDEDFVGRDDFDDADQLRIGNDGIFMLTFFMAFLFNWIGFFLSFCLTTSAAGRYGAISGFGLSLIKWILIVRFSTYFPGYFDGQYWLWWVFLVLGFLLFLRGFINYAKVRKMPETFSNLPRTRVLFIY

SEQ ID NO: 55154 - protein, 153 aa, Homo sapiens
MALALAALAAVEPACGSRYQQLQNEEESGEPEQAAGDAPPPYSSISAESAAYFDYKDESGFPKPPSYNVATTLPSCFYDISHLIFFIFYLRNMKKKYTKMVKLLHKSAPAQSDSCKCPFICCVCISRISIGSRSGYQYIMHRSVGCLKAKQEN

SEQ ID NO: 55155 - protein, 336 aa, Homo sapiens
MARRRSQRVCASGPSMLNSARGAPELLRGTATNAEVSAAAAGATGSEELPPGDRGCRNGGGRGPAATTSSTGVAVGAEHGEDSLSRKPDPEPGRMDHHQPGTGRYQVLLNEEDNSESSAIEQPPTSNPAPQIVQAASSAPALETDSSPPPYSSITVEVPTTSDTEVYGEFYPVPPPYSVATSLPTYDEAEKAKAAAMAAAAAETSQRIQEEECPPRDDFSDADQLRVGNDGIFMLAFFMAFIFNWLGFCLSFCITNTIAGRYGAICGFGLSLIKWILIVRFSDYFTGYFNGQYWLWWIFLVLGLLLFFRGFVNYLKVRNMSESMAAAHRTRYFFLL

SEQ ID NO: 55156 - protein, 534 aa, Homo sapiens
MAQLGKLLKEQKYDRQLRLWGDHGQEALESAHVCLINATATGTEILKNLVLPGIGSFTIIDGNQVSGEDAGNNFFLQRSSIGKNRAEAAMEFLQELNSDVSGSFVEESPENLLDNDPSFFCRFTVVVATQLPESTSLRLADVLWNSQIPLLICRTYGLVGYMRIIIKEHPVIESHPDNALEDLRLDKPFPELREHFQSYDLDHMEKKDHSHTPWIVIIAKYLAQWYSETNGRIPKTYKEKEDFRDLIRQGILKNENGAPEDEENFEEAIKNVNTALNTTQIPSSIEDIFNDDRCINITKQTPSFWILARALKEFVAKEGQGNLPVRGTIPDMIADSGKYIKLQNVYREKAKKDAAAVGNHVAKLLQSIGQAPESISEKELKLLCSNSAFLRVVRCRSLAEEYGLDTINKDEIISSMDNPDNEIVLYLMLRAVDRFHKQQGRYPGVSNYQVEEDIGKLKSCLTGFLQEYGLSVMVKDDYVHEFCRYGAAEPHTIAAFLGGAAAQEVIKIITKQFVIFNNTYIYSGMSQTSATFQL

SEQ ID NO: 55157 - protein, 528 aa, Homo sapiens
MDAQQTKTNEARLWGDHGQEALESAHVCLINATATGTEILKNLVLPGIGSFTIIDGNQVSGEDAGNNFFLQRSSIGKNRAEAAMEFLQELNSDVSGSFVEESPENLLDNDPSFFCRFTVVVATQLPESTSLRLADVLWNSQIPLLICRTYGLVGYMRIIIKEHPVIESHPDNALEDLRLDKPFPELREHFQSYDLDHMEKKDHSHTPWIVIIAKYLAQWYSETNGRIPKTYKEKEDFRDLIRQGILKNENGAPEDEENFEEAIKNVNTALNTTQIPSSIEDIFNDDRCINITKQTPSFWILARALKEFVAKEGQGNLPVRGTIPDMIADSGKYIKLQNVYREKAKKDAAAVGNHVAKLLQSIGQAPESISEKELKLLCSNSAFLRVVRCRSLAEEYGLDTINKDEIISSMDNPDNEIVLYLMLRAVDRFHKQQGRYPGVSNYQVEEDIGKLKSCLTGFLQEYGLSVMVKDDYVHEFCRYGAAEPHTIAAFLGGAAAQEVIKIITKQFVIFNNTYIYSGMSQTSATFQL

SEQ ID NO: 55158 - protein, 445 aa, Homo sapiens
MEFLQELNSDVSGSFVEESPENLLDNDPSFFCRFTVVVATQLPESTSLRLADVLWNSQIPLLICRTYGLVGYMRIIIKEHPVIESHPDNALEDLRLDKPFPELREHFQSYDLDHMEKKDHSHTPWIVIIAKYLAQWYSETNGRIPKTYKEKEDFRDLIRQGILKNENGAPEDEENFEEAIKNVNTALNTTQIPSSIEDIFNDDRCINITKQTPSFWILARALKEFVAKEGQGNLPVRGTIPDMIADSGKYIKLQNVYREKAKKDAAAVGNHVAKLLQSIGQAPESISEKELKLLCSNSAFLRVVRCRSLAEEYGLDTINKDEIISSMDNPDNEIVLYLMLRAVDRFHKQQGRYPGVSNYQVEEDIGKLKSCLTGFLQEYGLSVMVKDDYVHEFCRYGAAEPHTIAAFLGGAAAQEVIKIITKQFVIFNNTYIYSGMSQTSATFQL

SEQ ID NO: 55159 - protein, 966 aa, Homo sapiens
MEPQVTLNVTFKNEIQSFLVSDPENTTWADIEAMVKVSFDLNTIQIKYLDEENEEVSINSQGEYEEALKMAVKQGNQLQMQVHEGHHVVDEAPPPVVGAKRLAARAGKKPLAHYSSLVRVLGSDMKTPEDPAVQSFPLVPCDTDQPQDKPPDWFTSYLETFREQVVNETVEKLEQKLHEKLVLQNPSLGSCPSEVSMPTSEETLFLPENQFSWHIACNNCQRRIVGVRYQCSLCPSYNICEDCEAGPYGHDTNHVLLKLRRPVVGSSEPFCHSKYSTPRLPAALEQVRLQKQVDKNFLKAEKQRLRAEKKQRKAEVKELKKQLKLHRKIHLWNSIHGLQSPKSPLGRPESLLQSNTLMLPLQPCTSVMPMLSAAFVDENLPDGTHLQPGTKFIKHWRMKNTGNVKWSADTKLKFMWGNLTLASTEKKDVLVPCLKAGHVGVVSVEFIAPALEGTYTSHWRLSHKGQQFGPRVWCSIIVDPFPSEESPDNIEKGMISSSKTDDLTCQQEETFLLAKEERQLGEVTEQTEGTAACIPQKAKNVASERELYIPSVDLLTAQDLLSFELLDINIVQELERVPHNTPVDVTPCMSPLPHDSPLIEKPGLGQIEEENEGAGFKALPDSMVSVKRKAENIASVEEAEEDLSGTQFVCETVIRSLTLDAAPDHNPPCRQKSLQMTFALPEGPLGNEKEEIIHIAEEEAVMEEEEDEEDEEEEDELKDEVQSQSSASSEDYIIILPECFDTSRPLGDSMYSSALSQPGLERGAEGKPGVEAGQEPAEAGERLPGGENQPQEHSISDILTTSQTLETVPLIPEVVELPPSLPRSSPCVHHHGSPGVDLPVTIPEVSSVPDQIRGEPRGSSGLVNSRQKSYDHSRHHHGSSIAGGLVKGALSVAASAYKALFAGPPVTAQPIISEDQTAALMAHLFEMGFCDRQLNLRLLKKHNYNILQVVTELLQLNNNDWYSQRY

SEQ ID NO: 55160 - protein, 937 aa, Homo sapiens
MEPQVTLNVTFKNEIQSFLVSDPENTTWADIEAMVKVSFDLNTIQIKYLDEENEEVKIVLLGEYEEALKMAVKQGNQLQMQVHEGHHVVDEAPPPVVGAKRLAARAGKKPLAHYSSLVRVLGSDMKTPEDPAVQSFPLVPCDTDQPQDKPPDWFTSYLETFREQVVNETVEKLEQKLHEKLVLQNPSLGSCPSEVSMPTSEETLFLPENQFSWHIACNNCQRRIVGVRYQCSLCPSYNICEDCEAGPYGHDTNHVLLKLRRPVVGSSEPFCHSKYSTPRLPAALEQVRLQKQVDKNFLKAEKQRLRAEKKQRKAEVKELKKQLKLHRKIHLWNSIHGLQSPKSPLGRPESLLQSNTLMLPLQPCTSVMPMLSAAFVDENLPDGTHLQPGTKFIKHWRMKNTGNVKWSADTKLKFMWGNLTLASTEKKDVLVPCLKAGHVGVVSVEFIAPALEGTYTSHWRLSHKGQQFGPRVWCSIIVDPFPSEESPDNIEKGMISSSKTDDLTCQQEETFLLAKEERQLGEVTEQTEGTAACIPQKAKNVASERELYIPSVDLLTAQDLLSFELLDINIVQELERVPHNTPVDVTPCMSPLPHDSPLIEKPGLGQIEEENEGAGFKALPDSMVSVKRKAENIASVEEAEEDLSGTQFVCETVIRSLTLDAAPDHNPPCRQKSLQMTFALPEGPLGNEKEEIIHIAEEEAVMEEEEDEEDEEEEDELKDEVQSQSSASSEDYIIILPECFDTSRPLGDSMYSSALSQPGLERGAEGKPGVEAGQEPAEAGERLPGGENQPQEHSISDILTTSQTLETVPLIPEVVELPPSLPRSSPCVHHHGSPGVDLPVTIPEVSSVPDQIRGEPRGSSGLVNSRQKSYDHSRHHHGSSIAGGLVKGALSVAASAYKALFAGPPVTAQGLWGLLSFLHLAKKCFFLKAPSEAFSWF

SEQ ID NO: 55161 - protein, 966 aa, Homo sapiens
MEPQVTLNVTFKNEIQSFLVSDPENTTWADIEAMVKVSFDLNTIQIKYLDEENEEVKIVLLGEYEEALKMAVKQGNQLQMQVHEGHHVVDEAPPPVVGAKRLAARAGKKPLAHYSSLVRVLGSDMKTPEDPAVQSFPLVPCDTDQPQDKPPDWFTSYLETFREQVVNETVEKLEQKLHEKLVLQNPSLGSCPSEVSMPTSEETLFLPENQFSWHIACNNCQRRIVGVRYQCSLCPSYNICEDCEAGPYGHDTNHVLLKLRRPVVGSSEPFCHSKYSTPRLPAALEQVRLQKQVDKNFLKAEKQRLRAEKKQRKAEVKELKKQLKLHRKIHLWNSIHGLQSPKSPLGRPESLLQSNTLMLPLQPCTSVMPMLSAAFVDENLPDGTHLQPGTKFIKHWRMKNTGNVKWSADTKLKFMWGNLTLASTEKKDVLVPCLKAGHVGVVSVEFIAPALEGTYTSHWRLSHKGQQFGPRVWCSIIVDPFPSEESPDNIEKGMISSSKTDDLTCQQEETFLLAKEERQLGEVTEQTEGTAACIPQKAKNVASERELYIPSVDLLTAQDLLSFELLDINIVQELERVPHNTPVDVTPCMSPLPHDSPLIEKPGLGQIEEENEGAGFKALPDSMVSVKRKAENIASVEEAEEDLSGTQFVCETVIRSLTLDAAPDHNPPCRQKSLQMTFALPEGPLGNEKEEIIHIAEEEAVMEEEEDEEDEEEEDELKDEVQSQSSASSEDYIIILPECFDTSRPLGDSMYSSALSQPGLERGAEGKPGVEAGQEPAEAGERLPGGENQPQEHSISDILTTSQTLETVPLIPEVVELPPSLPRSSPCVHHHGSPGVDLPVTIPEVSSVPDQIRGEPRGSSGLVNSRQKSYDHSRHHHGSSIAGGLVKGALSVAASAYKALFAGPPVTAQPIISEDQTAALMAHLFEMGFCDRQLNLRLLKKHNYNILQVVTELLQLNNNDWYSQRY

SEQ ID NO: 55162 - protein, 966 aa, Homo sapiens; identical to SEQ ID NO: 55159

SEQ ID NO: 55163 - protein, 217 aa, Homo sapiens
MYSSALSQPGLERGAEGKPGVEAGQEPAEAGERLPGGENQPQEHSISDILTTSQTLETVPLIPEVVELPPSLPRSSPCVHHHGSPGVDLPVTIPEVSSVPDQIRGEPRGSSGLVNSRQKSYDHSRHHHGSSIAGGLVKGALSVAASAYKALFAGPPVTAQPIISEDQTAALMAHLFEMGFCDRQLNLRLLKKHNYNILQVVTELLQLNNNDWYSQRY

SEQ ID NO: 55164 - protein, 837 aa, Homo sapiens
MEPQVTLNVTFKNEIQSFLVSDPENTTWADIEAMVSINSQGEYEEALKMAVKQGNQLQMQVHEGHHVVDEAPPPVVGAKRLAARAGKKPLAHYSSLVRVLGSDMKTPEDPAVQSFPLVPCDTDQPQDKPPDWFTSYLETFREQVVNETVEKLEQKLHEKLVLQNPSLGSCPSEVSMPTSEETLFLPENQFSWHIACNNCQRRIVGVRYQCSLCPSYNICEDCEAGPYGHDTNHVLLKLRRPVVGSSEPFCHSKYSTPRLPAALEQVRLQKQVDKNFLKAEKQRLRAEKKQRKAEVKELKKQLKLHRKIHLWNSIHGLQSPKSPLGRPESLLQSNTLMLPLQPCTSVMPMLSAAFVDENLPDGTHLQPGTKFIKHWRMKNTGNVKWSADTKLKFMWGNLTLASTEKKDVLVPCLKAGHVGVVSVEFIAPALEGTYTSHWRLSHKGQQFGPRVWCSIIVDPFPSEESPDNIEKGMISSSKTDDLTCQQEETFLLAKEERQLGEVTEQTEGTAACIPQKAKNVASERELYIPSVDLLTAQDLLSFELLDINIVQELERVPHNTPVDVTPCMSPLPHDSPLIEKPGLGQIEEENEGAGFKALPDSMVSVKRKAENIASVEEAEEDLSGTQFVCETVIRSLTLDAAPDHNPPCRQKSLQMTFALPEGPLGNEKEEIIHIAEEEAVMEEEEDEEDEEEEDELKDEVQSQSSASSEDYIIILPECFDTSRPLGDSMYSSALSQPGLERGAEGKPGVEAGQEPAEAGERLPGGENQPQEHSISDILTTSQTLETVPLIPEVVELPPSLPRSSPCVHHHGSPGVDLPVTIPEVSSVPDQIRGANNF

SEQ ID NO: 55165 - protein, 753 aa, Homo sapiens
MPMDLILVVWFCVCTARTVVGFGMDPDLQMDIVTELDLVNTTLGVAQVSGMHNASKAFLFQDIEREIHAAPHVSEKLIQLFRNKSEFTILATVQQKPSTSGVILSIRELEHRIYERVIDPPDTNLPPGINLWLGQRNQKHGLFKGIIQDGKIIFMPNGYITQCPNLNHTCPTCSDFLSLVQGIMDLQELLAKMTAKLNYAETRLSQLENCHCEKTCQVSGLLYRDQDSWVDGDHCRNCTCKSGAVECRRMSCPPLNCSPDSLPVHIAGQCCKVCRPKCIYGGKVLAEGQRILTKSCRECRGGVLVKITEMCPPLNCSEKDHILPENQCCRVCRGHNFCAEGPKCGENSECKNWNTKATCECKSGYISVQGDSAYCEDIDECAAKMHYCHANTVCVNLPGLYRCDCVPGYIRVDDFSCTEHDECGSGQHNCDENAICTNTVQGHSCTCKPGYVGNGTICRAFCEEGCRYGGTCVAPNKCVCPSGFTGSHCEKDIDECSEGIIECHNHSRCVNLPGWYHCECRSGFHDDGTYSLSGESCIDIDECALRTHTCWNDSACINLAGGFDCLCPSGPSCSGDCPHEGGLKHNGQVWTLKEDRCSVCSCKDGKIFCRRTACDCQNPSADLFCCPECDTRVTSQCLDQNGHKLYRSGDNWTHSCQQCRCLEGEVDCWPLTCPNLSCEYTAILEGECCPRCVSDPCLADNITYDIRKTCLDSYGVSRLSGSVWTMAGSPCTTCKCKNGRVCCSVDFECLQNN

SEQ ID NO: 55166 - protein, 810 aa, Homo sapiens
MPMDLILVVWFCVCTARTVVGFGMDPDLQMDIVTELDLVNTTLGVAQVSGMHNASKAFLFQDIEREIHAAPHVSEKLIQLFRNKSEFTILATVQQKPSTSGVILSIRELEHSYFELESSGLRDEIRYHYIHNGKPRTEALPYRMADGQWHKVALSVSASHLLLHVDCNRIYERVIDPPDTNLPPGINLWLGQRNQKHGLFKGIIQDGKIIFMPNGYITQCPNLNHTCPTCSDFLSLVQGIMDLQELLAKMTAKLNYAETRLSQLENCHCEKTCQVSGLLYRDQDSWVDGDHCRNCTCKSGAVECRRMSCPPLNCSPDSLPVHIAGQCCKVCRPKCIYGGKVLAEGQRILTKSCRECRGGVLVKITEMCPPLNCSEKDHILPENQCCRVCRGHNFCAEGPKCGENSECKNWNTKATCECKSGYISVQGDSAYCEDIDECAAKMHYCHANTVCVNLPGLYRCDCVPGYIRVDDFSCTEHDECGSGQHNCDENAICTNTVQGHSCTCKPGYVGNGTICRAFCEEGCRYGGTCVAPNKCVCPSGFTGSHCEKDIDECSEGIIECHNHSRCVNLPGWYHCECRSGFHDDGTYSLSGESCIDIDECALRTHTCWNDSACINLAGGFDCLCPSGPSCSGDCPHEGGLKHNGQVWTLKEDRCSVCSCKDGKIFCRRTACDCQNPSADLFCCPECDTRVTSQCLDQNGHKLYRSGDNWTHSCQQCRCLEGEVDCWPLTCPNLSCEYTAILEGECCPRCVSDPCLADNITYDIRKTCLDSYGVSRLSGSVWTMAGSPCTTCKCKNGRVCCSVDFECLQNN

SEQ ID NO: 55167 - protein, 763 aa, Homo sapiens
MPMDLILVVWFCVCTARTVVGFGMDPDLQMDIVTELDLVNTTLGVAQVSGMHNASKAFLFQDIEREIHAAPHVSEKLIQLFRNKSEFTILATVQQKPSTSGVILSIRELEHSYFELESSGLRDEIRYHYIHNGKPRTEALPYRMADGQWHKVALSVSASHLLLHVDCNRIYERVIDPPDTNLPPGINLWLGQRNQKHGLFKGIIQDGKIIFMPNGYITQCPNLNHTCPTCSDFLSLVQGIMDLQELLAKMTAKLNYAETRLSQLENCHCEKTCQVSGLLYRDQDSWVDGDHCRNCTCKSGAVECRRMSCPPLNCSPDSLPVHIAGQCCKVCRPKCIYGGKVLAEGQRILTKSCRECRGGVLVKITEMCPPLNCSEKDHILPENQCCRVCRGHNFCAEGPKCGENSECKNWNTKATCECKSGYISVQGDSAYCEDIDECAAKMHYCHANTVCVNLPGLYRCDCVPGYIRVDDFSCTEHDECGSGQHNCDENAICTNTVQGHSCTCKPGYVGNGTICRAFCEEGCRYGGTCVAPNKCVCPSGFTGSHCEKDIDECALRTHTCWNDSACINLAGGFDCLCPSGPSCSGDCPHEGGLKHNGQVWTLKEDRCSVCSCKDGKIFCRRTACDCQNPSADLFCCPECDTRVTSQCLDQNGHKLYRSGDNWTHSCQQCRCLEGEVDCWPLTCPNLSCEYTAILEGECCPRCVSDPCLADNITYDIRKTCLDSYGVSRLSGSVWTMAGSPCTTCKCKNGRVCCSVDFECLQNN

SEQ ID NO: 55168 - protein, 839 aa, Homo sapiens
MSIRRLLILILKIGRRWTELIRTMESRVLLRTFCLIFGLGAVWGLGVDPSLQIDVLTELELGESTTGVRQVPGLHNGTKAFLFQDTPRSIKASTATAEQFFQKLRNKHEFTILVTLKQTHLNSGVILSIHHLDHRYLELESSGHRNEVRLHYRSGSHRPHTEVFPYILADDKWHKLSLAISASHLILHIDCNKIYERVVEKPSTDLPLGTTFWLGQRNNAHGYFKGIMQDVQLLVMPQGFIAQCPDLNRTCPTCNDFHGLVQKIMELQDILAKTSAKLSRAEQRMNRLDQCYCERTCTMKGTTYREFESWIDGCKNCTCLNGTIQCETLICPNPDCPLKSALAYVDGKCCKECKSICQFQGRTYFEGERNTVYSSSGVCVLYECKDQTMKLVESSGCPALDCPESHQITLSHSCCKVCKGYDFCSERHNCMENSICRNLNDRAVCSCRDGFRALREDNAYCEDIDECAEGRHYCRENTMCVNTPGSFMCICKTGYIRIDDYSCTEHDECITNQHNCDENALCFNTVGGHNCVCKPGYTGNGTTCKAFCKDGCRNGGACIAANVCACPQGFTGPSCETDIDECSDGFVQCDSRANCINLPGWYHCECRDGYHDNGMFSPSGESCEDIDECGTGRHSCANDTICFNLDGGYDCRCPHGKNCTGDCIHDGKVKHNGQIWVLENDRCSVCSCQNGFVMCRRMVCDCENPTVDLFCCPECDPRLSSQCLHQNGETLYNSGDTWVQNCQQCRCLQGEVDCWPLPCPDVECEFSILPENECCPRCVTDPCQADTIRNDITKTCLDEMNVVRFTGSSWIKHGTECTLCQCKNGHICCSVDPQCLQEL

SEQ ID NO: 55169 - protein, 815 aa, Homo sapiens
METGLGAPLFKAWLLISVWGLGVDPSLQIDVLTELELGESTTGVRQVPGLHNGTKAFLFQDTPRSIKASTATAEQFFQKLRNKHEFTILVTLKQTHLNSGVILSIHHLDHRYLELESSGHRNEVRLHYRSGSHRPHTEVFPYILADDKWHKLSLAISASHLILHIDCNKIYERVVEKPSTDLPLGTTFWLGQRNNAHGYFKGIMQDVQLLVMPQGFIAQCPDLNRTCPTCNDFHGLVQKIMELQDILAKTSAKLSRAEQRMNRLDQCYCERTCTMKGTTYREFESWIDGCKNCTCLNGTIQCETLICPNPDCPLKSALAYVDGKCCKECKSICQFQGRTYFEGERNTVYSSSGVCVLYECKDQTMKLVESSGCPALDCPESHQITLSHSCCKVCKGYDFCSERHNCMENSICRNLNDRAVCSCRDGFRALREDNAYCEDIDECAEGRHYCRENTMCVNTPGSFMCICKTGYIRIDDYSCTEHDECITNQHNCDENALCFNTVGGHNCVCKPGYTGNGTTCKAFCKDGCRNGGACIAANVCACPQGFTGPSCETDIDECSDGFVQCDSRANCINLPGWYHCECRDGYHDNGMFSPSGESCEDIDECGTGRHSCANDTICFNLDGGYDCRCPHGKNCTGDCIHDGKVKHNGQIWVLENDRCSVCSCQNGFVMCRRMVCDCENPTVDLFCCPECDPRLSSQCLHQNGETLYNSGDTWVQNCQQCRCLQGEVDCWPLPCPDVECEFSILPENECCPRCVTDPCQADTIRNDITKTCLDEMNVVRFTGSSWIKHGTECTLCQCKNGHICCSVDPQCLQEL

SEQ ID NO: 55170 - protein, 816 aa, Homo sapiens
MESRVLLRTFCLIFGLGAVWGLGVDPSLQIDVLTELELGESTTGVRQVPGLHNGTKAFLFQDTPRSIKASTATAEQFFQKLRNKHEFTILVTLKQTHLNSGVILSIHHLDHRYLELESSGHRNEVRLHYRSGSHRPHTEVFPYILADDKWHKLSLAISASHLILHIDCNKIYERVVEKPSTDLPLGTTFWLGQRNNAHGYFKGIMQDVQLLVMPQGFIAQCPDLNRTCPTCNDFHGLVQKIMELQDILAKTSAKLSRAEQRMNRLDQCYCERTCTMKGTTYREFESWIDGCKNCTCLNGTIQCETLICPNPDCPLKSALAYVDGKCCKECKSICQFQGRTYFEGERNTVYSSSGVCVLYECKDQTMKLVESSGCPALDCPESHQITLSHSCCKVCKGYDFCSERHNCMENSICRNLNDRAVCSCRDGFRALREDNAYCEDIDECAEGRHYCRENTMCVNTPGSFMCICKTGYIRIDDYSCTEHDECITNQHNCDENALCFNTVGGHNCVCKPGYTGNGTTCKAFCKDGCRNGGACIAANVCACPQGFTGPSCETDIDECSDGFVQCDSRANCINLPGWYHCECRDGYHDNGMFSPSGESCEDIDECGTGRHSCANDTICFNLDGGYDCRCPHGKNCTGDCIHDGKVKHNGQIWVLENDRCSVCSCQNGFVMCRRMVCDCENPTVDLFCCPECDPRLSSQCLHQNGETLYNSGDTWVQNCQQCRCLQGEVDCWPLPCPDVECEFSILPENECCPRCVTDPCQADTIRNDITKTCLDEMNVVRFTGSSWIKHGTECTLCQCKNGHICCSVDPQCLQEL

SEQ ID NO: 55171 - protein, 866 aa, Homo sapiens
MGFPPLLKGQASATRSSLASCSWVVFFLSCLSRHAPEIEGGRRWTELIRTMESRVLLRTFCLIFGLGAVWGLGVDPSLQIDVLTELELGESTTGVRQVPGLHNGTKAFLFQDTPRSIKASTATAEQFFQKLRNKHEFTILVTLKQTHLNSGVILSIHHLDHRYLELESSGHRNEVRLHYRSGSHRPHTEVFPYILADDKWHKLSLAISASHLILHIDCNKIYERVVEKPSTDLPLGTTFWLGQRNNAHGYFKGIMQDVQLLVMPQGFIAQCPDLNRTCPTCNDFHGLVQKIMELQDILAKTSAKLSRAEQRMNRLDQCYCERTCTMKGTTYREFESWIDGCKNCTCLNGTIQCETLICPNPDCPLKSALAYVDGKCCKECKSICQFQGRTYFEGERNTVYSSSGVCVLYECKDQTMKLVESSGCPALDCPESHQITLSHSCCKVCKGYDFCSERHNCMENSICRNLNDRAVCSCRDGFRALREDNAYCEDIDECAEGRHYCRENTMCVNTPGSFMCICKTGYIRIDDYSCTEHDECITNQHNCDENALCFNTVGGHNCVCKPGYTGNGTTCKAFCKDGCRNGGACIAANVCACPQGFTGPSCETDIDECSDGFVQCDSRANCINLPGWYHCECRDGYHDNGMFSPSGESCEDIDECGTGRHSCANDTICFNLDGGYDCRCPHGKNCTGDCIHDGKVKHNGQIWVLENDRCSVCSCQNGFVMCRRMVCDCENPTVDLFCCPECDPRLSSQCLHQNGETLYNSGDTWVQNCQQCRCLQGEVDCWPLPCPDVECEFSILPENECCPRCVTDPCQADTIRNDITKTCLDEMNVVRFTGSSWIKHGTECTLCQCKNGHICCSVDPQCLQEL

SEQ ID NO: 55172 - protein, 816 aa, Homo sapiens; identical to SEQ ID NO: 55170

SEQ ID NO: 55173 - protein, 577 aa, Homo sapiens
METGLGAPLFKAWLLISVWGLGVDPSLQIDVLTELELGESTTGVRQVPGLHNGTKAFLFQDTPRSIKASTATAEQFFQKLRNKHEFTILVTLKQTHLNSGVILSIHHLDHRYLELESSGHRNEVRLHYRSGSHRPHTEVFPYILADDKWHKLSLAISASHLILHIDCNKIYERVVEKPSTDLPLGTTFWLGQRNNAHGYFKGIMQDVQLLVMPQGFIAQCPDLNRTCPTCNDFHGLVQKIMELQDILAKTSAKLSRAEQRMNRLDQCYCERTCTMKGTTYREFESWIDGCKNCTCLNGTIQCETLICPNPDCPLKSALAYVDGKCCKECKSICQFQGRTYFEGERNTVYSSSGVCVLYECKDQTMKLVESSGCPALDCPESHQITLSHSCCKVCKGYDFCSERHNCMENSICRNLNDRAVCSCRDGFRALREDNAYCEDIDECAEGRHYCRENTMCVNTPGSFMCICKTGYIRIDDYSCTEHDECITNQHNCDENALCFNTVGGHNCVCKPGYTGNGTTCKAFCKDGCRNGGACIAANVCACPQGFTGPSCETDIDECSDGFVQCDSRANCICLVPL

SEQ ID NO: 55174 - protein, 110 aa, Homo sapiens
METGLGAPLFKAWLLISVWGLGVDPSLQIDVLTELELGESTTGVRQVPGLHNGTKAFLFQDTPRSIKASTATAEQFFQKLRNKHEFTILVTLKQTHLNSGVILSIHHLDH

SEQ ID NO: 55175 - protein, 815 aa, Homo sapiens; identical to SEQ ID NO: 55169

SEQ ID NO: 55176 - protein, 22 aa, Homo sapiens
MESRVLLRTFCLIFGLGAVWGL

SEQ ID NO: 55177 - protein, 321 aa, Homo sapiens
MESRVLLRTFCLIFGLGAVWGLGVDPSLQIDVLTELELGESTTGVRQVPGLHNGTKAFLFQDTPRSIKASTATAEQFFQKLRNKHEFTILVTLKQTHLNSGVILSIHHLDHRYLELESSGHRNEVRLHYRSGSHRPHTEVFPYILADDKWHKLSLAISASHLILHIDCNKIYERVVEKPSTDLPLGTTFWLGQRNNAHGYFKGIMQDVQLLVMPQGFIAQCPDLNRTCPTCNDFHGLVQKIMELQDILAKTSAKLSRAEQRMNRLDQCYCERTCTMKGTTYREFESWIDGCKNCTCLNGTIQCETLICPNPDCPLKSALAY

SEQ ID NO: 55178 - protein, 1461 aa, Homo sapiens
MAAERGARRLLSTPSFWLYCLLLLGRRAPGAAAARSGSAPQSPGASIRTFTPFYFLVEPVDTLSVRGSSVILNCSAYSEPSPKIEWKKDGTFLNLVSDDRRQLLPDGSLFISNVVHSKHNKPDEGYYQCVATVESLGTIISRTAKLIVAGLPRFTSQPEPSSVYAGNNAILNCEVNADLVPFVRWEQNRQPLLLDDRVIKLPSGMLVISNATEGDGGLYRCVVESGGPPKYSDEVELKVLPDPEVISDLVFLKQPSPLVRVIGQDVVLPCVASGLPTPTIKWMKNEEALDTESSERLVLLAGGSLEISDVTEDDAGTYFCIADNGNETIEAQAELTVQAQPEFLKQPTNIYAHESMDIVFECEVTGKPTPTVKWVKNGDMVIPSDYFKIVKEHNLQVLGLVKSDEGFYQCIAENDVGNAQAGAQLIILEHAPATTGPLPSAPRDVVASLVSTRFIKLTWRTPASDPHGDNLTYSVFYTKEGIARERVENTSHPGEMQVTIQNLMPATVYIFRVMAQNKHGSGESSAPLRVETQPEVQLPGPAPNLRAYAASPTSITVTWETPVSGNGEIQNYKLYYMEKGTDKEQDVDVSSHSYTINGLKKYTEYSFRVVAYNKHGPGVSTPDVAVRTLSDVPSAAPQNLSLEVRNSKSIMIHWQPPAPATQNGQITGYKIRYRKASRKSDVTETLVSGTQLSQLIEGLDRGTEYNFRVAALTINGTGPATDWLSAETFESDLDETRVPEVPSSLHVRPLVTSIVVSWTPPENQNIVVRGYAIGYGIGSPHAQTIKVDYKQRYYTIENLDPSSHYVITLKAFNNVGEGIPLYESAVTRPHTDTSEVDLFVINAPYTPVPDPTPMMPPVGVQASILSHDTIRITWADNSLPKHQKITDSRYYTVRWKTNIPANTKYKNANATTLSYLVTGLKPNTLYEFSVMVTKGRRSSTWSMTAHGTTFELVPTSPPKDVTVVSKEGKPKTIIVNWQPPSEANGKITGYIIYYSTDVNAEIHDWVIEPVVGNRLTHQIQELTLDTPYYFKIQARNSKGMGPMSEAVQFRTPKADSSDKMPNDQASGSGGKGSRLPDLGSDYKPPMSGSNSPHGSPTSPLDSNMLLVIIVSVGVITIVVVVIIAVFCTRRTTSHQKKKRAACKSVNGSHKYKGNSKDVKPPDLWIHHERLELKPIDKSPDPNPIMTDTPIPRNSQDITPVDNSMDSNIHQRRNSYRGHESEDSMSTLAGRRGMRPKMMMPFDSQPPQPVISAHPIHSLDNPHHHFHSSSLASPARSHLYHPGSPWPIGTSMSLSDRANSTESVRNTPSTDTMPASSSQTCCTDHQDPEGATSSSYLASSQEEDSGQSLPTAHVRPSHPLKSFAVPAIPPPGPPTYDPALPSTPLLSQQALNHHIHSVKTASIGTLGRSRPPMPVVVPSAPEVQETTRMLEDSESSYEPDELTKEMAHLEGLMKDLNAITTA

SEQ ID NO: 55179 - protein, 1461 aa, Homo sapiens; identical to SEQ ID NO: 55178

SEQ ID NO: 55180 - protein, 1172 aa, Homo sapiens
MKNEEALDTESSERLVLLAGGSLEISDVTEDDAGTYFCIADNGNETIEAQAELTVQAQPEFLKQPTNIYAHESMDIVFECEVTGKPTPTVKWVKNGDMVIPSDYFKIVKEHNLQVLGLVKSDEGFYQCIAENDVGNAQAGAQLIILEHDVAIPTLPPTSLTSATTDHLAPATTGPLPSAPRDVVASLVSTRFIKLTWRTPASDPHGDNLTYSVFYTKEGIARERVENTSHPGEMQVTIQNLMPATVYIFRVMAQNKHGSGESSAPLRVETQPEVQLPGPAPNLRAYAASPTSITVTWETPVSGNGEIQNYKLYYMEKGTDKEQDVDVSSHSYTINGLKKYTEYSFRVVAYNKHGPGVSTPDVAVRTLSDVPSAAPQNLSLEVRNSKSIMIHWQPPAPATQNGQITGYKIRYRKASRKSDVTETLVSGTQLSQLIEGLDRGTEYNFRVAALTINGTGPATDWLSAETFESDLDETRVPEVPSSLHVRPLVTSIVVSWTPPENQNIVVRGYAIGYGIGSPHAQTIKVDYKQRYYTIENLDPSSHYVITLKAFNNVGEGIPLYESAVTRPHTVPDPTPMMPPVGVQASILSHDTIRITWADNSLPKHQKITDSRYYTVRWKTNIPANTKYKNANATTLSYLVTGLKPNTLYEFSVMVTKGRRSSTWSMTAHGTTFELVPTSPPKDVTVVSKEGKPKTIIVNWQPPSEANGKITGYIIYYSTDVNAEIHDWVIEPVVGNRLTHQIQELTLDTPYYFKIQARNSKGMGPMSEAVQFRTPKASGSGGKGSRLPDLGSDYKPPMSGSNSPHGSPTSPLDSNMLLVIIVSVGVITIVVVVIIAVFCTRRTTSHQKKKRAACKSVNGSHKYKGNSKDVKPPDLWIHHERLELKPIDKSPDPNPIMTDTPIPRNSQDITPVDNSMDSNIHQRRNSYRGHESEDSMSTLAGRRGMRPKMMMPFDSQPPQPVISAHPIHSLDNPHHHFHSSSLASPARSHLYHPGSPWPIGTSMSLSDRANSTESVRNTPSTDTMPASSSQTCCTDHQDPEGATSSSYLASSQEEDSGQSLPTAHVRPSHPLKSFAVPAIPPPGPPTYDPALPSTPLLSQQALNHHIHSVKTASIGTLGRSRPPMPVVVPSAPEVQETTRMLEDSESSYEPDELTKEMAHLEGLMKDLNAITTA

SEQ ID NO: 55181 - protein, 1450 aa, Homo sapiens
MAAERGARRLLSTPSFWLYCLLLLGRRAPGAAAARSGSAPQSPGASIRTFTPFYFLVEPVDTLSVRGSSVILNCSAYSEPSPKIEWKKDGTFLNLVSDDRRQLLPDGSLFISNVVHSKHNKPDEGYYQCVATVESLGTIISRTAKLIVAGLPRFTSQPEPSSVYAGNNAILNCEVNADLVPFVRWEQNRQPLLLDDRVIKLPSGMLVISNATEGDGGLYRCVVESGGPPKYSDEVELKVLPDPEVISDLVFLKQPSPLVRVIGQDVVLPCVASGLPTPTIKWMKNEEALDTESSERLVLLAGGSLEISDVTEDDAGTYFCIADNGNETIEAQAELTVQAQPEFLKQPTNIYAHESMDIVFECEVTGKPTPTVKWVKNGDMVIPSDYFKIVKEHNLQVLGLVKSDEGFYQCIAENDVGNAQAGAQLIILEHAPATTGPLPSAPRDVVASLVSTRFIKLTWRTPASDPHGDNLTYSVFYTKEGIARERVENTSHPGEMQVTIQNLMPATVYIFRVMAQNKHGSGESSAPLRVETQPEVQLPGPAPNLRAYAASPTSITVTWETPVSGNGEIQNYKLYYMEKGTDKEQDVDVSSHSYTINGLKKYTEYSFRVVAYNKHGPGVSTPDVAVRTLSDVPSAAPQNLSLEVRNSKSIMIHWQPPAPATQNGQITGYKIRYRKASRKSDVTETLVSGTQLSQLIEGLDRGTEYNFRVAALTINGTGPATDWLSAETFESDLDETRVPEVPSSLHVRPLVTSIVVSWTPPENQNIVVRGYAIGYGIGSPHAQTIKVDYKQRYYTIENLDPSSHYVITLKAFNNVGEGIPLYESAVTRPHTDTSEVDLFVINAPYTPVPDPTPMMPPVGVQASILSHDTIRITWADNSLPKHQKITDSRYYTVRWKTNIPANTKYKNANATTLSYLVTGLKPNTLYEFSVMVTKGRRSSTWSMTAHGTTFELVPTSPPKDVTVVSKEGKPKTIIVNWQPPSEANGKITGYIIYYSTDVNAEIHDWVIEPVVGNRLTHQIQELTLDTPYYFKIQARNSKGMGPMSEAVQFRTPKASGSGGKGSRLPDLGSDYKPPMSGSNSPHGSPTSPLDSNMLLVIIVSVGVITIVVVVIIAVFCTRRTTSHQKKKRAACKSVNGSHKYKGNSKDVKPPDLWIHHERLELKPIDKSPDPNPIMTDTPIPRNSQDITPVDNSMDSNIHQRRNSYRGHESEDSMSTLAGRRGMRPKMMMPFDSQPPQPVISAHPIHSLDNPHHHFHSSSLASPARSHLYHPGSPWPIGTSMSLSDRANSTESVRNTPSTDTMPASSSQTCCTDHQDPEGATSSSYLASSQEEDSGQSLPTAHVRPSHPLKSFAVPAIPPPGPPTYDPALPSTPLLSQQALNHHIHSVKTASIGTLGRSRPPMPVVVPSAPEVQETTRMLEDSESSYEPDELTKEMAHLEGLMKDLNAITTA

SEQ ID NO: 55182 - protein, 1408 aa, Homo sapiens
MAAERGARRLLSTPSFWLYCLLLLGRRAPGAAAARSGSAPQSPGASIRTFTPFYFLVEPVDTLSVRGSSVILNCSAYSEPSPKIEWKKDGTFLNLVSDDRRQLLPDGSLFISNVVHSKHNKPDEGYYQCVATVESLGTIISRTAKLIVAGLPRFTSQPEPSSVYAGNNAILNCEVNADLVPFVRWEQNRQPLLLDDRVIKLPSGMLVISNATEGDGGLYRCVVESGGPPKYSDEVELKVLPDPEVISDLVFLKQPSPLVRVIGQDVVLPCVASGLPTPTIKWMKNEEALDTESSERLVLLAGGSLEISDVTEDDAGTYFCIADNGNETIEAQAELTVQAQPEFLKQPTNIYAHESMDIVFECEVTGKPTPTVKWVKNGDMVIPSDYFKIVKEHNLQVLGLVKSDEGFYQCIAENDVGNAQAGAQLIILEHAPATTGPLPSAPRDVVASLVSTRFIKLTWRTPASDPHGDNLTYSVFYTKEGIARERVENTSHPGEMQVTIQNLMPATVYIFRVMAQNKHGSGESSAPLRVETQPEVQLPGPAPNLRAYAASPTSITVTWETPVSGNGEIQNYKLYYMEKGTDKEQDVDVSSHSYTINGLKKYTEYSFRVVAYNKHGPGVSTPDVAVRTLSDVPSAAPQNLSLEVRNSKSIMIHWQPPAPATQNGQITGYKIRYRKASRKSDVTETLVSGTQLSQLIEGLDRGTEYNFRVAALTINGTGPATDWLSAETFESDLDETRVPEVPSSLHVRPLVTSIVVSWTPPENQNIVVRGYAIGYGIGSPHAQTIKVDYKQRYYTIENLDPSSHYVITLKAFNNVGEGIPLYESAVTRPHTDTSEVDLFVINAPYTPVPDPTPMMPPVGVQASILSHDTIRITWADNSLPKHQKITDSRYYTVRWKTNIPANTKYKNANATTLSYLVTGLKPNTLYEFSVMVTKGRRSSTWSMTAHGTTFELVPTSPPKDVTVVSKEGKPKTIIVNWQPPSEANGKITGYIIYYSTDVNAEIHDWVIEPVVGNRLTHQIQELTLDTPYYFKIQARNSKGMGPMSEAVQFRTPKADSSDKMPNDQASGSGGKGSRLPDLGSDYKPPMSGSNSPHGSPTSPLDSNMLLVIIVSVGVITIVVVVIIAVFCTRRTTSHQKKKRAACKSVNGSHKYKGNSKDVKPPDLWIHHERLELKPIDKSPDPNPIMTDTPIPRNSQDITPVDNSMDSNIHQRRNSYRGHESEDSMSTLAGRRGMRPKMMMPFDSQPPQQSVRNTPSTDTMPASSSQTCCTDHQDPEGATSSSYLASSQEEDSGQSLPTAHVRPSHPLKSFAVPAIPPPGPPTYDPALPSTPLLSQQALNHHIHSVKTASIGTLGRSRPPMPVVVPSAPEVQETTRMLEDSESSYEPDELTKEMAHLEGLMKDLNAITTA

SEQ ID NO: 55183 - protein, 357 aa, Homo sapiens
MQSVQSTSFCLRKQCLCLTFLLLHLLGQVAATQRCPPQCPGRCPATPPTCAPGVRAVLDGCSCCLVCARQRGESCSDLEPCDESSGLYCDRSADPSNQTGICTAVEGDNCVFDGVIYRSGEKFQPSCKFQCTCRDGQIGCVPRCQLDVLLPEPNCPAPRKVEVPGECCEKWICGPDEEDSLGGLTLAAYRPEATLGVEVSDSSVNCIEQTTEWTACSKSCGMGFSTRVTNRNRQCEMLKQTRLCMVRPCEQEPEQPTDKKGKKCLRTKKSLKAIHLQFKNCTSLHTYKPRFCGVCSDGRCCTPHNTKTIQAEFQCSPGQIVKKPVMVIGTCTCHTNCPKNNEAFLQELELKTTRGKM

SEQ ID NO: 55184 - protein, 733 aa, Homo sapiens
MLARRQRDPLQALRRRNQELKQQVDSLLSESQLKEALEPNKRQHIYQRCIQLKQAIDENKNALQKLSKADESAPVANYNQRKEEEHTLLDKLTQQLQGLAVTISRENITEVGAPTEEEEESESEDSEDSGGEEEDAEEEEEEKEENESHKWSTGEEYIAVGDFTAQQVGDLTFKKGEILLVIEKKPDGWWIAKDAKGNEGLVPRTYLEPYSEEEEGQESSEEGSEEDVEAVDETADGAEVKQRTDPHWSAVQKAISEAGIFCLVNHVSFCYLIVLMRNRMETVEDTNGSETGFRAWNVQSRGRIFLVSKPVLQQINTVDVLTTMGAIPAGFRPSTLSQLLEEGNQFRANYFLQPELMPSQLAFRDLMWDATEGTIRSRPSRISLILTLWSCKMIPLPGMSIQVLSRHVRLCLFDGNKVLSNIHTVRATWQPKKPKTWTFSPQVTRILPCLLDGDCFIRSNSASPDLGILFELGISYIRNSTGERGELSCGWVFLKLFDASGVPIPAKTYELFLNGGTPYEKGIEVDPSISRRAHGSVFYQIMTMRRQPQLLVKLRSLNRRSRNVLSLLPETLIGNMCSIHLLIFYRQILGDVLLKDRMSLQSTDLISHPMLATFPMLLEQPDVMDALRSSWAGKESTLKRSEKRDKEFLKSTFLLVYHDCVLPLLHSTRLPPFRWAEEETETARWKVITDFLKQNQENQGALQALLSPDGVHEPFDLSEQTYDFLGEMRKNAV

SEQ ID NO: 55185 - protein, 614 aa, Homo sapiens
MLARRQRDPLQALRRRNQELKQQVDSLLSESQLKEALEPNKRQHIYQRVGAPTEEEEESESEDSEDSGGEEEDAEEEEEEKEENESHKWSTGEEYIAVGDFTAQQVGDLTFKKGEILLVIEKKPDGWWIAKDAKGNEGLVPRTYLEPYSEEEEGQESSEEGSEEDVEAVDETADGAEVKQRTDPHWSAVQKAISEINTVDVLTTMGAIPAGFRPSTLSQLLEEGNQFRANYFLQPELMPSQLAFRDLMWDATEGTIRSRPSRISLILTLWSCKMIPLPGMSIQVLSRHVRLCLFDGNKVLSNIHTVRATWQPKKPKTWTFSPQVTRILPCLLDGDCFIRSNSASPDLGILFELGISYIRNSTGERGELSCGWVFLKLFDASGVPIPAKTYELFLNGGTPYEKGIEVDPSISRRAHGSVFYQIMTMRRQPQLLVKLRSLNRRSRNVLSLLPETLIGNMCSIHLLIFYRQILGDVLLKDRMSLQSTDLISHPMLATFPMLLEQPDVMDALRSSWAGKESTLKRSEKRDKEFLKSTFLLVYHDCVLPLLHSTRLPPFRWAEEETETARWKVITDFLKQNQENQGALQALLSPDGVHEPFDLSEQTYDFLGEMRKNAV

SEQ ID NO: 55186 - protein, 732 aa, Homo sapiens
MLARRQRDPLQALRRRNQELKQQVDSLLSESQLKEALEPNKRQHIYQRCIQLKQAIDENKNALQKLSKADESAPVANYNQRKEEEHTLLDKLTQQLQGLAVTISRENITEVGAPTEEEEESESEDSEDSGGEEEDAEEEEEEKEENESHKWSTGEEYIAVGDFTAQQVGDLTFKKGEILLVIEKKPDGWWIAKDAKGNEGLVPRTYLEPYSEEEEGQESSEEGSEEDVEAVDETADGAEVKQRTDPHWSAVQKAISEAGIFCLVNHVSFCYLIVLMRNRMETVEDTNGSETGFRAWNVQSRGRIFLVSKPVLQINTVDVLTTMGAIPAGFRPSTLSQLLEEGNQFRANYFLQPELMPSQLAFRDLMWDATEGTIRSRPSRISLILTLWSCKMIPLPGMSIQVLSRHVRLCLFDGNKVLSNIHTVRATWQPKKPKTWTFSPQVTRILPCLLDGDCFIRSNSASPDLGILFELGISYIRNSTGERGELSCGWVFLKLFDASGVPIPAKTYELFLNGGTPYEKGIEVDPSISRRAHGSVFYQIMTMRRQPQLLVKLRSLNRRSRNVLSLLPETLIGNMCSIHLLIFYRQILGDVLLKDRMSLQSTDLISHPMLATFPMLLEQPDVMDALRSSWAGKESTLKRSEKRDKEFLKSTFLLVYHDCVLPLLHSTRLPPFRWAEEETETARWKVITDFLKQNQENQGALQALLSPDGVHEPFDLSEQTYDFLGEMRKNAV

SEQ ID NO: 55187 - protein, 677 aa, Homo sapiens
MLARRQRDPLQALRRRNQELKQQVDSLLSESQLKEALEPNKRQHIYQRCIQLKQAIDENKNALQKLSKADESAPVANYNQRKEEEHTLLDKLTQQLQGLAVTISRENITEVGAPTEEEEESESEDSEDSGGEEEDAEEEEEEKEENESHKWSTGEEYIAVGDFTAQQVGDLTFKKGEILLVIEKKPDGWWIAKDAKGNEGLVPRTYLEPYSEEEEGQESSEEGSEEDVEAVDETADGAEVKQRTDPHWSAVQKAISEQINTVDVLTTMGAIPAGFRPSTLSQLLEEGNQFRANYFLQPELMPSQLAFRDLMWDATEGTIRSRPSRISLILTLWSCKMIPLPGMSIQVLSRHVRLCLFDGNKVLSNIHTVRATWQPKKPKTWTFSPQVTRILPCLLDGDCFIRSNSASPDLGILFELGISYIRNSTGERGELSCGWVFLKLFDASGVPIPAKTYELFLNGGTPYEKGIEVDPSISRRAHGSVFYQIMTMRRQPQLLVKLRSLNRRSRNVLSLLPETLIGNMCSIHLLIFYRQILGDVLLKDRMSLQSTDLISHPMLATFPMLLEQPDVMDALRSSWAGKESTLKRSEKRDKEFLKSTFLLVYHDCVLPLLHSTRLPPFRWAEEETETARWKVITDFLKQNQENQGALQALLSPDGVHEPFDLSEQTYDFLGEMRKNAV

SEQ ID NO: 55188 - protein, 704 aa, Homo sapiens
MGTASSLVSPAGGEVIEDTYGAGGGEACEIPVEVKPKARLLRNSFRRGAGAAAGAGPGSLPRGVGAGGLLGASFKSTGSSVPELEYAAAEYERLRKEYEIFRVSKNQELLSMGRREAKLDTENKRLRAELQALQKTYQKILREKESALEAKYQAMERAATFEHDRDKVKRQFKIFRETKENEIQDLLRAKRELESKLQRLQAQGIQVFDPGESDSDDNCTDVTAAGTQCEYWTGGALGSEPSIGSMIQLQQSFRGPEFAHSSIDVEGPFANVNRDDWDIAVASLLQVTPLFSHSLWSNTVRCYLIYTDETQPEMDLFLKDYSPKLKRMCETMGYFFHAVYFPIDVENQYLTVRKWEIEKSSLVILFIHLTLPSLLLEDCEEAFLKNPEGKPRLIFHRLEDGKVSSDSVQQLIDQVSNLNKTSKAKIIDHSGDPAEGVYKTYICVEKIIKQDILGFENTDLETKDLGSEDSIPEEDDFGDVLWDIHDEQEQMETFQQASNSAHELGFEKYYQRLNDLVAAPAPIPPLLVSGGPGSGKSLLLSKWIQLQQKNSPNTLILSHFVGRPMSTSSESSLIIKRLTLKLMQHSWSVSALTLDPAKLLEEFPRWLEKLSARHQGSIIIVIDSIDQVQQVEKHMKWLIDPLPVNVRVIVSVNVETCPPAWRLWPTLHLDPLSPKDAKSIIIAECHSVDIKLSKEQCWESRQFR

SEQ ID NO: 55189 - protein, 1330 aa, Homo sapiens
MGTASSLVSPAGGEVIEDTYGAGGGEACEIPVEVKPKARLLRNSFRRGAGAAAGAGPGSLPRGVGAGGLLGASFKSTGSSVPELEYAAAEYERLRKEYEIFRVSKNQELLSMGRREAKLDTENKRLRAELQALQKTYQKILREKESALEAKYQAMERAATFEHDRDKVKRQFKIFRETKENEIQDLLRAKRELESKLQRLQAQGIQVFDPGESDSDDNCTDVTAAGTQCEYWTGGALGSEPSIGSMIQLQQSFRGPEFAHSSIDVEGPFANVNRDDWDIAVASLLQVTPLFSHSLWSNTVRCYLIYTDETQPEMDLFLKDYSPKLKRMCETMGYFFHAVYFPIDVENQYLTVRKWEIEKSSLVILFIHLTLPSLLLEDCEEAFLKNPEGKPRLIFHRLEDGKVSSDSVQQLIDQVSNLNKTSKAKIIDHSGDPAEGVYKTYICVEKIIKQDILGFENTDLETKDLGSEDSIPEEDDFGDVLWDIHDEQEQMETFQQASNSAHELGFEKYYQRLNDLVAAPAPIPPLLVSGGPGSGKSLLLSKWIQLQQKNSPNTLILSHFVGRPMSTSSESSLIIKRLTLKLMQHSWSVSALTLDPAKLLEEFPRWLEKLSARHQGSIIIVIDSIDQVQQVEKHMKWLIDPLPVNVRVIVSVNVETCPPAWRLWPTLHLDPLSPKDAKSIIIAECHSVDIKLSKEQEKKLERHCRSATTCNALYVTLFGKMIARAGRAGNLDKILHQCFQCQDTLSLYRLVLHSIRESMANDVDKELMKQILCLVNVSHNGVSESELMELYPEMSWTFLTSLIHSLYKMCLLTYGCGLLRFQHLQAWETVRLEYLEGPTVTSSYRQKLINYFTLQLSQDRVTWRSADELPWLFQQQGSKQKLHDCLLNLFVSQNLYKRGHFAELLSYWQFVGKDKSAMATEYFDSLKQYEKNCEGEDNMSCLADLYETLGRFLKDLGLLSQAIVPLQRSLEIRETALDPDHPRVAQSLHQLASVYVQWKKFGNAEQLYKQALEISENAYGADHPYTARELEALATLYQKQNKYEQAEHFRKKSFKIHQKAIKKKGNLYGFALLRRRALQLEELTLGKDTPDNARTLNELGVLYYLQNNLETADQFLKRSLEMRERVLGPDHPDCAQSLNNLAALCNEKKQYDKAEELYERALDIRRRALAPDHPSLAYTVKHLAILYKKMGKLDKAVPLYELAVEIRQKSFGPKHPSVATALVNLAVLYSQMKKHVEALPLYERALKIYEDSLGRMHPRVGETLKNLAVLSYEGGDFEKAAELYKRAMEIKEAETSLLGGKAPSRHSSSGDTFSLKTAHSPNVFLQQGQR

SEQ ID NO: 55190 - protein, 239 aa, Homo sapiens
MGTASSLVSPAGGEVIEDTYGAGGGEACEIPVEVKPKARLLRNSFRRGAGAAAGAGPGSLPRGVGAGGLLGASFKSTGSSVPELEYAAAEYERLRKEYEIFRVSKNQELLSMGRREAKLDTENKRLRAELQALQKTYQKILREKESALEAKYQAMERAATFEHDRDKVKRQFKIFRETKENEIQDLLRAKRELESKLQRLQAQGIQVFDPGESDSDDNCTDVTVSLESDQHPGIFIANF

SEQ ID NO: 55191 - protein, 150 aa, Homo sapiens
MGTASSLVSPAGGEVIEDTYGAGGGEACEIPVEVKPKARLLRNSFRRGAGAAAGAGPGSLPRGVGAGGLLGASFKSTGSSVPELEYAAAEYERLRKEYEIFRVSKNQELLSMGRREAKLDTENKRLRAELQGLAAVARSRLTATWNSWAQ

SEQ ID NO: 55192 - protein, 637 aa, Homo sapiens
IIANAGRAGNLDKILHQCFQCQDTLSLYRLVLHSIRESMANDVDKELMKQILCLVNVSHNGVSESELMELYPEMSWTFLTSLIHSLYKMCLLTYGCGLLRFQHLQAWETVRLEYLEGPTVTSSYRQKLINYFTLQLSQDRVTWRSADELPWLFQQQGSKQKLHDCLLNLFVSQNLYKRGHFAELLSYWQFVGKDKSAMATEYFDSLKQYEKNCEGEDNMSCLADLYETLGRFLKDLGLLSQAIVPLQRSLEIRETALDPDHPRVAQSLHQLASVYVQWKKFGNAEQLYKQALEISENAYGADHPYTARELEALATLYQKQNKYEQAEHFRKKSFKIHQKAIKKKGNLYGFALLRRRALQLEELTLGKDTPDNARTLNELGVLYYLQNNLETADQFLKRSLEMRERVLGPDHPDCAQSLNNLAALCNEKKQYDKAEELYERALDIRRRALAPDHPSLAYTVKHLAILYKKMGKLDKAVPLYELAVEIRQKSFGPKHPSVATALVNLAVLYSQMKKHVEALPLYERALKIYEDSLGRMHPRVGETLKNLAVLSYEGGDFEKAAELYKRAMEIKEAETSLLGGKAPSRHSSSGDTFSLKTAHSPNVFLQQGQRKVQSNLLSPEGLSNICAQEKTTRFTSS

SEQ ID NO: 55193 - protein, 411 aa, Homo sapiens
MSCLADLYETLGRFLKDLGLLSQAIVPLQRSLEIRETALDPDHPRVAQSLHQLASVYVQWKKFGNAEQLYKQALEISENAYGADHPYTARELEALATLYQKQNKYEQAEHFRKKSFKIHQKAIKKKGNLYGFALLRRRALQLEELTLGKDTPDNARTLNELGVLYYLQNNLETADQFLKRSLEMRERVLGPDHPDCAQSLNNLAALCNEKKQYDKAEELYERALDIRRRALAPDHPSLAYTVKHLAILYKKMGKLDKAVPLYELAVEIRQKSFGPKHPSVATALVNLAVLYSQMKKHVEALPLYERALKIYEDSLGRMHPRVGETLKNLAVLSYEGGDFEKAAELYKRAMEIKEAETSLLGGKAPSRHSSSGDTFSLKTAHSPNVFLQQGQRAGKSNPTFYLQKGFQTYVL

SEQ ID NO: 55194 - protein, 1426 aa, Homo sapiens
MNDWHRIFTQNVLVPPHPQRARQPWKESTAFQCVLKWLDGPVIRQGVLEVLSEVECHLRVSFFDVTYRHFFGRTWKTTVKPTKRPPSRIVFNEPLYFHTSLNHPHIVAVVEVVAEGKKRDGSLQTLSCGFGILRIFSNQPDSPISASQDKRLRLYHGTPRALLHPLLQDPAEQNRHMTLIENCSLQYTLKPHPALEPAFHLLPENLLVSGLQQIPGLLPAHGESGDALRKPRLQKPITGHLDDLFFTLYPSLEKFEEELLELHVQDHFQEGCGPLDGGALEILERRLRVGVHNGLGFVQRPQVVVLVPEMDVALTRSASFSRKVVSSSKTSSGSQALVLRSRLRLPEMVGHPAFAVIFQLEYVFSSPAGVDGNAASVTSLSNLACMHMVRWAVWNPLLEADSGRVTLPLQGGIQPNPSHCLVYKVPSASMSSEEVKQVESGTLRFQFSLGSEEHLDAPTEPVSGPKVERRPSRKPPTSPSSPPAPVPRVLAAPQNSPVGPGLSISQLAASPRSPTQHCLARPTSQLPHGSQASPAQAQEFPLEAGISHLEADLSQTSLVLETSIAEQLQELPFTPLHAPIVVGTQTRSSAGQPSRASMVLLQSSGFPEILDANKQPAEAVSATEPVTFNPQKEESDCLQSNEMVLQFLAFSRVAQDCRGTSWPKTVYFTFQFYRFPPATTPRLQLVQLDEAGQPSSGALTHILVPVSRDGTFDAGSPGFQLRYMVGPGFLKPGERRCFARYLAVQTLQIDVWDGDSLLLIGSAAVQMKHLLRQGRPAVQASHELEVVATEYEQDNMVVSGDMLGFGRVKPIGVHSVVKGRLHLTLANVGHPCEQKVRGCSTLPPSRSRVISNDGASRFSGGSLLTTGSSRRKHVVQAQKLADVDSELAAMLLTHARQGKGPQDVSRESDATRRRKLERMRSVRLQEAGGDLGRRGTSVLAQQSVRTQHLRDLQVIAAYRERTKAESIASLLSLAITTEHTLHATLGVAEFFEFVLKNPHNTQHTVTVEIDNPELSVIVDSQEWRDFKGAAGLHTPVEEDMFHLRGSLAPQLYLRPHETAHVPFKFQSFSAGQLAMVQASPGLSNEKGMDAVSPWKSSAVPTKHAKVLFRASGGKPIAVLCLTVELQPHVVDQVFRFYHPELSFLKKAIRLPPWHTFPGAPVGMLGEDPPVHVRCSDPNVICETQNVGPGEPRDIFLKVASGPSPEIKDFFVIIYSDRWLATPTQTWQVYLHSLQRVDVSCVAGQLTRLSLVLRGTQTVRKVRAFTSHPQELKTDPKGVFVLPPRGVQDLHVGVRPLRAGSRFVHLNLVDVDCHQLVASWLVCLCCRQPLISKAFEIMLAAGEGKGVNKRITYTNPYPSRRTFHLHSDHPELLRFREDSFQVGGGETYTIGLQFAPSQRVGEEEILIYINDHEDKNEEAFCVKVIYQ

SEQ ID NO: 55195 - protein, 181 aa, Homo sapiens
MVLLQSSGFPEILDANKQPAEAVSATEPVTFNPQKEESDCLQSNEMVLQFLAFSRVAQDCRGTSWPKTVYFTFQFYRFPPATTPRLQLVQLDEAGQPSSGALTHILVPVSRDGTFDAGSPGFQLRYMVGPGFLKPGERRCFARYLAVQTLQIDVWDGDSLLLIGSAAVQMKETSHIFSVSQ

SEQ ID NO: 55196 - protein, 1201 aa, Homo sapiens
MALGTTLRASLLLLGLLTEGLAQLAIPASVPRGFWALPENLTVVEGASVELRCGVSTPGSAVQWAKDGLLLGPDPRIPGFPRYRLEGDPARGEFHLHIEACDLSDDAEYECQVGRSEMGPELVSPRVILSILVPPKLLLLTPEAGTMVTWVAGQEYVVNCVSGDAKPAPDITILLSGQTISDISANVNEGSQQKLFTVEATARVTPRSSDNRQLLVCEASSPALEAPIKASFTVNVLFPPGPPVIEWPGLDEGHVRAGQSLELPCVARGGNPLATLQWLKNGQPVSTAWGTEHTQAVARSVLVMTVRPEDHGAQLSCEAHNSVSAGTQEHGITLQVTFPPSAIIILGSASQTENKNVTLSCVSKSSRPRVLLRWWLGWRQLLPMEETVMDGLHGGHISMSNLTFLARREDNGLTLTCEAFSEAFTKETFKKSLILNVKYPAQKLWIEGPPEGQKLRAGTRVRLVCLAIGGNPEPSLMWYKDSRTVTESRLPQESRRVHLGSVEKSGSTFSRELVLVTGPSDNQAKFTCKAGQLSASTQLAVQFPPTNVTILANASALRPGDALNLTCVSVSSNPPVNLSWDKEGERLEGVAAPPRRAPFKGSAAARSVLLQVSSRDHGQRVTCRAHSAELRETVSSFYRLNVLYRPEFLGEQVLVVTAVEQGEALLPVSVSANPAPEAFNWTFRGYRLSPAGGPRHRILSSGALHLWNVTRADDGLYQLHCQNSEGTAEARLRLDVHYAPTIRALQDPTEVNVGGSVDIVCTVDANPILPGMFNWERLGEDEEDQSLDDMEKISRGPTGRLRIHHAKLAQAGAYQCIVDNGVAPPARRLLRLVVRFAPQVEHPTPLTKVAAAGDSTSSATLHCRARGVPNIVFTWTKNGVPLDLQDPRYTEHTYHQGGVHSSLLTIANVSAAQDYALFTCTATNALGSDQTNIQLVSISRPDPPSGLKVVSLTPHSVGLEWKPGFDGGLPQRFCIRYEALGTPGFHYVDVVPPQATTFTLTGLQPSTRYRVWLLASNALGDSGLADKGTQLPITTPGLHQPSGEPEDQLPTEPPSGISEKTEAGSEEDRVRNEYEESQWTGERDTQSSTVSTTEAEPYYRSLRDFSPQLPPTQEEVSYSRGFTGEDEDMAFPGHLYDEVERTYPPSGAWGPLYDEVQMGPWDLHWPEDTYQDPRGIYDQVAGDLDTLEPDSLPFELRGHLV

SEQ ID NO: 55197 - protein, 1241 aa, Homo sapiens
MALGTTLRASLLLLGLLTEGLAQLAIPASVPRGFWALPENLTVVEGASVELRCGVSTPGSAVQWAKDGLLLGPDPRIPGFPRYRLEGDPARGEFHLHIEACDLSDDAEYECQVGRSEMGPELVSPRVILSILVPPKLLLLTPEAGTMVTWVAGQEYVVNCVSGDAKPAPDITILLSGQTISDISANVNEGSQQKLFTVEATARVTPRSSDNRQLLVCEASSPALEAPIKASFTVNVLFPPGPPVIEWPGLDEGHVRAGQSLELPCVARGGNPLATLQWLKNGQPVSTAWGTEHTQAVARSVLVMTVRPEDHGAQLSCEAHNSVSAGTQEHGITLQVTFPPSAIIILGSASQTENKNVTLSCVSKSSRPRVLLRWWLGWRQLLPMEETVMDGLHGGHISMSNLTFLARREDNGLTLTCEAFSEAFTKETFKKSLILNVKYPAQKLWIEGPPEGQKLRAGTRVRLVCLAIGGNPEPSLMWYKDSRTVTESRLPQESRRVHLGSVEKSGSTFSRELVLVTGPSDNQAKFTCKAGQLSASTQLAVQFPPTNVTILANASALRPGDALNLTCVSVSSNPPVNLSWDKEGERLEGVAAPPRRAPFKGSAAARSVLLQVSSRDHGQRVTCRAHSAELRETVSSFYRLNVLYRPEFLGEQVLVVTAVEQGEALLPVSVSANPAPEAFNWTFRGYRLSPAGGPRHRILSSGALHLWNVTRADDGLYQLHCQNSEGTAEARLRLDVHYAPTIRALQDPTEVNVGGSVDIVCTVDANPILPGMFNWERLGEDEEDQSLDDMEKISRGPTGRLRIHHAKLAQAGAYQCIVDNGVAPPARRLLRLVVRFAPQVEHPTPLTKVAAAGDSTSSATLHCRARGVPNIVFTWTKNGVPLDLQDPRYTEHTYHQGGVHSSLLTIANVSAAQDYALFTCTATNALGSDQTNIQLVSISRPDPPSGLKVVSLTPHSVGLEWKPGFDGGLPQRFCIRYEALGTPGFHYVDVVPPQATTFTLTGLQPSTRYRVWLLASNALGDSGLADKGTQLPITTPGLHQPSGEPEDQLPTEPPSGPSGLPLLPVLFALGGLLLLSNASCVGGVLWQRRLRRLAEGISEKTEAGSEEDRVRNEYEESQWTGERDTQSSTVSTTEAEPYYRSLRDFSPQLPPTQEEVSYSRGFTGEDEDMAFPGHLYDEVERTYPPSGAWGPLYDEVQMGPWDLHWPEDTYQDPRGIYDQVAGDLDTLEPDSLPFELRGHLV

SEQ ID NO: 55198 - protein, 383 aa, Homo sapiens
MERRARSSSRESRGRGGRTPHKENKRAKAERSGGGRGRQEAGPEPSGSGRAGTPGEPRAPAATVVDVDEVRGSGEEGTEVVALLESERPEEGTKSSGLGACEWLLVLISLLFIIMTFPFSIWFCVKVVQEYERVIIFRLGHLLPGRAKGPGLFFFLPCLDTYHKVDLRLQTLEIPFHEIVTKDMFIMEIDAICYYRMENASLLLSSLAHVSKAVQFLVQTTMKRLLAHRSLTEILLERKSIAQDAKVALDSVTCIWGIKVERIEIKDVRLPAGLQHSLAVEAEAQRQAKVRMIAAEAEKAASESLRMAAEILSGTPAAVQLRYLHTLQSLSTEKPSTVVLPLPFDLLNCLSSPSNRTQGSLPFPSPSKPVEPLNPKKKDSPML

SEQ ID NO: 55199 - protein, 315 aa, Homo sapiens
MERRARSSSRESRGRGGRTPHKENKRAKAERSGGGRGRQEAGPEPSGSGRAGTPGEPRAPAATVVDVDEVRGSGEEGTEVVALLESERPEEGTKSSGLGACEWLLVLISLLFIIMTFPFSIWFCVKVVQEYERVIIFRLGHLLPGRAKGPGLFFFLPCLDTYHKVDLRLQTLEIPFHEVALDSVTCIWGIKVERIEIKDVRLPAGLQHSLAVEAEAQRQAKVRMIAAEAEKAASESLRMAAEILSGTPAAVQLRYLHTLQSLSTEKPSTVVLPLPFDLLNCLSSPSNRTQGSLPFPSPSKPVEPLNPKKKDSPML

SEQ ID NO: 55200 - protein, 427 aa, Homo sapiens
MGAGATGRAMDGPRLLLLLLLGVSLGGAKEACPTGLYTHSGECCKACNLGEGVAQPCGANQTVCEPCLDSVTFSDVVSATEPCKPCTECVGLQSMSAPCVEADDAVCRCAYGYYQDETTGRCEACRVCEAGSGLVFSCQDKQNTVCEECPDGTYSDEANHVDPCLPCTVCEDTERQLRECTRWADAECEEIPGRWITRSTPPEGSDSTAPSTQEPEAPPEQDLIASTVAGVVTTVMGSSQPVVTRGTTDNLIPVYCSILAAVVVGLVAYIAFKRWNSCKQNKQGANSRPVNQTPPPEGEKLHSDSGISVDSQSLHDQQPHTQTASGQALKGDGGLYSSLPPAKREEVEKLLNGSAGDTWRHLAGELGYQPEHIDSFTHEACPVRALLASWATQDSATLDALLAALRRIQRADLVESLCSESTATSPV

SEQ ID NO: 55201 - protein, 333 aa, Homo sapiens
MSAPCVEADDAVCRCAYGYYQDETTGRCEACRVCEAGSGLVFSCQDKQNTVCEECPDGTYSDEANHVDPCLPCTVCEDTERQLRECTRWADAECEEIPGRWITRSTPPEGSDSTAPSTQEPEAPPEQDLIASTVAGVVTTVMGSSQPVVTRGTTDNLIPVYCSILAAVVVGLVAYIAFKRWNSCKQNKQGANSRPVNQTPPPEGEKLHSDSGISVDSQSLHDQQPHTQTASGQALKGDGGLYSSLPPAKREEVEKLLNGSAGDTWRHLAGELGYQPEHIDSFTHEACPVRALLASWATQDSATLDALLAALRRIQRADLVESLCSESTATSPV

SEQ ID NO: 55202 - protein, 111 aa, Homo sapiens
MANIHQENEEMEQPMQNGEEDRPLGGGEGHQPAGNRRGQARRLAPNFRWAIPNRQINDGMGGDGDDMEIFMEEMREIRRKLRELQLRNCLRILMGELSNHHDHHDEFCLMP

SEQ ID NO: 55203 - protein, 101 aa, Homo sapiens
MEQPMQNGEEDRPLGGGEGHQPAGNRRGQARRLAPNFRWAIPNRQINDGMGGDGDDMEIFMEEMREIRRKLRELQLRNCLRILMGELSNHHDHHDEFCLMP

SEQ ID NO: 55204 - protein, 101 aa, Homo sapiens; identical to SEQ ID NO: 55203

SEQ ID NO: 55205 - protein, 111 aa, Homo sapiens; identical to SEQ ID NO: 55202

SEQ ID NO: 55206 - protein, 111 aa, Homo sapiens; identical to SEQ ID NO: 55202

SEQ ID NO: 55207 - protein, 133 aa, Homo sapiens
MMLNSDTMELDLPPTHSETESGFSDCGGGAGPDGAGPGGPGGGQARGPEPGEPGRKDLQHLSREERRRRRRATAKYRTAHATRERIRVEAFNLAFAELRKLLPTLPPDKKLSKIEILRLAICYISYLNHVLDV

SEQ ID NO: 55208 - protein, 135 aa, Homo sapiens
MMLSPDQAADSDHPSSAHSDPESLGGTDTKVLGSVSDLEPVEEAEGDGKGGSRAALYPHPQQLSREEKRRRRRATAKYRSAHATRERIRVEAFNLAFAELRKLLPTLPPDKKLSKIEILRLAICYISYLNHVLDV

SEQ ID NO: 55209 - protein, 135 aa, Homo sapiens; identical to SEQ ID NO: 55208

SEQ ID NO: 55210 - protein, 107 aa, Homo sapiens
MMLSPDQAADSDHPSSAHSDPESLGGTDTKVLGSVSDLEPVEEAEGDGKGGSRAALYPHPQQLSREEKRRRRRATAKYRSAHATRERIRVEAFNLAFAELRKLLPTL

SEQ ID NO: 55211 - protein, 644 aa, Homo sapiens
MTIEIDFLQKKSIDSNPYDTDKMAAEFIQQFNNQAFSVGQQLVFSFNEKLFGLLVKDIEAMDPSILKGEPATGKRQKIEVGLVVGNSQVAFEKAENSSLNLIGKAKTKENRQSIINPDWNFEKMGIGGLDKEFSDIFRRAFASRVFPPEIVEQMGCKHVKGILLYGPPGCGKTLLARQIGKMLNAREPKVVNGPEILNKYVGESEANIRKLFADAEEEQRRLGANSGLHIIIFDEIDAICKQRGSMAGSTGVHDTVVNQLLSKIDGVEQLNNILVIGMTNRPDLIDEALLRPGRLEVKMEIGLPDEKGRLQILHIHTARMRGHQLLSADVDIKELAVETKNFSGAELEGLVRAAQSTAMNRHIKASTKVEVDMEKAESLQVTRGDFLASLENDIKPAFGTNQEDYASYIMNGIIKWGDPVTRVLDDGELLVQQTKNSDRTPLVSVLLEGPPHSGKTALAAKIAEESNFPFIKICSPDKMIGFSETAKCQAMKKIFDDAYKSQLSCVVVDDIERLLDYVPIGPRFSNLVLQALLVLLKKAPPQGRKLLIIGTTSRKDVLQEMEMLNAFSTTIHVPNIATGEQLLEALELLGNFKDKERTTIAQQVKGKKVWIGIKKLLMLIEMSLQMDPEYRVRKFLALLREEGA

SEQ ID NO: 55212 - protein, 744 aa, Homo sapiens
MAGRSMQAARCPTDELSLTNCAVVNEKDFQSGQHVIVRTSPNHRYTFTLKTHPSVVPGSIAFSLPQRKWAGLSIGQEIEVSLYTFDKAKQCIGTMTIEIDFLQKKSIDSNPYDTDKMAAEFIQQFNNQAFSVGQQLVFSFNEKLFGLLVKDIEAMDPSILKGEPATGKRQKIEVGLVVGNSQVAFEKAENSSLNLIGKAKTKENRQSIINPDWNFEKMGIGGLDKEFSDIFRRAFASRVFPPEIVEQMGCKHVKGILLYGPPGCGKTLLARQIGKMLNAREPKVVNGPEILNKYVGESEANIRKLFADAEEEQRRLGANSGLHIIIFDEIDAICKQRGSMAGSTGVHDTVVNQLLSKIDGVEQLNNILVIGMTNRPDLIDEALLRPGRLEVKMEIGLPDEKGRLQILHIHTARMRGHQLLSADVDIKELAVETKNFSGAELEGLVRAAQSTAMNRHIKASTKVEVDMEKAESLQVTRGDFLASLENDIKPAFGTNQEDYASYIMNGIIKWGDPVTRVLDDGELLVQQTKNSDRTPLVSVLLEGPPHSGKTALAAKIAEESNFPFIKICSPDKMIGFSETAKCQAMKKIFDDAYKSQLSCVVVDDIERLLDYVPIGPRFSNLVLQALLVLLKKAPPQGRKLLIIGTTSRKDVLQEMEMLNAFSTTIHVPNIATGEQLLEALELLGNFKDKERTTIAQQVKGKKVWIGIKKLLMLIEMSLQMDPEYRVRKFLALLREEGASPLDFD

SEQ ID NO: 55213 - protein, 295 aa, Homo sapiens
MDNSGKEAEAMALLAEAERKVKNSQSFFSGLFGGSSKIEEACEIYARAANMFKMAKNWSAAGNAFCQAAQLHLQLQSKHDAATCFVDAGNAFKKADPQEAINCLMRAIEIYTDMGRFTIAAKHHISIAEIYETELVDIEKAIAHYEQSADYYKGEESNSSANKCLLKVAGYAALLEQYQKAIDIYEQVGTNAMDSPLLKYSAKDYFFKAALCHFCIDMLNAKLAVQKYEELFPAFSDSRECKLMKKLLEAHEEQNVDSYTESVKEYDSISRLDQWLTTMLLRIKKTIQGDEEDLR

SEQ ID NO: 55214 - protein, 298 aa, Homo sapiens
MDNAGKEREAVQLMAEAEKRVKASHSFLRGLFGGNTRIEEACEMYTRAANMFKMAKNWSAAGNAFCQAAKLHMQLQSKHDSATSFVDAGNAYKKADPQEAINCLNAAIDIYTDMGRFTIAAKHHITIAEIYETELVDIEKAIAHYEQSADYYKGEESNSSANKCLLKVAAYAAQLEQYQKAIEIYEQVGANTMDNPLLKYSAKDYFFKAALCHFIVDELNAKLALEKYEEMFPAFTDSRECKLLKKLLEAHEEQNSEAYTEAVKEFDSISRLDQWLTTMLLRIKKSIQGDGEGDGDLK

SEQ ID NO: 55215 - protein, 204 aa, Homo sapiens
MTLLPALWMLEMLTKRQIPKGRFTIAAKHHITIAEIYETELVDIEKAIAHYEQSADYYKGEESNSSANKCLLKVAAYAAQLEQYQKAIEIYEQVGANTMDNPLLKYSAKDYFFKAALCHFIVDELNAKLALEKYEEMFPAFTDSRECKLLKKLLEAHEEQNSEAYTEAVKEFDSISRLDQWLTTMLLRIKKSIQGDGEGDGDLK

SEQ ID NO: 55216 - protein, 255 aa, Homo sapiens
MYTRAANMFKMAKNWSAAGNAFCQAAKLHMQLQSKHDSATSFVDAGNAYKKADPQEAINCLNAAIDIYTDMGRFTIAAKHHITIAEIYETELVDIEKAIAHYEQSADYYKGEESNSSANKCLLKVAAYAAQLEQYQKAIEIYEQVGANTMDNPLLKYSAKDYFFKAALCHFIVDELNAKLALEKYEEMFPAFTDSRECKLLKKLLEAHEEQNSEAYTEAVKEFDSISRLDQWLTTMLLRIKKSIQGDGEGDGDLK

SEQ ID NO: 55217 - protein, 259 aa, Homo sapiens
MDNAGKEREAVQLMAEAEKRVKASHSFLRGLFGGNTRIEEACEMYTRAANMFKMAKNWSEAINCLNAAIDIYTDMGRFTIAAKHHITIAEIYETELVDIEKAIAHYEQSADYYKGEESNSSANKCLLKVAAYAAQLEQYQKAIEIYEQVGANTMDNPLLKYSAKDYFFKAALCHFIVDELNAKLALEKYEEMFPAFTDSRECKLLKKLLEAHEEQNSEAYTEAVKEFDSISRLDQWLTTMLLRIKKSIQGDGEGDGDLK

SEQ ID NO: 55218 - protein, 628 aa, Homo sapiens
MGSCARLLLLWGCTVVAAGLSGVAGVSSRCEKACNPRMGNLALGRKLWADTTCGQNATELYCFYSENTDLTCRQPKCDKCNAAYPHLAHLPSAMADSSFRFPRTWWQSAEDVHREKIQLDLEAEFYFTHLIVMFKSPRPAAMVLDRSQDFGKTWKPYKYFATNCSATFGLEDDVVKKGAICTSKYSSPFPCTGGEVIFKALSPPYDTENPYSAKVQEQLKITNLRVQLLKRQSCPCQRNDLNEEPQHFTHYAIYDFIVKGSCFCNGHADQCIPVHGFRPVKAPGTFHMVHGKCMCKHNTAGSHCQHCAPLYNDRPWEAADGKTGAPNECRTCKCNGHADTCHFDVNVWEASGNRSGGVCDDCQHNTEGQYCQRCKPGFYRDLRRPFSAPDACKPCSCHPVGSAVLPANSVTFCDPSNGDCPCKPGVAGRRCDRCMVGYWGFGDYGCRPCDCAGSCDPITGDCISSHTDIDWYHEVPDFRPVHNKSEPAWEWEDAQGFSALLHSGKCECKEQTLGNAKAFCGMKYSYVLKIKILSAHDKGTHVEVNVKIKKVLKSTKLKIFRGKRTLYPESWTDRGCTCPILNPGLEYLVAGHEDIRTGKLIVNMKSFVQHWKPSLGRKVMDILKRECK

SEQ ID NO: 55219 - protein, 591 aa, Homo sapiens
MGNLALGRKLWADTTCGQNATELYCFYSENTDLTCRQPKCDKCNAAYPHLAHLPSAMADSSFRFPRTWWQSAEDVHREKIQLDLEAEFYFTHLIVMFKSPRPAAMVLDRSQDFGKTWKPYKYFATNCSATFGLEDDVVKKGAICTSKYSSPFPCTGGEVIFKALSPPYDTENPYSAKVQEQLKITNLRVQLLKRQSCPCQRNDLNEEPQHFTHYAIYDFIVKGSCFCNGHADQCIPVHGFRPVKAPGTFHMVHGKCMCKHNTAGSHCQHCAPLYNDRPWEAADGKTGAPNECRTCKCNGHADTCHFDVNVWEASGNRSGGVCDDCQHNTEGQYCQRCKPGFYRDLRRPFSAPDACKPCSCHPVGSAVLPANSVTFCDPSNGDCPCKPGVAGRRCDRCMVGYWGFGDYGCRPCDCAGSCDPITGDCISSHTDIDWYHEVPDFRPVHNKSEPAWEWEDAQGFSALLHSGKCECKEQTLGNAKAFCGMKYSYVLKIKILSAHDKGTHVEVNVKIKKVLKSTKLKIFRGKRTLYPESWTDRGCTCPILNPGLEYLVAGHEDIRTGKLIVNMKSFVQHWKPSLGRKVMDILKRECK

SEQ ID NO: 55220 - protein, 605 aa, Homo sapiens
MGSCARLLLLWGCTVVAAGLSGVAGVSSRCEKACNPRMGNLALGRKLWADTTCGQNATELYCFYSENTDLTCRQPKCDKCNAAYPHLAHLPSAMADSSFRFPRTWWQSAEDVHREKIQLDLEAEFYFTHLIVMFKSPRPAAMVLDRSQDFGKTWKPYKYFATNCSATFGLEDDVVKKGAICTSKYSSPFPCTGGEVIFKALSPPYDTENPYSAKVQEQLKITNLRVQLLKRQSCPCQRNDLNEEPQHFTHYAIYDFIVKGSCFCNGHADQCIPVHGFRPVKAPGTFHMVHGKCMCKHNTAGSHCQHCAPLYNDRPWEAADGKTGAPNECRTCKCNGHADTCHFDVNVWEASGNRSGGVCDDCQHNTEGQYCQRCKPGFYRDLRRPFSAPDACKPCSCHPVGSAVLPANSVTFCDPSNGDCPCKPGVAGRRCDRCMVGYWGFGDYGCRPCDCAGSCDPITGDCISSHTDIDWYHEVPDFRPVHNKSEPAWEWEDAQGFSALLHSVLKIKILSAHDKGTHVEVNVKIKKVLKSTKLKIFRGKRTLYPESWTDRGCTCPILNPGLEYLVAGHEDIRTGKLIVNMKSFVQHWKPSLGRKVMDILKRECK

SEQ ID NO: 55221 - protein, 364 aa, Homo sapiens
MYLSRFLSIHALWVTVSSVMQPYPLVWGHYDLCKTQIYTEEGKVWDYMACQPESTDMTKYLKVKLDPPDITCGDPPETFCAMGNPYMCNNECDASTPELAHPPELMFDFEGRHPSTFWQSATWKEYPKPLQVNITLSWSKTIELTDNIVITFESGRPDQMILEKSLDYGRTWQPYQYYATDCLDAFHMDPKSVKDLSQHTVLEIICTEEYSTGYTTNSKIIHFEIKDRFAFFAGPRLRNMASLYGQLDTTKKLRDFFTVTDLRIRLLRPAVGEIFVDELHLARYFYAISDIKVRGRCKCNLHATVCVYDNSKLTCECEHNTTGPDCGKCKKNYQGRPWSPGSYLPIPKGTANTCIPSISSIGSK

SEQ ID NO: 55222 - protein, 505 aa, Homo sapiens
MYLSRFLSIHALWVTVSSVMQPYPLVWGHYDLCKTQIYTEEGKVWDYMACQPESTDMTKYLKVKLDPPDITCGDPPETFCAMGNPYMCNNECDASTPELAHPPELMFDFEGRHPSTFWQSATWKEYPKPLQVNITLSWSKTIELTDNIVITFESGRPDQMILEKSLDYGRTWQPYQYYATDCLDAFHMDPKSVKDLSQHTVLEIICTEEYSTGYTTNSKIIHFEIKDRFAFFAGPRLRNMASLYGQLDTTKKLRDFFTVTDLRIRLLRPAVGEIFVDELHLARYFYAISDIKVRGRCKCNLHATVCVYDNSKLTCECEHNTTGPDCGKCKKNYQGRPWSPGSYLPIPKGTANTCIPSISSIGNPPKFNRIWPNISSLEVSNPKQECYCNPLGSIHDRCNGSGFCECKTGTTGPKCDECLPGNSWHYGCQPNVCDNELLHCQNGGTCHNNVRCLCPAAYTGILCEKLRCEEAGSCGSDSGQGAPPHGSPALLLLTTLLGTASPLVF

SEQ ID NO: 55223 - protein, 286 aa, Homo sapiens
MASLYGQLDTTKKLRDFFTVTDLRIRLLRPAVGEIFVDELHLARYFYAISDIKVRGRCKCNLHATVCVYDNSKLTCECEHNTTGPDCGKCKKNYQGRPWSPGSYLPIPKGTANTCIPSISSIGNPPKFNRIWPNISSLEVSNPKQVAPKLALSTVSSVQVANHKRECYCNPLGSIHDRCNGSGFCECKTGTTGPKCDECLPGNSWHYGCQPNVCDNELLHCQNGGTCHNNVRCLCPAAYTGILCEKLRCEEAGSCGSDSGQGAPPHGSPALLLLTTLLGTASPLVF

SEQ ID NO: 55224 - protein, 342 aa, Homo sapiens
MASLYGQLDTTKKLRDFFTVTDLRIRLLRPAVGEIFVDELHLARYFYAISDIKVRGRCKCNLHATVCVYDNSKLTCECEHNTTGPDCGKCKKNYQGRPWSPGSYLPIPKGTANTCIPSISSIGNPPKFNRIWPNISSLEVSNPKQVAPKLALSTVSSVQVANHKRDCECFGHSNRCSYIDLLNTVICVSCKHNTRGQHCELCRLGYFRNASAQLDDENVCIECYCNPLGSIHDRCNGSGFCECKTGTTGPKCDECLPGNSWHYGCQPNVCDNELLHCQNGGTCHNNVRCLCPAAYTGILCEKLRCEEAGSCGSDSGQGAPPHGSPALLLLTTLLGTASPLVF

SEQ ID NO: 55225 - protein, 494 aa, Homo sapiens
MYLSRFLSIHALWVTVSSVMQPYPLVWGHYDLCKTQIYTEEGKVWDYMACQPESTDMTKYLKVKLDPPDITCGDPPETFCAMGNPYMCNNECDASTPELAHPPELMFDFEGRHPSTFWQSATWKEYPKPLQVNITLSWSKTIELTDNIVITFESGRPDQMILEKSLDYGRTWQPYQYYATDCLDAFHMDPKSVKDLSQHTVLEIICTEEYSTGYTTNSKIIHFEIKDRFAFFAGPRLRNMASLYGQLDTTKKLRDFFTVTDLRIRLLRPAVGEIFVDELHLARYFYAISDIKVRGRCKCNLHATVCVYDNSKLTCECEHNTTGPDCGKCKKNYQGRPWSPGSYLPIPKGTANTCIPSISSIGNCECFGHSNRCSYIDLLNTVICVSCKHNTRGQHCELCRLGYFRNASAQLDDENVCIANVCDNELLHCQNGGTCHNNVRCLCPAAYTGILCEKLRCEEAGSCGSDSGQGAPPHGSPALLLLTTLLGTASPLVF

SEQ ID NO: 55226 - protein, 480 aa, Homo sapiens
MYLSRFLSIHALWVTVSSVMQPYPLVWGHYDLCKTQIYTEEGKVWDYMACQPESTDMTKYLKVKLDPPDITCGDPPETFCAMGNPYMCNNECDASTPELAHPPELMFDFEGRHPSTFWQSATWKEYPKPLQVNITLSWSKTIELTDNIVITFESGRPDQMILEKSLDYGRTWQPYQYYATDCLDAFHMDPKSVKDLSQHTVLEIICTEEYSTGYTTNSKIIHFEIKDRFAFFAGPRLRNMASLYGQLDTTKKLRDFFTVTDLRIRLLRPAVGEIFVDELHLARYFYAISDIKVRGRCKCNLHATVCVYDNSKLTCECEHNTTGPDCGKCKKNYQGRPWSPGSYLPIPKGTANTCIPSISSIGNPPKFNRIWPNISSLEVSNPKQVAPKLALSTVSSVQVANHKRANVCDNELLHCQNGGTCHNNVRCLCPAAYTGILCEKLRCEEAGSCGSDSGQGAPPHGSPALLLLTTLLGTASPLVF

SEQ ID NO: 55227 - protein, 460 aa, Homo sapiens
MYLSRFLSIHALWVTVSSVMQPYPLVWGHYDLCKTQIYTEEGKVWDYMACQPESTDMTKYLKVKLDPPDITCGDPPETFCAMGNPYMCNNECDASTPELAHPPELMFDFEGRHPSTFWQSATWKEYPKPLQVNITLSWSKTIELTDNIVITFESGRPDQMILEKSLDYGRTWQPYQYYATDCLDAFHMDPKSVKDLSQHTVLEIICTEEYSTGYTTNSKIIHFEIKDRFAFFAGPRLRNMASLYGQLDTTKKLRDFFTVTDLRIRLLRPAVGEIFVDELHLARYFYAISDIKVRGRCKCNLHATVCVYDNSKLTCECEHNTTGPDCGKCKKNYQGRPWSPGSYLPIPKGTANTCIPSISSIGNPPKFNRIWPNISSLEVSNPKQANVCDNELLHCQNGGTCHNNVRCLCPAAYTGILCEKLRCEEAGSCGSDSGQGAPPHGSPALLLLTTLLGTASPLVF

SEQ ID NO: 55228 - protein, 539 aa, Homo sapiens
MYLSRFLSIHALWVTVSSVMQPYPLVWGHYDLCKTQIYTEEGKVWDYMACQPESTDMTKYLKVKLDPPDITCGDPPETFCAMGNPYMCNNECDASTPELAHPPELMFDFEGRHPSTFWQSATWKEYPKPLQVNITLSWSKTIELTDNIVITFESGRPDQMILEKSLDYGRTWQPYQYYATDCLDAFHMDPKSVKDLSQHTVLEIICTEEYSTGYTTNSKIIHFEIKDRFAFFAGPRLRNMASLYGQLDTTKKLRDFFTVTDLRIRLLRPAVGEIFVDELHLARYFYAISDIKVRGRCKCNLHATVCVYDNSKLTCECEHNTTGPDCGKCKKNYQGRPWSPGSYLPIPKGTANTCIPSISSIGNCECFGHSNRCSYIDLLNTVICVSCKHNTRGQHCELCRLGYFRNASAQLDDENVCIECYCNPLGSIHDRCNGSGFCECKTGTTGPKCDECLPGNSWHYGCQPNVCDNELLHCQNGGTCHNNVRCLCPAAYTGILCEKLRCEEAGSCGSDSGQGAPPHGSPALLLLTTLLGTASPLVF

SEQ ID NO: 55229 - protein, 460 aa, Homo sapiens
MYLSRFLSIHALWVTVSSVMQPYPLVWGHYDLCKTQIYTEEGKVWDYMACQPESTDMTKYLKVKLDPPDITCGDPPETFCAMGNPYMCNNECDASTPELAHPPELMFDFEGRHPSTFWQSATWKEYPKPLQVNITLSWSKTIELTDNIVITFESGRPDQMILEKSLDYGRTWQPYQYYATDCLDAFHMDPKSVKDLSQHTVLEIICTEEYSTGYTTNSKIIHFEIKDRFAFFAGPRLRNMASLYGQLDTTKKLRDFFTVTDLRIRLLRPAVGEIFVDELHLARYFYAISDIKVRGRCKCNLHATVCVYDNSKLTCECEHNTTGPDCGKCKKNYQGRPWSPGSYLPIPKGTANTCDPYLTSCGDPPKFNRIWPNISSLEVSNPKQANVCDNELLHCQNGGTCHNNVRCLCPAAYTGILCEKLRCEEAGSCGSDSGQGAPPHGSPALLLLTTLLGTASPLVF

SEQ ID NO: 55230 - protein, 480 aa, Homo sapiens; identical to SEQ ID NO: 55226

SEQ ID NO: 55231 - protein, 494 aa, Homo sapiens
MYLSRFLSIHALWVTVSSVMQPYPLVWGHYDLCKTQIYTEEGKVWDYMACQPESTDMTKYLKVKLDPPDITCGDPPETFCAMGNPYMCNNECDASTPELAHPPELMFDFEGRHPSTFWQSATWKEYPKPLQVNITLSWSKTIELTDNIVITFESGRPDQMILEKSLDYGRTWQPYQYYATDCLDAFHMDPKSVKDLSQHTVLEIICTEEYSTGYTTNSKIIHFEIKDRFAFFAGPRLRNMASLYGQLDTTKKLRDFFTVTDLRIRLLRPAVGEIFVDELHLARYFYAISDIKVRGRCKCNLHATVCVYDNSKLTCECEHNTTGPDCGKCKKNYQGRPWSPGSYLPIPKGTANTCDPYLTSCGDCECFGHSNRCSYIDLLNTVICVSCKHNTRGQHCELCRLGYFRNASAQLDDENVCIANVCDNELLHCQNGGTCHNNVRCLCPAAYTGILCEKLRCEEAGSCGSDSGQGAPPHGSPALLLLTTLLGTASPLVF

SEQ ID NO: 55232 - protein, 539 aa, Homo sapiens; identical to SEQ ID NO: 55228

SEQ ID NO: 55233 - protein, 438 aa, Homo sapiens
MYLSRFLSIHALWVTVSSVMQPYPLVWGHYDLCKTQIYTEEGKVWDYMACQPESTDMTKYLKVKLDPPDITCGDPPETFCAMGNPYMCNNECDASTPELAHPPELMFDFEGRHPSTFWQSATWKEYPKPLQVNITLSWSKTIELTDNIVITFESGRPDQMILEKSLDYGRTWQPYQYYATDCLDAFHMDPKSVKDLSQHTVLEIICTEEYSTGYTTNSKIIHFEIKDRFAFFAGPRLRNMASLYGQLDTTKKLRDFFTVTDLRIRLLRPAVGEIFVDELHLARYFYAISDIKVRGRCKCNLHATVCVYDNSKLTCECEHNTTGPDCGKCKKNYQGRPWSPGSYLPIPKGTANTCIPSISSIGTNVCDNELLHCQNGGTCHNNVRCLCPAAYTGILCEKLRCEEAGSCGSDSGQGAPPHGSPALLLLTTLLGTASPLVF

SEQ ID NO: 55234 - protein, 364 aa, Homo sapiens; identical to SEQ ID NO: 55221

SEQ ID NO: 55235 - protein, 438 aa, Homo sapiens
MYLSRFLSIHALWVTVSSVMQPYPLVWGHYDLCKTQIYTEEGKVWDYMACQPESTDMTKYLKVKLDPPDITCGDPPETFCAMGNPYMCNNECDASTPELAHPPELMFDFEGRHPSTFWQSATWKEYPKPLQVNITLSWSKTIELTDNIVITFESGRPDQMILEKSLDYGRTWQPYQYYATDCLDAFHMDPKSVKDLSQHTVLEIICTEEYSTGYTTNSKIIHFEIKDRFAFFAGPRLRNMASLYGQLDTTKKLRDFFTVTDLRIRLLRPAVGEIFVDELHLARYFYAISDIKVRGRCKCNLHATVCVYDNSKLTCECEHNTTGPDCGKCKKNYQGRPWSPGSYLPIPKGTANTYLPSMYSVAANVCDNELLHCQNGGTCHNNVRCLCPAAYTGILCEKLRCEEAGSCGSDSGQGAPPHGSPALLLLTTLLGTASPLVF

SEQ ID NO: 55236 - protein, 539 aa, Homo sapiens
MYLSRFLSIHALWVTVSSVMQPYPLVWGHYDLCKTQIYTEEGKVWDYMACQPESTDMTKYLKVKLDPPDITCGDPPETFCAMGNPYMCNNECDASTPELAHPPELMFDFEGRHPSTFWQSATWKEYPKPLQVNITLSWSKTIELTDNIVITFESGRPDQMILEKSLDYGRTWQPYQYYATDCLDAFHMDPKSVKDLSQHTVLEIICTEEYSTGYTTNSKIIHFEIKDRFAFFAGPRLRNMASLYGQLDTTKKLRDFFTVTDLRIRLLRPAVGEIFVDELHLARYFYAISDIKVRGRCKCNLHATVCVYDNSKLTCECEHNTTGPDCGKCKKNYQGRPWSPGSYLPIPKGTANTCDPYLTSCGDCECFGHSNRCSYIDLLNTVICVSCKHNTRGQHCELCRLGYFRNASAQLDDENVCIECYCNPLGSIHDRCNGSGFCECKTGTTGPKCDECLPGNSWHYGCQPNVCDNELLHCQNGGTCHNNVRCLCPAAYTGILCEKLRCEEAGSCGSDSGQGAPPHGSPALLLLTTLLGTASPLVF

SEQ ID NO: 55237 - protein, 172 aa, Homo sapiens
MVGPAPRRRLRPLAALALVLALAPGLPTARAGQTPRPAERGPPVRLFTEEELARYGGEEEDQPIYLAVKGVVFDVTSGKEFYGRGAPYNALTGKDSTRGVAKMSLDPADLTHDTTGLTAKELEALDEVFTKVYKAKYPIVGYTARRILNEDGSPNLDFKPEDQPHFDIKDEF

SEQ ID NO: 55238 - protein, 695 aa, Homo sapiens
MSLLLSFYLLGLLVSSGQDRFAMLANNNLQILNINKSDEGIYRCEGRVEARGEIDFRDIIVIVNVPPAISMPQKSFNATAERGEEMTFSCRASGSPEPAISWFRNGKLIEENEKYILKGSNTELTVRNIINSDGGPYVCRATNKAGEDEKQAFLQVFVQPHIIQLKNETTYENGQVTLVCDAEGEPIPEITWKRAVDGFTFTEGDKSLDGRIEVKGQHGSSSLHIKDVKLSDSGRYDCEAASRIGGHQKSMYLDIEYAPKFISNQTIYYSWEGNPINISCDVKSNPPASIHWRRDKLVLPAKNTTNLKTYSTGRKMILEIAPTSDNDFGRYNCTATNHIGTRFQEYILALADVPSSPYGVKIIELSQTTAKVSFNKPDSHGGVPIHHYQVDVKEVASEIWKIVRSHGVQTMVVLNNLEPNTTYEIRVAAVNGKGQGDYSKIEIFQTLPVREPSPPSIHGQPSSGKSFKLSITKQDDGGAPILEYIVKYRSKDKEDQWLEKKVQGNKDHIILEHLQWTMGYEVQITAANRLGYSEPTVYEFSMPPKPNIIKDTLFNGLGLGAVIGLGVAALLLILVVTDVSCFFIRQCGLLMCITRRMCGKKSGSSGKSKELEEGKAAYLKDGSKEPIVEMRTEDERVTNHEDGSPVNEPNETTPLTEPEKLPLKEEDGKEALNPETIEIKVSNDIIQSKEDDSKA

SEQ ID NO: 55239 - protein, 837 aa, Homo sapiens
MSLLLSFYLLGLLVSSGQALLQVTISLSKVELSVGESKFFTCTAIGEPESIDWYNPQGEKIISTQRVVVQKEGVRSRLTIYNANIEDAGIYRCQATDAKGQTQEATVVLEIYQKLTFREVVSPQEFKQGEDAEVVCRVSSSPAPAVSWLYHNEEVTTISDNRFAMLANNNLQILNINKSDEGIYRCEGRVEARGEIDFRDIIVIVNVPPAISMPQKSFNATAERGEEMTFSCRASGSPEPAISWFRNGKLIEENEKYILKGSNTELTVRNIINSDGGPYVCRATNKAGEDEKQAFLQVFVQPHIIQLKNETTYENGQVTLVCDAEGEPIPEITWKRAVDGFTFTEGDKSLDGRIEVKGQHGSSSLHIKDVKLSDSGRYDCEAASRIGGHQKSMYLDIEYAPKFISNQTIYYSWEGNPINISCDVKSNPPASIHWRRDKLVLPAKNTTNLKTYSTGRKMILEIAPTSDNDFGRYNCTATNHIGTRFQEYILALADVPSSPYGVKIIELSQTTAKVSFNKPDSHGGVPIHHYQVDVKEVASEIWKIVRSHGVQTMVVLNNLEPNTTYEIRVAAVNGKGQGDYSKIEIFQTLPVREPSPPSIHGQPSSGKSFKLSITKQDDGGAPILEYIVKYRSKDKEDQWLEKKVQGNKDHIILEHLQWTMGYEVQITAANRLGYSEPTVYEFSMPPKPNIIKDTLFNGLGLGAVIGLGVAALLLILVVTDVSCFFIRQCGLLMCITRRMCGKKSGSSGKSKELEEGKAAYLKDGSKEPIVEMRTEDERVTNHEDGSPVNEPNETTPLTEPEKLPLKEEDGKEALNPETIEIKVSNDIIQSKEDDSKA

SEQ ID NO: 55240 - protein, 424 aa, Homo sapiens
MVRSDSGGQVYLDYHNRQGLFVDWKYNEALYLEEGQPETYYRTALLQVTISLSKVELSVGESKFFTCTAIGEPESIDWYNPQGEKIISTQRVVVQKEGVRSRLTIYNANIEDAGIYRCQATDAKGQTQEATVVLEIYQKLTFREVVSPQEFKQGEDAEVVCRVSSSPAPAVSWLYHNEEVTTISDNRFAMLANNNLQILNINKSDEGIYRCEGRVEARGEIDFRDIIVIVNVPPAISMPQKSFNATAERGEEMTFSCRASGSPEPAISWFRNGKLIEENEKYILKGSNTELTVRNIINSDGGPYVCRATNKAGEDEKQAFLQVFVQPHIIQLKNETTYENGQVTLVCDAEGEPIPEITWKRAVDGFTFTEGDKSLDGRIEVKGQHGSSSLHIKDVKLSDSGRYDCEAASRIGGHQKSMYLDIES

SEQ ID NO: 55241 - protein, 660 aa, Homo sapiens
MQENLRFASSGDDIKIWDASSMTLVDKFNPHTSPHGISSICWSSNNNFLVTASSSGDKIVVSSCKCKPVPLLELAEGQKQTCVNLNSTSMYLVSGGLNNTVNIWDLKSKRVHRSLKDHKDQVTCVTYNWNDCYIASGSLSGEIILHSVTTNLSSTPFGHGSNQSVRHLKYSLFKKSLLGSVSDNGIVTLWDVNSQSPYHNFDSVHKAPASGICFSPVNELLFVTIGLDKRIILYDTSSKKLVKTLVADTPLTAVDFMPDGATLAIGSSRGKIYQYDLRMLKSPVKTISAHKTSVQCIAFQYSTVLTKSSLNKGCSNKPTTVNKRSVNVNAASGGVQNSGIVREAPATSIATVLPQPMTSAMGKGTVAVQEKAGLPRSINTDTLSKETDSGKNQDFSSFDDTGKSSLGDMFSPIRDDAVVNKGSDESIGKGDGFDFLPQLNSVFPPRKNPVTSSTSVLHSSPLNVFMGSPGKEENENRDLTAESKKIYMGKQESKDSFKQLAKLVTSGAESGNLNTSPSSNQTRNSEKFEKPENEIEAQLICEPPINGSSTPNPKIASSVTAGVASSLSEKIADSIGNNRQNAPLTSIQIRFIQNMIQETLDDFREACHRDIVNLQVEMIKQFHMQLNEMHSLLERYSVNEGLVAEIERLREENKRLRAHF

SEQ ID NO: 55242 - protein, 571 aa, Homo sapiens
MYLVSGGLNNTVNIWDLKSKRVHRSLKDHKDQVTCVTYNWNDCYIASGSLSGEIILHSVTTNLSSTPFGHGSNQSVRHLKYSLFKKSLLGSVSDNGIVTLWDVNSQSPYHNFDSVHKAPASGICFSPVNELLFVTIGLDKRIILYDTSSKKLVKTLVADTPLTAVDFMPDGATLAIGSSRGKIYQYDLRMLKSPVKTISAHKTSVQCIAFQYSTVLTKSSLNKGCSNKPTTVNKRSVNVNAASGGVQNSGIVREAPATSIATVLPQPMTSAMGKGTVAVQEKAGLPRSINTDTLSKETDSGKNQDFSSFDDTGKSSLGDMFSPIRDDAVVNKGSDESIGKGDGFDFLPQLNSVFPPRKNPVTSSTSVLHSSPLNVFMGSPGKEENENRDLTAESKKIYMGKQESKDSFKQLAKLVTSGAESGNLNTSPSSNQTRNSEKFEKPENEIEAQLICEPPINGSSTPNPKIASSVTAGVASSLSEKIADSIGNNRQNAPLTSIQIRFIQNMIQETLDDFREACHRDIVNLQVEMIKQFHMQLNEMHSLLERYSVNEGLVAEIERLREENKRLRAHF

SEQ ID NO: 55243 - protein, 660 aa, Homo sapiens; identical to SEQ ID NO: 55241

SEQ ID NO: 55244 - protein, 571 aa, Homo sapiens; identical to SEQ ID NO: 55242

SEQ ID NO: 55245 - protein, 160 aa, Homo sapiens
MYLVSGGLNNTVNIWDLKSKRVHRSLKDHKDQVTCVTYNWNDCYIASGSLSGEIILHSVTTNLSSTPFGHGSNQSVRHLKYSLFKKSLLGSVSDNGIVTLWDVNSQSPYHNFDSVHKAPASGICFSPVNELLFVTIGLDKRIILYDTSSKKLVKTLVADT

SEQ ID NO: 55246 - protein, 167 aa, Homo sapiens
MHFTGAVMQENLRFASSGDDIKIWDASSMTLVDKFNPHTSPHGISSICWSSNNNFLVTASSSGDKIVVSSCKCKPVPLLELAEGQKQTCVNLNSTSMYLVSGGLNNTVNIWDLKSKRVHRSLKDHKDQVTCVTYNWNDCYIASGSLSGEIILHSVTTNLSSTPFGHG

SEQ ID NO: 55247 - protein, 101 aa, Homo sapiens
MQENLRFASSGDDIKIWDASSMTLVDKFNPHTSPHGISSICWSSNNNFLVTASSSGDKIVVSSCKCKPVPLLELAEGQKQTCVNLNSTSMYLVSGGLNNTV

SEQ ID NO: 55248 - protein, 165 aa, Homo sapiens
MQENLRFASSGDDIKIWDASSMTLVDKFNPHTSPHGISSICWSSNNNFLVTASSSGDKIVVSSCKCKPVPLLELAEGQKQTCVNLNSTSMYLVSGGLNNTVNIWDLKSKRVHRSLKDHKDQVTCVTYNWNDCYIASGSLSGEIILHSVTTNLSSTPFGHGSNQSV

SEQ ID NO: 55249 - protein, 667 aa, Homo sapiens
MHFTGAVMQENLRFASSGDDIKIWDASSMTLVDKFNPHTSPHGISSICWSSNNNFLVTASSSGDKIVVSSCKCKPVPLLELAEGQKQTCVNLNSTSMYLVSGGLNNTVNIWDLKSKRVHRSLKDHKDQVTCVTYNWNDCYIASGSLSGEIILHSVTTNLSSTPFGHGSNQSVRHLKYSLFKKSLLGSVSDNGIVTLWDVNSQSPYHNFDSVHKAPASGICFSPVNELLFVTIGLDKRIILYDTSSKKLVKTLVADTPLTAVDFMPDGATLAIGSSRGKIYQYDLRMLKSPVKTISAHKTSVQCIAFQYSTVLTKSSLNKGCSNKPTTVNKRSVNVNAASGGVQNSGIVREAPATSIATVLPQPMTSAMGKGTVAVQEKAGLPRSINTDTLSKETDSGKNQDFSSFDDTGKSSLGDMFSPIRDDAVVNKGSDESIGKGDGFDFLPQLNSVFPPRKNPVTSSTSVLHSSPLNVFMGSPGKEENENRDLTAESKKIYMGKQESKDSFKQLAKLVTSGAESGNLNTSPSSNQTRNSEKFEKPENEIEAQLICEPPINGSSTPNPKIASSVTAGVASSLSEKIADSIGNNRQNAPLTSIQIRFIQNMIQETLDDFREACHRDIVNLQVEMIKQFHMQLNEMHSLLERYSVNEGLVAEIERLREENKRLRAHF

SEQ ID NO: 55250 - protein, 1247 aa, Homo sapiens
MAQSLRLHFAARRSNTYPLSETSGDDLDSHVHMCFKRPTRISTSNVVQMKLTPRQTALAPLIKENVQSQERSSVPSSENVNKKSSCLQISLQPTRYSGYLQSSNVLADSDDASFTCILKDGIYSSAVVDNELNAVNDGHLVSSPAICSGSLSNFSTSDNGSYSSNGSDFGSCASITSGGSYTNSVISDSSSYTFPPSDDTFLGGNLPSDSTSNRSVPNRNTTPCEIFSRSTSTDPFVQDDLEHGLEIMKLPVSRNTKIPLKRYSSLVIFPRSPSTTRPTSPTSLCTLLSKGSYQTSHQFIISPSEIAHNEDGTSAKGFLSTAVNGLRLSKTICTPGEVRDIRPLHRKGSLQKKIVLSNNTPRQTVCEKSSEGYSCVSVHFTQRKAATLDCETTNGDCKPEMSEIKLNSDSEYIKLMHRTSACLPSSQNVDCQININGELERPHSQMNKNHGILRRSISLGGAYPNISCLSSLKHNCSKGGPSQLLIKFASGNEGKVDNLSRDSNRDCTNELSNSCKPGWVVLDQPDAACHLQQQQEPSPLPPGWEERQDILGRTYYVNHESRRTQWKRPTPQDNLTDAENGNIQLQAQRAFTTRRQISEETESVDNRESSENWEIIREDEATMYSNQAFPSPPPSSNLDVPTHLAEELNARLTIFGNSAVSQPASSSNHSSRRGSLQAYTFEEQPTLPVLLPTSSGLPPGWEEKQDERGRSYYVDHNSRTTTWTKPTVQATVETSQLTSSQSSAGPQSQASTSDSGQQVTQPSEIEQGFLPKGWEVRHAPNGRPFFIDHNTKTTTWEDPRLKIPAHLRGKTSLDTSNDLGPLPPGWEERTHTDGRIFYINHNIKRTQWEDPRLENVAITGPAVPYSRDYKRKYEFFRRKLKKQNDIPNKFEMKLRRATVLEDSYRRIMGVKRADFLKARLWIEFDGEKGLDYGGVAREWFFLISKEMFNPYYGLFEYSATDNYTLQINPNSGLCNEDHLSYFKFIGRVAGMAVYHGKLLDGFFIRPFYKMMLHKPITLHDMESVDSEYYNSLRWILENDPTELDLRFIIDEELFGQTHQHELKNGGSEIVVTNKNKKEYIYLVIQWRFVNRIQKQMAAFKEGFFELIPQDLIKIFDENELELLMCGLGDVDVNDWREHTKYKNGYSANHQVIQWFWKAVLMMDSEKRIRLLQFVTGTSRVPMNGFAELYGSNGPQSFTVEQWGTPEKLPRAHTCFNRLDLPPYESFEELWDKLQMAIENTQGFDGVD

SEQ ID NO: 55251 - protein, 900 aa, Homo sapiens
MATCAVEVFGLLEDEENSRIVRVRVIAGIGLAKKDILGASDPYVRVTLYDPMNGVLTSVQTKTIKKSLNPKWNEEILFRVHPQQHRLLFEVFDENRLTRDDFLGQVDVPLYPLPTENPRLERPYTFKDFVLHPRSHKSRVKGYLRLKMTYLPKTSGSEDDNAEQAEELEPGWVVLDQPDAACHLQQQQEPSPLPPGWEERQDILGRTYYVNHESRRTQWKRPTPQDNLTDAENGNIQLQAQRAFTTRRQISEETESVDNRESSENWEIIREDEATMYSNQAFPSPPPSSNLDVPTHLAEELNARLTIFGNSAVSQPASSSNHSSRRGSLQAYTFEEQPTLPVLLPTSSGLPPGWEEKQDERGRSYYVDHNSRTTTWTKPTVQATVETSQLTSSQSSAGPQSQASTSDSGQQVTQPSEIEQGFLPKGWEVRHAPNGRPFFIDHNTKTTTWEDPRLKIPAHLRGKTSLDTSNDLGPLPPGWEERTHTDGRIFYINHNIKRTQWEDPRLENVAITGPAVPYSRDYKRKYEFFRRKLKKQNDIPNKFEMKLRRATVLEDSYRRIMGVKRADFLKARLWIEFDGEKGLDYGGVAREWFFLISKEMFNPYYGLFEYSATDNYTLQINPNSGLCNEDHLSYFKFIGRVAGMAVYHGKLLDGFFIRPFYKMMLHKPITLHDMESVDSEYYNSLRWILENDPTELDLRFIIDEELFGQTHQHELKNGGSEIVVTNKNKKEYIYLVIQWRFVNRIQKQMAAFKEGFFELIPQDLIKIFDENELELLMCGLGDVDVNDWREHTKYKNGYSANHQVIQWFWKAVLMMDSEKRIRLLQFVTGTSRVPMNGFAELYGSNGPQSFTVEQWGTPEKLPRAHTCFNRLDLPPYESFEELWDKLQMAIENTQGFDGVD

SEQ ID NO: 55252 - protein, 1303 aa, Homo sapiens
MAQSLRLHFAARRSNTYPLSETSGDDLDSHVHMCFKRPTRISTSNVVQMKLTPRQTALAPLIKENVQSQERSSVPSSENVNKKSSCLQISLQPTRYSGYLQSSNVLADSDDASFTCILKDGIYSSAVVDNELNAVNDGHLVSSPAICSGSLSNFSTSDNGSYSSNGSDFGSCASITSGGSYTNSVISDSSSYTFPPSDDTFLGGNLPSDSTSNRSVPNRNTTPCEIFSRSTSTDPFVQDDLEHGLEIMKLPVSRNTKIPLKRYSSLVIFPRSPSTTRPTSPTSLCTLLSKGSYQTSHQFIISPSEIAHNEDGTSAKGFLSTAVNGLRLSKTICTPGEVRDIRPLHRKGSLQKKIVLSNNTPRQTVCEKSSEGYSCVSVHFTQRKAATLDCETTNGDCKPEMSEIKLNSDSEYIKLMHRTSACLPSSQNVDCQININGELERPHSQMNKNHGILRRSISLGGAYPNISCLSSLKHNCSKGGPSQLLIKFASGNEGKVDNLSRDSNRDCTNELSNSCKTRDDFLGQVDVPLYPLPTENPRLERPYTFKDFVLHPRSHKSRVKGYLRLKMTYLPKTSGSEDDNAEQAEELEQQQEPSPLPPGWEERQDILGRTYYVNHESRRTQWKRPTPQDNLTDAENGNIQLQAQRAFTTRRQISEETESVDNRESSENWEIIREDEATMYSNQAFPSPPPSSNLDVPTHLAEELNARLTIFGNSAVSQPASSSNHSSRRGSLQAYTFEEQPTLPVLLPTSSGLPPGWEEKQDERGRSYYVDHNSRTTTWTKPTVQATVETSQLTSSQSSAGPQSQASTSDSGQQVTQPSEIEQGFLPKGWEVRHAPNGRPFFIDHNTKTTTWEDPRLKIPAHLRGKTSLDTSNDLGPLPPGWEERTHTDGRIFYINHNIKRTQWEDPRLENVAITGPAVPYSRDYKRKYEFFRRKLKKQNDIPNKFEMKLRRATVLEDSYRRIMGVKRADFLKARLWIEFDGEKGLDYGGVAREWFFLISKEMFNPYYGLFEYSATDNYTLQINPNSGLCNEDHLSYFKFIGRVAGMAVYHGKLLDGFFIRPFYKMMLHKPITLHDMESVDSEYYNSLRWILENDPTELDLRFIIDEELFGQTHQHELKNGGSEIVVTNKNKKEYIYLVIQWRFVNRIQKQMAAFKEGFFELIPQDLIKIFDENELELLMCGLGDVDVNDWREHTKYKNGYSANHQVIQWFWKAVLMMDSEKRIRLLQFVTGTSRVPMNGFAELYGSNGPQSFTVEQWGTPEKLPRAHTCFNRLDLPPYESFEELWDKLQMAIENTQGFDGVD

SEQ ID NO: 55253 - protein, 1319 aa, Homo sapiens
MAQSLRLHFAARRSNTYPLSETSGDDLDSHVHMCFKRPTRISTSNVVQMKLTPRQTALAPLIKENVQSQERSSVPSSENVNKKSSCLQISLQPTRYSGYLQSSNVLADSDDASFTCILKDGIYSSAVVDNELNAVNDGHLVSSPAICSGSLSNFSTSDNGSYSSNGSDFGSCASITSGGSYTNSVISDSSSYTFPPSDDTFLGGNLPSDSTSNRSVPNRNTTPCEIFSRSTSTDPFVQDDLEHGLEIMKLPVSRNTKIPLKRYSSLVIFPRSPSTTRPTSPTSLCTLLSKGSYQTSHQFIISPSEIAHNEDGTSAKGFLSTAVNGLRLSKTICTPGEVRDIRPLHRKGSLQKKIVLSNNTPRQTVCEKSSEGYSCVSVHFTQRKAATLDCETTNGDCKPEMSEIKLNSDSEYIKLMHRTSACLPSSQNVDCQININGELERPHSQMNKNHGILRRSISLGGAYPNISCLSSLKHNCSKGGPSQLLIKFASGNEGKVDNLSRDSNRDCTNELSNSCKTRDDFLGQVDVPLYPLPTENPRLERPYTFKDFVLHPRSHKSRVKGYLRLKMTYLPKTSGSEDDNAEQAEELEPGWVVLDQPDAACHLQQQQEPSPLPPGWEERQDILGRTYYVNHESRRTQWKRPTPQDNLTDAENGNIQLQAQRAFTTRRQISEETESVDNRESSENWEIIREDEATMYSNQAFPSPPPSSNLDVPTHLAEELNARLTIFGNSAVSQPASSSNHSSRRGSLQAYTFEEQPTLPVLLPTSSGLPPGWEEKQDERGRSYYVDHNSRTTTWTKPTVQATVETSQLTSSQSSAGPQSQASTSDSGQQVTQPSEIEQGFLPKGWEVRHAPNGRPFFIDHNTKTTTWEDPRLKIPAHLRGKTSLDTSNDLGPLPPGWEERTHTDGRIFYINHNIKRTQWEDPRLENVAITGPAVPYSRDYKRKYEFFRRKLKKQNDIPNKFEMKLRRATVLEDSYRRIMGVKRADFLKARLWIEFDGEKGLDYGGVAREWFFLISKEMFNPYYGLFEYSATDNYTLQINPNSGLCNEDHLSYFKFIGRVAGMAVYHGKLLDGFFIRPFYKMMLHKPITLHDMESVDSEYYNSLRWILENDPTELDLRFIIDEELFGQTHQHELKNGGSEIVVTNKNKKEYIYLVIQWRFVNRIQKQMAAFKEGFFELIPQDLIKIFDENELELLMCGLGDVDVNDWREHTKYKNGYSANHQVIQWFWKAVLMMDSEKRIRLLQFVTGTSRVPMNGFAELYGSNGPQSFTVEQWGTPEKLPRAHTCFNRLDLPPYESFEELWDKLQMAIENTQGFDGVD

SEQ ID NO: 55254 - protein, 871 aa, Homo sapiens
MATGLGEPVYGLSEDEGESRILRVKVVSGIDLAKKDIFGASDPYVKLSLYVADENRELALVQTKTIKKTLNPKWNEEFYFRVNPSNHRLLFEVFDENRLTRDDFLGQVDVPLSHLPTEDPTMERPYTFKDFLLRPRSHKSRVKGFLRLKMAYMPKNGGQDEENSDQRDDMEHGWEVVDSNDSASQHQEELPPPPLPPGWEEKVDNLGRTYYVNHNNRTTQWHRPSLMDVSSESDNNIRQINQEAAHRRFRSRRHISEDLEPEPSEGGDVPEPWETISEEVNIAGDSLGLALPPPPASPGSRTSPQELSEELSRRLQITPDSNGEQFSSLIQREPSSRLRSCSVTDAVAEQGHLPPGAKDSPVRRAVKDTLSNPQSPQPSPYNSPKPQHKVTQSFLPPGWEMRIAPNGRPFFIDHNTKTTTWEDPRLKFPVHMRSKTSLNPNDLGPLPPGWEERIHLDGRTFYIDHNSKITQWEDPRLQNPAITGPAVPYSREFKQKYDYFRKKLKKPADIPNRFEMKLHRNNIFEESYRRIMSVKRPDVLKARLWIEFESEKGLDYGGVAREWFFLLSKEMFNPYYGLFEYSATDNYTLQINPNSGLCNEDHLSYFTFIGRVAGLAVFHGKLLDGFFIRPFYKMMLGKQITLNDMESVDSEYYNSLKWILENDPTELDLMFCIDEENFGQTYQVDLKPNGSEIMVTNENKREYIDLVIQWRFVNRVQKQMNAFLEGFTELLPIDLIKIFDENELELLMCGLGDVDVNDWRQHSIYKNGYCPNHPVIQWFWKAVLLMDAEKRIRLLQFVTGTSRVPMNGFAELYGSNGPQLFTIEQWGSPEKLPRAHTCFNRLDLPPYETFEDLREKLLMAVENAQGFEGVD

SEQ ID NO: 55255 - protein, 835 aa, Homo sapiens
MERPYTFKDFLLRPRSHKSRVKGFLRLKMAYMPKNGGQDEENSDQRDDMEHGWEVVDSNDSASQHQEELPPPPLPPGWEEKVDNLGRTYYVNHNNRTTQWHRPSLMDVSSESDNNIRQINQEAAHRRFRSRRHISEDLEPEPSEGGDVPEPWETISEEVNIAGDSLGLALPPPPASPGSRTSPQELSEELSRRLQITPDSNGEQFSSLIQREPSSRLRSCSVTDAVAEQGHLPPPSVAYVHTTPGLPSGWEERKDAKGRTYYVNHNNRTTTWTRPIMQLAEDGASGSATNSNNHLIEPQIRRPRSLSSPTVTLSAPLEGAKDSPVRRAVKDTLSNPQSPQPSPYNSPKPQHKVTQSFLPPGWEMRIAPNGRPFFIDHNTKTTTWEDPRLKFPVHMRSKTSLNPNDLGPLPPGWEERIHLDGRTFYIDHNSKITQWEDPRLQNPAITGPKAVPYSREFKQKYDYFRKKLKKPADIPNRFEMKLHRNNIFEESYRRIMSVKRPDVLKARLWIEFESEKGLDYGGVAREWFFLLSKEMFNPYYGLFEYSATDNYTLQINPNSGLCNEDHLSYFTFIGRVAGLAVFHGKLLDGFFIRPFYKMMLGKQITLNDMESVDSEYYNSLKWILENDPTELDLMFCIDEENFGQTYQVDLKPNGSEIMVTNENKREYIDLVIQWRFVNRVQKQMNAFLEGFTELLPIDLIKIFDENELELLMCGLGDVDVNDWRQHSIYKNGYCPNHPVIQWFWKAVLLMDAEKRIRLLQFVTGTSRVPMNGFAELYGSNGPQLFTIEQWGSPEKLPRAHTCFNRLDLPPYETFEDLREKLLMAVENAQGFEGVD

SEQ ID NO: 55256 - protein, 911 aa, Homo sapiens
MATGLGEPVYGLSEDEGESRILRVKVVSGIDLAKKDIFGASDPYVKLSLYVADENRELALVQTKTIKKTLNPKWNEEFYFRVNPSNHRLLFEVFDENRLTRDDFLGQVDVPLSHLPTEDPTMERPYTFKDFLLRPRSHKSRVKGFLRLKMAYMPKNGGQDEENSDQRDDMEHGWEVVDSNDSASQHQEELPPPPLPPGWEEKVDNLGRTYYVNHNNRTTQWHRPSLMDVSSESDNNIRQINQEAAHRRFRSRRHISEDLEPEPSEGGDVPEPWETISEEVNIAGDSLGLALPPPPASPGSRTSPQELSEELSRRLQITPDSNGEQFSSLIQREPSSRLRSCSVTDAVAEQGHLPPLAEDGASGSATNSNNHLIEPQIRRPRSLSSPTVTLSAPLEGAKDSPVRRAVKDTLSNPQSPQPSPYNSPKPQHKVTQSFLPPGWEMRIAPNGRPFFIDHNTKTTTWEDPRLKFPVHMRSKTSLNPNDLGPLPPGWEERIHLDGRTFYIDHNSKITQWEDPRLQNPAITGPAVPYSREFKQKYDYFRKKLKKPADIPNRFEMKLHRNNIFEESYRRIMSVKRPDVLKARLWIEFESEKGLDYGGVAREWFFLLSKEMFNPYYGLFEYSATDNYTLQINPNSGLCNEDHLSYFTFIGRVAGLAVFHGKLLDGFFIRPFYKMMLGKQITLNDMESVDSEYYNSLKWILENDPTELDLMFCIDEENFGQTYQVDLKPNGSEIMVTNENKREYIDLVIQWRFVNRVQKQMNAFLEGFTELLPIDLIKIFDENELELLMCGLGDVDVNDWRQHSIYKNGYCPNHPVIQWFWKAVLLMDAEKRIRLLQFVTGTSRVPMNGFAELYGSNGPQLFTIEQWGSPEKLPRAHTCFNRLDLPPYETFEDLREKLLMAVENAQGFEGVD

SEQ ID NO: 55257 - protein, 967 aa, Homo sapiens
MRRLAFEQGESRILRVKVVSGIDLAKKDIFGASDPYVKLSLYVADENRELALVQTKTIKKTLNPKWNEEFYFRVNPSNHRLLFEVFDENRLTRDDFLGQVDVPLSHLPTEDPTMERPYTFKDFLLRPRSHKSRVKGFLRLKMAYMPKNGGQDEENSDQRDDMEHGWEVVDSNDSASQHQEELPPPPLPPGWEEKVDNLGRTYYVNHNNRTTQWHRPSLMDVSSESDNNIRQINQEAAHRRFRSRRHISEDLEPEPSEGGDVPEPWETISEEVNIAGDSLGLALPPPPASPGSRTSPQELSEELSRRLQITPDSNGEQFSSLIQREPSSRLRSCSVTDAVAEQGHLPPPSAPAGRARSSTVTGGEEPTPSVAYVHTTPGLPSGWEERKDAKGRTYYVNHNNRTTTWTRPIMQLAEDGASGSATNSNNHLIEPQIRRPRSLSSPTVTLSAPLEGAKDSPVRRAVKDTLSNPQSPQPSPYNSPKPQHKVTQSFLPPGWEMRIAPNGRPFFIDHNTKTTTWEDPRLKFPVHMRSKTSLNPNDLGPLPPGWEERIHLDGRTFYIDHNSKITQWEDPRLQNPAITGPAVPYSREFKQKYDYFRKKLKKPADIPNRFEMKLHRNNIFEESYRRIMSVKRPDVLKARLWIEFESEKGLDYGGVAREWFFLLSKEMFNPYYGLFEYSATDNYTLQINPNSGLCNEDHLSYFTFIGRVAGLAVFHGKLLDGFFIRPFYKMMLGKQITLNDMESVDSEYYNSLKWILENDPTELDLMFCIDEENFGQTYQVDLKPNGSEIMVTNENKREYIDLVIQWRFVNRVQKQMNAFLEGFTELLPIDLIKIFDENELELLMCGLGDVDVNDWRQHSIYKNGYCPNHPVIQWFWKAVLLMDAEKRIRLLQFVTGTSRVPMNGFAELYGSNGPQLFTIEQWGSPEKLPRAHTCFNRLDLPPYETFEDLREKLLMAVENAQGFEGVD

SEQ ID NO: 55258 - protein, 955 aa, Homo sapiens
MATGLGEPVYGLSEDEGESRILRVKVVSGIDLAKKDIFGASDPYVKLSLYVADENRELALVQTKTIKKTLNPKWNEEFYFRVNPSNHRLLFEVFDENRLTRDDFLGQVDVPLSHLPTEDPTMERPYTFKDFLLRPRSHKSRVKGFLRLKMAYMPKNGGQDEENSDQRDDMEHGWEVVDSNDSASQHQEELPPPPLPPGWEEKVDNLGRTYYVNHNNRTTQWHRPSLMDVSSESDNNIRQINQEAAHRRFRSRRHISEDLEPEPSEGGDVPEPWETISEEVNIAGDSLGLALPPPPASPGSRTSPQELSEELSRRLQITPDSNGEQFSSLIQREPSSRLRSCSVTDAVAEQGHLPPPSVAYVHTTPGLPSGWEERKDAKGRTYYVNHNNRTTTWTRPIMQLAEDGASGSATNSNNHLIEPQIRRPRSLSSPTVTLSAPLEGAKDSPVRRAVKDTLSNPQSPQPSPYNSPKPQHKVTQSFLPPGWEMRIAPNGRPFFIDHNTKTTTWEDPRLKFPVHMRSKTSLNPNDLGPLPPGWEERIHLDGRTFYIDHNSKITQWEDPRLQNPAITGPAVPYSREFKQKYDYFRKKLKKPADIPNRFEMKLHRNNIFEESYRRIMSVKRPDVLKARLWIEFESEKGLDYGGVAREWFFLLSKEMFNPYYGLFEYSATDNYTLQINPNSGLCNEDHLSYFTFIGRVAGLAVFHGKLLDGFFIRPFYKMMLGKQITLNDMESVDSEYYNSLKWILENDPTELDLMFCIDEENFGQTYQVDLKPNGSEIMVTNENKREYIDLVIQWRFVNRVQKQMNAFLEGFTELLPIDLIKIFDENELELLMCGLGDVDVNDWRQHSIYKNGYCPNHPVIQWFWKAVLLMDAEKRIRLLQFVTGTSRVPMNGFAELYGSNGPQLFTIEQWGSPEKLPRAHTCFNRLDLPPYETFEDLREKLLMAVENAQGFEGVD

SEQ ID NO: 55259 - protein, 975 aa, Homo sapiens
MATGLGEPVYGLSEDEGESRILRVKVVSGIDLAKKDIFGASDPYVKLSLYVADENRELALVQTKTIKKTLNPKWNEEFYFRVNPSNHRLLFEVFDENRLTRDDFLGQVDVPLSHLPTEDPTMERPYTFKDFLLRPRSHKSRVKGFLRLKMAYMPKNGGQDEENSDQRDDMEHGWEVVDSNDSASQHQEELPPPPLPPGWEEKVDNLGRTYYVNHNNRTTQWHRPSLMDVSSESDNNIRQINQEAAHRRFRSRRHISEDLEPEPSEGGDVPEPWETISEEVNIAGDSLGLALPPPPASPGSRTSPQELSEELSRRLQITPDSNGEQFSSLIQREPSSRLRSCSVTDAVAEQGHLPPPSAPAGRARSSTVTGGEEPTPSVAYVHTTPGLPSGWEERKDAKGRTYYVNHNNRTTTWTRPIMQLAEDGASGSATNSNNHLIEPQIRRPRSLSSPTVTLSAPLEGAKDSPVRRAVKDTLSNPQSPQPSPYNSPKPQHKVTQSFLPPGWEMRIAPNGRPFFIDHNTKTTTWEDPRLKFPVHMRSKTSLNPNDLGPLPPGWEERIHLDGRTFYIDHNSKITQWEDPRLQNPAITGPAVPYSREFKQKYDYFRKKLKKPADIPNRFEMKLHRNNIFEESYRRIMSVKRPDVLKARLWIEFESEKGLDYGGVAREWFFLLSKEMFNPYYGLFEYSATDNYTLQINPNSGLCNEDHLSYFTFIGRVAGLAVFHGKLLDGFFIRPFYKMMLGKQITLNDMESVDSEYYNSLKWILENDPTELDLMFCIDEENFGQTYQVDLKPNGSEIMVTNENKREYIDLVIQWRFVNRVQKQMNAFLEGFTELLPIDLIKIFDENELELLMCGLGDVDVNDWRQHSIYKNGYCPNHPVIQWFWKAVLLMDAEKRIRLLQFVTGTSRVPMNGFAELYGSNGPQLFTIEQWGSPEKLPRAHTCFNRLDLPPYETFEDLREKLLMAVENAQGFEGVD

SEQ ID NO: 55260 - protein, 854 aa, Homo sapiens
MERPYTFKDFLLRPRSHKSRVKGFLRLKMAYMPKNGGQDEENSDQRDDMEHGWEVVDSNDSASQHQEELPPPPLPPGWEEKVDNLGRTYYVNHNNRTTQWHRPSLMDVSSESDNNIRQINQEAAHRRFRSRRHISEDLEPEPSEGGDVPEPWETISEEVNIAGDSLGLALPPPPASPGSRTSPQELSEELSRRLQITPDSNGEQFSSLIQREPSSRLRSCSVTDAVAEQGHLPPPSAPAGRARSSTVTGGEEPTPSVAYVHTTPGLPSGWEERKDAKGRTYYVNHNNRTTTWTRPIMQLAEDGASGSATNSNNHLIEPQIRRPRSLSSPTVTLSAPLEGAKDSPVRRAVKDTLSNPQSPQPSPYNSPKPQHKVTQSFLPPGWEMRIAPNGRPFFIDHNTKTTTWEDPRLKFPVHMRSKTSLNPNDLGPLPPGWEERIHLDGRTFYIDHNSKITQWEDPRLQNPAITGPAVPYSREFKQKYDYFRKKLKKPADIPNRFEMKLHRNNIFEESYRRIMSVKRPDVLKARLWIEFESEKGLDYGGVAREWFFLLSKEMFNPYYGLFEYSATDNYTLQINPNSGLCNEDHLSYFTFIGRVAGLAVFHGKLLDGFFIRPFYKMMLGKQITLNDMESVDSEYYNSLKWILENDPTELDLMFCIDEENFGQTYQVDLKPNGSEIMVTNENKREYIDLVIQWRFVNRVQKQMNAFLEGFTELLPIDLIKIFDENELELLMCGLGDVDVNDWRQHSIYKNGYCPNHPVIQWFWKAVLLMDAEKRIRLLQFVTGTSRVPMNGFAELYGSNGPQLFTIEQWGSPEKLPRAHTCFNRLDLPPYETFEDLREKLLMAVENAQGFEGVD

SEQ ID NO: 55261 - protein, 834 aa, Homo sapiens
MERPYTFKDFLLRPRSHKSRVKGFLRLKMAYMPKNGGQDEENSDQRDDMEHGWEVVDSNDSASQHQEELPPPPLPPGWEEKVDNLGRTYYVNHNNRTTQWHRPSLMDVSSESDNNIRQINQEAAHRRFRSRRHISEDLEPEPSEGGDVPEPWETISEEVNIAGDSLGLALPPPPASPGSRTSPQELSEELSRRLQITPDSNGEQFSSLIQREPSSRLRSCSVTDAVAEQGHLPPPSVAYVHTTPGLPSGWEERKDAKGRTYYVNHNNRTTTWTRPIMQLAEDGASGSATNSNNHLIEPQIRRPRSLSSPTVTLSAPLEGAKDSPVRRAVKDTLSNPQSPQPSPYNSPKPQHKVTQSFLPPGWEMRIAPNGRPFFIDHNTKTTTWEDPRLKFPVHMRSKTSLNPNDLGPLPPGWEERIHLDGRTFYIDHNSKITQWEDPRLQNPAITGPAVPYSREFKQKYDYFRKKLKKPADIPNRFEMKLHRNNIFEESYRRIMSVKRPDVLKARLWIEFESEKGLDYGGVAREWFFLLSKEMFNPYYGLFEYSATDNYTLQINPNSGLCNEDHLSYFTFIGRVAGLAVFHGKLLDGFFIRPFYKMMLGKQITLNDMESVDSEYYNSLKWILENDPTELDLMFCIDEENFGQTYQVDLKPNGSEIMVTNENKREYIDLVIQWRFVNRVQKQMNAFLEGFTELLPIDLIKIFDENELELLMCGLGDVDVNDWRQHSIYKNGYCPNHPVIQWFWKAVLLMDAEKRIRLLQFVTGTSRVPMNGFAELYGSNGPQLFTIEQWGSPEKLPRAHTCFNRLDLPPYETFEDLREKLLMAVENAQGFEGVD

SEQ ID NO: 55262 - protein, 834 aa, Homo sapiens; identical to SEQ ID NO: 55261

SEQ ID NO: 55263 - protein, 854 aa, Homo sapiens; identical to SEQ ID NO: 55260

SEQ ID NO: 55264 - protein, 174 aa, Homo sapiens
MKYKNLMARALYDNVPECAEELAFRKGDILTVIEQNTGGLEGWWLCSLHGRQGIVPGNRVKLLIGPMQETASSHEQPASGLMQQTFGQQKLYQVPNPQAAPRDTIYQVPPSYQNQGIYQVPTGHGTQEQEVYQVPPSVQRSIGGTSGPHVGKKVFQRDGQVSYFLVRASKQTSL

SEQ ID NO: 55265 - protein, 834 aa, Homo sapiens
MKYKNLMARALYDNVPECAEELAFRKGDILTVIEQNTGGLEGWWLCSLHGRQGIVPGNRVKLLIGPMQETASSHEQPASGLMQQTFGQQKLYQVPNPQAAPRDTIYQVPPSYQNQGIYQVPTGHGTQEQEVYQVPPSVQRSIGGTSGPHVGKKVITPVRTGHGYVYEYPSRYQKDVYDIPPSHTTQGVYDIPPSSAKGPVFSVPVGEIKPQGVYDIPPTKGVYAIPPSACRDEAGLREKDYDFPPPMRQAGRPDLRPEGVYDIPPTCTKPAGKDLHVKYNCDIPGAAEPVARRHQSLSPNHPPPQLGQSVGSQNDAYDVPRGVQFLEPPAETSEKANPQERDGVYDVPLHNPPDAKGSRDLVDGINRLSFSSTGSTRSNMSTSSTSSKESSLSASPAQDKRLFLDPDTAIERLQRLQQALEMGVSSLMALVTTDWRCYGYMERHINEIRTAVDKVELFLKEYLHFVKGAVANAACLPELILHNKMKRELQRVEDSHQILSQTSHDLNECSWSLNILAINKPQNKCDDLDRFVMVAKTVPDDAKQLTTTINTNAEALFRPGPGSLHLKNGPESIMNSTEYPHGGSQGQLLHPGDHKAQAHNKALPPGLSKEQAPDCSSSDGSERSWMDDYDYVHLQGKEEFERQQKELLEKENIMKQNKMQLEHHQLSQFQLLEQEITKPVENDISKWKPSQSLPTTNSGVSAQDRQLLCFYYDQCETHFISLLNAIDALFSCVSSAQPPRIFVAHSKFVILSAHKLVFIGDTLTRQVTAQDIRNKVMNSSNQLCEQLKTIVMATKMAALHYPSTTALQEMVHQVTDLSRNAQLFKRSLLEMATF

SEQ ID NO: 55266 - protein, 32 aa, Homo sapiens
MWTRNLMARALYDNVPECAEELAFRKGDILTV

SEQ ID NO: 55267 - protein, 834 aa, Homo sapiens
MWTRNLMARALYDNVPECAEELAFRKGDILTVIEQNTGGLEGWWLCSLHGRQGIVPGNRVKLLIGPMQETASSHEQPASGLMQQTFGQQKLYQVPNPQAAPRDTIYQVPPSYQNQGIYQVPTGHGTQEQEVYQVPPSVQRSIGGTSGPHVGKKVITPVRTGHGYVYEYPSRYQKDVYDIPPSHTTQGVYDIPPSSAKGPVFSVPVGEIKPQGVYDIPPTKGVYAIPPSACRDEAGLREKDYDFPPPMRQAGRPDLRPEGVYDIPPTCTKPAGKDLHVKYNCDIPGAAEPVARRHQSLSPNHPPPQLGQSVGSQNDAYDVPRGVQFLEPPAETSEKANPQERDGVYDVPLHNPPDAKGSRDLVDGINRLSFSSTGSTRSNMSTSSTSSKESSLSASPAQDKRLFLDPDTAIERLQRLQQALEMGVSSLMALVTTDWRCYGYMERHINEIRTAVDKVELFLKEYLHFVKGAVANAACLPELILHNKMKRELQRVEDSHQILSQTSHDLNECSWSLNILAINKPQNKCDDLDRFVMVAKTVPDDAKQLTTTINTNAEALFRPGPGSLHLKNGPESIMNSTEYPHGGSQGQLLHPGDHKAQAHNKALPPGLSKEQAPDCSSSDGSERSWMDDYDYVHLQGKEEFERQQKELLEKENIMKQNKMQLEHHQLSQFQLLEQEITKPVENDISKWKPSQSLPTTNSGVSAQDRQLLCFYYDQCETHFISLLNAIDALFSCVSSAQPPRIFVAHSKFVILSAHKLVFIGDTLTRQVTAQDIRNKVMNSSNQLCEQLKTIVMATKMAALHYPSTTALQEMVHQVTDLSRNAQLFKRSLLEMATF

SEQ ID NO: 55268 - protein, 403 aa, Homo sapiens
MLRPEAGLVGLHGPAQENSALPGRRDSASELRALSGLEVDPGEGWGRVVLISPRTVRFRVLSPGVREEGHVQNNGQNQARPARGVTGAGGWGSAAVCRGRALRGREPALPSASFPDVAACPGSLDCALKRRARCPPGAHACGPCLQPFQEDQQGLCVPRMRRPPGGGRPQPRLEDEIDFLAQELARKESGHSTPPLPKDRQRLPEPATLGFSARGQGLELGLPSTPGTPTPTPHTSLGSPVSSDPVHMSPLEPRGGQGDGLALVLILAFCVAGAAALSVASLCWCRLQREIRLTQKADYATAKAPGSPAAPRISPGDQRLAQSAEMYHYQHQRQQMLCLERHKEPPKELDTASSDEENEDGDFTVYECPGLAPTGEMEVRNPLFDHAALSAPLPAPSSPPALP

SEQ ID NO: 55269 - protein, 325 aa, Homo sapiens
MATPLPPPSPRHLRLLRLLLSGLVLGAALRGAAAGHPDVAACPGSLDCALKRRARCPPGAHACGPCLQPFQEDQQGLCVPRMRRPPGGGRPQPRLEDEIDFLAQELARKESGHSTPPLPKDRQRLPEPATLGFSARGQGLELGLPSTPGTPTPTPHTSLGSPVSSDPVHMSPLEPRGGQGDGLALVLILAFCVAGAAALSVASLCWCRLQREIRLTQKADYATAKAPGSPAAPRISPGDQRLAQSAEMYHYQHQRQQMLCLERHKEPPKELDTASSDEENEDGDFTVYECPGLAPTGEMEVRNPLFDHAALSAPLPAPSSPPALP

SEQ ID NO: 55270 - protein, 98 aa, Homo sapiens
MSVRELNRQLRGCGRDEALRLKQRRRTLKNRGYAQACRSKRLQQRRGLEAERARLAAQLDALRAEVARLARERDLYKARCDRLTSSGPGSGDPSHLFL

SEQ ID NO: 55271 - protein, 237 aa, Homo sapiens
MALPPSPLAMEYVNDFDLMKFEVKREPSEGRPGPPTASLGSTPYSSVPPSPTFSEPGMVGATEGTRPGLEELYWLATLQQQLGAGEALGLSPEEAMELLQGQGPVPVDGPHGYYPGSPEETGAQHVQLAERFSDAALVSMSVRELNRQLRGCGRDEALRLKQRRRTLKNRGYAQACRSKRLQQRRGLEAERARLAAQLDALRAEVARLARERDLYKARCDRLTSSGPGSGDPSHLFL

SEQ ID NO: 55272 - protein, 237 aa, Homo sapiens; identical to SEQ ID NO: 55271

SEQ ID NO: 55273 - protein, 65 aa, Homo sapiens
MALPPSPLAMEYVNDFDLMKFEVKREPSEGRPGPPTASLGSTPYSSVPPSPTFSEPGMVGATEGT

SEQ ID NO: 55274 - protein, 98 aa, Homo sapiens; identical to SEQ ID NO: 55270

SEQ ID NO: 55275 - protein, 237 aa, Homo sapiens; identical to SEQ ID NO: 55271

SEQ ID NO: 55276 - protein, 557 aa, Homo sapiens
MGGQITRSTLHDSIGGPFPVTSHRCHHKQKHCPAVLPSGGLPATPLLFHPHTKGSQILMDLSHKAVKRQASFCNAITFSNRPVLIYEQVRLKITKKQCCWSGALRLGFTSKDPSRIHPDSLPKYACPDLVSQSGFWAKALPEEFANEGNIIAFWVDKKGRVFHRINDSAVMLFFSGVRTADPLWALVDVYGLTRGVQLLDSELVLPDCLRPRSFTALRRPSLRREADDARLSVSLCDLNVPGADGDEAAPAAGCPIPQNSLNSQHSRALPAQLDGDLRFHALRAGAHVRILDEQTVARVEHGRDERALVFTSRPVRVAETIFVKVTRSGGARPGALSFGVTTCDPGTLRPADLPFSPEALVDRKEFWAVCRVPGPLHSGDILGLVVNADGELHLSHNGAAAGMQLCVDASQPLWMLFGLHGTITQIRILGSTILAERGIPSLPCSPASTPTSPSALGSRLSDPLLSTCSSGPLGSSAGGTAPNSPVSLPESPVTPGLGQWSDECTICYEHAVDTVIYTCGHMCLCYACGLRLKKALHACCPICRRPIKDIIKTYRSS

SEQ ID NO: 55277 - protein, 574 aa, Homo sapiens
MGNNFSSIPSLPRGNPSRAPRGHPQNLKDSIGGPFPVTSHRCHHKQKHCPAVLPSGGLPATPLLFHPHTKGSQILMDLSHKAVKRQASFCNAITFSNRPVLIYEQVRLKITKKQCCWSGALRLGFTSKDPSRIHPDSLPKYACPDLVSQSGFWAKALPEEFANEGNIIAFWVDKKGRVFHRINDSAVMLFFSGVRTADPLWALVDVYGLTRGVQLLDSELVLPDCLRPRSFTALRRPSLRREADDARLSVSLCDLNVPGADGDEAAPAAGCPIPQNSLNSQHSRALPAQLDGDLRFHALRAGAHVRILDEQTVARVEHGRDERALVFTSRPVRVAETIFVKVTRSGGARPGALSFGVTTCDPGTLRPADLPFSPEALVDRKEFWAVCRVPGPLHSGDILGLVVNADGELHLSHNGAAAGMQLCVDASQPLWMLFGLHGTITQIRILGSTILAERGIPSLPCSPASTPTSPSALGSRLSDPLLSTCSSGPLGSSAGGTAPNSPVSLPESPVTPGLGQWSDECTICYEHAVDTVIYTCGHMCLCYACGLRLKKALHACCPICRRPIKDIIKTYRSS

SEQ ID NO: 55278 - protein, 199 aa, Homo sapiens
MGGQITRSTLHDSIGGPFPVTSHRCHHKQKHCPAVLPSGGLPATPLLFHPHTKGSQILMDLSHKAVKRQASFCNAITFSNRPVLIYEQVRLKITKKQCCWSGALRLGFTSKDPSRIHPDSLPKYACPDLVSQSGFWAKALPEEFANEGNIIAFWVDKKGRVFHRINDSAVMLFFSGVRTADPLWALVDVYGLTRGVQLL

SEQ ID NO: 55279 - protein, 108 aa, Homo sapiens
MDLSHKAVKRQASFCNAITFSNRPVLIYEQVRLKITKKQCCWSGALRLGFTSKDPSRIHPDSLPKYACPDLVSQSGFWAKALPEEFANEGNIIAFWVDKKGRVFHRIN

SEQ ID NO: 55280 - protein, 850 aa, Homo sapiens
MRQVCCSALPPPPLEKGRCSSYSDSSSSSSERSSSSSSSSSESGSSSRSSSNNSSISRPAAPPEPRPQQQPQPRSPAARRAAARSRAAAAGGMRRDPAPGFSMLLFGVSLACYSPSLKSVQDQAYKAPVVVEGKVQGLVPAGGSSSNSTREPPASGRVALVKVLDKWPLRSGGLQREQVISVGSCVPLERNQRYIFFLEPTEQPLVFKTAFAPLDTNGKNLKKEVGKILCTDCATRPKLKKMKSQTGQVGEKQSLKCEAAAGNPQPSYRWFKDGKELNRSRDIRIKYGNGRKNSRLQFNKVKVEDAGEYVCEAENILGKDTVRGRLYVNSVSTTLSSWSGHARKCNETAKSYCVNGGVCYYIEGINQLSCKCPNGFFGQRCLEKLPLRLYMPDPKQKAEELYQKRVLTITGICVALLVVGIVCVVAYCKTKKQRKQMHNHLRQNMCPAHQNRSLANGPSHPRLDPEEIQMADYISKNVPATDHVIRRETETTFSGSHSCSPSHHCSTATPTSSHRHESHTWSLERSESLTSDSQSGIMLSSVGTSKCNSPACVEARARRAAAYNLEERRRATAPPYHDSVDSLRDSPHSERYVSALTTPARLSPVDFHYSLATQVPTFEITSPNSAHAVSLPPAAPISYRLAEQQPLLRHPAPPGPGPGPGPGPGPGADMQRSYDSYYYPAAGPGPRRGTCALGGSLGSLPASPFRIPEDDEYETTQECAPPPPPRPRARGASRRTSAGPRRWRRSRLNGLAAQRARAARDSLSLSSGSGGGSASASDDDADDADGALAAESTPFLGLRGAHDALRSDSPPLCPAADSRTYYSLDSHSTRASSRHSRGPPPRAKQDSAPL

SEQ ID NO: 55281 - protein, 426 aa, Homo sapiens
MRQVCCSALPPPPLEKGRCSSYSDSSSSSSERSSSSSSSSSESGSSSRSSSNNSSISRPAAPPEPRPQQQPQPRSPAARRAAARSRAAAAGGMRRDPAPGFSMLLFGVSLACYSPSLKSVQDQAYKAPVVVEGKVQGLVPAGGSSSNSTREPPASGRVALVKVLDKWPLRSGGLQREQVISVGSCVPLERNQRYIFFLEPTEQPLVFKTAFAPLDTNGKNLKKEVGKILCTDCATRPKLKKMKSQTGQVGEKQSLKCEAAAGNPQPSYRWFKDGKELNRSRDIRIKYGNGRKNSRLQFNKVKVEDAGEYVCEAENILGKDTVRGRLYVNSVSTTLSSWSGHARKCNETAKSYCVNGGVCYYIEGINQLSCKCPNGFFGQRCLEKLPLRLYMPDPKQSVLWDTPGTGVSSSQWSTSPKPRSCTRRGS

SEQ ID NO: 55282 - protein, 858 aa, Homo sapiens
MRQVCCSALPPPPLEKGRCSSYSDSSSSSSERSSSSSSSSSESGSSSRSSSNNSSISRPAAPPEPRPQQQPQPRSPAARRAAARSRAAAAGGMRRDPAPGFSMLLFGVSLACYSPSLKSVQDQAYKAPVVVEGKVQGLVPAGGSSSNSTREPPASGRVALVKVLDKWPLRSGGLQREQVISVGSCVPLERNQRYIFFLEPTEQPLVFKTAFAPLDTNGKNLKKEVGKILCTDCATRPKLKKMKSQTGQVGEKQSLKCEAAAGNPQPSYRWFKDGKELNRSRDIRIKYGNGRKNSRLQFNKVKVEDAGEYVCEAENILGKDTVRGRLYVNSVSTTLSSWSGHARKCNETAKSYCVNGGVCYYIEGINQLSCKCPNGFFGQRCLEKLPLRLYMPDPKQSFLSFELSKAEELYQKRVLTITGICVALLVVGIVCVVAYCKTKKQRKQMHNHLRQNMCPAHQNRSLANGPSHPRLDPEEIQMADYISKNVPATDHVIRRETETTFSGSHSCSPSHHCSTATPTSSHRHESHTWSLERSESLTSDSQSGIMLSSVGTSKCNSPACVEARARRAAAYNLEERRRATAPPYHDSVDSLRDSPHSERYVSALTTPARLSPVDFHYSLATQVPTFEITSPNSAHAVSLPPAAPISYRLAEQQPLLRHPAPPGPGPGPGPGPGPGADMQRSYDSYYYPAAGPGPRRGTCALGGSLGSLPASPFRIPEDDEYETTQECAPPPPPRPRARGASRRTSAGPRRWRRSRLNGLAAQRARAARDSLSLSSGSGGGSASASDDDADDADGALAAESTPFLGLRGAHDALRSDSPPLCPAADSRTYYSLDSHSTRASSRHSRGPPPRAKQDSAPL

SEQ ID NO: 55283 - protein, 784 aa, Homo sapiens
MRQVCCSALPPPPLEKGRCSSYSDSSSSSSERSSSSSSSSSESGSSSRSSSNNSSISRPAAPPEPRPQQQPQPRSPAARRAAARSRAAAAGGMRRDPAPGFSMLLFGVSLACYSPSLKSVQDQAYKAPVVVEGKVQGLVPAGGSSSNSTREPPASGRVALVKVLDKWPLRSGGLQREQVISVGSCVPLERNQRYIFFLEPTEQPLVFKTAFAPLDTNGKNLKKEVGKILCTDCATRPKLKKMKSQTGQVGEKQSLKCEAAAGNPQPSYRWFKDGKELNRSRDIRIKYGNGRKNSRLQFNKVKVEDAGEYVCEAENILGKDTVRGRLYVNSEAEELYQKRVLTITGICVALLVVGIVCVVAYCKTKKQRKQMHNHLRQNMCPAHQNRSLANGPSHPRLDPEEIQMADYISKNVPATDHVIRRETETTFSGSHSCSPSHHCSTATPTSSHRHESHTWSLERSESLTSDSQSGIMLSSVGTSKCNSPACVEARARRAAAYNLEERRRATAPPYHDSVDSLRDSPHSERYVSALTTPARLSPVDFHYSLATQVPTFEITSPNSAHAVSLPPAAPISYRLAEQQPLLRHPAPPGPGPGPGPGPGPGADMQRSYDSYYYPAAGPGPRRGTCALGGSLGSLPASPFRIPEDDEYETTQECAPPPPPRPRARGASRRTSAGPRRWRRSRLNGLAAQRARAARDSLSLSSGSGGGSASASDDDADDADGALAAESTPFLGLRGAHDALRSDSPPLCPAADSRTYYSLDSHSTRASSRHSRGPPPRAKQDSAPL

SEQ ID NO: 55284 - protein, 330 aa, Homo sapiens
MRRDPAPGFSMLLFGVSLACYSPSLKSVQDQAYKAPVVVEGKVQGLVPAGGSSSNSTREPPASGRVALVKVLDKWPLRSGGLQREQVISVGSCVPLERNQRYIFFLEPTEQPLVFKTAFAPLDTNGKNLKKEVGKILCTDCATRPKLKKMKSQTGQVGEKQSLKCEAAAGNPQPSYRWFKDGKELNRSRDIRIKYGNGRKNSRLQFNKVKVEDAGEYVCEAENILGKDTVRGRLYVNSVSTTLSSWSGHARKCNETAKSYCVNGGVCYYIEGINQLSCKCPNGFFGQRCLEKLPLRLYMPDPKQSVLWDTPGTGVSSSQWSTSPSTLDLN

SEQ ID NO: 55285 - protein, 852 aa, Homo sapiens
MRQVCCSALPPPPLEKGRCSSYSDSSSSSSERSSSSSSSSSESGSSSRSSSNNSSISRPAAPPEPRPQQQPQPRSPAARRAAARSRAAAAGGMRRDPAPGFSMLLFGVSLACYSPSLKSVQDQAYKAPVVVEGKVQGLVPAGGSSSNSTREPPASGRVALVKVLDKWPLRSGGLQREQVISVGSCVPLERNQRYIFFLEPTEQPLVFKTAFAPLDTNGKNLKKEVGKILCTDCATRPKLKKMKSQTGQVGEKQSLKCEAAAGNPQPSYRWFKDGKELNRSRDIRIKYGNGRKNSRLQFNKVKVEDAGEYVCEAENILGKDTVRGRLYVNSVSTTLSSWSGHARKCNETAKSYCVNGGVCYYIEGINQLSCKCPVGYTGDRCQQFAMVNFSTRLGGDVEEAEELYQKRVLTITGICVALLVVGIVCVVAYCKTKKQRKQMHNHLRQNMCPAHQNRSLANGPSHPRLDPEEIQMADYISKNVPATDHVIRRETETTFSGSHSCSPSHHCSTATPTSSHRHESHTWSLERSESLTSDSQSGIMLSSVGTSKCNSPACVEARARRAAAYNLEERRRATAPPYHDSVDSLRDSPHSERYVSALTTPARLSPVDFHYSLATQVPTFEITSPNSAHAVSLPPAAPISYRLAEQQPLLRHPAPPGPGPGPGPGPGPGADMQRSYDSYYYPAAGPGPRRGTCALGGSLGSLPASPFRIPEDDEYETTQECAPPPPPRPRARGASRRTSAGPRRWRRSRLNGLAAQRARAARDSLSLSSGSGGGSASASDDDADDADGALAAESTPFLGLRGAHDALRSDSPPLCPAADSRTYYSLDSHSTRASSRHSRGPPPRAKQDSAPL

SEQ ID NO: 55286 - protein, 844 aa, Homo sapiens
MRQVCCSALPPPPLEKGRCSSYSDSSSSSSERSSSSSSSSSESGSSSRSSSNNSSISRPAAPPEPRPQQQPQPRSPAARRAAARSRAAAAGGMRRDPAPGFSMLLFGVSLACYSPSLKSVQDQAYKAPVVVEGKVQGLVPAGGSSSNSTREPPASGRVALVKVLDKWPLRSGGLQREQVISVGSCVPLERNQRYIFFLEPTEQPLVFKTAFAPLDTNGKNLKKEVGKILCTDCATRPKLKKMKSQTGQVGEKQSLKCEAAAGNPQPSYRWFKDGKELNRSRDIRIKYGNGRKNSRLQFNKVKVEDAGEYVCEAENILGKDTVRGRLYVNSVSTTLSSWSGHARKCNETAKSYCVNGGVCYYIEGINQLSCKCPVGYTGDRCQQFAMVNFSKAEELYQKRVLTITGICVALLVVGIVCVVAYCKTKKQRKQMHNHLRQNMCPAHQNRSLANGPSHPRLDPEEIQMADYISKNVPATDHVIRRETETTFSGSHSCSPSHHCSTATPTSSHRHESHTWSLERSESLTSDSQSGIMLSSVGTSKCNSPACVEARARRAAAYNLEERRRATAPPYHDSVDSLRDSPHSERYVSALTTPARLSPVDFHYSLATQVPTFEITSPNSAHAVSLPPAAPISYRLAEQQPLLRHPAPPGPGPGPGPGPGPGADMQRSYDSYYYPAAGPGPRRGTCALGGSLGSLPASPFRIPEDDEYETTQECAPPPPPRPRARGASRRTSAGPRRWRRSRLNGLAAQRARAARDSLSLSSGSGGGSASASDDDADDADGALAAESTPFLGLRGAHDALRSDSPPLCPAADSRTYYSLDSHSTRASSRHSRGPPPRAKQDSAPL

SEQ ID NO: 55287 - protein, 858 aa, Homo sapiens
MRQVCCSALPPPPLEKGRCSSYSDSSSSSSERSSSSSSSSSESGSSSRSSSNNSSISRPAAPPEPRPQQQPQPRSPAARRAAARSRAAAAGGMRRDPAPGFSMLLFGVSLACYSPSLKSVQDQAYKAPVVVEGKVQGLVPAGGSSSNSTREPPASGRVALVKVLDKWPLRSGGLQREQVISVGSCVPLERNQRYIFFLEPTEQPLVFKTAFAPLDTNGKNLKKEVGKILCTDCATRPKLKKMKSQTGQVGEKQSLKCEAAAGNPQPSYRWFKDGKELNRSRDIRIKYGNGRKNSRLQFNKVKVEDAGEYVCEAENILGKDTVRGRLYVNSVSTTLSSWSGHARKCNETAKSYCVNGGVCYYIEGINQLSCKCPNGFFGQRCLEKLPLRLYMPDPKQKHLGFELKEAEELYQKRVLTITGICVALLVVGIVCVVAYCKTKKQRKQMHNHLRQNMCPAHQNRSLANGPSHPRLDPEEIQMADYISKNVPATDHVIRRETETTFSGSHSCSPSHHCSTATPTSSHRHESHTWSLERSESLTSDSQSGIMLSSVGTSKCNSPACVEARARRAAAYNLEERRRATAPPYHDSVDSLRDSPHSERYVSALTTPARLSPVDFHYSLATQVPTFEITSPNSAHAVSLPPAAPISYRLAEQQPLLRHPAPPGPGPGPGPGPGPGADMQRSYDSYYYPAAGPGPRRGTCALGGSLGSLPASPFRIPEDDEYETTQECAPPPPPRPRARGASRRTSAGPRRWRRSRLNGLAAQRARAARDSLSLSSGSGGGSASASDDDADDADGALAAESTPFLGLRGAHDALRSDSPPLCPAADSRTYYSLDSHSTRASSRHSRGPPPRAKQDSAPL

SEQ ID NO: 55288 - protein, 696 aa, Homo sapiens
MSEGAAAASPPGAASAAAASAEEGTAAAAAAAAAGGGPDGGGEGAAEPPRELRCSDCIVWNRQQTWLCVVPLFIGFIGLGLSLMLLKWIVVGSVKEYVPTDLVDSKGMGQDPFFLSKPSSFPKAMETTTTTTSTTSPATPSAGGAASSRTPNRISTRLTTITRAPTRFPGHRVPIRASPRSTTARNTAAPATVPSTTAPFFSSSTLGSRPPVPGTPSTQAMPSWPTAAYATSSYLHDSTPSWTLSPFQDAASSSSSSSSSATTTTPETSTSPKFHTTTYSTERSEHFKPCRDKDLAYCLNDGECFVIETLTGSHKHCRCKEGYQGVRCDQFLPKTDSILSDPTDHLGIEFMESEEVYQRQVLSISCIIFGIVIVGMFCAAFYFKSKKQAKQIQEQLKVPQNGKSYSLKASSTMAKSENLVKSHVQLQNYSKVERHPVTALEKMMESSFVGPQSFPEVPSPDRGSQSVKHHRSLSSCCSPGQRSGMLHRNAFRRTPPSPRSRLGGIVGPAYQQLEESRIPDQDTIPCQGYSSSGLKTQRNTSINMQLPSRETNPYFNSLEQKDLVGYSSTRASSVPIIPSVGLEETCLQMPGISEVKSIKWCKNSYSADVVNVSIPVSDCLIAEQQEVKILLETVQEQIRILTDARRSEDYELASVETEDSASENTAFLPLSPTAKSEREAQFVLRNEIQRDSALTK

SEQ ID NO: 55289 - protein, 499 aa, Homo sapiens
MECGIPPTLVCVGRGGGLHTINIIIWYYFPSAWRTCFNISSSVGLLLTNSYKFYTTTYSTERSEHFKPCRDKDLAYCLNDGECFVIETLTGSHKHCRCKEGYQGVRCDQFLPKTDSILSDPTDHLGIEFMESEEVYQRQVLSISCIIFGIVIVGMFCAAFYFKSKKQAKQIQEQLKVPQNGKSYSLKASSTMAKSENLVKSHVQLQNYSKVERHPVTALEKMMESSFVGPQSFPEVPSPDRGSQSVKHHRSLSSCCSPGQRSGMLHRNAFRRTPPSPRSRLGGIVGPAYQQLEESRIPDQDTIPCQGIEVRKTISHLPIQLWCVERPLDLKYSSSGLKTQRNTSINMQLPSRETNPYFNSLEQKDLVGYSSTRASSVPIIPSVGLEETCLQMPGISEVKSIKWCKNSYSADVVNVSIPVSDCLIAEQQEVKILLETVQEQIRILTDARRSEDYELASVETEDSASENTAFLPLSPTAKSEREAQFVLRNEIQRDSALTK

SEQ ID NO: 55290 - protein, 720 aa, Homo sapiens
MSEGAAAASPPGAASAAAASAEEGTAAAAAAAAAGGGPDGGGEGAAEPPRELRCSDCIVWNRQQTWLCVVPLFIGFIGLGLSLMLLKWIVVGSVKEYVPTDLVDSKGMGQDPFFLSKPSSFPKAMETTTTTTSTTSPATPSAGGAASSRTPNRISTRLTTITRAPTRFPGHRVPIRASPRSTTARNTAAPATVPSTTAPFFSSSTLGSRPPVPGTPSTQAMPSWPTAAYATSSYLHDSTPSWTLSPFQDAASSSSSSSSSATTTTPETSTSPKFHTTTYSTERSEHFKPCRDKDLAYCLNDGECFVIETLTGSHKHCRCKEGYQGVRCDQFLPKTDSILSDPTDHLGIEFMESEEVYQRQVLSISCIIFGIVIVGMFCAAFYFKSKKQAKQIQEQLKVPQNGKSYSLKASSTMAKSENLVKSHVQLQNYSKVERHPVTALEKMMESSFVGPQSFPEVPSPDRGSQSVKHHRSLSSCCSPGQRSGMLHRNAFRRTPPSPRSRLGGIVGPAYQQLEESRIPDQDTIPCQGIEVRKTISHLPIQLWCVERPLDLKYSSSGLKTQRNTSINMQLPSRETNPYFNSLEQKDLVGYSSTRASSVPIIPSVGLEETCLQMPGISEVKSIKWCKNSYSADVVNVSIPVSDCLIAEQQEVKILLETVQEQIRILTDARRSEDYELASVETEDSASENTAFLPLSPTAKSEREAQFVLRNEIQRDSALTK

SEQ ID NO: 55291 - protein, 695 aa, Homo sapiens
MSEGAAAASPPGAASAAAASAEEGTAAAAAAAAAGGGPDGGGEGAAEPPRELRCSDCIVWNRQQTWLCVVPLFIGFIGLGLSLMLLKWIVVGSVKEYVPTDLVDSKGMGQDPFFLSKPSSFPKAMETTTTTTSTTSPATPSAGGAASSRTPNRISTRLTTITRAPTRFPGHRVPIRASPRSTTARNTAAPATVPSTTAPFFSSSTLGSRPPVPGTPSTQAMPSWPTAAYATSSYLHDSTPSWTLSPFQDAASSSSSSSSSATTTTPETSTSPKFHTTTYSTERSEHFKPCRDKDLAYCLNDGECFVIETLTGSHKHCRCKEGYQGVRCDQFLPKTDSILSDPTHIGIIFTESEEVYQRQVLSISCIIFGIVIVGMFCAAFYFKSKKQAKQIQEQLKVPQNGKSYSLKASSTMAKSENLVKSHVQLQNYSKVERHPVTALEKMMESSFVGPQSFPEVPSPDRGSQSVKHHRSLSSCCSPGQRSGMLHRNAFRRTPPSPRSRLGGIVGPAYQQLEESRIPDQDTIPCQGYSSSGLKTQRNTSINMQLPSRETNPYFNSLEQKDLVGYSSTRASSVPIIPSVGLEETCLQMPGISEVKSIKWCKNSYSADVVNVSIPVSDCLIAEQQEVKILLETVQEQIRILTDARRSEDYELASVETEDSASENTAFLPLSPTAKSEREAQFVLRNEIQRDSALTK

SEQ ID NO: 55292 - protein, 346 aa, Homo sapiens
MESEEVYQRQVLSISCIIFGIVIVGMFCAAFYFKSKKQAKQIQEQLKVPQNGKSYSLKASSTMAKSENLVKSHVQLQNYSKVERHPVTALEKMMESSFVGPQSFPEVPSPDRGSQSVKHHRSLSSCCSPGQRSGMLHRNAFRRTPPSPRSRLGGIVGPAYQQLEESRIPDQDTIPCQGYSSSGLKTQRNTSINMQLPSRETNPYFNSLEQKDLVGYSSTRASSVPIIPSVGLEETCLQMPGISEVKSIKWCKNSYSADVVNVSIPVSDCLIAEQQEVKILLETVQEQIRILTDARRSEDYELASVETEDSASENTAFLPLSPTAKSEREAQFVLRNEIQRDSALTK

SEQ ID NO: 55293 - protein, 346 aa, Homo sapiens; identical to SEQ ID NO: 55292

SEQ ID NO: 55294 - protein, 56 aa, Homo sapiens
MPTDHEEPCGPSHKSFCLNGGLCYVIPTIPSPFCSLHENENDNNEDLYDDLLPLNE

SEQ ID NO: 55295 - protein, 115 aa, Homo sapiens
MPTDHEEPCGPSHKSFCLNGGLCYVIPTIPSPFCRCVENYTGARCEEVFLPGSSIQTKSNLFEAFVALAVLVTLIIGAFYFLCRKGHFQRASSVQYDINLVETSSTSAHHSHEQH

SEQ ID NO: 55296 - protein, 90 aa, Homo sapiens
MPTDHEEPCGPSHKSFCLNGGLCYVIPTIPSPFCRCVENYTGARCEEVFLPGSSIQTKSNLFEAFVALAVLVTLIIGAFYFLCRCGNTCM

SEQ ID NO: 55297 - protein, 204 aa, Homo sapiens
MMPSCNRSCSCSRGPSVEDGKWYGVRSYLHLFYEDCAGTALSDDPEGPPVLCPRRPWPSLCWKISLSSGTLLLLLGVAALTTGYAVPPKLEGIGEGEFLVLDQRAADYNQALGTCRLAGTALCVAAGVLLAICLFWAMIGWLSQDTKAEPLDPEADSHVEVFGDEPEQQLSPIFRNASGQSWFSPPASPFGQSSVQTIQPKRDS

SEQ ID NO: 55298 - protein, 204 aa, Homo sapiens; identical to SEQ ID NO: 55297

SEQ ID NO: 55299 - protein, 442 aa, Homo sapiens
MYQRMLRCGAELGSPGGGGGGGGGGGAGGRLALLWIVPLTLSGLLGVAWGASSLGAHHIHHFHGSSKHHSVPIAIYRSPASLRGGHAGTTYIFSKGGGQITYKWPPNDRPSTRADRLAIGFSTVQKEAVLVRVDSSSGLGDYLELHIHQGKIGVKFNVGTDDIAIEESNAIINDGKYHVVRFTRSGGNATLQVDSWPVIERYPAGRQLTIFNSQATIIIGGKEQGQPFQGQLSGLYYNGLKVLNMAAENDANIAIVGNVRLVGEVPSSMTTESTATAMQSEMSTSIMETTTTLATSTARRGKPPTKEPISQTTDDILVASAECPSDDEDIDPCEPSSGGLANPTRAGGREPYPGSAEVIRESSSTTGMVVGIVAAAALCILILLYAMYKYRNRDEGSYHVDESRNYISNSAQSNGAVVKEKQPSSAKSSNKNKKNKDKEYYV

SEQ ID NO: 55300 - protein, 1507 aa, Homo sapiens
MGTALLQRGGCFLLCLSLLLLGCWAELGSGLEFPGAEGQWTRFPKWNACCESEMSFQLKTRSARGLVLYFDDEGFCDFLELILTRGGRLQLSFSIFCAEPATLLADTPVNDGAWHSVRIRRQFRNTTLFIDQVEAKWVEVKSKRRDMTVFSGLFVGGLPPELRAAALKLTLASVREREPFKGWIRDVRVNSSQVLPVDSGEVKLDDEPPNSGGGSPCEAGEEGEGGVCLNGGVCSVVDDQAVCDCSRTGFRGKDCSQEDNNVEGLAHLMMGDQGKSKGKEEYIATFKGSEYFCYDLSQNPIQSSSDEITLSFKTLQRNGLMLHTGKSADYVNLALKNGAVSLVINLGSGAFEALVEPVNGKFNDNAWHDVKVTRNLRQHSGIGHAMVTISVDGILTTTGYTQEDYTMLGSDDFFYVGGSPSTADLPGSPVSNNFMGCLKEVVYKNNDVRLELSRLAKQGDPKMKIHGVVAFKCENVATLDPITFETPESFISLPKWNAKKTGSISFDFRTTEPNGLILFSHGKPRHQKDAKHPQMIKVDFFAIEMLDGHLYLLLDMGSGTIKIKALLKKVNDGEWYHVDFQRDGRSGTISVNTLRTPYTAPGESEILDLDDELYLGGLPENKAGLVFPTEVWTALLNYGYVGCIRDLFIDGQSKDIRQMAEVQSTAGVKPSCSKETAKPCLSNPCKNNGMCRDGWNRYVCDCSGTGYLGRSCEREATVLSYDGSMFMKIQLPVVMHTEAEDVSLRFRSQRAYGILMATTSRDSADTLRLELDAGRVKLTVNLDCIRINCNSSKGPETLFAGYNLNDNEWHTVRVVRRGKSLKLTVDDQQAMTGQMAGDHTRLEFHNIETGIITERRYLSSVPSNFIGHLQSLTFNGMAYIDLCKNGDIDYCELNARFGFRNIIADPVTFKTKSSYVALATLQAYTSMHLFFQFKTTSLDGLILYNSGDGNDFIVVELVKGYLHYVFDLGNGANLIKGSSNKPLNDNQWHNVMISRDTSNLHTVKIDTKITTQITAGARNLDLKSDLYIGGVAKETYKSLPKLVHAKEGFQGCLASVDLNGRLPDLISDALFCNGQIERGCEGPSTTCQEDSCSNQGVCLQQWDGFSCDCSMTSFSGPLCNDPGTTYIFSKGGGQITYKWPPNDRPSTRADRLAIGFSTVQKEAVLVRVDSSSGLGDYLELHIHQGKIGVKFNVGTDDIAIEESNAIINDGKYHVVRFTRSGGNATLQVDSWPVIERYPAGNNDNERLAIARQRIPYRLGRVVDEWLLDKGRQLTIFNSQATIIIGGKEQGQPFQGQLSGLYYNGLKVLNMAAENDANIAIVGNVRLVGEVPSSMTTESTATAMQSEMSTSIMETTTTLATSTARRGKPPTKEPISQTTDDILVASAECPSDDEDIDPCEPSSGGLANPTRAGGREPYPGSAEVIRESSSTTGMVVGIVAAAALCILILLYAMYKYRNRDEGSYHVDESRNYISNSAQSNGAVVKEKQPSSAKSSNKNKKNKDKEYYV

SEQ ID NO: 55301 - protein, 495 aa, Homo sapiens
MISRDTSNLHTVKIDTKITTQITAGARNLDLKSDLYIGGVAKETYKSLPKLVHAKEGFQGCLASVDLNGRLPDLISDALFCNGQIERGCEVALMKADLQGPSTTCQEDSCSNQGVCLQQWDGFSCDCSMTSFSGPLCNDPGTTYIFSKGGGQITYKWPPNDRPSTRADRLAIGFSTVQKEAVLVRVDSSSGLGDYLELHIHQGKIGVKFNVGTDDIAIEESNAIINDGKYHVVRFTRSGGNATLQVDSWPVIERYPAGRQLTIFNSQATIIIGGKEQGQPFQGQLSGLYYNGLKVLNMAAENDANIAIVGNVRLVGEVPSSMTTESTATAMQSEMSTSIMETTTTLATSTARRGKPPTKEPISQTTDDILVASAECPSDDEDIDPCEPSSGGLANPTRAGGREPYPGSAEVIRESSSTTGMVVGIVAAAALCILILLYAMYKYRNRDEGSYHVDESRNYISNSAQSNGAVVKEKQPSSAKSSNKNKKNKDKEYYV

SEQ ID NO: 55302 - protein, 1499 aa, Homo sapiens
MGTALLQRGGCFLLCLSLLLLGCWAELGSGLEFPGAEGQWTRFPKWNACCESEMSFQLKTRSARGLVLYFDDEGFCDFLELILTRGGRLQLSFSIFCAEPATLLADTPVNDGAWHSVRIRRQFRNTTLFIDQVEAKWVEVKSKRRDMTVFSGLFVGGLPPELRAAALKLTLASVREREPFKGWIRDVRVNSSQVLPVDSGEVKLDDEPPNSGGGSPCEAGEEGEGGVCLNGGVCSVVDDQAVCDCSRTGFRGKDCSQADTNLEGLAHLMMGDQAKSKRKEEYIATFKGSEYFCYDLSQNPIQSSSDEITLSFKTLQRNGLMLHTGKSADYVNLALKNGAVSLVINLGSGAFEALVEPVNGKFNDNAWHDVKVTRNLRQVTISVDGILTTTGYTQEDYTMLGSDDFFYVGGSPSTADLPGSPVSNNFMGCLKEVVYKNNDVRLELSRLAKQGDPKMKIHGVVAFKCENVATLDPITFETPESFISLPKWNAKKTGSISFDFRTTEPNGLILFSHGKPRHQKDAKHPQMIKVDFFAIEMLDGHLYLLLDMGSGTIKIKALLKKVNDGEWYHVDFQRDGRSGTISVNTLRTPYTAPGESEILDLDDELYLGGLPENKAGLVFPTEVWTALLNYGYVGCIRDLFIDGQSKDIRQMAEVQSTAGVKPSCSKETAKPCLSNPCKNNGMCRDGWNRYVCDCSGTGYLGRSCEREATVLSYDGSMFMKIQLPVVMHTEAEDVSLRFRSQRAYGILMATTSRDSADTLRLELDAGRVKLTVNLDCIRINCNSSKGPETLFAGYNLNDNEWHTVRVVRRGKSLKLTVDDQQAMTGQMAGDHTRLEFHNIETGIITERRYLSSVPSNFIGHLQSLTFNGMAYIDLCKNGDIDYCELNARFGFRNIIADPVTFKTKSSYVALATLQAYTSMHLFFQFKTTSLDGLILYNSGDGNDFIVVELVKGYLHYVFDLGNGANLIKGSSNKPLNDNQWHNVMISRDTSNLHTVKIDTKITTQITAGARNLDLKSDLYIGGVAKETYKSLPKLVHAKEGFQGCLASVDLNGRLPDLISDALFCNGQIERGCEGPSTTCQEDSCSNQGVCLQQWDGFSCDCSMTSFSGPLCNDPGTTYIFSKGGGQITYKWPPNDRPSTRADRLAIGFSTVQKEAVLVRVDSSSGLGDYLELHIHQGKIGVKFNVGTDDIAIEESNAIINDGKYHVVRFTRSGGNATLQVDSWPVIERYPAGNNDNERLAIARQRIPYRLGRVVDEWLLDKGRQLTIFNSQATIIIGGKEQGQPFQGQLSGLYYNGLKVLNMAAENDANIAIVGNVRLVGEVPSSMTTESTATAMQSEMSTSIMETTTTLATSTARRGKPPTKEPISQTTDDILVASAECPSDDEDIDPCEPSSGGLANPTRAGGREPYPGSAEVIRESSSTTGMVVGIVAAAALCILILLYAMYKYRNRDEGSYHVDESRNYISNSAQSNGAVVKEKQPSSAKSSNKNKKNKDKEYYV

SEQ ID NO: 55303 - protein, 1547 aa, Homo sapiens
MGTALLQRGGCFLLCLSLLLLGCWAELGSGLEFPGAEGQWTRFPKWNACCESEMSFQLKTRSARGLVLYFDDEGFCDFLELILTRGGRLQLSFSIFCAEPATLLADTPVNDGAWHSVRIRRQFRNTTLFIDQVEAKWVEVKSKRRDMTVFSGLFVGGLPPELRAAALKLTLASVREREPFKGWIRDVRVNSSQVLPVDSGEVKLDDEPPNSGGGSPCEAGEEGEGGVCLNGGVCSVVDDQAVCDCSRTGFRGKDCSQEIKFGLQCVLPVLLHDNDQGKYCCINTAKPLTEKDNNVEGLAHLMMGDQGKSKGKEEYIATFKGSEYFCYDLSQNPIQSSSDEITLSFKTLQRNGLMLHTGKSADYVNLALKNGAVSLVINLGSGAFEALVEPVNGKFNDNAWHDVKVTRNLRQHSGIGHAMVNKLHCSVTISVDGILTTTGYTQEDYTMLGSDDFFYVGGSPSTADLPGSPVSNNFMGCLKEVVYKNNDVRLELSRLAKQGDPKMKIHGVVAFKCENVATLDPITFETPESFISLPKWNAKKTGSISFDFRTTEPNGLILFSHGKPRHQKDAKHPQMIKVDFFAIEMLDGHLYLLLDMGSGTIKIKALLKKVNDGEWYHVDFQRDGRSGTISVNTLRTPYTAPGESEILDLDDELYLGGLPENKAGLVFPTEVWTALLNYGYVGCIRDLFIDGQSKDIRQMAEVQSTAGVKPSCSKETAKPCLSNPCKNNGMCRDGWNRYVCDCSGTGYLGRSCEREATVLSYDGSMFMKIQLPVVMHTEAEDVSLRFRSQRAYGILMATTSRDSADTLRLELDAGRVKLTVNLDCIRINCNSSKGPETLFAGYNLNDNEWHTVRVVRRGKSLKLTVDDQQAMTGQMAGDHTRLEFHNIETGIITERRYLSSVPSNFIGHLQSLTFNGMAYIDLCKNGDIDYCELNARFGFRNIIADPVTFKTKSSYVALATLQAYTSMHLFFQFKTTSLDGLILYNSGDGNDFIVVELVKGYLHYVFDLGNGANLIKGSSNKPLNDNQWHNVMISRDTSNLHTVKIDTKITTQITAGARNLDLKSDLYIGGVAKETYKSLPKLVHAKEGFQGCLASVDLNGRLPDLISDALFCNGQIERGCEGPSTTCQEDSCSNQGVCLQQWDGFSCDCSMTSFSGPLCNDPGTTYIFSKGGGQITYKWPPNDRPSTRADRLAIGFSTVQKEAVLVRVDSSSGLGDYLELHIHQGKIGVKFNVGTDDIAIEESNAIINDGKYHVVRFTRSGGNATLQVDSWPVIERYPAGNNDNERLAIARQRIPYRLGRVVDEWLLDKGRQLTIFNSQATIIIGGKEQGQPFQGQLSGLYYNGLKVLNMAAENDANIAIVGNVRLVGEVPSSMTTESTATAMQSEMSTSIMETTTTLATSTARRGKPPTKEPISQTTDDILVASAECPSDDEDIDPCEPSSGGLANPTRAGGREPYPGSAEVIRESSSTTGMVVGIVAAAALCILILLYAMYKYRNRDEGSYHVDESRNYISNSAQSNGAVVKEKQPSSAKSSNKNKKNKDKEYYV

SEQ ID NO: 55304 - protein, 1477 aa, Homo sapiens
MGTALLQRGGCFLLCLSLLLLGCWAELGSGLEFPGAEGQWTRFPKWNACCESEMSFQLKTRSARGLVLYFDDEGFCDFLELILTRGGRLQLSFSIFCAEPATLLADTPVNDGAWHSVRIRRQFRNTTLFIDQVEAKWVEVKSKRRDMTVFSGLFVGGLPPELRAAALKLTLASVREREPFKGWIRDVRVNSSQVLPVDSGEVKLDDEPPNSGGGSPCEAGEEGEGGVCLNGGVCSVVDDQAVCDCSRTGFRGKDCSQEDNNVEGLAHLMMGDQGKSKGKEEYIATFKGSEYFCYDLSQNPIQSSSDEITLSFKTLQRNGLMLHTGKSADYVNLALKNGAVSLVINLGSGAFEALVEPVNGKFNDNAWHDVKVTRNLRQHSGIGHAMVTISVDGILTTTGYTQEDYTMLGSDDFFYVGGSPSTADLPGSPVSNNFMGCLKEVVYKNNDVRLELSRLAKQGDPKMKIHGVVAFKCENVATLDPITFETPESFISLPKWNAKKTGSISFDFRTTEPNGLILFSHGKPRHQKDAKHPQMIKVDFFAIEMLDGHLYLLLDMGSGTIKIKALLKKVNDGEWYHVDFQRDGRSGTISVNTLRTPYTAPGESEILDLDDELYLGGLPENKAGLVFPTEVWTALLNYGYVGCIRDLFIDGQSKDIRQMAEVQSTAGVKPSCSKETAKPCLSNPCKNNGMCRDGWNRYVCDCSGTGYLGRSCEREATVLSYDGSMFMKIQLPVVMHTEAEDVSLRFRSQRAYGILMATTSRDSADTLRLELDAGRVKLTVNLDCIRINCNSSKGPETLFAGYNLNDNEWHTVRVVRRGKSLKLTVDDQQAMTGQMAGDHTRLEFHNIETGIITERRYLSSVPSNFIGHLQSLTFNGMAYIDLCKNGDIDYCELNARFGFRNIIADPVTFKTKSSYVALATLQAYTSMHLFFQFKTTSLDGLILYNSGDGNDFIVVELVKGYLHYVFDLGNGANLIKGSSNKPLNDNQWHNVMISRDTSNLHTVKIDTKITTQITAGARNLDLKSDLYIGGVAKETYKSLPKLVHAKEGFQGCLASVDLNGRLPDLISDALFCNGQIERGCEGPSTTCQEDSCSNQGVCLQQWDGFSCDCSMTSFSGPLCNDPGTTYIFSKGGGQITYKWPPNDRPSTRADRLAIGFSTVQKEAVLVRVDSSSGLGDYLELHIHQGKIGVKFNVGTDDIAIEESNAIINDGKYHVVRFTRSGGNATLQVDSWPVIERYPAGRQLTIFNSQATIIIGGKEQGQPFQGQLSGLYYNGLKVLNMAAENDANIAIVGNVRLVGEVPSSMTTESTATAMQSEMSTSIMETTTTLATSTARRGKPPTKEPISQTTDDILVASAECPSDDEDIDPCEPSSGGLANPTRAGGREPYPGSAEVIRESSSTTGMVVGIVAAAALCILILLYAMYKYRNRDEGSYHVDESRNYISNSAQSNGAVVKEKQPSSAKSSNKNKKNKDKEYYV

SEQ ID NO: 55305 - protein, 1477 aa, Homo sapiens
MGTALLQRGGCFLLCLSLLLLGCWAELGSGLEFPGAEGQWTRFPKWNACCESEMSFQLKTRSARGLVLYFDDEGFCDFLELILTRGGRLQLSFSIFCAEPATLLADTPVNDGAWHSVRIRRQFRNTTLFIDQVEAKWVEVKSKRRDMTVFSGLFVGGLPPELRAAALKLTLASVREREPFKGWIRDVRVNSSQVLPVDSGEVKLDDEPPNSGGGSPCEAGEEGEGGVCLNGGVCSVVDDQAVCDCSRTGFRGKDCSQADTNLEGLAHLMMGDQAKSKRKEEYIATFKGSEYFCYDLSQNPIQSSSDEITLSFKTLQRNGLMLHTGKSADYVNLALKNGAVSLVINLGSGAFEALVEPVNGKFNDNAWHDVKVTRNLRQHSGIGHAMVTISVDGILTTTGYTQEDYTMLGSDDFFYVGGSPSTADLPGSPVSNNFMGCLKEVVYKNNDVRLELSRLAKQGDPKMKIHGVVAFKCENVATLDPITFETPESFISLPKWNAKKTGSISFDFRTTEPNGLILFSHGKPRHQKDAKHPQMIKVDFFAIEMLDGHLYLLLDMGSGTIKIKALLKKVNDGEWYHVDFQRDGRSGTISVNTLRTPYTAPGESEILDLDDELYLGGLPENKAGLVFPTEVWTALLNYGYVGCIRDLFIDGQSKDIRQMAEVQSTAGVKPSCSKETAKPCLSNPCKNNGMCRDGWNRYVCDCSGTGYLGRSCEREATVLSYDGSMFMKIQLPVVMHTEAEDVSLRFRSQRAYGILMATTSRDSADTLRLELDAGRVKLTVNLDCIRINCNSSKGPETLFAGYNLNDNEWHTVRVVRRGKSLKLTVDDQQAMTGQMAGDHTRLEFHNIETGIITERRYLSSVPSNFIGHLQSLTFNGMAYIDLCKNGDIDYCELNARFGFRNIIADPVTFKTKSSYVALATLQAYTSMHLFFQFKTTSLDGLILYNSGDGNDFIVVELVKGYLHYVFDLGNGANLIKGSSNKPLNDNQWHNVMISRDTSNLHTVKIDTKITTQITAGARNLDLKSDLYIGGVAKETYKSLPKLVHAKEGFQGCLASVDLNGRLPDLISDALFCNGQIERGCEGPSTTCQEDSCSNQGVCLQQWDGFSCDCSMTSFSGPLCNDPGTTYIFSKGGGQITYKWPPNDRPSTRADRLAIGFSTVQKEAVLVRVDSSSGLGDYLELHIHQGKIGVKFNVGTDDIAIEESNAIINDGKYHVVRFTRSGGNATLQVDSWPVIERYPAGRQLTIFNSQATIIIGGKEQGQPFQGQLSGLYYNGLKVLNMAAENDANIAIVGNVRLVGEVPSSMTTESTATAMQSEMSTSIMETTTTLATSTARRGKPPTKEPISQTTDDILVASAECPSDDEDIDPCEPSSGGLANPTRAGGREPYPGSAEVIRESSSTTGMVVGIVAAAALCILILLYAMYKYRNRDEGSYHVDESRNYISNSAQSNGAVVKEKQPSSAKSSNKNKKNKDKEYYV

SEQ ID NO: 55306 - protein, 1548 aa, Homo sapiens
MGTALLQRGGCFLLCLSLLLLGCWAELGSGLEFPGAEGQWTRFPKWNACCESEMSFQLKTRSARGLVLYFDDEGFCDFLELILTRGGRLQLSFSIFCAEPATLLADTPVNDGAWHSVRIRRQFRNTTLFIDQVEAKWVEVKSKRRDMTVFSGLFVGGLPPELRAAALKLTLASVREREPFKGWIRDVRVNSSQVLPVDSGEVKLDDEPPNSGGGSPCEAGEEGEGGVCLNGGVCSVVDDQAVCDCSRTGFRGKDCSQEIKFGLQCVLPVLLHDNDQGKYCCINTAKPLTEKKDNDFEGLAHLMMGDQAKSKRKEEYIATFKGSEYFCYDLSQNPIQSSSDEITLSFKTLQRNGLMLHTGKSADYVNLALKNGAVSLVINLGSGAFEALVEPVNGKFNDNAWHDVKVTRNLRQHSGIGHAMVNKLHCSVTISVDGILTTTGYTQEDYTMLGSDDFFYVGGSPSTADLPGSPVSNNFMGCLKEVVYKNNDVRLELSRLAKQGDPKMKIHGVVAFKCENVATLDPITFETPESFISLPKWNAKKTGSISFDFRTTEPNGLILFSHGKPRHQKDAKHPQMIKVDFFAIEMLDGHLYLLLDMGSGTIKIKALLKKVNDGEWYHVDFQRDGRSGTISVNTLRTPYTAPGESEILDLDDELYLGGLPENKAGLVFPTEVWTALLNYGYVGCIRDLFIDGQSKDIRQMAEVQSTAGVKPSCSKETAKPCLSNPCKNNGMCRDGWNRYVCDCSGTGYLGRSCEREATVLSYDGSMFMKIQLPVVMHTEAEDVSLRFRSQRAYGILMATTSRDSADTLRLELDAGRVKLTVNLDCIRINCNSSKGPETLFAGYNLNDNEWHTVRVVRRGKSLKLTVDDQQAMTGQMAGDHTRLEFHNIETGIITERRYLSSVPSNFIGHLQSLTFNGMAYIDLCKNGDIDYCELNARFGFRNIIADPVTFKTKSSYVALATLQAYTSMHLFFQFKTTSLDGLILYNSGDGNDFIVVELVKGYLHYVFDLGNGANLIKGSSNKPLNDNQWHNVMISRDTSNLHTVKIDTKITTQITAGARNLDLKSDLYIGGVAKETYKSLPKLVHAKEGFQGCLASVDLNGRLPDLISDALFCNGQIERGCEGPSTTCQEDSCSNQGVCLQQWDGFSCDCSMTSFSGPLCNDPGTTYIFSKGGGQITYKWPPNDRPSTRADRLAIGFSTVQKEAVLVRVDSSSGLGDYLELHIHQGKIGVKFNVGTDDIAIEESNAIINDGKYHVVRFTRSGGNATLQVDSWPVIERYPAGNNDNERLAIARQRIPYRLGRVVDEWLLDKGRQLTIFNSQATIIIGGKEQGQPFQGQLSGLYYNGLKVLNMAAENDANIAIVGNVRLVGEVPSSMTTESTATAMQSEMSTSIMETTTTLATSTARRGKPPTKEPISQTTDDILVASAECPSDDEDIDPCEPSSGGLANPTRAGGREPYPGSAEVIRESSSTTGMVVGIVAAAALCILILLYAMYKYRNRDEGSYHVDESRNYISNSAQSNGAVVKEKQPSSAKSSNKNKKNKDKEYYV

SEQ ID NO: 55307 - protein, 396 aa, Homo sapiens
ALEIWEQPPAPRLLFPGLPFRTSPSPAAFYRSPASLRGGHAGTTYIFSKGGGQITYKWPPNDRPSTRADRLAIGFSTVQKEAVLVRVDSSSGLGDYLELHIHQGKIGVKFNVGTDDIAIEESNAIINDGKYHVVRFTRSGGNATLQVDSWPVIERYPAGRQLTIFNSQATIIIGGKEQGQPFQGQLSGLYYNGLKVLNMAAENDANIAIVGNVRLVGEVPSSMTTESTATAMQSEMSTSIMETTTTLATSTARRGKPPTKEPISQTTDDILVASAECPSDDEDIDPCEPSSGGLANPTRAGGREPYPGSAEVIRESSSTTGMVVGIVAAAALCILILLYAMYKYRNRDEGSYHVDESRNYISNSAQSNGAVVKEKQPSSAKSSNKNKKNKDKEYYV

SEQ ID NO: 55308 - protein, 1712 aa, Homo sapiens
MASGSRWRPTPPPLLLLLLLALAARADGLEFGGGPGQWARYARWAGAASSGELSFSLRTNATRALLLYLDDGGDCDFLELLLVDGRLRLRFTLSCAEPATLQLDTPVADDRWHMVLLTRDARRTALAVDGEARAAEVRSKRREMQVASDLFVGGIPPDVRLSALTLSTVKYEPPFRGLLANLKLGERPPALLGSQGLRGATADPLCAPARNPCANGGLCTVLAPGEVGCDCSHTGFGGKFCSEEEHPMEGPAHLTLNSEVGSLLFSEGGAGRGGAGDVHQPTKGKEEFVATFKGNEFFCYDLSHNPIQSSTDEITLAFRTLQRNGLMLHTGKSADYVNLSLKSGAVWLVINLGSGAFEALVEPVNGKFNDNAWHDVRVTRNLRQHAGIGHAMVNKLHYLVTISVDGILTTTGYTQEDYTMLGSDDFFYIGGSPNTADLPGSPVSNNFMGCLKDVVYKNNDFKLELSRLAKEGDPKMKLQGDLSFRCEDVAALDPVTFESPEAFVALPRWSAKRTGSISLDFRTTEPNGLLLFSQGRRAGGGAGSHSSAQRADYFAMELLDGHLYLLLDMGSGGIKLRASSRKVNDGEWCHVDFQRDGRKGSISVNSRSTPFLATGDSEILDLESELYLGGLPEGGRVDLPLPPEVWTAALRAGYVGCVRDLFIDGRSRDLRGLAEAQGAVGVAPFCSRETLKQCASAPCRNGGVCREGWNRFICDCIGTGFLGRVCEREATVLSYDGSMYMKIMLPNAMHTEAEDVSLRFMSQRAYGLMMATTSRESADTLRLELDGGQMKLTVNLDCLRVGCAPSKGPETLFAGHKLNDNEWHTVRVVRRGKSLQLSVDNVTVEGQMAGAHMRLEFHNIETGIMTERRFISVVPSNFIGHLSGLVFNGQPYMDQCKDGDITYCELNARFGLRAIVADPVTFKSRSSYLALATLQAYASMHLFFQFKTTAPDGLLLFNSGNGNDFIVIELVKGYIHYVFDLGNGPSLMKGNSDKPVNDNQWHNVVVSRDPGNVHTLKIDSRTVTQHSNGARNLDLKGELYIGGLSKNMFSNLPKLVASRDGFQGCLASVDLNGRLPDLIADALHRIGQVERGCDGPSTTCTEESCANQGVCLQQWDGFTCDCTMTSYGGPVCNDPGTTYIFGKGGALITYTWPPNDRPSTRMDRLAVGFSTHQRSAVLVRVDSASGLGDYLQLHIDQGTVGVIFNVGTDDITIDEPNAIVSDGKYHVVRFTRSGGNATLQVDSWPVNERYPAGNFDNERLAIARQRIPYRLGRVVDEWLLDKGRQLTIFNSQAAIKIGGRDQGRPFQGQVSGLYYNGLKVLALAAESDPNVRTEGHLRLVGEGPSVLLSAETTATTLLADMATTIMETTTTMATTTTRRGRSPTLRDSTTQNTDDLLVASAECPSDDEDLEECEPSTGGELILPIITEDSLDPPPVATRSPFVPPPPTFYPFLTGVGATQDTLPPPAARRPPSGGPCQAERDDSDCEEPIEASGFASGEVFDSSLPPTDDEDFYTTFPLVTDRTTLLSPRKPAPRPNLRTDGATGAPGVLFAPSAPAPNLPAGKMNHRDPLQPLLENPPLGPGAPTSFEPRRPPPLRPGVTSAPGFPHLPTANPTGPGERGPPGAVEVIRESSSTTGMVVGIVAAAALCILILLYAMYKYRNRDEGSYQVDQSRNYISNSAQSNGAVVKEKAPAAPKTPSKAKKNKDKEYYV

SEQ ID NO: 55309 - protein, 1642 aa, Homo sapiens
MASGSRWRPTPPPLLLLLLLALAARADGLEFGGGPGQWARYARWAGAASSGELSFSLRTNATRALLLYLDDGGDCDFLELLLVDGRLRLRFTLSCAEPATLQLDTPVADDRWHMVLLTRDARRTALAVDGEARAAEVRSKRREMQVASDLFVGGIPPDVRLSALTLSTVKYEPPFRGLLANLKLGERPPALLGSQGLRGATADPLCAPARNPCANGGLCTVLAPGEVGCDCSHTGFGGKFCSEAPSPFQGPAHLTLNSEGKEEFVATFKGNEFFCYDLSHNPIQSSTDEITLAFRTLQRNGLMLHTGKSADYVNLSLKSGAVWLVINLGSGAFEALVEPVNGKFNDNAWHDVRVTRNLRQHAGIGHAMVTISVDGILTTTGYTQEDYTMLGSDDFFYIGGSPNTADLPGSPVSNNFMGCLKDVVYKNNDFKLELSRLAKEGDPKMKLQGDLSFRCEDVAALDPVTFESPEAFVALPRWSAKRTGSISLDFRTTEPNGLLLFSQGRRAGGGAGSHSSAQRADYFAMELLDGHLYLLLDMGSGGIKLRASSRKVNDGEWCHVDFQRDGRKGSISVNSRSTPFLATGDSEILDLESELYLGGLPEGGRVDLPLPPEVWTAALRAGYVGCVRDLFIDGRSRDLRGLAEAQGAVGVAPFCSRETLKQCASAPCRNGGVCREGWNRFICDCIGTGFLGRVCEREATVLSYDGSMYMKIMLPNAMHTEAEDVSLRFMSQRAYGLMMATTSRESADTLRLELDGGQMKLTVNLGKGPETLFAGHKLNDNEWHTVRVVRRGKSLQLSVDNVTVEGQMAGAHMRLEFHNIETGIMTERRFISVVPSNFIGHLSGLVFNGQPYMDQCKDGDITYCELNARFGLRAIVADPVTFKSRSSYLALATLQAYASMHLFFQFKTTAPDGLLLFNSGNGNDFIVIELVKGYIHYVFDLGNGPSLMKGNSDKPVNDNQWHNVVVSRDPGNVHTLKIDSRTVTQHSNGARNLDLKGELYIGGLSKNMFSNLPKLVASRDGFQGCLASVDLNGRLPDLIADALHRIGQVERGCDGPSTTCTEESCANQGVCLQQWDGFTCDCTMTSYGGPVCNDPGTTYIFGKGGALITYTWPPNDRPSTRMDRLAVGFSTHQRSAVLVRVDSASGLGDYLQLHIDQGTVGVIFNVGTDDITIDEPNAIVSDGKYHVVRFTRSGGNATLQVDSWPVNERYPAGRQLTIFNSQAAIKIGGRDQGRPFQGQVSGLYYNGLKVLALAAESDPNVRTEGHLRLVGEGPSVLLSAETTATTLLADMATTIMETTTTMATTTTRRGRSPTLRDSTTQNTDDLLVASAECPSDDEDLEECEPSTGGELILPIITEDSLDPPPVATRSPFVPPPPTFYPFLTGVGATQDTLPPPAARRPPSGGPCQAERDDSDCEEPIEASGFASGEVFDSSLPPTDDEDFYTTFPLVTDRTTLLSPRKPAPRPNLRTDGATGAPGVLFAPSAPAPNLPAGKMNHRDPLQPLLENPPLGPGAPTSFEPRRPPPLRPGVTSAPGFPHLPTANPTGPGERGPPGAVEVIRESSSTTGMVVGIVAAAALCILILLYAMYKYRNRDEGSYQVDQSRNYISNSAQSNGAVVKEKAPAAPKTPSKAKKNKDKEYYV

SEQ ID NO: 55310 - protein, 1712 aa, Homo sapiens; identical to SEQ ID NO: 55308

SEQ ID NO: 55311 - protein, 1642 aa, Homo sapiens
MASGSRWRPTPPPLLLLLLLALAARADGLEFGGGPGQWARYARWAGAASSGELSFSLRTNATRALLLYLDDGGDCDFLELLLVDGRLRLRFTLSCAEPATLQLDTPVADDRWHMVLLTRDARRTALAVDGEARAAEVRSKRREMQVASDLFVGGIPPDVRLSALTLSTVKYEPPFRGLLANLKLGERPPALLGSQGLRGATADPLCAPARNPCANGGLCTVLAPGEVGCDCSHTGFGGKFCSEEEHPMEGPAHLTLNSEGKEEFVATFKGNEFFCYDLSHNPIQSSTDEITLAFRTLQRNGLMLHTGKSADYVNLSLKSGAVWLVINLGSGAFEALVEPVNGKFNDNAWHDVRVTRNLRQHAGIGHAMVTISVDGILTTTGYTQEDYTMLGSDDFFYIGGSPNTADLPGSPVSNNFMGCLKDVVYKNNDFKLELSRLAKEGDPKMKLQGDLSFRCEDVAALDPVTFESPEAFVALPRWSAKRTGSISLDFRTTEPNGLLLFSQGRRAGGGAGSHSSAQRADYFAMELLDGHLYLLLDMGSGGIKLRASSRKVNDGEWCHVDFQRDGRKGSISVNSRSTPFLATGDSEILDLESELYLGGLPEGGRVDLPLPPEVWTAALRAGYVGCVRDLFIDGRSRDLRGLAEAQGAVGVAPFCSRETLKQCASAPCRNGGVCREGWNRFICDCIGTGFLGRVCEREATVLSYDGSMYMKIMLPNAMHTEAEDVSLRFMSQRAYGLMMATTSRESADTLRLELDGGQMKLTVNLGKGPETLFAGHKLNDNEWHTVRVVRRGKSLQLSVDNVTVEGQMAGAHMRLEFHNIETGIMTERRFISVVPSNFIGHLSGLVFNGQPYMDQCKDGDITYCELNARFGLRAIVADPVTFKSRSSYLALATLQAYASMHLFFQFKTTAPDGLLLFNSGNGNDFIVIELVKGYIHYVFDLGNGPSLMKGNSDKPVNDNQWHNVVVSRDPGNVHTLKIDSRTVTQHSNGARNLDLKGELYIGGLSKNMFSNLPKLVASRDGFQGCLASVDLNGRLPDLIADALHRIGQVERGCDGPSTTCTEESCANQGVCLQQWDGFTCDCTMTSYGGPVCNDPGTTYIFGKGGALITYTWPPNDRPSTRMDRLAVGFSTHQRSAVLVRVDSASGLGDYLQLHIDQGTVGVIFNVGTDDITIDEPNAIVSDGKYHVVRFTRSGGNATLQVDSWPVNERYPAGRQLTIFNSQAAIKIGGRDQGRPFQGQVSGLYYNGLKVLALAAESDPNVRTEGHLRLVGEGPSVLLSAETTATTLLADMATTIMETTTTMATTTTRRGRSPTLRDSTTQNTDDLLVASAECPSDDEDLEECEPSTGGELILPIITEDSLDPPPVATRSPFVPPPPTFYPFLTGVGATQDTLPPPAARRPPSGGPCQAERDDSDCEEPIEASGFASGEVFDSSLPPTDDEDFYTTFPLVTDRTTLLSPRKPAPRPNLRTDGATGAPGVLFAPSAPAPNLPAGKMNHRDPLQPLLENPPLGPGAPTSFEPRRPPPLRPGVTSAPGFPHLPTANPTGPGERGPPGAVEVIRESSSTTGMVVGIVAAAALCILILLYAMYKYRNRDEGSYQVDQSRNYISNSAQSNGAVVKEKAPAAPKTPSKAKKNKDKEYYV

SEQ ID NO: 55312 - protein, 1705 aa, Homo sapiens
MASGSRWRPTPPPLLLLLLLALAARADGLEFGGGPGQWARYARWAGAASSGELSFSLRTNATRALLLYLDDGGDCDFLELLLVDGRLRLRFTLSCAEPATLQLDTPVADDRWHMVLLTRDARRTALAVDGEARAAEVRSKRREMQVASDLFVGGIPPDVRLSALTLSTVKYEPPFRGLLANLKLGERPPALLGSQGLRGATADPLCAPARNPCANGGLCTVLAPGEVGCDCSHTGFGGKFCSEEEHPMEGPAHLTLNSEVGSLLFSEGGAGRGGAGDVHQPTKGKEEFVATFKGNEFFCYDLSHNPIQSSTDEITLAFRTLQRNGLMLHTGKSADYVNLSLKSGAVWLVINLGSGAFEALVEPVNGKFNDNAWHDVRVTRNLRQHAGIGHAMVTISVDGILTTTGYTQEDYTMLGSDDFFYIGGSPNTADLPGSPVSNNFMGCLKDVVYKNNDFKLELSRLAKEGDPKMKLQGDLSFRCEDVAALDPVTFESPEAFVALPRWSAKRTGSISLDFRTTEPNGLLLFSQGRRAGGGAGSHSSAQRADYFAMELLDGHLYLLLDMGSGGIKLRASSRKVNDGEWCHVDFQRDGRKGSISVNSRSTPFLATGDSEILDLESELYLGGLPEGGRVDLPLPPEVWTAALRAGYVGCVRDLFIDGRSRDLRGLAEAQGAVGVAPFCSRETLKQCASAPCRNGGVCREGWNRFICDCIGTGFLGRVCEREATVLSYDGSMYMKIMLPNAMHTEAEDVSLRFMSQRAYGLMMATTSRESADTLRLELDGGQMKLTVNLDCLRVGCAPSKGPETLFAGHKLNDNEWHTVRVVRRGKSLQLSVDNVTVEGQMAGAHMRLEFHNIETGIMTERRFISVVPSNFIGHLSGLVFNGQPYMDQCKDGDITYCELNARFGLRAIVADPVTFKSRSSYLALATLQAYASMHLFFQFKTTAPDGLLLFNSGNGNDFIVIELVKGYIHYVFDLGNGPSLMKGNSDKPVNDNQWHNVVVSRDPGNVHTLKIDSRTVTQHSNGARNLDLKGELYIGGLSKNMFSNLPKLVASRDGFQGCLASVDLNGRLPDLIADALHRIGQVERGCDGPSTTCTEESCANQGVCLQQWDGFTCDCTMTSYGGPVCNDPGTTYIFGKGGALITYTWPPNDRPSTRMDRLAVGFSTHQRSAVLVRVDSASGLGDYLQLHIDQGTVGVIFNVGTDDITIDEPNAIVSDGKYHVVRFTRSGGNATLQVDSWPVNERYPAGNFDNERLAIARQRIPYRLGRVVDEWLLDKGRQLTIFNSQAAIKIGGRDQGRPFQGQVSGLYYNGLKVLALAAESDPNVRTEGHLRLVGEGPSVLLSAETTATTLLADMATTIMETTTTMATTTTRRGRSPTLRDSTTQNTDDLLVASAECPSDDEDLEECEPSTGGELILPIITEDSLDPPPVATRSPFVPPPPTFYPFLTGVGATQDTLPPPAARRPPSGGPCQAERDDSDCEEPIEASGFASGEVFDSSLPPTDDEDFYTTFPLVTDRTTLLSPRKPAPRPNLRTDGATGAPGVLFAPSAPAPNLPAGKMNHRDPLQPLLENPPLGPGAPTSFEPRRPPPLRPGVTSAPGFPHLPTANPTGPGERGPPGAVEVIRESSSTTGMVVGIVAAAALCILILLYAMYKYRNRDEGSYQVDQSRNYISNSAQSNGAVVKEKAPAAPKTPSKAKKNKDKEYYV

SEQ ID NO: 55313 - protein, 666 aa, Homo sapiens
MPPGGSGPGGCPRRPPALAGPLPPPPPPPPPPLLPLLPLLLLLLLGAAEGARVSSSLSTTHHVHHFHSKHGTVPIAINRMPFLTRGGHAGTTYIFGKGGALITYTWPPNDRPSTRMDRLAVGFSTHQRSAVLVRVDSASGLGDYLQLHIDQGTVGVIFNVGTDDITIDEPNAIVSDGKYHVVRFTRSGGNATLQVDSWPVNERYPAGNFDNERLAIARQRIPYRLGRVVDEWLLDKGRQLTIFNSQAAIKIGGRDQGRPFQGQVSGLYYNGLKVLALAAESDPNVRTEGHLRLVGEGPSVLLSAETTATTLLADMATTIMETTTTMATTTTRRGRSPTLRDSTTQNTDDLLVASAECPSDDEDLEECEPSTGGELILPIITEDSLDPPPVATRSPFVPPPPTFYPFLTGVGATQDTLPPPAARRPPSGGPCQAERDDSDCEEPIEASGFASGEVFDSSLPPTDDEDFYTTFPLVTDRTTLLSPRKPAPRPNLRTDGATGAPGVLFAPSAPAPNLPAGKMNHRDPLQPLLENPPLGPGAPTSFEPRRPPPLRPGVTSAPGFPHLPTANPTGPGERGPPGAVEVIRESSSTTGMVVGIVAAAALCILILLYAMYKYRNRDEGSYQVDQSRNYISNSAQSNGAVVKEKAPAAPKTPSKAKKNKDKEYYV

SEQ ID NO: 55314 - protein, 432 aa, Homo sapiens
MHLRIHARRSPPRRPAWTLGIWFLFWGCIVSSVWSSSNVASSSSTSSSPGSHSQHEHHFHGSKHHSVPISIYRSPVSLRGGHAGATYIFGKSGGLILYTWPANDRPSTRSDRLAVGFSTTVKDGILVRIDSAPGLGDFLQLHIEQGKIGVVFNIGTVDISIKEERTPVNDGKYHVVRFTRNGGNATLQVDNWPVNEHYPTGRQLTIFNTQAQIAIGGKDKGRLFQGQLSGLYYDGLKVLNMAAENNPNIKINGSVRLVGEVPSILGTTQTTSMPPEMSTTVMETTTTMATTTTRKNRSTASIQPTSDDLVSSAECSSDDEDFVECEPSTGRSANPTEPGIRRVPGASEVIRESSSTTGMVVGIVAAAALCILILLYAMYKYRNRDEGSYQVDETRNYISNSAQSNGTLMKEKQQSSKSGHKKQKNKDREYYV

SEQ ID NO: 55315 - protein, 1643 aa, Homo sapiens
MSSTLHSVFFTLKVSILLGSLLGLCLGLEFMGLPNQWARYLRWDASTRSDLSFQFKTNVSTGLLLYLDDGGVCDFLCLSLVDGRVQLRFSMDCAETAVLSNKQVNDSSWHFLMVSRDRLRTVLMLDGEGQSGELQPQRPYMDVVSDLFLGGVPTDIRPSALTLDGVQAMPGFKGLILDLKYGNSEPRLLGSRGVQMDAEGPCGERPCENGGICFLLDGHPTCDCSTTGYGGKLCSEGSSGDPCLSHLMMSEQAREENVATFRGSEYLCYDLSQNPIQSSSDEITLSFKTWQRNGLILHTGKSADYVNLALKDGAVSLVINLGSGAFEAIVEPVNGKFNDNAWHDVKVTRNLRQVTISVDGILTTTGYTQEDYTMLGSDDFFYVGGSPSTADLPGSPVSNNFMGCLKEVVYKNNDIRLELSRLARIADTKMKIYGEVVFKCENVATLDPINFETPEAYISLPKWNTKRMGSISFDFRTTEPNGLILFTHGKPQERKDARSQKNTKVDFFAVELLDGNLYLLLDMGSGTIKVKATQKKANDGEWYHVDIQRDGRSGTISVNSRRTPFTASGESEILDLEGDMYLGGLPENRAGLILPTELWTAMLNYGYVGCIRDLFIDGRSKNIRQLAEMQNAAGVKSSCSRMSAKQCDSYPCKNNAVCKDGWNRFICDCTGTGYWGRTCEREASILSYDGSMYMKIIMPMVMHTEAEDVSFRFMSQRAYGLLVATTSRDSADTLRLELDGGRVKLMVNLDCIRINCNSSKGPETLYAGQKLNDNEWHTVRVVRRGKSLKLTVDDDVAEGTMVGDHTRLEFHNIETGIMTEKRYISVVPSSFIGHLQSLMFNGLLYIDLCKNGDIDYCELKARFGLRNIIADPVTFKTKSSYLSLATLQAYTSMHLFFQFKTTSPDGFILFNSGDGNDFIAVELVKGYIHYVFDLGNGPNVIKGNSDRPLNDNQWHNVVITRDNSNTHSLKVDTKVVTQVINGAKNLDLKGDLYMAGLAQGMYSNLPKLVASRDGFQGCLASVDLNGRLPDLINDALHRSGQIERGCEGPSTTCQEDSCANQGVCMQQWEGFTCDCSMTSYSGNQCNDPGATYIFGKSGGLILYTWPANDRPSTRSDRLAVGFSTTVKDGILVRIDSAPGLGDFLQLHIEQGKIGVVFNIGTVDISIKEERTPVNDGKYHVVRFTRNGGNATLQVDNWPVNEHYPTGRQLTIFNTQAQIAIGGKDKGRLFQGQLSGLYYDGLKVLNMAAENNPNIKINGSVRLVGEVPSILGTTQTTSMPPEMSTTVMETTTTMATTTTRKNRSTASIQPTSDDLVSSAECSSDDEDFVECEPSTARGELVIPLLVEDPLATPPIATRAPSITLPPTFRPLLTIIETTKDSLSMTSEAGLPCLSDQGSDGCDDDGLVISGYGSGETFDSNLPPTDDEDFYTTFSLVTDKSLSTSIFEGGYKAHAPKWESKDFRPNKVSETSRTTTTSLSPELIRFTASSSSGMVPKLPAGKMNNRDLKPQPDIVLLPLPTAYELDSTKLKSPLITSPMFRNVPTANPTEPGIRRVPGASEVIRESSSTTGMVVGIVAAAALCILILLYAMYKYRNRDEGSYQVDETRNYISNSAQSNGTLMKEKQQSSKSGHKKQKNKDREYYV

SEQ ID NO: 55316 - protein, 1392 aa, Homo sapiens
MSSTLHSVFFTLKVSILLGSLLGLCLGLEFMGLPNQWARYLRWDASTRSDLSFQFKTNVSTGLLLYLDDGGVCDFLCLSLVDGRVQLRFSMDCAETAVLSNKQVNDSSWHFLMVSRDRLRTVLMLDGEGQSGELQPQRPYMDVVSDLFLGGVPTDIRPSALTLDGVQAMPGFKGLILDLKYGNSEPRLLGSRGVQMDAEGPCGERPCENGGICFLLDGHPTCDCSTTGYGGKLCSEGLSHLMMSEQGRWKAREENVATFRGSEYLCYDLSQNPIQSSSDEITLSFKTWQRNGLILHTGKSADYVNLALKDGAVSLVINLGSGAFEAIVEPVNGKFNDNAWHDVKVTRNLRQVTISVDGILTTTGYTQEDYTMLGSDDFFYVGGSPSTADLPGSPVSNNFMGCLKEVVYKNNDIRLELSRLARIADTKMKIYGEVVFKCENVATLDPINFETPEAYISLPKWNTKRMGSISFDFRTTEPNGLILFTHGKPQERKDARSQKNTKVDFFAVELLDGNLYLLLDMGSGTIKVKATQKKANDGEWYHVDIQRDGRSGTISVNSRRTPFTASGESEILDLEGDMYLGGLPENRAGLILPTELWTAMLNYGYVGCIRDLFIDGRSKNIRQLAEMQNAAGVKSSCSRMSAKQCDSYPCKNNAVCKDGWNRFICDCTGTGYWGRTCEREASILSYDGSMYMKIIMPMVMHTEAEDVSFRFMSQRAYGLLVATTSRDSADTLRLELDGGRVKLMVNLGKGPETLYAGQKLNDNEWHTVRVVRRGKSLKLTVDDDVAEGTMVGDHTRLEFHNIETGIMTEKRYISVVPSSFIGHLQSLMFNGLLYIDLCKNGDIDYCELKARFGLRNIIADPVTFKTKSSYLSLATLQAYTSMHLFFQFKTTSPDGFILFNSGDGNDFIAVELVKGYIHYVFDLGNGPNVIKGNSDRPLNDNQWHNVVITRDNSNTHSLKVDTKVVTQVINGAKNLDLKGDLYMAGLAQGMYSNLPKLVASRDGFQGCLASVDLNGRLPDLINDALHRSGQIERGCEGPSTTCQEDSCANQGVCMQQWEGFTCDCSMTSYSGNQCNDPGATYIFGKSGGLILYTWPANDRPSTRSDRLAVGFSTTVKDGILVRIDSAPGLGDFLQLHIEQGKIGVVFNIGTVDISIKEERTPVNDGKYHVVRFTRNGGNATLQVDNWPVNEHYPTGNTDNERFQMVKQKIPFKYNRPVEEWLQEKGRQLTIFNTQAQIAIGGKDKGRLFQGQLSGLYYDGLKVLNMAAENNPNIKINGSVRLVGEVPSILGTTQTTSMPPEMSTTVMETTTTMATTTTRKNRSTASIQPTSDDLVSSAECSSDDEDFVECEPSTGRSARSSNAARSLRAALTWTWRLTYTFTPIIFISCVVHS

SEQ ID NO: 55317 - protein, 1061 aa, Homo sapiens
MLGSDDFFYVGGSPSTADLPGSPVSNNFMGCLKEVVYKNNDIRLELSRLARIADTKMKIYGEVVFKCENVATLDPINFETPEAYISLPKWNTKRMGSISFDFRTTEPNGLILFTHGKPQERKDARSQKNTKVDFFAVELLDGNLYLLLDMGSGTIKVKATQKKANDGEWYHVDIQRDGRSGTISVNSRRTPFTASGESEILDLEGDMYLGGLPENRAGLILPTELWTAMLNYGYVGCIRDLFIDGRSKNIRQLAEMQNAAGVKSSCSRMSAKQCDSYPCKNNAVCKDGWNRFICDCTGTGYWGRTCEREASILSYDGSMYMKIIMPMVMHTEAEDVSFRFMSQRAYGLLVATTSRDSADTLRLELDGGRVKLMVNLDCIRINCNSSKGPETLYAGQKLNDNEWHTVRVVRRGKSLKLTVDDDVAEGTMVGDHTRLEFHNIETGIMTEKRYISVVPSSFIGHLQSLMFNGLLYIDLCKNGDIDYCELKARFGLRNIIADPVTFKTKSSYLSLATLQAYTSMHLFFQFKTTSPDGFILFNSGDGNDFIAVELVKGYIHYVFDLGNGPNVIKGNSDRPLNDNQWHNVVITRDNSNTHSLKVDTKVVTQVINGAKNLDLKGDLYMAGLAQGMYSNLPKLVASRDGFQGCLASVDLNGRLPDLINDALHRSGQIERGCEGPSTTCQEDSCANQGVCMQQWEGFTCDCSMTSYSGNQCNDPGATYIFGKSGGLILYTWPANDRPSTRSDRLAVGFSTTVKDGILVRIDSAPGLGDFLQLHIEQGKIGVVFNIGTVDISIKEERTPVNDGKYHVVRFTRNGGNATLQVDNWPVNEHYPTGRQLTIFNTQAQIAIGGKDKGRLFQGQLSGLYYDGLKVLNMAAENNPNIKINGSVRLVGEVPSILGTTQTTSMPPEMSTTVMETTTTMATTTTRKNRSTASIQPTSDDLVSSAECSSDDEDFVECEPSTANPTEPGIRRVPGASEVIRESSSTTGMVVGIVAAAALCILILLYAMYKYRNRDEGSYQVDETRNYISNSAQSNGTLMKEKQQSSKSGHKKQKNKDREYYV

SEQ ID NO: 55318 - protein, 459 aa, Homo sapiens
MHLRIHARRSPPRRPAWTLGIWFLFWGCIVSSVWSSSNVASSSSTSSSPGSHSQHEHHFHGSKHHSVPISIYRSPVSLRGGHAGATYIFGKSGGLILYTWPANDRPSTRSDRLAVGFSTTVKDGILVRIDSAPGLGDFLQLHIEQGKIGVVFNIGTVDISIKEERTPVNDGKYHVVRFTRNGGNATLQVDNWPVNEHYPTGNTDNERFQMVKQKIPFKYNRPVEEWLQEKGRQLTIFNTQAQIAIGGKDKGRLFQGQLSGLYYDGLKVLNMAAENNPNIKINGSVRLVGEVPSILGTTQTTSMPPEMSTTVMETTTTMATTTTRKNRSTASIQPTSDDLVSSAECSSDDEDFVECEPSTANPTEPGIRRVPGASEVIRESSSTTGMVVGIVAAAALCILILLYAMYKYRNRDEGSYQVDETRNYISNSAQSNGTLMKEKQQSSKSGHKKQKNKDREYYV

SEQ ID NO: 55319 - protein, 1061 aa, Homo sapiens; identical to SEQ ID NO: 55317

SEQ ID NO: 55320 - protein, 637 aa, Homo sapiens
MHLRIHARRSPPRRPAWTLGIWFLFWGCIVSSVWSSSNVASSSSTSSSPGSHSQHEHHFHGSKHHSVPISIYRSPVSLRGGHAGATYIFGKSGGLILYTWPANDRPSTRSDRLAVGFSTTVKDGILVRIDSAPGLGDFLQLHIEQGKIGVVFNIGTVDISIKEERTPVNDGKYHVVRFTRNGGNATLQVDNWPVNEHYPTGRQLTIFNTQAQIAIGGKDKGRLFQGQLSGLYYDGLKVLNMAAENNPNIKINGSVRLVGEVPSILGTTQTTSMPPEMSTTVMETTTTMATTTTRKNRSTASIQPTSDDLVSSAECSSDDEDFVECEPSTGGELVIPLLVEDPLATPPIATRAPSITLPPTFRPLLTIIETTKDSLSMTSEAGLPCLSDQGSDGCDDDGLVISGYGSGETFDSNLPPTDDEDFYTTFSLVTDKSLSTSIFEGGYKAHAPKWESKDFRPNKVSETSRTTTTSLSPELIRFTASSSSGMVPKLPAGKMNNRDLKPQPDIVLLPLPTAYELDSTKLKSPLITSPMFRNVPTANPTEPGIRRVPGASEVIRESSSTTGMVVGIVAAAALCILILLYAMYKYRNRDEGSYQVDETRNYISNSAQSNGTLMKEKQQSSKSGHKKQKNKDREYYV

SEQ ID NO: 55321 - protein, 142 aa, Homo sapiens
MGLKLNGRYISLILAVQIAYLVQAVRAAGKCDAVFKGFSDCLLKLGDSMANYPQGLDDKTNIKTVCTYWEDFHSCTVTALTDCQEGAKDMWDKLRKESKNLNIQGSLFELCGSGNGAAGSLLPAFPVLLVSLSAALATWLSF

SEQ ID NO: 55322 - protein, 2946 aa, Homo sapiens [sequence omitted]

SEQ ID NO: 55323 - protein, 524 aa, Homo sapiens
MFVNSNGYNLGVREDEVVVNDVDLPPWAKKPEDFVRINRMALESEFVSCQLHQWIDLIFGYKQRGPEAVRALNVFHYLTYEGSVNLDSITDPVLREIPEAYFIRDPHTFLLTKDFIKAMEAQIQNFGQTPSQLLIEPHPPRSSAMHLCFLPQSPLMFKDQMQQDVIMVLKFPSNSPVTHVAANTLPHLTIPAVVTVTCSRLFAVNRWHNTVGLRGAPGYSLDQAHHLPIEMDPLIANNSGVNKRQITDLVDQSIQINAHCFVVTADNRYILICGFWDKSFRVYSTETGKLTQIVFGHWDVVTCLARSESYIGGDCYIVSGSRDATLLLWYWSGRHHIIGDNPNSSDYPAPRAVLTGHDHEVVCVSVCAELGLVISGAKEGPCLVHTITGDLLRALEGPENCLFPRLISVSSEGHCIIYYERGRFSNFSINGKLLAQMEINDSTRAILLSSDGQNLVTGGDNGVVEVWQACDFKQLYIYPGCDAGIRAMDLSHDQRTLITGMASGSIVAFNIDFNRWHYEHQNRY

SEQ ID NO: 55324 - protein, 2943 aa, Homo sapiens
MASEKPGPGPGLEPQPVGLIAVGAAGGGGGGSGGGGTGGSGMGELRGASGSGSVMLPAGMINPSVPIRNIRMKFAVLIGLIQVGEVSNRDIVETVLNLLVGGEFDLEMNFIIQDAESITCMTELLEHCDVTCQAEIWSMFTAILRKSVRNLQTSTEVGLIEQVLLKMSAVDDMIADLLVDMLGVLASYSITVKELKLLFSMLRGESGIWPRHAVKLLSVLNQMPQRHGPDTFFNFPGCSAAAIALPPIAKWPYQNGFTLNTWFRMDPLNNINVDKDKPYLYCFRTSKGVGYSAHFVGNCLIVTSLKSKGKGFQHCVKYDFQPRKWYMISIVHIYNRWRNSEIRCYVNGQLVSYGDMAWHVNTNDSYDKCFLGSSETADANRVFCGQLGAVYVFSEALNPAQIFAIHQLGPGYKSTFKFKSESDIHLAEHHKQVLYDGKLASSIAFTYNAKATDAQLCLESSPKENASIFVHSPHALMLQDVKAIVTHSIHSAIHSIGGIQVLFPLFAQLDNRQLNDSQVETTVCATLLAFLVELLKSSVAMQEQMLGGKGFLVIGYLLEKSSRVHITRAVLEQFLSFAKYLDGLSHGAPLLKQLCDHILFNPAIWIHTPAKVQLSLYTYLSAEFIGTATIYTTIRRVGTVLQLMHTLKYYYWVINPADSSGITPKGLDGPRPSQKEIISLRAFMLLFLKQLILKDRGVKEDELQSILNYLLTMHEDENIHDVLQLLVALMSEHPASMIPAFDQRNGIRVIYKLLASKSESIWVQALKVLGYFLKHLGHKRKVEIMHTHSLFTLLGERLMLHTNTVTVTTYNTLYEILTEQVCTQVVHKPHPEPDSTVKIQNPMILKVVATLLKNSTPSAELMEVRRLFLSDMIKLFSNSRENRRCLLQCSVWQDWMFSLGYINPKNSEEQKITEMVYNIFRILLYHAIKYEWGGWRVWVDTLSIAHSKVTYEAHKEYLAKMYEEYQRQEEENIKKGKKGNVSTISGLSSQTTGAKGGMEIREIEDLSQSQSPESETDYPVSTDTRDLLMSTKVSDDILGNSDRPGSGVHVEVHDLLVDIKAEKVEATEVKLDDMDLSPETLVGGENGALVEVESLLDNVYSAAVEKLQNNVHGSVGIIKKNEEKDNGPLITLADEKEDLPNSSTSFLFDKIPKQEEKLLPELSSNHIIPNIQDTQVHLGVSDDLGLLAHMTGSVDLTCTSSIIEEKEFKIHTTSDGMSSISERDLASSTKGLEYAEMTATTLETESSSSKIVPNIDAGSIISDTERSDDGKESGKEIRKIQTTTTTQAVQGRSITQQDRDLRVDLGFRGMPMTEEQRRQFSPGPRTTMFRIPEFKWSPMHQRLLTDLLFALETDVHVWRSHSTKSVMDFVNSNENIIFVHNTIHLISQMVDNIIIACGGILPLLSAATSPTTELENIEVTQGMSAETAVTFLSRLMAMVDVLVFASSLNFSEIEAEKNMSSGGLMRQCLRLVCCVAVRNCLECRQRQRDRGNKSSHGSSKPQEVPQSVTATAASKTPLENVPGNLSPIKDPDRLLQDVDINRLRAVVFRDVDDSKQAQFLALAVVYFISVLMVSKYRDILEPQRETTRTGSQPGRNIRQEINSPTSTVVVIPSIPHPSLNHGFLAKLIPEQSFGHSFYKETPAAFPDTIKEKETPTPGEDIQVESSIPHTDSGIGEEQVASILNGAELETSTGPDAMSELLSTLSSEVKKSQESLTENPSETLKPATSISSISQTKGINVKEILKSLVAAPVEIAECGPEPIPYPDPALKRETQAILPMQFHSFDRSVVVPVKKPPPGSLAVTTVGATTAGSGLPTGSTSNIFAATGATPKSMINTTGAVDSGSSSSSSSSSFVNGATSKNLPAVQTVAPMPEDSAENMSITAKLERALEKVAPLLREIFVDFAPFLSRTLLGSHGQELLIEGLVCMKSSTSVVELVMLLCSQEWQNSIQKNAGLAFIELINEGRLLCHAMKDHIVRVANEAEFILNRQRAEDVHKHAEFESQCAQYAADRREEEKMCDHLISAAKHRDHVTANQLKQKILNILTNKHGAWGAVSHSQLHDFWRLDYWEDDLRRRRRFVRNAFGSTHAEALLKAAIEYGTEEDVVKSKKTFRSQAIVNQNAETELMLEGDDDAVSLLQEKEIDNLAGPVVLSTPAQLIAPVVVAKGTLSITTTEIYFEVDEDDSAFKKIDTKVLAYTEGLHGKWMFSEIRAVFSRRYLLQNTALEVFMANRTSVMFNFPDQATVKKVVYSLPRVGVGTSYGLPQARRISLATPRQLYKSSNMTQRWQRREISNFEYLMFLNTIAGRTYNDLNQYPVFPWVLTNYESEELDLTLPGNFRDLSKPIGALNPKRAVFYAERYETWEDDQSPPYHYNTHYSTATSTLSWLVRIEPFTTFFLNANDGKFDHPDRTFSSVARSWRTSQRDTSDVKELIPEFYYLPEMFVNSNGYNLGVREDEVVVNDVDLPPWAKKPEDFVRINRMALESEFVSCQLHQWIDLIFGYKQRGPEAVRALNVFHYLTYEGSVNLDSITDPVLREAMEAQIQNFGQTPSQLLIEPHPPRSSAMHLCFLPQSPLMFKDQMQQDVIMVLKFPSNSPVTHVAANTLPHLTIPAVVTVTCSRLFAVNRWHNTVGLRGAPGYSLDQAHHLPIEMDPLIANNSGVNKRQITDLVDQSIQINAHCFVVTADNRYILICGFWDKSFRVYSTETGKLTQIVFGHWDVVTCLARSESYIGGDCYIVSGSRDATLLLWYWSGRHHIIGDNPNSSDYPAPRAVLTGHDHEVVCVSVCAELGLVISGAKEGPCLVHTITGDLLRALEGPENCLFPRLISVSSEGHCIIYYERGRFSNFSINGKLLAQMEINDSTRAILLSSDGQNLVTGGDNGVVEVWQACDFKQLYIYPGCDAGIRAMDLSHDQRTLITGMASGSIVAFNIDFNRWHYEHQNRY

SEQ ID NO: 55325 - protein, 2946 aa, Homo sapiens
MASEKPGPGPGLEPQPVGLIAVGAAGGGGGGSGGGGTGGSGMGELRGASGSGSVMLPAGMINPSVPIRNIRMKFAVLIGLIQVGEVSNRDIVETVLNLLVGGEFDLEMNFIIQDAESITCMTELLEHCDVTCQAEIWSMFTAILRKSVRNLQTSTEVGLIEQVLLKMSAVDDMIADLLVDMLGVLASYSITVKELKLLFSMLRGESGIWPRHAVKLLSVLNQMPQRHGPDTFFNFPGCSAAAIALPPIAKWPYQNGFTLNTWFRMDPLNNINVDKDKPYLYCFRTSKGVGYSAHFVGNCLIVTSLKSKGKGFQHCVKYDFQPRKWYMISIVHIYNRWRNSEIRCYVNGQLVSYGDMAWHVNTNDSYDKCFLGSSETADANRVFCGQLGAVYVFSEALNPAQIFAIHQLGPGYKSTFKFKSESDIHLAEHHKQVLYDGKLASSIAFTYNAKATDAQLCLESSPKENASIFVHSPHALMLQDVKAIVTHSIHSAIHSIGGIQVLFPLFAQLDNRQLNDSQVETTVCATLLAFLVELLKSSVAMQEQMLGGKGFLVIGYLLEKSSRVHITRAVLEQFLSFAKYLDGLSHGAPLLKQLCDHILFNPAIWIHTPAKVQLSLYTYLSAEFIGTATIYTTIRRVGTVLQLMHTLKYYYWVINPADSSGITPKGLDGPRPSQKEIISLRAFMLLFLKQLILKDRGVKEDELQSILNYLLTMHEDENIHDVLQLLVALMSEHPASMIPAFDQRNGIRVIYKLLASKSESIWVQALKVLGYFLKHLGHKRKVEIMHTHSLFTLLGERLMLHTNTVTVTTYNTLYEILTEQVCTQVVHKPHPEPDSTVKIQNPMILKVVATLLKNSTPSAELMEVRRLFLSDMIKLFSNSRENRRCLLQCSVWQDWMFSLGYINPKNSEEQKITEMVYNIFRILLYHAIKYEWGGWRVWVDTLSIAHSKVTYEAHKEYLAKMYEEYQRQEEENIKKGKKGNVSTISGLSSQTTGAKGGMEIREIEDLSQSQSPESETDYPVSTDTRDLLMSTKVSDDILGNSDRPGSGVHVEVHDLLVDIKAEKVEATEVKLDDMDLSPETLVGGENGALVEVESLLDNVYSAAVEKLQNNVHGSVGIIKKNEEKDNGPLITLADEKEDLPNSSTSFLFDKIPKQEEKLLPELSSNHIIPNIQDTQVHLGVSDDLGLLAHMTGSVDLTCTSSIIEEKEFKIHTTSDGMSSISERDLASSTKGLEYAEMTATTLETESSSSKIVPNIDAGSIISDTERSDDGKESGKEIRKIQTTTTTQAVQGRSITQQDRDLRVDLGFRGMPMTEEQRRQFSPGPRTTMFRIPEFKWSPMHQRLLTDLLFALETDVHVWRSHSTKSVMDFVNSNENIIFVHNTIHLISQMVDNIIIACGGILPLLSAATSPTGSKTELENIEVTQGMSAETAVTFLSRLMAMVDVLVFASSLNFSEIEAEKNMSSGGLMRQCLRLVCCVAVRNCLECRQRQRDRGNKSSHGSSKPQEVPQSVTATAASKTPLENVPGNLSPIKDPDRLLQDVDINRLRAVVFRDVDDSKQAQFLALAVVYFISVLMVSKYRDILEPQRETTRTGSQPGRNIRQEINSPTSTVVVIPSIPHPSLNHGFLAKLIPEQSFGHSFYKETPAAFPDTIKEKETPTPGEDIQVESSIPHTDSGIGEEQVASILNGAELETSTGPDAMSELLSTLSSEVKKSQESLTENPSETLKPATSISSISQTKGINVKEILKSLVAAPVEIAECGPEPIPYPDPALKRETQAILPMQFHSFDRSVVVPVKKPPPGSLAVTTVGATTAGSGLPTGSTSNIFAATGATPKSMINTTGAVDSGSSSSSSSSSFVNGATSKNLPAVQTVAPMPEDSAENMSITAKLERALEKVAPLLREIFVDFAPFLSRTLLGSHGQELLIEGLVCMKSSTSVVELVMLLCSQEWQNSIQKNAGLAFIELINEGRLLCHAMKDHIVRVANEAEFILNRQRAEDVHKHAEFESQCAQYAADRREEEKMCDHLISAAKHRDHVTANQLKQKILNILTNKHGAWGAVSHSQLHDFWRLDYWEDDLRRRRRFVRNAFGSTHAEALLKAAIEYGTEEDVVKSKKTFRSQAIVNQNAETELMLEGDDDAVSLLQEKEIDNLAGPVVLSTPAQLIAPVVVAKGTLSITTTEIYFEVDEDDSAFKKIDTKVLAYTEGLHGKWMFSEIRAVFSRRYLLQNTALEVFMANRTSVMFNFPDQATVKKVVYSLPRVGVGTSYGLPQARRISLATPRQLYKSSNMTQRWQRREISNFEYLMFLNTIAGRTYNDLNQYPVFPWVLTNYESEELDLTLPGNFRDLSKPIGALNPKRAVFYAERYETWEDDQSPPYHYNTHYSTATSTLSWLVRIEPFTTFFLNANDGKFDHPDRTFSSVARSWRTSQRDTSDVKELIPEFYYLPEMFVNSNGYNLGVREDEVVVNDVDLPPWAKKPEDFVRINRMALESEFVSCQLHQWIDLIFGYKQRGPEAVRALNVFHYLTYEGSVNLDSITDPVLREAMEAQIQNFGQTPSQLLIEPHPPRSSAMHLCFLPQSPLMFKDQMQQDVIMVLKFPSNSPVTHVAANTLPHLTIPAVVTVTCSRLFAVNRWHNTVGLRGAPGYSLDQAHHLPIEMDPLIANNSGVNKRQITDLVDQSIQINAHCFVVTADNRYILICGFWDKSFRVYSTETGKLTQIVFGHWDVVTCLARSESYIGGDCYIVSGSRDATLLLWYWSGRHHIIGDNPNSSDYPAPRAVLTGHDHEVVCVSVCAELGLVISGAKEGPCLVHTITGDLLRALEGPENCLFPRLISVSSEGHCIIYYERGRFSNFSINGKLLAQMEINDSTRAILLSSDGQNLVTGGDNGVVEVWQACDFKQLYIYPGCDAGIRAMDLSHDQRTLITGMASGSIVAFNIDFNRWHYEHQNRY

SEQ ID NO: 55326 - protein, 524 aa, Homo sapiens; identical to SEQ ID NO: 55323

SEQ ID NO: 55327 - protein, 1575 aa, Homo sapiens
MHQRLLTDLLFALETDVHVWRSHSTKSVMDFVNSNENIIFVHNTIHLISQMVDNIIIACGGILPLLSAATSPTTELENIEVTQGMSAETAVTFLSRLMAMVDVLVFASSLNFSEIEAEKNMSSGGLMRQCLRLVCCVAVRNCLECRQRQRDRGNKSSHGSSKPQEVPQSVTATAASKTPLENVPGNLSPIKDPDRLLQDVDINRLRAVVFRDVDDSKQAQFLALAVVYFISVLMVSKYRDILEPQRETTRTGSQPGRNIRQEINSPTSTETPAAFPDTIKEKETPTPGEDIQVESSIPHTDSGIGEEQVASILNGAELETSTGPDAMSELLSTLSSEVKKSQESLTENPSETLKPATSISSISQTKGINVKEILKSLVAAPVEIAECGPEPIPYPDPALKRETQAILPMQFHSFDRSVVVPVKKPPPGSLAVTTVGATTAGSGLPTGSTSNIFAATGATPKSMINTTGAVDSGSSSSSSSSSFVNGATSKNLPAVQTVAPMPEDSAENMSITAKLERALEKVAPLLREIFVDFAPFLSRTLLGSHGQELLIEGLVCMKSSTSVVELVMLLCSQEWQNSIQKNAGLAFIELINEGRLLCHAMKDHIVRVANEAEFILNRQRAEDVHKHAEFESQCAQYAADRREEEKMCDHLISAAKHRDHVTANQLKQKILNILTNKHGAWGAVSHSQLHDFWRLDYWEDDLRRRRRFVRNAFGSTHAEALLKAAIEYGTEEDVVKSKKTFRSQAIVNQNAETELMLEGDDDAVSLLQEKEIDNLAGPVVLSTPAQLIAPVVVAKGTLSITTTEIYFEVDEDDSAFKKIDTKVLAYTEGLHGKWMFSEIRAVFSRRYLLQNTALEVFMANRTSVMFNFPDQATVKKVVYSLPRVGVGTSYGLPQARRISLATPRQLYKSSNMTQRWQRREISNFEYLMFLNTIAGRTYNDLNQYPVFPWVLTNYESEELDLTLPGNFRDLSKPIGALNPKRAVFYAERYETWEDDQSPPYHYNTHYSTATSTLSWLVRIEPFTTFFLNANDGKFDHPDRTFSSVARSWRTSQRDTSDVKELIPEFYYLPEMFVNSNGYNLGVREDEVVVNDVDLPPWAKKPEDFVRINRMALESEFVSCQLHQWIDLIFGYKQRGPEAVRALNVFHYLTYEGSVNLDSITDPVLREAMEAQIQNFGQTPSQLLIEPHPPRSSAMHLCFLPQSPLMFKDQMQQDVIMVLKFPSNSPVTHVAANTLPHLTIPAVVTVTCSRLFAVNRWHNTVGLRGAPGYSLDQAHHLPIEMDPLIANNSGVNKRQITDLVDQSIQINAHCFVVTADNRYILICGFWDKSFRVYSTETGKLTQIVFGHWDVVTCLARSESYIGGDCYIVSGSRDATLLLWYWSGRHHIIGDNPNSSECDYPAPRAVLTGHDHEVVCVSVCAELGLVISGAKEGPCLVHTITGDLLRALEGPENCLFPRLISVSSEGHCIIYYERGRFSNFSINGKLLAQMEINDSTRAILLSSDGQNLVTGGDNGVVEVWQACDFKQLYIYPGCDAGIRAMDLSHDQRTLITGMASGSIVAFNIDFNRWHYEHQNRY

SEQ ID NO: 55328 - protein, 739 aa, Homo sapiens
MFSEIRAVFSRRYLLQNTALEVFMANRTSVMFNFPDQATVKKVVYSLPRVGVGTSYGLPQARRISLATPRQLYKSSNMTQRWQRREISNFEYLMFLNTIAGRTYNDLNQYPVFPWVLTNYESEELDLTLPGNFRDLSKPIGALNPKRAVFYAERYETWEDDQSPPYHYNTHYSTATSTLSWLVRIEPFTTFFLNANDGKFDHPDRTFSSVARSWRTSQRDTSDVKELIPEFYYLPEMFVNSNGYNLGVREDEVVVNDVDLPPWAKKPEDFVRINRMALESEFVSCQLHQWIDLIFGYKQRGPEAVRALNVFHYLTYEGSVNLDSITDPVLREAMEAQIQNFGQTPSQLLIEPHPPRSSAMHLCFLPQSPLMFKDQMQQDVIMVLKFPSNSPVTHVAANTLPHLTIPAVVTVTCSRLFAVNRWHNTVGLRGAPGYSLDQAHHLPIEMDPLIANNSGVNKRQITDLVDQSIQINAHCFVVTADNRYILICGFWDKSFRVYSTETGKLTQIVFGHWDVVTCLARSESYIGGDCYIVSGSRDATLLLWYWSGRHHIIGDNPNSSDYPAPRAVLTGHDHEVVCVSVCAELGLVISGAKEGPCLVHTITGDLLRALEGPENCLFPRLISVSSEGHCIIYYERGRFSNFSINGKLLAQMEINDSTRAILLSSDGQNLVTGGDNGVVEVWQACDFKQLYIYPGCDAGIRAMDLSHDQRTLITGMASGSIVAFNIDFNRWHYEHQNRY

SEQ ID NO: 55329 - protein, 2946 aa, Homo sapiens [sequence omitted]

SEQ ID NO: 55330 - protein, 277 aa, Homo sapiens
MFSEIRAVFSRRYLLQNTALEVFMANRTSVMFNFPDQATVKKVVYSLPRVGVGTSYGLPQARRISLATPRQLYKSSNMTQRWQRREISNFEYLMFLNTIAGRTYNDLNQYPVFPWVLTNYESEELDLTLPGNFRDLSKPIGALNPKRAVFYAERYETWEDDQSPPYHYNTHYSTATSTLSWLVRIEPFTTFFLNANDGKFDHPDRTFSSVARSWRTSQRDTSDVKELIPEFYYLPEMFVNSNGYNLGVREDEVVVNDVDLPPWAKNLKTLCGSTGWP

SEQ ID NO: 55331 - protein, 2604 aa, Homo sapiens
MASRERLFELWMLYCTKKDPDYLKLWLDTFVSSYEQFLDVDFEKLPTRVDDMPPGISLLPDNILQVLRIQLLQCVQKMADGLEEQQQALSILLVKFFIILCRNLSNVEEIGTCSYINYVITMTTLYIQQLKSKKKEKEMADQTCIEEFVIHALAFCESLYDPYRNWRHRISGRILSTVEKSRQKYKPASLTVEFVPFFYQCFQESEHLKESLKCCLLHLFGAIVAGGQRNALQAISPATMEVLMRVLADCDSWEDGDPEEVGRKAELTLKCLTEVVHILLSSNSDQRQVETSTILENYFKLLNSDHSALPNQRRSRQWENRFIALQIKMLNTITAMLDCTDRPVLQAIFLNSNCFEHLIRLLQNCKVFQGQLDCLAISTIQALTAVMNKSPAAKEVFKERIGYTHMLEVLKSLGQPPLELLKELMNMAVEGDHTSVGILGISNVQPLLLLIQWLPELQSHDLQIFISDWLKRICCINRQSRTTCVNANMGIRIIETLDLHSSLHQTCAENLIAIHGSLGSQSVSSEEIRRLLRLLRVDESESVHPYVTPVTRAILTMARKLSLESALQYFNLSHSMAGISVPPIQKWPGSAFSFSAWFCLDQDQLTLGIANKGGKRKQLYSFFTGSGMGFEAFITHSGMLVVAVCTKREYATVMLPDHSFCDSLWHNITVVHMPGKRPFGQSFVYIYDNGQQKVSAPLRFPAMNEPFTSCCIGSAGQRTTTPPPSQIPDPPFSSPITPHRTSFGGILSSASWGGTIEKSKLITKLISAGTQDSEWGCPTSLEGQLGSVIIFYEPLQPPQVKALYLAGPNCLSPWKCQESDMADLPGNILLYYTAKACKNSICLDLSTNCLHGRLTGNKVVNWDIKDIINCIGGLNVLFPLLEQISHFSEGQIPEEKNESTVPESVTPVEGDWLVWTSTKASESRLERNLVATFILIVKHFIQRHPINQGNLIHSHGVATLGALLQKVPSTLMDVNVLMAVQLLIEQVSLEKNMQLLQQMYQYLLFDFRIWNRGDFPFRIGHIQYLSTIIKDSRRVFRKKYGVQFLLDTLRIYYGNGCKYNELSLDDIRTIRTSLYGLIKYFLCKGGSHEEIQSIMGYIAATNEEEQLFGILDVLFSLLRTSPTRGQLFLLLFEPGNADILYALLLNQKYSDRLREIIFKIMEQMLKCTNVYERSKQHIRLREVGYSGLGLLLNEALVNTSLIKNLTHQIINTDPVINFKDLLSVVYISHRAHINVRVAICRKVLQILQFQPDAAHQISQQVGWQDTLVRLFLKAKFENGNTLHKHSRAVLMKDNDKNMSTEDTKKNSDEKTDEEKITSFASANVSSDQWSLEDRHSLDSNTPLFPEDSSVGELSFKSENQEEFWHSNPSHLSLDLSGIDSCEMSDSGSQVPDSLPSTPSPVESTKSFSVHSDRESSITNDMGFSDDFSLLESQERCEEELLQLLTHILNYVMCKGLEKSDDDTWIERGQVFSALSKPGISSELLRPSDEIKLTLLQKMLEWAISENREAKTNPVTAENAFRLVLIIQDFLQSEGLVNSNMWTEKLLEDMMLLFDCLSVCYSESPVWVKLSQIQIQLLLGFIGRGNLQVCAMASAKLNTLLQTKVIENQDEACYILGKLEHVLSQSIKEQTEIYSFLIPLVRTLVSKIYELLFMNLHLPSLPFTNGSSSFFEDFQEYCNSNEWQVYIEKYIVPYMKQYEAHTFYDGHENMALYWKDCYEALMVNMHKRDREGGESKLKFQELFVEPFNRKARQENLRYNNMLKQLSSQQLATLRRWKAIQLYLTCERGPWAKRKQNPIHWKLANVENYSRMRLKLVPNYNFKTHEEASALRDNLGIQHSQPSSDTLLLEVVKQVKVSDMVEDKLDLPEEDITARVNVDEKEEQDQKEKLVLMEDCELITIIDVIPGRLEITTQHIYFYDGSIEKEDGVGFDFKWPHSQIREIHLRRYNLRRSALEIFHVDQSNYFLNFKKEVRNKIYSRLLSLHSPNSYYGSRSPQELFKASGLTQKWVNREISNFDYLIQINTMAGRTYNDLAQYPVFPWILQDYTSEELDLNNPAVFRDLSKPIGVVNEKNAKAMREKYENFEDPMGTIDKFHYGTHYSNSAGVMHYLIRVEPFTTLHIQLQSGRFDCADRQFHSIPATWQALMDNPYDVKELIPEFFYFPEFLENQNQFNLGRLQISKELVNDVILPKWAKSAEDFIYKHRKALESEYVSAHLHEWIDLIFGYKQRGPAAVEALNVFYYCSYEGAVDLDALTDEKERKALEGMINNFGQTPCQLLKITISMNYVIGTHGWLPYDRNISNYFTFIKDQTVTNPKTQRSINGSFAPGLEITSKLFVVSHDAKLLFSAGYWDNSIQVMSLTKGKIISHIIRHMDIVTCLATDYCGIHLISGSRDTTCMIWQITQQGGVPVGLASKPFQILYGHTNEVLSVGISTELDMAVSGSRDGTVIIHTIPNLAISWEGHIVVYSSTEEKTTLKDKNALHLFSINGKYLGSQILKEQVSDICIIGEHIVTGSIQGFLSIRDLHSLNLSINPLAMRLPIHCVCVTKEYSHILVGLEDGKLIVVGVGKPAEMRSGQLSRKFWGSSKRLSQISAGETEYNTQDSK

SEQ ID NO: 55332 - protein, 2694 aa, Homo sapiens
MASRERLFELWMLYCTKKDPDYLKLWLDTFVSSYEQFLDVDFEKLPTRVDDMPPGISLLPDNILQVLRIQLLQCVQKMADGLEEQQQALSILLVKFFIILCRNLSNVEEIGTCSYINYVITMTTLYIQQLKSKKKEKEMADQTCIEEFVIHALAFCESLYDPYRNWRHRISGRILSTVEKSRQKYKPASLTVEFVPFFYQCFQESEHLKESLKCCLLHLFGAIVAGGQRNALQAISPATMEVLMRVLADCDSWEDGDPEEVGRKAELTLKCLTEVVHILLSSNSDQRQVETSTILENYFKLLNSDHSALPNQRRSRQWENRFIALQIKMLNTITAMLDCTDRPVLQAIFLNSNCFEHLIRLLQNCKVFQGQLDCLAISTIQALTAVMNKSPAAKEVFKERIGYTHMLEVLKSLGQPPLELLKELMNMAVEGDHTSVGILGISNVQPLLLLIQWLPELQSHDLQIFISDWLKRICCINRQSRTTCVNANMGIRIIETLDLHSSLHQTCAENLIAIHGSLGSQSVSSEEIRRLLRLLRVDESESVHPYVTPVTRAILTMARKLSLESALQYFNLSHSMAGISVPPIQKWPGSAFSFSAWFCLDQDQLTLGIANKGGKRKQLYSFFTGSGMGFEAFITHSGMLVVAVCTKREYATVMLPDHSFCDSLWHNITVVHMPGKRPFGQSFVYIYDNGQQKVSAPLRFPAMNEPFTSCCIGSAGQRTTTPPPSQIPDPPFSSPITPHRTSFGGILSSASWGGTIEKSKLITKLISAGTQDSEWGCPTSLEGQLGSVIIFYEPLQPPQVKALYLAGPNCLSPWKCQESDMADLPGNILLYYTAKACKNSICLDLSTNCLHGRLTGNKVVNWDIKDIINCIGGLNVLFPLLEQISHFSEGQIPEEKNESTVPESVTPVEGDWLVWTSTKASESRLERNLVATFILIVKHFIQRHPINQGNLIHSHGVATLGALLQKVPSTLMDVNVLMAVQLLIEQVSLEKNMQLLQQMYQYLLFDFRIWNRGDFPFRIGHIQYLSTIIKDSRRVFRKKYGVQFLLDTLRIYYGNGCKYNELSLDDIRTIRTSLYGLIKYFLCKGGSHEEIQSIMGYIAATNEEEQLFGILDVLFSLLRTSPTRGQLFLLLFEPGNADILYALLLNQKYSDRLREIIFKIMEQMLKCTNVYERSKQHIRLREVGYSGLGLLLNEALVNTSLIKNLTHQIINTDPVINFKDLLSVVYISHRAHINVRVAICRKVLQILQFQPDAAHQISQQVGWQDTLVRLFLKAKFENGNTLHKHSRAVLMKDNDKNMSTEDTKKNSDEKTDEEKITSFASANVSSDQWSLEDRHSLDSNTPLFPEDSSVGELSFKSENQEEFWHSNPSHLSLDLSGIDSCEMSDSGSQVPDSLPSTPSPVESTKSFSVHSDRESSITNDMGFSDDFSLLESQERCEEELLQLLTHILNYVMCKGLEKSDDDTWIERGQVFSALSKPGISSELLRPSDEIKLTLLQKMLEWAISENREAKTNPVTAENAFRLVLIIQDFLQSEGLVNSNMWTEKLLEDMMLLFDCLSVCYSESPVWVKLSQIQIQLLLGFIGRGNLQVCAMASAKLNTLLQTKVIENQDEACYILGKLEHVLSQSIKEQTEIYSFLIPLVRTLVSKIYELLFMNLHLPSLPFTNGSSSFFEDFQEYCNSNEWQVYIEKYIVPYMKQYEAHTFYDGHENMALYWKDCYEALMVNMHKRDREGGESKLKFQELFVEPFNRKARQENLRYNNMLKQLSSQQLATLRRWKAIQLYLTCERGPWAKRKQNPIHWKLANVENYSRMRLKLVPNYNFKTHEEASALRDNLGIQHSQPSSDTLLLEVVKQVKVSDMVEDKLDLPEEDITARVNVDEKEEQDQKEKLVLMEDCELITIIDVIPGRLEITTQHIYFYDGSIEKEDGVGFDFKWPHSQIREIHLRRYNLRRSALEIFHVDQSNYFLNFKKEVRNKIYSRLLSLHSPNSYYGSRSPQELFKASGLTQKWVNREISNFDYLIQINTMAGRTYNDLAQYPVFPWILQDYTSEELDLNNPAVFRDLSKPIGVVNEKNAKAMREKYENFEDPMGTIDKFHYGTHYSNSAGVMHYLIRVEPFTTLHIQLQSGRFDCADRQFHSIPATWQALMDNPYDVKELIPEFFYFPEFLENQNQFNLGRLQISKELVNDVILPKWAKSAEDFIYKHRKALESEYVSAHLHEWIDLIFGYKQRGPAAVEALNVFYYCSYEGAVDLDALTDEKERKALEGMINNFGQTPCQLLKEPHPPRLSAEEAVQKPTKIDTSTLNLFQHLPELKSFFIEGISDGIPLLKATIPKNQYRSFMSQGSPELLITISMNYVIGTHGWLPYDRNISNYFTFIKDQTVTNPKTQRSINGSFAPGLEITSKLFVVSHDAKLLFSAGYWDNSIQVMSLTKGKIISHIIRHMDIVTCLATDYCGIHLISGSRDTTCMIWQITQQGGVPVGLASKPFQILYGHTNEVLSVGISTELDMAVSGSRDGTVIIHTIQKGQYMRTLRPPCESSLFLTIPNLAISWEGHIVVYSSTEEKTTLKDKNALHLFSINGKYLGSQILKEQVSDICIIGEHIVTGSIQGFLSIRDLHSLNLSINPLAMRLPIHCVCVTKEYSHILVGLEDGKLIVVGVGKPAEMRSGQLSRKFWGSSKRLSQISAGETEYNTQDSK

SEQ ID NO: 55333 - protein, 2570 aa, Homo sapiens
MAASERLYELWLLYYAQKDLGYLQQWLKAFVGAFKKSISLSSLEPRRPEEAGAEVPLLPLDELHVLAEQLHQADLEQALLLLKLFIILCRNLENIEAGRGQVLVPRVLALLTKLVAELKGCPPPQGRGTQLENVALHALLLCEGLFDPYQTWRRQRSGEVISSKEKSKYKFPPAALPQEFSAFFQESLQNADHLPPILLLRLIHLFCAVLAGGKENGQMAVSDGSVKGLLSVVRGWSRGPAPDPCLVPLALEALVGAVHVLHASRAPPRGPELRALLESYFHVLNADWPAGLSSGPEEALVTLRVSMLDAIPMMLACEDRPVLQATFLSNNCFEHLTRLIQNSKLYLQSRAPPEGDSDLATRLLTEPDVQKVLDQDTDAIAVHVVRVLTCIMSDSPSAKEVFKERIGYPHLQEVLQSHGPPTHRLLQELLNMAVEGDHSMCPPPPIRNEQPVLVLAQWLPSLPTAELRLFLAQRLRWLCDSCPASRATCVQAGLVGCLLETLSTGLALEARCQEQLLALLQALGRVSIRPMELRHLLRPRPGLDSEPGGAEAGKARHAGAVIRTLSGMARHQGPARALRYFDLTPSMAGIMVPPVQRWPGPGFTFHAWLCLHPMDTAPTPAPTRPLQRKQLYSFFTSSGSGFEAFFTAAGTLVVAVCTRKEYLTMSLPEVSFADSAWHCVAIVHVPGRRPFSQNLVHVYKDGHLVKTAPLRCPSLSEPFSSCCIGSAGYRTTTTTTGLPTPPVPATLAYTHPALTRSQSVPASTGLGWGSGLVAPLQEGSIDSTLAGTQDTRWGSPTSLEGELGAVAIFHEALQATALRTLCTLGPNETAPFKPEGELHELSTRLLLHYSPQACKNNICLDLSPSHGLDGRLTGHRVETWDVKDVVNCVGGMGALLPLLERVAAQPKEAEAGPAETHDLVGPELTSGHNTQGLVLPLGKSSEERMERNAVAAFLLMLRNFLQGHMVNQESLVQCQGPAIIGALLRKVPSWAMDMNVLMSAQLLMEQVAAEGSGPLLYLLYQHLLFNFHLWTLSDFAVRLGHIQYMSSIVREHRQKLRKKYGVQFILDALRTHYSPQRERPLAADDLRTVQTSLLGLAREFLVRSLSADDVQVTQTMLSFLAATGDDGQILRRLQQNERLPERSRQRLRLRECGLQGLVACLPEGTVSPQLCQGLYKLFLGAGSGNTAGGGGSSGTLTPASQPGTPSPLDGPRPFPAAPGRHSSSLSNVLEDGSLPEPTISGDDTSNTSNPQQTSEEELCNLLTNVLFSVTWRGVEGSDEAAWRERGQVFSVLTQLGASATLVRPPDCIKRSLLEMMLESALTDIKEAPVGVLASLTQQALWLLRLLQDFLCAEGHGNQELWSEKLFEGVCSLLDRLGAWPHLANGTADLREMAQIGLRLVLGYILLEDPQLHAQAYVRLHMLLQTAVPARREEACYVLSKLEAALGRVLNTSSLESATDEAGSPLAAAAAAAAAERCSWLVPLVRTLLDRAYEPLGLQWGLPSLPPTNGSPTFFEDFQAFCATPEWRHFIDKQVQPTMSQFEMDTYAKSHDLMSGFWNACYDMLMSSGQRRQWERAQSRRAFQELVLEPAQRRARLEGLRYTAVLKQQATQHSMALLHWGALWRQLASPCGAWALRDTPIPRWKLSSAETYSRMRLKLVPNHHFDPHLEASALRDNLGEVPLTPTEEASLPLAVTKEAKVSTPPELLQEDQLGEDELAELETPMEAAELDEQREKLVLSAECQLVTVVAVVPGLLEVTTQNVYFYDGSTERVETEEGIGYDFRRPLAQLREVHLRRFNLRRSALELFFIDQANYFLNFPCKVGTTPVSSPSQTPRPQPGPIPPHTQVRNQVYSWLLRLRPPSQGYLSSRSPQEMLRASGLTQKWVQREISNFEYLMQLNTIAGRTYNDLSQYPVFPWVLQDYVSPTLDLSNPAVFRDLSKPIGVVNPKHAQLVREKYESFEDPAGTIDKFHYGTHYSNAAGVMHYLIRVEPFTSLHVQLQSGRFDCSDRQFHSVAAAWQARLESPADVKELIPEFFYFPDFLENQNGFDLGCLQLTNEKVGDVVLPPWASSPEDFIQQHRQALESEYVSAHLHEWIDLIFGYKQRGPAAEEALNVFYYCTYEGAVDLDHVTDERERKALEGIISNFGQTPCQLLKEPHPTRLSAEEAAHRLARLDTNSPSIFQHLDELKAFFAEVVSDGVPLVLALVPHRQPHSFITQGSPDLLVTVSASGLLGTHSWLPYDRNISNYFSFSKDPTMGSHKTQRLLSGPWVPGSGVSGQALAVAPDGKLLFSGGHWDGSLRVTALPRGKLLSQLSCHLDVVTCLALDTCGIYLISGSRDTTCMVWRLLHQGGLSVGLAPKPVQVLYGHGAAVSCVAISTELDMAVSGSEDGTVIIHTVRRGQFVAALRPLGATFPGPIFHLALGSEGQIVVQSSAWERPGAQVTYSLHLYSVNGKLRASLPLAEQPTALTVTEDFVLLGTAQCALHILQLNTLLPAAPPLPMKVAIRSVAVTKERSHVLVGLEDGKLIVVVAGQPSEVRSSQFARKLWRSSRRISQVSSGETEYNPTEAR

SEQ ID NO: 55334 - protein, 615 aa, Homo sapiens
MEPALGPGVQKDLGYLQQWLKAFVGAFKKSISLSSLEPRRPEEAGAEVPLLPLDELHVLAEQLHQADLEQALLLLKLFIILCRNLENIEAGRGQVLVPRVLALLTKLVAELKGCPPPQGRGTQLENVALHALLLCEGLFDPYQTWRRQRSGEVISSKEKSKYKFPPAALPQEFSAFFQESLQNADHLPPILLLRLIHLFCAVLAGGKENGQMAVSDGSVKGLLSVVRGWSRGPAPDPCLVPLALEALVGAVHVLHASRAPPRGPELRALLESYFHVLNADWPAGLSSGPEEALVTLRVSMLDAIPMMLACEDRPVLQATFLSNNCFEHLTRLIQNSKVLDQDTDAIAVHVVRVLTCIMSDSPSAKEVFKERIGYPHLQEVLQSHGPPTHRLLQELLNMAVEGDHSMCPPPPIRNEQPVLVLAQWLPSLPTAELRLFLAQRLRWLCDSCPASRATCVQAGLVGCLLETLSTGLALEARCQEQLLALLQALGRVSIRPMELRHLLRPRPGLDSEPGGAEAGKARHAGAVIRTLSGMARHQGPARALRYFDLTPSMAGIMVPPVQRWPGPGFTFHAWLCLHPMDTAPTPAPPTLPSSGIGGRCYPLRDWRAEVPPLAG

SEQ ID NO: 55335 - protein, 1003 aa, Homo sapiens
MSQFEMDTYAKSHDLMSGFWNACYDMLMSSGQRRQWERAQSRRAFQELVLEPAQRRARLEGLRYTAVLKQQATQHSMALLHWGALWRQLASPCGAWALRDTPIPRWKLSSAETYSRMRLKLVPNHHFDPHLEASALRDNLGEVPLTPTEEASLPLAVTKEAKVSTPPELLQEDQLGEDELAELETPMEAAELDEQREKLVLSAECQLVTVVAVVPGLLEVTTQNVYFYDGSTERVETEEGIGYDFRRPLAQLREVHLRRFNLRRSALELFFIDQANYFLNFPCKVGTTPVSSPSQTPRPQPGPIPPHTQVRNQVYSWLLRLRPPSQGYLSSRSPQEMLRASGLTQKWVQREISNFEYLMQLNTIAGRTYNDLSQYPVFPWVLQDYVSPTLDLSNPAVFRDLSKPIGVVNPKHAQLVREKYESFEDPAGTIDKFHYGTHYSNAAGVMHYLIRVEPFTSLHVQLQSGRFDCSDRQFHSVAAAWQARLESPADVKELIPEFFYFPDFLENQNGFDLGCLQLTNEKVGDVVLPPWASSPEDFIQQHRQALESEYVSAHLHEWIDLIFGYKQRGPAAEEALNVFYYCTYEGAVDLDHVTDERERKALEGIISNFGQTPCQLLKEPHPTRLSAEEAAHRLARLDTNSPSIFQHLDELKAFFAEVTVSASGLLGTHSWLPYDRNISNYFSFSKDPTMGSHKTQRLLSGPWVPGSGVSGQALAVAPDGKLLFSGGHWDGSLRVTALPRGKLLSQLSCHLDVVTCLALDTCGIYLISGSRDTTCMVWRLLHQGGLSVGLAPKPVQVLYGHGAAVSCVAISTELDMAVSGSEDGTVIIHTVRRGQFVAALRPLGATFPGPIFHLALGSEGQIVVQSSAWERPGAQVTYSLHLYSVNGKLRASLPLAEQPTALTVTEDFVLLGTAQCALHILQLNTLLPAAPPLPMKVAIRSVAVTKERSHVLVGLEDGKLIVVVAGQPSEVRSSQFARKLWRSSRRISQVSSGETEYNPTEAR

SEQ ID NO: 55336 - protein, 697 aa, Homo sapiens
MLRASGLTQKWVQREISNFEYLMQLNTIAGRTYNDLSQYPVFPWVLQDYVSPTLDLSNPAVFRDLSKPIGVVNPKHAQLVREKYESFEDPAGTIDKFHYGTHYSNAAGVMHYLIRVEPFTSLHVQLQSGRFDCSDRQFHSVAAAWQARLESPADVKELIPEFFYFPDFLENQNGFDLGCLQLTNEKVGDVVLPPWASSPEDFIQQHRQALESEYVSAHLHEWIDLIFGYKQRGPAAEEALNVFYYCTYEGAVDLDHVTDERERKALEGIISNFGQTPCQLLKEPHPTRLSAEEAAHRLARLDTNSPSIFQHLDELKAFFAEVVSDGVPLVLALVPHRQPHSFITQGSPDLLVTVSASGLLGTHSWLPYDRNISNYFSFSKDPTMGSHKTQRLLSGPWVPGSGVSGQALAVAPDGKLLFSGGHWDGSLRVTALPRGKLLSQLSCHLDVVTCLALDTCGIYLISGSRDTTCMVWRLLHQGGLSVGLAPKPVQVLYGHGAAVSCVAISTELDMAVSGSEDGTVIIHTVRRGQFVAALRPLGATFPGPIFHLALGSEGQIVVQSSAWERPGAQVTYSLHLYSVNGKLRASLPLAEQPTALTVTEDFVLLGTAQCALHILQLNTLLPAAPPLPMKVAIRSVAVTKERSHVLVGLEDGKLIVVVAGQPSEVRSSQFARKLWRSSRRISQVSSGETEYNPTEAR

SEQ ID NO: 55337 - protein, 2754 aa, Homo sapiens
MAASERLYELWLLYYAQKDLGYLQQWLKAFVGAFKKSISLSSLEPRRPEEAGAEVPLLPLDELHVLAEQLHQADLEQALLLLKLFIILCRNLENIEAGRGQVLVPRVLALLTKLVAELKGCPPPQGRGTQLENVALHALLLCEGLFDPYQTWRRQRSGEVISSKEKSKYKFPPAALPQEFSAFFQESLQNADHLPPILLLRLIHLFCAVLAGGKENGQMAVSDGSVKGLLSVVRGWSRGPAPDPCLVPLALEALVGAVHVLHASRAPPRGPELRALLESYFHVLNADWPAGLSSGPEEALVTLRVSMLDAIPMMLACEDRPVLQATFLSNNCFEHLTRLIQNSKLYLQSRAPPEGDSDLATRLLTEPDVQKVLDQDTDAIAVHVVRVLTCIMSDSPSAKEVFKERIGYPHLQEVLQSHGPPTHRLLQELLNMAVEGDHSMCPPPPIRNEQPVLVLAQWLPSLPTAELRLFLAQRLRWLCDSCPASRATCVQAGLVGCLLETLSTGLALEARCQEQLLALLQALGRVSIRPMELRHLLRPRPGLDSEPGGAEAGKARHAGAVIRTLSGMARHQGPARALRYFDLTPSMAGIMVPPVQRWPGPGFTFHAWLCLHPMDTAPTPAPTRPLQRKQLYSFFTSSGSGFEAFFTAAGTLVVAVCTRKEYLTMSLPEVSFADSAWHCVAIVHVPGRRPFSQNLVHVYKDGHLVKTAPLRCPSLSEPFSSCCIGSAGYRTTTTTTGLPTPPVPATLAYTHPALTRSQSVPASTGLGWGSGLVAPLQEGSIDSTLAGTQDTRWGSPTSLEGELGAVAIFHEALQATALRTLCTLGPNETAPFKPEGELHELSTRLLLHYSPQACKNNICLDLSPSHGLDGRLTGHRVETWDVKDVVNCVGGMGALLPLLERVAAQPKEAEAGPAETHDLVGPELTSGHNTQGLVLPLGKSSEERMERNAVAAFLLMLRNFLQGHMVNQESLVQCQGPAIIGALLRKVPSWAMDMNVLMSAQLLMEQVAAEGSGPLLYLLYQHLLFNFHLWTLSDFAVRLGHIQYMSSIVREHRQKLRKKYGVQFILDALRTHYSPQRERPLAADDLRTVQTSLLGLAREFLVRSLSADDVQVTQTMLSFLAATGDDGQAVGALDLLLALLHGSLVQESLAVFLLEPGNLEVLLALLVRPGSLPLLPDRVCKILRRLQQNERLPERSRQRLRLRECGLQGLVACLPEGTVSPQLCQGLYKLFLGADCLNLSDLLAVVQLSLQADLSVRLDICRQLFHLIYGQPDVVRLLARQAGWQDVLTRLYVLEAATAGSPPPSSPESPTSPKPAPPKPPTESPAEPSDVFLPSEAPCPDPDGFYHALSPFCTPFDLGLERSSVGSGNTAGGGGSSGTLTPASQPGTPSPLDGPRPFPAAPGRHSSSLSNVLEDGSLPEPTISGDDTSNTSNPQQTSEEELCNLLTNVLFSVTWRGVEGSDEAAWRERGQVFSVLTQLGASATLVRPPDCIKRSLLEMMLESALTDIKEAPVGVLASLTQQALWLLRLLQDFLCAEGHGNQELWSEKLFEGVCSLLDRLGAWPHLANGTADLREMAQIGLRLVLGYILLEDPQLHAQAYVRLHMLLQTAVPARREEACYVLSKLEAALGRVLNTSSLESATDEAGSPLAAAAAAAAAERCSWLVPLVRTLLDRAYEPLGLQWGLPSLPPTNGSPTFFEDFQAFCATPEWRHFIDKQVQPTMSQFEMDTYAKSHDLMSGFWNACYDMLMSSGQRRQWERAQSRRAFQELVLEPAQRRARLEGLRYTAVLKQQATQHSMALLHWGALWRQLASPCGAWALRDTPIPRWKLSSAETYSRMRLKLVPNHHFDPHLEASALRDNLGEVPLTPTEEASLPLAVTKEAKVSTPPELLQEDQLGEDELAELETPMEAAELDEQREKLVLSAECQLVTVVAVVPGLLEVTTQNVYFYDGSTERVETEEGIGYDFRRPLAQLREVHLRRFNLRRSALELFFIDQANYFLNFPCKVGTTPVSSPSQTPRPQPGPIPPHTQVRNQVYSWLLRLRPPSQGYLSSRSPQEMLRASGLTQKWVQREISNFEYLMQLNTIAGRTYNDLSQYPVFPWVLQDYVSPTLDLSNPAVFRDLSKPIGVVNPKHAQLVREKYESFEDPAGTIDKFHYGTHYSNAAGVMHYLIRVEPFTSLHVQLQSGRFDCSDRQFHSVAAAWQARLESPADVKELIPEFFYFPDFLENQNGFDLGCLQLTNEKVGDVVLPPWASSPEDFIQQHRQALESEYVSAHLHEWIDLIFGYKQRGPAAEEALNVFYYCTYEGAVDLDHVTDERERKALEGIISNFGQTPCQLLKEPHPTRLSAEEAAHRLARLDTNSPSIFQHLDELKAFFAEVVSDGVPLVLALVPHRQPHSFITQGSPDLLVTVSASGLLGTHSWLPYDRNISNYFSFSKDPTMGSHKTQRLLSGPWVPGSGVSGQALAVAPDGKLLFSGGHWDGSLRVTALPRGKLLSQLSCHLDVVTCLALDTCGIYLISGSRDTTCMVWRLLHQGGLSVGLAPKPVQVLYGHGAAVSCVAISTELDMAVSGSEDGTVIIHTVRRGQFVAALRPLGATFPGPIFHLALGSEGQIVVQSSAWERPGAQVTYSLHLYSVNGKLRASLPLAEQPTALTVTEDFVLLGTAQCALHILQLNTLLPAAPPLPMKVAIRSVAVTKERSHVLVGLEDGKLIVVVAGQPSEVRSSQFARKLWRSSRRISQVSSGETEYNPTEAR

SEQ ID NO: 55338 - protein, 2371 aa, Homo sapiens
MAAPESGPALSPGTAEGEEETILYDLLVNTEWPPETEVQPRGNQKHGASFIITKAIRDRLLFLRQYIWYSPAPFLLPDGLVRLVNKQINWHLVLASNGKLLAAVQDQCVEIRSAKDDFTSIIGKCQVPKDPKPQWRRVAWSYDCTLLAYAESTGTVRVFDLMGSELFVISPASSFIGDLSYAIAGLIFLEYKASAQWSAELLVINYRGELRSYLVSVGTNQSYQESHCFSFSSHYPHGINTAIYHPGHRLLLVGGCETAEVGMSKASSCGLSAWRVLSGSPYYKQVTNGGDGVTAVPKTLGLLRMLSVKFYSRQGQEQDGIFKMSLSPDGMLLAAIHFSGKLSIWAIPSLKQQGEWGQNEQPGYDDLNPDWRLSTEKRKKIKDKESFYPLIDVNWWADSAVTLARCSGALTVSSVKTLKNLLGKSCEWFEPSPQVTATHDGGFLSLECEIKLAPKRSRLETRAGEEDEGEEDSDSDYEISAKARYFGYIKQGLYLVTEMERFAPPRKRPRTITKNYRLVSLRSTTPEELYQRKIESEEYEEALSLAHTYGLDTDLVYQRQWRKSAVNVASIQNYLSKIKKRSWVLHECLERVPENVDAAKELLQYGLKGTDLEALLAIGKGADDGRFTLPGEIDIDSISYEELSPPDEEPAKNKKEKELKKRQELLKLVNFSKLTLEQKELCRCRRKLLTYLDRLATYEEILGVPHASEQRYDAEFFKKFRNQNIVLSARTYAQESNVQALEILFTYHGSDLLPHRLAILSNFPETTSPHEYSVLLPEACFNGDSLMIIPWHEHKHRAKDWCEELACRMVVEPNLQDESEFLYAAQPELLRFRMTQLTVEKVMDWYQTRAEEIEHYARQVDCALSLIRLGMERNIPGLLVLCDNLVTLETLVYEARCDVTLTLKELQQMKDIEKLRLLMNSCSEDKYVTSAYQWMVPFLHRCEKQSPGVANELLKEYLVTLAKGDLKFPLKIFQHSKPDLQQKIIPDQDQLMAIALECIYTCERNDQLCLCYDLLECLPERGYGDKTEATTKLHDMVDQLEQILSVSELLEKHGLEKPISFVKNTQSSSEEARKLMVRLTRHTGRKQPPVSESHWRTLLQDMLTMQQNVYTCLDSDACYEIFTESLLCSSRLENIHLAGQMMHCSACSENPPAGIAHKGKPHYRVSYEKSIDLVLAASREYFNSSTNLTDSCMDLARCCLQLITDRPPAIQEELDLIQAVGCLEEFGVKILPLQVRLCPDRISLIKECISQSPTCYKQSTKLLGLAELLRVAGENPEERRGQVLILLVEQALRFHDYKAASMHCQELMATGYPKSWDVCSQLGQSEGYQDLATRQELMAFALTHCPPSSIELLLAASSSLQTEILYQRVNFQIHHEGGENISASPLTSKAVQEDEVGVPGSNSADLLRWTTATTMKVLSNTTTTTKAVLQAVSDGQWWKKSLTYLRPLQGQKCGGAYQIGTTANEDLEKQGCHPFYESVISNPFVAESEGTYDTYQHVPVESFAEVLLRTGKLAEAKNKGEVFPTTEVLLQLASEALPNDMTLALAYLLALPQVLDANRCFEKQSPSALSLQLAAYYYSLQIYARLAPCFRDKCHPLYRADPKELIKMVTRHVTRHEHEAWPEDLISLTKQLHCYNERLLDFTQAQILQGLRKGVDVQRFTADDQYKRETILGLAETLEESVYSIAISLAQRYSVSRWEVFMTHLEFLFTDSGLSTLEIENRAQDLHLFETLKTDPEAFHQHMVKYIYPTIGGFDHERLQYYFTLLENCGCADLGNCAIKPETHIRLLKKFKVVASGLNYKKLTDENMSPLEALEPVLSSQNILSISKLVPKIPEKDGQMLSPSSLYTIWLQKLFWTGDPHLIKQVPGSSPEWLHAYDVCMKYFDRLHPGDLITVVDAVTFSPKAVTKLSVEARKEMTRKAIKTVKHFIEKPRKRNSEDEAQEAKDSKVTYADTLNHLEKSLAHLETLSHSFILSLKNSEQETLQKYSHLYDLSRSEKEKLHDEAVAICLDGQPLAMIQQLLEVAVGPLDISPKDIVQSAIMKIISALSGGSADLGGPRDPLKVLEGVVAAVHASVDKGEELVSPEDLLEWLRPFCADDAWPVRPRIHVLQILGQSFHLTEEDSKLLVFFRTEAILKASWPQRQVDIADIENEENRYCLFMELLESSHHEAEFQHLVLLLQAWPPMKSEYVITNNPWVRLATVMLTRCTMENKEGLGNEVLKMCRSLYNTKQMLPAEGVKELCLLLLNQSLLLPSLKLLLESRDEHLHEMALEQITAVTTVNDSNCDQELLSLLLDAKLLVKCVSTPFYPRIVDHLLASLQQGRWDAEELGRHLREAGHEAEAGSLLLAVRGTHQAFRTFSTALRAAQHWV

SEQ ID NO: 55339 - protein, 2251 aa, Homo sapiens
MAAPESGPALSPGTAEGEEETILYDLLVNTEWPPETEVQPRGNQKHGASFIITKAIRDRLLFLRQYIWYSPAPFLLPDGLVRLVNKQINWHLVLASNGKLLAAVQDQCVEIRSAKDDFTSIIGKCQVPKDPKPQWRRVAWSYDCTLLAYAESTGTVRVFDLMGSELFVISPASSFIGDLSYAIAGLIFLEYKASAQWSAELLVINYRGELRSYLVSVGTNQSYQESHCFSFSSHYPHGINTAIYHPGHRLLLVGGCETAEVGMSKASSCGLSAWRVLSGSPYYKQVTNGGDGVTAVPKTLGLLRMLSVKFYSRQGQEQDGIFKMSLSPDGMLLAAIHFSGKLSIWAIPSLKQQGEWGQNEQPGYDDLNPDWRLSTEKRKKIKDKESFYPLIDVNWWADSAVTLARCSGALTVSSVKTLKNLLGKSCEWFEPSPQVTATHDGGFLSLECEIKLAPKRSRLETRAGEEDEGEEDSDSDYEISAKARYFGYIKQGLYLVTEMERFAPPRKRPRTITKNYRLVSLRSTTPEELYQRKIESEEYEEALSLAHTYGLDTDLVYQRQWRKSAVNVASIQNYLSKIKKRSWVLHECLERVPENVDAAKELLQYGLKGTDLEALLAIGKGADDGRFTLPGEIDIDSISYEELSPPDEEPAKNKKEKELKKRQELLKLVNFSKLTLEQKELCRCRRKLLTYLDRLATYEEILGVPHASEQRYDAEFFKKFRNQNIVLSARTYAQESNVQALEILFTYHGSDLLPHRLAILSNFPETTSPHEYSVLLPEACFNGDSLMIIPWHEHKHRAKDWCEELACRMVVEPNLQDESEFLYAAQPELLRFRMTQLTVEKVMDWYQTRAEEIEHYARQLQQKIIPDQDQLMAIALECIYTCERNDQLCLCYDLLECLPERGYGDKTEATTKLHDMVDQLEQILSVSELLEKHGLEKPISFVKNTQSSSEEARKLMVRLTRHTGRKQPPVSESHWRTLLQDMLTMQQNVYTCLDSDACYEIFTESLLCSSRLENIHLAGQMMHCSACSENPPAGIAHKGKPHYRVSYEKSIDLVLAASREYFNSSTNLTDSCMDLARCCLQLITDRPPAIQEELDLIQAVGCLEEFGVKILPLQVRLCPDRISLIKECISQSPTCYKQSTKLLGLAELLRVAGENPEERRGQVLILLVEQALRFHDYKAASMHCQELMATGYPKSWDVCSQLGQSEGYQDLATRQELMAFALTHCPPSSIELLLAASSSLQTEILYQRVNFQIHHEGGENISASPLTSKAVQEDEVGVPGSNSADLLRWTTATTMKVLSNTTTTTKAVLQAVSDGQWWKKSLTYLRPLQGQKCGGAYQIGTTANEDLEKQGCHPFYESVISNPFVAESEGTYDTYQHVPVESFAEVLLRTGKLAEAKNKGEVFPTTEVLLQLASEALPNDMTLALAYLLALPQVLDANRCFEKQSPSALSLQLAAYYYSLQIYARLAPCFRDKCHPLYRADPKELIKMVTRHVTRHEHEAWPEDLISLTKQLHCYNERLLDFTQAQILQGLRKGVDVQRFTADDQYKRETILGLAETLEESVYSIAISLAQRYSVSRWEVFMTHLEFLFTDSGLSTLEIENRAQDLHLFETLKTDPEAFHQHMVKYIYPTIGGFDHERLQYYFTLLENCGCADLGNCAIKPETHIRLLKKFKVVASGLNYKKLTDENMSPLEALEPVLSSQNILSISKLVPKIPEKDGQMLSPSSLYTIWLQKLFWTGDPHLIKQVPGSSPEWLHAYDVCMKYFDRLHPGDLITVVDAVTFSPKAVTKLSVEARKEMTRKAIKTVKHFIEKPRKRNSEDEAQEAKDSKVTYADTLNHLEKSLAHLETLSHSFILSLKNSEQETLQKYSHLYDLSRSEKEKLHDEAVAICLDGQPLAMIQQLLEVAVGPLDISPKDIVQSAIMKIISALSGGSADLGGPRDPLKVLEGVVAAVHASVDKGEELVSPEDLLEWLRPFCADDAWPVRPRIHVLQILGQSFHLTEEDSKLLVFFRTEAILKASWPQRQVDIADIENEENRYCLFMELLESSHHEAEFQHLVLLLQAWPPMKSEYVITNNPWVRLATVMLTRCTMENKEGLGNEVLKMCRSLYNTKQMLPAEGVKELCLLLLNQSLLLPSLKLLLESRDEHLHEMALEQITAVTTVNDSNCDQELLSLLLDAKLLVKCVSTPFYPRIVDHLLASLQQGRWDAEELGRHLREAGHEAEAGSLLLAVRGTHQAFRTFSTALRAAQHWV

SEQ ID NO: 55340 - protein, 3553 aa, Homo sapiens
MVVSAGPWSSEKAEMNILEINETLRPQLAEKKQQFRNLKEKCFLTQLAGFLANRQKKYKYEECKDLIKFMLRNERQFKEEKLAEQLKQAEELRQYKVLVHSQERELTQLREKLREGRDASRSLYEHLQALLTPDEPDKSQGQDLQEQLAEGCRLAQHLVQKLSPENDEDEDEDVQVEEAEKVLESSAPREVQKAEESKVPEDSLEECAITCSNSHGPCDSNQPHKNIKITFEEDEVNSTLVVDRESSHDECQDALNILPVPGPTSSATNVSMVVSAGPLSSEKAEMNILEINEKLRPQLAEKKQQFRNLKEKCFLTQLSGFLANQQKKYKYEECKDLIKFMLRNERQFKEEKLAEQLKQAEELRQYKVLVHAQERELTQLKEKLREGRDASRSLNEHLQALLTPYEPDKSQGQDLQEQLAEGCRLAQHLVQKLSPENDNDDDEDVQVEVAEKVQKSSAPREMQKAEEKEVPEDSLEECAITYSNSHGSYDSNQPHRKTKITFEEDKVDSTLIGSSSHVEWEDAVHIIPENESDDEEEEEKGPVSPRNLQESEEEEVPQESWDEGYSTLSIPPEMLASYQSYSSTFHSLEEQQVCMAVDIGRHRWDQVKKEDQEATGPRLSRELLDEKEPEVLQDSLDRCYSTPSGYLELPDLGQPYSSAVYSLEEQYLGLALDVDRIKKDQEEEEDQGPPCPRLSRELLEVVEPEVLQDSLDRCYSTPSSCLEQPDSCQPYGSSFYALEEKHVGFSLDVGEIEKKGKGKKRRGRRSKKERRRGRKEGEEDQNPPCPRLSRELLDEKGPEVLQDSLDRCYSTPSGCLELTDSCQPYRSAFYVLEQQRVGFAVDMDEIEKYQEVEEDQDPSCPRLSRELLDEKEPEVLQDSLDRCYSTPSGYLELPDLGQPYSSAVYSLEEQYLGLALDVDRIKKDQEEEEDQGPPCPRLSRELLEVVEPEVLQDSLDRCYSTPSSCLEQPDSCQPYGSSFYALEEKHVGFSLDVGEIEKKGKGKKRRGRRSKKERRRGRKEGEEDQNPPCPRLSRELLDEKGPEVLQDSLDRCYSTPSGCLELTDSCQPYRSAFYVLEQQRVGFAVDMDEIEKYQEVEEDQDPSCPRLSRELLDEKEPEVLQDSLDRCYSTPSGYLELPDLGQPYSSAVYSLEEQYLGLALDVDRIKKDEEEEEDQDPPCPRLSRELLEVVAPEVLQDSLDRCYSTPSSCLEQPDSCQPYGSSFYALEEKHVGFSLDVGEIEKKGKGKKRRGRRSKKERRRGRKEGEEDQNPPCPRLSRELLDEKGPEVLQDSLDRCYSTPSGCLELTDSCQPYRSAFYVLEQQRVGMAVDMDEIEKYQEVEEDQDPSCPRLSRELLDEKEPEVLQDSLNRCYSTPSGYLELPDLGQPYSSAVYSLEEQYLGLALDVDRIKKDQEEEEDEDQDPPCPRLSRELLEVVEPEVLQDSLDRCYSTPSSCLEQPDSCQPYGSSFYALEENHVGFSLDVGEIEKKGKGKKRRGRRSKKERRRGRKEGEEDQNPPCPRLSRELLDEKGPEVLQDSLDRCYSTPSGCLELTDSCQPYRSAFYVLEQQHVGLAVDMDEIEKYQEVEEDQDPSCPRLSRELLDEKEPEVLQDSLDRCYSTPSGYLELPDLGQPYSSAVYSLEEQYLGLALDVDRIKKDQEEEEDQGPPCPRLSRELLEVVEPEVLQDSLDRCYSTPSSCLEQPDSCQPYGSSFYALEENHVGFSLDVGEIEKKGKGKKRRGRRSKKERRRGRKEGEEDQNPPCPRLSRELLDEKGPEVLQDSLDRCYSTPSGCLELTDSCQPYRSAFYVLEQQHVGLAVDMDEIEKYQEVEEDQDPSCPRLSRELLDEKEPEVLQDSLDRCYSTPSGYLELPDLGQPYSSAVYSLEEQYLGLALDVDRIKKDQEEEEDQGPPCPRLSRELLEVVEPEVLQDSLDRCYSTPSSCLEQPDSCQPYGSSFYALEENHVGFSLDVGEIEKKGKGKKRRGRRSKKERRRGRKEGEEDQNPPCPRLSRELLDEKGPEVLQDSLDRCYSTPSGCLELTDSCQPYRSAFYVLEQQHVGLAVDMDEIEKYQEVEEDQDPSCPRLSRELLDEKEPEVLQDSLDRCYSTPSGYLELPDLGQPYSSAVYSLEEQYLGLALDVDRIKKDQEEEEDQGPPCPRLSRELLEVVEPEVLQDSLDRCYSTPSSCLEQPDSCQPYGSSFYALEENHVGFSLDVGEIEKKGKGKKRRGRRSKKERRRGRKEGEEDQNPPCPRLSRELLDEKGPEVLQDSLDRCYSTPSGCLELTDSCQPYRSAFYVLEQQHVGLAVDMDEIEKYQEVEEDQDPSCPRLSRELLDEKEPEVLQDSLDRCYSTPSGYLELPDLGQPYSSAVYSLEEQYLGLALDVDRIKKDQEEEEDQGPPCPRLSRELLEVVEPEVLQDSLDRCYSTPSSCLEQPDSCQPYGSSFYALEENHVGFSLDVGEIEKKGKGKKRRGRRSKKERRRGRKEGEEDQNPPCPRLSRELLDEKGPEVLQDSLDRCYSTPSGCLELTDSCQPYRSAFYVLEQQHVGLAVDMDEIEKYQEVEEDQDPSCPRLSRELLDEKEPEVLQDSLDRCYSTPSGYLELPDLGQPYSSAVYSLEEQYLGLALDVDRIKKDQEEEEDQGPPCPRLSRELLEVVEPEVLQDSLDRCYSTPSSCLEQPDSCQPYGSSFYALEEKHVGFSLDVGEIEKKGKGKKRRGRRSKKERRRGRKEGEEDQNPPCPRLSRELLDEKGPEVLQDSLDRCYSTPSGCLELTDSCQPYRSAFYVLEQQHVGLAVDMDEIEKYQEVEEDQDPSCPRLSRELLDEKEPEVLQDSLDRCYSTPSGYLELPDLGQPYSSAVYSLEEQYLGLALDVDRIKKDQEEEEDQGPPCPRLSRELLEVVEPEVLQDSLDRCYSTPSSCLEQPDSCQPYGSSFYALEEKHVGFSLDVGEIEKKGKGKKRRGRRSKKERRRGRKEGEEDQNPPCPRLSRELLDEKGPKVLQDSLDRCYSTPSGCLELCDSCQPYRSAFYVLEQQRVGLAVDMDEIEKYQEVEEDQDPSCPRLSRELLDEKGPEVLQDSLDRCYSTPSGCLELCDSCQPYRSAFYILEQQRVGLAVDMDEIEKYQEVEEDQDPSCPRLSRELLDEKEPEVLQDSLDRCYSTPSGYLELPDLGQPYSSAVYSLEEQYLGLALDVDRIKKDQEEEEDQGPPCPRLSRELLEVVEPEVLQDSLDRCYSTPSSCLEQPDSCQPYGSSFYALEEKHVGFSLDVGEIEKKGKGKKRRGRRSKKERRRGRKEGEEDQNPPCPRLSRELLDEKGPEVLQDSLDRCYSTPSGCLELCDSCQPYRSAFYVLEQQHVGLAVDMDEIEKYQEVEEDQDPSCPRLSRELLDEKEPEVLQDSLDRCYSTPSGYLELPDLGQPYSSAVYSLEEQYLGLALDVDKIEKKGKGKKRRGRRSKKERRRGRKEGEEDQNPPCPRLNGVLMEVEEREVLQDSLDRCYSTPSMYFELPDSFQHYRSVFYSFEEQHISFALYVDNRFFTLTVTSLHLVFQMGVIFPQ

SEQ ID NO: 55341 - protein, 299 aa, Homo sapiens
MVVSAGPLSSEKAEMNILEINEKLRPQLAEKKQQFRNLKEKCFLTQLSGFLANQQKKYKYEECKDLIKFMLRNERQFKEEKLAEQLKQAEELRQYKVLVHAQERELTQLKEKLREGRDASRSLNEHLQALLTPYEPDKSQGQDLQEQLAEGCRLAQHLVQKLSPENDNDDDEDVQVEVAEKVQKSSAPREMQKAEEKEVPEDSLEECAITYSNSHGSYDSNQPHRKTKITFEEDKVDSTLIGSSSHVEWEDAVHIIPENESDDEEEEEKGPVSPRTSVGSSEKGGPRGNRSQAQQGAAG

SEQ ID NO: 55342 - protein, 669 aa, Homo sapiens
MVVSAGPLSSEKAEMNILEINEKLRPQLAEKKQQFRNLKEKCFLTQLSGFLANQQKKYKYEECKDLIKFMLRNERQFKEEKLAEQLKQAEELRQYKVLVHAQERELTQLKEKLREGRDASRSLNEHLQALLTPYEPDKSQGQDLQEQLAEGCRLAQHLVQKLSPENDNDDDEDVQVEVAEKVQKSSAPREMQKAEEKEVPEDSLEECAITYSNSHGSYDSNQPHRKTKITFEEDKVDSTLIGSSSHVEWEDAVHIIPENESDDEEEEEKGPVSPRNLQESEEEEVPQESWDEGYSTLSIPPEMLASYQSYSSTFHSLEEQQVCMAVDIGRHRWDQVKKEDQEATGPSRELLDEKGPEVFQDSQDRCYSTPSGCLELTDSCQPYRSAFYILEQQRVGLAIDMDEIEKYQEVEEDQDPSCPRLSRELLDEKEPEVLQDSLDRCYSTPSGYLELPDLGQPYSSAVYSLEEQYLGLALDVDRIKKDQEEEEDQGPPCPRLSRELLDEKGPEVLQDSLDRCYSTPSGCLELTDSCQPYRSAFYVLEQQHVGLAVDMDEIEKKGKGKKRRGRRSKKERRRGRKEGEEDQNPPCPRLNGVLMEVEEREVLQDSLDRCYSTPSMYFELPDSFQHYRSVFYSFEEQHISFALYVDNRFFTLTVTSLHLVFQMGVIFPQ

SEQ ID NO: 55343 - protein, 673 aa, Homo sapiens [sequence omitted]

SEQ ID NO: 55344 - protein, 172 aa, Homo sapiens
MAVDIGRHRWDQVKKEDQEATGPSRELLDEKGPEVFQDSQDRCYSTPSGCLELTDSCQPYRSAFYILEQQRVGLAIDMDEIEKYQEVEEDQDPSCPRLSRELLDEKEPEVLQDSLDRCYSTPSGYLELPDLGQPYSSAVYSLEEQYLGLALDVDRIKKDQEEEEDQGPPCPR

SEQ ID NO: 55345 - protein, 764 aa, Homo sapiens
MFSNSTGRLPGQPTEEIQQYKVLVHSQERELTQLREKLREGRDASRSLYEHLQALLTPDEPDKSQGQDLQEQLAEGCRLAQHLVQKLSPENDEDEDEDVQVEEAEKVLESSAPREVQKAEESKVPEDSLEECAITCSNSHGPCDSNQPHKNIKITFEEDEVNSTLVVDRESSHDECQDALNILPVPGPTSSATNVSMVVSAGPLSSEKAEMNILEINEKLRPQLAEKKQQFRNLKEKCFLTQLSGFLANQQKKYKYEECKDLIKFMLRNERQFKEEKLAEQLKQAEELRQYKVLVHAQERELTQLKEKLREGRDASRSLNEHLQALLTPYEPDKSQGQDLQEQLAEGCRLAQHLVQKLSPENDNDDDEDVQVEVAEKVQKSSAPREMQKAEEKEVPEDSLEECAITYSNSHGSYDSNQPHRKTKITFEEDKVDSTLIGSSSHVEWEDAVHIIPENESDDEEEEEKGPVSPRNLQESEEEEVPQESWDEGYSTLSIPPEMLASYQSYSSTFHSLEEQQVCMAVDIGRHRWDQVKKEDQEATGPRLSRELLDEKGPEVLQDSLDRCYSTPSGCLELTDSCQPYRSAFYVLEQQHVGLAVDMDEIEKYQEVEEDQDPSCPRLSRELLDEKEPEVLQDSLDRCYSTPSGYLELPDLGQPYSSAVYSLEEQYLGLALDVDRIKKDQEEEEDQGPPCPRLSRELLEVVEPEVLQDSLDRCYSTPSSCLEQPDSCQPYGSSFYALEEKHVGFSLDVGEIEKKGKGKKRRGR

SEQ ID NO: 55346 - protein, 34 aa, Homo sapiens
IGSSSHVEWEDAVHIIPENESDDEEEEEKGPVSP

SEQ ID NO: 55347 - protein, 838 aa, Homo sapiens
MVVSAGPWSSEKAEMNILEINEKLRPQLAENKQQFRNLKERCFLTQLAGFLANRQKKYKYEECKDLIKFMLRNERQFKEEKLAEQLKQAEELRQYKVLVHSQERELTQLREKLREGRDASRSLNEHLQALLTPDEPDKSQGQDLQEQLAEGCRLAQHLVQKLSPENDEDEDEDVQVEEDEKVLESSAPREVQKAEESKVPEDSLEECAITCSNSHGPCDSIQPHKNIKITFEEDKVNSSLVVDRESSHDGCQDALNILPVPGPTSSATNVSMVVSAGPLSSEKAEMNILEINEKLCPQLAEKKQQFRSLKEKCFVTQVACFLAKQQNKYKYEECKDLIKSMLRNERQFKEEKLAEQLKQAEELRQYKVLVHSQERELTQLREKLREGRDASRSLNEHLQALLTPDEPDKSQGQDLQEQLAEGCRLAQHLVQKLSPENDNDDDEDVQVEVAEKVQKSSSPREMQKAEEKEVPEDSLEECAITCSNSHGPYDSNQPHRKPKSHLRKTKSTQLSLAHPLMLNGRMLYTLSQKMKVMMRKRKKKGQCLPGICRSLKRRKSPRSPGMKVIRLSQFLLKGHRWDQVKKEDQEATGPRLSRELLDEKEPEVLQDSLDRCYSTPSVYLGLTDSCQPYRSAFYVLEQQRIGLAVDMDEIEKYQEVEEDQDPSCPRLSRELLAEKEPEVLQDSLDRCYSTPSGYLELPDLGQPYRSAVYSLEEQYLGLALDVDRIKKDQEEEEDQGPPCPRLSRELLEVVEPEVLQDSLDVIQLLPVVLNSLTPASPTEVPFMHWRKNMLAFLLTWEKLKRRGRGRKEGEEDQRRKEEGEEKKGKKIKTHHAPGSAAC

SEQ ID NO: 55348 - protein, 790 aa, Homo sapiens
MFSNSTGRLPGQPTEEIQQYKVLVHSQERELTQLREKLREGRDASRSLNEHLQALLTPDEPDKSQGQDLQEQLAEGCRLAQHLVQKLSPENDEDEDEDVQVEEDEKVLESSAPREVQKAEESKVPEDSLEECAITCSNSHGPCDSIQPHKNIKITFEEDKVNSSLVVDRESSHDGCQDALNILPVPGPTSSATNVSMVVSAGPLSSEKAEMNILEINEKLCPQLAEKKQQFRSLKEKCFVTQVACFLAKQQNKYKYEECKDLIKSMLRNERQFKEEKLAEQLKQAEELRQYKVLVHSQERELTQLREKLREGRDASRSLNEHLQALLTPDEPDKSQGQDLQEQLAEGCRLAQHLVQKLSPENDNDDDEDVQVEVAEKVQKSSSPREMQKAEEKEVPEDSLEECAITCSNSHGPYDSNQPHRKTKITFEEDKVDSTLIGSSSHVEWEDAVHIIPENESDDEEEEEKGPVSPRNLQESEEEEVPQESWDEGYSTLSIPPERLASYQSYSSTFHSLEEQQVCMAVDIGRHRWDQVKKEDQEATGPRLSRELLDEKEPEVLQDSLDRCYSTPSVYLGLTDSCQPYRSAFYVLEQQRIGLAVDMDEIEKYQEVEEDQDPSCPRLSRELLAEKEPEVLQDSLDRCYSTPSGYLELPDLGQPYRSAVYSLEEQYLGLALDVDRIKKDQEEEEDQGPPCPRLSRELLEVVEPEVLQDSLDVIQLLPVVLNSLTPASPTEVPFMHWRKNMLAFLLTWEKLKRRGRGRKEGEEDQRRKEEGEEKKGKKIKTHHAPGSAAC

SEQ ID NO: 55349 - protein, 85 aa, Homo sapiens
EMQKAEEKEVPEDSLEECAITCSNSHGPYDSNQPHRKTKITFEEDKVDSTLIGSSSHVEWEDAVHIIPENESDDEEEEEKGPVSP

SEQ ID NO: 55350 - protein, 366 aa, Homo sapiens
LASYQSYSSTFHSLEEQQVCMAVDIGRHRWDQVKKEDQEATGPRLSRELLDEKEPEVLQDSLDRCYSTPSVYLGLTDSCQPYRSAFYVLEQQRIGLAVDMDEIEKYQEVEEDQDPSCPRLSRELLAEKEPEVLQDSLDRCYSTPSGYLELPDLGQPYRSAVYSLEEQYLGLALDVDRIKKDQEEEEDQGPPCPRLSRELLEVVEPEVLQDSLCYSTPSSCLEQPDSCQPYGSSFYALEEKHVGFSLDVGEIEKKGKGKKRRGRRSKKKRRRGRKEGEEDQNPPCPRLSSVLMEVEVPEVLQDSLDRYYSTPSMYFELPDSFQHYRSVFYSFEEQHISFALDMDNRFFTLTVRSLHLVFQMGVIFPQ

SEQ ID NO: 55351 - protein, 865 aa, Homo sapiens
MVVSAGPWSSEKAEMNILEINEKLRPQLAENKQQFRNLKERCFLTQLAGFLANRQKKYKYEECKDLIKFMLRNERQFKEEKLAEQLKQAEELRQYKVLVHSQERELTQLREKLREGRDASRSLNEHLQALLTPDEPDKSQGQDLQEQLAEGCRLAQHLVQKLSPENDEDEDEDVQVEEDEKVLESSAPREVQKAEESKVPEDSLEECAITCSNSHGPCDSIQPHKNIKITFEEDKVNSSLVVDRESSHDGCQDALNILPVPGPTSSATNVSMVVSAGPLSSEKAEMNILEINEKLCPQLAEKKQQFRSLKEKCFVTQVACFLAKQQNKYKYEECKDLIKSMLRNERQFKEEKLAEQLKQAEELRQYKVLVHSQERELTQLREKLREGRDASRSLNEHLQALLTPDEPDKSQGQDLQEQLAEGCRLAQHLVQKLSPENDNDDDEDVQVEVAEKVQKSSSPREMQKAEEKEVPEDSLEECAITCSNSHGPYDSNQPHRKTKITFEEDKVDSTLIGSSSHVEWEDAVHIIPENESDDEEEEEKGPVSPRNLQESEEEEVPQESWDEGYSTLSIPPERLASYQSYSSTFHSLEEQQVCMAVDIGRHRWDQVKKEDQEATGPRLSRELLDEKEPEVLQDSLDRCYSTPSVYLGLTDSCQPYRSAFYVLEQQRIGLAVDMDEIEKYQEVEEDQDPSCPRLSRELLAEKEPEVLQDSLDRCYSTPSGYLELPDLGQPYRSAVYSLEEQYLGLALDVDRIKKDQEEEEDQGPPCPRLSRELLEVVEPEVLQDSLDVIQLLPVVLNSLTPASPTEVPFMHWRKNMLAFLLTWEKLKRRGRGRKEGEEDQRRKEEGEEKKGKKIKTHHAPGSAAC

SEQ ID NO: 55352 - protein, 790 aa, Homo sapiens
MFSNSTGRLPGQPTEEIQQYKVLVHSQERELTQLREKLREGRDASRSLNEHLQALLTPDEPDKSQGQDLQEQLAEGCRLAQQLVQKLSPENDEDEDEDVQVEEDEKVLESSAPREVQKAEESKVPEDSLEECAITCSNSHGPCDSNQPHKNIKITFEEDKVNSSLVVDREYSHDECQDALNILPVPGPTSSATNVSMVVSAGPLSSEKAEMNILEINEKLRPQLAEKKQQFRSLKEKCFVTQVACFLAKQQNKYKYEECKDLIKSMLRNELQFKEEKLAEQLKQAEELRQYKVLVHSQERELTQLREKLREGRDASRSLNEHLQALLTPDEPDKSQGQDLQEQLAEGCRLAQHLVQKLSPENDNDDDEDVQVEVAEKVQKSSSPREMQKAEEKEVPEDSLEECAITCSNSHGPYDSNQPHRKTKITFEEDKVDSTLIGSSSHVEWEDAVHIIPENESDDEEEEEKGPVSPRNLQESEEEEVPQESWDEGYSTLSIPPERLASYQSYSSTFHSLEEQQVCMAVDIGRHRWDQVKKEDQEATGPRLSRELLAEKEPEVLQDSLDRCYSTPSVYLGLTDSCQPYRSAFYVLEQQRVGLAVDMDEIEKYQEVEEDQDPSCPRLSRELLAEKEPEVLQDSLDRCYSTPSGYLELPDLGQPYRSAVYSLEEQYLGLALDVDRIKKDQEEEEDQGPPCPRLSRELLEVVEPEVLQDSLDVIQLLPVVLNSLTPASPTEVPFMHWRKNMLAFLLTWEKLKRRGRGRKEGEEDQRRKEEGEEKKGKKIKTHHAPGSTAC

SEQ ID NO: 55353 - protein, 77 aa, Homo sapiens
MDEIEKYQEVEEDQDPSCPRLSRELLAEKEPEVLQDSLDRCYSTPSGYLELPDLGQPYRSAVYSLEEQYLGLALDVD

SEQ ID NO: 55354 - protein, 77 aa, Homo sapiens
MDEIEKYQEVEEDQDPSCPRLSRELLAEKEPEVLQDSLDRWYSTPSGYLELPDLGQPYRSAVYSLEEQYLGLALDVD

SEQ ID NO: 55355 - protein, 77 aa, Homo sapiens; identical to SEQ ID NO: 55353

SEQ ID NO: 55356 - protein, 68 aa, Homo sapiens
EMQKAEEKEVPEDSLEECAITCSNSHGPYDSNQPHRKTKITFEEDKVDSTLIGSSSHVEWEDAVHIIP

SEQ ID NO: 55357 - protein, 3331 aa, Homo sapiens
MVVSAGPWSSEKAEMNILEINEKLRPQLAENKQQFRNLKERCFLTQLAGFLANRQKKYKYEECKDLIKFMLRNERQFKEEKLAEQLKQAEELRQYKVLVHSQERELTQLREKLREGRDASRSLNEHLQALLTPDEPDKSQGQDLQEQLAEGCRLAQQLVQKLSPENDEDEDEDVQVEEDEKVLESSAPREVQKAEESKVPEDSLEECAITCSNSHGPCDSNQPHKNIKITFEEDKVNSTVVVDRKSSHDECQDALNILPVPGPTSSATNVSMVVSAGPLSSEKAEMNILEINEKLRPQLAEKKQQFRSLKEKCFVTQLAGFLAKQQNKYKYEECKDLIKSMLRNELQFKEEKLAEQLKQAEELRQYKVLVHSQERELTQLREKLREGRDASRSLNEHLQALLTPDEPDKSQGQDLQEQLAEGCRLAQHLVQKLSPENDEDEDEDVQVEEDEKVLESSSPREMQKAEESKVPEDSLEECAITCSNSHGPCDSNQPHKNIKITFEEDKVNSSLVVDREYSHDECQDALNILPVPGPTSSATNVSMVVSAGPLSSEKAEMNILEINEKLRPQLAEKKQQFRSLKEKCFVTQVACFLAKQQNKYKYEECKDLIKSMLRNELQFKEEKLAEQLKQAEELRQYKVLVHSQERELTQLREKLREGRDASRSLNEHLQALLTPDEPDKSQGQDLQEQLAEGCRLAQHLVQKLSPENDNDDDEDVQVEVAEKVQKSSSPREMQKAEEKEVPEDSLEECAITCSNSHGPYDSNQPHRKTKITFEEDKVDSTLIGSSSHVEWEDAVHIIPENESDDEEEEEKGPVSPRNLQESEEEEVPQESWDEGYSTLSIPPERLASYQSYSSTFHSLEEQQVCMAVDIGSEYSIVKVIKLQFMAQSQAMPVPTWTDCHDIELKAGHRWDQVKKEDQEATGPRLSRELLAEKEPEVLQDSLDRCYSTPSVYLGLTDSCQPYRSAFYVLEQQRVGLAVDMDEIEKYQEVEEDQDPSCPRLSRELLAEKEPEVLQDSLDRWYSTPSGYLELPDLGQPYRSAVYSLEEQYLGLALDVDRIKKDQEEEEDQGPPCPRLSRELLEVVEPEVLQDSLDRCYSTPSSCLEQPDSCQPYRSSFYALEEKHVGFSLDVGEIEKKGKGKKRRGRRSKKKRRRGRKEGEEDQNPPCPRLSRELLAEKEPEVLQDSLDRWYSTPSVYLGLTDPCQPYRSAFYVLEQQRVGLAVDMDEIEKYQEVEEDQDPSCPRLSRELLAEKEPEVLQDSLDRWYSTPSGYLELPDLGQPYRSAVYSLEEQYLGLALDVDRIKKDQEEEEDQGPPCPRLSRELLEVVEPEVLQDSLDRCYSTPSSCLEQPDSCQPYRSSFYALEEKHVGFSLDVGEIEKKGKGKKRRGRRSKKKRRRGRKEGEEDQNPPCPRLSRELLAEKEPEVLQDSLDRWYSTPSVYLGLTDPCQPYRSAFYVLEQQRVGLAVDMDEIEKYQEVEEDQDPSCPRLSRELLAEKEPEVLQDSLDRWYSTPSGYLELPDLGQPYRSAVYSLEEQYLGLALDVDRIKKDQEEEEDQGPPCPRLSRELLEVVEPEVLQDSLDRCYSTPSSCLEQPDSCQPYRSSFYALEEKHVGFSLDVGEIEKKGKGKKRRGRRSKKKRRRGRKEGEEDQNPPCPRLSRELLAEKEPEVLQDSLDRWYSTPSVYLGLTDPCQPYRSAFYVLEQQRVGLAVDMDEIEKYQEVEEDQDPSCPRLSRELLAEKEPEVLQDSLDRWYSTPSGYLELPDLGQPYRSAVYSLEEQYLGLALDVDRIKKDQEEEEDQGPPCPRLSRELLEVVEPEVLQDSLDRCYSTPSSCLEQPDSCQPYRSSFYALEEKHVGFSLDVGEIEKKGKGKKRRGRRSKKKRRRGRKEGEEDQNPPCPRLSRELLAEKEPEVLQDSLDRWYSTPSVYLGLTDPCQPYRSAFYVLEQQRVGLAVDMDEIEKYQEVEEDQDPSCPRLSRELLAEKEPEVLQDSLDRWYSTPSGYLELPDLGQPYRSAVYSLEEQYLGLALDVDKIEKYQEVEEDQDPSCPRLSRELLAEKEPEVLQDSLDRWYSTPSVYLGLTDPCQPYRSAFYVLEQQRVGLAVDMDEIEKYQEVEEDQDPSCPRLSRELLAEKEPEVLQDSLDRCYSTPSGYLELPDLGQPYRSAVYSLEEQYLGLALDVDRIKKDQEEEEDQGPPCPRLSRELLEVVEPEVLQDSLDRCYSTPSSCLEQPDSCQPYRSSFYALEEKHVGFSLDVGEIEKYQEVEEDQDPSCPRLSRELLAEKEPEVLQDSLDRWYSTPSVYLGLTDPCQPYRSAFYVLEQQRVGLAVDMDEIEKYQEVEEDQDPSCPRLSRELLAEKEPEVLQDSLDRCYSTPSGYLELPDLGQPYRSAVYSLEEQYLGLALDVDRIKKDQEEEEDQGPPCPRLSRELLEVVEPEVLQDSLDRCYSTPSSCLEQPDSCQPYRSSFYALEEKHVGFSLDVGEIEKKGKGKKRRGRRSKKKRRRGRKEGEEDQNPPCPRLSRELLAEKEPEVLQDSLDRWYSTPSVYLGLTDPCQPYRSAFYVLEQQRVGLAVDMDEIEKYQEVEEDQDPSCPRLSRELLAEKEPEVLQDSLDRWYSTPSGYLELPDLGQPYRSAVYSLEEQYLGLALDVDRIKKDQEEEEDQGPPCPRLSRELLEVVEPEVLQDSLDRCYSTPSSCLEQPDSCQPYRSSFYALEEKHVGFSLDVGEIEKKGKGKKRRGRRSKKKRRRGRKEGEEDQNPPCPRLSRELLAEKEPEVLQDSLDRWYSTPSVYLGLTDPCQPYRSAFYVLEQQRVGLAVDMDEIEKYQEVEEDQDPSCPRLSRELLAEKEPEVLQDSLDRCYSTPSGYLELPDLGQPYRSAVYSLEEQYLGLALDVDRIKKDQEEEEDQGPPCPRLSRELLEVVEPEVLQDSLDRCYSTPSSCLEQPDSCQPYRSSFYALEEKHVGFSLDVGEIEKKGKGKKRRGRRSKKKRRRGRKEGEEDQNPPCPRLSRELLAEKEPEVLQDSLDRWYSTPSVYLGLTDPCQPCRSAFYVLEQQRVGLAVDMDEIEKYQEVEEDQDPSCPRLSRELLAEKEPEVLQDSLDRCYSTPSGYLELPDLGQPYRSAVYSLEEQYLGLALDVDRIKKDQEEEEDQGPPCPRLSRELLEVVEPEVLQDSLDRCYSTPSSCLEQPDSCQPYRSSFYALEEKHVGFSLDVGEIEKKGKGKKRRGRRSKKKRRRGRKEGEEDQNPPCPRLNSVLMEVEEPEVLQDSLDRCYSTPSMYFELPDSFQHYRSVFYSFEEQHITFALDMDNSFFTLTVTSLHLVFQMGVIFPQ

SEQ ID NO: 55358 - protein, 77 aa, Homo sapiens; identical to SEQ ID NO: 55353

SEQ ID NO: 55359 - protein, 838 aa, Homo sapiens
MVVSAGPWSSEKAEMNILEINEKLRPQLAENKQQFRNLKERCFLTQLAGFLANRQKKYKYEECKDLIKFMLRNERQFKEEKLAEQLKQAEELRQYKVLVHSQERELTQLREKLREGRDASRSLNEHLQALLTPDEPDKSQGQDLQEQLAEGCRLAQQLVQKLSPENDEDEDEDVQVEEDEKVLESSAPREVQKAEESKVPEDSLEECAITCSNSHGPCDSNQPHKNIKITFEEDKVNSSLVVDREYSHDECQDALNILPVPGPTSSATNVSMVVSAGPLSSEKAEMNILEINEKLRPQLAEKKQQFRSLKEKCFVTQVACFLAKQQNKYKYEECKDLIKSMLRNELQFKEEKLAEQLKQAEELRQYKVLVHSQERELTQLREKLREGRDASRSLNEHLQALLTPDEPDKSQGQDLQEQLAEGCRLAQHLVQKLSPENDNDDDEDVQVEVAEKVQKSSSPREMQKAEEKEVPEDSLEECAITCSNSHGPYDSNQPHRKPKSHLRKTKSTQLSLAHPLMLNGRMLYTLSQKMKVMMRKRKKKGQCLPGICRSLKRRKSPRSPGMKVIRLSQFLLKGHRWDQVKKEDQEATGPRLSRELLAEKEPEVLQDSLDRCYSTPSVYLGLTDSCQPYRSAFYVLEQQRVGLAVDMDEIEKYQEVEEDQDPSCPRLSRELLAEKEPEVLQDSLDRCYSTPSGYLELPDLGQPYRSAVYSLEEQYLGLALDVDRIKKDQEEEEDQGPPCPRLSRELLEVVEPEVLQDSLDVIQLLPVVLNSLTPASPTEVPFMHWRKNMLAFLLTWEKLKRRGRGRKEGEEDQRRKEEGEEKKGKKIKTHHAPGSTAC

SEQ ID NO: 55360 - protein, 95 aa, Homo sapiens
IAEIEKYQEVEEDQDPSCPRLSRELLAEKEPEVLQDSLDRWYSTPSGYLELPDLGQPYRSAVYSLEEQYLGLALDVDKIEKYQEVEEDQDPSCPR

SEQ ID NO: 55361 - protein, 77 aa, Homo sapiens; identical to SEQ ID NO: 55353

SEQ ID NO: 55362 - protein, 927 aa, Homo sapiens
  VARIANT 1: note = MOD_RES - Any amino acid
XDLIKSMLRNERQFKEEKLAEQLKQAEELRQYKVLVHAQERELTQLREKLREGRDASRSLNEHLQALLTPDEPDKSQGQDLQEQLAEGCRLAQHLVQKLSPENDNDDDEDVQVEVAEKVQKSSAPREMQKAEEKEVPEDSLEECAITCSNSHGPYDSNQPHRKTKITFEEDKVDSTLIGSSSHVEWEDAVHIIPENESDDEEEEEKGPVSPRNLQESEEEEVPQESWDEGYSTLSIPPEMLASYKSYSSTFHSLEEQQVCMAVDIGRHRWDQVKKEDHEATGPRLSRELLDEKGPEVLQDSLDRCYSTPSGCLELTDSCQPYRSAFYVLEQQRVGLAVNMDEIEKYQEVEEDQDPSCPRLSRELLDEKEPEVLQDSLGRCYSTPSGYLELPDLGQPYSSAVYSLEEQYLGLALDVDRIKKDQEEEEDQGPPCPRLSRELLEVVEPEVLQDSLDRCYSTPSSCLEQPDSCQPYGSSFYALEEKHVGFSLDVGEIEKKGKGKKRRGRRSKKERRRGRKEGEEDQNPPCPRLSRELLDEKGPEVLQDSLDRCYSTPSGCLELTDSCQPYRSAFYILEQQRVGLAVDMDEIEKYQEVEEDQDPSCPRLSGELLDEKEPEVLQESLDRCYSTPSGCLELTDSCQPYRSAFYILEQQRVGLAVDMDEIEKYQEVEEDQDPSCPRLSRELLDEKEPEVLQDSLGRCYSTPSGYLELPDLGQPYSSAVYSLEEQYLGLALDVDRIKKDQEEEEDQGPPCPRLSRELLEVVEPEVLQDSLDRCYSTPSSCLEQPDSCQPYGSSFYALEEKHVGFSLDVGEIEKKGKGKKRRGRRSKKERRRGRKEGEEDQNPPCPRLNSMLMEVEEPEVLQDSLDICYSTPSMYFELPDSFQHYRSVFYSFEEEHISFALYVDNRFFTLTVTSLHLVFQMGVIFPQ

SEQ ID NO: 55363 - protein, 921 aa, Homo sapiens
MLRNERQFKEEKLAEQLKQAEELRQYKVLVHAQERELTQLREKLREGRDASRSLNEHLQALLTPDEPDKSQGQDLQEQLAEGCRLAQHLVQKLSPENDNDDDEDVQVEVAEKVQKSSAPREMQKAEEKEVPEDSLEECAITCSNSHGPYDSNQPHRKTKITFEEDKVDSTLIGSSSHVEWEDAVHIIPENESDDEEEEEKGPVSPRNLQESEEEEVPQESWDEGYSTLSIPPEMLASYKSYSSTFHSLEEQQVCMAVDIGRHRWDQVKKEDHEATGPRLSRELLDEKGPEVLQDSLDRCYSTPSGCLELTDSCQPYRSAFYVLEQQRVGLAVNMDEIEKYQEVEEDQDPSCPRLSRELLDEKEPEVLQDSLGRCYSTPSGYLELPDLGQPYSSAVYSLEEQYLGLALDVDRIKKDQEEEEDQGPPCPRLSRELLEVVEPEVLQDSLDRCYSTPSSCLEQPDSCQPYGSSFYALEEKHVGFSLDVGEIEKKGKGKKRRGRRSKKERRRGRKEGEEDQNPPCPRLSRELLDEKGPEVLQDSLDRCYSTPSGCLELTDSCQPYRSAFYILEQQRVGLAVDMDEIEKYQEVEEDQDPSCPRLSGELLDEKEPEVLQESLDRCYSTPSGCLELTDSCQPYRSAFYILEQQRVGLAVDMDEIEKYQEVEEDQDPSCPRLSRELLDEKEPEVLQDSLGRCYSTPSGYLELPDLGQPYSSAVYSLEEQYLGLALDVDRIKKDQEEEEDQGPPCPRLSRELLEVVEPEVLQDSLDRCYSTPSSCLEQPDSCQPYGSSFYALEEKHVGFSLDVGEIEKKGKGKKRRGRRSKKERRRGRKEGEEDQNPPCPRLNSMLMEVEEPEVLQDSLDICYSTPSMYFELPDSFQHYRSVFYSFEEEHISFALYVDNRFFTLTVTSLHLVFQMGVIFPQ

SEQ ID NO: 55364 - protein, 269 aa, Homo sapiens
MDEIEKYQEVEEDQDPSCPRLSRELLDEKEPEVLQDSLGRCYSTPSGYLELPDLGQPYSSAVYSLEEQYLGLALDVDRIKKDQEEEEDQGPPCPRLSRELLEVVEPEVLQDSLDRCYSTPSSCLEQPDSCQPYGSSFYALEEKHVGFSLDVGEIEKKGKGKKRRGRRSKKERRRGRKEGEEDQNPPCPRLNSMLMEVEEPEVLQDSLDICYSTPSMYFELPDSFQHYRSVFYSFEEEHISFALYVDNRFFTLTVTSLHLVFQMGVIFPQ

SEQ ID NO: 55365 - protein, 512 aa, Homo sapiens
  VARIANT 1: note = MOD_RES - Any amino acid
XYEECKDLIKSMLRNERQFKEEKLAEQLKQAEELRQYKVLVHAQERELTQLREKLREGRDASRSLNEHLQALLTPDEPDKSQGQDLQEQLAEGCRLAQHLVQKLSPENDNDDDEDVQVEVAEKVQKSSAPREMQKAEEKEVPEDSLEECAITCSNSHGPYDSNQPHRKTKITFEEDKVDSTLIGSSSHVEWEDAVHIIPENESDDEEEEEKGPVSPRNLQESEEEEVPQESWDEGYSTLSIPPEMLASYKSYSSTFHSLEEQQVCMAVDIGRHRWDQVKKEDHEATGPRLSRELLDEKGPEVLQDSLDRCYSTPSGCLELTDSCQPYRSAFYVLEQQRVGLAVNMDEIEKYQEVEEDQDPSCPRLSRELLDEKEPEVLQDSLGRCYSTPSGYLELPDLGQPYSSAVYSLEEQYLGLALDVDRIKKDQEEEEDQGPPCPRLSRELLEVVEPEVLQDSLDRCYSTPSSCLEQPDSCQPYGSSFYALEEKHVGFSLDVGEIEKKGKGKKRRGRRS

SEQ ID NO: 55366 - protein, 188 aa, Homo sapiens
MDEIEKYQEVEEDQDPSCPRLSRELLDEKEPEVLQDSLGRCYSTPSGYLELPDLGQPYSSAVYSLEEQYLGLALDVDRIKKDQEEEEDQGPPCPRLSRELLEVVEPEVLQDSLDRCYSTPSSCLEQPDSCQPYGSSFYALEEKHVGFSLDVGEIEKKGKGKKRRGRRSKKERRRGRKEGEEDQNPPCP

SEQ ID NO: 55367 - protein, 512 aa, Homo sapiens; identical to SEQ ID NO: 55365
  VARIANT 1: note = MOD_RES - Any amino acid

SEQ ID NO: 55368 - protein, 512 aa, Homo sapiens; identical to SEQ ID NO: 55365
  VARIANT 1: note = MOD_RES - Any amino acid

SEQ ID NO: 55369 - protein, 250 aa, Homo sapiens
EIEKYQEVEEDQDPSCPRLSRELLDEKEPEVLQDSLGRCYSTPSGYLELPDLGQPYSSAVYSLEEQYLGLALDVDRIKKDQEEEEDQGPPCPRLSRELLEVVEPEVLQDSLDRCYSTPSSCLEQPDSCQPYGSSFYALEEKHVGFSLDVGEIEKKGKGKKRRGRRSKKERRRGRKEGEEDQNPPCPRLSGELLDEKEPEVLQESLDRCYSTPSGCLELTDSCQPYRSAFYILEQQRVGLAVDMDGEYLSM

SEQ ID NO: 55370 - protein, 512 aa, Homo sapiens; identical to SEQ ID NO: 55365
  VARIANT 1: note = MOD_RES - Any amino acid

SEQ ID NO: 55371 - protein, 512 aa, Homo sapiens; identical to SEQ ID NO: 55365
  VARIANT 1: note = MOD_RES - Any amino acid

SEQ ID NO: 55372 - protein, 512 aa, Homo sapiens; identical to SEQ ID NO: 55365
  VARIANT 1: note = MOD_RES - Any amino acid

SEQ ID NO: 55373 - protein, 512 aa, Homo sapiens; identical to SEQ ID NO: 55365
  VARIANT 1: note = MOD_RES - Any amino acid

SEQ ID NO: 55374 - protein, 670 aa, Homo sapiens
MVVSAGPLSSEKAEMNILEINEKLRPQLAEKKQQFRNLKEKCFLTQLAGFLANRQKKYKYEECKDLIKFMLRNERQFKEEKLAEQLKQAEELRQYKVLVHAQERELTQLREKLREGRDASRSLNEHLQALLTPDEPDKSQGQDLQEQLAEGCRLTQHLVQKLSPENDNDDDEDVQVEVAEKVQKSSAPREMQKAEEKEVPEDSLEECAITCSNSHGPYDSNQPHKKTKITFEEDKVDSTLIGSSSHVEWEDAVHIIPENESDDEEEEEKGPVSPRNLQESEEEEVPQESWDEGYSTLSIPPEMLASYQSYSSTFHSLEEQQVCMAVDIGRHRWDQVKKEDQEATGPRLSRELLDEKEPEVLQDSLDRCYSTPSGCLELTDSCQPYRSAFYVLEQQRVGLAIDMDEIEKYQEVEEDQDPSCPRLSRELLDEKEPEVLQDSLDRCYSTPSDYLELPDLGQPYSSAVYSLEEQYLGLALDVDRIKKDQEEEEDQGPPCPRLSRELLEVVEPEVLQDSLDRCYSTPSSCLEQPDSCQPYGSSFYALEEKHVGFSLDVGEIEKKGKGKKRRGRRSKKKRRRGRKEGEDDNPPCPRLYGVLMEVEEPEVLQDSLDRCYSTPSMYFEQPDSFQHYRSVFYSFEEEHISFALYVDNRFFTLTVTSLHLVFQMGVIFPQ

SEQ ID NO: 55375 - protein, 670 aa, Homo sapiens; identical to SEQ ID NO: 55374

SEQ ID NO: 55376 - protein, 670 aa, Homo sapiens [sequence omitted]

SEQ ID NO: 55377 - protein, 670 aa, Homo sapiens [sequence omitted]

SEQ ID NO: 55378 - protein, 841 aa, Homo sapiens
MVVSAGPWSSEKAEMNILEINEKLRPQLAENKQQFGNLKERCFVTQLAGFLANQQKKYNYEECKDLIKFMLRNERQFKEEKLAEQLKQAEELRQYKVLVHSQERELTQLREKLREGRDASRSLNEHLQALLTLDEPDKSQGQDLQEQLAEGCRLAQHLVQKLSPENDEDEDEDVQVEEAEKVQKSSAPREVQKTEESKVPEDSLEECAITCSNSHGPCDSNQPHKNIKITFEEDEVNSTLVVDRESSHDECQDALNILPVPGPTSSATNVSMVVSAGPLSSEKAEMNILEINEKLHPQLAEKKQQFRNLKERCFVTQLAGFLANQQKKYKYEECKDLIKSMLRNERQFKEEKLAEQLKQAEELRQYKVLVHAQERELTQLREKLREGRDASRSLNEHLQALLTPDEPDKSQGQDLQEQLAEGCRLAQHLVQKLSPENDNDDDEDVQVELAEKVQKSSAPREMQKAEEKEVPEDSQEECAITYSNSHGPYDSNQPHRKTKITFEEDKVDSTLIGSSSHVEWEDAVHIIPENESDDEEEEEKGPVSPRNLQESEEEEVPQESWDEGYSTLSIPPEMLASYQSYSSTFHSLEEQQVCMAVDIGRHRWDQVKKEDQEATGPRLSRELLDEKGPEVLQDSLDRCYSTPSGCLELTDSCQPYRSAFYVLEQQRVGLAVDMDEIEKYQEVEEDQDPSCPRLSRELLDEKEPEVLQDSLDRCYSTPSGYLELPDLGQPYSSAVYSLEEQYLGLALDVDRTKKDQEEEEDQGPPCPRLSRELLEVVEPEVLQDSLDRCYSTPSSCLEQPDSCQPYGSSFYALEEKHVGFSLDVGEIEKKGKGKKRRGRRS

SEQ ID NO: 55379 - protein, 4621 aa, Homo sapiens [sequence omitted]

SEQ ID NO: 55380 - protein, 259 aa, Homo sapiens
MVVSAGPWSSEKAEMNILEINEKLRPQLAENKQQFGNLKERCFVTQLAGFLANQQKKYNYEECKDLIKFMLRNERQFKEEKLAEQLKQAEELRQYKVLVHSQERELTQLREKLREGRDASRSLNEHLQALLTLDEPDKSQGQDLQEQLAEGCRLAQHLVQKLSPENDEDEDEDVQVEEAEKVQKSSAPREVQKTEESKVPEDSLEECAITCSNSHGPCDSNQPHKNIKITFEEDEVNSTLVVDRESSHDECQDALNILP

SEQ ID NO: 55381 - protein, 151 aa, Homo sapiens
LSRELLEVVEPEVLQDSLDRCYSTPSSCLEQPDSCQPYGSSFYALEEKHVGFSLDVGEIEKKGKGKKRRGRRSKKERRRGRKEGEEDQTPPCPRLSRELLDEKGPEVLQDSLDRCYSTPSGCLELTDSCQPYRSAFYVLEQQRVGLAVDMD

SEQ ID NO: 55382 - protein, 151 aa, Homo sapiens
LSRELLEVVEPEVLQDSLDRCYSTPSSCLEQPDSCQPYGSSFYALEEKHVGFSLDVGEIEKKGKGKKRRGRRSKKERRRGRKEGEEDQNPPCPRLSRELLDEKGPEVLQDSLDRCYSTPSGCLELTDSCQPYRSAFYVLEQQRVGLAVDMD

SEQ ID NO: 55383 - protein, 151 aa, Homo sapiens
LSRELLEVVEPEVLQDSLDRCYSTPSSCLEQPDSCQPYGSSFYALEEKHVGFSLDVGEIEKKGKGKKRRGRRSKKERRRGRKEGEEDQNPPCPRLSRELLDEKGPEVLQDSLDRSYSTPSGCLELTDSCQPYRSAFYVLEQQRVGLAVDMD

SEQ ID NO: 55384 - protein, 151 aa, Homo sapiens; identical to SEQ ID NO: 55382

SEQ ID NO: 55385 - protein, 671 aa, Homo sapiens
MVVSAGPLSSEKAEMNILEINEKLHPQLAEKKQQFRNLKERCFVTQLAGFLANQQKKYKYEECKDLIKSMLRNERQFKEEKLAEQLKQAEELRQYKVLVHAQERELTQLREKLREGRDASRSLNEHLQALLTPDEPDKSQGQDLQEQLAEGCRLAQHLVQKLSPENDNDDDEDVQVELAEKVQKSSAPREMQKAEEKEVPEDSQEECAITYSNSHGPYDSNQPHRKTKITFEEDKVDSTLIGSSSHVEWEDAVHIIPENESDDEEEEEKGPVSPRNLQESEEEEVPQESWDEGYSTLSIPPEMLASYQSYSSTFHSLEEQQVCMAVDIGRHRWDQVKKEDQEATGPRLSRELLDEKGPEVLQDSLDRCYSTPSGCLELTDSCQPYRSAFYVLEQQRVGLAVDMDEIEKYQEVEEDQDPSCPRLSRELLDEKEPEVLQDSLDRCYSTPSGYLELPDLGQPYSSAVYSLEEQYLGLALDVDRTKKDQEEEEDQGPPCPRLSRELLEVVEPEVLQDSLDRCYSTPSSCLEQPDSCQPYGSSFYALEEKHVGFSLDVGEIEKKGKGKKRRGRRSKKKRRRGRKEGEEDQNPPCPRLNGVLMEVEEPEVLQDSLDGCYSTPSMYFELPDSFQHYRSVFYSFEEQHISFALYVDNRFFTLTVTSLHLVFQMGVIFPQ

SEQ ID NO: 55386 - protein, 157 aa, Homo sapiens
LSRELLEVVEPEVLQDSLDRCYSTPSSCLEQPDSCQPYGSSFYALEEKHVGFSLDVGEIEKKGKGKKRRGRRSKKERRRGRKEGEEDQNPPCPRLSRELLDEKGPEVLQDSLDRCYSTPSGCLELTDSCQPYRSAFYVLEQQRVGLAVDMDGEYLSM

SEQ ID NO: 55387 - protein, 226 aa, Homo sapiens
LSRELLEVVEPEVLQDSLDRCYSTPSSCLEQPDSCQPYGSSFYALEEKHVGFSLDVGEIEKKGKGKKRRGRRSKKERRRGRKEGEEDQNPPCPRLSRELLDEKGPEVLQDSLDRCYSTPSGCLELTDSCQPYRSAFYVLEQQRVGLAVDMDEIEKYQEVEEDQDPSCPRLSRELLDEKEPEVLQDSLDRCYSTPSGYLELPDLGQPYSSAVYSLEEQYLGLALDVD

SEQ ID NO: 55388 - protein, 269 aa, Homo sapiens
MDEIEKYQEVEEDQDPSCPRLSRELLDEKEPEVLQDSLDRCYSTPSGYLELPDLGQPYSSAVYSLEEQYLGLALDVDRTKKDQEEEEDQGPPCPRLSRELLEVVEPEVLQDSLDRCYSTPSSCLEQPDSCQPYGSSFYALEEKHVGFSLDVGEIEKKGKGKKRRGRRSKKKRRRGRKEGEEDQNPPCPRLNGVLMEVEEPEVLQDSLDGCYSTPSMYFELPDSFQHYRSVFYSFEEQHISFALYVDNRFFTLTVTSLHLVFQMGVIFPQ

SEQ ID NO: 55389 - protein, 157 aa, Homo sapiens; identical to SEQ ID NO: 55386

SEQ ID NO: 55390 - protein, 174 aa, Homo sapiens
LSRELLEVVEPEVLQDSLDRCYSTPSSCLEQPDSCQPYGSSFYALEEKHVGFSLDVGEIEKKGKGKKRRGRRSKKKRRRGRKEGEEDQNPPCPRLNGVLMEVEEPEVLQDSLDGCYSTPSMYFELPDSFQHYRSVFYSFEEQHISFALYVDNRFFTLTVTSLHLVFQMGVIFPQ

SEQ ID NO: 55391 - protein, 151 aa, Homo sapiens; identical to SEQ ID NO: 55383

SEQ ID NO: 55392 - protein, 252 aa, Homo sapiens
MDEIEKYQEVEEDQDPSCPRLSRELLDEKEPEVLQDSLDRCYSTPSGYLELPDLGQPYSSAVYSLEEQYLGLALDVDRTKKDQEEEEDQGPPCPRLSRELLEVVEPEVLQDSLDRCYSTPSSCLEQPDSCQPYGSSFYALEEKHVGFSLDVGEIEKKGKGKKRRGRRSKKERRRGRKEGEEDQNPPCPRLSRELLDEKGPEVLQDSLDRCYSTPSGCLELTDSCQPYRSAFYVLEQQRVGLAVDMDGEYLSM

SEQ ID NO: 55393 - protein, 577 aa, Homo sapiens
MVVSAGPWSGEKAEMNILEINKKSRPQLAENKQQFRNLKQKCLVTQVAYFLANRQNNYDYEDCKDLIKSMLRDERLLTEEKLAEELGQAEELRQYKVLVHSQERELTQLREKLQEGRDASRSLNQHLQALLTPDEPDNSQGRDLREQLAEGCRLAQHLVQKLSPENDDDEDEDVKVEEAEKVQELYAPREVQKAEEKEVPEDSLEECAITCSNSHHPCESNQPYGNTRITFEEDQVDSTLIDSSSHDEWLDAVCIIPENESDHEQEEEKGPVSPRNLQESEEEEAPQESWDEGDWTLSIPPDMSASYQSDRSTFHSVEEQQVGLALDIGRHWCDQVKKEDQEATSPRLSRELLDEKEPEVLQDSLDRFYSTPFEYLELPDLCQPYRSDFYSLQEQHLGLALDLDRMKKDQEEEEDQGPPCPRLSRELPEVVEPEDLQDSLDRWYSTPFSYPELPDSCQPYGSCFYSLEEEHVGFSLDVDEIEKYQEGEEDQKPPCPRLNEVLMEAEEPEVLQDSLDRCYSTTSTYFQLHASFQQYRSAFYSFEEQDVSLALDVDNRFFTLTVIRHHLAFQMGVIFPH

SEQ ID NO: 55394 - protein, 633 aa, Homo sapiens
MPLTPTVQGFQWTLRGPDVETSPFGAPRAASHGVGRHQELRDPTVPGPTSSATNVSMVVSAGPWSGEKAEMNILEINKKSRPQLAENKQQFRNLKQKCLVTQVAYFLANRQNNYDYEDCKDLIKSMLRDERLLTEEKLAEELGQAEELRQYKVLVHSQERELTQLREKLQEGRDASRSLNQHLQALLTPDEPDNSQGRDLREQLAEGCRLAQHLVQKLSPENDDDEDEDVKVEEAEKVQELYAPREVQKAEEKEVPEDSLEECAITCSNSHHPCESNQPYGNTRITFEEDQVDSTLIDSSSHDEWLDAVCIIPENESDHEQEEEKGPVSPRNLQESEEEEAPQESWDEGDWTLSIPPDMSASYQSDRSTFHSVEEQQVGLALDIGRHWCDQVKKEDQEATSPRLSRELLDEKEPEVLQDSLDRFYSTPFEYLELPDLCQPYRSDFYSLQEQHLGLALDLDRMKKDQEEEEDQGPPCPRLSRELPEVVEPEDLQDSLDRWYSTPFSYPELPDSCQPYGSCFYSLEEEHVGFSLDVDEIEKYQEGEEDQKPPCPRLNEVLMEAEEPEVLQDSLDRCYSTTSTYFQLHASFQQYRSAFYSFEEQDVSLALDVDNRFFTLTVIRHHLAFQMGVIFPH

SEQ ID NO: 55395 - protein, 621 aa, Homo sapiens
MPLTPTVQGFQWTLRGPDVETSPFGAPRAASHGVGRHQELRDPTVPGPTSSATNVSMVVSAGPWSGEKAEMNILEINKKSRPQLAENKQQFRNLKQKCLVTQVAYFLANRQNNYDYEDCKDLIKSMLRDERLLTEEKLAEELGQAEELRQYKVLVHSQERELTQLREKLQEGRDASRSLNQHLQALLTPDEPDNSQGRDLREQLAEGCRLAQHLVQKLSPENDDDEDEDVKVEEAEKVQELYAPREVQKAEEKEVPEDSLEECAITCSNSHHPCESNQPYGNTRITFEEDQVDSTLIDSSSHDEWLDAVCIIPENESDHEQEEEKGPVSPRSSGRFCCLISVGYIFCHPCPAWLIRNLQESEEEEAPQESWDEGHWCDQVKKEDQEATSPRLSRELLDEKEPEVLQDSLDRFYSTPFEYLELPDLCQPYRSDFYSLQEQHLGLALDLDRMKKDQEEEEDQGPPCPRLSRELPEVVEPEDLQDSLDRWYSTPFSYPELPDSCQPYGSCFYSLEEEHVGFSLDVDEIEKYQEGEEDQKPPCPRLNEVLMEAEEPEVLQDSLDRCYSTTSTYFQLHASFQQYRSAFYSFEEQDVSLALDVDNRFFTLTVIRHHLAFQMGVIFPH

SEQ ID NO: 55396 - protein, 353 aa, Homo sapiens
MVVSAGPWSGEKAEMNILEINKKSRPQLAENKQQFRNLKQKCLVTQVAYFLANRQNNYDYEDCKDLIKSMLRDERLLTEEKLAEELGQAEELRQYKVLVHSQERELTQLREKLQEGRDASRSLNQHLQALLTPDEPDNSQGRDLREQLAEGCRLAQHLVQKLSPENDDDEDEDVKVEEAEKVQELYAPREVQKAEEKEVPEDSLEECAITCSNSHHPCESNQPYGNTRITFEEDQVDSTLIDSSSHDEWLDAVCIIPENESDHEQEEEKGPVSPRNLQESEEEEAPQESWDEGDWTLSIPPDMSASYQSDRSTFHSVEEQQVGLALDIGRHWCDQEKGGPRGHKSQAQQGAAG

SEQ ID NO: 55397 - protein, 555 aa, Homo sapiens
MVVSAGPWSGEKAEMNILEINKKSRPQLAENKQQFRNLKQKCLVTQVAYFLANRQNNYDYEDCKDLIKSMLRDERLLTEEKLAEELGQAEELRQYKVLVHSQERELTQLREKLQEGRDASRSLNQHLQALLTPDEPDNSQGRDLREQLAEGCRLAQHLVQKLSPENDDDEDEDVKVEEAEKVQELYAPREVQKAEEKEVPEDSLEECAITCSNSHHPCESNQPYGNTRITFEEDQVDSTLIDSSSHDEWLDAVCIIPENESDHEQEEEKGPVSPRNLQESEEEEAPQESWDEGDWTLSIPPDMSASYQSDRSTFHSVEEQQVGLALDIGRHWCDQVKKEDQEATSPRLSRELLDEKEPEVLQDSLDRFYSTPFEYLELPDLCQPYRSDFYSLQEQHLGLALDLDRMKKDQEEEEDQGPPCPRLSRELPEVVEPEDLQDSLDRWYSTPFSYPELPDSCQPYGSCFYSLEEEHVGFSLDVDEIEKYQEGEEDQKPPCPRLNEVLMEAEEPEVLQDSLDRCYSTTSTYFQLHASFQQYRSAFYSFEEQDVSLALDVDN

SEQ ID NO: 55398 - protein, 563 aa, Homo sapiens
MPLTPTVQGFQWTLRGPDVETSPFGAPRAASHGVGRHQELRDPTDYEDCKDLIKSMLRDERLLTEEKLAEELGQAEELRQYKVLVHSQERELTQLREKLQEGRDASRSLNQHLQALLTPDEPDNSQGRDLREQLAEGCRLAQHLVQKLSPENDDDEDEDVKVEEAEKVQELYAPREVQKAEEKEVPEDSLEECAITCSNSHHPCESNQPYGNTRITFEEDQVDSTLIDSSSHDEWLDAVCIIPENESDHEQEEEKGPVSPRNLQESEEEEAPQESWDEGDWTLSIPPDMSASYQSDRSTFHSVEEQQVGLALDIGRHWCDQVKKEDQEATSPRLSRELLDEKEPEVLQDSLDRFYSTPFEYLELPDLCQPYRSDFYSLQEQHLGLALDLDRMKKDQEEEEDQGPPCPRLSRELPEVVEPEDLQDSLDRWYSTPFSYPELPDSCQPYGSCFYSLEEEHVGFSLDVDEIEKYQEGEEDQKPPCPRLNEVLMEAEEPEVLQDSLDRCYSTTSTYFQLHASFQQYRSAFYSFEEQDVSLALDVDNRFFTLTVIRHHLAFQMGVIFPH

SEQ ID NO: 55399 - protein, 638 aa, Homo sapiens
MVVSADPLSSERAEMNILEINQELRSQLAESNQQFRDLKEKFLITQATAYSLANQLKKYKCEEYKDIIDSVLRDELQSMEKLAEKLRQAEELRQYKALVHSQAKELTQLREKLREGRDASRWLNKHLKTLLTPDDPDKSQGQDLREQLAEGHRLAEHLVHKLSPENDEDEDEDEDDKDEEVEKVQESPAPREVQKTEEKEVPQDSLEECAVTCSNSHNPSNSNQPHRSTKITFKEHEVDSALVVESEHPHDEEEEALNIPPENQNDHEEEEGKAPVPPRHHDKSNSYRHREVSFLALDEQKVCSAQDVARDYSNPKWDETSLGFLEKQSDLEEVKGQETVAPRLSRGPLRVDKHEIPQESLDGCCLTPSILPDLTPSYHPYWSTLYSFEDKQVSLALVDKIKKDQEEIEDQSPPCPRLSQELPEVKEQEVPEDSVNEVYLTPSVHHDVSDCHQPYSSTLSSLEDQLACSALDVASPTEAACPQGTWSGDLSHHQSEVQVSQAQLEPSTLVPSCLRLQLDQGFHCGNGLAQRGLSSTTCSFSANADSGNQWPFQELVLEPSLGMKNPPQLEDDALEGSASNTQGRQVTGRIRASLVLILKTIRRRLPFSKWRLAFRFAGPHAESAEIPNTAGRTQRMAG

SEQ ID NO: 55400 - protein, 638 aa, Homo sapiens; identical to SEQ ID NO: 55399

SEQ ID NO: 55401 - protein, 573 aa, Homo sapiens
MVVSADPLSSERAEMNILEINQELRSQLAESNQQFRDLKEKFLITQATAYSLANQLKKYKCEEYKDIIDSVLRDELQSMEKLAEKLRQAEELRQYKALVHSQAKELTQLREKLREGRDASRWLNKHLKTLLTPDDPDKSQGQDLREQLAEGHRLAEHLVHKLSPENDEDEDEDEDDKDEEVEKVQESPAPREVQKTEEKEVPQDSLEECAVTCSNSHNPSNSNQPHRSTKITFKEHEVDSALVVESEHPHDEEEEALNIPPENQNDHEEEEGKAPVPPRNRQSLEPGELTNLRDFLISPVVSHVANPGHHDKSNSYRHREVSFLALDEQKVCSAQDVARDYSNPKWDETSLGFLEKQSDLEEVKGQETVAPRLSRGPLRVDKHEIPQESLDGCCLTPSILPDLTPSYHPYWSTLYSFEDKQVSLALVDKIKKDQEEIEDQSPPCPRLSQELPEVKEQEVPEDSVNEVYLTPSVHHDVSDCHQPYSSTLSSLEDQLACSALDVASPTEAACPQGTWSGDLSHHQSEVQVSQAQLEPSTLVPSCLRLQLDQGFHCGNGLAQRGLSSTTCSFSANA

SEQ ID NO: 55402 - protein, 123 aa, Homo sapiens
MVVSADPLSSERAEMNILEINQELRSQLAESNQQFRDLKEKFLITQATAYSLANQLKKYSCLKYRNHLPPERCRRLKKRKSLRTHWRNVLSLVQIVTTLLTPTSLTGAPKSHLRNTKSTLLWL

SEQ ID NO: 55403 - protein, 667 aa, Homo sapiens
MVVSADPLSSERAEMNILEINQELRSQLAESNQQFRDLKEKFLITQATAYSLANQLKKYKCEEYKDIIDSVLRDELQSMEKLAEKLRQAEELRQYKALVHSQAKELTQLREKLREGRDASRWLNKHLKTLLTPDDPDKSQGQDLREQLAEGHRLAEHLVHKLSPENDEDEDEDEDDKDEEVEKVQESPAPREVQKTEEKEVPQDSLEECAVTCSNSHNPSNSNQPHRSTKITFKEHEVDSALVVESEHPHDEEEEALNIPPENQNDHEEEEGKAPVPPRNRQSLEPGELTNLRDFLISPVVSHVANPGHHDKSNSYRHREVSFLALDEQKVCSAQDVARDYSNPKWDETSLGFLEKQSDLEEVKGQETVAPRLSRGPLRVDKHEIPQESLDGCCLTPSILPDLTPSYHPYWSTLYSFEDKQVSLALVDKIKKDQEEIEDQSPPCPRLSQELPEVKEQEVPEDSVNEVYLTPSVHHDVSDCHQPYSSTLSSLEDQLACSALDVASPTEAACPQGTWSGDLSHHRSEVQISQAQLEPSTLVPSCLRLQLDQGFHCGNGLAQRGLSSTTCSFSANADSGNQWPFQELVLEPSLGMKNPPQLEDDALEGSASNTQGRQVTGRIRASLVLILKTIRRRLPFSKWRLAFRFAGPHAESAEIPNTAERMQRMIG

SEQ ID NO: 55404 - protein, 573 aa, Homo sapiens
MVVSADPLSSERAEMNILEINQELRSQLAESNQQFRDLKEKFLITQATAYSLANQLKKYKCEEYKDIIDSVLRDELQSMEKLAEKLRQAEELRQYKALVHSQAKELTQLREKLREGRDASRWLNKHLKTLLTPDDPDKSQGQDLREQLAEGHRLAEHLVHKLSPENDEDEDEDEDDKDEEVEKVQESPAPREVQKTEEKEVPQDSLEECAVTCSNSHNPSNSNQPHRSTKITFKEHEVDSALVVESEHPHDEEEEALNIPPENQNDHEEEEGKAPVPPRNRQSLEPGELTNLRDFLISPVVSHVANPGHHDKSNSYRHREVSFLALDEQKVCSAQDVARDYSNPKWDETSLGFLEKQSDLEEVKGQETVAPRLSRGPLRVDKHEIPQESLDGCCLTPSILPDLTPSYHPYWSTLYSFEDKQVSLALVDKIKKDQEEIEDQSPPCPRLSQELPEVKEQEVPEDSVNEVYLTPSVHHDVSDCHQPYSSTLSSLEDQLACSALDVASPTEAACPQGTWSGDLSHHRSEVQISQAQLEPSTLVPSCLRLQLDQGFHCGNGLAQRGLSSTTCSFSANA

SEQ ID NO: 55405 - protein, 638 aa, Homo sapiens
MVVSADPLSSERAEMNILEINQELRSQLAESNQQFRDLKEKFLITQATAYSLANQLKKYKCEEYKDIIDSVLRDELQSMEKLAEKLRQAEELRQYKALVHSQAKELTQLREKLREGRDASRWLNKHLKTLLTPDDPDKSQGQDLREQLAEGHRLAEHLVHKLSPENDEDEDEDEDDKDEEVEKVQESPAPREVQKTEEKEVPQDSLEECAVTCSNSHNPSNSNQPHRSTKITFKEHEVDSALVVESEHPHDEEEEALNIPPENQNDHEEEEGKAPVPPRHHDKSNSYRHREVSFLALDEQKVCSAQDVARDYSNPKWDETSLGFLEKQSDLEEVKGQETVAPRLSRGPLRVDKHEIPQESLDGCCLTPSILPDLTPSYHPYWSTLYSFEDKQVSLALVDKIKKDQEEIEDQSPPCPRLSQELPEVKEQEVPEDSVNEVYLTPSVHHDVSDCHQPYSSTLSSLEDQLACSALDVASPTEAACPQGTWSGDLSHHRSEVQISQAQLEPSTLVPSCLRLQLDQGFHCGNGLAQRGLSSTTCSFSANADSGNQWPFQELVLEPSLGMKNPPQLEDDALEGSASNTQGRQVTGRIRASLVLILKTIRRRLPFSKWRLAFRFAGPHAESAEIPNTAERMQRMIG

SEQ ID NO: 55406 - protein, 638 aa, Homo sapiens; identical to SEQ ID NO: 55405

SEQ ID NO: 55407 - protein, 207 aa, Homo sapiens
MLASYKSYSSTFHSLEEQQVCMAVDIGRHRWDQVKKEDQEATGPRLSRELLDEKGPEVLQDSLYRCYSTPSGCLELTDSCQPYRSAFYVLEQQRVGLAVDMDEIEKYQEVEEDQGRWEEDQNPPCPRLNGVLMEVEEPEVLQDSLDGCYSTPSMYFELPDSFQHYRSVFYSFEEQHISFALYVDNRFFTLTVTSLHLVFQMEVIFPQ

SEQ ID NO: 55408 - protein, 609 aa, Homo sapiens
PVPGPTSSATNVSMVVSAGPLSSEKAEMNILEINEKLRPQLAEKKQQFRNLKEKCFLTQLSGFLANQQNKYKYEECKDLIKFMLRNERQFKEEKLAEQLKQAEELRQYKVLVHAQERELTQLREKLREGRDASRSLNEHLQALLTPDEPDKSQGQDLQEQLAEGCRLAQHLVQKLSPENDNDDNEDVQVEVAEKVQKSSAPREMQKAEEKEVPEDSLEECAITYSNSHGPYDSNQPHRKTKITFEEDKVDSTLIGSSSHVEREDAVHIIPENESDDEEEEEKGPVSPRNLQESEEEEVPQESWDEGYSTPSIPPEMLASYKSYSSTFHSLEEQQVCMAVDIGRHRWDQVKKEDQEATGPRLSRELLDEKGPEVLQDSLYRCYSTPSGYLELPDLGQPYSSAVYSLEEQYLGLALDLDRIKKDQEEEEDQGPPCPRLSRELLEVVEPEVLQDSLDRCYSTPSSCLEQPDSCQPYGSSFYALEEKHVGFSLDVGEIEKKGKGKKRRGRRSKKERRRGRKEGEEDQNPPCPRLNGVLMEVEEPEVLQDSLDGCYSTPSMYFELPDSFQHYRSVFYSFEEQHISFALYVDNRFFTLTVTSLHLVFQMEVIFPQ

SEQ ID NO: 55409 - protein, 683 aa, Homo sapiens
  VARIANT 1: note = MOD_RES - Any amino acid
XPGPTSSATNVSMVVSAGPLSSEKAEMNILEINEKLRPQLAEKKQQFRNLKEKCFLTQLSGFLANQQNKYKYEECKDLIKFMLRNERQFKEEKLAEQLKQAEELRQYKVLVHAQERELTQLREKLREGRDASRSLNEHLQALLTPDEPDKSQGQDLQEQLAEGCRLAQHLVQKLSPENDNDDNEDVQVEVAEKVQKSSAPREMQKAEEKEVPEDSLEECAITYSNSHGPYDSNQPHRKTKITFEEDKVDSTLIGSSSHVEREDAVHIIPENESDDEEEEEKGPVSPRNLQESEEEEVPQESWDEGYSTPSIPPEMLASYKSYSSTFHSLEEQQVCMAVDIGRHRWDQVKKEDQEATGPRLSRELLDEKGPEVLQDSLYRCYSTPSGCLELTDSCQPYRSAFYVLEQQRVGLAVDMDEIEKYQEVEEDQDPSCPRLSRELLDEKEPEVLQDSLGRWYSTPSGYLELPDLGQPYSSAVYSLEEQYLGLALDLDRIKKDQEEEEDQGPPCPRLSRELLEVVEPEVLQDSLDRCYSTPSSCLEQPDSCQPYGSSFYALEEKHVGFSLDVGEIEKKGKGKKRRGRRSKKERRRGRKEGEEDQNPPCPRLNGVLMEVEEPEVLQDSLDGCYSTPSMYFELPDSFQHYRSVFYSFEEQHISFALYVDNRFFTLTVTSLHLVFQMEVIFPQ

SEQ ID NO: 55410 - protein, 607 aa, Homo sapiens
PVPGPTSSATNVSMVVSAGPLSSEKAEMNILEINEKLRPQLAEKKQQFRNLKEKCFLTQLSGFLANQQNKYKYEECKDLIKFMLRNERQFKEEKLAEQLKQAEELRQYKVLVHAQERELTQLREKLREGRDASRSLNEHLQALLTPDEPDKSQGQDLQEQLAEGCRLAQHLVQKLSPENDNDDNEDVQVEVAEKVQKSSAPREMQKAEEKEVPEDSLEECAITYSNSHGPYDSNQPHRKTKITFEEDKVDSTLIGSSSHVEREDAVHIIPENESDDEEEEEKGPVSPRNLQESEEEEVPQESWDEGYSTPSIPPEMLASYKSYSSTFHSLEEQQVCMAVDIGRHRWDQVKKEDQEATGPRLSRELLDEKGPEVLQDSLYRCYSTPSGCLELTDSCQPYRSAFYVLEQQRVGLAVDMDEIEKYQEVEEDQDPSCPRLSRELLDEKEPEVLQDSLGRWYSTPSGYLELPDLGQPYSSAVYSLEEQYLGLALDLDRIKKDQEEEEDQGPPCPRLSRELLEVVEPEVLQDSLDVIQLLPVVLNSLTPASPMEVPFMHWRKNMLAFLLTWEKLKRRGRGRKEGEEDQRRKEEGEEKKGKKIKTHHAPGSTAC

SEQ ID NO: 55411 - protein, 193 aa, Homo sapiens [sequence omitted]

SEQ ID NO: 55412 - protein, 193 aa, Homo sapiens [sequence omitted]

SEQ ID NO: 55413 - protein, 193 aa, Homo sapiens [sequence omitted]

SEQ ID NO: 55414 - protein, 193 aa, Homo sapiens [sequence omitted]

SEQ ID NO: 55415 - protein, 193 aa, Homo sapiens [sequence omitted]

SEQ ID NO: 55416 - protein, 1321 aa, Homo sapiens
MGAPFVWALGLLMLQMLLFVAGEQGTQDITDASERGLHMQKLGSGSVQAALAELVALPCLFTLQPRPSAARDAPRIKWTKVRTASGQRQDLPILVAKDNVVRVAKSWQGRVSLPSYPRRRANATLLLGPLRASDSGLYRCQVVRGIEDEQDLVPLEVTGVVFHYRSARDRYALTFAEAQEACRLSSAIIAAPRHLQAAFEDGFDNCDAGWLSDRTVRYPITQSRPGCYGDRSSLPGVRSYGRRNPQELYDVYCFARELGGEVFYVGPARRLTLAGARAQCRRQGAALASVGQLHLAWHEGLDQCDPGWLADGSVRYPIQTPRRRCGGPAPGVRTVYRFANRTGFPSPAERFDAYCFRAHHPTSQHGDLETPSSGDEGEILSAEGPPVRELEPTLEEEEVVTPDFQEPLVSSGEEETLILEEKQESQQTLSPTPGDPMLASWPTGEVWLSTVAPSPSDMGAGTAASSHTEVAPTDPMPRRRGRFKGLNGRYFQQQEPEPGLQGGMEASAQPPTSEAAVNQMEPPLAMAVTEMLGSGQSRSPWADLTNEVDMPGAGSAGGKSSPEPWLWPPTMVPPSISGHSRAPVLELEKAEGPSARPATPDLFWSPLEATVSAPSPAPWEAFPVATSPDLPMMAMLRGPKEWMLPHPTPISTEANRVEAHGEATATAPPSPAAETKVYSLPLSLTPTGQGGEAMPTTPESPRADFRETGETSPAQVNKAEHSSSSPWPSVNRNVAVGFVPTETATEPTGLRGIPGSESGVFDTAESPTSGLQATVDEVQDPWPSVYSKGLDASSPSAPLGSPGVFLVPKVTPNLEPWVATDEGPTVNPMDSTVTPAPSDASGIWEPGSQVFEEAESTTLSPQVALDTSIVTPLTTLEQGDKVGVPAMSTLGSSSSQPHPEPEDQVETQGTSGASVPPHQSSPLGKPAVPPGTPTAASVGESASVSSGEPTVPWDPSSTLLPVTLGIEDFELEVLAGSPGVESFWEEVASGEEPALPGTPMNAGAEEVHSDPCENNPCLHGGTCNANGTMYGCSCDQGFAGENCEIDIDDCLCSPCENGGTCIDEVNGFVCLCLPSYGGSFCEKDTEGCDRGWHKFQGHCYRYFAHRRAWEDAEKDCRRRSGHLTSVHSPEEHSFINSFGHENTWIGLNDRIVERDFQWTDNTGLQFENWRENQPDNFFAGGEDCVVMVAHESGRWNDVPCNYNLPYVCKKGTVLCGPPPAVENASLIGARKAKYNVHATVRYQCNEGFAQHHVATIRCRSNGKWDRPQIVCTKPRRSHRMRRHHHHHQHHHQHHHHKSRKERRKHKKHPTEDWEKDEGNFC

SEQ ID NO: 55417 - protein, 772 aa, Homo sapiens
MPGAGSAGGKSSPEPWLWPPTMVPPSISGHSRAPVLELEKAEGPSARPATPDLFWSPLEATVSAPSPAPWEAFPVATSPDLPMMAMLRGPKEWMLPHPTPISTEANRVEAHGEATATAPPSPAAETKVYSLPLSLTPTGQGGEAMPTTPESPRADFRETGETSPAQVNKAEHSSSSPWPSVNRNVAVGFVPTETATEPTGLRGIPGSESGVFDTAESPTSGLQATVDEVQDPWPSVYSKGLDASSPSAPLGSPGVFLVPKVTPNLEPWVATDEGPTVNPMDSTVTPAPSDASGIWEPGSQVFEEAESTTLSPQVALDTSIVTPLTTLEQGDKVGVPAMSTLGSSSSQPHPEPEDQVETQGTSGASVPPHQSSPLGKPAVPPGTPTAASVGESASVSSGEPTVPWDPSSTLLPVTLGIEDFELEVLAGSPGVESFWEEVASGEEPALPGTPMNAGAEEVHSDPCENNPCLHGGTCNANGTMYGCSCDQGFAGENCEIDIDDCLCSPCENGGTCIDEVNGFVCLCLPSYGGSFCEKDTEGCDRGWHKFQGHCYRYFAHRRAWEDAEKDCRRRSGHLTSVHSPEEHSFINSFGHENTWIGLNDRIVERDFQWTDNTGLQFENWRENQPDNFFAGGEDCVVMVAHESGRWNDVPCNYNLPYVCKKGTVLCGPPPAVENASLIGARKAKYNVHATVRYQCNEGFAQHHVATIRCRSNGKWDRPQIVCTKPRRSHRMRRHHHHHQHHHQHHHHKSRKERRKHKKHPTEDWEKDEGNFC

SEQ ID NO: 55418 - protein, 1335 aa, Homo sapiens
RPPRDASELGARSRMGAPFVWALGLLMLQMLLFVAGEQGTQDITDASERGLHMQKLGSGSVQAALAELVALPCLFTLQPRPSAARDAPRIKWTKVRTASGQRQDLPILVAKDNVVRVAKSWQGRVSLPSYPRRRANATLLLGPLRASDSGLYRCQVVRGIEDEQDLVPLEVTGVVFHYRSARDRYALTFAEAQEACRLSSAIIAAPRHLQAAFEDGFDNCDAGWLSDRTVRYPITQSRPGCYGDRSSLPGVRSYGRRNPQELYDVYCFARELGGEVFYVGPARRLTLAGARAQCRRQGAALASVGQLHLAWHEGLDQCDPGWLADGSVRYPIQTPRRRCGGPAPGVRTVYRFANRTGFPSPAERFDAYCFRAHHPTSQHGDLETPSSGDEGEILSAEGPPVRELEPTLEEEEVVTPDFQEPLVSSGEEETLILEEKQESQQTLSPTPGDPMLASWPTGEVWLSTVAPSPSDMGAGTAASSHTEVAPTDPMPRRRGRFKGLNGRYFQQQEPEPGLQGGMEASAQPPTSEAAVNQMEPPLAMAVTEMLGSGQSRSPWADLTNEVDMPGAGSAGGKSSPEPWLWPPTMVPPSISGHSRAPVLELEKAEGPSARPATPDLFWSPLEATVSAPSPAPWEAFPVATSPDLPMMAMLRGPKEWMLPHPTPISTEANRVEAHGEATATAPPSPAAETKVYSLPLSLTPTGQGGEAMPTTPESPRADFRETGETSPAQVNKAEHSSSSPWPSVNRNVAVGFVPTETATEPTGLRGIPGSESGVFDTAESPTSGLQATVDEVQDPWPSVYSKGLDASSPSAPLGSPGVFLVPKVTPNLEPWVATDEGPTVNPMDSTVTPAPSDASGIWEPGSQVFEEAESTTLSPQVALDTSIVTPLTTLEQGDKVGVPAMSTLGSSSSQPHPEPEDQVETQGTSGASVPPHQSSPLGKPAVPPGTPTAASVGESASVSSGEPTVPWDPSSTLLPVTLGIEDFELEVLAGSPGVESFWEEVASGEEPALPGTPMNAGAEEVHSDPCENNPCLHGGTCNANGTMYGCSCDQGFAGENCEIDIDDCLCSPCENGGTCIDEVNGFVCLCLPSYGGSFCEKDTEGCDRGWHKFQGHCYRYFAHRRAWEDAEKDCRRRSGHLTSVHSPEEHSFINSFGHENTWIGLNDRIVERDFQWTDNTGLQFENWRENQPDNFFAGGEDCVVMVAHESGRWNDVPCNYNLPYVCKKGTVLCGPPPAVENASLIGARKAKYNVHATVRYQCNEGFAQHHVATIRCRSNGKWDRPQIVCTKPRRSHRMRRHHHHHQHHHQHHHHKSRKERRKHKKHPTEDWEKDEGNFC

SEQ ID NO: 55419 - protein, 729 aa, Homo sapiens
MSCCDLAAAGQLGKASIMASDCEPALNQAEGRNPTLERYLGALREAKNDSEQFAALLLVTKAVKAGDIDAKTRRRIFDAVGFTFPNRLLTTKEAPDGCPDHVLRALGVALLACFCSDPELAAHPQVLNKIPILSTFLTARGDPDDAARRSMIDDTYQCLTAVAGTPRGPRHLIAGGTVSALCQAYLGHGYGFDQALALLVGLLAAAETQCWKEAEPDLLAVLRGLSEDFQKAEDASKFELCQLLPLFLPPTTVPPECYRDLQAGLARILGSKLSSWQRNPALKLAARLAHACGSDWIPAGSSGSKFLALLVNLACVEVRLALEETGTEVKEDVVTACYALMELGIQECTRCEQSLLKEPQKVQLVSVMKEAIGAVIHYLLQVGSEKQKEPFVFASVRILGAWLAEETSSLRKEVCQLLPFLVRYAKTLYEEAEEANDLSQQVANLAISPTTPGPTWPGDALRLLLPGWCHLTVEDGPREILIKEGAPSLLCKYFLQQWELTSPGHDTSVLPDSVEIGLQTCCHIFLNLVVTAPGLIKRDACFTSLMNTLMTSLPALVQQQGRLLLAANVATLGLLMARLLSTSPALQGTPASRGFFAAAILFLSQSHVARATPGSDQAVLALSPEYEGIWADLQELWFLGMQAFTGCVPLLPWLAPAALRSRWPQELLQLLGSVSPNSVKPEMVAAYQGVLVELARANRLCREAMRLQAGEETASHYRMAALEQCLSEP

SEQ ID NO: 55420 - protein, 729 aa, Homo sapiens; identical to SEQ ID NO: 55419

SEQ ID NO: 55421 - protein, 712 aa, Homo sapiens
MASDCEPALNQAEGRNPTLERYLGALREAKNDSEQFAALLLVTKAVKAGDIDAKTRRRIFDAVGFTFPNRLLTTKEAPDGCPDHVLRALGVALLACFCSDPELAAHPQVLNKIPILSTFLTARGDPDDAARRSMIDDTYQCLTAVAGTPRGPRHLIAGGTVSALCQAYLGHGYGFDQALALLVGLLAAAETQCWKEAEPDLLAVLRGLSEDFQKAEDASKFELCQLLPLFLPPTTVPPECYRDLQAGLARILGSKLSSWQRNPALKLAARLAHACGSDWIPAGSSGSKFLALLVNLACVEVRLALEETGTEVKEDVVTACYALMELGIQECTRCEQSLLKEPQKVQLVSVMKEAIGAVIHYLLQVGSEKQKEPFVFASVRILGAWLAEETSSLRKEVCQLLPFLVRYAKTLYEEAEEANDLSQQVANLAISPTTPGPTWPGDALRLLLPGWCHLTVEDGPREILIKEGAPSLLCKYFLQQWELTSPGHDTSVLPDSVEIGLQTCCHIFLNLVVTAPGLIKRDACFTSLMNTLMTSLPALVQQQGRLLLAANVATLGLLMARLLSTSPALQGTPASRGFFAAAILFLSQSHVARATPGSDQAVLALSPEYEGIWADLQELWFLGMQAFTGCVPLLPWLAPAALRSRWPQELLQLLGSVSPNSVKPEMVAAYQGVLVELARANRLCREAMRLQAGEETASHYRMAALEQCLSEP

SEQ ID NO: 55422 - protein, 176 aa, Homo sapiens
MPHSFRYLAALQGTPASRGFFAAAILFLSQSHVARATPGSDQAVLALSPEYEGIWADLQELWFLGMQAFTGCVPLLPWLAPAALRSRWPQELLQLLGSQPQLCQARDGGRLSGCPGGAGAGQPAVPGGHEAAGGRGDGQPLPHGCLGAVPVRALRGVHRGQTQGRAEREGGRRHLP

SEQ ID NO: 55423 - protein, 193 aa, Homo sapiens
  VARIANT 1: note = MOD_RES - Any amino acid
XSSLRKEVCQLLPFLVRYAKTLYEEAEEANDLSQQVANLAISPTTPGPTWPGDALRLLLPGWCHLTVEDGPREILIKEGAPSLLCKYFLQQWELTSPGHDTSVLPDSVEIGLQTCCHIFLNLVVTAPGLIKRDACFTSLMNTLMTSLPALVQQQGRLLLAANVATLGLLMARLLSTSPGSISSQLPGAEHMPC

SEQ ID NO: 55424 - protein, 244 aa, Homo sapiens
MASDCEPALNQAEGRNPTLERYLGALREAKNDSEQFAALLLVTKAVKAGDIDAKTRRRIFDAVGFTFPNRLLTTKEAPDGCPDHVLRALGVALLACFCSDPELAAHPQVLNKIPILSTFLTARGDPDDAARRSMIDDTYQCLTAVAGTPRGPRHLIAGGTVSALCQAYLGHGYGFDQALALLVGLLAAAETQCWKEAEPDLLAVLRGLSEDFQKAEDASKFELCQLLPLFLPPTTVPPECYRDL

SEQ ID NO: 55425 - protein, 596 aa, Homo sapiens
MEPELAAQKQPRPRRRSRRASGLSTEGATGPSADTSGSELDGRCSLRRGSSFTFLTPGPNWDFTLKRKRREKDDDVVSLSSLDLKEPSNKRVRPLARVTSLANLISPVRNGAVRRFGQTIQSFTLRGDHRSPASAQKFSSRSTVPTPAKRRSSALWSEMLDITMKESLTTREIRRQEAIYEMSRGEQDLIEDLKLARKAYHDPMLKLSIMSEEELTHIFGDLDSYIPLHEDLLTRIGEATKPDGTVEQIGHILVSWLPRLNAYRGYCSNQLAAKALLDQKKQDPRVQDFLQRCLESPFSRKLDLWSFLDIPRSRLVKYPLLLKEILKHTPKEHPDVQLLEDAILIIQGVLSDINLKKGESECQYYIDKLEYLDEKQRDPRIEASKVLLCHGELRSKSGHKLYIFLFQDILVLTRPVTRNERHSYQVYRQPIPVQELVLEDLQDGDVRMGGSFRGAFSNSEKAKNIFRIRFHDPSPAQSHTLQANDVFHKQQWFNCIRAAIAPFQSAGSPPELQGLPELHEECEGNHPSARKLTAQRRASTVSSVTQVEVDENAYRCGSGMQMAEDSKSLKTHQTQPGIRRARDKALSGGKRKETLV

SEQ ID NO: 55426 - protein, 160 aa, Homo sapiens
MVAHDETGGLLPIKRTIRVLDVNNQSFREQEELTHIFGDLDSYIPLHEDLLTRIGEATKPDGTVEQIGHILVSWLPRLNAYRGYCSNQLAAKALLDQKKQDPRVQDFLQRCLESPFSRKLDLWSFLDIPRSRLVKYPLLLKEILKHTPKEHPDVQLLEDA

SEQ ID NO: 55427 - protein, 542 aa, Homo sapiens
MVAHDETGGLLPIKRTIRVLDVNNQSFREQEEPSNKRVRPLARVTSLANLISPVRNGAVRRFGQTIQSFTLRGDHRSPASAQKFSSRSTVPTPAKRRSSALWSEMLDITMKESLTTREIRRQEAIYEMSRGEQDLIEDLKLARKAYHDPMLKLSIMSEEELTHIFGDLDSYIPLHEDLLTRIGEATKPDGTVEQIGHILVSWLPRLNAYRGYCSNQLAAKALLDQKKQDPRVQDFLQRCLESPFSRKLDLWSFLDIPRSRLVKYPLLLKEILKHTPKEHPDVQLLEDAILIIQGVLSDINLKKGESECQYYIDKLEYLDEKQRDPRIEASKVLLCHGELRSKSGHKLYIFLFQDILVLTRPVTRNERHSYQVYRQPIPVQELVLEDLQDGDVRMGGSFRGAFSNSEKAKNIFRIRFHDPSPAQSHTLQANDVFHKQQWFNCIRAAIAPFQSAGSPPELQGLPELHEECEGNHPSARKLTAQRRASTVSSVTQVEVDENAYRCGSGMQMAEDSKSLKTHQTQPGIRRARDKALSGGKRKETLV

SEQ ID NO: 55428 - protein, 160 aa, Homo sapiens; identical to SEQ ID NO: 55426

SEQ ID NO: 55429 - protein, 415 aa, Homo sapiens
MSRGEQDLIEDLKLARKAYHDPMLKLSIMSEEELTHIFGDLDSYIPLHEDLLTRIGEATKPDGTVEQIGHILVSWLPRLNAYRGYCSNQLAAKALLDQKKQDPRVQDFLQRCLESPFSRKLDLWSFLDIPRSRLVKYPLLLKEILKHTPKEHPDVQLLEDAILIIQGVLSDINLKKGESECQYYIDKLEYLDEKQRDPRIEASKVLLCHGELRSKSGHKLYIFLFQDILVLTRPVTRNERHSYQVYRQPIPVQELVLEDLQDGDVRMGGSFRGAFSNSEKAKNIFRIRFHDPSPAQSHTLQANDVFHKQQWFNCIRAAIAPFQSAGSPPELQGLPELHEECEGNHPSARKLTAQRRASTVSSVTQVEVDENAYRCGSGMQMAEDSKSLKTHQTQPGIRRARDKALSGGKRKETLV

SEQ ID NO: 55430 - protein, 1020 aa, Homo sapiens
MMSFGGADALLGAPFAPLHGGGSLHYALARKGGAGGTRSAAGSSSGFHSWTRTSVSSVSASPSRFRGAGAASSTDSLDTLSNGPEGCMVAVATSRSEKEQLQALNDRFAGYIDKVRQLEAHNRSLEGEAAALRQQQAGRSAMGELYEREVREMRGAVLRLGAARGQLRLEQEHLLEDIAHVRQRLDDEARQREEAEAAARALARFAQEAEAARVDLQKKAQALQEECGYLRRHHQEEVGELLGQIQGSGAAQAQMQAETRDALKCDVTSALREIRAQLEGHAVQSTLQSEEWFRVRLDRLSEAAKVNTDAMRSAQEEITEYRRQLQARTTELEALKSTKDSLERQRSELEDRHQADIASYQEAIQQLDAELRNTKWEMAAQLREYQDLLNVKMALDIEIAAYRKLLEGEECRIGFGPIPFSLPEGLPKIPSVSTHIKVKSEEKIKVVEKSEKETVIVEEQTEETQVTEEVTEEEEKEAKEEEGKEEEGGEEEEAEGGEEETKSPPAEEAASPEKEAKSPVKEEAKSPAEAKSPEKEEAKSPAEVKSPEKAKSPAKEEAKSPPEAKSPEKEEAKSPAEVKSPEKAKSPAKEEAKSPAEAKSPEKAKSPVKEEAKSPAEAKSPVKEEAKSPAEVKSPEKAKSPTKEEAKSPEKAKSPEKEEAKSPEKAKSPVKAEAKSPEKAKSPVKAEAKSPEKAKSPVKEEAKSPEKAKSPVKEEAKSPEKAKSPVKEEAKTPEKAKSPVKEEAKSPEKAKSPEKAKTLDVKSPEAKTPAKEEARSPADKFPEKAKSPVKEEVKSPEKAKSPLKEDAKAPEKEIPKKEEVKSPVKEEEKPQEVKVKEPPKKAEEEKAPATPKTEEKKDSKKEEAPKKEAPKPKVEEKKEPAVEKPKESKVEAKKEEAEDKKKVPTPEKEAPAKVEVKEDAKPKEKTEVAKKEPDDAKAKEPSKPAEKKEAAPEKKDTKEEKAKKPEEKPKTEAKAKEDDKTLSKEPSKPKAEKAEKSSSTDQKDSKPPEKATEDKAAKGK

SEQ ID NO: 55431 - protein, 971 aa, Homo sapiens
MMSFGGADALLGAPFAPLHGGGSLHYALARKGGAGGTRSAAGSSSGFHSWTRTSVSSVSASPSRFRGAGAASSTDSLDTLSNGPEGCMVAVATSRSEKEQLQALNDRFAGYIDKVRQLEAHNRSLEGEAAALRQQQAGRSAMGELYEREVREMRGAVLRLGAARGQLRLEQEHLLEDIAHVRQRLDDEARQREEAEAAARALARFAQEAEAARVDLQKKAQALQEECGYLRRHHQEEVGELLGQIQGSGAAQAQMQAETRDALKCDVTSALREIRAQLEGHAVQSTLQSEEWFRVRLDRLSEAAKVNTDAMRSAQEEITEYRRQLQARTTELEALKSTKDSLERQRSELEDRHQADIASYQEAIQQLDAELRNTKWEMAAQLREYQDLLNVKMALDIEIAAYRKLLEGEECRIGFGPIPFSLPEGLPKIPSVSTHIKVKSEEKIKVVEKSEKETVIVEEQTEETQVTEEVTEEEEKEAKEEEGKEEEGGEEEEAEGGEEETKSPPAEEAASPEKEAKSPVKEEAKSPAEAKSPEKEEAKSPAEVKSPEKAKSPAKEEAKSPPEAKSPEKEEAKSPAEVKSPEKAKSPAKEEAKSPAEAKSPEKAKSPVKEEAKSPAEAKSPVKEEAKSPAEVKSPEKAKSPTKEEAKSPEKAKSPEKEEAKSPEKAKSPVKAEAKSPEKAKSPVKAEAKSPEKAKSPVKEEAKSPEKAKSPVKEEAKSPEKAKSPVKEEAKTPEKAKSPVKEEAKSPEKAKSPLKEDAKAPEKEIPKKEEVKSPVKEEEKPQEVKVKEPPKKAEEEKAPATPKTEEKKDSKKEEAPKKEAPKPKVEEKKEPAVEKPKESKVEAKKEEAEDKKKVPTPEKEAPAKVEVKEDAKPKEKTEVAKKEPDDAKAKEPSKPAEKKEAAPEKKDTKEEKAKKPEEKPKTEAKAKEDDKTLSKEPSKPKAEKAEKSSSTDQKDSKPPEKATEDKAAKGK

SEQ ID NO: 55432 - protein, 916 aa, Homo sapiens
MSYTLDSLGNPSAYRRVTETRSSFSRVSGSPSSGFRSQSWSRGSPSTVSSSYKRSMLAPRLAYSSAMLSSAESSLDFSQSSSLLNGGSGPGGDYKLSRSNEKEQLQGLNDRFAGYIEKVHYLEQQNKEIEAEIQALRQKQASHAQLGDAYDQEIRELRATLEMVNHEKAQVQLDSDHLEEDIHRLKERFEEEARLRDDTEAAIRALRKDIEEASLVKVELDKKVQSLQDEVAFLRSNHEEEVADLLAQIQASHITVERKDYLKTDISTALKEIRSQLESHSDQNMHQAEEWFKCRYAKLTEAAEQNKEAIRSAKEEIAEYRRQLQSKSIELESVRGTKESLERQLSDIEERHNHDLSSYQDTIQQLENELRGTKWEMARHLREYQDLLNVKMALDIEIAAYRKLLEGEETRFSTFAGSITGPLYTHRPPITISSKIQKPKVEAPKLKVQHKFVEEIIEETKVEDEKSEMEEALTAITEELAVSMKEEKKEAAEEKEEEPEAEEEEVAAKKSPVKATAPEVKEEEGEKEEEEGQEEEEEEDEGAKSDQAEEGGSEKEGSSEKEEGEQEEGETEAEAEGEEAEAKEEKKVEEKSEEVATKEELVADAKVEKPEKAKSPVPKSPVEEKGKSPVPKSPVEEKGKSPVPKSPVEEKGKSPVPKSPVEEKGKSPVSKSPVEEKAKSPVPKSPVEEAKSKAEVGKGEQKEEEEKEVKEAPKEEKVEKKEEKPKDVPEKKKAESPVKEEAVAEVVTITKSVKVHLEKETKEEGKPLQQEKEKEKAGGEGGSEEEGSDKGAKGSRKEDIAVNGEVEGKEEVEQETKEKGSGREEEKGVVTNGLDLSPADEKKGGDKSEEKVVVTKTVEKITSEGGDGATKYITKSVTVTQKVEEHEETFEEKLVSTKKVEKVTSHAIVKEVTQSD

SEQ ID NO: 55433 - protein, 540 aa, Homo sapiens
MARHLREYQDLLNVKMALDIEIAAYRKLLEGEETRFSTFAGSITGPLYTHRPPITISSKIQKPKVEAPKLKVQHKFVEEIIEETKVEDEKSEMEEALTAITEELAVSMKEEKKEAAEEKEEEPEAEEEEVAAKKSPVKATAPEVKEEEGEKEEEEGQEEEEEEDEGAKSDQAEEGGSEKEGSSEKEEGEQEEGETEAEAEGEEAEAKEEKKVEEKSEEVATKEELVADAKVEKPEKAKSPVPKSPVEEKGKSPVPKSPVEEKGKSPVPKSPVEEKGKSPVPKSPVEEKGKSPVSKSPVEEKAKSPVPKSPVEEAKSKAEVGKGEQKEEEEKEVKEAPKEEKVEKKEEKPKDVPEKKKAESPVKEEAVAEVVTITKSVKVHLEKETKEEGKPLQQEKEKEKAGGEGGSEEEGSDKGAKGSRKEDIAVNGEVEGKEEVEQETKEKGSGREEEKGVVTNGLDLSPADEKKGGDKSEEKVVVTKTVEKITSEGGDGATKYITKSVTVTQKVEEHEETFEEKLVSTKKVEKVTSHAIVKEVTQSD

SEQ ID NO: 55434 - protein, 877 aa, Homo sapiens
MSYTLDSLGNPSAYRRVTETRSSFSRVSGSPSSGFRSQSWSRGSPSTVSSSYKRSMLAPRLAYSSAMLSSAESSLDFSQSSSLLNGGSGPGGDYKLSRSNEKEQLQGLNDRFAGYIEKVHYLEQQNKEIEAEIQALRQKQASHAQLGDAYDQEIRELRATLEMVNHEKAQVQLDSDHLEEDIHRLKERFEEEARLRDDTEAAIRALRKDIEEASLVKVELDKKVQSLQDEVAFLRSNHEEEVADLLAQIQASHITVERKDYLKTDISTALKEIRSQLESHSDQNMHQAEEWFKCRYAKLTEAAEQNKEAIRSAKEEIAEYRRQLQSKSIELESVRGTKESLERQLSDIEERHNHDLSSYQDTIQQLENELRGTKWEMARHLREYQDLLNVKMALDIEIAAYRKLLEGEETRFSTFAGSITGPLYTHRPPITISSKIQKPKVEAPKLKVQHKFVEEIIEETKVEDEKSEMEEALTAITEELAVSMKEEKKEAAEEKEEEPEAEEEEVAAKKSPVKATAPEVKEEEGEKEEEEGQEEEEEEDEGAKSDQAEEGGSEKEGSSEKEEGEQEEGETEAEAEGEEAEAKEEKKVEEKSEEVATKEELVADAKVEKPEKAKSPVPKSPVEEKGKSPVSKSPVEEKAKSPVPKSPVEEAKSKAEVGKGEQKEEEEKEVKEAPKEEKVEKKEEKPKDVPEKKKAESPVKEEAVAEVVTITKSVKVHLEKETKEEGKPLQQEKEKEKAGGEGGSEEEGSDKGAKGSRKEDIAVNGEVEGKEEVEQETKEKGSGREEEKGVVTNGLDLSPADEKKGGDKSEEKVVVTKTVEKITSEGGDGATKYITKSVTVTQKVEEHEETFEEKLVSTKKVEKVTSHAIVKEVTQSD

SEQ ID NO: 55435 - protein, 356 aa, Homo sapiens
MTKSYSESGLMGEPQPQGPPSWTDECLSSQDEEHEADKKEDDLETMNAEEDSLRNGGEEEDEDEDLEEEEEEEEEDDDQKPKRRGPKKKKMTKARLERFKLRRMKANARERNRMHGLNAALDNLRKVVPCYSKTQKLSKIETLRLAKNYIWALSEILRSGKSPDLVSFVQTLCKGLSQPTTNLVAGCLQLNPRTFLPEQNQDMPPHLPTASASFPVHPYSYQSPGLPSPPYGTMDSSHVFHVKPPPHAYSAALEPFFESPLTDCTSPSFDGPLSPPLSINGNFSFKHEPSAEFEKNYAFTMHYPAATLAGAQSHGSIFSGTAAPRCEIPIDNIMSFDSHSHHERVMSAQLNAIFHD

SEQ ID NO: 55436 - protein, 382 aa, Homo sapiens
MLTRLFSEPGLLSDVPKFASWGDGEDDEPRSDKGDAPPPPPPAPGPGAPGPARAAKPVPLRGEEGTEATLAEVKEEGELGGEEEEEEEEEEGLDEAEGERPKKRGPKKRKMTKARLERSKLRRQKANARERNRMHDLNAALDNLRKVVPCYSKTQKLSKIETLRLAKNYIWALSEILRSGKRPDLVSYVQTLCKGLSQPTTNLVAGCLQLNSRNFLTEQGADGAGRFHGSGGPFAMHPYPYPCSRLAGAQCQAAGGLGGGAAHALRTHGYCAAYETLYAAAGGGGASPDYNSSEYEGPLSPPLCLNGNFSLKQDSSPDHEKSYHYSMHYSALPGSRPTGHGLVFGSSAVRGGVHSENLLSYDMHLHHDRGPMYEELNAFFHN

SEQ ID NO: 55437 - protein, 331 aa, Homo sapiens
MSKTFVKSKEMGELVNTPSWMDKGLGSQNEVKEEESRPGTYGMLSSLTEEHDSIEEEEEEEEDGEKPKRRGPKKKKMTKARLERFRARRVKANARERTRMHGLNDALDNLRRVMPCYSKTQKLSKIETLRLARNYIWALSEVLETGQTPEGKGFVEMLCKGLSQPTSNLVAGCLQLGPQSVLLEKHEDKSPICDSAISVHNFNYQSPGLPSPPYGHMETHLLHLKPQVFKSLGESSFGSHLPDCSTPPYEGPLTPPLSISGNFSLKQDGSPDLEKSYSFMPHYPSSSLSSGHVHSTPFQAGTPRYDVPIDMSYDSYPHHGIGTQLNTVFTE

SEQ ID NO: 55438 - protein, 337 aa, Homo sapiens
MLTLPFDESVVMPESQMCRKFSRECEDQKQIKKPESFSKQIVLRGKSIKRAPGEETEKEEEEEDREEEDENGLPRRRGLRKKKTTKLRLERVKFRRQEANARERNRMHGLNDALDNLRKVVPCYSKTQKLSKIETLRLAKNYIWALSEILRIGKRPDLLTFVQNLCKGLSQPTTNLVAGCLQLNARSFLMGQGGEAAHHTRSPYSTFYPPYHSPELTTPPGHGTLDNSKSMKPYNYCSAYESFYESTSPECASPQFEGPLSPPPINYNGIFSLKQEETLDYGKNYNYGMHYCAVPPRGPLGQGAMFRLPTDSHFPYDLHLRSQSLTMQDELNAVFHN

SEQ ID NO: 55439 - protein, 237 aa, Homo sapiens
MPARLETCISDLDCASSSGSDLSGFLTDEEDCARLQQAASASGPPAPARRGAPNISRASEVPGAQDDEQERRRRRGRTRVRSEALLHSLRRSRRVKANDRERNRMHNLNAALDALRSVLPSFPDDTKLTKIETLRFAYNYIWALAETLRLADQGLPGGGARERLLPPQCVPCLPGPPSPASDAESWGSGAAAASPLSDPSSPAASEDFTYRPGDPVFSFPSLPKDLLHTTPCFIPYH

SEQ ID NO: 55440 - protein, 214 aa, Homo sapiens
MTPQPSGAPTVQVTRETERSFPRASEDEVTCPTSAPPSPTRTRGNCAEAEEGGCRGAPRKLRARRGGRSRPKSELALSKQRRSRRKKANDRERNRMHNLNSALDALRGVLPTFPDDAKLTKIETLRFAHNYIWALTQTLRIADHSLYALEPPAPHCGELGSPGGSPGDWGSLYSPVSQAGSLSPAASLEERPGLLGATFSACLSPGSLAFSDFL

SEQ ID NO: 55441 - protein, 151 aa, Homo sapiens
MERPEPELIRQSWRAVSRSPLEHGTVLFARLFALEPDLLPLFQYNCRQFSSPEDCLSSPEFLDHIRKVMLVIDAAVTNVEDLSSLEEYLASLGRKHRAVGVKLSSFSTVGESLLYMLEKCLGPAFTPATRAAWSQLYGAVVQAMSRGWDGE

SEQ ID NO: 55442 - protein, 78 aa, Homo sapiens
MDCCTENACSKPDDDILDIPLDDPGANAAAAKIQASFRGHMARKKIKSGERGRKGPGPGGPGGAGVARGGAGGGPSGD

SEQ ID NO: 55443 - protein, 78 aa, Homo sapiens; identical to SEQ ID NO: 55442

SEQ ID NO: 55444 - protein, 78 aa, Homo sapiens; identical to SEQ ID NO: 55442

SEQ ID NO: 55445 - protein, 311 aa, Homo sapiens
MAALGVLESDLPSAVTLLKNLQEQVMAVTAQVKSLTQKVQAGAYPTEKGLSFLEVKDQLLLMYLMDLTHLILDKASGGSLQGHDAVLRLVEIRTVLEKLRPLDQKLKYQIDKLIKTAVTGSLSENDPLRFKPHPSNMMSKLSSEDEEEDEAEDDQSEASGKKSVKGVSKKYVPPRLVPVHYDETEAEREKKRLERAKRRALSSSVIRELKEQYSDAPEEIRDARHPHVTRQSQEDQHRINYEESMMVRLSVSKREKGRRKRANVMSSQLHSLTHFSDISALTGGTVHLDEDQNPIKKRKKIPQKGRKKKGQ

SEQ ID NO: 55446 - protein, 315 aa, Homo sapiens
MAALGVLESDLPSAVTLLKNLQEQVMAVTAQVKSLTQKVQAGAYPTEKGLSFLEVKDQLLLMYLMDLTHLILDKASGGSLQGHDAVLRLVEIRTVLEKLRPLDQKLKYQIDKLIKTAVTGSLSENDPLRFKPHPSNMMSKLSSEDEEEDEAEDDQSEASGKKSVKGVSKKYVPPRLVPVHYDETEAEREKKRLERAKRRALSSSVIRELKEQYSDAPEEIRDARHPHVTRQSQEDQHRINYEESMMVRLSVSKREKGRRKRANVMSSQLHSLTHFSDISALTGGTVHLDEDQNPIKKRKKIPQKGRKKKGFRRRR

SEQ ID NO: 55447 - protein, 823 aa, Homo sapiens
MALPRCTWPNYVWRAVMACLVHRGLGAPLTLCMLGCLLQAGHVLSQKLDDVDPLVATNFGKIRGIKKELNNEILGPVIQFLGVPYAAPPTGERRFQPPEPPSPWSDIRNATQFAPVCPQNIIDGRLPEVMLPVWFTNNLDVVSSYVQDQSEDCLYLNIYVPTEDDIRDSGGPKPVMVYIHGGSYMEGTGNLYDGSVLASYGNVIVITVNYRLGVLGFLSTGDQAAKGNYGLLDLIQALRWTSENIGFFGGDPLRITVFGSGAGGSCVNLLTLSHYSEGNRWSNSTKGLFQRAIAQSGTALSSWAVSFQPAKYARMLATKVGCNVSDTVELVECLQKKPYKELVDQDIQPARYHIAFGPVIDGDVIPDDPQILMEQGEFLNYDIMLGVNQGEGLKFVENIVDSDDGISASDFDFAVSNFVDNLYGYPEGKDVLRETIKFMYTDWADRHNPETRRKTLLALFTDHQWVAPAVATADLHSNFGSPTYFYAFYHHCQTDQVPAWADAAHGDEVPYVLGIPMIGPTELFPCNFSKNDVMLSAVVMTYWTNFAKTGDPNQPVPQDTKFIHTKPNRFEEVAWTRYSQKDQLYLHIGLKPRVKEHYRANKVNLWLELVPHLHNLNDISQYTSTTTKVPSTDITFRPTRKNSVPVTSAFPTAKQDDPKQQPSPFSVDQRDYSTELSVTIAVGASLLFLNILAFAALYYKKDKRRHDVHRRCSPQRTTTNDLTHAQEEEIMSLQMKHTDLDHECESIHPHEVVLRTACPPDYTLAMRRSPDDVPLMTPNTITMIPNTIPGIQPLHTFNTFTGGQNNTLPHPHPHPHSHSTTRV

SEQ ID NO: 55448 - protein, 863 aa, Homo sapiens
MALPRCTWPNYVWRAVMACLVHRGLGAPLTLCMLGCLLQAGHVLSQKLDDVDPLVATNFGKIRGIKKELNNEILGPVIQFLGVPYAAPPTGERRFQPPEPPSPWSDIRNATQFAPVCPQNIIDGRLPEVMLPVWFTNNLDVVSSYVQDQSEDCLYLNIYVPTEDVKRISKECARKPGKKICRKGGPLTKKQTDDLGDNDGAEDEDIRDSGGPKPVMVYIHGGSYMEGTGNLYDGSVLASYGNVIVITVNYRLGVLGFLSTGDQAAKGNYGLLDLIQALRWTSENIGFFGGDPLRITVFGSGAGGSCVNLLTLSHYSEGNRWSNSTKGLFQRAIAQSGTALSSWAVSFQPAKYARMLATKVGCNVSDTVELVECLQKKPYKELVDQDIQPARYHIAFGPVIDGDVIPDDPQILMEQGEFLNYDIMLGVNQGEGLKFVENIVDSDDGISASDFDFAVSNFVDNLYGYPEGKDVLRETIKFMYTDWADRHNPETRRKTLLALFTDHQWVAPAVATADLHSNFGSPTYFYAFYHHCQTDQVPAWADAAHGDEVPYVLGIPMIGPTELFPCNFSKNDVMLSAVVMTYWTNFAKTGDPNQPVPQDTKFIHTKPNRFEEVAWTRYSQKDQLYLHIGLKPRVKEHYRANKVNLWLELVPHLHNLNDISQYTSTTTKVPSTDITFRPTRKNSVPVTSAFPTAKQDDPKQQPSPFSVDQRDYSTELSVTIAVGASLLFLNILAFAALYYKKDKRRHDVHRRCSPQRTTTNDLTHAQEEEIMSLQMKHTDLDHECESIHPHEVVLRTACPPDYTLAMRRSPDDVPLMTPNTITMIPNTIPGIQPLHTFNTFTGGQNNTLPHPHPHPHSHSTTRV

SEQ ID NO: 55449 - protein, 10 aa, Homo sapiens
MALPRCTWPN

SEQ ID NO: 55450 - protein, 13 aa, Homo sapiens
MALPRCTWPNYVW

SEQ ID NO: 55451 - protein, 823 aa, Homo sapiens; identical to SEQ ID NO: 55447

SEQ ID NO: 55452 - protein, 823 aa, Homo sapiens; identical to SEQ ID NO: 55447

SEQ ID NO: 55453 - protein, 835 aa, Homo sapiens
MWLLALCLVGLAGAQRGGGGPGGGAPGGPGLGLGSLGEERFPVVNTAYGRVRGVRRELNNEILGPVVQFLGVPYATPPLGARRFQPPEAPASWPGVRNATTLPPACPQNLHGALPAIMLPVWFTDNLEAAATYVQNQSEDCLYLNLYVPTEDGPLTKKRDEATLNPPDTDIRDPGKKPVMLFLHGGSYMEGTGNMFDGSVLAAYGNVIVATLNYRLGVLGFLSTGDQAAKGNYGLLDQIQALRWLSENIAHFGGDPERITIFGSGAGASCVNLLILSHHSEGLFQKAIAQSGTAISSWSVNYQPLKYTRLLAAKVGCDREDSAEAVECLRRKPSRELVDQDVQPARYHIAFGPVVDGDVVPDDPEILMQQGEFLNYDMLIGVNQGEGLKFVEDSAESEDGVSASAFDFTVSNFVDNLYGYPEGKDVLRETIKFMYTDWADRDNGEMRRKTLLALFTDHQWVAPAVATAKLHADYQSPVYFYTFYHHCQAEGRPEWADAAHGDELPYVFGVPMVGATDLFPCNFSKNDVMLSAVVMTYWTNFAKTGDPNQPVPQDTKFIHTKPNRFEEVVWSKFNSKEKQYLHIGLKPRVRDNYRANKVAFWLELVPHLHNLHTELFTTTTRLPPYATRWPPRPPAGAPGTRRPPPPATLPPEPEPEPGPRAYDRFPGDSRDYSTELSVTVAVGASLLFLNILAFAALYYKRDRRQELRCRRLSPPGGSGSGVPGGGPLLPAAGRELPPEEELVSLQLKRGGGVGADPAEALRPACPPDYTLALRRAPDDVPLLAPGALTLLPSGLGPPPPPPPPSLHPFGPFPPPPPTATSHNNTLPHPHSTTRV

SEQ ID NO: 55454 - protein, 848 aa, Homo sapiens
MWLRLGPPSLSLSPKPTVGRSLCLTLWFLSLALRASTQAPAPTVNTHFGKLRGARVPLPSEILGPVDQYLGVPYAAPPIGEKRFLPPEPPPSWSGIRNATHFPPVCPQNIHTAVPEVMLPVWFTANLDIVATYIQEPNEDCLYLNVYVPTEDVKRISKECARKPNKKICRKGGSGAKKQGEDLADNDGDEDEDIRDSGAKPVMVYIHGGSYMEGTGNMIDGSILASYGNVIVITLNYRVGVLGFLSTGDQAAKGNYGLLDQIQALRWVSENIAFFGGDPRRITVFGSGIGASCVSLLTLSHHSEGLFQRAIIQSGSALSSWAVNYQPVKYTSLLADKVGCNVLDTVDMVDCLRQKSAKELVEQDIQPARYHVAFGPVIDGDVIPDDPEILMEQGEFLNYDIMLGVNQGEGLKFVEGVVDPEDGVSGTDFDYSVSNFVDNLYGYPEGKDTLRETIKFMYTDWADRDNPETRRKTLVALFTDHQWVEPSVVTADLHARYGSPTYFYAFYHHCQSLMKPAWSDAAHGDEVPYVFGVPMVGPTDLFPCNFSKNDVMLSAVVMTYWTNFAKTGDPNKPVPQDTKFIHTKANRFEEVAWSKYNPRDQLYLHIGLKPRVRDHYRATKVAFWKHLVPHLYNLHDMFHYTSTTTKVPPPDTTHSSHITRRPNGKTWSTKRPAISPAYSNENAQGSWNGDQDAGPLLVENPRDYSTELSVTIAVGASLLFLNVLAFAALYYRKDKRRQEPLRQPSPQRGAGAPELGAAPEEELAALQLGPTHHECEAGPPHDTLRLTALPDYTLTLRRSPDDIPLMTPNTITMIPNSLVGLQTLHPYNTFAAGFNSTGLPHSHSTTRV

SEQ ID NO: 55455 - protein, 828 aa, Homo sapiens
MWLRLGPPSLSLSPKPTVGRSLCLTLWFLSLALRASTQAPAPTVNTHFGKLRGARVPLPSEILGPVDQYLGVPYAAPPIGEKRFLPPEPPPSWSGIRNATHFPPVCPQNIHTAVPEVMLPVWFTANLDIVATYIQEPNEDCLYLNVYVPTEDGSGAKKQGEDLADNDGDEDEDIRDSGAKPVMVYIHGGSYMEGTGNMIDGSILASYGNVIVITLNYRVGVLGFLSTGDQAAKGNYGLLDQIQALRWVSENIAFFGGDPRRITVFGSGIGASCVSLLTLSHHSEGLFQRAIIQSGSALSSWAVNYQPVKYTSLLADKVGCNVLDTVDMVDCLRQKSAKELVEQDIQPARYHVAFGPVIDGDVIPDDPEILMEQGEFLNYDIMLGVNQGEGLKFVEGVVDPEDGVSGTDFDYSVSNFVDNLYGYPEGKDTLRETIKFMYTDWADRDNPETRRKTLVALFTDHQWVEPSVVTADLHARYGSPTYFYAFYHHCQSLMKPAWSDAAHGDEVPYVFGVPMVGPTDLFPCNFSKNDVMLSAVVMTYWTNFAKTGDPNKPVPQDTKFIHTKANRFEEVAWSKYNPRDQLYLHIGLKPRVRDHYRATKVAFWKHLVPHLYNLHDMFHYTSTTTKVPPPDTTHSSHITRRPNGKTWSTKRPAISPAYSNENAQGSWNGDQDAGPLLVENPRDYSTELSVTIAVGASLLFLNVLAFAALYYRKDKRRQEPLRQPSPQRGAGAPELGAAPEEELAALQLGPTHHECEAGPPHDTLRLTALPDYTLTLRRSPDDIPLMTPNTITMIPNSLVGLQTLHPYNTFAAGFNSTGLPHSHSTTRV

SEQ ID NO: 55456 - protein, 513 aa, Homo sapiens
MWLRLGPPSLSLSPKPTVGRSLCLTLWFLSLALRASTQAPAPTVNTHFGKLRGARVPLPSEILGPVDQYLGVPYAAPPIGEKRFLPPEPPPSWSGIRNATHFPPVCPQNIHTAVPEVMLPVWFTANLDIVATYIQEPNEDCLYLNVYVPTEDDIRDSGAKPVMVYIHGGSYMEGTGNMIDGSILASYGNVIVITLNYRVGVLGFLSTGDQAAKGNYGLLDQIQALRWVSENIAFFGGDPRRITVFGSGIGASCVSLLTLSHHSEGLFQRAIIQSGSALSSWAVNYQPVKYTSLLADKVGCNVLDTVDMVDCLRQKSAKELVEQDIQPARYHVAFGPVIDGDVIPDDPEILMEQGEFLNYDIMLGVNQGEGLKFVEGVVDPEDGVSGTDFDYSVSNFVDNLYGYPEGKDTLRETIKFMYTDWADRDNPETRRKTLVALFTDHQWVEPSVVTADLHARYGSPTYFYAFYHHCQSLMKPAWSDAAHGDEVPYVFGVPMVGPTDLFPCNFSKNDVML

SEQ ID NO: 55457 - protein, 808 aa, Homo sapiens
MWLRLGPPSLSLSPKPTVGRSLCLTLWFLSLALRASTQAPAPTVNTHFGKLRGARVPLPSEILGPVDQYLGVPYAAPPIGEKRFLPPEPPPSWSGIRNATHFPPVCPQNIHTAVPEVMLPVWFTANLDIVATYIQEPNEDCLYLNVYVPTEDDIRDSGAKPVMVYIHGGSYMEGTGNMIDGSILASYGNVIVITLNYRVGVLGFLSTGDQAAKGNYGLLDQIQALRWVSENIAFFGGDPRRITVFGSGIGASCVSLLTLSHHSEGLFQRAIIQSGSALSSWAVNYQPVKYTSLLADKVGCNVLDTVDMVDCLRQKSAKELVEQDIQPARYHVAFGPVIDGDVIPDDPEILMEQGEFLNYDIMLGVNQGEGLKFVEGVVDPEDGVSGTDFDYSVSNFVDNLYGYPEGKDTLRETIKFMYTDWADRDNPETRRKTLVALFTDHQWVEPSVVTADLHARYGSPTYFYAFYHHCQSLMKPAWSDAAHGDEVPYVFGVPMVGPTDLFPCNFSKNDVMLSAVVMTYWTNFAKTGDPNKPVPQDTKFIHTKANRFEEVAWSKYNPRDQLYLHIGLKPRVRDHYRATKVAFWKHLVPHLYNLHDMFHYTSTTTKVPPPDTTHSSHITRRPNGKTWSTKRPAISPAYSNENAQGSWNGDQDAGPLLVENPRDYSTELSVTIAVGASLLFLNVLAFAALYYRKDKRRQEPLRQPSPQRGAGAPELGAAPEEELAALQLGPTHHECEAGPPHDTLRLTALPDYTLTLRRSPDDIPLMTPNTITMIPNSLVGLQTLHPYNTFAAGFNSTGLPHSHSTTRV

SEQ ID NO: 55458 - protein, 351 aa, Homo sapiens
MLPVWFTANLDIVATYIQEPNEDCLYLNVYVPTEDGSGAKKQGEDLADNDGDEDEDIRDSGAKPVMVYIHGGSYMEGTGNMIDGSILASYGNVIVITLNYRVGVLGFLSTGDQAAKGNYGLLDQIQALRWVSENIAFFGGDPRRITVFGSGIGASCVSLLTLSHHSEGLFQRAIIQSGSALSSWAVNYQPVKYTSLLADKVGCNVLDTVDMVDCLRQKSAKELVEQDIQPARYHVAFGPVIDGDVIPDDPEILMEQGEFLNYDIMLGVNQGEGLKFVEGVVDPEDGVSGTDFDYSVSILWTICMAILRVRTPCERPSSSCIQTGQTVTTLRPAVKHWWHSSLTTSGWSPQW

SEQ ID NO: 55459 - protein, 256 aa, Homo sapiens
MLRPQGLLWLPLLFTSVCVMLNSNVLLWITALAIKFTLIDSQAQYPVVNTNYGKIQGLRTPLPSEILGPVEQYLGVPYASPPTGERRFQPPESPSSWTGIRNATQFSAVCPQHLDERFLLHDMLPIWFTTSLDTLMTYVQDQNEDCLYLNIYVPMEDGTNIKRNADDITSNDHGEDKDIHEQNSKKPVMVYIHGGSYMEGTGNMIDGSILASYGNVIVITINYRLGILGMQEARLCGSSKMFNYFKSPFTNLINFF

SEQ ID NO: 55460 - protein, 816 aa, Homo sapiens
MLRPQGLLWLPLLFTSVCVMLNSNVLLWITALAIKFTLIDSQAQYPVVNTNYGKIQGLRTPLPSEILGPVEQYLGVPYASPPTGERRFQPPESPSSWTGIRNATQFSAVCPQHLDERFLLHDMLPIWFTTSLDTLMTYVQDQNEDCLYLNIYVPMEDDIHEQNSKKPVMVYIHGGSYMEGTGNMIDGSILASYGNVIVITINYRLGILGFLSTGDQAAKGNYGLLDQIQALRWIEENVGAFGGDPKRVTIFGSGAGASCVSLLTLSHYSEGLFQKAIIQSGTALSSWAVNYQPAKYTRILADKVGCNMLDTTDMVECLKNKNYKELIQQTITPATYHIAFGPVIDGDVIPDDPQILMEQGEFLNYDIMLGVNQGEGLKFVDGIVDNEDGVTPNDFDFSVSNFVDNLYGYPEGKDTLRETIKFMYTDWADKENPETRRKTLVALFTDHQWVAPAVATADLHAQYGSPTYFYAFYHHCQSEMKPSWADSAHGDEVPYVFGIPMIGPTELFSCNFSKNDVMLSAVVMTYWTNFAKTGDPNQPVPQDTKFIHTKPNRFEEVAWSKYNPKDQLYLHIGLKPRVRDHYRATKVAFWLELVPHLHNLNEIFQYVSTTTKVPPPDMTSFPYGTRRSPAKIWPTTKRPAITPANNPKHSKDPHKTGPEDTTVLIETKRDYSTELSVTIAVGASLLFLNILAFAALYYKKDKRRHETHRHPSPQRNTTNDITHIQNEEIMSLQMKQLEHDHECESLQAHDTLRLTCPPDYTLTLRRSPDDIPFMTPNTITMIPNTLMGMQPLHTFKTFSGGQNSTNLPHGHSTTRV

SEQ ID NO: 55461 - protein, 816 aa, Homo sapiens; identical to SEQ ID NO: 55460

SEQ ID NO: 55462 - protein, 873 aa, Homo sapiens
MLRPQGLLWLPLLFTSVCVMLNSNVLLWITALAIKFTLIDSQAQYPVVNTNYGKIQGLRTPLPSEILGPVEQYLGVPYASPPTGERRFQPPESPSSWTGIRNATQFSAVCPQHLDERFLLHDMLPIWFTTSLDTLMTYVQDQNEDCLYLNIYVPMEDGTNIKRNADDITSNDHGEDKDIHEQNSKKPVMVYIHGGSYMEGTGNMIDGSILASYGNVIVITINYRLGILAQNTLAHGNCKHRCQLHLQAPRDCKSAYPFRNEDEIRGFLSTGDQAAKGNYGLLDQIQALRWIEENVGAFGGDPKRVTIFGSGAGASCVSLLTLSHYSEGLFQKAIIQSGTALSSWAVNYQPAKYTRILADKVGCNMLDTTDMVECLKNKNYKELIQQTITPATYHIAFGPVIDGDVIPDDPQILMEQGEFLNYDIMLGVNQGEGLKFVDGIVDNEDGVTPNDFDFSVSNFVDNLYGYPEGKDTLRETIKFMYTDWADKENPETRRKTLVALFTDHQWVAPAVATADLHAQYGSPTYFYAFYHHCQSEMKPSWADSAHGDEVPYVFGIPMIGPTELFSCNFSKNDVMLSAVVMTYWTNFAKTGDPNQPVPQDTKFIHTKPNRFEEVAWSKYNPKDQLYLHIGLKPRVRDHYRATKVAFWLELVPHLHNLNEIFQYVSTTTKVPPPDMTSFPYGTRRSPAKIWPTTKRPAITPANNPKHSKDPHKTGPEDTTVLIETKRDYSTELSVTIAVGASLLFLNILAFAALYYKKDKRRHETHRHPSPQRNTTNDITHIQNEEIMSLQMKQLEHDHECESLQAHDTLRLTCPPDYTLTLRRSPDDIPFMTPNTITMIPNTLMGMQPLHTFKTFSGGQNSTNLPHGHSTTRV

SEQ ID NO: 55463 - protein, 648 aa, Homo sapiens
MVYIHGGSYMEGTGNMIDGSILASYGNVIVITINYRLGILGFLSTGDQAAKGNYGLLDQIQALRWIEENVGAFGGDPKRVTIFGSGAGASCVSLLTLSHYSEGLFQKAIIQSGTALSSWAVNYQPAKYTRILADKVGCNMLDTTDMVECLKNKNYKELIQQTITPATYHIAFGPVIDGDVIPDDPQILMEQGEFLNYDIMLGVNQGEGLKFVDGIVDNEDGVTPNDFDFSVSNFVDNLYGYPEGKDTLRETIKFMYTDWADKENPETRRKTLVALFTDHQWVAPAVATADLHAQYGSPTYFYAFYHHCQSEMKPSWADSAHGDEVPYVFGIPMIGPTELFSCNFSKNDVMLSAVVMTYWTNFAKTGDPNQPVPQDTKFIHTKPNRFEEVAWSKYNPKDQLYLHIGLKPRVRDHYRATKVAFWLELVPHLHNLNEIFQYVSTTTKVPPPDMTSFPYGTRRSPAKIWPTTKRPAITPANNPKHSKDPHKTGPEDTTVLIETKRDYSTELSVTIAVGASLLFLNILAFAALYYKKDKRRHETHRHPSPQRNTTNDITHIQNEEIMSLQMKQLEHDHECESLQAHDTLRLTCPPDYTLTLRRSPDDIPFMTPNTITMIPNTLMGMQPLHTFKTFSGGQNSTNLPHGHSTTRV

SEQ ID NO: 55464 - protein, 236 aa, Homo sapiens
  VARIANT 1: note = MOD_RES - Any amino acid
XNSNVLLWITALAIKFTLIDSQAQYPVVNTNYGKIQGLRTPLPSEILGPVEQYLGVPYASPPTGERRFQPPESPSSWTGIRNATQFSAVCPQHLDERFLLHDMLPIWFTTSLDTLMTYVQDQNEDCLYLNIYVPMEDGTNIKRNADDITSNDHGEDKDIHEQNSKKPVMVYIHGGSYMEGTGNMIDGSILASYGNVIVITINYRLGILGMQEARLCGSSKMFNYFKSPFTNLINFF

SEQ ID NO: 55465 - protein, 836 aa, Homo sapiens
MLRPQGLLWLPLLFTSVCVMLNSNVLLWITALAIKFTLIDSQAQYPVVNTNYGKIQGLRTPLPSEILGPVEQYLGVPYASPPTGERRFQPPESPSSWTGIRNATQFSAVCPQHLDERFLLHDMLPIWFTTSLDTLMTYVQDQNEDCLYLNIYVPMEDGTNIKRNADDITSNDHGEDKDIHEQNSKKPVMVYIHGGSYMEGTGNMIDGSILASYGNVIVITINYRLGILGFLSTGDQAAKGNYGLLDQIQALRWIEENVGAFGGDPKRVTIFGSGAGASCVSLLTLSHYSEGLFQKAIIQSGTALSSWAVNYQPAKYTRILADKVGCNMLDTTDMVECLKNKNYKELIQQTITPATYHIAFGPVIDGDVIPDDPQILMEQGEFLNYDIMLGVNQGEGLKFVDGIVDNEDGVTPNDFDFSVSNFVDNLYGYPEGKDTLRETIKFMYTDWADKENPETRRKTLVALFTDHQWVAPAVATADLHAQYGSPTYFYAFYHHCQSEMKPSWADSAHGDEVPYVFGIPMIGPTELFSCNFSKNDVMLSAVVMTYWTNFAKTGDPNQPVPQDTKFIHTKPNRFEEVAWSKYNPKDQLYLHIGLKPRVRDHYRATKVAFWLELVPHLHNLNEIFQYVSTTTKVPPPDMTSFPYGTRRSPAKIWPTTKRPAITPANNPKHSKDPHKTGPEDTTVLIETKRDYSTELSVTIAVGASLLFLNILAFAALYYKKDKRRHETHRHPSPQRNTTNDITHIQNEEIMSLQMKQLEHDHECESLQAHDTLRLTCPPDYTLTLRRSPDDIPFMTPNTITMIPNTLMGMQPLHTFKTFSGGQNSTNLPHGHSTTRV

SEQ ID NO: 55466 - protein, 607 aa, Homo sapiens
MIARCLLAVRSLRRVGGSRILLRMTLGREVMSPLQAMSSYTVAGRNVLRWDLSPEQIKTRTEELIVQTKQVYDAVGMLGIEEVTYENCLQALADVEVKYIVERTMLDFPQHVSSDKEVRAASTEADKRLSRFDIEMSMRGDIFERIVHLQETCDLGKIKPEARRYLEKSIKMGKRNGLHLPEQVQNEIKSMKKRMSELCIDFNKNLNEDDTFLVFSKAELGALPDDFIDSLEKTDDDKYKITLKYPHYFPVMKKCCIPETRRRMEMAFNTRCKEENTIILQQLLPLRTKVAKLLGYSTHADFVLEMNTAKSTSRVTAFLDDLSQKLKPLGEAEREFILNLKKKECKDRGFEYDGKINAWDLYYYMTQTEELKYSIDQEFLKEYFPIEVVTEGLLNTYQELLGLSFEQMTDAHVWNKSVTLYTVKDKATGEVLGQFYLDLYPREGKYNHAACFGLQPGCLLPDGSRMMAVAALVVNFSQPVAGRPSLLRHDEVRTYFHEFGHVMHQICAQTDFARFSGTNVETDFVEVPSQMLENWVWDVDSLRRLSKHYKDGSPIADDLLEKLVASRLVNTGLLTLRQIVLSKVDQSLHTNTSLDAASNMPNTAQKY

SEQ ID NO: 55467 - protein, 704 aa, Homo sapiens
MIARCLLAVRSLRRVGGSRILLRMTLGREVMSPLQAMSSYTVAGRNVLRWDLSPEQIKTRTEELIVQTKQVYDAVGMLGIEEVTYENCLQALADVEVKYIVERTMLDFPQHVSSDKEVRAASTEADKRLSRFDIEMSMRGDIFERIVHLQETCDLGKIKPEARRYLEKSIKMGKRNGLHLPEQVQNEIKSMKKRMSELCIDFNKNLNEDDTFLVFSKAELGALPDDFIDSLEKTDDDKYKITLKYPHYFPVMKKCCIPETRRRMEMAFNTRCKEENTIILQQLLPLRTKVAKLLGYSTHADFVLEMNTAKSTSRVTAFLDDLSQKLKPLGEAEREFILNLKKKECKDRGFEYDGKINAWDLYYYMTQTEELKYSIDQEFLKEYFPIEVVTEGLLNTYQELLGLSFEQMTDAHVWNKSVTLYTVKDKATGEVLGQFYLDLYPREGKYNHAACFGLQPGCLLPDGSRMMAVAALVVNFSQPVAGRPSLLRHDEVRTYFHEFGHVMHQICAQTDFARFSGTNVETDFVEVPSQMLENWVWDVDSLRRLSKHYKDGSPIADDLLEKLVASRLVNTGLLTLRQIVLSKVDQSLHTNTSLDAASEYAKYCSEILGVAATPGTNMPATFGHLAGGYDGQYYGYLWSEVFSMDMFYSCFKKEGIMNPEVGMKYRNLILKPGGSLDGMDMLHNFLKREPNQKAFLMSRGLHAP

SEQ ID NO: 55468 - protein, 600 aa, Homo sapiens
MLDFPQHVSSDKEVRAASTEADKRLSRFDIEMSMRGDIFERIVHLQETCDLGKIKPEARRYLEKSIKMGKRNGLHLPEQVQNEIKSMKKRMSELCIDFNKNLNEDDTFLVFSKAELGALPDDFIDSLEKTDDDKYKITLKYPHYFPVMKKCCIPETRRRMEMAFNTRCKEENTIILQQLLPLRTKVAKLLGYSTHADFVLEMNTAKSTSRVTAFLDDLSQKLKPLGEAEREFILNLKKKECKDRGFEYDGKINAWDLYYYMTQTEELKYSIDQEFLKEYFPIEVVTEGLLNTYQELLGLSFEQMTDAHVWNKSVTLYTVKDKATGEVLGQFYLDLYPREGKYNHAACFGLQPGCLLPDGSRMMAVAALVVNFSQPVAGRPSLLRHDEVRTYFHEFGHVMHQICAQTDFARFSGTNVETDFVEVPSQMLENWVWDVDSLRRLSKHYKDGSPIADDLLEKLVASRLVNTGLLTLRQIVLSKVDQSLHTNTSLDAASEYAKYCSEILGVAATPGTNMPATFGHLAGGYDGQYYGYLWSEVFSMDMFYSCFKKEGIMNPEVGMKYRNLILKPGGSLDGMDMLHNFLKREPNQKAFLMSRGLHAP

SEQ ID NO: 55469 - protein, 121 aa, Homo sapiens
MARRAGGARMFGSLLLFALLAAGVAPLSWDLPEPRSRASKIRVHSRGNLWATGHFMGKKSLEPSSPSPLGTAPHTSLRDQRLQLSHDLLGILLLKKALGVSLSRPAPQIQYRRLLVQILQK

SEQ ID NO: 55470 - protein, 154 aa, Homo sapiens
MARRAGGARMFGSLLLFALLAAGVAPLSWDLPEPRSRASKIRVHSRGNLWATGHFMGKKSLEPSSPSPLGTAPHTSLRDQRLQLSHDLLGILLLKKALGVSLSRPAPQIQEAAGTNTAEMTPIMGQTQQRGLDCAHPGKVLNGTLLMAPSGCKS

SEQ ID NO: 55471 - protein, 390 aa, Homo sapiens
MPSKSLSNLSVTTGANESGSVPEGWERDFLPASDGTTTELVIRCVIPSLYLLIITVGLLGNIMLVKIFITNSAMRSVPNIFISNLAAGDLLLLLTCVPVDASRYFFDEWMFGKVGCKLIPVIQLTSVGVSVFTLTALSADRYRAIVNPMDMQTSGALLRTCVKAMGIWVVSVLLAVPEAVFSEVARISSLDNSSFTACIPYPQTDELHPKIHSVLIFLVYFLIPLAIISIYYYHIAKTLIKSAHNLPGEYNEHTKKQMETRKRLAKIVLVFVGCFIFCWFPNHILYMYRSFNYNEIDPSLGHMIVTLVARVLSFGNSCVNPFALYLLSESFRRHFNSQLCCGRKSYQERGTSYLLSSSAVRMTSLKSNAKNMVTNSVLLNGHSMKQEMAL

SEQ ID NO: 55472 - protein, 426 aa, Homo sapiens
MTPLCLNCSVLPGDLYPGGARNPMACNGSAARGHFDPEDLNLTDEALRLKYLGPQQTELFMPICATYLLIFVVGAVGNGLTCLVILRHKAMRTPTNYYLFSLAVSDLLVLLVGLPLELYEMWHNYPFLLGVGGCYFRTLLFEMVCLASVLNVTALSVERYVAVVHPLQARSMVTRAHVRRVLGAVWGLAMLCSLPNTSLHGIRQLHVPCRGPVPDSAVCMLVRPRALYNMVVQTTALLFFCLPMAIMSVLYLLIGLRLRRERLLLMQEAKGRGSAAARSRYTCRLQQHDRGRRQVTKMLFVLVVVFGICWAPFHADRVMWSVVSQWTDGLHLAFQHVHVISGIFFYLGSAANPVLYSLMSSRFRETFQEALCLGACCHRLRPRHSSHSLSRMTTGSTLCDVGSLGSWVHPLAGNDGPEAQQETDPS

SEQ ID NO: 55473 - protein, 415 aa, Homo sapiens
MSGMEKLQNASWIYQQKLEDPFQKHLNSTEEYLAFLCGPRRSHFFLPVSVVYVPIFVVGVIGNVLVCLVILQHQAMKTPTNYYLFSLAVSDLLVLLLGMPLEVYEMWRNYPFLFGPVGCYFKTALFETVCFASILSITTVSVERYVAILHPFRAKLQSTRRRALRILGIVWGFSVLFSLPNTSIHGIKFHYFPNGSLVPGSATCTVIKPMWIYNFIIQVTSFLFYLLPMTVISVLYYLMALRLKKDKSLEADEGNANIQRPCRKSVNKMLFVLVLVFAICWAPFHIDRLFFSFVEEWSESLAAVFNLVHVVSGVFFYLSSAVNPIIYNLLSRRFQAAFQNVISSFHKQWHSQHDPQLPPAQRNIFLTECHFVELTEDIGPQFPCQSSMHNSHLPAALSSEQMSRTNYQSFHFNKT

SEQ ID NO: 55474 - protein, 1874 aa, Homo sapiens
MLGSSVKSVQPEVELSSGGGDEGADEPRGAGRKAAAADGRGMLPKRAKAPGGGGGMAKASAAELKVFKSGSVDSRVPGGPPASNLRKQKSLTNLSFLTDSEKKLQLYEPEWSDDMAKAPKGLGKVGSKGREAPLMSKTLSKSEHSLFQAKGSPAGGAKTPLAPLAPNLGKPSRIPRGPYAEVKPLSKAPEAAVSEDGKSDDELLSSKAKAQKSSGPVPSAKGQEERAFLKVDPELVVTVLGDLEQLLFSQMLDPESQRKRTVQNVLDLRQNLEETMSSLRGSQVTHSSLEMTCYDSDDANPRSVSSLSNRSSPLSWRYGQSSPRLQAGDAPSVGGSCRSEGTPAWYMHGERAHYSHTMPMRSPSKLSHISRLELVESLDSDEVDLKSGYMSDSDLMGKTMTEDDDITTGWDESSSISSGLSDASDNLSSEEFNASSSLNSLPSTPTASRRNSTIVLRTDSEKRSLAESGLSWFSESEEKAPKKLEYDSGSLKMEPGTSKWRRERPESCDDSSKGGELKKPISLGHPGSLKKGKTPPVAVTSPITHTAQSALKVAGKPEGKATDKGKLAVKNTGLQRSSSDAGRDRLSDAKKPPSGIARPSTSGSFGYKKPPPATGTATVMQTGGSATLSKIQKSSGIPVKPVNGRKTSLDVSNSAEPGFLAPGARSNIQYRSLPRPAKSSSMSVTGGRGGPRPVSSSIDPSLLSTKQGGLTPSRLKEPTKVASGRTTPAPVNQTDREKEKAKAKAVALDSDNISLKSIGSPESTPKNQASHPTATKLAELPPTPLRATAKSFVKPPSLANLDKVNSNSLDLPSSSDTTHASKVPDLHATSSASGGPLPSCFTPSPAPILNINSASFSQGLELMSGFSVPKETRMYPKLSGLHRSMESLQMPMSLPSAFPSSTPVPTPPAPPAAPTEEETEELTWSGSPRAGQLDSNQRDRNTLPKKGLRYQLQSQEETKERRHSHTIGGLPESDDQSELPSPPALPMSLSAKGQLTNIVSPTAATTPRITRSNSIPTHEAAFELYSGSQMGSTLSLAERPKGMIRSGSFRDPTDDVHGSVLSLASSASSTYSSAEERMQSEQIRKLRRELESSQEKVATLTSQLSANANLVAAFEQSLVNMTSRLRHLAETAEEKDTELLDLRETIDFLKKKNSEAQAVIQGALNASETTPKELRIKRQNSSDSISSLNSITSHSSIGSSKDADAKKKKKKSWLRSSFNKAFSIKKGPKSASSYSDIEEIATPDSSAPSSPKLQHGSTETASPSIKSSTSSSVGTDVTEGPAHPAPHTRLFHANEEEEPEKKEVSELRSELWEKEMKLTDIRLEALNSAHQLDQLRETMHNMQLEVDLLKAENDRLKVAPGPSSGSTPGQVPGSSALSSPRRSLGLALTHSFGPSLADTDLSPMDGISTCGPKEEVTLRVVVRMPPQHIIKGDLKQQEFFLGCSKVSGKVDWKMLDEAVFQVFKDYISKMDPASTLGLSTESIHGYSISHVKRVLDAEPPEMPPCRRGVNNISVSLKGLKEKCVDSLVFETLIPKPMMQHYISLLLKHRRLVLSGPSGTGKTYLTNRLAEYLVERSGREVTEGIVSTFNMHQQSCKDLQLYLSNLANQIDRETGIGDVPLVILLDDLSEAGSISELVNGALTCKYHKCPYIIGTTNQPVKMTPNHGLHLSFRMLTFSNNVEPANGFLVRYLRRKLVESDSDINANKEELLRVLDWVPKLWYHLHTFLEKHSTSDFLIGPCFFLSCPIGIEDFRTWFIDLWNNSIIPYLQEGAKDGIKVHGQKAAWEDPVEWVRDTLPWPSAQQDQSKLYHLPPPTVGPHSIASPPEDRTVKDSTPSSLDSDPLMAMLLKLQEAANYIESPDRETILDPNLQATL

SEQ ID NO: 55475 - protein, 1877 aa, Homo sapiens
MLGSSVKSVQPEVELSSGGGDEGADEPRGAGRKAAAADGRGMLPKRAKAPGGGGGMAKASAAELKVFKSGSVDSRVPGGPPASNLRKQKSLTNLSFLTDSEKKLQLYEPEWSDDMAKAPKGLGKVGSKGREAPLMSKTLSKSEHSLFQAKGSPAGGAKTPLAPLAPNLGKPSRIPRGPYAEVKPLSKAPEAAVSEDGKSDDELLSSKAKAQKSSGPVPSAKGQEERAFLKVDPELVVTVLGDLEQLLFSQMLDPESQRKRTVQNVLDLRQNLEETMSSLRGSQVTHSSLEMTCYDSDDANPRSVSSLSNRSSPLSWRYGQSSPRLQAGDAPSVGGSCRSEGTPAWYMHGERAHYSHTMPMRSPSKLSHISRLELVESLDSDEVDLKSGYMSDSDLMGKTMTEDDDITTGWDESSSISSGLSDASDNLSSEEFNASSSLNSLPSTPTASRRNSTIVLRTDSEKRSLAESGLSWFSESEEKAPKKLEYDSGSLKMEPGTSKWRRERPESCDDSSKGGELKKPISLGHPGSLKKGKTPPVAVTSPITHTAQSALKVAGKPEGKATDKGKLAVKNTGLQRSSSDAGRDRLSDAKKPPSGIARPSTSGSFGYKKPPPATGTATVMQTGGSATLSKIQKSSGIPVKPVNGRKTSLDVSNSAEPGFLAPGARSNIQYRSLPRPAKSSSMSVTGGRGGPRPVSSSIDPSLLSTKQGGLTPSRLKEPTKVASGRTTPAPVNQTDREKEKAKAKAVALDSDNISLKSIGSPESTPKNQASHPTATKLAELPPTPLRATAKSFVKPPSLANLDKVNSNSLDLPSSSDTTHASKVPDLHATSSASGGPLPSCFTPSPAPILNINSASFSQGLELMSGFSVPKETRMYPKLSGLHRSMESLQMPMSLPSAFPSSTPVPTPPAPPAAPTEEETEELTWSGSPRAGQLDSNQRDRNTLPKKGLRYQLQSQEETKERRHSHTIGGLPESDDQSELPSPPALPMSLSAKGQLTNIVSPTAATTPRITRSNSIPTHEAAFELYSGSQMGSTLSLAERPKGMIRSGSFRDPTDDVHGSVLSLASSASSTYSSAEERMQSEQIRKLRRELESSQEKVATLTSQLSANANLVAAFEQSLVNMTSRLRHLAETAEEKDTELLDLRETIDFLKKKNSEAQAVIQGALNASETTPKELRIKRQNSSDSISSLNSITSHSSIGSSKDADAKKKKKKSWVYELRSSFNKAFSIKKGPKSASSYSDIEEIATPDSSAPSSPKLQHGSTETASPSIKSSTSSSVGTDVTEGPAHPAPHTRLFHANEEEEPEKKEVSELRSELWEKEMKLTDIRLEALNSAHQLDQLRETMHNMQLEVDLLKAENDRLKVAPGPSSGSTPGQVPGSSALSSPRRSLGLALTHSFGPSLADTDLSPMDGISTCGPKEEVTLRVVVRMPPQHIIKGDLKQQEFFLGCSKVSGKVDWKMLDEAVFQVFKDYISKMDPASTLGLSTESIHGYSISHVKRVLDAEPPEMPPCRRGVNNISVSLKGLKEKCVDSLVFETLIPKPMMQHYISLLLKHRRLVLSGPSGTGKTYLTNRLAEYLVERSGREVTEGIVSTFNMHQQSCKDLQLYLSNLANQIDRETGIGDVPLVILLDDLSEAGSISELVNGALTCKYHKCPYIIGTTNQPVKMTPNHGLHLSFRMLTFSNNVEPANGFLVRYLRRKLVESDSDINANKEELLRVLDWVPKLWYHLHTFLEKHSTSDFLIGPCFFLSCPIGIEDFRTWFIDLWNNSIIPYLQEGAKDGIKVHGQKAAWEDPVEWVRDTLPWPSAQQDQSKLYHLPPPTVGPHSIASPPEDRTVKDSTPSSLDSDPLMAMLLKLQEAANYIESPDRETILDPNLQATL

SEQ ID NO: 55476 - protein, 1869 aa, Homo sapiens
MLGSSVKSVQPEVELSSGGGDEGADEPRGAGRKAAAADGRGMLPKRAKAPGGGGGMAKASAAELKVFKSGSVDSRVPGGPPASNLRKQKSLTNLSFLTDSEKKLQLYEPEWSDDMAKAPKGLGKVGSKGREAPLMSKTLSKSEHSLFQAKGSPAGGAKTPLAPLAPNLGKPSRIPRGPYAEVKPLSKAPEAAVSEDGKSDDELLSSKAKAQKSSGPVPSAKGQEERAFLKVDPELVVTVLGDLEQLLFSQMLDPESQRKRTVQNVLDLRQNLEETMSSLRGSQVTHSSLEMTCYDSDDANPRSVSSLSNRSSPLSWRYGQSSPRLQAGDAPSVGGSCRSEGTPAWYMHGERAHYSHTMPMRSPSKLSHISRLELVESLDSDEVDLKSGYMSDSDLMGKTMTEDDDITTGWDESSSISSGLSDASDNLSSEEFNASSSLNSLPSTPTASRRNSTIVLRTDSEKRSLAESGLSWFSESEEKAPKKLEYDSGSLKMEPGTSKWRRERPESCDDSSKGGELKKPISLGHPGSLKKGKTPPVAVTSPITHTAQSALKVAGKPEGKATDKGKLAVKNTGLQRSSSDAGRDRLSDAKKPPSGIARPSTSGSFGYKKPPPATGTATVMQTGGSATLSKIQKSSGIPVKPVNGRKTSLDVSNSAEPGFLAPGARSNIQYRSLPRPAKSSSMSVTGGRGGPRPVSSSIDPSLLSTKQGGLTPSRLKEPTKVASGRTTPAPVNQTDREKEKAKAKAVALDSDNISLKSIGSPESTPKNQASHPTATKLAELPPTPLRATAKSFVKPPSLANLDKVNSNSLDLPSSSDTTHASKVPDLHATSSASGGPLPSCFTPSPAPILNINSASFSQGLELMSGFSVPKETRMYPKLSGLHRSMESLQMPMSLPSAFPSSTPVPTPPAPPAAPTEEETEELTWSGSPRAGQLDSNQRDRNTLPKKGLRYQLQSQEETKERRHSHTIGGLPESDDQSELPSPPALPMSLSAKGQLTNIVSPTAATTPRITRSNSIPTHEAAFELYSGSQMGSTLSLAERPKGMIRSGSFRDPTDDVHGSVLSLASSASSTYSSQIRKLRRELESSQEKVATLTSQLSANANLVAAFEQSLVNMTSRLRHLAETAEEKDTELLDLRETIDFLKKKNSEAQAVIQGALNASETTPKELRIKRQNSSDSISSLNSITSHSSIGSSKDADAKKKKKKSWVYELRSSFNKAFSIKKGPKSASSYSDIEEIATPDSSAPSSPKLQHGSTETASPSIKSSTSSSVGTDVTEGPAHPAPHTRLFHANEEEEPEKKEVSELRSELWEKEMKLTDIRLEALNSAHQLDQLRETMHNMQLEVDLLKAENDRLKVAPGPSSGSTPGQVPGSSALSSPRRSLGLALTHSFGPSLADTDLSPMDGISTCGPKEEVTLRVVVRMPPQHIIKGDLKQQEFFLGCSKVSGKVDWKMLDEAVFQVFKDYISKMDPASTLGLSTESIHGYSISHVKRVLDAEPPEMPPCRRGVNNISVSLKGLKEKCVDSLVFETLIPKPMMQHYISLLLKHRRLVLSGPSGTGKTYLTNRLAEYLVERSGREVTEGIVSTFNMHQQSCKDLQLYLSNLANQIDRETGIGDVPLVILLDDLSEAGSISELVNGALTCKYHKCPYIIGTTNQPVKMTPNHGLHLSFRMLTFSNNVEPANGFLVRYLRRKLVESDSDINANKEELLRVLDWVPKLWYHLHTFLEKHSTSDFLIGPCFFLSCPIGIEDFRTWFIDLWNNSIIPYLQEGAKDGIKVHGQKAAWEDPVEWVRDTLPWPSAQQDQSKLYHLPPPTVGPHSIASPPEDRTVKDSTPSSLDSDPLMAMLLKLQEAANYIESPDRETILDPNLQATL

SEQ ID NO: 55477 - protein, 1817 aa, Homo sapiens
MLGSSVKSVQPEVELSSGGGDEGADEPRGAGRKAAAADGRGMLPKRAKAPGGGGGMAKASAAELKVFKSGSVDSRVPGGPPASNLRKQKSLTNLSFLTDSEKKLQLYEPEWSDDMAKAPKGLGKVGSKGREAPLMSKTLSKSEHSLFQAKGSPAGGAKTPLAPLAPNLGKPSRIPRGPYAEVKPLSKAPEAAVSEDGKSDDELLSSKAKAQKSSGPVPSAKGQEERAFLKVDPELVVTVLGDLEQLLFSQMLDPESQRKRTVQNVLDLRQNLEETMSSLRGSQVTHSSLEMTCYDSDDANPRSVSSLSNRSSPLSWRYGQSSPRLQAGDAPSVGGSCRSEGTPAWYMHGERAHYSHTMPMRSPSKLSHISRLELVESLDSDEVDLKSGYMSDSDLMGKTMTEDDDITTGWDESSSISSGLSDASDNLSSEEFNASSSLNSLPSTPTASRRNSTIVLRTDSEKRSLAESGLSWFSESEEKAPKKLEYDSGSLKMEPGTSKWRRERPESCDDSSKGGELKKPISLGHPGSLKKGKTPPVAVTSPITHTAQSALKVAGKPEGKATDKGKLAVKNTGLQRSSSDAGRDRLSDAKKPPSGIARPSTSGSFGYKKPPPATGTATVMQTGGSATLSKIQKSSGIPVKPVNGRKTSLDVSNSAEPGFLAPGARSNIQYRSLPRPAKSSSMSVTGGRGGPRPVSSSIDPSLLSTKQGGLTPSRLKEPTKVASGRTTPAPVNQTDREKEKAKAKAVALDSDNISLKSIGSPESTPKNQASHPTATKLAELPPTPLRATAKSFVKPPSLANLDKVNSNSLDLPSSSDTTHASKVPDLHATSSASGGPLPSCFTPSPAPILNINSASFSQGLELMSGFSVPKETRMYPKLSGLHRSMESLQMPMSLPSAFPSSTPVPTPPAPPAAPTEEETEELTWSGSPRAGQLDSNQRDRNTLPKKGLRYQLQSQEETKERRHSHTIGGLPESDDQSELPSPPALPMSLSAKGQLTNIVHGSVLSLASSASSTYSSAEERMQSEQIRKLRRELESSQEKVATLTSQLSANANLVAAFEQSLVNMTSRLRHLAETAEEKDTELLDLRETIDFLKKKNSEAQAVIQGALNASETTPKELRIKRQNSSDSISSLNSITSHSSIGSSKDADAKKKKKKSWLRSSFNKAFSIKKGPKSASSYSDIEEIATPDSSAPSSPKLQHGSTETASPSIKSSTSSSVGTDVTEGPAHPAPHTRLFHANEEEEPEKKEVSELRSELWEKEMKLTDIRLEALNSAHQLDQLRETMHNMQLEVDLLKAENDRLKVAPGPSSGSTPGQVPGSSALSSPRRSLGLALTHSFGPSLADTDLSPMDGISTCGPKEEVTLRVVVRMPPQHIIKGDLKQQEFFLGCSKVSGKVDWKMLDEAVFQVFKDYISKMDPASTLGLSTESIHGYSISHVKRVLDAEPPEMPPCRRGVNNISVSLKGLKEKCVDSLVFETLIPKPMMQHYISLLLKHRRLVLSGPSGTGKTYLTNRLAEYLVERSGREVTEGIVSTFNMHQQSCKDLQLYLSNLANQIDRETGIGDVPLVILLDDLSEAGSISELVNGALTCKYHKCPYIIGTTNQPVKMTPNHGLHLSFRMLTFSNNVEPANGFLVRYLRRKLVESDSDINANKEELLRVLDWVPKLWYHLHTFLEKHSTSDFLIGPCFFLSCPIGIEDFRTWFIDLWNNSIIPYLQEGAKDGIKVHGQKAAWEDPVEWVRDTLPWPSAQQDQSKLYHLPPPTVGPHSIASPPEDRTVKDSTPSSLDSDPLMAMLLKLQEAANYIESPDRETILDPNLQATL

SEQ ID NO: 55478 - protein, 260 aa, Homo sapiens
MHQQSCKDLQLYLSNLANQIDRETGIGDVPLVILLDDLSEAGSISELVNGALTCKYHKCPYIIGTTNQPVKMTPNHGLHLSFSRMLTFSNNVEPANGFLVRYLRRKLVESDSDINANKEELLRVLDWVPKLWYHLHTFLEKHSTSDFLIGSPCFFLSCPIGIEDFRTWFIDLWNNSIIPYLQEGAKDGIKVHGQKAAWEDPVEWVRDTLPWPSAQQDDSTPSSLDSDPLMAMLLKLQEAANYIESPDRETILDPNLQATL

SEQ ID NO: 55479 - protein, 730 aa, Homo sapiens
MEPGTSKWRRERPESCDDSSKGGELKKPISLGHPGSLKKGKTPPVAVTSPITHTAQSALKVAGKPEGKATDKGKLAVKNTGLQRSSSDAGRDRLSDAKKPPSGIARPSTSGSFGYKKPPPATGTATVMQTGGSATLSKIQKSSGIPVKPVNGRKTSLDVSNSAEPGFLAPGARSNIQYRSLPRPAKSSSMSVTGGRGGPRPVSSSIDPSLLSTKQGGLTPSRLKEPTKVASGRTTPAPVNQTDREKEKAKAKAVALDSDNISLKSIGSPESTPKNQASHPTATKLAELPPTPLRATAKSFVKPPSLANLDKVNSNSLDLPSSSDTTHASKVPDLHATSSASGGPLPSCFTPSPAPILNINSASFSQGLELMSGFSVPKETRMYPKLSGLHRSMESLQMPMSLPSAFPSSTPVPTPPAPPAAPTEEETEELTWSGSPRAGQLDSNQRDRNTLPKKGLRYQLQSQEETKERRHSHTIGGLPESDDQSELPSPPALPMSLSAKGQLTNIVSPTAATTPRITRSNSIPTHEAAFELYSGSQMGSTLSLAERPKGMIRSGSFRDPTDDVHGSVLSLASSASSTYSSQIRKLRRELESSQEKVATLTSQLSANANLVAAFEQSLVNMTSRLRHLAETAEEKMEFRSCHPGWSALARSWLTANSASQDTELLDLRETIDFLKKKNSEAQAVIQGALNASETTPKELRIKRQNSSDSISSLNSITSHSSIGSSKDADA

SEQ ID NO: 55480 - protein, 1483 aa, Homo sapiens
MLHLPLPRSGRTVNFPRSWDESSSISSGLSDASDNLSSEEFNASSSLNSLPSTPTASRRNSTIVLRTDSEKRSLAESGLSWFSESEEKAPKKLEYDSGSLKMEPGTSKWRRERPESCDDSSKGGELKKPISLGHPGSLKKGKTPPVAVTSPITHTAQSALKVAGKPEGKATDKGKLAVKNTGLQRSSSDAGRDRLSDAKKPPSGIARPSTSGSFGYKKPPPATGTATVMQTGGSATLSKIQKSSGIPVKPVNGRKTSLDVSNSAEPGFLAPGARSNIQYRSLPRPAKSSSMSVTGGRGGPRPVSSSIDPSLLSTKQGGLTPSRLKEPTKVASGRTTPAPVNQTDREKEKAKAKAVALDSDNISLKSIGSPESTPKNQASHPTATKLAELPPTPLRATAKSFVKPPSLANLDKVNSNSLDLPSSSDTTHASKVPDLHATSSASGGPLPSCFTPSPAPILNINSASFSQGLELMSGFSVPKETRMYPKLSGLHRSMESLQMPMSLPSAFPSSTPVPTPPAPPAAPTEEETEELTWSGSPRAGQLDSNQRDRNTLPKKGLRYQLQSQEETKERRHSHTIGGLPESDDQSELPSPPALPMSLSAKGQLTNIVSPTAATTPRITRSNSIPTHEAAFELYSGSQMGSTLSLAERPKGMIRSGSFRDPTDDVHGSVLSLASSASSTYSSAEERMQSEQIRKLRRELESSQEKVATLTSQLSANANLVAAFEQSLVNMTSRLRHLAETAEEKDTELLDLRETIDFLKKKNSEAQAVIQGALNASETTPKELRIKRQNSSDSISSLNSITSHSSIGSSKDADAKKKKKKSWLRSSFNKAFSIKKGPKSASSYSDIEEIATPDSSAPSSPKLQHGSTETASPSIKSSTSSSVGTDVTEGPAHPAPHTRLFHANEEEEPEKKEVSELRSELWEKEMKLTDIRLEALNSAHQLDQLRETMHNMQLEVDLLKAENDRLKVAPGPSSGSTPGQVPGSSALSSPRRSLGLALTHSFGPSLADTDLSPMDGISTCGPKEEVTLRVVVRMPPQHIIKGDLKQQEFFLGCSKVSGKVDWKMLDEAVFQVFKDYISKMDPASTLGLSTESIHGYSISHVKRVLDAEPPEMPPCRRGVNNISVSLKGLKEKCVDSLVFETLIPKPMMQHYISLLLKHRRLVLSGPSGTGKTYLTNRLAEYLVERSGREVTEGIVSTFNMHQQSCKDLQLYLSNLANQIDRETGIGDVPLVILLDDLSEAGSISELVNGALTCKYHKCPYIIGTTNQPVKMTPNHGLHLSFRMLTFSNNVEPANGFLVRYLRRKLVESDSDINANKEELLRVLDWVPKLWYHLHTFLEKHSTSDFLIGPCFFLSCPIGIEDFRTWFIDLWNNSIIPYLQEGAKDGIKVHGQKAAWEDPVEWVRDTLPWPSAQQDQSKLYHLPPPTVGPHSIASPPEDRTVKDSTPSSLDSDPLMAMLLKLQEAANYIESPDRETILDPNLQATL

SEQ ID NO: 55481 - protein, 1493 aa, Homo sapiens
MLWPRNLTSWDDSSSVSSGISDTIDNLSTDDINTSSSISSYANTPASSRKNLDVQTDAEKHSQVERNSLWSGDDVKKSDGGSDSGIKMEPGSKWRRNPSDVSDESDKSTSGKKNPVISQTGSWRRGMTAQVGITMPRTKPSAPAGALKTPGTGKTDDAKVSEKGRLSPKASQVKRSPSDAGRSSGDESKKPLPSSSRTPTANANSFGFKKQSGSAAGLAMITASGVTVTSRSATLGKIPKSSALVSRSAGRKSSMDGAQNQDDGYLALSSRTNLQYRSLPRPSKSNSRNGAGNRSSTSSIDSNISSKSAGLPVPKLREPSKTALGSSLPGLVNQTDKEKGISSDNESVASCNSVKVNPAAQPVSSPAQTSLQPGAKYPDVASPTLRRLFGGKPTKQVPIATAENMKNSVVISNPHATMTQQGNLDSPSGSGVLSSGSSSPLYSKNVDLNQSPLASSPSSAHSAPSNSLTWGTNASSSSAVSKDGLGFQSVSSLHTSCESIDISLSSGGVPSHNSSTGLIASSKDDSLTPFVRTNSVKTTLSESDPHLDRNTLPKKGLRYTPTSQLRTQEDAKEWLRSHSAGGLQDTAANSPFSSGSSVTSPSGTRFNFSQLASPTTVTQMSLSNPTMLRTHSLSNADGQYDPYTDSRFRNSSMSLDEKSRTMSRSGSFRDGFEEVHGSSLSLVSSTSSVYSTPEEKCQSEIRKLRRELDASQEKVSALTTQLTANAHLVAAFEQSLGNMTIRLQSLTMTAEQKDSELNELRKTIELLKKQNAAAQAAINGVINTPELNCKGNGTAQSADLRIRRQHSSDSVSSINSATSHSSVGSNIESDSKKKKRKNWLRSSFKQAFGKKKSPKSASSHSDIEEMTDSSLPSSPKLPHNGSTGSTPLLRNSHSNSLISECMDSEAETVMQLRNELRDKEMKLTDIRLEALSSAHQLDQLREAMNRMQSEIEKLKAENDRLKSESQGSGCSRAPSQVSISASPRQSMGLSQHSLNLTESTSLDMLLDDTGECSARKEGGRHVKIVVSFQEEMKWKEDSRPHLFLIGCIGVSGKTKWDVLDGVVRRLFKEYIIHVDPVSQLGLNSDSVLGYSIGEIKRSNTSETPELLPCGYLVGENTTISVTVKGLAENSLDSLVFESLIPKPILQRYVSLLIEHRRIILSGPSGTGKTYLANRLSEYIVLREGRELTDGVIATFNVDHKSSKELRQYLSNLADQCNSENNAVDMPLVIILDNLHHVSSLGEIFNGLLNCKYHKCPYIIGTMNQATSSTPNLQLHHNFRWVLCANHTEPVKGFLGRFLRRKLMETEISGRVRNMELVKIIDWIPKVWHHLNRFLEAHSSSDVTIGPRLFLSCPIDVDGSRVWFTDLWNYSIIPYLLEAVREGLQLYGRRAPWEDPAKWVMDTYPWAASPQQHEWPPLLQLRPEDVGFDGYSMPREGSTSKQMPPSDAEGDPLMNMLMRLQEAANYSSPQSYDSDSNSNSHHDDILDSSLESTL

SEQ ID NO: 55482 - protein, 2429 aa, Homo sapiens
MPAILVASKMKSGLPKPVHSAAPILHVPPARAGPQPCYLKLGSKVEVSKTTYPSQIPLKSQVLQGLQEPAGEGLPLRKSGSVENGFDTQIYTDWANHYLAKSGHKRLIRDLQQDVTDGVLLAQIIQVVANEKIEDINGCPKNRSQMIENIDACLNFLAAKGINIQGLSAEEIRNGNLKAILGLFFSLSRYKQQQQQPQKQHLSSPLPPAVSQVAGAPSQCQAGTPQQQVPVTPQAPCQPHQPAPHQQSKAQAEMQSRLPGPTARVSAAGSEAKTRGGSTTANNRRSQSFNNYDKSKPVTSPPPPPSSHEKEPLASSASSHPGMSDNAPASLESGSSSTPTNCSTSSAIPQPGAATKPWRSKSLSVKHSATVSMLSVKPPGPEAPRPTPEAMKPAPNNQKSMLEKLKLFNSKGGSKAGEGPGSRDTSCERLETLPSFEESEELEAASRMLTTVGPASSSPKIALKGIAQRTFSRALTNKKSSLKGNEKEKEKQQREKDKEKSKDLAKRASVTERLDLKEEPKEDPSGAAVPEMPKKSSKIASFIPKGGKLNSAKKEPMAPSHSGIPKPGMKSMPGKSPSAPAPSKEGERSRSGKLSSGLPQQKPQLDGRHSSSSSSLASSEGKGPGGTTLNHSISSQTVSGSVGTTQTTGSNTVSVQLPQPQQQYNHPNTATVAPFLYRSQTDTEGNVTAESSSTGVSVEPSHFTKTGQPALEELTGEDPEARRLRTVKNIADLRQNLEETMSSLRGTQVTHSTLETTFDTNVTTEMSGRSILSLTGRPTPLSWRLGQSSPRLQAGDAPSMGNGYPPRANASRFINTESGRYVYSAPLRRQLASRGSSVCHVDVSDKAGDEMDLEGISMDAPGYMSDGDVLSKNIRTDDITSGYMTDGGLGLYTRRLNRLPDGMAVVRETLQRNTSLGLGDADSWDDSSSVSSGISDTIDNLSTDDINTSSSISSYANTPASSRKNLDVQTDAEKHSQVERNSLWSGDDVKKSDGGSDSGIKMEPGSKWRRNPSDVSDESDKSTSGKKNPVISQTGSWRRGMTAQVGITMPRTKPSAPAGALKTPGTGKTDDAKVSEKGRLSPKASQVKRSPSDAGRSSGDESKKPLPSSSRTPTANANSFGFKKQSGSAAGLAMITASGVTVTSRSATLGKIPKSSALVSRSAGRKSSMDGAQNQDDGYLALSSRTNLQYRSLPRPSKSNSRNGAGNRSSTSSIDSNISSKSAGLPVPKLREPSKTALGSSLPGLVNQTDKEKGISSDNESVASCNSVKVNPAAQPVSSPAQTSLQPGAKYPDVASPTLRRLFGGKPTKQVPIATAENMKNSVVISNPHATMTQQGNLDSPSGSGVLSSGSSSPLYSKNVDLNQSPLASSPSSAHSAPSNSLTWGTNASSSSAVSKDGLGFQSVSSLHTSCESIDISLSSGGVPSHNSSTGLIASSKDDSLTPFVRTNSVKTTLSESPLSSPAASPKFCRSTLPRKQDSDPHLDRNTLPKKGLRYTPTSQLRTQEDAKEWLRSHSAGGLQDTAANSPFSSGSSVTSPSGTRFNFSQLASPTTVTQMSLSNPTMLRTHSLSNADGQYDPYTDSRFRNSSMSLDEKSRTMSRSGSFRDGFEEVHGSSLSLVSSTSSVYSTPEEKCQSEIRKLRRELDASQEKVSALTTQLTANAHLVAAFEQSLGNMTIRLQSLTMTAEQKDSELNELRKTIELLKKQNAAAQAAINGVINTPELNCKGNGTAQSADLRIRRQHSSDSVSSINSATSHSSVGSNIESDSKKKKRKNWLRSSFKQAFGKKKSPKSASSHSDIEEMTDSSLPSSPKLPHNGSTGSTPLLRNSHSNSLISECMDSEAETVMQLRNELRDKEMKLTDIRLEALSSAHQLDQLREAMNRMQSEIEKLKAENDRLKSESQGSGCSRAPSQVSISASPRQSMGLSQHSLNLTESTSLDMLLDDTGECSARKEGGRHVKIVVSFQEEMKWKEDSRPHLFLIGCIGVSGKTKWDVLDGVVRRLFKEYIIHVDPVSQLGLNSDSVLGYSIGEIKRSNTSETPELLPCGYLVGENTTISVTVKGLAENSLDSLVFESLIPKPILQRYVSLLIEHRRIILSGPSGTGKTYLANRLSEYIVLREGRELTDGVIATFNVDHKSSKELRQYLSNLADQCNSENNAVDMPLVIILDNLHHVSSLGEIFNGLLNCKYHKCPYIIGTMNQATSSTPNLQLHHNFRWVLCANHTEPVKGFLGRFLRRKLMETEISGRVRNMELVKIIDWIPKVWHHLNRFLEAHSSSDVTIGPRLFLSCPIDVDGSRVWFTDLWNYSIIPYLLEAVREGLQLYGRRAPWEDPAKWVMDTYPWAASPQQHEWPPLLQLRPEDVGFDGYSMPREGSTSKQMPPSDAEGDPLMNMLMRLQEAANYSSPQSYDSDSNSNSHHDDILDSSLESTL

SEQ ID NO: 55483 - protein, 2432 aa, Homo sapiens
MPAILVASKMKSGLPKPVHSAAPILHVPPARAGPQPCYLKLGSKVEVSKTTYPSQIPLKSQVLQGLQEPAGEGLPLRKSGSVENGFDTQIYTDWANHYLAKSGHKRLIRDLQQDVTDGVLLAQIIQVVANEKIEDINGCPKNRSQMIENIDACLNFLAAKGINIQGLSAEEIRNGNLKAILGLFFSLSRYKQQQQQPQKQHLSSPLPPAVSQVAGAPSQCQAGTPQQQVPVTPQAPCQPHQPAPHQQSKAQAEMQSRLPGPTARVSAAGSEAKTRGGSTTANNRRSQSFNNYDKSKPVTSPPPPPSSHEKEPLASSASSHPGMSDNAPASLESGSSSTPTNCSTSSAIPQPGAATKPWRSKSLSVKHSATVSMLSVKPPGPEAPRPTPEAMKPAPNNQKSMLEKLKLFNSKGGSKAGEGPGSRDTSCERLETLPSFEESEELEAASRMLTTVGPASSSPKIALKGIAQRTFSRALTNKKSSLKGNEKEKEKQQREKDKEKSKDLAKRASVTERLDLKEEPKEDPSGAAVPEMPKKSSKIASFIPKGGKLNSAKKEPMAPSHSGIPKPGMKSMPGKSPSAPAPSKEGERSRSGKLSSGLPQQKPQLDGRHSSSSSSLASSEGKGPGGTTLNHSISSQTVSGSVGTTQTTGSNTVSVQLPQPQQQYNHPNTATVAPFLYRSQTDTEGNVTAESSSTGVSVEPSHFTKTGQPALEELTGEDPEARRLRTVKNIADLRQNLEETMSSLRGTQVTHSTLETTFDTNVTTEMSGRSILSLTGRPTPLSWRLGQSSPRLQAGDAPSMGNGYPPRANASRFINTESGRYVYSAPLRRQLASRGSSVCHVDVSDKAGDEMDLEGISMDAPGYMSDGDVLSKNIRTDDITSGYMTDGGLGLYTRRLNRLPDGMAVVRETLQRNTSLGLGDADSWDDSSSVSSGISDTIDNLSTDDINTSSSISSYANTPASSRKNLDVQTDAEKHSQVERNSLWSGDDVKKSDGGSDSGIKMEPGSKWRRNPSDVSDESDKSTSGKKNPVISQTGSWRRGMTAQVGITMPRTKPSAPAGALKTPGTGKTDDAKVSEKGRLSPKASQVKRSPSDAGRSSGDESKKPLPSSSRTPTANANSFGFKKQSGSAAGLAMITASGVTVTSRSATLGKIPKSSALVSRSAGRKSSMDGAQNQDDGYLALSSRTNLQYRSLPRPSKSNSRNGAGNRSSTSSIDSNISSKSAGLPVPKLREPSKTALGSSLPGLVNQTDKEKGISSDNESVASCNSVKVNPAAQPVSSPAQTSLQPGAKYPDVASPTLRRLFGGKPTKQVPIATAENMKNSVVISNPHATMTQQGNLDSPSGSGVLSSGSSSPLYSKNVDLNQSPLASSPSSAHSAPSNSLTWGTNASSSSAVSKDGLGFQSVSSLHTSCESIDISLSSGGVPSHNSSTGLIASSKDDSLTPFVRTNSVKTTLSESPLSSPAASPKFCRSTLPRKQDSDPHLDRNTLPKKGLRYTPTSQLRTQEDAKEWLRSHSAGGLQDTAANSPFSSGSSVTSPSGTRFNFSQLASPTTVTQMSLSNPTMLRTHSLSNADGQYDPYTDSRFRNSSMSLDEKSRTMSRSGSFRDGFEEVHGSSLSLVSSTSSVYSTPEEKCQSEIRKLRRELDASQEKVSALTTQLTANAHLVAAFEQSLGNMTIRLQSLTMTAEQKDSELNELRKTIELLKKQNAAAQAAINGVINTPELNCKGNGTAQSADLRIRRQHSSDSVSSINSATSHSSVGSNIESDSKKKKRKNWVNELRSSFKQAFGKKKSPKSASSHSDIEEMTDSSLPSSPKLPHNGSTGSTPLLRNSHSNSLISECMDSEAETVMQLRNELRDKEMKLTDIRLEALSSAHQLDQLREAMNRMQSEIEKLKAENDRLKSESQGSGCSRAPSQVSISASPRQSMGLSQHSLNLTESTSLDMLLDDTGECSARKEGGRHVKIVVSFQEEMKWKEDSRPHLFLIGCIGVSGKTKWDVLDGVVRRLFKEYIIHVDPVSQLGLNSDSVLGYSIGEIKRSNTSETPELLPCGYLVGENTTISVTVKGLAENSLDSLVFESLIPKPILQRYVSLLIEHRRIILSGPSGTGKTYLANRLSEYIVLREGRELTDGVIATFNVDHKSSKELRQYLSNLADQCNSENNAVDMPLVIILDNLHHVSSLGEIFNGLLNCKYHKCPYIIGTMNQATSSTPNLQLHHNFRWVLCANHTEPVKGFLGRFLRRKLMETEISGRVRNMELVKIIDWIPKVWHHLNRFLEAHSSSDVTIGPRLFLSCPIDVDGSRVWFTDLWNYSIIPYLLEAVREGLQLYGRRAPWEDPAKWVMDTYPWAASPQQHEWPPLLQLRPEDVGFDGYSMPREGSTSKQMPPSDAEGDPLMNMLMRLQEAANYSSPQSYDSDSNSNSHHDDILDSSLESTL

SEQ ID NO: 55484 - protein, 2488 aa, Homo sapiens
MPAILVASKMKSGLPKPVHSAAPILHVPPARAGPQPCYLKLGSKVEVSKTTYPSQIPLKSQVLQGLQEPAGEGLPLRKSGSVENGFDTQIYTDWANHYLAKSGHKRLIRDLQQDVTDGVLLAQIIQVVANEKIEDINGCPKNRSQMIENIDACLNFLAAKGINIQGLSAEEIRNGNLKAILGLFFSLSRYKQQQQQPQKQHLSSPLPPAVSQVAGAPSQCQAGTPQQQVPVTPQAPCQPHQPAPHQQSKAQAEMQSSASSKDSSQSKIIRFTLGQKKISRLPGPTARVSAAGSEAKTRGGSTTANNRRSQSFNNYDKSKPVTSPPPPPSSHEKEPLASSASSHPGMSDNAPASLESGSSSTPTNCSTSSAIPQPGAATKPWRSKSLSVKHSATVSMLSVKPPGPEAPRPTPEAMKPAPNNQKSMLEKLKLFNSKGGSKAGEGPGSRDTSCERLETLPSFEESEELEAASRMLTTVGPASSSPKIALKGIAQRTFSRALTNKKSSLKGNEKEKEKQQREKDKEKSKDLAKRASVTERLDLKEEPKEDPSGAAVPEMPKKSSKIASFIPKGGKLNSAKKEPMAPSHSGIPKPGMKSMPGKSPSAPAPSKEGERSRSGKLSSGLPQQKPQLDGRHSSSSSSLASSEGKGPGGTTLNHSISSQTVSGSVGTTQTTGSNTVSVQLPQPQQQYNHPNTATVAPFLYRSQTDTEGNVTAESSSTGVSVEPSHFTKTGQPALEELTGEDPEARRLRTVKNIADLRQNLEETMSSLRGTQVTHSTLETTFDTNVTTEMSGRSILSLTGRPTPLSWRLGQSSPRLQAGDAPSMGNGYPPRANASRFINTESGRYVYSAPLRRQLASRGSSVCHVDVSDKAGDEMDLEGISMDAPGYMSDGDVLSKNIRTDDITSGYMTDGGLGLYTRRLNRLPDGMAVVRETLQRNTSLGLGDADSWDDSSSVSSGISDTIDNLSTDDINTSSSISSYANTPASSRKNLDVQTDAEKHSQVERNSLWSGDDVKKSDGGSDSGIKMEPGSKWRRNPSDVSDESDKSTSGKKNPVISQTGSWRRGMTAQVGITMPRTKPSAPAGALKTPGTGKTDDAKVSEKGRLSPKASQVKRSPSDAGRSSGDESKKPLPSSSRTPTANANSFGFKKQSGSAAGLAMITASGVTVTSRSATLGKIPKSSALVSRSAGRKSSMDGAQNQDDGYLALSSRTNLQYRSLPRPSKSNSRNGAGNRSSTSSIDSNISSKSAGLPVPKLREPSKTALGSSLPGLVNQTDKEKGISSDNESVASCNSVKVNPAAQPVSSPAQTSLQPGAKYPDVASPTLRRLFGGKPTKQVPIATAENMKNSVVISNPHATMTQQGNLDSPSGSGVLSSGSSSPLYSKNVDLNQSPLASSPSSAHSAPSNSLTWGTNASSSSAVSKDGLGFQSVSSLHTSCESIDISLSSGGVPSHNSSTGLIASSKDDSLTPFVRTNSVKTTLSESPLSSPAASPKFCRSTLPRKQDSDPHLDRNTLPKKGLRYTPTSQLRTQEDAKEWLRSHSAGGLQDTAANSPFSSGSSVTSPSGTRFNFSQLASPTTVTQMSLSNPTMLRTHSLSNADGQYDPYTDSRFRNSSMSLDEKSRTMSRSGSFRDGFEEESWEKSSVDNFVSRLHSSLHFSLPLFHHARYELVHGSSLSLVSSTSSVYSTPEEKCQSEIRKLRRELDASQEKVSALTTQLTANAHLVAAFEQSLGNMTIRLQSLTMTAEQKDSELNELRKTIELLKKQNAAAQAAINGVINTPELNCKGNGTAQSADLRIRRQHSSDSVSSINSATSHSSVGSNIESDSKKKKRKNWVNELRSSFKQAFGKKKSPKSASSHSDIEEMTDSSLPSSPKLPHNGSTGSTPLLRNSHSNSLISECMDSEAETVMQLRNELRDKEMKLTDIRLEALSSAHQLDQLREAMNRMQSEIEKLKAENDRLKSESQGSGCSRAPSQVSISASPRQSMGLSQHSLNLTESTSLDMLLDDTGECSARKEGGRHVKIVVSFQEEMKWKEDSRPHLFLIGCIGVSGKTKWDVLDGVVRRLFKEYIIHVDPVSQLGLNSDSVLGYSIGEIKRSNTSETPELLPCGYLVGENTTISVTVKGLAENSLDSLVFESLIPKPILQRYVSLLIEHRRIILSGPSGTGKTYLANRLSEYIVLREGRELTDGVIATFNVDHKSSKELRQYLSNLADQCNSENNAVDMPLVIILDNLHHVSSLGEIFNGLLNCKYHKCPYIIGTMNQATSSTPNLQLHHNFRWVLCANHTEPVKGFLGRFLRRKLMETEISGRVRNMELVKIIDWIPKVWHHLNRFLEAHSSSDVTIGPRLFLSCPIDVDGSRVWFTDLWNYSIIPYLLEAVREGLQLYGRRAPWEDPAKWVMDTYPWAASPQQHEWPPLLQLRPEDVGFDGYSMPREGSTSKQMPPSDAEGDPLMNMLMRLQEAANYSSPQSYDSDSNSNSHHDDILDSSLESTL

SEQ ID NO: 55485 - protein, 2417 aa, Homo sapiens
MSVMLWRWEQNNTTMKLQIYTDWANHYLAKSGHKRLIRDLQQDVTDGVLLAQIIQVVANEKIEDINGCPKNRSQMIENIDACLNFLAAKGINIQGLSAEEIRNGNLKAILGLFFSLSRYKQQQQQPQKQHLSSPLPPAVSQVAGAPSQCQAGTPQQQVPVTPQAPCQPHQPAPHQQSKAQAEMQSSASSKDSSQSKIIRFTLGQKKISRLPGPTARVSAAGSEAKTRGGSTTANNRRSQSFNNYDKSKPVTSPPPPPSSHEKEPLASSASSHPGMSDNAPASLESGSSSTPTNCSTSSAIPQPGAATKPWRSKSLSVKHSATVSMLSVKPPGPEAPRPTPEAMKPAPNNQKSMLEKLKLFNSKGGSKAGEGPGSRDTSCERLETLPSFEESEELEAASRMLTTVGPASSSPKIALKGIAQRTFSRALTNKKSSLKGNEKEKEKQQREKDKEKSKDLAKRASVTERLDLKEEPKEDPSGAAVPEMPKKSSKIASFIPKGGKLNSAKKEPMAPSHSGIPKPGMKSMPGKSPSAPAPSKEGERSRSGKLSSGLPQQKPQLDGRHSSSSSSLASSEGKGPGGTTLNHSISSQTVSGSVGTTQTTGSNTVSVQLPQPQQQYNHPNTATVAPFLYRSQTDTEGNVTAESSSTGVSVEPSHFTKTGQPALEELTGEDPEARRLRTVKNIADLRQNLEETMSSLRGTQVTHSTLETTFDTNVTTEMSGRSILSLTGRPTPLSWRLGQSSPRLQAGDAPSMGNGYPPRANASRFINTESGRYVYSAPLRRQLASRGSSVCHVDVSDKAGDEMDLEGISMDAPGYMSDGDVLSKNIRTDDITSGYMTDGGLGLYTRRLNRLPDGMAVVRETLQRNTSLGLGDADSWDDSSSVSSGISDTIDNLSTDDINTSSSISSYANTPASSRKNLDVQTDAEKHSQVERNSLWSGDDVKKSDGGSDSGIKMEPGSKWRRNPSDVSDESDKSTSGKKNPVISQTGSWRRGMTAQVGITMPRTKPSAPAGALKTPGTGKTDDAKVSEKGRLSPKASQVKRSPSDAGRSSGDESKKPLPSSSRTPTANANSFGFKKQSGSAAGLAMITASGVTVTSRSATLGKIPKSSALVSRSAGRKSSMDGAQNQDDGYLALSSRTNLQYRSLPRPSKSNSRNGAGNRSSTSSIDSNISSKSAGLPVPKLREPSKTALGSSLPGLVNQTDKEKGISSDNESVASCNSVKVNPAAQPVSSPAQTSLQPGAKYPDVASPTLRRLFGGKPTKQVPIATAENMKNSVVISNPHATMTQQGNLDSPSGSGVLSSGSSSPLYSKNVDLNQSPLASSPSSAHSAPSNSLTWGTNASSSSAVSKDGLGFQSVSSLHTSCESIDISLSSGGVPSHNSSTGLIASSKDDSLTPFVRTNSVKTTLSESPLSSPAASPKFCRSTLPRKQDSDPHLDRNTLPKKGLRYTPTSQLRTQEDAKEWLRSHSAGGLQDTAANSPFSSGSSVTSPSGTRFNFSQLASPTTVTQMSLSNPTMLRTHSLSNADGQYDPYTDSRFRNSSMSLDEKSRTMSRSGSFRDGFEEESWEKSSVDNFVSRLHSSLHFSLPLFHHARYELVHGSSLSLVSSTSSVYSTPEEKCQSEIRKLRRELDASQEKVSALTTQLTANAHLVAAFEQSLGNMTIRLQSLTMTAEQKDSELNELRKTIELLKKQNAAAQAAINGVINTPELNCKGNGTAQSADLRIRRQHSSDSVSSINSATSHSSVGSNIESDSKKKKRKNWVNELRSSFKQAFGKKKSPKSASSHSDIEEMTDSSLPSSPKLPHNGSTGSTPLLRNSHSNSLISECMDSEAETVMQLRNELRDKEMKLTDIRLEALSSAHQLDQLREAMNRMQSEIEKLKAENDRLKSESQGSGCSRAPSQVSISASPRQSMGLSQHSLNLTESTSLDMLLDDTGECSARKEGGRHVKIVVSFQEEMKWKEDSRPHLFLIGCIGVSGKTKWDVLDGVVRRLFKEYIIHVDPVSQLGLNSDSVLGYSIGEIKRSNTSETPELLPCGYLVGENTTISVTVKGLAENSLDSLVFESLIPKPILQRYVSLLIEHRRIILSGPSGTGKTYLANRLSEYIVLREGRELTDGVIATFNVDHKSSKELRQYLSNLADQCNSENNAVDMPLVIILDNLHHVSSLGEIFNGLLNCKYHKCPYIIGTMNQATSSTPNLQLHHNFRWVLCANHTEPVKGFLGRFLRRKLMETEISGRVRNMELVKIIDWIPKVWHHLNRFLEAHSSSDVTIGPRLFLSCPIDVDGSRVWFTDLWNYSIIPYLLEAVREGLQLYGRRAPWEDPAKWVMDTYPWAASPQQHEWPPLLQLRPEDVGFDGYSMPREGSTSKQMPPSDAEGDPLMNMLMRLQEAANYSSPQSYDSDSNSNSHHDDILDSSLESTL

SEQ ID NO: 55486 - protein, 1493 aa, Homo sapiens; identical to SEQ ID NO: 55481

SEQ ID NO: 55487 - protein, 816 aa, Homo sapiens
MLWPRNLTSWDDSSSVSSGISDTIDNLSTDDINTSSSISSYANTPASSRKNLDVQTDAEKHSQVERNSLWSGDDVKKSDGGSDSGIKMEPGSKWRRNPSDVSDESDKSTSGKKNPVISQTGSWRRGMTAQVGITMPRTKPSAPAGALKTPGTGKTDDAKVSEKGRLSPKASQVKRSPSDAGRSSGDESKKPLPSSSRTPTANANSFGFKKQSGSAAGLAMITASGVTVTSRSATLGKIPKSSALVSRSAGRKSSMDGAQNQDDGYLALSSRTNLQYRSLPRPSKSNSRNGAGNRSSTSSIDSNISSKSAGLPVPKLREPSKTALGSSLPGLVNQTDKEKGISSDNESVASCNSVKVNPAAQPVSSPAQTSLQPGAKYPDVASPTLRRLFGGKPTKQVPIATAENMKNSVVISNPHATMTQQGNLDSPSGSGVLSSGSSSPLYSKNVDLNQSPLASSPSSAHSAPSNSLTWGTNASSSSAVSKDGLGFQSVSSLHTSCESIDISLSSGGVPSHNSSTGLIASSKDDSLTPFVRTNSVKTTLSERYTPTSQLRTQEDAKEWLRSHSAGGLQDTAANSPFSSGSSVTSPSGTRFNFSQLASPTTVTQMSLSNPTMLRTHSLSNADGQYDPYTDSRFRNSSMSLDEKSRTMSRSGSFRDGFEEVHGSSLSLVSSTSSVYSTPEEKCQSEIRKLRRELDASQEKVSALTTQLTANAHLVAAFEQSLGNMTIRLQSLTMTAEQKDSELNELRKTIELLKKQNAAAQAAINGVINTPELNCKGNGTAQSADLRIRRQHSSDSVSSINSATSHSSVGSNIESDS

SEQ ID NO: 55488 - protein, 2419 aa, Homo sapiens
MAIDLYCGLACLWGIHEPRQIYTDWANHYLAKSGHKRLIRDLQQDVTDGVLLAQIIQVVANEKIEDINGCPKNRSQMIENIDACLNFLAAKGINIQGLSAEEIRNGNLKAILGLFFSLSRYKQQQQQPQKQHLSSPLPPAVSQVAGAPSQCQAGTPQQQVPVTPQAPCQPHQPAPHQQSKAQAEMQSSASSKDSSQSKIIRFTLGQKKISRLPGPTARVSAAGSEAKTRGGSTTANNRRSQSFNNYDKSKPVTSPPPPPSSHEKEPLASSASSHPGMSDNAPASLESGSSSTPTNCSTSSAIPQPGAATKPWRSKSLSVKHSATVSMLSVKPPGPEAPRPTPEAMKPAPNNQKSMLEKLKLFNSKGGSKAGEGPGSRDTSCERLETLPSFEESEELEAASRMLTTVGPASSSPKIALKGIAQRTFSRALTNKKSSLKGNEKEKEKQQREKDKEKSKDLAKRASVTERLDLKEEPKEDPSGAAVPEMPKKSSKIASFIPKGGKLNSAKKEPMAPSHSGIPKPGMKSMPGKSPSAPAPSKEGERSRSGKLSSGLPQQKPQLDGRHSSSSSSLASSEGKGPGGTTLNHSISSQTVSGSVGTTQTTGSNTVSVQLPQPQQQYNHPNTATVAPFLYRSQTDTEGNVTAESSSTGVSVEPSHFTKTGQPALEELTGEDPEARRLRTVKNIADLRQNLEETMSSLRGTQVTHSTLETTFDTNVTTEMSGRSILSLTGRPTPLSWRLGQSSPRLQAGDAPSMGNGYPPRANASRFINTESGRYVYSAPLRRQLASRGSSVCHVDVSDKAGDEMDLEGISMDAPGYMSDGDVLSKNIRTDDITSGYMTDGGLGLYTRRLNRLPDGMAVVRETLQRNTSLGLGDADSWDDSSSVSSGISDTIDNLSTDDINTSSSISSYANTPASSRKNLDVQTDAEKHSQVERNSLWSGDDVKKSDGGSDSGIKMEPGSKWRRNPSDVSDESDKSTSGKKNPVISQTGSWRRGMTAQVGITMPRTKPSAPAGALKTPGTGKTDDAKVSEKGRLSPKASQVKRSPSDAGRSSGDESKKPLPSSSRTPTANANSFGFKKQSGSAAGLAMITASGVTVTSRSATLGKIPKSSALVSRSAGRKSSMDGAQNQDDGYLALSSRTNLQYRSLPRPSKSNSRNGAGNRSSTSSIDSNISSKSAGLPVPKLREPSKTALGSSLPGLVNQTDKEKGISSDNESVASCNSVKVNPAAQPVSSPAQTSLQPGAKYPDVASPTLRRLFGGKPTKQVPIATAENMKNSVVISNPHATMTQQGNLDSPSGSGVLSSGSSSPLYSKNVDLNQSPLASSPSSAHSAPSNSLTWGTNASSSSAVSKDGLGFQSVSSLHTSCESIDISLSSGGVPSHNSSTGLIASSKDDSLTPFVRTNSVKTTLSESPLSSPAASPKFCRSTLPRKQDSDPHLDRNTLPKKGLRYTPTSQLRTQEDAKEWLRSHSAGGLQDTAANSPFSSGSSVTSPSGTRFNFSQLASPTTVTQMSLSNPTMLRTHSLSNADGQYDPYTDSRFRNSSMSLDEKSRTMSRSGSFRDGFEEESWEKSSVDNFVSRLHSSLHFSLPLFHHARYELVHGSSLSLVSSTSSVYSTPEEKCQSEIRKLRRELDASQEKVSALTTQLTANAHLVAAFEQSLGNMTIRLQSLTMTAEQKDSELNELRKTIELLKKQNAAAQAAINGVINTPELNCKGNGTAQSADLRIRRQHSSDSVSSINSATSHSSVGSNIESDSKKKKRKNWVNELRSSFKQAFGKKKSPKSASSHSDIEEMTDSSLPSSPKLPHNGSTGSTPLLRNSHSNSLISECMDSEAETVMQLRNELRDKEMKLTDIRLEALSSAHQLDQLREAMNRMQSEIEKLKAENDRLKSESQGSGCSRAPSQVSISASPRQSMGLSQHSLNLTESTSLDMLLDDTGECSARKEGGRHVKIVVSFQEEMKWKEDSRPHLFLIGCIGVSGKTKWDVLDGVVRRLFKEYIIHVDPVSQLGLNSDSVLGYSIGEIKRSNTSETPELLPCGYLVGENTTISVTVKGLAENSLDSLVFESLIPKPILQRYVSLLIEHRRIILSGPSGTGKTYLANRLSEYIVLREGRELTDGVIATFNVDHKSSKELRQYLSNLADQCNSENNAVDMPLVIILDNLHHVSSLGEIFNGLLNCKYHKCPYIIGTMNQATSSTPNLQLHHNFRWVLCANHTEPVKGFLGRFLRRKLMETEISGRVRNMELVKIIDWIPKVWHHLNRFLEAHSSSDVTIGPRLFLSCPIDVDGSRVWFTDLWNYSIIPYLLEAVREGLQLYGRRAPWEDPAKWVMDTYPWAASPQQHEWPPLLQLRPEDVGFDGYSMPREGSTSKQMPPSDAEGDPLMNMLMRLQEAANYSSPQSYDSDSNSNSHHDDILDSSLESTL

SEQ ID NO: 55489 - protein, 2365 aa, Homo sapiens
MESVSESSQQQKRKPVIHGLEDQKRIYTDWANHYLAKSGHKRLIRDLQQDVTDGVLLAQIIQVVANEKIEDINGCPKNRSQMIENIDACLNFLAAKGINIQGLSAEEIRNGNLKAILGLFFSLSRYKQQQQQPQKQHLSSPLPPAVSQVAGAPSQCQAGTPQQQVPVTPQAPCQPHQPAPHQQSKAQAEMQSRLPGPTARVSAAGSEAKTRGGSTTANNRRSQSFNNYDKSKPVTSPPPPPSSHEKEPLASSASSHPGMSDNAPASLESGSSSTPTNCSTSSAIPQPGAATKPWRSKSLSVKHSATVSMLSVKPPGPEAPRPTPEAMKPAPNNQKSMLEKLKLFNSKGGSKAGEGPGSRDTSCERLETLPSFEESEELEAASRMLTTVGPASSSPKIALKGIAQRTFSRALTNKKSSLKGNEKEKEKQQREKDKEKSKDLAKRASVTERLDLKEEPKEDPSGAAVPEMPKKSSKIASFIPKGGKLNSAKKEPMAPSHSGIPKPGMKSMPGKSPSAPAPSKEGERSRSGKLSSGLPQQKPQLDGRHSSSSSSLASSEGKGPGGTTLNHSISSQTVSGSVGTTQTTGSNTVSVQLPQPQQQYNHPNTATVAPFLYRSQTDTEGNVTAESSSTGVSVEPSHFTKTGQPALEELTGEDPEARRLRTVKNIADLRQNLEETMSSLRGTQVTHSTLETTFDTNVTTEMSGRSILSLTGRPTPLSWRLGQSSPRLQAGDAPSMGNGYPPRANASRFINTESGRYVYSAPLRRQLASRGSSVCHVDVSDKAGDEMDLEGISMDAPGYMSDGDVLSKNIRTDDITSGYMTDGGLGLYTRRLNRLPDGMAVVRETLQRNTSLGLGDADSWDDSSSVSSGISDTIDNLSTDDINTSSSISSYANTPASSRKNLDVQTDAEKHSQVERNSLWSGDDVKKSDGGSDSGIKMEPGSKWRRNPSDVSDESDKSTSGKKNPVISQTGSWRRGMTAQVGITMPRTKPSAPAGALKTPGTGKTDDAKVSEKGRLSPKASQVKRSPSDAGRSSGDESKKPLPSSSRTPTANANSFGFKKQSGSAAGLAMITASGVTVTSRSATLGKIPKSSALVSRSAGRKSSMDGAQNQDDGYLALSSRTNLQYRSLPRPSKSNSRNGAGNRSSTSSIDSNISSKSAGLPVPKLREPSKTALGSSLPGLVNQTDKEKGISSDNESVASCNSVKVNPAAQPVSSPAQTSLQPGAKYPDVASPTLRRLFGGKPTKQVPIATAENMKNSVVISNPHATMTQQGNLDSPSGSGVLSSGSSSPLYSKNVDLNQSPLASSPSSAHSAPSNSLTWGTNASSSSAVSKDGLGFQSVSSLHTSCESIDISLSSGGVPSHNSSTGLIASSKDDSLTPFVRTNSVKTTLSESPLSSPAASPKFCRSTLPRKQDSDPHLDRNTLPKKGLRYTPTSQLRTQEDAKEWLRSHSAGGLQDTAANSPFSSGSSVTSPSGTRFNFSQLASPTTVTQMSLSNPTMLRTHSLSNADGQYDPYTDSRFRNSSMSLDEKSRTMSRSGSFRDGFEEVHGSSLSLVSSTSSVYSTPEEKCQSEIRKLRRELDASQEKVSALTTQLTANAHLVAAFEQSLGNMTIRLQSLTMTAEQKDSELNELRKTIELLKKQNAAAQAAINGVINTPELNCKGNGTAQSADLRIRRQHSSDSVSSINSATSHSSVGSNIESDSKKKKRKNWLRSSFKQAFGKKKSPKSASSHSDIEEMTDSSLPSSPKLPHNGSTGSTPLLRNSHSNSLISECMDSEAETVMQLRNELRDKEMKLTDIRLEALSSAHQLDQLREAMNRMQSEIEKLKAENDRLKSESQGSGCSRAPSQVSISASPRQSMGLSQHSLNLTESTSLDMLLDDTGECSARKEGGRHVKIVVSFQEEMKWKEDSRPHLFLIGCIGVSGKTKWDVLDGVVRRLFKEYIIHVDPVSQLGLNSDSVLGYSIGEIKRSNTSETPELLPCGYLVGENTTISVTVKGLAENSLDSLVFESLIPKPILQRYVSLLIEHRRIILSGPSGTGKTYLANRLSEYIVLREGRELTDGVIATFNVDHKSSKELRQYLSNLADQCNSENNAVDMPLVIILDNLHHVSSLGEIFNGLLNCKYHKCPYIIGTMNQATSSTPNLQLHHNFRWVLCANHTEPVKGFLGRFLRRKLMETEISGRVRNMELVKIIDWIPKVWHHLNRFLEAHSSSDVTIGPRLFLSCPIDVDGSRVWFTDLWNYSIIPYLLEAVREGLQLYGRRAPWEDPAKWVMDTYPWAASPQQHEWPPLLQLRPEDVGFDGYSMPREGSTSKQMPPSDAEGDPLMNMLMRLQEAANYSSPQSYDSDSNSNSHHDDILDSSLESTL

SEQ ID NO: 55490 - protein, 2363 aa, Homo sapiens
MPVLGVASKLRQPAVGSKPVHTALPIPNLGTTGSQHCSSRPLELTETESSMLSCQLALKSTCEFGEKKPLQGKAKEKEDSKIYTDWANHYLAKSGHKRLIKDLQQDIADGVLLAEIIQIIANEKVEDINGCPRSQSQMIENVDVCLSFLAARGVNVQGLSAEEIRNGNLKAILGLFFSLSRYKQQQHHQQQYYQSLVELQQRVTHASPPSEASQAKTQQDMQSSLAARYATQSNHSGIATSQKKPTRLPGPSRVPAAGSSSKVQGASNLNRRSQSFNSIDKNKPPNYANGNEKDSSKGPQSSSGVNGNVQPPSTAGQPPASAIPSPSASKPWRSKSMNVKHSATSTMLTVKQSSTATSPTPSSDRLKPPVSEGVKTAPSGQKSMLEKFKLVNARTALRPPQPPSSGPSDGGKDDDAFSESGEMEGFNSGLNSGGSTNSSPKVSPKLAPPKAGSKNLSNKKSLLQPKEKEEKNRDKNKVCTEKPVKEEKDQVTEMAPKKTSKIASLIPKGSKTTAAKKESLIPSSSGIPKPGSKVPTVKQTISPGSTASKESEKFRTTKGSPSQSLSKPITMEKASASSCPAPLEGREAGQASPSGSCTMTVAQSSGQSTGNGAVQLPQQQQHSHPNTATVAPFIYRAHSENEGTALPSADSCTSPTKMDLSYSKTAKQCLEEISGEDPETRRMRTVKNIADLRQNLEETMSSLRGTQISHSTLETTFDSTVTTEVNGRTIPNLTSRPTPMTWRLGQACPRLQAGDAPSLGAGYPRSGTSRFIHTDPSRFMYTTPLRRAAVSRLGNMSQIDMSEKASSDLDMSSEVDVGGYMSDGDILGKSLRTDDINSGYMTDGGLNLYTRSLNRIPDTATSRDIIQRGVHDVTVDADSWDDSSSVSSGLSDTLDNISTDDLNTTSSVSSYSNITVPSRKNTQLRTDSEKRSTTDETWDSPEELKKPEEDFDSHGDAGGKWKTVSSGLPEDPEKAGQKASLSVSQTGSWRRGMSAQGGAPSRQKAGTSALKTPGKTDDAKASEKGKAPLKGSSLQRSPSDAGKSSGDEGKKPPSGIGRSTATSSFGFKKPSGVGSSAMITSSGATITSGSATLGKIPKSAAIGGKSNAGRKTSLDGSQNQDDVVLHVSSKTTLQYRSLPRPSKSSTSGIPGRGGHRSSTSSIDSNVSSKSAGATTSKLREPTKIGSGRSSPVTVNQTDKEKEKVAVSDSESVSLSGSPKSSPTSASACGAQGLRQPGSKYPDIASPTFRRLFGAKAGGKSASAPNTEGVKSSSVMPSPSTTLARQGSLESPSSGTGSMGSAGGLSGSSSPLFNKPSDLTTDVISLSHSLASSPASVHSFTSGGLVWAANMSSSSAGSKDTPSYQSMTSLHTSSESIDLPLSHHGSLSGLTTGTHEVQSLLMRTGSVRSTLSESMQLDRNTLPKKGLRYTPSSRQANQEEGKEWLRSHSTGGLQDTGNQSPLVSPSAMSSSAAGKYHFSNLVSPTNLSQFNLPGPSMMRSNSIPAQDSSFDLYDDSQLCGSATSLEERPRAISHSGSFRDSMEEVHGSSLSLVSSTSSLYSTAEAGGSLEQIHKLRRELVASQEKVATLTSQLSANAHLVAAFEKSLGNMTGRLQSLTMTAEQKESELIELRETIEMLKAQNSAAQAAIQGALNGPDHPPKDLRIRRQHSSESVSSINSATSHSSIGSGNDADSKKKKKKNWVNSRGSELRSSFKQAFGKKKSTKPPSSHSDIEELTDSSLPASPKLPHNAGDCGSASMKPSQSASAICECTEAEAEIILQLKSELREKELKLTDIRLEALSSAHHLDQIREAMNRMQNEIEILKAENDRLKAETGNTAKPTRPPSESSSSTSSSSSRQSLGLSLNNLNITEAVSSDILLDDAGDATGHKDGRSVKIIVSISKGYGRAKDQKSQAYLIGSIGVSGKTKWDVLDGVIRRLFKEYVFRIDTSTSLGLSSDCIASYCIGDLIRSHNLEVPELLPCGYLVGDNNIITVNLKGVEENSLDSFVFDTLIPKPITQRYFNLLMEHHRIILSGPSGTGKTYLANKLAEYVITKSGRKKTEDAIATFNVDHKSSKELQQYLANLAEQCSADNNGVELPVVIILDNLHHVGSLSDIFNGFLNCKYNKCPYIIGTMNQGVSSSPNLELHHNFRWVLCANHTEPVKGFLGRYLRRKLIEIEIERNIRNNDLVKIIDWIPKTWHHLNSFLETHSSSDVTIGPRLFLPCPMDVEGSRVWFMDLWNYSLVPYILEAVREGLQMYGKRTPWEDPSKWVLDTYPWSSATLPQESPALLQLRPEDVGYESCTSTKEATTSKHIPQTDTEGDPLMNMLMKLQEAANYSSTQSCDSESTSHHEDILDSSLESTL

SEQ ID NO: 55491 - protein, 2186 aa, Homo sapiens
MPVLGVASKLRQPAVGSKPVHTALPIPNLGTTGSQHCSSRPLELTETESSMLSCQLALKSTCEFGEKKPLQGKAKEKEDSKIYTDWANHYLAKSGHKRLIKDLQQDIADGVLLAEIIQIIANEKVEDINGCPRSQSQMIENVDVCLSFLAARGVNVQGLSAEEIRNGNLKAILGLFFSLSRYKQQQHHQQQYYQSLVELQQRVTHASPPSEASQAKTQQDMQSSLAARYATQSNHSGIATSQKKPTRLPGPSRVPAAGSSSKVQGASNLNRRSQSFNSIDKNKPPNYANGNEKDSSKGPQSSSGVNGNVQPPSTAGQPPASAIPSPSASKPWRSKSMNVKHSATSTMLTVKQSSTATSPTPSSDRLKPPVSEGVKTAPSGQKSMLEKFKLVNARTALRPPQPPSSGPSDGGKDDDAFSESGEMEGFNSGLNSGGSTNSSPKVSPKLAPPKAGSKNLSNKKSLLQPKEKEEKNRDKNKVCTEKPVKEEKDQVTEMAPKKTSKIASLIPKGSKTTAAKKESLIPSSSGIPKPGSKVPTVKQTISPGSTASKESEKFRTTKGSPSQSLSKPITMEKASASSCPAPLEGREAGQASPSGSCTMTVAQSSGQSTGNGAVQLPQQQQHSHPNTATVAPFIYRAHSENEGTALPSADSCTSPTKMDLSYSKTAKQCLEEISGEDPETRRMRTVKNIADLRQNLEETMSSLRGTQISHSTLETTFDSTVTTEVNGRTIPNLTSRPTPMTWRLGQACPRLQAGDAPSLGAGYPRSGTSRFIHTDPSRFMYTTPLRRAAVSRLGNMSQIDMSEKASSDLDMSSEVDVGGYMSDGDILGKSLRTDDINSGYMTDGGLNLYTRSLNRIPDTATSRDIIQRGVHDVTVDADSWDDSSSVSSGLSDTLDNISTDDLNTTSSVSSYSNITVPSRKNTQLRTDSEKRSTTDETWDSPEELKKPEEDFDSHGDAGGKWKTVSSGLPEDPEKAGQKASLSVSQTGSWRRGMSAQGGAPSRQKAGTSALKTPGKTDDAKASEKGKAPLKGSSLQRSPSDAGKSSGDEGKKPPSGIGRSTATSSFGFKKPSGVGSSAMITSSGATITSGSATLGKIPKSAAIGGKSNAGRKTSLDGSQNQDDVVLHVSSKTTLQYRSLPRPSKSSTSGIPGRGGHRSSTSSIDSNVSSKSAGATTSKLREPTKIGSGRSSPVTVNQTDKEKEKVAVSDSESVSLSGSPKSSPTSASACGAQGLRQPGSKYPDIASPTFRRYTPSSRQANQEEGKEWLRSHSTGGLQDTGNQSPLVSPSAMSSSAAGKYHFSNLVSPTNLSQFNLPGPSMMRSNSIPAQDSSFDLYDDSQLCGSATSLEERPRAISHSGSFRDSMEEVHGSSLSLVSSTSSLYSTAEAGGSLEQIHKLRRELVASQEKVATLTSQLSANAHLVAAFEKSLGNMTGRLQSLTMTAEQKESELIELRETIEMLKAQNSAAQAAIQGALNGPDHPPKDLRIRRQHSSESVSSINSATSHSSIGSGNDADSKKKKKKNWVNSRGSELRSSFKQAFGKKKSTKPPSSHSDIEELTDSSLPASPKLPHNAGDCGSASMKPSQSASAICECTEAEAEIILQLKSELREKELKLTDIRLEALSSAHHLDQIREAMNRMQNEIEILKAENDRLKAETGNTAKPTRPPSESSSSTSSSSSRQSLGLSLNNLNITEAVSSDILLDDAGDATGHKDGRSVKIIVSISKGYGRAKDQKSQAYLIGSIGVSGKTKWDVLDGVIRRLFKEYVFRIDTSTSLGLSSDCIASYCIGDLIRSHNLEVPELLPCGYLVGDNNIITVNLKGVEENSLDSFVFDTLIPKPITQRYFNLLMEHHRIILSGPSGTGKTYLANKLAEYVITKSGRKKTEDAIATFNVDHKSSKELQQYLANLAEQCSADNNGVELPVVIILDNLHHVGSLSDIFNGFLNCKYNKCPYIIGTMNQGVSSSPNLELHHNFRWVLCANHTEPVKGFLGRYLRRKLIEIEIERNIRNNDLVKIIDWIPKTWHHLNSFLETHSSSDVTIGPRLFLPCPMDVEGSRVWFMDLWNYSLVPYILEAVREGLQMYGKRTPWEDPSKWVLDTYPWSSATLPQESPALLQLRPEDVGYESCTSTKEATTSKHIPQTDTEGDPLMNMLMKLQEAANYSSTQSCDSESTSHHEDILDSSLESTL

SEQ ID NO: 55492 - protein, 791 aa, Homo sapiens
MTSLHTSSESIDLPLSHHGSLSGLTTGTHEVQSLLMRTGSVRSTLSERYTPSSRQANQEEGKEWLRSHSTGGLQDTGNQSPLVSPSAMSSSAAGKYHFSNLVSPTNLSQFNLPGPSMMRSNSIPAQDSSFDLYDDSQLCGSATSLEERPRAISHSGSFRDSMEEVHGSSLSLVSSTSSLYSTAIQKPNIQQIHKLRRELVASQEKVATLTSQLSANAHLVAAFEKSLGNMTGRLQSLTMTAEQKESELIELRETIEMLKAQNSAAQAAIQGALNGPDHPPKDLRIRRQHSSESVSSINSATSHSSIGSGNDADSKKKKKKNWLRSSFKQAFGKKKSTKPPSSHSDIEELTDSSLPASPKLPHNAGDCGSASMKPSQSASAICECTEAEAEIILQLKSELREKELKLTDIRLEALSSAHHLDQIREAMNRMQNEIEILKAENDRLKAETGNTAKPTRPPSESSSSTSSSSSRQSLGLSLNNLNITEAVSSDILLDDAGDATGHKDGRSVKIIVSISKGYGRAKDQKSQAYLIGSIGVSGKTKWDVLDGVIRRLFKEYVFRIDTSTSLGLSSDCIASYCIGDLIRSHNLEVPELLPCGYLVGDNNIITVNLKGVEENSLDSFVFDTLIPKPITQRYFNLLMEHHRIILSGPSGTGKTYLANKLAEYVITKSGRKKTEDAIATFNVDHKSSKELQQYLANLAEQCSADNNGVELPVVIILDNLHHVGSLSDIFNGFLNCKYNKCPYIIGTMNQGVSSSPNLELHHNFRWVLCANHTEPVKGFLGRYLRRKLIEI

SEQ ID NO: 55493 - protein, 2385 aa, Homo sapiens
MPVLGVASKLRQPAVGSKPVHTALPIPNLGTTGSQHCSSRPLELTETESSMLSCQLALKSTCEFGEKKPLQGKAKEKEDSKIYTDWANHYLAKSGHKRLIKDLQQDIADGVLLAEIIQIIANEKVEDINGCPRSQSQMIENVDVCLSFLAARGVNVQGLSAEEIRNGNLKAILGLFFSLSRYKQQQHHQQQYYQSLVELQQRVTHASPPSEASQAKTQQDMQSSLAARYATQSNHSGIATSQKKPTRLPGPSRVPAAGSSSKVQGASNLNRRSQSFNSIDKNKPPNYANGNEKDSSKGPQSSSGVNGNVQPPSTAGQPPASAIPSPSASKPWRSKSMNVKHSATSTMLTVKQSSTATSPTPSSDRLKPPVSEGVKTAPSGQKSMLEKFKLVNARTALRPPQPPSSGPSDGGKDDDAFSESGEMEGFNSGLNSGGSTNSSPKVSPKLAPPKAGSKNLSNKKSLLQPKEKEEKNRDKNKVCTEKPVKEEKDQVTEMAPKKTSKIASLIPKGSKTTAAKKESLIPSSSGIPKPGSKVPTVKQTISPGSTASKESEKFRTTKGSPSQSLSKPITMEKASASSCPAPLEGREAGQASPSGSCTMTVAQSSGQSTGNGAVQLPQQQQHSHPNTATVAPFIYRAHSENEGTALPSADSCTSPTKMDLSYSKTAKQCLEEISGEDPETRRMRTVKNIADLRQNLEETMSSLRGTQISHSTLETTFDSTVTTEVNGRTIPNLTSRPTPMTWRLGQACPRLQAGDAPSLGAGYPRSGTSRFIHTDPSRFMYTTPLRRAAVSRLGNMSQIDMSEKASSDLDMSSEVDVGGYMSDGDILGKSLRTDDINSGYMTDGGLNLYTRSLNRIPDTATSRDIIQRGVHDVTVDADSWDDSSSVSSGLSDTLDNISTDDLNTTSSVSSYSNITVPSRKNTQLRTDSEKRSTTDETWDSPEELKKPEEDFDSHGDAGGKWKTVSSGLPEDPEKAGQKASLSVSQTGSWRRGMSAQGGAPSRQKAGTSALKTPGKTDDAKASEKGKAPLKGSSLQRSPSDAGKSSGDEGKKPPSGIGRSTATSSFGFKKPSGVGSSAMITSSGATITSGSATLGKIPKSAAIGGKSNAGRKTSLDGSQNQDDVVLHVSSKTTLQYRSLPRPSKSSTSGIPGRGGHRSSTSSIDSNVSSKSAGATTSKLREPTKIGSGRSSPVTVNQTDKEKEKVAVSDSESVSLSGSPKSSPTSASACGAQGLRQPGSKYPDIASPTFRRLFGAKAGGKSASAPNTEGVKSSSVMPSPSTTLARQGSLESPSSGTGSMGSAGGLSGSSSPLFNKPSDLTTDVISLSHSLASSPASVHSFTSGGLVWAANMSSSSAGSKDTPSYQSMTSLHTSSESIDLPLSHHGSLSGLTTGTHEVQSLLMRTGSVRSTLSESMQLDRNTLPKKGLRYTPSSRQANQEEGKEWLRSHSTGGLQDTGNQSPLVSPSAMSSSAAGKYHFSNLVSPTNLSQFNLPGPSMMRSNSIPAQDSSFDLYDDSQLCGSATSLEERPRAISHSGSFRDSMEEVHGSSLSLVSSTSSLYSTAEEKAHSEQIHKLRRELVASQEKVATLTSQLSANAHLVAAFEKSLGNMTGRLQSLTMTAEQKESELIELRETIEMLKAQNSAAQAAIQGALNGPDHPPKDLRIRRQHSSESVSSINSATSHSSIGSGNDADSKKKKKKNWVNSRGSELRSSFKQAFGKKKSTKPPSSHSDIEELTDSSLPASPKLPHNAGDCGSASMKPSQSASASPLVWPPKKRQNGPVIYKHRSRICECTEAEAEIILQLKSELREKELKLTDIRLEALSSAHHLDQIREAMNRMQNEIEILKAENDRLKAETGNTAKPTRPPSESSSSTSSSSSRQSLGLSLNNLNITEAVSSDILLDDAGDATGHKDGRSVKIIVSISKGYGRAKDQKSQAYLIGSIGVSGKTKWDVLDGVIRRLFKEYVFRIDTSTSLGLSSDCIASYCIGDLIRSHNLEVPELLPCGYLVGDNNIITVNLKGVEENSLDSFVFDTLIPKPITQRYFNLLMEHHRIILSGPSGTGKTYLANKLAEYVITKSGRKKTEDAIATFNVDHKSSKELQQYLANLAEQCSADNNGVELPVVIILDNLHHVGSLSDIFNGFLNCKYNKCPYIIGTMNQGVSSSPNLELHHNFRWVLCANHTEPVKGFLGRYLRRKLIEIEIERNIRNNDLVKIIDWIPKTWHHLNSFLETHSSSDVTIGPRLFLPCPMDVEGSRVWFMDLWNYSLVPYILEAVREGLQMYGKRTPWEDPSKWVLDTYPWSSATLPQESPALLQLRPEDVGYESCTSTKEATTSKHIPQTDTEGDPLMNMLMKLQEAANYSSTQSCDSESTSHHEDILDSSLESTL

SEQ ID NO: 55494 - protein, 2363 aa, Homo sapiens
MPVLGVASKLRQPAVGSKPVHTALPIPNLGTTGSQHCSSRPLELTETESSMLSCQLALKSTCEFGEKKPLQGKAKEKEDSKIYTDWANHYLAKSGHKRLIKDLQQDIADGVLLAEIIQIIANEKVEDINGCPRSQSQMIENVDVCLSFLAARGVNVQGLSAEEIRNGNLKAILGLFFSLSRYKQQQHHQQQYYQSLVELQQRVTHASPPSEASQAKTQQDMQSSLAARYATQSNHSGIATSQKKPTRLPGPSRVPAAGSSSKVQGASNLNRRSQSFNSIDKNKPPNYANGNEKDSSKGPQSSSGVNGNVQPPSTAGQPPASAIPSPSASKPWRSKSMNVKHSATSTMLTVKQSSTATSPTPSSDRLKPPVSEGVKTAPSGQKSMLEKFKLVNARTALRPPQPPSSGPSDGGKDDDAFSESGEMEGFNSGLNSGGSTNSSPKVSPKLAPPKAGSKNLSNKKSLLQPKEKEEKNRDKNKVCTEKPVKEEKDQVTEMAPKKTSKIASLIPKGSKTTAAKKESLIPSSSGIPKPGSKVPTVKQTISPGSTASKESEKFRTTKGSPSQSLSKPITMEKASASSCPAPLEGREAGQASPSGSCTMTVAQSSGQSTGNGAVQLPQQQQHSHPNTATVAPFIYRAHSENEGTALPSADSCTSPTKMDLSYSKTAKQCLEEISGEDPETRRMRTVKNIADLRQNLEETMSSLRGTQISHSTLETTFDSTVTTEVNGRTIPNLTSRPTPMTWRLGQACPRLQAGDAPSLGAGYPRSGTSRFIHTDPSRFMYTTPLRRAAVSRLGNMSQIDMSEKASSDLDMSSEVDVGGYMSDGDILGKSLRTDDINSGYMTDGGLNLYTRSLNRIPDTATSRDIIQRGVHDVTVDADSWDDSSSVSSGLSDTLDNISTDDLNTTSSVSSYSNITVPSRKNTQLRTDSEKRSTTDETWDSPEELKKPEEDFDSHGDAGGKWKTVSSGLPEDPEKAGQKASLSVSQTGSWRRGMSAQGGAPSRQKAGTSALKTPGKTDDAKASEKGKAPLKGSSLQRSPSDAGKSSGDEGKKPPSGIGRSTATSSFGFKKPSGVGSSAMITSSGATITSGSATLGKIPKSAAIGGKSNAGRKTSLDGSQNQDDVVLHVSSKTTLQYRSLPRPSKSSTSGIPGRGGHRSSTSSIDSNVSSKSAGATTSKLREPTKIGSGRSSPVTVNQTDKEKEKVAVSDSESVSLSGSPKSSPTSASACGAQGLRQPGSKYPDIASPTFRRLFGAKAGGKSASAPNTEGVKSSSVMPSPSTTLARQGSLESPSSGTGSMGSAGGLSGSSSPLFNKPSDLTTDVISLSHSLASSPASVHSFTSGGLVWAANMSSSSAGSKDTPSYQSMTSLHTSSESIDLPLSHHGSLSGLTTGTHEVQSLLMRTGSVRSTLSESMQLDRNTLPKKGLRYTPSSRQANQEEGKEWLRSHSTGGLQDTGNQSPLVSPSAMSSSAAGKYHFSNLVSPTNLSQFNLPGPSMMRSNSIPAQDSSFDLYDDSQLCGSATSLEERPRAISHSGSFRDSMEEVHGSSLSLVSSTSSLYSTAEEKAHSEQIHKLRRELVASQEKVATLTSQLSANAHLVAAFEKSLGNMTGRLQSLTMTAEQKESELIELRETIEMLKAQNSAAQAAIQGALNGPDHPPKDLRIRRQHSSESVSSINSATSHSSIGSGNDADSKKKKKKNWVNSRGSELRSSFKQAFGKKKSTKPPSSHSDIEELTDSSLPASPKLPHNAGDCGSASMKPSQSASAICECTEAEAEIILQLKSELREKELKLTDIRLEALSSAHHLDQIREAMNRMQNEIEILKAENDRLKAETGNTAKPTRPPSESSSSTSSSSSRQSLGLSLNNLNITEAVSSDILLDDAGDATGHKDGRSVKIIVSISKGYGRAKDQKSQAYLIGSIGVSGKTKWDVLDGVIRRLFKEYVFRIDTSTSLGLSSDCIASYCIGDLIRSHNLEVPELLPCGYLVGDNNIITVNLKGVEENSLDSFVFDTLIPKPITQRYFNLLMEHHRIILSGPSGTGKTYLANKLAEYVITKSGRKKTEDAIATFNVDHKSSKELQQYLANLAEQCSADNNGVELPVVIILDNLHHVGSLSDIFNGFLNCKYNKCPYIIGTMNQGVSSSPNLELHHNFRWVLCANHTEPVKGFLGRYLRRKLIEIEIERNIRNNDLVKIIDWIPKTWHHLNSFLETHSSSDVTIGPRLFLPCPMDVEGSRVWFMDLWNYSLVPYILEAVREGLQMYGKRTPWEDPSKWVLDTYPWSSATLPQESPALLQLRPEDVGYESCTSTKEATTSKHIPQTDTEGDPLMNMLMKLQEAANYSSTQSCDSESTSHHEDILDSSLESTL

SEQ ID NO: 55495 - protein, 215 aa, Homo sapiens
MKRWVLCANHTEPVKGFLGRYLRRKLIEIEIERNIRNNDLVKIIDWIPKTWHHLNSFLETHSSSDVTIGPRLFLPCPMDVEGSRVWFMDLWNYSLVPYILEAVREGLQMYGKRTPWEDPSKWVLDTYPWSSATLPQESPALLQLRPEDVGYESCTSTKEATTSKHIPQTDTEGDPLMNMLMKLQEAANYSSTQSCDSESTSHHEDILDSSLESTL

SEQ ID NO: 55496 - protein, 190 aa, Homo sapiens [sequence omitted]

SEQ ID NO: 55497 - protein, 172 aa, Homo sapiens
MATITEKEVQQWYKGFIKDCPSGQLDAAGFQKIYKQFFPFGDPTKFATFVFNVFDENKDGRIEFSEFIQALSVTSRGTLDEKLRWAFKLYDLDNDGYITRNEMLDIVDAIYQMVGNTVELPEEENTPEKRVDRIFAMMDKNADGKLTLQEFQEGSKADPSIVQALSLYDGLV

SEQ ID NO: 55498 - protein, 1183 aa, Homo sapiens
MQLKIMPKKKRLSAGRVPLILFLCQMISALEVPLDLVQPPTITQQSPKDYIIDPRENIVIQCEAKGKPPPSFSWTRNGTHFDIDKDPLVTMKPGTGTLIINIMSEGKAETYEGVYQCTARNERGAAVSNNIVVRPSRSPLWTKEKLEPITLQSGQSLVLPCRPPIGLPPPIIFWMDNSFQRLPQSERVSQGLNGDLYFSNVLPEDTREDYICYARFNHTQTIQQKQPISVKVISVDELNDTIAANLSDTEFYGAKSSRERPPTFLTPEGNASNKEELRGNVLSLECIAEGLPTPIIYWAKEDGMLPKNRTVYKNFEKTLQIIHVSEADSGNYQCIAKNALGAIHHTISVRVKAAPYWITAPQNLVLSPGEDGTLICRANGNPKPRISWLTNGVPIEIAPDDPSRKIDGDTIIFSNVQERSSAVYQCNASNEYGYLLANAFVNVLAEPPRILTPANTLYQVIANRPALLDCAFFGSPLPTIEWFKGAKGSALHEDIYVLHENGTLEIPVAQKDSTGTYTCVARNKLGMAKNEVHLEIKDPTWIVKQPEYAVVQRGSMVSFECKVKHDHTLSLTVLWLKDNRELPSDERFTVDKDHLVVADVSDDDSGTYTCVANTTLDSVSASAVLSVVDVPNPPFDLELTDQLDKSVQLSWTPGDDNNSPITKFIIEYEDAMHKPGLWHHQTEVSGTQTTAQLKLSPYVNYSFRVMAVNSIGKSLPSEASEQYLTKASEPDKNPTAVEGLGSEPDNLVITWKPLNGFESNGPGLQYKVSWRQKDGDDEWTSVVVANVSKYIVSGTPTFVPYLIKVQALNDMGFAPEPAVVMGHSGEDLPMVAPGNVRVNVVNSTLAEVHWDPVPLKSIRGHLQGYRIYYWKTQSSSKRNRRHIEKKILTFQGSKTHGMLPGLEPFSHYTLNVRVVNGKGEGPASPDRVFNTPEGVPSAPSSLKIVNPTLDSLTLEWDPPSHPNGILTEYTLKYQPINSTHELGPLVDLKIPANKTRWTLKNLNFSTRYKFYFYAQTSAGSGSQITEEAVTTVDEAMASRQVDIATQGWFIGLMCAVALLILILLIVCFIRRNKGGKYPVKEKEDAHADPEIQPMKEDDGTFGEYSDAEDHKPLKKGSRTPSDRTVKKEDSDDSLVDYGEGVNGQFNEDGSFIGQYSGKKEKEPAEGNESSEAPSPVNAMNSFV

SEQ ID NO: 55499 - protein, 1236 aa, Homo sapiens
MQLKIMPKKKRLSAGRVPLILFLCQMISALEVPLDQKSTEVMVQPPTITQQSPKDYIIDPRENIVIQCEAKGKPPPSFSWTRNGTHFDIDKDPLVTMKPGTGTLIINIMSEGKAETYEGVYQCTARNERGAAVSNNIVVRPSRSPLWTKEKLEPITLQSGQSLVLPCRPPIGLPPPIIFWMDNSFQRLPQSERVSQGLNGDLYFSNVLPEDTREDYICYARFNHTQTIQQKQPISVKVISVDELNDTIAANLSDTEFYGAKSSRERPPTFLTPEGNASNKEELRGNVLSLECIAEGLPTPIIYWAKEDGMLPKNRTVYKNFEKTLQIIHVSEADSGNYQCIAKNALGAIHHTISVRVKAAPYWITAPQNLVLSPGEDGTLICRANGNPKPRISWLTNGVPIEIAPDDPSRKIDGDTIIFSNVQERSSAVYQCNASNEYGYLLANAFVNVLAEPPRILTPANTLYQVIANRPALLDCAFFGSPLPTIEWFKGAKGSALHEDIYVLHENGTLEIPVAQKDSTGTYTCVARNKLGMAKNEVHLEIKDPTWIVKQPEYAVVQRGSMVSFECKVKHDHTLSLTVLWLKDNRELPSDERFTVDKDHLVVADVSDDDSGTYTCVANTTLDSVSASAVLSVVAPTPTPAPVYDVPNPPFDLELTDQLDKSVQLSWTPGDDNNSPITKFIIEYEDAMHKPGLWHHQTEVSGTQTTAQLKLSPYVNYSFRVMAVNSIGKSLPSEASEQYLTKASEPDKNPTAVEGLGSEPDNLVITWKPLNGFESNGPGLQYKVSWRQKDGDDEWTSVVVANVSKYIVSGTPTFVPYLIKVQALNDMGFAPEPAVVMGHSGEDLPMVAPGNVRVNVVNSTLAEVHWDPVPLKSIRGHLQGYRIYYWKTQSSSKRNRRHIEKKILTFQGSKTHGMLPGLEPFSHYTLNVRVVNGKGEGPASPDRVFNTPEGVPSAPSSLKIVNPTLDSLTLEWDPPSHPNGILTEYTLKYQPINSTHELGPLVDLKIPANKTRWTLKNLNFSTRYKFYFYAQTSAGSGSQITEEAVTTVDEAGILPPDVGAGKVQAVNPRISNLTAAAAETYANISWEYEGPEHVNFYVEYGVAGSKEEWRKEIVNGSRSFFGLKGLMPGTAYKVRVGAVGDSGFVSSEDVFETGPAMASRQVDIATQGWFIGLMCAVALLILILLIVCFIRRNKGGKYPVKEKEDAHADPEIQPMKEDDGTFGEYRLFSFVSSASF

SEQ ID NO: 55500 - protein, 1192 aa, Homo sapiens
MQLKIMPKKKRLSAGRVPLILFLCQMISALEVPLDPKLLEDLVQPPTITQQSPKDYIIDPRENIVIQCEAKGKPPPSFSWTRNGTHFDIDKDPLVTMKPGTGTLIINIMSEGKAETYEGVYQCTARNERGAAVSNNIVVRPSRSPLWTKEKLEPITLQSGQSLVLPCRPPIGLPPPIIFWMDNSFQRLPQSERVSQGLNGDLYFSNVLPEDTREDYICYARFNHTQTIQQKQPISVKVISAKSSRERPPTFLTPEGNASNKEELRGNVLSLECIAEGLPTPIIYWAKEDGMLPKNRTVYKNFEKTLQIIHVSEADSGNYQCIAKNALGAIHHTISVRVKAAPYWITAPQNLVLSPGEDGTLICRANGNPKPRISWLTNGVPIEIAPDDPSRKIDGDTIIFSNVQERSSAVYQCNASNEYGYLLANAFVNVLAEPPRILTPANTLYQVIANRPALLDCAFFGSPLPTIEWFKGAKGSALHEDIYVLHENGTLEIPVAQKDSTGTYTCVARNKLGMAKNEVHLEIKDPTWIVKQPEYAVVQRGSMVSFECKVKHDHTLSLTVLWLKDNRELPSDERFTVDKDHLVVADVSDDDSGTYTCVANTTLDSVSASAVLSVVAPTPTPAPVYDVPNPPFDLELTDQLDKSVQLSWTPGDDNNSPITKFIIEYEDAMHKPGLWHHQTEVSGTQTTAQLKLSPYVNYSFRVMAVNSIGKSLPSEASEQYLTKASEPDKNPTAVEGLGSEPDNLVITWKPLNGFESNGPGLQYKVSWRQKDGDDEWTSVVVANVSKYIVSGTPTFVPYLIKVQALNDMGFAPEPAVVMGHSGEDLPMVAPGNVRVNVVNSTLAEVHWDPVPLKSIRGHLQGYRIYYWKTQSSSKRNRRHIEKKILTFQGSKTHGMLPGLEPFSHYTLNVRVVNGKGEGPASPDRVFNTPEGVPSAPSSLKIVNPTLDSLTLEWDPPSHPNGILTEYTLKYQPINSTHELGPLVDLKIPANKTRWTLKNLNFSTRYKFYFYAQTSAGSGSQITEEAVTTVDEAGILPPDVGAGKAMASRQVDIATQGWFIGLMCAVALLILILLIVCFIRRNKGGKYPVKEKEDAHADPEIQPMKEDDGTFGEYSDAEDHKPLKKGSRTPSDRTVKKEDSDDSLVDYGEGVNGQFNEDGSFIGQYSGKKEKEPAEGNESSEAPSPVNAMNSFV

SEQ ID NO: 55501 - protein, 1304 aa, Homo sapiens
MQLKIMPKKKRLSAGRVPLILFLCQMISALEVPLDPKLLEDLVQPPTITQQSPKDYIIDPRENIVIQCEAKGKPPPSFSWTRNGTHFDIDKDPLVTMKPGTGTLIINIMSEGKAETYEGVYQCTARNERGAAVSNNIVVRPSRSPLWTKEKLEPITLQSGQSLVLPCRPPIGLPPPIIFWMDNSFQRLPQSERVSQGLNGDLYFSNVLPEDTREDYICYARFNHTQTIQQKQPISVKVISVDELNDTIAANLSDTEFYGAKSSRERPPTFLTPEGNASNKEELRGNVLSLECIAEGLPTPIIYWAKEDGMLPKNRTVYKNFEKTLQIIHVSEADSGNYQCIAKNALGAIHHTISVRVKAAPYWITAPQNLVLSPGEDGTLICRANGNPKPRISWLTNGVPIEIAPDDPSRKIDGDTIIFSNVQERSSAVYQCNASNEYGYLLANAFVNVLAEPPRILTPANTLYQVIANRPALLDCAFFGSPLPTIEWFKGAKGSALHEDIYVLHENGTLEIPVAQKDSTGTYTCVARNKLGMAKNEVHLEIKDPTWIVKQPEYAVVQRGSMVSFECKVKHDHTLSLTVLWLKDNRELPSDERFTVDKDHLVVADVSDDDSGTYTCVANTTLDSVSASAVLSVVAPTPTPAPVYDVPNPPFDLELTDQLDKSVQLSWTPGDDNNSPITKFIIEYEDAMHKPGLWHHQTEVSGTQTTAQLKLSPYVNYSFRVMAVNSIGKSLPSEASEQYLTKASEPDKNPTAVEGLGSEPDNLVITWKPLNGFESNGPGLQYKVSWRQKDGDDEWTSVVVANVSKYIVSGTPTFVPYLIKVQALNDMGFAPEPAVVMGHSGEDLPMVAPGNVRVNVVNSTLAEVHWDPVPLKSIRGHLQGYRIYYWKTQSSSKRNRRHIEKKILTFQGSKTHGMLPGLEPFSHYTLNVRVVNGKGEGPASPDRVFNTPEGVPSAPSSLKIVNPTLDSLTLEWDPPSHPNGILTEYTLKYQPINSTHELGPLVDLKIPANKTRWTLKNLNFSTRYKFYFYAQTSAGSGSQITEEAVTTVDEAGILPPDVGAGKVQAVNPRISNLTAAAAETYANISWEYEGPEHVNFYVEYGVAGSKEEWRKEIVNGSRSFFGLKGLMPGTAYKVRVGAVGDSGFVSSEDVFETGPAMASRQVDIATQGWFIGLMCAVALLILILLIVCFIRRNKGGKYPVKEKEDAHADPEIQPMKEDDGTFGEYSDAEDHKPLKKGSRTPSDRTVKKEDSDDSLVDYGEGVNGQFNEDGSFIGQYSGKKEKEPAEGNESSEAPSPVNAMNSFV

SEQ ID NO: 55502 - protein, 1308 aa, Homo sapiens
MQLKIMPKKKRLSAGRVPLILFLCQMISALEVPLDQKSTEVMVQPPTITQQSPKDYIIDPRENIVIQCEAKGKPPPSFSWTRNGTHFDIDKDPLVTMKPGTGTLIINIMSEGKAETYEGVYQCTARNERGAAVSNNIVVRPSRSPLWTKEKLEPITLQSGQSLVLPCRPPIGLPPPIIFWMDNSFQRLPQSERVSQGLNGDLYFSNVLPEDTREDYICYARFNHTQTIQQKQPISVKVISVDELNDTIAANLSDTEFYGAKSSRERPPTFLTPEGNASNKEELRGNVLSLECIAEGLPTPIIYWAKEDGMLPKNRTVYKNFEKTLQIIHVSEADSGNYQCIAKNALGAIHHTISVRVKAAPYWITAPQNLVLSPGEDGTLICRANGNPKPRISWLTNGVPIEIAPDDPSRKIDGDTIIFSNVQERSSAVYQCNASNEYGYLLANAFVNVLAEPPRILTPANTLYQVIANRPALLDCAFFGSPLPTIEWFKGAKGSALHEDIYVLHENGTLEIPVAQKDSTGTYTCVARNKLGMAKNEVHLEIKDPTWIVKQPEYAVVQRGSMVSFECKVKHDHTLSLTVLWLKDNRELPSDERFTVDKDHLVVADVSDDDSGTYTCVANTTLDSVSASAVLSVVAPTPTPAPVYDVPNPPFDLELTDQLDKSVQLSWTPGDDNNSPITKFIIEYEDAMHKPGLWHHQTEVSGTQTTAQLKLSPYVNYSFRVMAVNSIGKSLPSEASEQYLTKASEPDKNPTAVEGLGSEPDNLVITWKPLNGFESNGPGLQYKVSWRQKDGDDEWTSVVVANVSKYIVSGTPTFVPYLIKVQALNDMGFAPEPAVVMGHSGEDLPMVAPGNVRVNVVNSTLAEVHWDPVPLKSIRGHLQGYRIYYWKTQSSSKRNRRHIEKKILTFQGSKTHGMLPGLEPFSHYTLNVRVVNGKGEGPASPDRVFNTPEGVPSAPSSLKIVNPTLDSLTLEWDPPSHPNGILTEYTLKYQPINSTHELGPLVDLKIPANKTRWTLKNLNFSTRYKFYFYAQTSAGSGSQITEEAVTTVDEAGILPPDVGAGKVQAVNPRISNLTAAAAETYANISWEYEGPEHVNFYVEYGVAGSKEEWRKEIVNGSRSFFGLKGLMPGTAYKVRVGAVGDSGFVSSEDVFETGPAMASRQVDIATQGWFIGLMCAVALLILILLIVCFIRRNKGGKYPVKEKEDAHADPEIQPMKEDDGTFGEYSSLKNDAEDHKPLKKGSRTPSDRTVKKEDSDDSLVDYGEGVNGQFNEDGSFIGQYSGKKEKEPAEGNESSEAPSPVNAMNSFV

SEQ ID NO: 55503 - protein, 1180 aa, Homo sapiens
MQLKIMPKKKRLSAGRVPLILFLCQMISALEVPLDQKSTEVMVQPPTITQQSPKDYIIDPRENIVIQCEAKGKPPPSFSWTRNGTHFDIDKDPLVTMKPGTGTLIINIMSEGKAETYEGVYQCTARNERGAAVSNNIVVRPSRSPLWTKEKLEPITLQSGQSLVLPCRPPIGLPPPIIFWMDNSFQRLPQSERVSQGLNGDLYFSNVLPEDTREDYICYARFNHTQTIQQKQPISVKVISAKSSRERPPTFLTPEGNASNKEELRGNVLSLECIAEGLPTPIIYWAKEDGMLPKNRTVYKNFEKTLQIIHVSEADSGNYQCIAKNALGAIHHTISVRVKAAPYWITAPQNLVLSPGEDGTLICRANGNPKPRISWLTNGVPIEIAPDDPSRKIDGDTIIFSNVQERSSAVYQCNASNEYGYLLANAFVNVLAEPPRILTPANTLYQVIANRPALLDCAFFGSPLPTIEWFKGAKGSALHEDIYVLHENGTLEIPVAQKDSTGTYTCVARNKLGMAKNEVHLEIKDPTWIVKQPEYAVVQRGSMVSFECKVKHDHTLSLTVLWLKDNRELPSDERFTVDKDHLVVADVSDDDSGTYTCVANTTLDSVSASAVLSVVAPTPTPAPVYDVPNPPFDLELTDQLDKSVQLSWTPGDDNNSPITKFIIEYEDAMHKPGLWHHQTEVSGTQTTAQLKLSPYVNYSFRVMAVNSIGKSLPSEASEQYLTKASEPDKNPTAVEGLGSEPDNLVITWKPLNGFESNGPGLQYKVSWRQKDGDDEWTSVVVANVSKYIVSGTPTFVPYLIKVQALNDMGFAPEPAVVMGHSGEDLPMVAPGNVRVNVVNSTLAEVHWDPVPLKSIRGHLQGYRIYYWKTQSSSKRNRRHIEKKILTFQGSKTHGMLPGLEPFSHYTLNVRVVNGKGEGPASPDRVFNTPEGVPSAPSSLKIVNPTLDSLTLEWDPPSHPNGILTEYTLKYQPINSTHELGPLVDLKIPANKTRWTLKNLNFSTRYKFYFYAQTSAGSGSQITEEAVTTVDEAMASRQVDIATQGWFIGLMCAVALLILILLIVCFIRRNKGGKYPVKEKEDAHADPEIQPMKEDDGTFGEYSDAEDHKPLKKGSRTPSDRTVKKEDSDDSLVDYGEGVNGQFNEDGSFIGQYSGKKEKEPAEGNESSEAPSPVNAMNSFV

SEQ ID NO: 55504 - protein, 431 aa, Homo sapiens
MQLKIMPKKKRLSAGRVPLILFLCQMISALEVPLDLVQPPTITQQSPKDYIIDPRENIVIQCEAKGKPPPSFSWTRNGTHFDIDKDPLVTMKPGTGTLIINIMSEGKAETYEGVYQCTARNERGAAVSNNIVVRPSRSPLWTKEKLEPITLQSGQSLVLPCRPPIGLPPPIIFWMDNSFQRLPQSERVSQGLNGDLYFSNVLPEDTREDYICYARFNHTQTIQQKQPISVKVISVDELNDTIAANLSDTEFYGAKSSRERPPTFLTPEGNASNKEELRGNVLSLECIAEGLPTPIIYWAKEDGMLPKNRTVYKNFEKTLQIIHVSEADSGNYQCIAKNALGAIHHTISVRVKAAPYWITAPQNLVLSPGEDGTLICRANGNPKPRISWLTNGVPIEIAPDDPSRKIDGDTIIFSNVQERSSAVYQCNASNE

SEQ ID NO: 55505 - protein, 61 aa, Homo sapiens
MQLKIMPKKKRLSAGRVPLILFLCQMISALEVPLDPKLLEDLVQPPTITQQSPKDYIIDPR

SEQ ID NO: 55506 - protein, 106 aa, Homo sapiens
MQLKIMPKKKRLSAGRVPLILFLCQMISALEVPLDLVQPPTITQQSPKDYIIDPRENIVIQCEAKGKPPPSFSWTRNGTHFDIDKDPLVTMKPGTGTLIINIMSEG

SEQ ID NO: 55507 - protein, 1304 aa, Homo sapiens; identical to SEQ ID NO: 55501

SEQ ID NO: 55508 - protein, 148 aa, Homo sapiens
MASRQVDIATQGWFIGLMCAVALLILILLIVCFIRRNKGGKYPVKEKEDAHADPEIQPMKEDDGTFGEYSDAEDHKPLKKGSRTPSDRTVKKEDSDDSLVDYGEGVNGQFNEDGSFIGQYSGKKEKEPAEGNESSEAPSPVNAMNSFV

SEQ ID NO: 55509 - protein, 118 aa, Homo sapiens
MQLKIMPKKKRLSAGRVPLILFLCQMISALEVPLDPKLLEDLVQPPTITQQSPKDYIIDPRENIVIQCEAKGKPPPSFSWTRNGTHFDIDKDPLVTMKPGTGTLIINIMSEGKAETYE

SEQ ID NO: 55510 - protein, 771 aa, Homo sapiens [sequence omitted]

SEQ ID NO: 55511 - protein, 106 aa, Homo sapiens; identical to SEQ ID NO: 55506

SEQ ID NO: 55512 - protein, 1153 aa, Homo sapiens
MQLKIMPKKKRLSAGRVPLILFLCQMISALEVPLDQKSTEVMVQPPTITQQSPKDYIIDPRENIVIQCEAKGKPPPSFSWTRNGTHFDIDKDPLVTMKPGTGTLIINIMSEGKAETYEGVYQCTARNERGAAVSNNIVVRPSRSPLWTKEKLEPITLQSGQSLVLPCRPPIGLPPPIIFWMDNSFQRLPQSERVSQGLNGDLYFSNVLPEDTREDYICYARFNHTQTIQQKQPISVKVISVDELNDTIAANLSDTEFYGAKSSRERPPTFLTPEGNASNKEELRGNVLSLECIAEGLPTPIIYWAKEDGMLPKNRTVYKNFEKTLQIIHVSEADSGNYQCIAKNALGAIHHTISVRVKAAPYWITAPQNLVLSPGEDGTLICRANGNPKPRISWLTNGVPIEIAPDDPSRKIDGDTIIFSNVQERSSAVYQCNASNEYGYLLANAFVNVLAEPPRILTPANTLYQVIANRPALLDCAFFGSPLPTIEWFKGAKGSALHEDIYVLHENGTLEIPVAQKDSTGTYTCVARNKLGMAKNEVHLEIKDPTWIVKQPEYAVVQRGSMVSFECKVKHDHTLSLTVLWLKDNRELPSDERFTVDKDHLVVADVSDDDSGTYTCVANTTLDSVSASAVLSVVAPTPTPAPVYDVPNPPFDLELTDQLDKSVQLSWTPGDDNNSPITKFIIEYEDAMHKPGLWHHQTEVSGTQTTAQLKLSPYVNYSFRVMAVNSIGKSLPSEASEQYLTKASEPDKNPTAVEGLGSEPDNLVITWKPLNGFESNGPGLQYKVSWRQKDGDDEWTSVVVANVSKYIVSGTPTFVPYLIKVQALNDMGFAPEPAVVMGHSGEDLPMVAPGNVRVNVVNSTLAEVHWDPVPLKSIRGHLQGYRIYYWKTQSSSKRNRRHIEKKILTFQGSKTHGMLPGLEPFSHYTLNVRVVNGKGEGPASPDRVFNTPEGVPSAPSSLKIVNPTLDSLTLEWDPPSHPNGILTEYTLKYQPINSTHELGPLVDLKIPANKTRWTLKNLNFSTRYKFYFYAQTSAGSGSQITEEAVTTVDEAGILPPDVGAGKAMASRQVDIATQGWFIGLMCAVALLILILLIVCFIRRNKGGKYPVKEKEDAHADPEIQPMKEDDGTFGEYSDAEDHKPLKKGSRTPSDRTV

SEQ ID NO: 55513 - protein, 226 aa, Homo sapiens
MQVHLTVQVPPKIYDISNDMTVNEGTNVTLTCLATGKPEPSISWRHISPSAKPFENGQYLDIYGITRDQAGEYECSAENDVSFPDVRKVKVVVNFAPTIQEIKSGTVTPGRSGLIRCEGAGVPPPAFEWYKGEKKLFNGQQGIIIQNFSTRSILTVTNVTQEHFGNYTCVAANKLGTTNASLPLNPPSTAQYGITGSADVLFSCWYLVLTLSSFTSIFYLKNAILQ

SEQ ID NO: 55514 - protein, 354 aa, Homo sapiens
MDMMLLVQGACCSNQWLAAVLLSLCCLLPSCLPAGQSVDFPWAAVDNMMVRKGDTAVLRCYLEDGASKGAWLNRSSIIFAGGDKWSVDPRVSISTLNKRDYSLQIQNVDVTDDGPYTCSVQTQHTPRTMQVHLTVQVPPKIYDISNDMTVNEGTNVTLTCLATGKPEPSISWRHISPSAKPFENGQYLDIYGITRDQAGEYECSAENDVSFPDVRKVKVVVNFAPTIQEIKSGTVTPGRSGLIRCEGAGVPPPAFEWYKGEKKLFNGQQGIIIQNFSTRSILTVTNVTQEHFGNYTCVAANKLGTTNASLPLNPPSTAQYGITGSADVLFSCWYLVLTLSSFTSIFYLKNAILQ

SEQ ID NO: 55515 - protein, 308 aa, Homo sapiens [sequence omitted]

SEQ ID NO: 55516 - protein, 710 aa, Homo sapiens
METRESEDLEKTRRKSASDQWNTDNEPAKVKPELLPEKEETSQADQDIQDKEPHCHIPIKRNSIFNRSIRRKSKAKARDNPERNASCLADSQDNGKSVNEPLTLNIPWSRMPPCRTAMQTDPGAQEMSESSSTPGNGATPEEWPALADSPTTLTEALRMIHPIPADSWRNLIEQIGLLYQEYRDKSTLQEIETRRQQDAEIEDNTNGSPASEDTPEEEEEEEEEEEPASPPERKTLPQICLLSNPHSRFNLWQDLPEIRSSGVLEILQPEEIKLQEAMFELVTSEASYYKSLNLLVSHFMENERIRKILHPSEAHILFSNVLDVLAVSERFLLELEHRMEENIVISDVCDIVYRYAADHFSVYITYVSNQTYQERTYKQLLQEKAAFRELIAQLELDPKCRGLPFSSFLILPFQRITRLKLLVQNILKRVEERSERECTALDAHKELEMVVKACNEGVRKMSRTEQMISIQKKMEFKIKSVPIISHSRWLLKQGELQQMSGPKTSRTLRTKKLFHEIYLFLFNDLLVICRQIPGDKYQVFDSAPRGLLRVEELEDQGQTLANVFILRLLENADDREATYMLKASSQSEMKRWMTSLAPNRRTKFVSFTSRLLDCPQVQCVHPYVAQQPDELTLELADILNILDKTDDGWIFGERLHDQERGWFPSSMTEEILNPKIRSQNLKECFRVHKMDDPQRSQNKDRRKLGSRNRQ

SEQ ID NO: 55517 - protein, 618 aa, Homo sapiens
MELLAAAFSAACAVDHDSSTSESDARDSAAGHLPGSESSSTPGNGATPEEWPALADSPTTLTEALRMIHPIPADSWRNLIEQIGLLYQEYRDKSTLQEIETRRQQDAEIEDNTNGSPASEDTPEEEEEEEEEEEPASPPERKTLPQICLLSNPHSRFNLWQDLPEIRSSGVLEILQPEEIKLQEAMFELVTSEASYYKSLNLLVSHFMENERIRKILHPSEAHILFSNVLDVLAVSERFLLELEHRMEENIVISDVCDIVYRYAADHFSVYITYVSNQTYQERTYKQLLQEKAAFRELIAQLELDPKCRGLPFSSFLILPFQRITRLKLLVQNILKRVEERSERECTALDAHKELEMVVKACNEGVRKMSRTEQMISIQKKMEFKIKSVPIISHSRWLLKQGELQQMSGPKTSRTLRTKKLFHEIYLFLFNDLLVICRQIPGDKYQVFDSAPRGLLRVEELEDQGQTLANVFILRLLENADDREATYMLKASSQSEMKRWMTSLAPNRRTKFVSFTSRLLDCPQVQCVHPYVAQQPDELTLELADILNILDKTDDGWIFGERLHDQERGWFPSSMTEEILNPKIRSQNLKECFRVHKMDDPQRSQNKDRRKLGSRNRQ

SEQ ID NO: 55518 - protein, 238 aa, Homo sapiens
MELLAAAFSAACAVDHDSSTSESDARDSAAGHLPGSESSSTPGNGATPEEWPALADSPTTLTEALRMIHPIPADSWRNLIEQIGLLYQEYRDKSTLQEIETRRQQDAEIEDNTNGSPASEDTPEEEEEEEEEEEPASPPERKTLPQICLLSNPHSRFNLWQDLPEIRSSGVLEILQPEEIKLQEAMFELVTSEASYYKSLNLLVSHFMENERIRKILHPSEAHILFSNVLDVLAVSER

SEQ ID NO: 55519 - protein, 433 aa, Homo sapiens
MFELVTSEASYYKSLNLLVSHFMENERIRKILHPSEAHILFSNVLDVLAVSERFLLELEHRMEENIVISDVCDIVYRYAADHFSVYITYVSNQTYQERTYKQLLQEKAAFRELIAQLELDPKCRGLPFSSFLILPFQRITRLKLLVQNILKRVEERSERECTALDAHKELEMVVKACNEGVRKMSRTEQMISIQKKMEFKIKSVPIISHSRWLLKQGELQQMSGPKTSRTLRTKKLFHEIYLFLFNDLLVICRQIPGDKYQVFDSAPRGLLRVEELEDQGQTLANVFILRLLENADDREATYMLKASSQSEMKRWMTSLAPNRRTKFVSFTSRLLDCPQVQCVHPYVAQQPDELTLELADILNILDKTDDGWIFGERLHDQERGWFPSSMTEEILNPKIRSQNLKECFRVHKMDDPQRSQNKDRRKLGSRNRQ

SEQ ID NO: 55520 - protein, 600 aa, Homo sapiens
MPPCRTAMQTDPGAQEMSESSSTPGNGATPEEWPALADSPTTLTEALRMIHPIPADSWRNLIEQIGLLYQEYRDKSTLQEIETRRQQDAEIEDNTNGSPASEDTPEEEEEEEEEEEPASPPERKTLPQICLLSNPHSRFNLWQDLPEIRSSGVLEILQPEEIKLQEAMFELVTSEASYYKSLNLLVSHFMENERIRKILHPSEAHILFSNVLDVLAVSERFLLELEHRMEENIVISDVCDIVYRYAADHFSVYITYVSNQTYQERTYKQLLQEKAAFRELIAQLELDPKCRGLPFSSFLILPFQRITRLKLLVQNILKRVEERSERECTALDAHKELEMVVKACNEGVRKMSRTEQMISIQKKMEFKIKSVPIISHSRWLLKQGELQQMSGPKTSRTLRTKKLFHEIYLFLFNDLLVICRQIPGDKYQVFDSAPRGLLRVEELEDQGQTLANVFILRLLENADDREATYMLKASSQSEMKRWMTSLAPNRRTKFVSFTSRLLDCPQVQCVHPYVAQQPDELTLELADILNILDKTDDGWIFGERLHDQERGWFPSSMTEEILNPKIRSQNLKECFRVHKMDDPQRSQNKDRRKLGSRNRQ

SEQ ID NO: 55521 - protein, 234 aa, Homo sapiens
MTGSSVFDYIHPGDHSEVLEQLGLRTPTPGPPTPPSVSSSSSSSSSLADTPEIEASLTKVPPSSLVQERSFFVRMKSTLTKRGLHVKASGYKVIHVTGRLRAHALGLVALGHTLPPAPLAELPLHGHMIVFRLSLGLTILACESRVSDHMDLGPSELVGRSCYQFVHGQDATRIRQSHVDSCRGLRVAAVCGHSGWEREEPRGAPCALGQPRAQPSRGWPNSFGCLPASSQRGL

SEQ ID NO: 55522 - protein, 590 aa, Homo sapiens
MAAPYPGSGGGSEVKCVGGRGASVPWDFLPGLMVKAPSGPCLQAQRKEKSRNAARSRRGKENLEFFELAKLLPLPGAISSQLDKASIVRLSVTYLRLRRFAALGAPPWGLRAAGPPAGLAPGRRGPAALVSEVFEQHLGGHILQSLDGFVFALNQEGKFLYISETVSIYLGLSQVEMTGSSVFDYIHPGDHSEVLEQLGLRTPTPGPPTPPSVSSSSSSSSSLADTPEIEASLTKVPPSSLVQERSFFVRMKSTLTKRGLHVKASGYKVIHVTGRLRAHALGLVALGHTLPPAPLAELPLHGHMIVFRLSLGLTILACESRVSDHMDLGPSELVGRSCYQFVHGQDATRIRQSHVDLLDKGQVMTGYYRWLQRAGGFVWLQSVATVAGSGKSPGEHHVLWVSHVLSQAEGGQTPLDAFQLPASVACEEASSPGPEPTEPEPPTEGKQAAPAENEAPQTQGKRIKVEPGPRETKGSEDSGDEDPSSHPATPRPEFTSVIRAGVLKQDPVRPWGLAPPGDPPPTLLHAGFLPPVVRGLCTPGTIRYGPAELGLVYPHLQRLGPGPALPEAFYPPLGLPYPGPAGTRLPRKGD

SEQ ID NO: 55523 - protein, 824 aa, Homo sapiens
MDEDEKDRAKRASRNKSEKKRRDQFNVLIKELSSMLPGNTRKMDKTTVLEKVIGFLQKHNEVSAQTEICDIQQDWKPSFLSNEEFTQLMLEALDGFIIAVTTDGSIIYVSDSITPLLGHLPSDVMDQNLLNFLPEQEHSEVYKILSSHMLVTDSPSPEYLKSDSDLEFYCHLLRGSLNPKEFPTYEYIKFVGNFRSYNNVPSPSCNGFDNTLSRPCRVPLGKEVCFIATVRLATPQFLKEMCIVDEPLEEFTSRHSLEWKFLFLDHRAPPIIGYLPFEVLGTSGYDYYHIDDLELLARCHQHLMQFGKGKSCCYRFLTKGQQWIWLQTHYYITYHQWNSKPEFIVCTHSVVSYADVRVERRQELALEDPPSEALHSSALKDKGSSLEPRQHFNTLDVGASGLNTSHSPSASSRSSHKSSHTAMSEPTSTPTKLMAEASTPALPRSATLPQELPVPGLSQAATMPAPLPSPSSCDLTQQLLPQTVLQSTPAPMAQFSAQFSMFQTIKDQLEQRTRILQANIRWQQEELHKIQEQLCLVQDSNVQMFLQQPAVSLSFSSTQRPEAQQQLQQRSAAVTQPQLGAGPQLPGQISSAQVTSQHLLRESSVISTQGPKPMRSSQLMQSSGRSGSSLVSPFSSATAALPPSLNLTTPASTSQDASQCQPSPDFSHDRQLRLLLSQPIQPMMPGSCDARQPSEVSRTGRQVKYAQSQTVFQNPDAHPANSSSAPMPVLLMGQAVLHPSFPASQPSPLQPAQARQQPPQHYLQVQAPTSLHSEQQDSLLLSTYSQQPGTLGYPQPPPAQPQPLRPPRRVSSLSESSGLQQPPR

SEQ ID NO: 55524 - protein, 889 aa, Homo sapiens
MYAYGFVGRCAPFPAEEGRTFDLSEELGRSVTREGTGTTRLNSEPVPLLCLPLLNCSRKNCIENLMDEDEKDRAKRASRNKSEKKRRDQFNVLIKELSSMLPGNTRKMDKTTVLEKVIGFLQKHNEVSAQTEICDIQQDWKPSFLSNEEFTQLMLEALDGFIIAVTTDGSIIYVSDSITPLLGHLPSDVMDQNLLNFLPEQEHSEVYKILSSHMLVTDSPSPEYLKSDSDLEFYCHLLRGSLNPKEFPTYEYIKFVGNFRSYNNVPSPSCNGFDNTLSRPCRVPLGKEVCFIATVRLATPQFLKEMCIVDEPLEEFTSRHSLEWKFLFLDHRAPPIIGYLPFEVLGTSGYDYYHIDDLELLARCHQHLMQFGKGKSCCYRFLTKGQQWIWLQTHYYITYHQWNSKPEFIVCTHSVVSYADVRVERRQELALEDPPSEALHSSALKDKGSSLEPRQHFNTLDVGASGLNTSHSPSASSRSSHKSSHTAMSEPTSTPTKLMAEASTPALPRSATLPQELPVPGLSQAATMPAPLPSPSSCDLTQQLLPQTVLQSTPAPMAQFSAQFSMFQTIKDQLEQRTRILQANIRWQQEELHKIQEQLCLVQDSNVQMFLQQPAVSLSFSSTQRPEAQQQLQQRSAAVTQPQLGAGPQLPGQISSAQVTSQHLLRESSVISTQGPKPMRSSQLMQSSGRSGSSLVSPFSSATAALPPSLNLTTPASTSQDASQCQPSPDFSHDRQLRLLLSQPIQPMMPGSCDARQPSEVSRTGRQVKYAQSQTVFQNPDAHPANSSSAPMPVLLMGQAVLHPSFPASQPSPLQPAQARQQPPQHYLQVQAPTSLHSEQQDSLLLSTYSQQPGTLGYPQPPPAQPQPLRPPRRVSSLSESSGLQQPPR

SEQ ID NO: 55525 - protein, 257 aa, Homo sapiens
MAPTKPSFQQDPSRRERITAQHPLPNQSECRKIYRYDGIYCESTYQNLQALRKEKSRDAARSRRGKENFEFYELAKLLPLPAAITSQLDKASIIRLTISYLKMRDFANQGDPPWNLRMEGPPPNTSVKVIGAQRRRSPSALAIEVFEAHLGSHILQSLDGFVFALNQEGKFLYISETVSIYLGLSQVELTGSSVFDYVHPGDHVEMAEQLGMKLPPGRGLLSQGTAEDGASSASSSSQSETPEPVVCFPPASDQFLL

SEQ ID NO: 55526 - protein, 901 aa, Homo sapiens
MAPTKPSFQQDPSRRERLQALRKEKSRDAARSRRGKENFEFYELAKLLPLPAAITSQLDKASIIRLTISYLKMRDFANQGDPPWNLRMEGPPPNTSVKGAQRRRSPSALAIEVFEAHLGSHILQSLDGFVFALNQEGKFLYISETVSIYLGLSQVELTGSSVFDYVHPGDHVEMAEQLGMKLPPGRGLLSQGTAEDGASSASSSSQSETPEPVESTSPSLLTTDNTLERSFFIRMKSTLTKRGVHIKSSGYKVIHITGRLRLRVSLSHGRTVPSQIMGLVVVAHALPPPTINEVRIDCHMFVTRVNMDLNIIYCENRISDYMDLTPVDIVGKRCYHFIHAEDVEGIRHSHLDLLNKGQCVTKYYRWMQKNGGYIWIQSSATIAINAKNANEKNIIWVNYLLSNPEYKDTPMDIAQLPHLPEKTSESSETSDSESDSKDTSGITEDNENSKSDEKGNQSENSEDPEPDRKKSGNACDNDMNCNDDGHSSSNPDSRDSDDSFEHSDFENPKAGEDGFGALGAMQIKVERYVESESDLRLQNCESLTSDSAKDSDSAGEAGAQASSKHQKRKKRRKRQKGGSASRRRLSSASSPGGLDAGLVEPPRLLSSPNSASVLKIKTEISEPINFDNDSSIWNYPPNREISRNESPYSMTKPPSSEHFPSPQGGGGGGGGGGGLHVAIPDSVLTPPGADGAAARKTQFGASATAALAPVASDPLSPPLSASPRDKHPGNGGGGGGGGGGAGGGGPSASNSLLYTGDLEALQRLQAGNVVLPLVHRVTGTLAATSTAAQRVYTTGTIRYAPAEVTLAMQSNLLPNAHAVNFVDVNSPGFGLDPKTPMEMLYHHVHRLNMSGPFGGAVSAASLTQMPAGNVFTTAEGLFSTLPFPVYSNGIHAAQTLERKED

SEQ ID NO: 55527 - protein, 933 aa, Homo sapiens
MAPTKPSFQQDPSRRERITAQHPLPNQSECRKIYRYDGIYCESTYQNLQALRKEKSRDAARSRRGKENFEFYELAKLLPLPAAITSQLDKASIIRLTISYLKMRDFANQGDPPWNLRMEGPPPNTSVKVIGAQRRRSPSALAIEVFEAHLGSHILQSLDGFVFALNQEGKFLYISETVSIYLGLSQVELTGSSVFDYVHPGDHVEMAEQLGMKLPPGRGLLSQGTAEDGASSASSSSQSETPEPVESTSPSLLTTDNTLERSFFIRMKSTLTKRGVHIKSSGYKVIHITGRLRLRVSLSHGRTVPSQIMGLVVVAHALPPPTINEVRIDCHMFVTRVNMDLNIIYCENRISDYMDLTPVDIVGKRCYHFIHAEDVEGIRHSHLDLLNKGQCVTKYYRWMQKNGGYIWIQSSATIAINAKNANEKNIIWVNYLLSNPEYKDTPMDIAQLPHLPEKTSESSETSDSESDSKDTSGITEDNENSKSDEKGNQSENSEDPEPDRKKSGNACDNDMNCNDDGHSSSNPDSRDSDDSFEHSDFENPKAGEDGFGALGAMQIKVERYVESESDLRLQNCESLTSDSAKDSDSAGEAGAQASSKHQKRKKRRKRQKGGSASRRRLSSASSPGGLDAGLVEPPRLLSSPNSASVLKIKTEISEPINFDNDSSIWNYPPNREISRNESPYSMTKPPSSEHFPSPQGGGGGGGGGGGLHVAIPDSVLTPPGADGAAARKTQFGASATAALAPVASDPLSPPLSASPRDKHPGNGGGGGGGGGGAGGGGPSASNSLLYTGDLEALQRLQAGNVVLPLVHRVTGTLAATSTAAQRVYTTGTIRYAPAEVTLAMQSNLLPNAHAVNFVDVNSPGFGLDPKTPMEMLYHHVHRLNMSGPFGGAVSAASLTQMPAGNVFTTAEGLFSTLPFPVYSNGIHAAQTLERKED

SEQ ID NO: 55528 - protein, 920 aa, Homo sapiens
MAPTKPSFQQDPSRRERLQALRKEKSRDAARSRRGKENFEFYELAKLLPLPAAITSQLDKASIIRLTISYLKMRDFANQGDPPWNLRMEGPPPNTSVKGIQMWKSELCMRKTPCEVIGAQRRRSPSALAIEVFEAHLGSHILQSLDGFVFALNQEGKFLYISETVSIYLGLSQVELTGSSVFDYVHPGDHVEMAEQLGMKLPPGRGLLSQGTAEDGASSASSSSQSETPEPVESTSPSLLTTDNTLERSFFIRMKSTLTKRGVHIKSSGYKVIHITGRLRLRVSLSHGRTVPSQIMGLVVVAHALPPPTINEVRIDCHMFVTRVNMDLNIIYCENRISDYMDLTPVDIVGKRCYHFIHAEDVEGIRHSHLDLLNKGQCVTKYYRWMQKNGGYIWIQSSATIAINAKNANEKNIIWVNYLLSNPEYKDTPMDIAQLPHLPEKTSESSETSDSESDSKDTSGITEDNENSKSDEKGNQSENSEDPEPDRKKSGNACDNDMNCNDDGHSSSNPDSRDSDDSFEHSDFENPKAGEDGFGALGAMQIKVERYVESESDLRLQNCESLTSDSAKDSDSAGEAGAQASSKHQKRKKRRKRQKGGSASRRRLSSASSPGGLDAGLVEPPRLLSSPNSASVLKIKTEISEPINFDNDSSIWNYPPNREISRNESPYSMTKPPSSEHFPSPQGGGGGGGGGGGLHVAIPDSVLTPPGADGAAARKTQFGASATAALAPVASDPLSPPLSASPRDKHPGNGGGGGGGGGGAGGGGPSASNSLLYTGDLEALQRLQAGNVVLPLVHRVTGTLAATSTAAQRVYTTGTIRYAPAEVTLAMQSNLLPNAHAVNFVDVNSPGFGLDPKTPMEMLYHHVHRLNMSGPFGGAVSAASLTQMPAGNVFTTAEGLFSTLPFPVYSNGIHAAQTLERKED

SEQ ID NO: 55529 - protein, 153 aa, Homo sapiens
MRDFANQGDPPWNLRMEGPPPNTSVKGAQRRRSPSALAIEVFEAHLGSHILQSLDGFVFALNQEGKFLYISETVSIYLGLSQVELTGSSVFDYVHPGDHVEMAEQLGMKLPPGRGLLSQGTAEDGASSASSSSQSETPEPVVCFPPASDQFLL

SEQ ID NO: 55530 - protein, 903 aa, Homo sapiens
MAPTKPSFQQDPSRRERLQALRKEKSRDAARSRRGKENFEFYELAKLLPLPAAITSQLDKASIIRLTISYLKMRDFANQGDPPWNLRMEGPPPNTSVKVIGAQRRRSPSALAIEVFEAHLGSHILQSLDGFVFALNQEGKFLYISETVSIYLGLSQVELTGSSVFDYVHPGDHVEMAEQLGMKLPPGRGLLSQGTAEDGASSASSSSQSETPEPVESTSPSLLTTDNTLERSFFIRMKSTLTKRGVHIKSSGYKVIHITGRLRLRVSLSHGRTVPSQIMGLVVVAHALPPPTINEVRIDCHMFVTRVNMDLNIIYCENRISDYMDLTPVDIVGKRCYHFIHAEDVEGIRHSHLDLLNKGQCVTKYYRWMQKNGGYIWIQSSATIAINAKNANEKNIIWVNYLLSNPEYKDTPMDIAQLPHLPEKTSESSETSDSESDSKDTSGITEDNENSKSDEKGNQSENSEDPEPDRKKSGNACDNDMNCNDDGHSSSNPDSRDSDDSFEHSDFENPKAGEDGFGALGAMQIKVERYVESESDLRLQNCESLTSDSAKDSDSAGEAGAQASSKHQKRKKRRKRQKGGSASRRRLSSASSPGGLDAGLVEPPRLLSSPNSASVLKIKTEISEPINFDNDSSIWNYPPNREISRNESPYSMTKPPSSEHFPSPQGGGGGGGGGGGLHVAIPDSVLTPPGADGAAARKTQFGASATAALAPVASDPLSPPLSASPRDKHPGNGGGGGGGGGGAGGGGPSASNSLLYTGDLEALQRLQAGNVVLPLVHRVTGTLAATSTAAQRVYTTGTIRYAPAEVTLAMQSNLLPNAHAVNFVDVNSPGFGLDPKTPMEMLYHHVHRLNMSGPFGGAVSAASLTQMPAGNVFTTAEGLFSTLPFPVYSNGIHAAQTLERKED

SEQ ID NO: 55531 - protein, 802 aa, Homo sapiens
MYRSTKGASKARRDQINAEIRNLKELLPLAEADKVRLSYLHIMSLACIYTRKGVFFAGGTPLAGPTGLLSAQELEDIVAALPGFLLVFTAEGKLLYLSESVSEHLGHSMVDLVAQGDSIYDIIDPADHLTVRQQLTLPSALDTDRLFRCRFNTSKSLRRQSAGNKLVLIRGRFHAHPPGAYWAGNPVFTAFCAPLEPRPRPGPGPGPGPASLFLAMFQSRHAKDLALLDISESVLIYLGFERSELLCKSWYGLLHPEDLAHASAQHYRLLAESGDIQAEMVVRLQAKTGGWAWIYCLLYSEGPEGPITANNYPISDMEAWSLRQQLNSEDTQAAYVLGTPTMLPSFPENILSQEECSSTNPLFTAALGAPRSTSFPSAPELSVVSASEELPRPSKELDFSYLTFPSGPEPSLQAELSKDLVCTPPYTPHQPGGCAFLFSLHEPFQTHLPTPSSTLQEQLTPSTATFSDQLTPSSATFPDPLTSPLQGQLTETSVRSYEDQLTPCTSTFPDQLLPSTATFPEPLGSPAHEQLTPPSTAFQAHLDSPSQTFPEQLSPNPTKTYFAQEGCSFLYEKLPPSPSSPGNGDCTLLALAQLRGPLSVDVPLVPEGLLTPEASPVKQSFFHYSEKEQNEIDRLIQQISQLAQGMDRPFSAEAGTGGLEPLGGLEPLDSNLSLSGAGPPVLSLDLKPWKCQELDFLADPDNMFLEETPVEDIFMDLSTPDPSEEWGSGDPEAEGPGGAPSPCNNLSPEDHSFLEDLATYETAFETGVSAFPYDGFTDELHQLQSQVQDSFHEDGSGGEPTF

SEQ ID NO: 55532 - protein, 234 aa, Homo sapiens
MYRSTKGASKARRDQINAEIRNLKELLPLAEADKVRLSYLHIMSLACIYTRKGVFFAGGTPLAGPTGLLSAQELEDIVAALPGFLLVFTAEGKLLYLSESVSEHLGHSMVDLVAQGDSIYDIIDPADHLTVRQQLTLPSALDTDRLFRCRFNTSKSLRRQSAGNKLVLIRGRFHAHPPGAYWAGNPVFTAFCAPLEPRPRPGPGPGPGPASLFLAMFQSRHAKDLALLDISESG

SEQ ID NO: 55533 - protein, 432 aa, Homo sapiens
MPAGRAARTCALLALCLLGAGAQDFGPTRFICTSVPVDADMCAASVAAGGAEELRSSVLQLRETVLQQKETILSQKETIRELTAKLGRCESQSTLDPGAGEARAGGGRKQPGSGKNTMGDLSRTPAAETLSQLGQTLQSLKTRLENLEQYSRLNSSSQTNSLKDLLQSKIDELERQVLSRVNTLEEGKGGPRNDTEERVKIETALTSLHQRISELEKGQKDNRPGDKFQLTFPLRTNYMYAKVKKSLPEMYAFTVCMWLKSSATPGVGTPFSYAVPGQANELVLIEWGNNPMEILINDKVAKLPFVINDGKWHHICVTWTTRDGVWEAYQDGTQGGSGENLAPYHPIKPQGVLVLGQEQDTLGGGFDATQAFVGELAHFNIWDRKLTPGEVYNLATCSTKALSGNVIAWAESHIEIYGGATKWTFEACRQIN

SEQ ID NO: 55534 - protein, 194 aa, Homo sapiens
MYAKVKKSLPEMYAFTVCMWLKSSATPGVGTPFSYAVPGQANELVLIEWGNNPMEILINDKVAKLPFVINDGKWHHICVTWTTRDGVWEAYQDGTQGGSGENLAPYHPIKPQGVLVLGQEQDTLGGGFDATQAFVGELAHFNIWDRKLTPGEVYNLATCSTKALSGNVIAWAESHIEIYGGATKWTFEACRQIN

SEQ ID NO: 55535 - protein, 431 aa, Homo sapiens
MLALLAASVALAVAAGAQDSPAPGSRFVCTALPPEAVHAGCPLPAMPMQGGAQSPEEELRAAVLQLRETVVQQKETLGAQREAIRELTGKLARCEGLAGGKARGAGATGKDTMGDLPRDPGHVVEQLSRSLQTLKDRLESLEHQLRANVSNAGLPGDFREVLQQRLGELERQLLRKVAELEDEKSLLHNETSAHRQKTESTLNALLQRVTELERGNSAFKSPDAFKVSLPLRTNYLYGKIKKTLPELYAFTICLWLRSSASPGIGTPFSYAVPGQANEIVLIEWGNNPIELLINDKVAQLPLFVSDGKWHHICVTWTTRDGMWEAFQDGEKLGTGENLAPWHPIKPGGVLILGQEQDTVGGRFDATQAFVGELSQFNIWDRVLRAQEIVNIANCSTNMPGNIIPWVDNNVDVFGGASKWPVETCEERLLDL

SEQ ID NO: 55536 - protein, 81 aa, Homo sapiens
MAAVAAASAELLIIGWYIFRVLLQVFLECCIYWVGFAFRNPPGTQPIARSEVFRYSLQKLAYTVSRTGRQVLGERRQRAPN

SEQ ID NO: 55537 - protein, 54 aa, Homo sapiens
MAAVAAASAELLIIGWYIFRVLLQVFRYSLQKLAYTVSRTGRQVLGERRQRAPN

SEQ ID NO: 55538 - protein, 89 aa, Homo sapiens
MISSVKLNLILVLSLSTMHVFWCYPVPSSKVSGKSDYFLILLNSCPTRLDRSKELAFLKPILEKMFVKRSFRNGVGTGMKKTSFQRAKS

SEQ ID NO: 55539 - protein, 174 aa, Homo sapiens
VVLLYASTYVLVSLSIDRYHAIVYPMKVLIVIAWSLSFLFSIPTLIIFGKRTLSNGEVQCWALWPDDSYWTPYMTIVAFLGSLITFICCWSPYFLFDILDNFNLLPDTQERFYASVIIQNLPALNSAINPLIYCVFSSSISFPCREQRSQDSRMTFRERTERHEMQILSKPEFI

SEQ ID NO: 55540 - protein, 377 aa, Homo sapiens
MPANFTEGSFDSSGTGQTLDSSPVACTETVTFTEVVEGKEWGSFYYSFKTEQLITLWVLFVFTIVGNSVVLFSTWRRKKKSRMTFFVTQLAITDSFTGLVNILTDINWRFTGDFTAPDLVCRVVRYLQVVLLYASTYVLVSLSIDRYHAIVYPMKFLQGEKQARVLIVIAWSLSFLFSIPTLIIFGKRTLSNGEVQCWALWPDDSYWTPYMTIVAFLVYFIPLTIISIMYGIVIRTIWIKSKTYETVISNCSDGKLCSSYNRGLISKAKIKAIKYSIIIILAFICCWSPYFLFDILDNFNLLPDTQERFYASVIIQNLPALNSAINPLIYCVFSSSISFPCRVIRLRQLQEAALMLCPQRENWKGTWPGVPSWALPR

SEQ ID NO: 55541 - protein, 371 aa, Homo sapiens
MPANFTEGSFDSSGTGQTLDSSPVACTETVTFTEVVEGKEWGSFYYSFKTEQLITLWVLFVFTIVGNSVVLFSTWRRKKKSRMTFFVTQLAITDSFTGLVNILTDINWRFTGDFTAPDLVCRVVRYLQVVLLYASTYVLVSLSIDRYHAIVYPMKFLQGEKQARVLIVIAWSLSFLFSIPTLIIFGKRTLSNGEVQCWALWPDDSYWTPYMTIVAFLVYFIPLTIISIMYGIVIRTIWIKSKTYETVISNCSDGKLCSSYNRGLISKAKIKAIKYSIIIILAFICCWSPYFLFDILDNFNLLPDTQERFYASVIIQNLPALNSAINPLIYCVFSSSISFPCREQRSQDSRMTFRERTERHEMQILSKPEFI

SEQ ID NO: 55542 - protein, 390 aa, Homo sapiens
MPANFTEGSFDSSGTGQTLDSSPVACTETVTFTEVVEGKEWGSFYYSFKTEQLITLWVLFVFTIVGNSVVLFSTWRRKKKSRMTFFVTQLAITDSFTGLVNILTDINWRFTGDFTAPDLVCRVVRYLQVVLLYASTYVLVSLSIDRYHAIVYPMKFLQGEKQARVLIVIAWSLSFLFSIPTLIIFGKRTLSNGEVQCWALWPDDSYWTPYMTIVAFLVYFIPLTIISIMYGIVIRTIWIKSKTYETVISNCSDGKLCSSYNRGLISKAKIKAIKYSIIIILAFICCWSPYFLFDILDNFNLLPDTQERFYASVIIQNLPALNSAINPLIYCVFSSSISFPCRANSSVYLLACDVSVLWALVLTSEKESCESWRRKGAKITGFQNDVPGEN

SEQ ID NO: 55543 - protein, 305 aa, Homo sapiens
MPANFTEGSFDSSGTGQTLDSSPVACTETVTFTEVVEGKEWGSFYYSFKTEQLITLWVLFVFTIVGNSVVLFSTWRRKKKSRMTFFVTQLAITEKQARVLIVIAWSLSFLFSIPTLIIFGKRTLSNGEVQCWALWPDDSYWTPYMTIVAFLVYFIPLTIISIMYGIVIRTIWIKSKTYETVISNCSDGKLCSSYNRGLISKAKIKAIKYSIIIILAFICCWSPYFLFDILDNFNLLPDTQERFYASVIIQNLPALNSAINPLIYCVFSSSISFPCREQRSQDSRMTFRERTERHEMQILSKPEFI

SEQ ID NO: 55544 - protein, 143 aa, Homo sapiens
MPANFTEGSFDSSGTGQTLDSSPVACTETVTFTEVVEGKEWGSFYYSFKTEQLITLWVLFVFTIVGNSVVLFSTWRRKKKSRMTFFVTQLAITDSFTGLVNILTDINWRFTGDFTAPDLVCRVVRYLQVMVMKLFHIQKMNME

SEQ ID NO: 55545 - protein, 94 aa, Homo sapiens
MPANFTEGSFDSSGTGQTLDSSPVACTETVTFTEVVEGKEWGSFYYSFKTEQLITLWVLFVFTIVGNSVVLFSTWRRKKKSRMTFFVTQLAITV

SEQ ID NO: 55546 - protein, 97 aa, Homo sapiens
MLGNKRLGLSGLTLALSLLVCLGALAEAYPSKPDNPGEDAPAEDMARYYSALRHYINLITRQRYGKRSSPETLISDLLMRESTENVPRTRLEDPAMW

SEQ ID NO: 55547 - protein, 97 aa, Homo sapiens; identical to SEQ ID NO: 55546

SEQ ID NO: 55548 - protein, 97 aa, Homo sapiens; identical to SEQ ID NO: 55546

SEQ ID NO: 55549 - protein, 384 aa, Homo sapiens
MNSTLFSQVENHSVHSNFSEKNAQLLAFENDDCHLPLAMIFTLALAYGAVIILGVSGNLALIIIILKQKEMRNVTNILIVNLSFSDLLVAIMCLPFTFVYTLMDHWVFGEAMCKLNPFVQCVSITVSIFSLVLIAVERHQLIINPRGWRPNNRHAYVGIAVIWVLAVASSLPFLIYQVMTDEPFQNVTLDAYKDKYVCFDQFPSDSHRLSYTTLLLVLQYFGPLCFIFICYFKIYIRLKRRNNMMDKMRDNKYRSSETKRINIMLLSIVVAFAVCWLPLTIFNTVFDWNHQIIATCNHNLLFLLCHLTAMISTCVNPIFYGFLNKNFQRDLQFFFNFCDFRSRDDDYETIAMSTMHTDVSKTSLKQASPVAFKKINNNDDNEKI

SEQ ID NO: 55550 - protein, 61 aa, Homo sapiens
MNSTLFSQVENHSVHSNFSEKNAQLLAFENDDCHLPLAMIFTLALAYGAVIILGVSGNLAL

SEQ ID NO: 55551 - protein, 141 aa, Homo sapiens
MMDKMRDNKYRSSETKRINIMLLSIVVAFAVCWLPLTIFNTVFDWNHQIIATCNHNLLFLLCHLTAMISTCVNPIFYGFLNKNFQRDLQFFFNFCDFRSRDDDYETIAMSTMHTDVSKTSLKQASPVAFKKINNNDDNEKI

SEQ ID NO: 55552 - protein, 25 aa, Homo sapiens
MNSTLFSQVENHSVHSNFSEKNAQL

SEQ ID NO: 55553 - protein, 60 aa, Homo sapiens
MNSTLFSQVENHSVHSNFSEKNAQLLAFENDDCHLPLAMIFTLALAYGAVIILGVSGNLA

SEQ ID NO: 55554 - protein, 381 aa, Homo sapiens
MGPIGAEADENQTVEEMKVEQYGPQTTPRGELVPDPEPELIDSTKLIEVQVVLILAYCSIILLGVIGNSLVIHVVIKFKSMRTVTNFFIANLAVADLLVNTLCLPFTLTYTLMGEWKMGPVLCHLVPYAQGLAVQVSTITLTVIALDRHRCIVYHLESKISKRISFLIIGLAWGISALLASPLAIFREYSLIEIIPDFEIVACTEKWPGEEKSIYGTVYSLSSLLILYVLPLGIISFSYTRIWSKLKNHVSPGAANDHYHQRRQKTTKMLVCVVVVFAVSWLPLHAFQLAVDIDSQVLDLKEYKLIFTVFHIIAMCSTFANPLLYGWMNSNYRKAFLSAFRCEQRLDAIHSEVSVTFKAKKNLEVRKNSGPNDSFTEATNV

SEQ ID NO: 55555 - protein, 381 aa, Homo sapiens; identical to SEQ ID NO: 55554

SEQ ID NO: 55556 - protein, 445 aa, Homo sapiens
MDLELDEYYNKTLATENNTAATRNSDFPVWDDYKSSVDDLQYFLIGLYTFVSLLGFMGNLLILMALMKKRNQKTTVNFLIGNLAFSDILVVLFCSPFTLTSVLLDQWMFGKVMCHIMPFLQCVSVLVSTLILISIAIVRYHMIKHPISNNLTANHGYFLIATVWTLGFAICSPLPVFHSLVELQETFGSALLSSRYLCVESWPSDSYRIAFTISLLLVQYILPLVCLTVSHTSVCRSISCGLSNKENRLEENEMINLTLHPSKKSGPQVKLSGSHKWSYSFIKKHRRRYSKKTACVLPAPERPSQENHSRILPENFGSVRSQLSSSSKFIPGVPTCFEIKPEENSDVHELRVKRSVTRIKKRSRSVFYRLTILILVFAVSWMPLHLFHVVTDFNDNLISNRHFKLVYCICHLLGMMSCCLNPILYGFLNNGIKADLVSLIHCLHM

SEQ ID NO: 55557 - protein, 445 aa, Homo sapiens; identical to SEQ ID NO: 55556

SEQ ID NO: 55558 - protein, 445 aa, Homo sapiens; identical to SEQ ID NO: 55556

SEQ ID NO: 55559 - protein, 328 aa, Homo sapiens
MDNASFSEPWPANASGPDPALSCSNASTLAPLPAPLAVAVPVVYAVICAVGLAGNSAVLYVLLRAPRMKTVTNLFILNLAIADELFTLVLPINIADFLLRQWPFGELMCKLIVAIDQYNTFSSLYFLTVMSADRYLVVLATAESRRVAGRTYSAARAVSLAVWGIVTLVVLPFAVFARLDDEQGRRQCVLVFPQPEAFWWRASRLYTLVLGFAIPVSTICVLYTTLLCRLHAMRLDSHAKALERAKKRVTFLVVAILAVCLLCWTPYHLSTVVALTTDLPQTPLVIAISYFITSLSYANSCLNPFLYAFLDASFRRNLRQLITCRAAA

SEQ ID NO: 55560 - protein, 532 aa, Homo sapiens
MLAEPFPKVVASLIILHLSGATKKGTEKQTTSETQKSVQCGTWTKHAEGGIFTSPNYPSKYPPDRECIYIIEAAPRQCIELYFDEKYSIEPSWECKFDHIEVRDGPFGFSPIIGRFCGQQNPPVIKSSGRFLWIKFFADGELESMGFSARYNFTPDPDFKDLGALKPLPACEFEMGGSEGIVESIQIMKEGKATASEAVDCKWYIRAPPRSKIYLRFLDYEMQNSNECKRNFVAVYDGSSSVEDLKAKFCSTVANDVMLRTGLGVIRMWADEGSRNSRFQMLFTSFQEPPCEGNTFFCHSNMCINNTLVCNGLQNCVYPWDENHCKEKRKTSLLDQLTNTSGTVIGVTSCIVIILIIISVIVQIKQPRKKYVQRKSDFDQTVFQEVFEPPHYELCTLRGTGATADFADVADDFENYHKLRRSSSKCIHDHHCGSQLSSTKGSRSNLSTRDASILTEMPTQPGKPLIPPMNRRNILVMKHSYSQDAADACDIDEIEEVPTTSHRLSRHDKAVQRFCLIGSLSKHESEYNTTRV

SEQ ID NO: 55561 - protein, 533 aa, Homo sapiens
MIHGRSVLHIVASLIILHLSGATKKGTEKQTTSETQKSVQCGTWTKHAEGGIFTSPNYPSKYPPDRECIYIIEAAPRQCIELYFDEKYSIEPSWECKFDHIEVRDGPFGFSPIIGRFCGQQNPPVIKSSGRFLWIKFFADGELESMGFSARYNFTPDPDFKDLGALKPLPACEFEMGGSEGIVESIQIMKEGKATASEAVDCKWYIRAPPRSKIYLRFLDYEMQNSNECKRNFVAVYDGSSSVEDLKAKFCSTVANDVMLRTGLGVIRMWADEGSRNSRFQMLFTSFQEPPCEGNTFFCHSNMCINNTLVCNGLQNCVYPWDENHCKEKRKTSLLDQLTNTSGTVIGVTSCIVIILIIISVIVQIKQPRKKYVQRKSDFDQTVFQEVFEPPHYELCTLRGTGATADFADVADDFENYHKLRRSSSKCIHDHHCGSQLSSTKGSRSNLSTRDASILTEMPTQPGKPLIPPMNRRNILVMKHSYSQDAADACDIDEIEEVPTTSHRLSRHDKAVQRFCLIGSLSKHESEYNTTRV

SEQ ID NO: 55562 - protein, 156 aa, Homo sapiens
MLAEPFPKVVASLIILHLSGATKKGTEKQTTSETQKSVQCGTWTKHAEGGIFTSPNYPSKYPPDRECIYIIEAAPRQCIELYFDEKYSIEPSWECKFDHIEVRDGPFGFSPIIGRFCGQQNPPVIKSSGRFLWIKFFADGELESMGFSARYNFTPE

SEQ ID NO: 55563 - protein, 533 aa, Homo sapiens; identical to SEQ ID NO: 55561

SEQ ID NO: 55564 - protein, 338 aa, Homo sapiens
MSGSSLPSALALSLLLVSGSLLPGPGAAQNAGFVKSPMSETKLTGDAFELYCDVVGSPTPEIQWWYAEVNRAESFRQLWDGARKRRVTVNTAYGSNGVSVLRITRLTLEDSGTYECRASNDPKRNDLRQNPSITWIRAQATISVLQKPRIVTSEEVIIRDSPVLPVTLQCNLTSSSHTLTYSYWTKNGVELSATRKNASNMEYRINKPRAEDSGEYHCVYHFVSAPKANATIEVKAAPDITGHKRSENKNEGQDATMYCKSVGYPHPDWIWRKKENGMPMDIVNTSGRFFIINKENYTELNIVNLQITEDPGEYEWCGATWPHSGLSWEFWLKLSSLW

SEQ ID NO: 55565 - protein, 398 aa, Homo sapiens
MSGSSLPSALALSLLLVSGSLLPGPGAAQNAGFVKSPMSETKLTGDAFELYCDVVGSPTPEIQWWYAEVNRAESFRQLWDGARKRRVTVNTAYGSNGVSVLRITRLTLEDSGTYECRASNDPKRNDLRQNPSITWIRAQATISVLQKPRIVTSEEVIIRDSPVLPVTLQCNLTSSSHTLTYSYWTKNGVELSATRKNASNMEYRINKPRAEDSGEYHCVYHFVSAPKANATIEVKAAPDITGHKRSENKNEGQDATMYCKSVGYPHPDWIWRKKENGMPMDIVNTSGRFFIINKENYTELNIVNLQITEDPGEYECNATNAIGSASVVTVLRVRSHLAPLWPFLGILAEIIILVVIIVVYEKRKRPDEVPDDDEPAGPMKTNSTNNHKDKNLRQRNTN

SEQ ID NO: 55566 - protein, 282 aa, Homo sapiens
MSGSSLPSALALSLLLVSGSLLPGPGAAQNEPRIVTSEEVIIRDSPVLPVTLQCNLTSSSHTLTYSYWTKNGVELSATRKNASNMEYRINKPRAEDSGEYHCVYHFVSAPKANATIEVKAAPDITGHKRSENKNEGQDATMYCKSVGYPHPDWIWRKKENGMPMDIVNTSGRFFIINKENYTELNIVNLQITEDPGEYECNATNAIGSASVVTVLRVRSHLAPLWPFLGILAEIIILVVIIVVYEKRKRPDEVPDDDEPAGPMKTNSTNNHKDKNLRQRNTN

SEQ ID NO: 55567 - protein, 193 aa, Homo sapiens
MSGSSLPSALALSLLLVSGSLLPGPGAAQNAAPDITGHKRSENKNEGQDATMYCKSVGYPHPDWIWRKKENGMPMDIVNTSGRFFIINKENYTELNIVNLQITEDPGEYECNATNAIGSASVVTVLRVRSHLAPLWPFLGILAEIIILVVIIVVYEKRKRPDEVPDDDEPAGPMKTNSTNNHKDKNLRQRNTN

SEQ ID NO: 55568 - protein, 394 aa, Homo sapiens
MSGSSLPSALALSLLLVSGSLLPGPGAAQNAGFVKSPMSETKLTGDAFELYCDVVGSPTPEIQWWYAEVNRAESFRQLWDGARKRRVTVNTAYGSNGVSVLRITRLTLEDSGTYECRASNDPKRNDLRQNPSITWIRAQATISVLQKPRIVTSEEVIIRDSPVLPVTLQCNLTSSSHTLTYSYWTKNGVELSATRKNASNMEYRINKPRAEDSGEYHCVYHFVSAPKANATIEVKAAPDITGHKRSENKNEGQDATMYCKSVGYPHPDWIWRKKENGMPMDIVNTSGRFFIINKENYTELNIVNLQITEDPGEYECNATNAIGSASVVTVLRVRSHLAPLWPFLGILAEIIILVVIIVVYEKRKRPDEVPDVPPRKTNSTNNHKDKNLRQRNTN

SEQ ID NO: 55569 - protein, 170 aa, Homo sapiens
MMAGMKIQLVCMLLLAFSSWSLCSDSEEEMKALEADFLTNMHTSKISKAHVPSWKMTLLNVCSLVNNLNSPAEETGEVHEEELVARRKLPTALDGFSLEAMLTIYQLHKICHSRAFQHWELIQEDILDTGNDKNGKEEVIKRKIPYILKRQLYENKPRRPYILKRDSYYY

SEQ ID NO: 55570 - protein, 115 aa, Homo sapiens
MTLLNVCSLVNNLNSPAEETGEVHEEELVARRKLPTALDGFSLEAMLTIYQLHKICHSRAFQHWELIQEDILDTGNDKNGKEEVIKRKIPYILKRQLYENKPRRPYILKRDSYYY

SEQ ID NO: 55571 - protein, 95 aa, Homo sapiens
MMAGMKIQLVCMLLLAFSSWSLCSDSEEEMKALEADFLTNMHTSKLIQEDILDTGNDKNGKEEVIKRKIPYILKRQLYENKPRRPYILKRDSYYY

SEQ ID NO: 55572 - protein, 418 aa, Homo sapiens
MRLNSSAPGTPGTPAADPFQRAQAGLEEALLAPGFGNASGNASERVLAAPSSELDVNTDIYSKVLVTAVYLALFVVGTVGNTVTAFTLARKKSLQSLQSTVHYHLGSLALSDLLTLLLAMPVELYNFIWVHHPWAFGDAGCRGYYFLRDACTYATALNVASLSVERYLAICHPFKAKTLMSRSRTKKFISAIWLASALLAVPMLFTMGEQNRSADGQHAGGLVCTPTIHTATVKVVIQVNTFMSFIFPMVVISVLNTIIANKLTVMVRQAAEQGQVCTVGGEHSTFSMAIEPGRVQALRHGVRVLRAVVIAFVVCWLPYHVRRLMFCYISDEQWTPFLYDFYHYFYMVTNALFYVSSTINPILYNLVSANFRHIFLATLACLCPVWRRRRKRPAFSRKADSVSSNHTLSSNATRETLY

SEQ ID NO: 55573 - protein, 316 aa, Homo sapiens
MGVCGYLFLPWKCLVVVSLRLLFLVPTGVPVRSGDATFPKAMDNVTVRQGESATLRCTIDNRVTRVAWLNRSTILYAGNDKWCLDPRVVLLSNTQTQYSIEIQNVDVYDEGPYTCSVQTDNHPKTSRVHLIVQVSPKIVEISSDISINEGNNISLTCIATGRPEPTVTWRHISPKAVGFVSEDEYLEIQGITREQSGDYECSASNDVAAPVVRRVKVTVNYPPYISEAKGTGVPVGQKGTLQCEASAVPSAEFQWYKDDKRLIEGKKGVKVENRPFLSKLIFFNVSEHDYGNYTCVASNKLGHTNASIMLFGETVL

SEQ ID NO: 55574 - protein, 344 aa, Homo sapiens
MGVCGYLFLPWKCLVVVSLRLLFLVPTGVPVRSGDATFPKAMDNVTVRQGESATLRCTIDNRVTRVAWLNRSTILYAGNDKWCLDPRVVLLSNTQTQYSIEIQNVDVYDEGPYTCSVQTDNHPKTSRVHLIVQVSPKIVEISSDISINEGNNISLTCIATGRPEPTVTWRHISPKAVGFVSEDEYLEIQGITREQSGDYECSASNDVAAPVVRRVKVTVNYPPYISEAKGTGVPVGQKGTLQCEASAVPSAEFQWYKDDKRLIEGKKGVKVENRPFLSKLIFFNVSEHDYGNYTCVASNKLGHTNASIMLFGPGAVSEVSNGTSRRAGCVWLLPLLVLHLLLKF

SEQ ID NO: 55575 - protein, 344 aa, Homo sapiens
MKTIQPKMHNSISWAIFTGLAALCLFQGVPVRSGDATFPKAMDNVTVRQGESATLRCTIDNRVTRVAWLNRSTILYAGNDKWCLDPRVVLLSNTQTQYSIEIQNVDVYDEGPYTCSVQTDNHPKTSRVHLIVQVSPKIVEISSDISINEGNNISLTCIATGRPEPTVTWRHISPKAVGFVSEDEYLEIQGITREQSGDYECSASNDVAAPVVRRVKVTVNYPPYISEAKGTGVPVGQKGTLQCEASAVPSAEFQWYKDDKRLIEGKKGVKVENRPFLSKLIFFNVSEHDYGNYTCVASNKLGHTNASIMLFGPGAVSEVSNGTSRRAGCVWLLPLLVLHLLLKF

SEQ ID NO: 55576 - protein, 346 aa, Homo sapiens
MNGKRNGEGGKRWKWKGTGVPVRSGDATFPKAMDNVTVRQGESATLRCTIDNRVTRVAWLNRSTILYAGNDKWCLDPRVVLLSNTQTQYSIEIQNVDVYDEGPYTCSVQTDNHPKTSRVHLIVQVSPKIVEISSDISINEGNNISLTCIATGRPEPTVTWRHISPKAVGFVSEDEYLEIQGITREQSGDYECSASNDVAAPVVRRVKVTVNYPPYISEAKGTGVPVGQKGTLQCEASAVPSAEFQWYKDDKRLIEGKKGVKVENRPFLSKLIFFNVSEHDYGNYTCVASNKLGHTNASIMLFEVKTTALTPWKGPGAVSEVSNGTSRRAGCVWLLPLLVLHLLLKF

SEQ ID NO: 55577 - protein, 355 aa, Homo sapiens
MKTIQPKMHNSISWAIFTGLAALCLFQGVPVRSGDATFPKAMDNVTVRQGESATLRCTIDNRVTRVAWLNRSTILYAGNDKWCLDPRVVLLSNTQTQYSIEIQNVDVYDEGPYTCSVQTDNHPKTSRVHLIVQVSPKIVEISSDISINEGNNISLTCIATGRPEPTVTWRHISPKAVGFVSEDEYLEIQGITREQSGDYECSASNDVAAPVVRRVKVTVNYPPYISEAKGTGVPVGQKGTLQCEASAVPSAEFQWYKDDKRLIEGKKGVKVENRPFLSKLIFFNVSEHDYGNYTCVASNKLGHTNASIMLFEVKTTALTPWKGPGAVSEVSNGTSRRAGCVWLLPLLVLHLLLKF

SEQ ID NO: 55578 - protein, 355 aa, Homo sapiens
MGVCGYLFLPWKCLVVVSLRLLFLVPTGVPVRSGDATFPKAMDNVTVRQGESATLRCTIDNRVTRVAWLNRSTILYAGNDKWCLDPRVVLLSNTQTQYSIEIQNVDVYDEGPYTCSVQTDNHPKTSRVHLIVQVSPKIVEISSDISINEGNNISLTCIATGRPEPTVTWRHISPKAVGFVSEDEYLEIQGITREQSGDYECSASNDVAAPVVRRVKVTVNYPPYISEAKGTGVPVGQKGTLQCEASAVPSAEFQWYKDDKRLIEGKKGVKVENRPFLSKLIFFNVSEHDYGNYTCVASNKLGHTNASIMLFEVKTTALTPWKGPGAVSEVSNGTSRRAGCVWLLPLLVLHLLLKF

SEQ ID NO: 55579 - protein, 790 aa, Homo sapiens
MLRGGRRGQLGWHSWAAGPGSLLAWLILASAGAAPCPDACCPHGSSGLRCTRDGALDSLHHLPGAENLTELYIENQQHLQHLELRDLRGLGELRNLTIVKSGLRFVAPDAFHFTPRLSRLNLSFNALESLSWKTVQGLSLQELVLSGNPLHCSCALRWLQRWEEEGLGGVPEQKLQCHGQGPLAHMPNASCGVPTLKVQVPNASVDVGDDVLLRCQVEGRGLEQAGWILTELEQSATVMKSGGLPSLGLTLANVTSDLNRKNVTCWAENDVGRAEVSVQVNVSFPASVQLHTAVEMHHWCIPFSVDGQPAPSLRWLFNGSVLNETSFIFTEFLEPAANETVRHGCLRLNQPTHVNNGNYTLLAANPFGQASASIMAAFMDNPFEFNPEDPIPDTNSTSGDPVEKKDETPFGVSVAVGLAVFACLFLSTLLLVLNKCGRRNKFGINRPAVLAPEDGLAMSLHFMTLGGSSLSPTEGKGSGLQGHIIENPQYFSDACVHHIKRRDIVLKWELGEGAFGKVFLAECHNLLPEQDKMLVAVKALKEASESARQDFQREAELLTMLQHQHIVRFFGVCTEGRPLLMVFEYMRHGDLNRFLRSHGPDAKLLAGGEDVAPGPLGLGQLLAVASQVAAGMVYLAGLHFVHRDLATRNCLVGQGLVVKIGDFGMSRDIYSTDYYRVGGRTMLPIRWMPPESILYRKFTTESDVWSFGVVLWEIFTYGKQPWYQLSNTEAIDCITQGRELERPRACPPEVYAIMRGCWQREPQQRHSIKDVHARLQALAQAPPVYLDVLG

SEQ ID NO: 55580 - protein, 760 aa, Homo sapiens
MKEAALICLAPSVPPILTVKSWDTMQLRAARSRCTNLLAASYIENQQHLQHLELRDLRGLGELRNLTIVKSGLRFVAPDAFHFTPRLSRLNLSFNALESLSWKTVQGLSLQELVLSGNPLHCSCALRWLQRWEEEGLGGVPEQKLQCHGQGPLAHMPNASCGVPTLKVQVPNASVDVGDDVLLRCQVEGRGLEQAGWILTELEQSATVMKSGGLPSLGLTLANVTSDLNRKNVTCWAENDVGRAEVSVQVNVSFPASVQLHTAVEMHHWCIPFSVDGQPAPSLRWLFNGSVLNETSFIFTEFLEPAANETVRHGCLRLNQPTHVNNGNYTLLAANPFGQASASIMAAFMDNPFEFNPEDPIPDTNSTSGDPVEKKDETPFGVSVAVGLAVFACLFLSTLLLVLNKCGRRNKFGINRPAVLAPEDGLAMSLHFMTLGGSSLSPTEGKGSGLQGHIIENPQYFSDACVHHIKRRDIVLKWELGEGAFGKVFLAECHNLLPEQDKMLVAVKALKEASESARQDFQREAELLTMLQHQHIVRFFGVCTEGRPLLMVFEYMRHGDLNRFLRSHGPDAKLLAGGEDVAPGPLGLGQLLAVASQVAAGMVYLAGLHFVHRDLATRNCLVGQGLVVKIGDFGMSRDIYSTDYYRVGGRTMLPIRWMPPESILYRKFTTESDVWSFGVVLWEIFTYGKQPWYQLSNTEAIDCITQGRELERPRACPPEVYAIMRGCWQREPQQRHSIKDVHARLQALAQAPPVYLDVLG

SEQ ID NO: 55581 - protein, 796 aa, Homo sapiens
MLRGGRRGQLGWHSWAAGPGSLLAWLILASAGAAPCPDACCPHGSSGLRCTRDGALDSLHHLPGAENLTELYIENQQHLQHLELRDLRGLGELRNLTIVKSGLRFVAPDAFHFTPRLSRLNLSFNALESLSWKTVQGLSLQELVLSGNPLHCSCALRWLQRWEEEGLGGVPEQKLQCHGQGPLAHMPNASCGVPTLKVQVPNASVDVGDDVLLRCQVEGRGLEQAGWILTELEQSATVMKSGGLPSLGLTLANVTSDLNRKNVTCWAENDVGRAEVSVQVNVSFPASVQLHTAVEMHHWCIPFSVDGQPAPSLRWLFNGSVLNETSFIFTEFLEPAANETVRHGCLRLNQPTHVNNGNYTLLAANPFGQASASIMAAFMDNPFEFNPEDPIPVSFSPVDTNSTSGDPVEKKDETPFGVSVAVGLAVFACLFLSTLLLVLNKCGRRNKFGINRPAVLAPEDGLAMSLHFMTLGGSSLSPTEGKGSGLQGHIIENPQYFSDACVHHIKRRDIVLKWELGEGAFGKVFLAECHNLLPEQDKMLVAVKALKEASESARQDFQREAELLTMLQHQHIVRFFGVCTEGRPLLMVFEYMRHGDLNRFLRSHGPDAKLLAGGEDVAPGPLGLGQLLAVASQVAAGMVYLAGLHFVHRDLATRNCLVGQGLVVKIGDFGMSRDIYSTDYYRVGGRTMLPIRWMPPESILYRKFTTESDVWSFGVVLWEIFTYGKQPWYQLSNTEAIDCITQGRELERPRACPPEVYAIMRGCWQREPQQRHSIKDVHARLQALAQAPPVYLDVLG

SEQ ID NO: 55582 - protein, 838 aa, Homo sapiens
MSSWIRWHGPAMARLWGFCWLVVGFWRAAFACPTSCKCSASRIWCSDPSPGIVAFPRLEPNSVDPENITEIFIANQKRLEIINEDDVEAYVGLRNLTIVDSGLKFVAHKAFLKNSNLQHINFTRNKLTSLSRKHFRHLDLSELILVGNPFTCSCDIMWIKTLQEAKSSPDTQDLYCLNESSKNIPLANLQIPNCGLPSANLAAPNLTVEEGKSITLSCSVAGDPVPNMYWDVGNLVSKHMNETSHTQGSLRITNISSDDSGKQISCVAENLVGEDQDSVNLTVHFAPTITFLESPTSDHHWCIPFTVKGNPKPALQWFYNGAILNESKYICTKIHVTNHTEYHGCLQLDNPTHMNNGDYTLIAKNEYGKDEKQISAHFMGWPGIDDGANPNYPDVIYEDYGTAANDIGDTTNRSNEIPSTDVTDKTGREHLSVYAVVVIASVVGFCLLVMLFLLKLARHSKFGMKDFSWFGFGKVKSRQGVGPASVISNDDDSASPLHHISNGSNTPSSSEGGPDAVIIGMTKIPVIENPQYFGITNSQLKPDTFVQHIKRHNIVLKRELGEGAFGKVFLAECYNLCPEQDKILVAVKTLKDASDNARKDFHREAELLTNLQHEHIVKFYGVCVEGDPLIMVFEYMKHGDLNKFLRAHGPDAVLMAEGNPPTELTQSQMLHIAQQIAAGMVYLASQHFVHRDLATRNCLVGENLLVKIGDFGMSRDVYSTDYYRVGGHTMLPIRWMPPESIMYRKFTTESDVWSLGVVLWEIFTYGKQPWYQLSNNEVIECITQGRVLQRPRTCPQEVYELMLGCWQREPHMRKNIKGIHTLLQNLAKASPVYLDILG

SEQ ID NO: 55583 - protein, 553 aa, Homo sapiens
MSSWIRWHGPAMARLWGFCWLVVGFWRAAFACPTSCKCSASRIWCSDPSPGIVAFPRLEPNSVDPENITEIFIANQKRLEIINEDDVEAYVGLRNLTIVDSGLKFVAHKAFLKNSNLQHINFTRNKLTSLSRKHFRHLDLSELILVGNPFTCSCDIMWIKTLQEAKSSPDTQDLYCLNESSKNIPLANLQIPNCGLPSANLAAPNLTVEEGKSITLSCSVAGDPVPNMYWDVGNLVSKHMNETSHTQGSLRITNISSDDSGKQISCVAENLVGEDQDSVNLTVHFAPTITFLESPTSDHHWCIPFTVKGNPKPALQWFYNGAILNESKYICTKIHVTNHTEYHGCLQLDNPTHMNNGDYTLIAKNEYGKDEKQISAHFMGWPGIDDGANPNYPDVIYEDYGTAANDIGDTTNRSNEIPSTDVTDKTGREHLSVYAVVVIASVVGFCLLVMLFLLKLARHSKFGMKDFSWFGFGKVKSRQGVGPASVISNDDDSASPLHHISNGSNTPSSSEGGPDAVIIGMTKIPVIENPQYFGITNSQLKPDTWPRGSPKTA

SEQ ID NO: 55584 - protein, 822 aa, Homo sapiens
MSSWIRWHGPAMARLWGFCWLVVGFWRAAFACPTSCKCSASRIWCSDPSPGIVAFPRLEPNSVDPENITEIFIANQKRLEIINEDDVEAYVGLRNLTIVDSGLKFVAHKAFLKNSNLQHINFTRNKLTSLSRKHFRHLDLSELILVGNPFTCSCDIMWIKTLQEAKSSPDTQDLYCLNESSKNIPLANLQIPNCGLPSANLAAPNLTVEEGKSITLSCSVAGDPVPNMYWDVGNLVSKHMNETSHTQGSLRITNISSDDSGKQISCVAENLVGEDQDSVNLTVHFAPTITFLESPTSDHHWCIPFTVKGNPKPALQWFYNGAILNESKYICTKIHVTNHTEYHGCLQLDNPTHMNNGDYTLIAKNEYGKDEKQISAHFMGWPGIDDGANPNYPDVIYEDYGTAANDIGDTTNRSNEIPSTDVTDKTGREHLSVYAVVVIASVVGFCLLVMLFLLKLARHSKFGMKGPASVISNDDDSASPLHHISNGSNTPSSSEGGPDAVIIGMTKIPVIENPQYFGITNSQLKPDTFVQHIKRHNIVLKRELGEGAFGKVFLAECYNLCPEQDKILVAVKTLKDASDNARKDFHREAELLTNLQHEHIVKFYGVCVEGDPLIMVFEYMKHGDLNKFLRAHGPDAVLMAEGNPPTELTQSQMLHIAQQIAAGMVYLASQHFVHRDLATRNCLVGENLLVKIGDFGMSRDVYSTDYYRVGGHTMLPIRWMPPESIMYRKFTTESDVWSLGVVLWEIFTYGKQPWYQLSNNEVIECITQGRVLQRPRTCPQEVYELMLGCWQREPHMRKNIKGIHTLLQNLAKASPVYLDILG

SEQ ID NO: 55585 - protein, 477 aa, Homo sapiens
MSSWIRWHGPAMARLWGFCWLVVGFWRAAFACPTSCKCSASRIWCSDPSPGIVAFPRLEPNSVDPENITEIFIANQKRLEIINEDDVEAYVGLRNLTIVDSGLKFVAHKAFLKNSNLQHINFTRNKLTSLSRKHFRHLDLSELILVGNPFTCSCDIMWIKTLQEAKSSPDTQDLYCLNESSKNIPLANLQIPNCGLPSANLAAPNLTVEEGKSITLSCSVAGDPVPNMYWDVGNLVSKHMNETSHTQGSLRITNISSDDSGKQISCVAENLVGEDQDSVNLTVHFAPTITFLESPTSDHHWCIPFTVKGNPKPALQWFYNGAILNESKYICTKIHVTNHTEYHGCLQLDNPTHMNNGDYTLIAKNEYGKDEKQISAHFMGWPGIDDGANPNYPDVIYEDYGTAANDIGDTTNRSNEIPSTDVTDKTGREHLSVYAVVVIASVVGFCLLVMLFLLKLARHSKFGMKGFVLFHKIPLDG

SEQ ID NO: 55586 - protein, 537 aa, Homo sapiens
MSSWIRWHGPAMARLWGFCWLVVGFWRAAFACPTSCKCSASRIWCSDPSPGIVAFPRLEPNSVDPENITEIFIANQKRLEIINEDDVEAYVGLRNLTIVDSGLKFVAHKAFLKNSNLQHINFTRNKLTSLSRKHFRHLDLSELILVGNPFTCSCDIMWIKTLQEAKSSPDTQDLYCLNESSKNIPLANLQIPNCGLPSANLAAPNLTVEEGKSITLSCSVAGDPVPNMYWDVGNLVSKHMNETSHTQGSLRITNISSDDSGKQISCVAENLVGEDQDSVNLTVHFAPTITFLESPTSDHHWCIPFTVKGNPKPALQWFYNGAILNESKYICTKIHVTNHTEYHGCLQLDNPTHMNNGDYTLIAKNEYGKDEKQISAHFMGWPGIDDGANPNYPDVIYEDYGTAANDIGDTTNRSNEIPSTDVTDKTGREHLSVYAVVVIASVVGFCLLVMLFLLKLARHSKFGMKGPASVISNDDDSASPLHHISNGSNTPSSSEGGPDAVIIGMTKIPVIENPQYFGITNSQLKPDTWPRGSPKTA

SEQ ID NO: 55587 - protein, 822 aa, Homo sapiens; identical to SEQ ID NO: 55584

SEQ ID NO: 55588 - protein, 838 aa, Homo sapiens; identical to SEQ ID NO: 55582

SEQ ID NO: 55589 - protein, 321 aa, Homo sapiens
MWIKTLQEAKSSPDTQDLYCLNESSKNIPLANLQIPNCGLPSANLAAPNLTVEEGKSITLSCSVAGDPVPNMYWDVGNLVSKHMNETSHTQGSLRITNISSDDSGKQISCVAENLVGEDQDSVNLTVHFAPTITFLESPTSDHHWCIPFTVKGNPKPALQWFYNGAILNESKYICTKIHVTNHTEYHGCLQLDNPTHMNNGDYTLIAKNEYGKDEKQISAHFMGWPGIDDGANPNYPDVIYEDYGTAANDIGDTTNRSNEIPSTDVTDKTGREHLSVYAVVVIASVVGFCLLVMLFLLKLARHSKFGMKGFVLFHKIPLDG

SEQ ID NO: 55590 - protein, 477 aa, Homo sapiens; identical to SEQ ID NO: 55585

SEQ ID NO: 55591 - protein, 612 aa, Homo sapiens
MDVSLCPAKCSFWRIFLLGSVWLDYVGSVLACPANCVCSKTEINCRRPDDGNLFPLLEGQDSGNSNGNASINITDISRNITSIHIENWRSLHTLNAVDMELYTGLQKLTIKNSGLRSIQPRAFAKNPHLRYINLSSNRLTTLSWQLFQTLSLRELQLEQNFFNCSCDIRWMQLWQEQGEAKLNSQNLYCINADGSQLPLFRMNISQCDLPEISVSHVNLTVREGDNAVITCNGSGSPLPDVDWIVTGLQSINTHQTNLNWTNVHAINLTLVNVTSEDNGFTLTCIAENVVGMSNASVALTVYYPPRVVSLEEPELRLEHCIEFVVRGNPPPTLHWLHNGQPLRESKIIHVEYYQEGEISEGCLLFNKPTHYNNGNYTLIAKNPLGTANQTINGHFLKEPFPESTDNFILFDEVSPTPPITVTHKPEEDTFGVSIAVGLAAFACVLLVVLFVMINKYGRRSKFGMKGPVAVISGEEDSASPLHHINHGITTPSSLDAGPDTVVIGMTRIPVIENPQYFRQGHNCHKPDTWVFSNIDNHGILNLKDNRDHLVPSTHYIYEEPEVQSGEVSYPRSHGFREIMLNPISLPGHSKPLNHGIYVEDVNVYFSKGRHGF

SEQ ID NO: 55592 - protein, 137 aa, Homo sapiens
MTRIPVIENPQYFRQGHNCHKPDTYVQHIKRRDIVLKRELGEGAFGKVFLAECYNLSPTKDKMLVAVKALKDPTLAARKDFQREAELLTNLQHEHIVKFYGVCGDGDPLIMVFEYMKHGDLNKFLSSISSPKSHQQG

SEQ ID NO: 55593 - protein, 825 aa, Homo sapiens
MDVSLCPAKCSFWRIFLLGSVWLDYVGSVLACPANCVCSKTEINCRRPDDGNLFPLLEGQDSGNSNGNASINITDISRNITSIHIENWRSLHTLNAVDMELYTGLQKLTIKNSGLRSIQPRAFAKNPHLRYINLSSNRLTTLSWQLFQTLSLRELQLEQNFFNCSCDIRWMQLWQEQGEAKLNSQNLYCINADGSQLPLFRMNISQCDLPEISVSHVNLTVREGDNAVITCNGSGSPLPDVDWIVTGLQSINTHQTNLNWTNVHAINLTLVNVTSEDNGFTLTCIAENVVGMSNASVALTVYYPPRVVSLEEPELRLEHCIEFVVRGNPPPTLHWLHNGQPLRESKIIHVEYYQEGEISEGCLLFNKPTHYNNGNYTLIAKNPLGTANQTINGHFLKEPFPESTDNFILFDEVSPTPPITVTHKPEEDTFGVSIAVGLAAFACVLLVVLFVMINKYGRRSKFGMKGPVAVISGEEDSASPLHHINHGITTPSSLDAGPDTVVIGMTRIPVIENPQYFRQGHNCHKPDTYVQHIKRRDIVLKRELGEGAFGKVFLAECYNLSPTKDKMLVAVKALKDPTLAARKDFQREAELLTNLQHEHIVKFYGVCGDGDPLIMVFEYMKHGDLNKFLRAHGPDAMILVDGQPRQAKGELGLSQMLHIASQIASGMVYLASQHFVHRDLATRNCLVGANLLVKIGDFGMSRDVYSTDYYRVGGHTMLPIRWMPPESIMYRKFTTESDVWSFGVILWEIFTYGKQPWFQLSNTEVIECITQGRVLERPRVCPKEVYDVMLGCWQREPQQRLNIKEIYKILHALGKATPIYLDILG

SEQ ID NO: 55594 - protein, 831 aa, Homo sapiens
MDVSLCPAKCSFWRIFLLGSVWLDYVGSVLACPANCVCSKTEINCRRPDDGNLFPLLEGQDSGNSNGNASINITDISRNITSIHIENWRSLHTLNAVDMELYTGLQKLTIKNSGLRSIQPRAFAKNPHLRYINLSSNRLTTLSWQLFQTLSLRELQLEQNFFNCSCDIRWMQLWQEQGEAKLNSQNLYCINADGSQLPLFRMNISQCDLPEISVSHVNLTVREGDNAVITCNGSGSPLPDVDWIVTGLQSINTHQTNLNWTNVHAINLTLVNVTSEDNGFTLTCIAENVVGMSNASVALTVYYPPRVVSLEEPELRLEHCIEFVVRGNPPPTLHWLHNGQPLRESKIIHVEYYQEGEISEGCLLFNKPTHYNNGNYTLIAKNPLGTANQTINGHFLKEPFPVDEVSPTPPITVTHKPEEDTFGVSIAVGLAAFACVLLVVLFVMINKYGRRSKFGMKGPVAVISGEEDSASPLHHINHGITTPSSLDAGPDTVVIGMTRIPVIENPQYFRQGHNCHKPDTYVQHIKRRDIVLKRELGEGAFGKVFLAECYNLSPTKDKMLVAVKALKDPTLAARKDFQREAELLTNLQHEHIVKFYGVCGDGDPLIMVFEYMKHGDLNKFLRAHGPDAMILVDGQPRQAKGELGLSQMLHIASQIASGMVYLASQHFVHRDLATRNCLVGANLLVKIGDFGMSRDVYSTDYYRLFNPSGNDFCIWCEVGGHTMLPIRWMPPESIMYRKFTTESDVWSFGVILWEIFTYGKQPWFQLSNTEVIECITQGRVLERPRVCPKEVYDVMLGCWQREPQQRLNIKEIYKILHALGKATPIYLDILG

SEQ ID NO: 55595 - protein, 839 aa, Homo sapiens
MDVSLCPAKCSFWRIFLLGSVWLDYVGSVLACPANCVCSKTEINCRRPDDGNLFPLLEGQDSGNSNGNASINITDISRNITSIHIENWRSLHTLNAVDMELYTGLQKLTIKNSGLRSIQPRAFAKNPHLRYINLSSNRLTTLSWQLFQTLSLRELQLEQNFFNCSCDIRWMQLWQEQGEAKLNSQNLYCINADGSQLPLFRMNISQCDLPEISVSHVNLTVREGDNAVITCNGSGSPLPDVDWIVTGLQSINTHQTNLNWTNVHAINLTLVNVTSEDNGFTLTCIAENVVGMSNASVALTVYYPPRVVSLEEPELRLEHCIEFVVRGNPPPTLHWLHNGQPLRESKIIHVEYYQEGEISEGCLLFNKPTHYNNGNYTLIAKNPLGTANQTINGHFLKEPFPESTDNFILFDEVSPTPPITVTHKPEEDTFGVSIAVGLAAFACVLLVVLFVMINKYGRRSKFGMKGPVAVISGEEDSASPLHHINHGITTPSSLDAGPDTVVIGMTRIPVIENPQYFRQGHNCHKPDTYVQHIKRRDIVLKRELGEGAFGKVFLAECYNLSPTKDKMLVAVKALKDPTLAARKDFQREAELLTNLQHEHIVKFYGVCGDGDPLIMVFEYMKHGDLNKFLRAHGPDAMILVDGQPRQAKGELGLSQMLHIASQIASGMVYLASQHFVHRDLATRNCLVGANLLVKIGDFGMSRDVYSTDYYRLFNPSGNDFCIWCEVGGHTMLPIRWMPPESIMYRKFTTESDVWSFGVILWEIFTYGKQPWFQLSNTEVIECITQGRVLERPRVCPKEVYDVMLGCWQREPQQRLNIKEIYKILHALGKATPIYLDILG

SEQ ID NO: 55596 - protein, 825 aa, Homo sapiens; identical to SEQ ID NO: 55593

SEQ ID NO: 55597 - protein, 612 aa, Homo sapiens; identical to SEQ ID NO: 55591

SEQ ID NO: 55598 - protein, 617 aa, Homo sapiens
MELYTGLQKLTIKNSGLRSIQPRAFAKNPHLRYINLSSNRLTTLSWQLFQTLSLRELQLEQNFFNCSCDIRWMQLWQEQGEAKLNSQNLYCINADGSQLPLFRMNISQCDLPEISVSHVNLTVREGDNAVITCNGSGSPLPDVDWIVTGLQSINTHQTNLNWTNVHAINLTLVNVTSEDNGFTLTCIAENVVGMSNASVALTVYYPPRVVSLEEPELRLEHCIEFVVRGNPPPTLHWLHNGQPLRESKIIHVEYYQEGEISEGCLLFNKPTHYNNGNYTLIAKNPLGTANQTINGHFLKEPFPESTDNFILFDEVSPTPPITVTHKPEEDTFGVSIAVGLAAFACVLLVVLFVMINKYGRRSKFGMKGPVAVISGEEDSASPLHHINHGITTPSSLDAGPDTVVIGMTRIPVIENPQYFRQGHNCHKPDTYVQHIKRRDIVLKRELGEGAFGKVFLAECYNLSPTKDKMLVAVKALKDPTLAARKDFQREAELLTNLQHEHIVKFYGVCGDGDPLIMVFEYMKHGDLNKFLRAHGPDAMILVDGQPRQAKGELGLSQMLHIASQIASGMVYLASQHFVHRDLATRNCLVGANLLVKIGDFGMSRDVYSTDYYRVVQA

SEQ ID NO: 55599 - protein, 257 aa, Homo sapiens
MSILFYVIFLAYLRGIQGNNMDQRSLPEDSLNSLIIKLIQADILKNKLSKQMVDVKENYQSTLPKAEAPREPERGGPAKSAFQPVIAMDTELLRQQRRYNSPRVLLSDSTPLEPPPLYLMEDYVGSPVVANRTSRRKRYAEHKSHRGEYSVCDSESLWVTDKSSAIDIRGHQVTVLGEIKTGNSPVKQYFYETRCKEARPVKNGCRGIDDKHWNSQCKTSQTYVRALTSENNKLVGWRWIRIDTSCVCALSRKIGRT

SEQ ID NO: 55600 - protein, 270 aa, Homo sapiens
MVTFATILQVNKVMSILFYVIFLAYLRGIQGNNMDQRSLPEDSLNSLIIKLIQADILKNKLSKQMVDVKENYQSTLPKAEAPREPERGGPAKSAFQPVIAMDTELLRQQRRYNSPRVLLSDSTPLEPPPLYLMEDYVGSPVVANRTSRRKRYAEHKSHRGEYSVCDSESLWVTDKSSAIDIRGHQVTVLGEIKTGNSPVKQYFYETRCKEARPVKNGCRGIDDKHWNSQCKTSQTYVRALTSENNKLVGWRWIRIDTSCVCALSRKIGRT

SEQ ID NO: 55601 - protein, 210 aa, Homo sapiens
MLPLPSCSLPILLLFLLPSVPIESQPPPSTLPPFLAPEWDLLSPRVVLSRGAPAGPPLLFLLEAGAFRESAGAPANRSRRGVSETAPASRRGELAVCDAVSGWVTDRRTAVDLRGREVEVLGEVPAAGGSPLRQYFFETRCKADNAEEGGPGAGGGGCRGVDRRHWVSECKAKQSYVRALTADAQGRVGWRWIRIDTACVCTLLSRTGRA

SEQ ID NO: 55602 - protein, 197 aa, Homo sapiens
MQRWKAAALASVLCSSVLSIWMCREGLLLSHRLGPALVPLHRLPRTLDARIARLAQYRALLQGAPDAMELRELTPWAGRPPGPRRRAGPRRRRARARLGARPCGLRELEVRVSELGLGYASDETVLFRYCAGACEAAARVYDLGLRRLRQRRRLRRERVRAQPCCRPTAYEDEVSFLDAHSRYHTVHELSARECACV

SEQ ID NO: 55603 - protein, 440 aa, Homo sapiens
MSSCRGQKVAGGLRVVSPFPLCQPAGEPSQGKMRSSCVLLTALVALAAYYVYIPLPGSVSDPWKLMLLDATFRGAQQVSNLIHYLGLSHHLLALNFIIVSFGKKSAWSSAQVKVTDTDFDGVEVRVFEGPPKPEEPLKRSVVYIHGGGWALASAKIRYYDELCTAMAEELNAVIVSIEYRLVPKVYFPEQIHDVVRATKYFLKPEVLQKYMVDPGRICISGDSAGGNLAAALGQQFTQDASLKNKLKLQALIYPVLQALDFNTPSYQQNVNTPILPRYVMVKYWVDYFKGNYDFVQAMIVNNHTSLDVEEAAAVRARLNWTSLLPASFTKNYKPVVQTTGNARIVQELPQLLDARSAPLIADQAVLQLLPKTYILTCEHDVLRDDGIMYAKRLESAGVEVTLDHFEDGFHGCMIFTSWPTNFSVGIRTRNSYIKWLDQNL

SEQ ID NO: 55604 - protein, 408 aa, Homo sapiens
MRSSCVLLTALVALAAYYVYIPLPGSVSDPWKLMLLDATFRGAQQVSNLIHYLGLSHHLLALNFIIVSFGKKSAWSSAQVKVTDTDFDGVEVRVFEGPPKPEEPLKRSVVYIHGGGWALASAKIRYYDELCTAMAEELNAVIVSIEYRLVPKVYFPEQIHDVVRATKYFLKPEVLQKYMVDPGRICISGDSAGGNLAAALGQQFTQDASLKNKLKLQALIYPVLQALDFNTPSYQQNVNTPILPRYVMVKYWVDYFKGNYDFVQAMIVNNHTSLDVEEAAAVRARLNWTSLLPASFTKNYKPVVQTTGNARIVQELPQLLDARSAPLIADQAVLQLLPKTYILTCEHDVLRDDGIMYAKRLESAGVEVTLDHFEDGFHGCMIFTSWPTNFSVGIRTRNSYIKWLDQNL

SEQ ID NO: 55605 - protein, 448 aa, Homo sapiens
MSSCRGQKVAGGLRVVSPFPLCQPAGEPSQGKMRSSCVLLTALVALAAYYVYIPLPGSVSDPWKLMLLDATFRGAQQVSNLIHYLGLSHHLLALNFIIVSFGKKSAWSSAQVKVTDTDFDGVEVRVFEGPPKPEEPLKRSVVYIHGGGWALASASASWSPSDEIRYYDELCTAMAEELNAVIVSIEYRLVPKVYFPEQIHDVVRATKYFLKPEVLQKYMVDPGRICISGDSAGGNLAAALGQQFTQDASLKNKLKLQALIYPVLQALDFNTPSYQQNVNTPILPRYVMVKYWVDYFKGNYDFVQAMIVNNHTSLDVEEAAAVRARLNWTSLLPASFTKNYKPVVQTTGNARIVQELPQLLDARSAPLIADQAVLQLLPKTYILTCEHDVLRDDGIMYAKRLESAGVEVTLDHFEDGFHGCMIFTSWPTNFSVGIRTRNSYIKWLDQNL

SEQ ID NO: 55606 - protein, 275 aa, Homo sapiens
MAEELNAVIVSIEYRLVPKVYFPEQIHDVVRATKYFLKPEVLQKYMVDPGRICISGDSAGGNLAAALGQQFTQDASLKNKLKLQALIYPVLQALDFNTPSYQQNVNTPILPRYVMVKYWVDYFKGNYDFVQAMIVNNHTSLDVEEAAAVRARLNWTSLLPASFTKNYKPVVQTTGNARIVQELPQLLDARSAPLIADQAVLQLLPKTYILTCEHDVLRDDGIMYAKRLESAGVEVTLDHFEDGFHGCMIFTSWPTNFSVGIRTRNSYIKWLDQNL

SEQ ID NO: 55607 - protein, 917 aa, Homo sapiens
MAFIRKKQQEQQLQLYSKERFSLLLLNLEEYYFEQHRANHILHKGSHHERKIRGSLKICSKSVIFEPDSISQPIIKIPLRDCIKIGKHGENGANRHFTKAKSGGISLIFSQVYFIKEHNVVAPYKIERGKMEYVFELDVPGKVEDVVETLLQLHRASCLDKLGDQTAMITAILQSRLARTSFDKNRFQNISEKLHMECKAEMVTPLVTNPGHVCITDTNLYFQPLNGYPKPVVQITLQDVRRIYKRRHGLMPLGLEVFCTEDDLCSDIYLKFYEPQDRDDLYFYIATYLEHHVAEHTAESYMLQWQRGHLSNYQYLLHLNNLADRSCNDLSQYPVFPWIIHDYSSSELDLSNPGTFRDLSKPVGALNKERLERLLTRYQEMPEPKFMYGSHYSSPGYVLFYLVRIAPEYMLCLQNGRFDNADRMFNSIAETWKNCLDGATDFKELIPEFYGDDVSFLVNSLKLDLGKRQGGQMVDDVELPPWASSPEDFLQKSKDALESNYVSEHLHEWIDLIFGYKQKGSDAVGAHNVFHPLTYEGGVDLNSIQDPDEKVAMLTQILEFGQTPKQLFVTPHPRRITPKFKSLSQTSSYNASMADSPGEESFEDLTEESKTLAWNNITKLQLHEHYKIHKEAVTGITVSRNGSSVFTTSQDSTLKMFSKESKMLQRSISFSNMALSSCLLLPGDATVITSSWDNNVYFYSIAFGRRQDTLMGHDDAVSKICWHDNRLYSASWDSTVKVWSGVPAEMPGTKRHHFDLLAELEHDVSVDTISLNAASTLLVSGTKEGTVNIWDLTTATLMHQIPCHSGIVCDTAFSPDSRHVLSTGTDGCLNVIDVQTGMLISSMTSDEPQRCFVWDGNSVLSGSQSGELLVWDLLGAKISERIQGHTGAVTCIWMNEQCSSIITGGEDRQIIFWKLQY

SEQ ID NO: 55608 - protein, 948 aa, Homo sapiens
MTGQARFHRGAEACRAIRQCRSRRPRAAHPEGRAGSGRGSRHASPGVRRGGFSLLLLNLEEYYFEQHRANHILHKGSHHERKIRGSLKICSKSVIFEPDSISQPIIKIPLRDCIKIGKHGENGANRHFTKAKSGGISLIFSQVYFIKEHNVVAPYKIERGKMEYVFELDVPGKVEDVVETLLQLHRASCLDKLGDQTAMITAILQSRLARTSFDKNRFQNISEKLHMECKAEMVTPLVTNPGHVCITDTNLYFQPLNGYPKPVVQITLQDVRRIYKRRHGLMPLGLEVFCTEDDLCSDIYLKFYEPQDRDDLYFYIATYLEHHVAEHTAESYMLQWQRGHLSNYQYLLHLNNLADRSCNDLSQYPVFPWIIHDYSSSELDLSNPGTFRDLSKPVGALNKERLERLLTRYQEMPEPKFMYGSHYSSPGYVLFYLVRIAPEYMLCLQNGRFDNADRMFNSIAETWKNCLDGATDFKELIPEFYGDDVSFLVNSLKLDLGKRQGGQMVDDVELPPWASSPEDFLQKSKDALESNYVSEHLHEWIDLIFGYKQKGSDAVGAHNVFHPLTYEGGVDLNSIQDPDEKVAMLTQILEFGQTPKQLFVTPHPRRITPKFKSLSQTSSYNASMADSPGEESFEDLTEESKTLAWNNITKLQLHEHYKIHKEAVTGITVSRNGSSVFTTSQDSTLKMFSKESKMLQRSISFSNMALSSCLLLPGDATVITSSWDNNVYFYSIAFGRRQDTLMGHDDAVSKICWHDNRLYSASWDSTVKVWSGVPAEMPGTKRHHFDLLAELEHDVSVDTISLNAASTLLVSGTKEGTVNIWDLTTATLMHQIPCHSGIVCDTAFSPDSRHVLSTGTDGCLNVIDVQTGMLISSMTSDEPQRCFVWDGNSVLSGSQSGELLVWDLLGAKISERIQGHTGAVTCIWMNEQCSSIITGGEDRQIIFWKLQY

SEQ ID NO: 55609 - protein, 390 aa, Homo sapiens
MGDTFIRHIALLGFEKRFVPSQHYVYMFLVKWQDLSEKVVYRRFTEIYEFHKTLKEMFPIEAGAINPENRIIPHLPAPKWFDGQRAAENRQGTLTEYCGTLMSLPTKISRCPHLLDFFKVRPDDLKLPTDNQTKKPETYLMPKDGKSTATDITGPIILQTYRAIANYEKTSGSEMALSTGDVVEVVEKSESGWWFCQMKAKRGWIPASFLEPLDSPDETEDPEPNYAGEPYVAIKAYTAVEGDEVSLLEGEAVEVIHKLLDGWWVIRKDDVTGYFPSMYLQKSGQDVSQAQRQIKRGAPPRRSSIRNAHSIHQRSRKRLSQDAYRRNSVRFLQQRRRQARPGPQSPGSPLEEERQTQRSKPQPAVPPRPSADLILNRCSESTKRKLASAV

SEQ ID NO: 55610 - protein, 147 aa, Homo sapiens [sequence omitted]

SEQ ID NO: 55611 - protein, 252 aa, Homo sapiens
MGDTFIRHIALLGFEKRFVPSQHYVHVPGEMAGPVGEGGLPALHRDLRVPSPKWFDGQRAAENRQGTLTEYCGTLMSLPTKISRCPHLLDFFKVRPDDLKLPTDNQTKKPETYLMPKDGKSTATDITGPIILQTYRAIANYEKTSGSEMALSTGDVVEVVEKSESGQTSHLTGLLPLVLRNPQPQAPCQGSGSLAPGRTPALLGALNVLPTLWVAFCLSVHPVVAVGICAWQAGAGHVCVFCLDGYGTVCSL

SEQ ID NO: 55612 - protein, 526 aa, Homo sapiens
MSLVEAISLWNEGVLAADKKDWKGALDAFSAVQDPHSRICFNIGCMYTILKNMTEAEKAFTRSINRDKHLAVAYFQRGMLYYQTEKYDLAIKDLKEALIQLRGNQLIDYKILGLQFKLFACEVLYNIAFMYAKKEEWKKAEEQLALATSMKSEPRHSKIDKAMECVWKQKLYEPVVIPVGKLFRPNERQVAQLAKKDYLGKATVVASVVDQDSFSGFAPLQPQAAEPPPRPKTPEIFRALEGEAHRVLFGFVPETKEELQVMPGNIVFVLKKGNDNWATVMFNGQKGLVPCNYLEPVELRIHPQQQPQEESSPQSDIPAPPSSKAPGRPQLSPGQKQKEEPKEVKLSVPMPYTLKVHYKYTVVMKTQPGLPYSQVRDMVSKKLELRLEHTKLSYRPRDSNELVPLSEDSMKDAWGQVKNYCLTLWCENTVGDQGFPDEPKESEKADANNQTTEPQLKKGSQVEALFSYEATQPEDLEFQEGDIILVLSKVNEEWLEGECKGKVGIFPKVFVEDCATTDLESTRREV

SEQ ID NO: 55613 - protein, 526 aa, Homo sapiens; identical to SEQ ID NO: 55612

SEQ ID NO: 55614 - protein, 598 aa, Homo sapiens
GSPARGDAPTCLLSVSWQLSWPPSFYLIMSLVEAISLWNEGVLAADKKDWKGALDAFSAVQDPHSRICFNIGCMYTILKNMTEAEKAFTRSINRDKHLAVAYFQRGMLYYQTEKYDLAIKDLKEALIQLRGNQLIDYKILGLQFKLFACEVLYNIAFMYAKKEEWKKAEEQLALATSMKSEPRHSKIDKAMECVWKQKLYEPVVIPVGKLFRPNERQVAQLAKKDYLGKATVVASVVDQDSFSGFAPLQPQVRQSDLLGAQAGSVSSRQLQLDVELEPGWSQVPGSKFSVFAPWHHVRGWGLDLVSILCRALEGEAHRVLFGFVPETKEELQVMPGNIVFVLKKGNDNWATVMFNGQKGLVPCNYLEPVELRIHPQQQPQEESSPQSDIPAPPSSKAPGRPQLSPGQKQKEEPKEVKLSVPMPYTLKVHYKYTVVMKTQPGLPYSQVRDMVSKKLELRLEHTKLSYRPRDSNELVPLSEDSMKDAWGQVKNYCLTLWCENTVGDQGFPDEPKESEKADANNQTTEPQLKKGSQVEALFSYEATQPEDLEFQEGDIILVLSKVNEEWLEGECKGKVGIFPKVFVEDCATTDLESTRREV

SEQ ID NO: 55615 - protein, 481 aa, Homo sapiens
MSLVEAISLWNEGVLAADKKDWKGALDAFSAVQDPHSRICFNIGCMYTILKNMTEAEKAFTRSINRDKHLAVAYFQRGMLYYQTEKYDLAIKDLKEALIQLRGNQLIDYKILGLQFKLFACEKQKLYEPVVIPVGKLFRPNERQVAQLAKKDYLGKATVVASVVDQDSFSGFAPLQPQAAEPPPRPKTPEIFRALEGEAHRVLFGFVPETKEELQVMPGNIVFVLKKGNDNWATVMFNGQKGLVPCNYLEPVELRIHPQQQPQEESSPQSDIPAPPSSKAPGRPQLSPGQKQKEEPKEVKLSVPMPYTLKVHYKYTVVMKTQPGLPYSQVRDMVSKKLELRLEHTKLSYRPRDSNELVPLSEDSMKDAWGQVKNYCLTLWCENTVGDQGFPDEPKESEKADANNQTTEPQLKKGSQVEALFSYEATQPEDLEFQEGDIILVLSKVNEEWLEGECKGKVGIFPKVFVEDCATTDLESTRREV

SEQ ID NO: 55616 - protein, 445 aa, Homo sapiens
MSLVEAISLWNEGVLAADKKDWKGALDAFSAVQDPHSRICFNIGCMYTILKNMTEAEKAFTRSINRDKHLAVAYFQRGMLYYQTEKYDLAIKDLKEALIQLRGNQLIDYKILGLQFKLFACEVVASVVDQDSFSGFAPLQPQAAEPPPRPKTPEIFRALEGEAHRVLFGFVPETKEELQVMPGNIVFVLKKGNDNWATVMFNGQKGLVPCNYLEPVELRIHPQQQPQEESSPQSDIPAPPSSKAPGRPQLSPGQKQKEEPKEVKLSVPMPYTLKVHYKYTVVMKTQPGLPYSQVRDMVSKKLELRLEHTKLSYRPRDSNELVPLSEDSMKDAWGQVKNYCLTLWCENTVGDQGFPDEPKESEKADANNQTTEPQLKKGSQVEALFSYEATQPEDLEFQEGDIILVLSKVNEEWLEGECKGKVGIFPKVFVEDCATTDLESTRREV

SEQ ID NO: 55617 - protein, 143 aa, Homo sapiens
MPGNIVFVLKKGNDNWATVMFNGQKGLVPCNYLEPVELRIHPQQQPQEESSPQSDIPAPPSSKAPGRPQLSPGQKQKEEPKEVKLSVPMPYTLKVHYKYTVVMKTQPGLPYSQVRDMVSKKLELRLEHTKLSYRPRDSNELVP

SEQ ID NO: 55618 - protein, 56 aa, Homo sapiens
MPYTLKVHYKYTVVMKTQPGLPYSQVRDMVSKKLELRLEHTKLSYRPRDSNELVPL

SEQ ID NO: 55619 - protein, 339 aa, Homo sapiens
MAVAQQLRAESDFEQLPDDVAISANIADIEEKRGFTSHFVFVIEVKTKGGSKYLIYRRYRQFHALQSKLEERFGPDSKSSALACTLPTLPAKVYVGVKQEIAEMRIPALNAYMKSLLSLPVWVLMDEDVRIFFYQSPYDSEQVPQALRRLRPRTRKVKSVSPQGNSVDRMAAPRAEALFDFTGNSKLELNFKAGDVIFLLSRINKDWLEGTVRGATGIFPLSFVKILKDFPEEDDPTNWLRCYYYEDTISTIKDIAVEEDLSSTPLLKDLLELTRREFQREDIALNYRDAEGDLVRLLSDEDVALMVRQARGLPSQKRLFPWKLHITQKDNYRVYNTMP

SEQ ID NO: 55620 - protein, 348 aa, Homo sapiens
MAVAQQLRAESDFEQLPDDVAISANIADIEEKRGFTSHFVFVIEVKTKGGSKYLIYRRYRQFHALQSKLEERFGPDSKSSALACTLPTLPAKVYVGVKQEIAEMRIPALNAYMKSLLSLPVWVLMDEDVRIFFYQSPYDSEQVPQALRRLRPRTRKVKSVSPQGNSVDRMAAPRAEALFDFTGNSKLELNFKAGDVIFLLSRINKDWLEGTVRGATGIFPLSFVKILKDFPEEDDPTNWLRCYYYEDTISTIKSVAWEGGACPAFLPSLRPLPLTSPSHGSLSHSKAPSGSQMSHNAVTSHQRPGWPGQPHSPFPHPTPHFQPDASLLQPVTPLGTSRWRKISAALPY

SEQ ID NO: 55621 - protein, 166 aa, Homo sapiens
MRIPALNAYMKSLLSLPVWVLMDEDVRIFFYQSPYDSEQVPQALRRLRPRTRKVKSVSPQGNSVDRMAAPRAEALFDFTGNSKLELNFKAGDVIFLLSRINKDWLEGTVRGATGIFPLSFVKILKDFPEEDDPTNWLRCYYYEDTISTIKSVAWEGGACPAFLPSL

SEQ ID NO: 55622 - protein, 159 aa, Homo sapiens
MNDISQKAEILLSSSKPVPKTYVPKLGKGDVKDKFEAMQRAREERNQRRSRDEKQRRKEQYIREREWNRRKQEIKEMLASDDEEDVSSKVEKAYVPKLTGTVKGRFAEMEKQRQEEQRKRTEEERKRRIEQDMLEKRKIQRELAKRAEQKLARRDGAHL

SEQ ID NO: 55623 - protein, 611 aa, Homo sapiens
MNDISQKAEIKEMLASDDEEDVSSKVEKAYVPKLTGTVKGRFAEMEKQRQEEQRKRTEEERKRRIEQDMLEKRKIQRELAKRAEQIEDINNTGTESASEEGDDSLLITVVPVKSYKTSGKMKKNFEDLEKEREEKERIKYEEDKRIRYEEQRPSLKEAKCLSLVMDDEIESEAKKESLSPGKLKLTFEELERQRQENRKKQAEEEARKRLEEEKRAFEEARRQMVNEDEENQDTAKIFKGYRPGKLKLSFEEMERQRREDEKRKAEEEARRRIEEEKKAFAEARRNMVVDDDSPEMYKTISQEFLTPGKLEINFEELLKQKMEEEKRRTEEERKHKLEMEKQEFEQLRQEMGEEEEENETFGLSREYEELIKLKRSGSIQAKNLKSKFEKIGQLSEKEIQKKIEEERARRRAIDLEIKEREAENFHEEDDVDVRPARKSEAPFTHKVNMKARFEQMAKAREEEEQRRIEEQKLLRMQFEQREIDAALQKKREEEEEEEGSIMNGSTAEDEEQTRSGAPWFKKPLKNTSVVDSEPVRFTVKVTGEPKPEITWWFEGEILQDGEDYQYIERGETYCLYLPETFPEDGGEYMCKAVNNKGSAASTCILTIESKN

SEQ ID NO: 55624 - protein, 675 aa, Homo sapiens
MNDISQKAEILLSSSKPVPKTYVPKLGKGDVKDKFEAMQRAREERNQRRSRDEKQRRKEQYIREREWNRRKQEIKEMLASDDEEDVSSKVEKAYVPKLTGTVKGRFAEMEKQRQEEQRKRTEEERKRRIEQDMLEKRKIQRELAKRAEQIEDINNTGTESASEEGDDSLLITVVPVKSYKTSGKMKKNFEDLEKEREEKERIKYEEDKRIRYEEQRPSLKEAKCLSLVMDDEIESEAKKESLSPGKLKLTFEELERQRQENRKKQAEEEARKRLEEEKRAFEEARRQMVNEDEENQDTAKIFKGYRPGKLKLSFEEMERQRREDEKRKAEEEARRRIEEEKKAFAEARRNMVVDDDSPEMYKTISQEFLTPGKLEINFEELLKQKMEEEKRRTEEERKHKLEMEKQEFEQLRQEMGEEEEENETFGLSREYEELIKLKRSGSIQAKNLKSKFEKIGQLSEKEIQKKIEEERARRRAIDLEIKEREAENFHEEDDVDVRPARKSEAPFTHKVNMKARFEQMAKAREEEEQRRIEEQKLLRMQFEQREIDAALQKKREEEEEEEGSIMNGSTAEDEEQTRSGAPWFKKPLKNTSVVDSEPVRFTVKVTGEPKPEITWWFEGEILQDGEDYQYIERGETYCLYLPETFPEDGGEYMCKAVNNKGSAASTCILTIESKN

SEQ ID NO: 55625 - protein, 576 aa, Homo sapiens
  VARIANT 1: note = MOD_RES - Any amino acid
XVKGRFAEMEKQRQEEQRKRTEEERKRRIEQDMLEKRKIQRELAKRAEQIEDINNTGTESASEEGDDSLLITVVPVKSYKTSGKMKKNFEDLEKEREEKERIKYEEDKRIRYEEQRPSLKEAKCLSLVMDDEIESEAKKESLSPGKLKLTFEELERQRQENRKKQAEEEARKRLEEEKRAFEEARRQMVNEDEENQDTAKIFKGYRPGKLKLSFEEMERQRREDEKRKAEEEARRRIEEEKKAFAEARRNMVVDDDSPEMYKTISQEFLTPGKLEINFEELLKQKMEEEKRRTEEERKHKLEMEKQEFEQLRQEMGEEEEENETFGLSREYEELIKLKRSGSIQAKNLKSKFEKIGQLSEKEIQKKIEEERARRRAIDLEIKEREAENFHEEDDVDVRPARKSEAPFTHKVNMKARFEQMAKAREEEEQRRIEEQKLLRMQFEQREIDAALQKKREEEEEEEGSIMNGSTAEDEEQTRSGAPWFKKPLKNTSVVDSEPVRFTVKVTGEPKPEITWWFEGEILQDGEDYQYIERGETYCLYLPETFPEDGGEYMCKAVNNKGSAASTCILTIETDDY

SEQ ID NO: 55626 - protein, 321 aa, Homo sapiens
MNDISQKAEIKEMLASDDEEDVSSKVEKAYVPKLTGTVKGRFAEMEKQRQEEQRKRTEEERKRRIEQDMLEKRKIQRELAKRAEQIEDINNTGTESASEEGDDSLLITVVPVKSYKTSGKMKKNFEDLEKEREEKERIKYEEDKRIRYEEQRPSLKEAKCLSLVMDDEIESEAKKESLSPGKLKLTFEELERQRQENRKKQAEEEARKRLEEEKRAFEEARRQMVNEDEENQDTAKIFKGYRPGKLKLSFEEMERQRREDEKRKAEEEARRRIEEEKKAFAEARRNMVVDDDSPEMYKTISQEFLTPGKLEINFEELLKQK

SEQ ID NO: 55627 - protein, 435 aa, Homo sapiens
MNDISQKAEILLSSSKPVPKTYVPKLGKGDVKDKFEAMQRAREERNQRRSRDEKQRRKEQYIREREWNRRKQEIKEMLASDDEEDVSSKVEKAYVPKLTGTVKGRFAEMEKQRQEEQRKRTEEERKRRIEQDMLEKRKIQRELAKRAEQEGDDSLLITVVPVKSYKTSGKMKKNFEDLEKEREEKERIKYEEDKRIRYEEQRPSLKEAKCLSLVMDDEIESEAKKESLSPGKLKLTFEELERQRQENRKKQAEEEARKRLEEEKRAFEEARRQMVNEDEENQDTAKIFKGYRPGKLKLSFEEMERQRREDEKRKAEEEARRRIEEEKKAFAEARRNMVVDDDSPEMYKTISQEFLTPGKLEINFEELLKQKMEEEKRRTEEERKHKLEMEKQEFEQLRQEMGEEEEENETFGLSREYEELIKLKRSGSIQAKNLK

SEQ ID NO: 55628 - protein, 662 aa, Homo sapiens
MNDISQKAEILLSSSKPVPKTYVPKLGKGDVKDKFEAMQRAREERNQRRSRDEKQRRKEQYIREREWNRRKQEIKEMLASDDEEDVSSKVEKAYVPKLTGTVKGRFAEMEKQRQEEQRKRTEEERKRRIEQDMLEKRKIQRELAKRAEQEGDDSLLITVVPVKSYKTSGKMKKNFEDLEKEREEKERIKYEEDKRIRYEEQRPSLKEAKCLSLVMDDEIESEAKKESLSPGKLKLTFEELERQRQENRKKQAEEEARKRLEEEKRAFEEARRQMVNEDEENQDTAKIFKGYRPGKLKLSFEEMERQRREDEKRKAEEEARRRIEEEKKAFAEARRNMVVDDDSPEMYKTISQEFLTPGKLEINFEELLKQKMEEEKRRTEEERKHKLEMEKQEFEQLRQEMGEEEEENETFGLSREYEELIKLKRSGSIQAKNLKSKFEKIGQLSEKEIQKKIEEERARRRAIDLEIKEREAENFHEEDDVDVRPARKSEAPFTHKVNMKARFEQMAKAREEEEQRRIEEQKLLRMQFEQREIDAALQKKREEEEEEEGSIMNGSTAEDEEQTRSGAPWFKKPLKNTSVVDSEPVRFTVKVTGEPKPEITWWFEGEILQDGEDYQYIERGETYCLYLPETFPEDGGEYMCKAVNNKGSAASTCILTIETDDY

SEQ ID NO: 55629 - protein, 270 aa, Homo sapiens
MENQPVRWRALPGLPRPPGLPAAPWLLLGVLLLPGTLRLAGGQSVTHTGLPIMASLANTAISFSCRITYPYTPQFKVFTVSYFHEDLQGQRSPKKPTNCHPGLGTENQSHTLDCQVTLVLPGASATGTYYCSVHWPHSTVRGSGTFILVRDAGYREPPQSPQKLLLFGFTGLLSVLSVVGTALLLWNKKRMRGPGKDPTRKCPDPRSASSPKQHPSESVYTALQRRETEVYACIENEDGSSPTAKQSPLSQERPHRFEDDGELNLVYENL

SEQ ID NO: 55630 - protein, 415 aa, Homo sapiens
MAPVSGSRSPDREASGSGGRRRSSSKSPKPSKSARSPRGRRSRSHSCSRSGDRNGLTHQLGGLSQGSRNQSYRSRSRSRSRERPSAPRGIPFASASSSVYYGSYSRPYGSDKPWPSLLDKEREESLRQKRLSERERIGELGAPEVWGLSPKNPEPDSDEHTPVEDEEPKKSTTSASTSEEEKKKKSSRSKERSKKRRKKKSSKRKHKKYSEDSDSDSDSETDSSDEDNKRRAKKAKKKEKKKKHRSKKYKKKRSKKSRKESSDSSSKESQEEFLENPWKDRTKAEEPSDLIGPEAPKTLTSQDDKPLNYGHALLPGEGAAMAEYVKAGKRIPRRGEIGLTSEEIASFECSGYVMSGSRHRRMEAVRLRKENQIYSADEKRALASFNQEERRKRENKILASFREMVYRKTKGKDDK

SEQ ID NO: 55631 - protein, 690 aa, Homo sapiens
MEKILQMAEGIDIGEMPSYDLVLSKPSKGQKRHLSTCDGQNPPKKQAGSKFHARPRFEPVHFVASSSKDERQEDPYGPQTKEVNEQTHFASMPRDIYQDYTQDSFSIQDGNSQYCDSSGFILTKDQPVTANMYFDSGNPAPSTTSQQANSQSTPEPSPSQTFPESVVAEKQYFIEKLTATIWKNLSNPEMTSGSDKINYTYMLTRCIQACKTNPEYIYAPLKEIPPADIPKNKKLLTDGYACEVRCQNIYLTTGYAGSKNGSRDRATELAVKLLQKRIEVRVVRRKFKHTFGEDLVVCQIGMSSYEFPPALKPPEDLVVLGKDASGQPIFNASAKHWTNFVITENANDAIGILNNSASFNKMSIEYKYEMMPNRTWRCRVFLQDHCLAEGYGTKKTSKHAAADEALKILQKTQPTYPSVKSSQCHTGSSPRGSGKKKDIKDLVVYENSSNPVCTLNDTAQFNRMTVEYVYERMTGLRWKCKVILESEVIAEAVGVKKTVKYEAAGEAVKTLKKTQPTVINNLKKGAVEDVISRNEIQGRSAEEAYKQQIKEDNIGNQLLRKMGWTGGGLGKSGEGIREPISVKEQHKREGLGLDVERVNKIAKRDIEQIIRNYARSESHTDLTFSRELTNDERKQIHQIAQKYGLKSKSHGVGHDRYLVVGRKRRKEDLLDQLKQEGQVGHYELVMPQAN

SEQ ID NO: 55632 - protein, 690 aa, Homo sapiens; identical to SEQ ID NO: 55631

SEQ ID NO: 55633 - protein, 705 aa, Homo sapiens
MGFMLPLIFRYSPRLMEKILQMAEGIDIGEMPSYDLVLSKPSKGQKRHLSTCDGQNPPKKQAGSKFHARPRFEPVHFVASSSKDERQEDPYGPQTKEVNEQTHFASMPRDIYQDYTQDSFSIQDGNSQYCDSSGFILTKDQPVTANMYFDSGNPAPSTTSQQANSQSTPEPSPSQTFPESVVAEKQYFIEKLTATIWKNLSNPEMTSGSDKINYTYMLTRCIQACKTNPEYIYAPLKEIPPADIPKNKKLLTDGYACEVRCQNIYLTTGYAGSKNGSRDRATELAVKLLQKRIEVRVVRRKFKHTFGEDLVVCQIGMSSYEFPPALKPPEDLVVLGKDASGQPIFNASAKHWTNFVITENANDAIGILNNSASFNKMSIEYKYEMMPNRTWRCRVFLQDHCLAEGYGTKKTSKHAAADEALKILQKTQPTYPSVKSSQCHTGSSPRGSGKKKDIKDLVVYENSSNPVCTLNDTAQFNRMTVEYVYERMTGLRWKCKVILESEVIAEAVGVKKTVKYEAAGEAVKTLKKTQPTVINNLKKGAVEDVISRNEIQGRSAEEAYKQQIKEDNIGNQLLRKMGWTGGGLGKSGEGIREPISVKEQHKREGLGLDVERVNKIAKRDIEQIIRNYARSESHTDLTFSRELTNDERKQIHQIAQKYGLKSKSHGVGHDRYLVVGRKRRKEDLLDQLKQEGQVGHYELVMPQAN

SEQ ID NO: 55634 - protein, 189 aa, Homo sapiens
MLLRAAWRRAAVAVTAAPGPKPAAPTRGLRLRVGDRAPQSAVPADTAAAPEVGPVLRPLYMDVQATTPLDPRVLDAMLPYLINYYGNPHSRTHAYGWESEAAMERARQQVASLIGADPREIIFTSGATESNNIAIKTESHSVIQAGVQWHDLDSLQAPPPGFTPFSCLSLLSSWDYRRPPPHPANFLYF

SEQ ID NO: 55635 - protein, 457 aa, Homo sapiens
MLLRAAWRRAAVAVTAAPGPKPAAPTRGLRLRVGDRAPQSAVPADTAAAPEVGPVLRPLYMDVQATTPLDPRVLDAMLPYLINYYGNPHSRTHAYGWESEAAMERARQQVASLIGADPREIIFTSGATESNNIAIKGVARFYRSRKKHLITTQTEHKCVLDSCRSLEAEGFQVTYLPVQKSGIIDLKELEAAIQPDTSLVSVMTVNNEIGVKQPIAEIGRICSSRKVYFHTDAAQAVGKIPLDVNDMKIDLMSISGHKIYGPKGVGAIYIRRRPRVRVEALQSGGGQERGMRSGTVPTPLVVGLGAACEVAQQEMEYDHKRISKLSERLIQNIMKSLPDVVMNGDPKHHYPGCINLSFAYVEGESLLMALKDVALSSGSACTSASLEPSYVLRAIGTDEDLAHSSIRFGIGRFTTEEEVDYTVEKCIQHVKRLREMSPLWEMVQDGIDLKSIKWTQH

SEQ ID NO: 55636 - protein, 161 aa, Homo sapiens [sequence omitted]

SEQ ID NO: 55637 - protein, 255 aa, Homo sapiens
MTVNNEIGVKQPIAEIGRICSSRKVYFHTDAAQAVGKIPLDVNDMKIDLMSISGHKIYGPKGVGAIYIRRRPRVRVEALQSGGGQERGMRSGTVPTPLVVGLGAACEVAQQEMEYDHKRISKLSERLIQNIMKSLPDVVMNGDPKHHYPGCINLSFAYVEGESLLMALKDVALSSGSACTSASLEPSYVLRAIGTDEDLAHSSIRFGIGRFTTEEEVDYTVEKCIQHVKRLREMSPLWEMVQDGIDLKSIKWTQH

SEQ ID NO: 55638 - protein, 406 aa, Homo sapiens
MLLRAAWRRAAVAVTAAPGPKPAAPTRGLRLRVGDRAPQSAVPADTAAAPEVGPVLRPLYMDVQATTPLDPRVLDAMLPYLINYYGNPHSRTHAYGWESEAAMERARQQVASLIGADPREIIFTSGATESNNIAIKELEAAIQPDTSLVSVMTVNNEIGVKQPIAEIGRICSSRKVYFHTDAAQAVGKIPLDVNDMKIDLMSISGHKIYGPKGVGAIYIRRRPRVRVEALQSGGGQERGMRSGTVPTPLVVGLGAACEVAQQEMEYDHKRISKLSERLIQNIMKSLPDVVMNGDPKHHYPGCINLSFAYVEGESLLMALKDVALSSGSACTSASLEPSYVLRAIGTDEDLAHSSIRFGIGRFTTEEEVDYTVEKCIQHVKRLREMSPLWEMVQDGIDLKSIKWTQH

SEQ ID NO: 55639 - protein, 230 aa, Homo sapiens
MLKNPYTIKKQPLHQFVQRPLFPLPAAFYHPVRYMFIQTQDTPNPNSLKFIPGKPVLETRTMDFPTPAAAFRSPLARQLFRIEGVKSVFFGPDFITVTKENEELDWNLLKPDIYATIMDFFASGLPLVTEETPSGEAGSEEDDEVVAMIKELLDTRIRPTVQEDGGDVIYKGFEDGIVQLKLQGSCTSCPSSIITLKNGIQNMLQFYIPEVEGVEQVMDDESDEKEANSP

SEQ ID NO: 55640 - protein, 113 aa, Homo sapiens
MDFFASGLPLVTEETPSGEAGSEEDDEVVAMIKELLDTRIRPTVQEDGGDVIYKGFEDGIVQLKLQGSCTSCPSSIITLKNGIQNMLQFYIPEVEGVEQVMDDESDEKEANSP

SEQ ID NO: 55641 - protein, 254 aa, Homo sapiens
MAATARRGWGAAAVAAGLRRRFCHMLKNPYTIKKQPLHQFVQRPLFPLPAAFYHPVRYMFIQTQDTPNPNSLKFIPGKPVLETRTMDFPTPAAAFRSPLARQLFRIEGVKSVFFGPDFITVTKENEELDWNLLKPDIYATIMDFFASGLPLVTEETPSGEAGSEEDDEVVAMIKELLDTRIRPTVQEDGGDVIYKGFEDGIVQLKLQGSCTSCPSSIITLKNGIQNMLQFYIPEVEGVEQVMDDESDEKEANSP

SEQ ID NO: 55642 - protein, 99 aa, Homo sapiens
MDFFASGLPLVTEETPSGEAGSEEDDEVVAMIKELLDTRIRPTVQEDGGDVIYKGFEDGIVQLKLQGSCTSCPSSIITLKNGIQNMLQFYIPEVEGVEQ

SEQ ID NO: 55643 - protein, 113 aa, Homo sapiens; identical to SEQ ID NO: 55640

SEQ ID NO: 55644 - protein, 96 aa, Homo sapiens
MDFFASGLPLVTEETPSGEAGSEEDDEVVAMIKELLDTRIRPTVQEDGGDVIYKGFEDGIVQLKLQGSCTSCPSSIITLKNGIQNMLQFYIPEVEG

SEQ ID NO: 55645 - protein, 487 aa, Homo sapiens
MAAALPRTLGELQLYRILQKANLLSYFDAFIQQGGDDVQQLCEAGEEEFLEIMALVGMASKPLHVRRLQKALRDWVTNPGLFNQPLTSLPVSSIPIYKLPEGSPTWLGISCSSYERSSNAREPHLKIPKCAATTCVQSLGQGKSDVVGSLALQSVGESRLWQGHHATESEHSLSPADLGSPASPKESSEALDAAAALSVAECVERMAPTLPKSDLNEVKELLKTNKKLAKMIGHIFEMNDDDPHKEEEIRKYSAIYGRFDSKRKDGKHLTLHELTVNEAAAQLCVKDNALLTRRDELFALARQISREVTYKYTYRTTKSKCGERDELSPKRIKVEDGFPDFQDSVQTLFQQARAKSEELAALSSQQPEKVMAKQMEFLCNQAGYERLQHAERRLSAGLYRQSSEEHSPNGLTSDNSDGQGERPLNLRMPNLQNRQPHHFVVDGELSRLYPSEAKSHSSESLGILKDYPHSAFTLEKKVIKTEPEDSR

SEQ ID NO: 55646 - protein, 458 aa, Homo sapiens
MAAALPRTLGELQLYRILQKANLLSYFDAFIQQGGDDVQQLCEAGEEEFLEIMALVGMASKPLHVRRLQKALRDWVTNPGLFNQPLTSLPVSSIPIYKLPEGSPTWLGISCSSYERSSNAREPHLKIPKCAATTCVQSLGQGKSDVVGSLALQSVGESRLWQGHHATESEHSLSPADLGSPASPKESSEALDAAAALSVAECVERMAPTLPKSDLNEVKELLKTNKKLAKMIGHIFEMNDDDPHKEEEIRKYSAIYGRFDSKRKDGKHLTLHELTVNEAAAQLCVKDNALLTRRDELFALARQISREVTYKYTYRTTKSKCGERDELSPKRIKVEDQPEKVMAKQMEFLCNQAGYERLQHAERRLSAGLYRQSSEEHSPNGLTSDNSDGQGERPLNLRMPNLQNRQPHHFVVDGELSRLYPSEAKSHSSESLGILKDYPHSAFTLEKKVIKTEPEDSR

SEQ ID NO: 55647 - protein, 487 aa, Homo sapiens; identical to SEQ ID NO: 55645

SEQ ID NO: 55648 - protein, 486 aa, Homo sapiens
MAAALPRTLGELQLYRILQKANLLSYFDAFIQQGGDDVQQLCEAGEEEFLEIMALVGMASKPLHVRRLQKALRDWVTNPGLFNQPLTSLPVSSIPIYKLPEGSPTWLGISCSSYERSSNAREPHLKIPKCAATTCVQSLGQGKSDVVGSLALQSVGESRLWQGHHATESEHSLSPADLGSPASPKESSEALDAAAALSVAECVERMAPTLPKSDLNEVKELLKTNKKLAKMIGHIFEMNDDDPHKEEEIRKYSAIYGRFDSKRKDGKHLTLHELTVNEAAAQLCVKDNALLTRRDELFALARQISREVTYKYTYRTTKSKCGERDELSPKRIKVEDGFPDFQDSVQTLFQQARAKSEELAALSSQPEKVMAKQMEFLCNQAGYERLQHAERRLSAGLYRQSSEEHSPNGLTSDNSDGQGERPLNLRMPNLQNRQPHHFVVDGELSRLYPSEAKSHSSESLGILKDYPHSAFTLEKKVIKTEPEDSR

SEQ ID NO: 55649 - protein, 157 aa, Homo sapiens
MAAALPRTLGELQLYRILQKANLLSYFDAFIQQGGDDVQQLCEAGEEEFLEIMALVGMASKPLHVRRLQKALRDWVTNPGLFNQPLTSLPVSSIPIYKLPEGSPTWLGISCSSYERSSNAREPHLKIPKCAATTCVQSLGQGKSDVVGSLALQSVGE

SEQ ID NO: 55650 - protein, 62 aa, Homo sapiens
MAAALPRTLGELQLYRILQKANLLSYFDAFIQQGGDDVQQLCEAGEEEFLEIMALVGMASKP

SEQ ID NO: 55651 - protein, 100 aa, Homo sapiens
MAAALPRTLGELQLYRILQKANLLSYFDAFIQQGGDDVQQLCEAGEEEFLEIMALVGMASKPLHVRRLQKALRDWVTNPGLFNQPLTSLPVSSIPIYKLP

SEQ ID NO: 55652 - protein, 240 aa, Homo sapiens
  VARIANT 1: note = MOD_RES - Any amino acid
XKELLKTNKKLAKMIGHIFEMNDDDPHKEEEIRKYSAIYGRFDSKRKDGKHLTLHELTVNEAAAQLCVKDNALLTRRDELFALARQISREVTYKYTYRTTKSKCGERDELSPKRIKVEQPEKVMAKQMEFLCNQAGYERLQHAERRLSAGLYRQSSEEHSPNGLTSDNSDGQGERPLNLRMPNLQNRQPHHFVVDGELSRLYPSEAKSHSSESLGILKDYPHSAFTLEKKVIKTEPEDSR

SEQ ID NO: 55653 - protein, 152 aa, Homo sapiens
MAAALPRTLGELQLYRILQKANLLSYFDAFIQQGGDDVQQLCEAGEEEFLEIMALVGMASKPLHVRRLQKALRDWVTNPGLFNQPLTSLPVSSIPIYKLPEGSPTWLGISCSSYERSSNAREPHLKIPKCAATTCVQSLGQGKSDVVGSLAL

SEQ ID NO: 55654 - protein, 227 aa, Homo sapiens
MIGHIFEMNDDDPHKEEEIRKYSAIYGRFDSKRKDGKHLTLHELTVNEAAAQLCVKDNALLTRRDELFALARQISREVTYKYTYRTTKSKCGERDELSPKRIKVEQPEKVMAKQMEFLCNQAGYERLQHAERRLSAGLYRQSSEEHSPNGLTSDNSDGQGERPLNLRMPNLQNRQPHHFVVDGELSRLYPSEAKSHSSESLGILKDYPHSAFTLEKKVIKTEPEDSR

SEQ ID NO: 55655 - protein, 525 aa, Homo sapiens
MHRAPSPTAEQPPGGGDSARRTLQPRLKPSARAMALPRTLGELQLYRVLQRANLLSYYETFIQQGGDDVQQLCEAGEEEFLEIMALVGMATKPLHVRRLQKALREWATNPGLFSQPVPAVPVSSIPLFKISETAGTRKGSMSNGHGSPGEKAGSARSFSPKSPLELGEKLSPLPGGPGAGDPRIWPGRSTPESDVGAGGEEEAGSPPFSPPAGGGVPEGTGAGGLAAGGTGGGPDRLEPEMVRMVVESVERIFRSFPRGDAGEVTSLLKLNKKLARSVGHIFEMDDNDSQKEEEIRKYSIIYGRFDSKRREGKQLSLHELTINEAAAQFCMRDNTLLLRRVELFSLSRQVARESTYLSSLKGSRLHPEELGGPPLKKLKQEVGEQSHPEIQQPPPGPESYVPPYRPSLEEDSASLSGESLDGHLQAVGSCPRLTPPPADLPLALPAHGLWSRHILQQTLMDEGLRLARLVSHDRVGRLSPCVPAKPPLAEFEEGLLDRCPAPGPHPALVEGRRSSVKVEAEASRQ

SEQ ID NO: 55656 - protein, 461 aa, Homo sapiens
MHRAPSPTAEQPPGGGDSARRTLQPRLKPSARAMALPRTLGELQLYRVLQRANLLSYYETFIQQGGDDVQQLCEAGEEEFLEIMALVGMATKPLHVRRLQKALREWATNPGLFSQPVPAVPVSSIPLFKISETAGTRKGSMSNGHGSPGEKAGSARSFSPKSPLELGEKLSPLPGGPGAGDPRIWPGRSTPESDVGAGGEEEAGSPPFSPPAGGGVPEGTGAGGLAAGGTGGGPDRLEPEMVRMVVESVERIFRSFPRGDAGEVTSLLKLNKKLARSVGHIFEMDDNDSQKEEEIRKYSIIYGRFDSKRREGKQLSLHELTINEAAAQFCMRDNTLLLRRVELFSLSRQVARESTYLSSLKGSRLHPEELGGPPLKKLKQEVGEQSHPEIQQPPPGPESYVPPYRPSLEEDSASLSGESLDGHLQEFEEGLLDRCPAPGPHPALVEGRRSSVKVEAEASRQ

SEQ ID NO: 55657 - protein, 322 aa, Homo sapiens
MHRAPSPTAEQPPGGGDSARRTLQPRLKPSARAMALPRTLGELQLYRVLQRANLLSYYETFIQQGGDDVQQLCEAGEEEFLEIMALVGMATKPLHVRRLQKALREWATNPGLFSQPVPAVPVSSIPLFKISETAGTRKGSMSNGHGSPGEKAGSARSFSPKSPLELGEKLSPLPGGPGAGDPRIWPGRSTPESDVGAGGEEEAGSPPFSPPAGGGVPEGTGAGGLAAGGTGGGPDRLEPEMVRMVVESVERIFRSFPRGDAGEVTSLLKLNKKLARSVGHIFEMDDNDSQKEEEIRKYSIIYGRFDSKRREGKQLSLHEASP

SEQ ID NO: 55658 - protein, 240 aa, Homo sapiens
  VARIANT 1: note = MOD_RES - Any amino acid
XSGSASPAVAELCQNTPETFLEASKLLLTYADNILRNPNDEKYRSIRIGNTAFSTRLLPVRGAVECLFEMGFEEGETHLIFPKKASVEQLQKIRDLIAIERSSRLDGSNKSHKVKSSQQPAASTQLPTTPSSNPSGLNQHTRNRQGQSSDPPSASTVAADSAILEVLQSNIQHVLVYENPALQEKALACIPVQELKRKSQEKLSRARKLDKDIITLRNFWKQDVDGVASGPIVLHCAAEL

SEQ ID NO: 55659 - protein, 654 aa, Homo sapiens [sequence omitted]

SEQ ID NO: 55660 - protein, 633 aa, Homo sapiens
AALGSSSGSASPAVAELCQNTPETFLEASKLLLTYADNILRNPNDEKYRSIRIGNTAFSTRLLPVRGAVECLFEMGFEEGETHLIFPKKASVEQLQKIRDLIAIERSSRLDGSNKSHKVKSSQQPAASTQLPTTPSSNPSGLNQHTRNRQGQSSDPPSASTVAADSAILEVLQSNIQHVLVYENPALQEKALACIPVQELKRKSQEKLSRARKLDKGINISDEDFLLLELLHWFKEEFFHWVNNVLCSKCGGQTRSRDRSLLPSDDELKWGAKEVEDHYCDACQFSNRFPRYNNPEKLLETRCGRCGEWANCFTLCCRAVGFEARYVWDYTELQRTLSLKLTTLKEIGKTFLRISKRQKLIQVVDVTWRYSCKHEEVIARRTKVKEALLRDTINGLNKQRQLFLSENRRKELLQRIIVELVEFISPKTPKPGELGGRISGSVAWRVARGEMGLQRKETLFIPCENEKISKQLHLCYNIVKDRYVRVSNNNQTISGWENGVWKMESIFRKVETDWHMVYLARKEGSSFAYISWKFECGSVGLKVDSISIRTSSQTFQTGTVEWKLRSDTAQVELTGDNSLHSYADFSGATEVILEAELSRGDGDVAWQHTQLFRQSLNDHEENCLEIIIKFSDL

SEQ ID NO: 55661 - protein, 558 aa, Homo sapiens
MAAAALGSSSGSASPAVAELCQNTPETFLEASKLLLTYADNILRNPNDEKYRSIRIGNTAFSTRLLPVRGAVECLFEMGFEEGETHLIFPKKASVEQLQKIRDLIAIERSSRLDGSNKSHKVKSSQQPAASTQLPTTPSSNPSGLNQHTRNRQGQSSDPPSASTVAADSAILEVLQSNIQHVLVYENPALQEKALACIPVQELKRKSQEKLSRARKLDKGINISDEDFLLLELLHWFKEEFFHWVNNVLCSKCGGQTRSRDRSLLPSDDELKWGAKEVEDHYCDACQFSNRFPRYNNPEKLLETRCGRCGEWANCFTLCCRAVGFEARYVWDYTDHVWTEVYSPSQQRWLHCDACEDVCDKPLLYEIGWGKKLSYVIAFSKDEVVDVTWRYSCKHEEVIARRTKVKEALLRDTINGLNKQRQLFLSENRRKELLQRIIVELVEFISPKTPKPGELGGRISGSVAWRVARGEMGLQRKETLFIPCENEKISKQLHLCYNIVKDRYVRVSNNNQTISGWENGVWKMESIFRKVETDWHMITVFTPMLIFLVPLKLFWKQN

SEQ ID NO: 55662 - protein, 612 aa, Homo sapiens
MRNPNDEKYRSIRIGNTAFSTRLLPVRGAVECLFEMGFEEGETHLIFPKKASVEQLQKIRDLIAIERSSRLDGSNKSHKVKSSQQPAASTQLPTTPSSNPSGLNQHTRNRQGQSSDPPSASTVAADSAILEVLQSNIQHVLVYENPALQEKALACIPVQELKRKSQEKLSRARKLDKGINISDEDFLLLELLHWFKEEFFHWVNNVLCSKCGGQTRSRDRSLLPSDDELKWGAKEVEDHYCDACQFSNRFPRYNNPEKLLETRCGRCGEWANCFTLCCRAVGFEARYVWDYTDHVWTEVYSPSQQRWLHCDACEDVCDKPLLYEIGWGKKLSYVIAFSKDEVVDVTWRYSCKHEEVIARRTKVKEALLRDTINGLNKQRQLFLSENRRKELLQRIIVELVEFISPKTPKPGELGGRISGSVAWRVARGEMGLQRKETLFIPCENEKISKQLHLCYNIVKDRYVRVSNNNQTISGWENGVWKMESIFRKVETDWHMVYLARKEGSSFAYISWKFECGSVGLKVDSISIRTSSQTFQTGTVEWKLRSDTAQVELTGDNSLHSYADFSGATEVILEAELSRGDGDVAWQHTQLFRQSLNDHEENCLEIIIKFSDL

SEQ ID NO: 55663 - protein, 171 aa, Homo sapiens
MGFEEGETHLIFPKKASVEQLQKIRDLIAIERSSRLDGSNKSHKVKSSQQPAASTQLPTTPSSNPSGLNQHTRNRQGQSSDPPSASTVAADSAILEVLQSNIQHVLVYENPALQEKALACIPVQELKRKSQEKLSRARKLDKDIITLRNFWKQDVDGVASGPIVLHCAAEL

SEQ ID NO: 55664 - protein, 636 aa, Homo sapiens
MAAAALGSSSGSASPAVAELCQNTPETFLEASKLLLTYADNILRNPNDEKYRSIRIGNTAFSTRLLPVRGAVECLFEMGFEEGETHLIFPKKASVEQLQKIRDLIAIERSSRLDGSNKSHKVKSSQQPAASTQLPTTPSSNPSGLNQHTRNRQGQSSDPPSASTVAADSAILEVLQSNIQHVLVYENPALQEKALACIPVQELKRKSQEKLSRARKLDKGINISDEDFLLLELLHWFKEEFFHWVNNVLCSKCGGQTRSRDRSLLPSDDELKWGAKEVEDHYCDACQFSNRFPRYNNPEKLLETRCGRCGEWANCFTLCCRAVGFEARYVWDYTELQRTLSLKLTTLKEIGKTFLRISKRQKLIQVVDVTWRYSCKHEEVIARRTKVKEALLRDTINGLNKQRQLFLSENRRKELLQRIIVELVEFISPKTPKPGELGGRISGSVAWRVARGEMGLQRKETLFIPCENEKISKQLHLCYNIVKDRYVRVSNNNQTISGWENGVWKMESIFRKVETDWHMVYLARKEGSSFAYISWKFECGSVGLKVDSISIRTSSQTFQTGTVEWKLRSDTAQVELTGDNSLHSYADFSGATEVILEAELSRGDGDVAWQHTQLFRQSLNDHEENCLEIIIKFSDL

SEQ ID NO: 55665 - protein, 395 aa, Homo sapiens
MAAEASESGPALHELMREAEISLLECKVCFEKFGHRQQRRPRNLSCGHVVCLACVAALAHPRTLALECPFCRRACRGCDTSDCLPVLHLIELLGSALRQSPAAHRAAPSAPGALTCHHTFGGWGTLVNPTGLALCPKTGRVVVVHDGRRRVKIFDSGGGCAHQFGEKGDAAQDIRYPVDVTITNDCHVVVTDAGDRSIKVFDFFGQIKLVIGGQFSLPWGVETTPQNGIVVTDAEAGSLHLLDVDFAEGVLRRTERLQAHLCNPRGVAVSWLTGAIAVLEHPLALGTGVCSTRVKVFSSSMQLVGQVDTFGLSLYFPSKITASAVTFDHQGNVIVADTSGPAILCLGKPEEFPVPKPMVTHGLSHPVALTFTKENSLLVLDTASHSIKVYKVDWG

SEQ ID NO: 55666 - protein, 128 aa, Homo sapiens
MTEADVNPKAYPLADAHLTKKLLDLVQQSCNYKQLRKGANEATKTLNRGISEFIVMAADAEPLEIILHLPLLCEDKNVPYVFVRSKQALGRACGVSRPVIACSVTIKEGSQLKQQIQSIQQSIERLLV

SEQ ID NO: 55667 - protein, 128 aa, Homo sapiens; identical to SEQ ID NO: 55666

SEQ ID NO: 55668 - protein, 128 aa, Homo sapiens; identical to SEQ ID NO: 55666

SEQ ID NO: 55669 - protein, 132 aa, Homo sapiens
MLLVQTEADVNPKAYPLADAHLTKKLLDLVQQSCNYKQLRKGANEATKTLNRGISEFIVMAADAEPLEIILHLPLLCEDKNVPYVFVRSKQALGRACGVSRPVIACSVTIKEGSQLKQQIQSIQQSIERLLV

SEQ ID NO: 55670 - protein, 709 aa, Homo sapiens
MATAGGGSGADPGSRGLLRLLSFCVLLAGLCRGNSVERKIYIPLNKTAPCVRLLNATHQIGCQSSISGDTGVIHVVEKEEDLQWVLTDGPNPPYMVLLESKHFTRDLMEKLKGRTSRIAGLAVSLTKPSPASGFSPSVQCPNDGFGVYSNSYGPEFAHCREIQWNSLGNGLAYEDFSFPIFLLEDENETKVIKQCYQDHNLSQNGSAPTFPLCAMQLFSHMHAVISTATCMRRSSIQSTFSINPEIVCDPLSDYNVWSMLKPINTTGTLKPDDRVVVAATRLDSRSFFWNVAPGAESAVASFVTQLAAAEALQKAPDVTTLPRNVMFVFFQGETFDYIGSSRMVYDMEKGKFPVQLENVDSFVELGQVALRTSLELWMHTDPVSQKNESVRNQVEDLLATLEKSGAGVPAVILRRPNQSQPLPPSSLQRFLRARNISGVVLADHSGAFHNKYYQSIYDTAENINVSYPEWLSPEEDLNFVTDTAKALADVATVLGRALYELAGGTNFSDTVQADPQTVTRLLYGFLIKANNSWFQSILRQDLRSYLGDGPLQHYIAVSSPTNTTYVVQYALANLTGTVVNLTREQCQDPSKVPSENKDLYEYSWVQGPLHSNETDRLPRCVRSTARLARALSPAFELSQWSSTEYSTWTESRWKDIRARIFLIASKELELITLTVGFGILIFSLIVTYCINAKADVLFIAPREPGAVSY

SEQ ID NO: 55671 - protein, 689 aa, Homo sapiens
MDFNLILESLCRGNSVERKIYIPLNKTAPCVRLLNATHQIGCQSSISGDTGVIHVVEKEEDLQWVLTDGPNPPYMVLLESKHFTRDLMEKLKGRTSRIAGLAVSLTKPSPASGFSPSVQCPNDGFGVYSNSYGPEFAHCREIQWNSLGNGLAYEDFSFPIFLLEDENETKVIKQCYQDHNLSQNGSAPTFPLCAMQLFSHMHAVISTATCMRRSSIQSTFSINPEIVCDPLSDYNVWSMLKPINTTGTLKPDDRVVVAATRLDSRSFFWNVAPGAESAVASFVTQLAAAEALQKAPDVTTLPRNVMFVFFQGETFDYIGSSRMVYDMEKGKFPVQLENVDSFVELGQVALRTSLELWMHTDPVSQKNESVRNQVEDLLATLEKSGAGVPAVILRRPNQSQPLPPSSLQRFLRARNISGVVLADHSGAFHNKYYQSIYDTAENINVSYPEWLSPEEDLNFVTDTAKALADVATVLGRALYELAGGTNFSDTVQADPQTVTRLLYGFLIKANNSWFQSILRQDLRSYLGDGPLQHYIAVSSPTNTTYVVQYALANLTGTVVNLTREQCQDPSKVPSENKDLYEYSWVQGPLHSNETDRLPRCVRSTARLARALSPAFELSQWSSTEYSTWTESRWKDIRARIFLIASKELELITLTVGFGILIFSLIVTYCINAKADVLFIAPREPGAVSY

SEQ ID NO: 55672 - protein, 451 aa, Homo sapiens [sequence omitted]

SEQ ID NO: 55673 - protein, 305 aa, Homo sapiens
MLKPINTTGTLKPDDRVVVAATRLDSRSFFWNVAPGAESAVASFVTQLAAAEALQKAPDVTTLPRNVMFVFFQGVALRTSLELWMHTDPVSQKNESVRNQVEDLLATLEKSGAGVPAVILRRPNQSQPLPPSSLQRFLRARNISGVVLADHSGAFHNKYYQSIYDTAENINVSYPEWLSPEEDLNFVTDTAKALADVATVLGRALYELAGGTNFSDTVQADPQTVTRLLYGFLIKANNSWFQSILRQDLRSYLGDGPLQHYIAVSSPTNTTYVVQYALANLTGTVVNLTREQCQDPSKVPSENKD

SEQ ID NO: 55674 - protein, 689 aa, Homo sapiens; identical to SEQ ID NO: 55671

SEQ ID NO: 55675 - protein, 255 aa, Homo sapiens
MATAGGGSGADPGSRGLLRLLSFCVLLAGLCRGNSVERKIYIPLNKTAPCVRLLNATHQIGCQSSISGDTGVIHVVEKEEDLQWVLTDGPNPPYMVLLESKHFTRDLMEKLKGRTSRIAGLAVSLTKPSPASGFSPSVQCPNDGFGVYSNSYGPEFAHCREIQWNSLGNGLAYEDFSFPIFLLEDENETKVIKQETFDYIGSSRMVYDMEKGKFPVQLENVDSFVELGQVALRTSLELWMHTDPVSQKNESVRNQ

SEQ ID NO: 55676 - protein, 320 aa, Homo sapiens
  VARIANT 1: note = MOD_RES - Any amino acid
XGFGVYSNSYGPEFAHCREIQWNSLGNGLAYEDFSFPIFLLEDENETKVIKQLFSHMHAVISTATCMRRSSIQSTFSINPEIVCDPLSDYNVWSMLKPINTTGTLKPDDRVVVAATRLDSRSFFWNVAPGAESAVASFVTQLAAAEALQKAPDVTTLPRNVMFVFFQGETFDYIGSSRMVYDMEKGKFPVQLENVDSFVELGQVALRTSLELWMHTDPVSQKNESVRNQVEDLLATLEKSGAGVPAVILRRPNQSQPLPPSSLQRFLRARNISGVVLADHSGAFHNKYYQSIYDTAENINVSYPEWLSPEEDLNFVTDTA

SEQ ID NO: 55677 - protein, 219 aa, Homo sapiens
RSSIQSTFSINPEIVCDPLSDYNVWSMLKPINTTGTLKPDDRVVVAATRLAAAEALQKAPDVTTLPRNVMFVFFQGETFDYIGSSRMVYDMEKGKFPVQLENVDSFVELGQVALRTSLELWMHTDPVSQKNESVRNQVEDLLATLEKSGAGVPAVILRRPNQSQPLPPSSLQRFLRARNISGVVLADHSGAFHNKYYQSIYDTAENINVSYPEWLSPEE

SEQ ID NO: 55678 - protein, 275 aa, Homo sapiens
  VARIANT 1: note = MOD_RES - Any amino acid
XNVAPGAESAVASFVTQLAAAEALQKAPDVTTLPRNVMFVFFQGVALRTSLELWMHTDPVSQKNESVRNQVEDLLATLEKSGAGVPAVILRRPNQSQPLPPSSLQRFLRARNISGVVLADHSGAFHNKYYQSIYDTAENINVSYPEWLSPEEDLNFVTDTAKALADVATVLGRALYELAGGTNFSDTVQADPQTVTRLLYGFLIKANNSWFQSILRQDLRSYLGDGPLQHYIAVSSPTNTTYVVQYALANLTGTVVNLTREQCQDPSKVPSENKD

SEQ ID NO: 55679 - protein, 134 aa, Homo sapiens
MATAGGGSGADPGSRGLLRLLSFCVLLAGLCRGNSVERKIYIPLNKTAPCVRLLNATHQIGCQSSISGDTGVIHVVEKEEDLQWVLTDGPNPPYMVLLESKHFTRQNVRLSDTFLCSFMEFLSYSRDLMEKLKG

SEQ ID NO: 55680 - protein, 232 aa, Homo sapiens
MATAGGGSGADPGSRGLLRLLSFCVLLAGLFLDFEPDPLPLCPDVSFFPQPQPPTPQSKGTGLCRGNSVERKIYIPLNKTAPCVRLLNATHQIGCQSSISGDTGVIHVVEKEEDLQWVLTDGPNPPYMVLLESKHFTRDLMEKLKGRTSRIAGLAVSLTKPSPASGFSPSVQCPNDGFGVYSNSYGPEFAHCREIQWNSLGNGLAYEDFSFPIFLLEDENETKVIKQCYQDH

SEQ ID NO: 55681 - protein, 571 aa, Homo sapiens
MATAGGGSGADPGSRGLLRLLSFCVLLAGLCRGNSVERKIYIPLNKTAPCVRLLNATHQIGCQSSISGDTGVIHVVEKEEDLQWVLTDGPNPPYMVLLESKHFTRDLMEKLKGRTSRIAGLAVSLTKPSPASGFSPSVQCPNDGFGVYSNSYGPEFAHCREIQWNSLGNGLAYEDFSFPIFLLEDENETKVIKQETFDYIGSSRMVYDMEKGKFPVQLENVDSFVELGQVALRTSLELWMHTDPVSQKNESVRNQVEDLLATLEKSGAGVPAVILRRPNQSQPLPPSSLQRFLRARNISGVVLADHSGAFHNKYYQSIYDTAENINVSYPEWLSPEEDLNFVTDTAKALADVATVLGRALYELAGGTNFSDTVQADPQTVTRLLYGFLIKANNSWFQSILRQDLRSYLGDGPLQHYIAVSSPTNTTYVVQYALANLTGTVVNLTREQCQDPSKVPSENKDLYEYSWVQGPLHSNETDRLPRCVRSTARLARALSPAFELSQWSSTEYSTWTESRWKDIRARIFLIASKELELITLTVGFGILIFSLIVTYCINAKADVLFIAPREPGAVSY

SEQ ID NO: 55682 - protein, 213 aa, Homo sapiens
MSRVLVPCHVKGSVALQVGDVRTSQGRPGVLVIDVTFPSVAPFELQEITFKNYYTAFLSIRVRQYTSAHTPAKWVTCLRDYCLMPDPHSEEGAQEYVSLFKHQMLCDMARISELRLILRQPSPLWLSFTVEELQIYQQGPKSPSVTFPKWLSHPVPCEQPALLREGLPDPSRVSSEVQQMWALTEMIRASHTSARIGRFDVDGCYDLNLLSYT

SEQ ID NO: 55683 - protein, 213 aa, Homo sapiens; identical to SEQ ID NO: 55682

SEQ ID NO: 55684 - protein, 175 aa, Homo sapiens
MSRVLVPCHVKGSVALQVGDVRTSQGRPGVLVIDVTFPSVAPFELQEITFKNYYTAFLSIRVRQYTSAHTPAKWVTCLRDYCLMPDPHSEEGAQEYVSLFKHQSPSVTFPKWLSHPVPCEQPALLREGLPDPSRVSSEVQQMWALTEMIRASHTSARIGRFDVDGCYDLNLLSYT

SEQ ID NO: 55685 - protein, 264 aa, Homo sapiens
MESGFTSKDTYLSHFNPRDYLEKYYKFGSRHSAESQILKHLLKNLFKIFCLDGVKGDLLIDIGSGPTIYQLLSACESFKEIVVTDYSDQNLQELEKWLKKEPEAFDWSPVVTYVCDLEGNRVKGPEKEEKLRQAVKQVLKCDVTQSQPLGAVPLPPADCVLSTLCLDAACPDLPTYCRALRNLGSLLKPGGFLVIMDALKSSYYMIGEQKFSSLPLGREAVEAAVKEAGYTIEWFEVISQSYSSTMANNEGLFSLVARKLSRPL

SEQ ID NO: 55686 - protein, 264 aa, Homo sapiens; identical to SEQ ID NO: 55685

SEQ ID NO: 55687 - protein, 252 aa, Homo sapiens
MKSRIPVVLLACGSFNPITNMHLRMFEVARDHLHQTGMYQVIQGIISPVNDTYGKKDLAASHHRVAMARLALQTSDWIRVDPWESEQAQWMETVKVLRHHHSKLLRSPPQMEGPDHGKALFSTPAAVPELKLLCGADVLKTFQTPNLWKDAHIQEIVEKFGLVCVGRVGHDPKGYIAESPILRMHQHNIHLAKEPVQNEISATYIRRALGQGQSVKYLIPDAVITYIKDHGLYTKGSTWKGKSTQSTEGKTS

SEQ ID NO: 55688 - protein, 215 aa, Homo sapiens
MYQVIQGIISPVNDTYGKKDLAASHHRVAMARLALQTSDWIRVDPWESEQAQWMETVKVLRHHHSKLLRSPPQMEGPDHGKALFSTPAAVPELKLLCGADVLKTFQTPNLWKDAHIQEIVEKFGLVCVGRVGHDPKGYIAESPILRMHQHNIHLAKEPVQNEISATYIRRALGQGQSVKYLIPDAVITYIKDHGLYTKGSTWKGKSTQSTEGKTS

SEQ ID NO: 55689 - protein, 215 aa, Homo sapiens; identical to SEQ ID NO: 55688

SEQ ID NO: 55690 - protein, 142 aa, Homo sapiens
MEGPDHGKALFSTPAAVPELKLLCGADVLKTFQTPNLWKDAHIQEIVEKFGLVCVGRVGHDPKGYIAESPILRMHQHNIHLAKEPVQNEISATYIRRALGQGQSVKYLIPDAVITYIKDHGLYTKGSTWKGKSTQSTEGKTS

SEQ ID NO: 55691 - protein, 114 aa, Homo sapiens
MKSRIPVVLLACGSFNPITNMHLRMFEVARDHLHQTGMYQVIQGIISPVNDTYGKKDLAASHHRVAMARLALQTSDWIRVDPWESEQAQWMETVKVLRHHHSKLLRSPPQMEGP

SEQ ID NO: 55692 - protein, 163 aa, Homo sapiens
MKSRIPVVLLACGSFNPITNMHLRMFEVARDHLHQTAVPELKLLCGADVLKTFQTPNLWKDAHIQEIVEKFGLVCVGRVGHDPKGYIAESPILRMHQHNIHLAKEPVQNEISATYIRRALGQGQSVKYLIPDAVITYIKDHGLYTKGSTWKGKSTQSTEGKTS

SEQ ID NO: 55693 - protein, 1086 aa, Homo sapiens
MANLLKTVVTGCSCPLLSNLGSCKGLRVKKDFLRTFYTHQELWCKAPVKPGIPYKQLTVGVPKEIFQNEKRVALSPAGVQNLVKQGFNVVVESGAGEASKFSDDHYRVAGAQIQGAKEVLASDLVVKVRAPMVNPTLGVHEADLLKTSGTLISFIYPAQNPELLNKLSQRKTTVLAMDQVPRVTIAQGYDALSSMANIAGYKAVVLAANHFGRFFTGQITAAGKVPPAKILIVGGGVAGLASAGAAKSMGAIVRGFDTRAAALEQFKSLGAEPLEVDLKESGEGQGGYAKEMSKEFIEAEMKLFAQQCKEVDILISTALIPGKKAPVLFNKEMIESMKEGSVVVDLAAEAGGNFETTKPGELYIHKGITHIGYTDLPSRMATQASTLYSNNITKLLKAISPDKDNFYFDVKDDFDFGTMGHVIRGTVVMKDGKVIFPAPTPKNIPQGAPVKQKTVAELEAEKAATITPFRKTMSTASAYTAGLTGILGLGIAAPNLAFSQMVTTFGLAGIVGYHTVWGVTPALHSPLMSVTNAISGLTAVGGLALMGGHLYPSTTSQGLAALAAFISSVNIAGGFLVTQRMLDMFKRPTDPPEYNYLYLLPAGTFVGGYLAALYSGYNIEQIMYLGSGLCCVGALAGLSTQGTARLGNALGMIGVAGGLAATLGVLKPGPELLAQMSGAMALGGTIGLTIAKRIQISDLPQLVAAFHSLVGLAAVLTCIAEYIIEYPHFATDAAANLTKIVAYLGTYIGGVTFSGSLIAYGKLQGLLKSAPLLLPGRHLLNAGLLAASVGGIIPFMVDPSFTTGITCLGSVSALSAVMGVTLTAAIGGADMPVVITVLNSYSGWALCAEGFLLNNNLLTIVGALIGSSGAILSYIMCVAMNRSLANVILGGYGTTSTAGGKPMEISGTHTEINLDNAIDMIREANSIIITPGYGLCAAKAQYPIADLVKMLTEQGKKVRFGIHPVAGRMPGQLNVLLAEAGVPYDIVLEMDEINHDFPDTDLVLVIGANDTVNSAAQEDPNSIIAGMPVLEVWKSKQVIVMKRSLGVGYAAVDNPIFYKPNTAMLLGDAKKTCDALQAKVRESYQK

SEQ ID NO: 55694 - protein, 1086 aa, Homo sapiens; identical to SEQ ID NO: 55693

SEQ ID NO: 55695 - protein, 199 aa, Homo sapiens
MANLLKTVVTGCSCPLLSNLGSCKGLRVKKDFLRTFYTHQELWCKAPVKPGIPYKQLTVGVPKEIFQNEKRVALSPAGVQNLVKQGFNVVVESGAGEASKFSDDHYRVAGAQIQGAKEVLASDLVVKVRAPMVNPTLGVHEADLLKTSGTLISFIYPAQNPELLNKLSQRKTTVLAMDQVPRVTIAQGYDALSSMANIA

SEQ ID NO: 55696 - protein, 217 aa, Homo sapiens
MANLLKTVVTGCSCPLLSNLGSCKGLRVKKDFLRTFYTHQELWCKAPVKPGIPYKQLTVGVPKEIFQNEKRVALSPAGVQNLVKQGFNVVVESGAGEASKFSDDHYRVAGAQIQGAKEVLASDLVVKVRAPMVNPTLGVHEADLLKTSGTLISFIYPAQNPELLNKLSQRKTTVLAMDQVPRVTIAQGYDALSSMANIAGYKAVVLAANHFGRFFTG

SEQ ID NO: 55697 - protein, 601 aa, Homo sapiens
MLSWNRVRAKLPSSQMVTTFGLAGIVGYHTVWGVTPALHSPLMSVTNAISGLTAVGGLALMGGHLYPSTTSQGLAALAAFISSVNIAGGFLVTQRMLDMFKRPTDPPEYNYLYLLPAGTFVGGYLAALYSGYNIEQIMYLGSGLCCVGALAGLSTQGTARLGNALGMIGVAGGLAATLGVLKPGPELLAQMSGAMALGGTIGLTIAKRIQISDLPQLVAAFHSLVGLAAVLTCIAEYIIEYPHFATDAAANLTKIVAYLGTYIGGVTFSGSLIAYGKLQGLLKSAPLLLPGRHLLNAGLLAASVGGIIPFMVDPSFTTGITCLGSVSALSAVMGVTLTAAIGGADMPVVITVLNSYSGWALCAEGFLLNNNLLTIVGALIGSSGAILSYIMCVAMNRSLANVILGGYGTTSTAGGKPMEISGTHTEINLDNAIDMIREANSIIITPGYGLCAAKAQYPIADLVKMLTEQGKKVRFGIHPVAGRMPGQLNVLLAEAGVPYDIVLEMDEINHDFPDTDLVLVIGANDTVNSAAQEDPNSIIAGMPVLEVWKSKQVIVMKRSLGVGYAAVDNPIFYKPNTAMLLGDAKKTCDALQAKVRESYQK

SEQ ID NO: 55698 - protein, 491 aa, Homo sapiens [sequence omitted]

SEQ ID NO: 55699 - protein, 368 aa, Homo sapiens
MNPAAEAEFNILLATDSYKVTHYKQYPPNTSKVYSYFECREKKTENSKLRKVKYEETVFYGLQYILNKYLKGKVVTKEKIQEAKDVYKEHFQDDVFNEKGWNYILEKYDGHLPIEIKAVPEGFVIPRGNVLFTVENTDPECYWLTNWIETILVQSWYPITVATNSREQKKILAKYLLETSGNLDGLEYKLHDFGYRGVSSQETAGIGASAHLVNFKGTDTVAGLALIKKYYGTKDPVPGYSVPAAEHSTITAWGKDHEKDAFEHIVTQFSSVPVSVVSDSYDIYNACEKIWGEDLRHLIVSRSTQAPLIIRPDSGNPLDTVLKVLEILGKKFPVTENSKGYKLLPPYLRVIQGDGVDINTLQEVCVLY

SEQ ID NO: 55700 - protein, 60 aa, Homo sapiens
MNPAAEAEFNILLATDSYKVTHYKQYPPNTSKVYSYFECREKKTENSKLRKVKYEETVFY

SEQ ID NO: 55701 - protein, 88 aa, Homo sapiens
MNPAAEAEFNILLATDSYKVTHYKQYPPNTSKVYSYFECREKKTENSKLRKVKYEETVFYGLQYILNKYLKGKVVTKEKIQEAKDVYK

SEQ ID NO: 55702 - protein, 566 aa, Homo sapiens
MAAEQDPEARAAARPLLTDLYQATMALGYWRAGRARDAAEFELFFRRCPFGGAFALAAGLRDCVRFLRAFRLRDADVQFLASVLPPDTDPAFFEHLRALDCSEVTVRALPEGSLAFPGVPLLQVSGPLLVVQLLETPLLCLVSYASLVATNAARLRLIAGPEKRLLEMGLRRAQGPDGGLTASTYSYLGGFDSSSNVLAGQLRGVPVAGTLAHSFVTSFSGSEVPPDPMLAPAAGEGPGVDLAAKAQVWLEQVCAHLGLGVQEPHPGERAAFVAYALAFPRAFQGLLDTYSVWRSGLPNFLAVALALGELGYRAVGVRLDSGDLLQQAQEIRKVFRAAAAQFQVPWLESVLIVVSNNIDEEALARLAQEGSEVNVIGIGTSVVTCPQQPSLGGVYKLVAVGGQPRMKLTEDPEKQTLPGSKAAFRLLGSDGSPLMDMLQLAEEPVPQAGQELRVWPPGAQEPCTVRPAQVEPLLRLCLQQGQLCEPLPSLAESRALAQLSLSRLSPEHRRLRSPAQYQVGGGPPCHSALCAPALTLPTAPVLCSLQVVLSERLQALVNSLCAGQSP

SEQ ID NO: 55703 - protein, 525 aa, Homo sapiens
MAAEQDPEARAAARPLLTDLYQATMALGYWRAGRARDAAEFELFFRRCPFGGAFALAAGLRDCVRFLRAFRLRDADVQFLASVLPPDTDPAFFEHLRALDCSEVTVRALPEGSLAFPGVPLLQVSGPLLVVQLLETPLLCLVSYASLVATNAARLRLIAGPEKRLLEMGLRRAQGPDGGLTASTYSYLGGFDSSSNVLAGQLRGVPVAGTLAHSFVTSFSGSEVPPDPMLAPAAGEGPGVDLAAKAQVWLEQVCAHLGLGVQEPHPGERAAFVAYALAFPRAFQGLLDTYSVWRSGLPNFLAVALALGELGYRAVGVRLDSGDLLQQAQEIRKVFRAAAAQFQVPWLESVLIVVSNNIDEEALARLAQEGSEVNVIGIGTSVVTCPQQPSLGGVYKLVAVGGQPRMKLTEDPEKQTLPGSKAAFRLLGSDGSPLMDMLQLAEEPVPQAGQELRVWPPGAQEPCTVRPAQLCEPLPSLAESRALAQLSLSRLSPEHRRLRSPAQYQVVLSERLQALVNSLCAGQSP

SEQ ID NO: 55704 - protein, 490 aa, Homo sapiens
MAAEQDPEARAAARPLLTDLYQATMALGYWRAGRARDAAEFELFFRRCPFGGAFALAAGLRDCVRFLRAFRLRDADVQFLASVLPPDTDPAFFEHLRALDCSEVTVRALPEGSLAFPGVPLLQVSGPLLVVQLLETPLLCLVSYASLVATNAARLRLIAGPEKRLLEMGLRRAQGPDGGLTASTYSYLGGFDSSSNVLAGQLRGVPVAGTLAHSFVTSFSGSEVPPDPMLAPAAGEGPGVDLAAKAQVWLEQVCAHLGLGVQEPHPGERAAFVAYALAFPRAFQGLLDTYSVWRSGLPNFLAVALALGELGYRAVGVRLDSGDLLQQAQEIRKVFRAAAAQFQVPWLESVLIVVSNNIDEEALARLAQEGSEVNVIGIGTSVVTCPQQPSLGGVYKLVAVGGQPRMKLTEDPEKQTLPGSKAAFRLLGSDGSPLMDMLQLAEEPVPQAGQELRVWPPGAQEPCTVRPAQVEPLLRLCLQQGQVAAPPPSS

SEQ ID NO: 55705 - protein, 538 aa, Homo sapiens
MAAEQDPEARAAARPLLTDLYQATMALGYWRAGRARDAAEFELFFRRCPFGGAFALAAGLRDCVRFLRAFRLRDADVQFLASVLPPDTDPAFFEHLRALDCSEVTVRALPEGSLAFPGVPLLQVSGPLLVVQLLETPLLCLVSYASLVATNAARLRLIAGPEKRLLEMGLRRAQGPDGGLTASTYSYLGGFDSSSNVLAGQLRGVPVAGTLAHSFVTSFSGSEVPPDPMLAPAAGEGPGVDLAAKAQVWLEQVCAHLGLGVQEPHPGERAAFVAYALAFPRAFQGLLDTYSVWRSGLPNFLAVALALGELGYRAVGVRLDSGDLLQQAQEIRKVFRAAAAQFQVPWLESVLIVVSNNIDEEALARLAQEGSEVNVIGIGTSVVTCPQQPSLGGVYKLVAVGGQPRMKLTEDPEKQTLPGSKAAFRLLGSDGSPLMDMLQLAEEPVPQAGQELRVWPPGAQEPCTVRPAQVEPLLRLCLQQGQLCEPLPSLAESRALAQLSLSRLSPEHRRLRSPAQYQVVLSERLQALVNSLCAGQSP

SEQ ID NO: 55706 - protein, 1375 aa, Homo sapiens
MEGDRVAGRPVLSSLPVLLLLPLLMLRAAALHPDELFPHGESWGDQLLQEGDDESSAVVKLANPLHFYEARFSNLYVGTNGIISTQDFPRETQYVDYDFPTDFPAIAPFLADIDTSHGRGRVLYREDTSPAVLGLAARYVRAGFPRSARFTPTHAFLATWEQVGAYEEVKRGALPSGELNTFQAVLASDGSDSYALFLYPANGLQFLGTRPKESYNVQLQLPARVGFCRGEADDLKSEGPYFSLTSTEQSVKNLYQLSNLGIPGVWAFHIGSTSPLDNVRPAAVGDLSAAHSSVPLGRSFSHATALESDYNEDNLDYYDVNEEEAEYLPGEPEEALNGHSSIDVSFQSKVDTKPLEESSTLDPHTKEGTSLGEVGGPDLKGQVEPWDERETRSPAPPEVDRDSLAPSWETPPPYPENGSIQPYPDGGPVPSEMDVPPAHPEEEIVLRSYPASGHTTPLSRGTYEVGLEDNIGSNTEVFTYNAANKETCEHNHRQCSRHAFCTDYATGFCCHCQSKFYGNGKHCLPEGAPHRVNGKVSGHLHVGHTPVHFTDVDLHAYIVGNDGRAYTAISHIPQPAAQALLPLTPIGGLFGWLFALEKPGSENGFSLAGAAFTHDMEVTFYPGEETVRITQTAEGLDPENYLSIKTNIQGQVPYVSANFTAHISPYKELYHYSDSTVTSTSSRDYSLTFGAINQTWSYRIHQNITYQVCRHAPRHPSFPTTQQLNVDRVFALYNDEERVLRFAVTNQIGPVKEDSDPTPGNPCYDGSHMCDTTARCHPGTGVDYTCECASGYQGDGRNCVDENECATGFHRCGPNSVCINLPGSYRCECRSGYEFADDRHTCILITPPANPCEDGSHTCAPAGQARCVHHGGSTFSCACLPGYAGDGHQCTDVDECSENRCHPAATCYNTPGSFSCRCQPGYYGDGFQCIPDSTSSLTPCEQQQRHAQAQYAYPGARFHIPQCDEQGNFLPLQCHGSTGFCWCVDPDGHEVPGTQTPPGSTPPHCGPSPEPTQRPPTICERWRENLLEHYGGTPRDDQYVPQCDDLGHFIPLQCHGKSDFCWCVDKDGREVQGTRSQPGTTPACIPTVAPPMVRPTPRPDVTPPSVGTFLLYTQGQQIGYLPLNGTRLQKDAAKTLLSLHGSIIVGIDYDCRERMVYWTDVAGRTISRAGLELGAEPETIVNSGLISPEGLAIDHIRRTMYWTDSVLDKIESALLDGSERKVLFYTDLVNPRAIAVDPIRGNLYWTDWNREAPKIETSSLDGENRRILINTDIGLPNGLTFDPFSKLLCWADAGTKKLECTLPDGTGRRVIQNNLKYPFSIVSYADHFYHTDWRRDGVVSVNKHSGQFTDEYLPEQRSHLYGITAVYPYCPTGRK

SEQ ID NO: 55707 - protein, 969 aa, Homo sapiens
MEGDRVAGRPVLSSLPVLLLLPLLMLRAAALHPDELFPHGESWGDQLLQEGDDESSAVVKLANPLHFYEARFSNLYVGTNGIISTQDFPRETQYVDYDFPTDFPAIAPFLADIDTSHGRGRVLYRVNGKVSGHLHVGHTPVHFTDVDLHAYIVGNDGRAYTAISHIPQPAAQALLPLTPIGGLFGWLFALEKPGSENGFSLAGAAFTHDMEVTFYPGEETVRITQTAEGLDPENYLSIKTNIQGQVPYVSANFTAHISPYKELYHYSDSTVTSTSSRDYSLTFGAINQTWSYRIHQNITYQVCRHAPRHPSFPTTQQLNVDRVFALYNDEERVLRFAVTNQIGPVKEDSDPTPGNPCYDGSHMCDTTARCHPGTGVDYTCECASGYQGDGRNCVDENECATGFHRCGPNSVCINLPGSYRCECRSGYEFADDRHTCILITPPANPCEDGSHTCAPAGQARCVHHGGSTFSCACLPGYAGDGHQCTDVDECSENRCHPAATCYNTPGSFSCRCQPGYYGDGFQCIPDSTSSLTPCEQQQRHAQAQYAYPGARFHIPQCDEQGNFLPLQCHGSTGFCWCVDPDGHEVPGTQTPPGSTPPHCGPSPEPTQRPPTICERWRENLLEHYGGTPRDDQYVPQCDDLGHFIPLQCHGKSDFCWCVDKDGREVQGTRSQPGTTPACIPTVAPPMVRPTPRPDVTPPSVGTFLLYTQGQQIGYLPLNGTRLQKDAAKTLLSLHGSIIVGIDYDCRERMVYWTDVAGRTISRAGLELGAEPETIVNSGLISPEGLAIDHIRRTMYWTDSVLDKIESALLDGSERKVLFYTDLVNPRAIAVDPIRGNLYWTDWNREAPKIETSSLDGENRRILINTDIGLPNGLTFDPFSKLLCWADAGTKKLECTLPDGTGRRVIQNNLKYPFSIVSYADHFYHTDWRRDGVVSVNKHSGQFTDEYLPEQRSHLYGITAVYPYCPTGRK

SEQ ID NO: 55708 - protein, 1180 aa, Homo sapiens
TPQTERITHSSISWSFLLRFSRGKLLMLRAAALHPDELFPHGESWGDQLLQEGDDESSAVVKLANPLHFYEARFSNLYVGTNGIISTQDFPRETQYVDYDFPTDFPAIAPFLADIDTSHGRGRVLYREDTSPAVLGLAARYVRAGFPRSARFTPTHAFLATWEQVGAYEEVKRGALPSGELNTFQAVLASDGSDSYALFLYPANGLQFLGTRPKESYNVQLQLPARVGFCRGEADDLKSEGPYFSLTSTEQSVKNLYQLSNLGIPGVWAFHIGSTSPLDNVRPAAVGDLSAAHSSVPLGRSFSHATALESDYNEDNLDYYDVNEEEAEYLPGEPEEALNGHSSIDVSFQSKVDTKPLEESSTLDPHTKEGTSLGEVGGPDLKGQVEPWDERETRSPAPPEVDRDSLAPSWETPPPYPENGSIQPYPDGGPVPSEMDVPPAHPEEEIVLRSYPASGHTTPLSRGTYEVGLEDNIGSNTEVFTYNAANKETCEHNHRQCSRHAFCTDYATGFCCHCQSKFYGNGKHCLPEGAPHRVNGKVSGHLHVGHTPVHFTDVDLHAYIVGNDGRAYTAISHIPQPAAQALLPLTPIGGLFGWLFALEKPGSENGFSLAGAAFTHDMEVTFYPGEETVRITQTAEGLDPENYLSIKTNIQGQVPYVSANFTAHISPYKELYHYSDSTVTSTSSRDYSLTFGAINQTWSYRIHQNITYQVCRHAPRHPSFPTTQQLNVDRVFALYNDEERVLRFAVTNQIGPVKEDSDPTPGNPCYDGSHMCDTTARCHPGTGVDYTCECASGYQGDGRNCVDENECATGFHRCGPNSVCINLPGSYRCECRSGYEFADDRHTCILITPPANPCEDGSHTCAPAGQARCVHHGGSTFSCACLPGYAGDGHQCTDVDECSENRCHPAATCYNTPGSFSCRCQPGYYGDGFQCIPDSTSSLTPCEQQQRHAQAQYAYPGARFHIPQCDEQGNFLPLQCHGSTGFCWCVDPDGHEVPGTQTPPGSTPPHCGPSPEPTQRPPTICERWRENLLEHYGGTPRDDQYVPQCDDLGHFIPLQCHGKSDFCWCVDKDGREVQGTRSQPGTTPACIPTVAPPMVRPTPRPDVTPPSVGTFLLYTQGQQIGYLPLNGTRLQKDAAKTLLSLHVKWISPVGGRAAWLSQWEPPHRPCCSEVDWCREVLEGF

SEQ ID NO: 55709 - protein, 1274 aa, Homo sapiens
MEGDRVKLANPLHFYEARFSNLYVGTNGIISTQDFPRETQYVDYDFPTDFPAIAPFLADIDTSHGRGRVLYREDTSPAVLGLAARYVRAGFPRSARFTPTHAFLATWEQVGAYEEVKRGALPSGELNTFQAVLASDGSDSYALFLYPANGLQFLGTRPKESYNVQLQLPARVGFCRGEADDLKSEGPYFSLTSTEQSVKNLYQLSNLGIPGVWAFHIGSTSPLDNVRPAAVGDLSAAHSSVPLGRSFSHATALESDYNEDNLDYYDVNEEEAEYLPGEPEEALNGHSSIDVSFQSKVDTKPLEESSTLDPHTKEGTSLGEVGGPDLKGQVEPWDERETRSPAPPEVDRDSLAPSWETPPPYPENGSIQPYPDGGPVPSEMDVPPAHPEEEIVLRSYPASGHTTPLSRGTYEVGLEDNIGSNTEVFTYNAANKETCEHNHRQCSRHAFCTDYATGFCCHCQSKFYGNGKHCLPEGAPHRVNGKVSGHLHVGHTPVHFTDVDLHAYIVGNDGRAYTAISHIPQPAAQALLPLTPIGGLFGWLFALEKPGSENGFSLAGAAFTHDMEVTFYPGEETVRITQTAEGLDPENYLSIKTNIQGQVPYVSANFTAHISPYKELYHYSDSTVTSTSSRDYSLTFGAINQTWSYRIHQNITYQVCRHAPRHPSFPTTQQLNVDRVFALYNDEERVLRFAVTNQIGPVKEDSDPTPGNPCYDGSHMCDTTARCHPGTGVDYTCECASGYQGDGRNCVDENECATGFHRCGPNSVCINLPGSYRCECRSGYEFADDRHTCIYVDECSENRCHPAATCYNTPGSFSCRCQPGYYGDGFQCIPDSTSSLTPCEQQQRHAQAQYAYPGARFHIPQCDEQGNFLPLQCHGSTGFCWCVDPDGHEVPGTQTPPGSTPPHCGPSPEPTQRPPTICERWRENLLEHYGGTPRDDQYVPQCDDLGHFIPLQCHGKSDFCWCVDKDGREVQGTRSQPGTTPACIPTVAPPMVRPTPRPDVTPPSVGTFLLYTQGQQIGYLPLNGTRLQKDAAKTLLSLHGSIIVGIDYDCRERMVYWTDVAGRTISRAGLELGAEPETIVNSGLISPEGLAIDHIRRTMYWTDSVLDKIESALLDGSERKVLFYTDLVNPRAIAVDPIRGNLYWTDWNREAPKIETSSLDGENRRILINTDIGLPNGLTFDPFSKLLCWADAGTKKLECTLPDGTGRRVIQNNLKYPFSIVSYADHFYHTDWRRDGVVSVNKHSGQFTDEYLPEQRSHLYGITAVYPYCPTGRK

SEQ ID NO: 55710 - protein, 1278 aa, Homo sapiens
MTARGLALGLLLLLLCPAQVFSQSCVWYGECGIAYGDKRYNCEYSGPPKPLPKDGYDLVQELCPGFFFGNVSLCCDVRQLQTLKDNLQLPLQFLSRCPSCFYNLLNLFCELTCSPRQSQFLNVTATEDYVDPVTNQTKTNVKELQYYVGQSFANAMYNACRDVEAPSSNDKALGLLCGKDADACNATNWIEYMFNKDNGQAPFTITPVFSDFPVHGMEPMNNATKGCDESVDEVTAPCSCQDCSIVCGPKPQPPPPPAPWTILGLDAMYVIMWITYMAFLLVFFGAFFAVWCYRKRYFVSEYTPIDSNIAFSVNASDKGEASCCDPVSAAFEGCLRRLFTRWGSFCVRNPGCVIFFSLVFITACSSGLVFVRVTTNPVDLWSAPSSQARLEKEYFDQHFGPFFRTEQLIIRAPLTDKHIYQPYPSGADVPFGPPLDIQILHQVLDLQIAIENITASYDNETVTLQDICLAPLSPYNTNCTILSVLNYFQNSHSVLDHKKGDDFFVYADYHTHFLYCVRAPASLNDTSLLHDPCLGTFGGPVFPWLVLGGYDDQNYNNATALVITFPVNNYYNDTEKLQRAQAWEKEFINFVKNYKNPNLTISFTAERSIEDELNRESDSDVFTVVISYAIMFLYISLALGHMKSCRRLLVDSKVSLGIAGILIVLSSVACSLGVFSYIGLPLTLIVIEVIPFLVLAVGVDNIFILVQAYQRDERLQGETLDQQLGRVLGEVAPSMFLSSFSETVAFFLGALSVMPAVHTFSLFAGLAVFIDFLLQITCFVSLLGLDIKRQEKNRLDIFCCVRGAEDGTSVQASESCLFRFFKNSYSPLLLKDWMRPIVIAIFVGVLSFSIAVLNKVDIGLDQSLSMPDDSYMVDYFKSISQYLHAGPPVYFVLEEGHDYTSSKGQNMVCGGMGCNNDSLVQQIFNAAQLDNYTRIGFAPSSWIDDYFDWVKPQSSCCRVDNITDQFCNASVVDPACVRCRPLTPEGKQRPQGGDFMRFLPMFLSDNPNPKCGKGGHAAYSSAVNILLGHGTRVGATYFMTYHTVLQTSADFIDALKKARLIASNVTETMGINGSAYRVFPYSVFYVFYEQYLTIIDDTIFNLGVSLGAIFLVTMVLLGCELWSAVIMCATIAMVLVNMFGVMWLWGISLNAVSLVNLVMSCGISVEFCSHITRAFTVSMKGSRVERAEEALAHMGSSVFSGITLTKFGGIVVLAFAKSQIFQIFYFRMYLAMVLLGATHGLIFLPVLLSYIGPSVNKAKSCATEERYKGTERERLLNF

SEQ ID NO: 55711 - protein, 960 aa, Homo sapiens
MYVIMWITYMAFLLVFFGAFFAVWCYRKRYFVSEYTPIDSNIAFSVNASDKGTAWLLTSTFPSSPVLPGEASCCDPVSAAFEGCLRRLFTRWGSFCVRNPGCVIFFSLVFITACSSGLVFVRVTTNPVDLWSAPSSQARLEKEYFDQHFGPFFRTEQLIIRAPLTDKHIYQPYPSGADVPFGPPLDIQILHQVLDLQIAIENITASYDNETVTLQDICLAPLSPYNTNCTILSVLNYFQNSHSVLDHKKGDDFFVYADYHTHFLYCVRFINFVKNYKNPNLTISFTAERSIEDELNRESDSDVFTVVISYAIMFLYISLALGHMKSCRRLLVDSKVSLGIAGILIVLSSVACSLGVFSYIGLPLTLIVIEVIPFLVLAVGVDNIFILVQAYQRDERLQGETLDQQLGRVLGEVAPSMFLSSFSETVAFFLGALSVMPAVHTFSLFAGLAVFIDFLLQITCFVSLLGLDIKRQEKNRLDIFCCVRGAEDGTSVQASESCLFRFFKNSYSPLLLKDWMRPIVIAIFVGVLSFSIAVLNKVDIGLDQSLSMPDDSYMVDYFKSISQYLHAGPPVYFVLEEGHDYTSSKGQNMVCGGMGCNNDSLVQQIFNAAQLDNYTRIGFAPSSWIDDYFDWVKPQSSCCRVDNITDQFCNASVVDPACVRCRPLTPEGKQRPQGGDFMRFLPMFLSDNPNPKCGKGGHAAYSSAVNILLGHGTRVGATYFMTYHTVLQTSADFIDALKKARLIASNVTETMGINGSAYRVFPYSVFYVFYEQYLTIIDDTIFNLGVSLGAIFLVTMVLLGCELWSAVIMCATIAMVLVNMFGVMWLWGISLNAVSLVNLVMSCGISVEFCSHITRAFTVSMKGSRVERAEEALAHMGSSVFSGITLTKFGGIVVLAFAKSQIFQIFYFRMYLAMVLLGATHGLIFLPVLLSYIGPSVNKAKSCATEERYKGTERERLLNF

SEQ ID NO: 55712 - protein, 776 aa, Homo sapiens
MYNACRDVEAPSSNDKALGLLCGKDADACNATNWIEYMFNKDNGQAPFTITPVFSDFPVHGMEPMNNATKGCDESVDEVTAPCSCQDCSIVCGPKPQPPPPPAPWTILGLDAMYVIMWITYMAFLLVFFGAFFAVWCYRKRYFVSEYTPIDSNIAFSVNASDKGEASCCDPVSAAFEGCLRRLFTRWGSFCVRNPGCVIFFSLVFITACSSGLVFVRVTTNPVDLWSAPSSQARLEKEYFDQHFGPFFRTEQLIIRAPLTDKHIYQPYPSGADVPFGPPLDIQILHQVLDLQIAIENITASYDNETVTLQDICLAPLSPYNTNCTILSVLNYFQNSHSVLDHKKGDDFFVYADYHTHFLYCVRAPASLNDTSLLHDPCLGTFGGPVFPWLVLGGYDDQNYNNATALVITFPVNNYYNDTEKLQRAQAWEKEFINFVKNYKNPNLTISFTAERSIEDELNRESDSDVFTVVISYAIMFLYISLALGHMKSCRRLLVDSKVSLGIAGILIVLSSVACSLGVFSYIGLPLTLIVIEVIPFLVLAVGVDNIFILVQAYQRDERLQGETLDQQLGRVLGEVAPSMFLSSFSETVAFFLGALSVMPAVHTFSLFAGLAVFIDFLLQITCFVSLLGLDIKRQEKNRLDIFCCVRGAEDGTSVQASESCLFRFFKNSYSPLLLKDWMRPIVIAIFVGVLSFSIAVLNKVDIGLDQSLSMPDDSYMVDYFKSISQYLHAGPPVYFVLEEGHDYTSSKGQNMVCGGMGCNNDSLVQQIFNAAQLDN

SEQ ID NO: 55713 - protein, 122 aa, Homo sapiens
MRFLAATFLLLALSTAAQAEPVQFKDCGSVDGVIKEVNVSPCPTQPCQLSKGQSYSVNVTFTSNIQSKSSKAVVHGILMGVPVPFPIPEPDGCKSGINCPIQKDKTYSYLNKLPVKSEYPSV

SEQ ID NO: 55714 - protein, 151 aa, Homo sapiens
MRFLAATFLLLALSTAAQAEPVQFKDCGSVDGVIKEVNVSPCPTQPCQLSKGQSYSVNVTFTSNIQSKSSKAVVHGILMGVPVPFPIPEPDGCKSGINCPIQKDKTYSYLNKLPVKSEYPSIKLVVEWQLQDDKNQSLFCWEIPVQIVSHL

SEQ ID NO: 55715 - protein, 350 aa, Homo sapiens
MDLKALLSSLNDFASLSFAESWDNVGLLVEPSPPHTVNTLFLTNDLTEEVMEEVLQKKADLILSYHPPIFRPMKRITWNTWKERLVIRALENRVGIYSPHTAYDAAPQGVNNWLAKGLGACTSRPIHPSKAPNYPTEGNHRVEFNVNYTQDLDKVMSAVKGIDGVSVTSFSARTGNEEQTRINLNCTQKALMQVVDFLSRNKQLYQKTEILSLEKPLLLHTGMGRLCTLDESVSLATMIDRIKRHLKLSHIRLALGVGRTLESQVKVVALCAGSGSSVLQGVEADLYLTGEMSHHDTLDAASQGINVILCEHSNTERGFLSDLRDMLDSHLENKINIILSETDRDPLQVV

SEQ ID NO: 55716 - protein, 252 aa, Homo sapiens
MLSSCVRPVPTTVRFVDSLICNSSRSFMDLKALLSSLNDFASLSFAESWDNVGLLVEPSPPHTVNTLFLTNDLTEEVMEEVLQKKADLILSYHPPIFRPMKRITWNTWKERLVIRALENRVGIYSPHTAYDAAPQGVNNWLAKGLGACTSRPIHPSKAPNYPTEGNHRVEFNVNYTQDLDKVMSAVKGIDGVSVTSFSARTGNEEQTRINLNCTQKALMQVVDFLSRNKQLYQKHQDNTFYKSAGCQLKFVT

SEQ ID NO: 55717 - protein, 377 aa, Homo sapiens
MLSSCVRPVPTTVRFVDSLICNSSRSFMDLKALLSSLNDFASLSFAESWDNVGLLVEPSPPHTVNTLFLTNDLTEEVMEEVLQKKADLILSYHPPIFRPMKRITWNTWKERLVIRALENRVGIYSPHTAYDAAPQGVNNWLAKGLGACTSRPIHPSKAPNYPTEGNHRVEFNVNYTQDLDKVMSAVKGIDGVSVTSFSARTGNEEQTRINLNCTQKALMQVVDFLSRNKQLYQKTEILSLEKPLLLHTGMGRLCTLDESVSLATMIDRIKRHLKLSHIRLALGVGRTLESQVKVVALCAGSGSSVLQGVEADLYLTGEMSHHDTLDAASQGINVILCEHSNTERGFLSDLRDMLDSHLENKINIILSETDRDPLQVV

SEQ ID NO: 55718 - protein, 162 aa, Homo sapiens
MDLKALLSSLNDFASLSFAESWDNVGLLVEPSPPHTVNTLFLTNDLTEEVMEEVLQKKADLILSYHPPIFRPMKRITWNTWKERLVIRALENRVGIYSPHTAYDAAPQGVNNWLAKGLGACTSRPIHPSKAPNYPTEGNHRVEFNVNYTQDLDKVMSAVKGI

SEQ ID NO: 55719 - protein, 377 aa, Homo sapiens; identical to SEQ ID NO: 55717

SEQ ID NO: 55720 - protein, 285 aa, Homo sapiens
MLSSCVRPVPTTVRFVDSLICNSSRSFMDLKALLSSLNDFASLSFAESWDNVGLLVEPSPPHTVNTLFLTNDLTEEVMEEVLQKKADLILSYHPPIFRPMKRITWNTWKERLVIRALENRVGIYSPHTAYDAAPQGVNNWLAKGLGACTSRPIHPSKAPNYPTEGNHRVEFNVNYTQDLDKVMSAVKGIDGVSVTSFSARTGNEEQTRINLNCTQKALMQVVDFLSRNKQLYQKTEILSLEKSLKSKSWPCVLVLGAAFCRVLRLTFTSQVRCPIMILWMLLPKE

SEQ ID NO: 55721 - protein, 377 aa, Homo sapiens; identical to SEQ ID NO: 55717

SEQ ID NO: 55722 - protein, 209 aa, Homo sapiens
MDLKALLSSLNDFASLSFAESWDNVGLLVEPSPPHTVNTLFLTNDLTEEVMEEVLQKKADLILSYHPPIFRPMKRITWNTWKERLVIRALENRVGIYSPHTAYDAAPQGVNNWLAKGLGACTSRPIHPSKAPNYPTEGNHRVEFNVNYTQDLDKVMSAVKGIDGVSVTSFSARTGNEEQTRINLNCTQKALMQVVDFLSRNKQLYQKTE

SEQ ID NO: 55723 - protein, 163 aa, Homo sapiens
MLSSCVRPVPTTVRFVDSLICNSSRSFMDLKALLSSLNDFASLSFAESWDNVGLLVEPSPPHTVNTLFLTNDLTEEVMEEVLQKKADLILSYHPPIFRPMKRITWNTWKERLVIRALENRVGIYSPHTAYDAAPQGVNNWLAKGLGACTSRPIHPSKAPNYPT

SEQ ID NO: 55724 - protein, 1582 aa, Homo sapiens
MAGPGGWRDREVTDLGHLPDPTGIFSLDKTIGLGTYGRIYLGLHEKTGAFTAVKVMNARKTPLPEIGRRVRVNKYQKSVGWRYSDEEEDLRTELNLLRKYSFHKNIVSFYGAFFKLSPPGQRHQLWMVMELCAAGSVTDVVRMTSNQSLKEDWIAYICREILQGLAHLHAHRVIHRDIKGQNVLLTHNAEVKLVDFGVSAQVSRTNGRRNSFIGTPYWMAPEVIDCDEDPRRSYDYRSDVWSVGITAIEMAEGAPPLCNLQPLEALFVILRESAPTVKSSGWSRKFHNFMEKCTIKNFLFRPTSANMLQHPFVRDIKNERHVVESLTRHLTGIIKKRQKKGIPLIFEREEAIKEQYTVRRFRGPSCTHELLRLPTSSRCRPLRVLHGEPSQPRWLPDREEPQVQALQQLQGAARVFMPLQALDSAPKPLKGQAQAPQRLQGAARVFMPLQAQVKAKASKPLQMQIKAPPRLRRAARVLMPLQAQVRAPRLLQVQSQVSKKQQAQTQTSEPQDLDQVPEEFQGQDQVPEQQRQGQAPEQQQRHNQVPEQELEQNQAPEQPEVQEQAAEPAQAETEAEEPESLRVNAQVFLPLLSQDHHVLLPLHLDTQVLIPVEGQTEGSPQAQAWTLEPPQAIGSVQALIEGLSRDLLRAPNSNNSKPLGPLQTLMENLSSNRFYSQPEQAREKKSKVSTLRQALAKRLSPKRFRAKSSWRPEKLELSDLEARRQRRQRRWEDIFNQHEEELRQVDKDKEDESSDNDEVFHSIQAEVQIEPLKPYISNPKKIEVQERSPSVPNNQDHAHHVKFSSSVPQRSLLEQAQKPIDIRQRSSQNRQNWLAASESSSEEESPVTGRRSQSSPPYSTIDQKLLVDIHVPDGFKVGKISPPVYLTNEWVGYNALSEIFRNDWLTPAPVIQPPEEDGDYVELYDASADTDGDDDDESNDTFEDTYDHANGNDDLDNQVDQANDVCKDHDDDNNKFVDDVNNNYYEAPSCPRASYGRDGSCKQDGYDGSRGKEEAYRGYGSHTANRSHGGSAASEDNAAIGDQEEHAANIGSERRGSEGDGGKGVVRTSEESGALGLNGEENCSETDGPGLKRPASQDFEYLQEEPGGGNEASNAIDSGAAPSAPDHESDNKDISESSTQSDFSANHSSPSKGSGMSADANFASAILYAGFVEVPEESPKQPSEVNVNPLYVSPACKKPLIHMYEKEFTSEICCGSLWGVNLLLGTRSNLYLMDRSGKADITKLIRRRPFRQIQVLEPLNLLITISGHKNRLRVYHLTWLRNKILNNDPESKRRQEEMLKTEEACKAIDKLTGCEHFSVLQHEETTYIAIALKSSIHLYAWAPKSFDESTAIKVCIDQSADSEGDYMSYQAYIRILAKIQAADPVNRFKRPDELLHLLKLKVFPTLDHKPVTVDLAIGSEKRLKIFFSSADGYHLIDAESEVMSDVTLPKNPLEIIIPQNIIILPDCLGIGMMLTFNAEALSVEANEQLFKKILEMWKDIPSSIAFECTQRTTGWGQKAIEVRSLQSRVLESELKRRSIKKLRFLCTRGDKLFFTSTLRNHHSRVYFMTLGKLEELQSNYDV

SEQ ID NO: 55725 - protein, 1583 aa, Homo sapiens
MAGPGGWRDREVTDLGHLPDPTGIFSLDKTIGLGTYGRIYLGLHEKTGAFTAVKVMNARKTPLPEIGRRVRVNKYQKSVGWRYSDEEEDLRTELNLLRKYSFHKNIVSFYGAFFKLSPPGQRHQLWMVMELCAAGSVTDVVRMTSNQSLKEDWIAYICREILQGLAHLHAHRVIHRDIKGQNVLLTHNAEVKLVDFGVSAQVSRTNGRRNSFIGTPYWMAPEVIDCDEDPRRSYDYRSDVWSVGITAIEMAEGAPPLCNLQPLEALFVILRESAPTVKSSGWSRKFHNFMEKCTIKNFLFRPTSANMLQHPFVRDIKNERHVVESLTRHLTGIIKKRQKKKGIPLIFEREEAIKEQYTVRRFRGPSCTHELLRLPTSSRCRPLRVLHGEPSQPRWLPDREEPQVQALQQLQGAARVFMPLQALDSAPKPLKGQAQAPQRLQGAARVFMPLQAQVKAKASKPLQMQIKAPPRLRRAARVLMPLQAQVRAPRLLQVQSQVSKKQQAQTQTSEPQDLDQVPEEFQGQDQVPEQQRQGQAPEQQQRHNQVPEQELEQNQAPEQPEVQEQAAEPAQAETEAEEPESLRVNAQVFLPLLSQDHHVLLPLHLDTQVLIPVEGQTEGSPQAQAWTLEPPQAIGSVQALIEGLSRDLLRAPNSNNSKPLGPLQTLMENLSSNRFYSQPEQAREKKSKVSTLRQALAKRLSPKRFRAKSSWRPEKLELSDLEARRQRRQRRWEDIFNQHEEELRQVDKDKEDESSDNDEVFHSIQAEVQIEPLKPYISNPKKIEVQERSPSVPNNQDHAHHVKFSSSVPQRSLLEQAQKPIDIRQRSSQNRQNWLAASESSSEEESPVTGRRSQSSPPYSTIDQKLLVDIHVPDGFKVGKISPPVYLTNEWVGYNALSEIFRNDWLTPAPVIQPPEEDGDYVELYDASADTDGDDDDESNDTFEDTYDHANGNDDLDNQVDQANDVCKDHDDDNNKFVDDVNNNYYEAPSCPRASYGRDGSCKQDGYDGSRGKEEAYRGYGSHTANRSHGGSAASEDNAAIGDQEEHAANIGSERRGSEGDGGKGVVRTSEESGALGLNGEENCSETDGPGLKRPASQDFEYLQEEPGGGNEASNAIDSGAAPSAPDHESDNKDISESSTQSDFSANHSSPSKGSGMSADANFASAILYAGFVEVPEESPKQPSEVNVNPLYVSPACKKPLIHMYEKEFTSEICCGSLWGVNLLLGTRSNLYLMDRSGKADITKLIRRRPFRQIQVLEPLNLLITISGHKNRLRVYHLTWLRNKILNNDPESKRRQEEMLKTEEACKAIDKLTGCEHFSVLQHEETTYIAIALKSSIHLYAWAPKSFDESTAIKVCIDQSADSEGDYMSYQAYIRILAKIQAADPVNRFKRPDELLHLLKLKVFPTLDHKPVTVDLAIGSEKRLKIFFSSADGYHLIDAESEVMSDVTLPKNPLEIIIPQNIIILPDCLGIGMMLTFNAEALSVEANEQLFKKILEMWKDIPSSIAFECTQRTTGWGQKAIEVRSLQSRVLESELKRRSIKKLRFLCTRGDKLFFTSTLRNHHSRVYFMTLGKLEELQSNYDV

SEQ ID NO: 55726 - protein, 188 aa, Homo sapiens
MAGPGGWRDREVTDLGHLPDPTGIFSLDKTIGLGTYGRIYLGLHEKTGAFTAVKVMNARKTPLPEIGRRVRVNKYQKSVGWRYSDEEEDLRTELNLLRKYSFHKNIVSFYGAFFKLSPPGQRHQLWMVMELCAAGSVTDVVRMTSNQSLKEDWIAYICREILQPKVIFLGTGCSDSSLKKELCLKHQN

SEQ ID NO: 55727 - protein, 163 aa, Homo sapiens
MQVPRERIKIAFRLWIPILVIRIVVAGTWPQAPGLSTLGLNIIILPDCLGIGMMLTFNAEALSVEANEQLFKKILEMWKDIPSSIAFECTQRTTGWGQKAIEVRSLQSRVLESELKRRSIKKLRFLCTRGDKLFFTSTLRNHHSRVYFMTLGKLEELQSNYDV

SEQ ID NO: 55728 - protein, 482 aa, Homo sapiens
MLKFQEAAKCVSGSTAISTYPKTLIARRYVLQQKLGSGSFGTVYLVSDKKAKRGEELKVLKEISVGELNPNETVQANLEAQLLSKLDHPAIVKFHASFVEQDNFCIITEYCEGRDLDDKIQEYKQAGKIFPENQIIEWFIQLLLGVDYMHERRILHRDLKSKNVFLKNNLLKIGDFGVSRLLMGSCDLATTLTGTPHYMSPEALKHQGYDTKSDIWSLACILYEMCCMNHAFAGSNFLSIVLKIVEGDTPSLPERYPKELNAIMESMLNKNPSLRPSAIEILKIPYLDEQLQNLMCRYSEMTLEDKNLDCQKEAAHIINAMQKRIHLQTLRALSEVQKMTPRERMRLRKLQAADEKARKLKKIVEEKYEENSKRMQELRSRNFQQLSVDVLHEKTHLKGMEEKEEQPEGRLSCSPQDEDEERWQGREEESDEPTLENLPESQPIPSMDLHELESIVEDATSDLGYHGDCNLISLDEYWKNEK

SEQ ID NO: 55729 - protein, 645 aa, Homo sapiens
MLKFQEAAKCVSGSTAISTYPKTLIARRYVLQQKLGSGSFGTVYLVSDKKAKRGEELKVLKEISVGELNPNETVQANLEAQLLSKLDHPAIVKFHASFVEQDNFCIITEYCEGRDLDDKIQEYKQAGKIFPENQIIEWFIQLLLGVDYMHERRILHRDLKSKNVFLKNNLLKIGDFGVSRLLMGSCDLATTLTGTPHYMSPEALKHQGYDTKSDIWSLACILYEMCCMNHAFAGSNFLSIVLKIVEGDTPSLPERYPKELNAIMESMLNKNPSLRPSAIEILKIPYLDEQLQNLMCRYSEMTLEDKNLDCQKEAAHIINAMQKRIHLQTLRALSEVQKMTPRERMRLRKLQAADEKARKLKKIVEEKYEENSKRMQELRSRNFQQLSVDVLHEKTHLKGMEEKEEQPEGRLSCSPQDEDEERWQGREEESDEPTLENLPESQPIPSMDLHELESIVEDATSDLGYHEIPEDPLVAEEYYADAFDSYCEESDEEEEEIALERPEKEIRNEGSQPAYRTNQQDSDIEALARCLENVLGCTSLDTKTITTMAEDMSPGPPIFNSVMARTKMKRMRESAMQKLGTEVFEEVYNYLKRARHQNASEAEIRECLEKVVPQASDCFEVDQLLYFEEQLLITMGKEPTLQNHL

SEQ ID NO: 55730 - protein, 461 aa, Homo sapiens
MHERRILHRDLKSKNVFLKNNLLKIGDFGVSRLLMGSCDLATTLTGTPHYMSPEALKHQGYDTKSDIWSLACILYEMCCMNHAFAGSNFLSIVLKIVEGDTPSLPERYPKELNAIMESMLNKNPSLRPSAIEILKIPYLDEQLQNLMCRYSEMTLEDKNLDCQKEAAHIINAMQKRIHLQTLRALSEVQKMTPRERMRLRKLQAADEKARKLKKIVEEKYEENSKRMQELRSRNFQQLSVDVLHESDEPTLENLPESQPIPSMDLHELESIVEDATSDLGYHEIPEDPLVAEEYYADAFDSYCEESDEEEEEIALERPEKEIRNEGSQPAYRTNQQDSDIEALARCLENVLGCTSLDTKTITTMAEDMSPGPPIFNSVMARTKMKRMRESAMQKLGTEVFEEVYNYLKRARHQNASEAEIRECLEKVVPQASDCFEVDQLLYFEEQLLITMGKEPTLQNHL

SEQ ID NO: 55731 - protein, 645 aa, Homo sapiens; identical to SEQ ID NO: 55729

SEQ ID NO: 55732 - protein, 482 aa, Homo sapiens; identical to SEQ ID NO: 55728

SEQ ID NO: 55733 - protein, 645 aa, Homo sapiens; identical to SEQ ID NO: 55729

SEQ ID NO: 55734 - protein, 470 aa, Homo sapiens
MLKFQEAAKCVSGSTAISTYPKTLIARRYVLQQKLGSGSFGTVYLVSDKKAKRGEELKVLKEISVGELNPNETVQANLEAQLLSKLDHPAIVKFHASFVEQDNFCIITEYCEGRDLDDKIQEYKQAGKIFPENQIIEWFIQLLLGVDYMHERRILHRDLKSKNVFLKNNLLKIGDFGVSRLLMGSCDLATTLTGTPHYMSPEALKHQGYDTKSDIWSLACILYEMCCMNHAFAGSNFLSIVLKIVEGDTPSLPERYPKELNAIMESMLNKNPSLRPSAIEILKIPYLDEQLQNLMCRYSEMTLEDKNLDCQKEAAHIINAMQKRIHLQTLRALSEVQKMTPRERMRLRKLQAADEKARKLKKIVEEKYEENSKRMQELRSRNFQQLSVDVLHEKTHLKGMEEKEEQPEGRLSCSPQDEDEERWQGREEESDEPTLENLPESQPIPSMDLHELESIVEDATSDLGYHATHS

SEQ ID NO: 55735 - protein, 692 aa, Homo sapiens
MEKYERIRVVGRGAFGIVHLCLRKADQKLVIIKQIPVEQMTKEERQAAQNECQVLKLLNHPNVIEYYENFLEDKALMIAMEYAPGGTLAEFIQKRCNSLLEEETILHFFVQILLALHHVHTHLILHRDLKTQNILLDKHRMVVKIGDFGISKILSSKSKAYTVVGTPCYISPELCEGKPYNQKSDIWALGCVLYELASLKRAFEAANLPALVLKIMSGTFAPISDRYSPELRQLVLSLLSLEPAQRPPLSHIMAQPLCIRALLNLHTDVGSVRMRRAEKSVAPSNTGSRTTSVRCRGIPRGPVRPAIPPPLSSVYAWGGGLGTPLRLPMLNTEVVQVAAGRTQKAGVTRSGRLILWEAPPLGAGGGSLLPGAVEQPQPQFISRFLEGQSGVTIKHVACGDFFTACLTDRGIIMTFGSGSNGCLGHGSLTDISQPTIVEALLGYEMVQVACGASHVLALSTERELFAWGRGDSGRLGLGTRESHSCPQQVPMPPGQEAQRVVCGIDSSMILTVPGQALACGSNRFNKLGLDHLSLGEEPVPHQQVEEALSFTLLGSAPLDQEPLLSIDLGTAHSAAVTASGDCYTFGSNQHGQLGTNTRRGSRAPCKVQGLEGIKMAMVACGDAFTVAIGAESEVYSWGKGARGRLGRRDEDAGLPRPVQLDETHPYTVTSVSCCHGNTLLAVRSVTDEPVPP

SEQ ID NO: 55736 - protein, 460 aa, Homo sapiens
MEKYERIRVVGRGAFGIVHLCLRKADQKLVIIKQIPVEQMTKEERQAAQNECQVLKLLNHPNVIEYYENFLEDKALMIAMEYAPGGTLAEFIQKRCNSLLEEETILHFFVQILLALHHVHTHLILHRDLKTQNILLDKHRMVVKIGDFGISKILSSKSKAYTVVGTPCYISPELCEGKPYNQKSDIWALGCVLYELASLKRAFEAANLPALVLKIMSGTFAPISDRYSPELRQLVLSLLSLEPAQRPPLSHIMAQPLCIRALLNLHTDVGSVRMRRPVQGQRAVLGGRVWAPSGSTGGLRQRETWGKSSLPACRNVRRVFVLRPPSVLQGREVRGPQQHREQDHQCPLQRYPPGTCEASHPTTTVVSVCLGWWAGHPPAAANAQHRGGPGGSWAHAESRRHALWASHPVGGPTPRCRRRQSPSWGSGAATAPVHLAFPGGPVGCDHQARGLWGLLHCLPD

SEQ ID NO: 55737 - protein, 979 aa, Homo sapiens
MSVLGEYERHCDSINSDFGSESGGCGDSSPGPSASQGPRAGGGAAEQEELHYIPIRVLGRGAFGEATLYRRTEDDSLVVWKEVDLTRLSEKERRDALNEIVILALLQHDNIIAYYNHFMDNTTLLIELEYCNGGNLYDKILRQKDKLFEEEMVVWYLFQIVSAVSCIHKAGILHRDIKTLNIFLTKANLIKLGDYGLAKKLNSEYSMAETLVGTPYYMSPELCQGVKYNFKSDIWAVGCVIFELLTLKRTFDATNPLNLCVKIVQGIRAMEVDSSQYSLELIQMVHSCLDQDPEQRPTADELLDRPLLRKRRREMEEKVTLLNAPTKRPRSSTVTEAPIAVVTSRTSEVYVWGGGKSTPQKLDVIKSGCSARQVCAGNTHFAVVTVEKELYTWVNMQGGTKLHGQLGHGDKASYRQPKHVEKLQGKAIRQVSCGDDFTVCVTDEGQLYAFGSDYYGCMGVDKVAGPEVLEPMQLNFFLSNPVEQVSCGDNHVVVLTRNKEVYSWGCGEYGRLGLDSEEDYYTPQKVDVPKALIIVAVQCGCDGTFLLTQSGKVLACGLNEFNKLGLNQCMSGIINHEAYHEVPYTTSFTLAKQLSFYKIRTIAPGKTHTAAIDERGRLLTFGCNKCGQLGVGNYKKRLGINLLGGPLGGKQVIRVSCGDEFTIAATDDNHIFAWGNGGNGRLAMTPTERPHGSDICTSWPRPIFGSLHHVPDLSCRGWHTILIVEKVLNSKTIRSNSSGLSIGTVFQSSSPGGGGGGGGGEEEDSQQESETPDPSGGFRGTMEADRGMEGLISPTEAMGNSNGASSSCPGWLRKELENAEFIPMPDSPSPLSAAFSESEKDTLPYEELQGLKVASEAPLEHKPQVEASSPRLNPAVTCAGKGTPLTPPACACSSLQVEVERLQGLVLKCLAEQQKLQQENLQIFTQLQKLNKKLEGGQQVGMHSKGTQTAKEEMEMDPKPDLDSDSWCLLGTDSCRPSL

SEQ ID NO: 55738 - protein, 514 aa, Homo sapiens
MSVLGEYERHCDSINSDFGSESGGCGDSSPGPSASQGPRAGGGAFGEATLYRRTEDDSLVVWKEVDLTRLSEKERRDALNEIVILALLQHDNIIAYYNHFMDNTTLLIELEYCNGGNLYDKILRQKDKLFEEEMVVWYLFQIVSAVSCIHKAGILHRDIKTLNIFLTKANLIKLGDYGLAKKLNSEYSMAETLVGTPYYMSPELCQGVKYNFKSDIWAVGCVIFELLTLKRTFDATNPLNLCVKIVQGIRAMEVDSSQYSLELIQMVHSCLDQDPEQRPTADELLDRPLLRKRRREMEEKVTLLNAPTKRPRSSTVTEAPIAVVTSRTSEVYVWGGGKSTPQKLDVIKSGCSARQVCAGNTHFAVVTVEKELYTWVNMQGGTKLHGQLGHGDKASYRQPKHVEKLQGKAIRQVSCGDDFTVCVTDEGQLYAFGSDYYGCMGVDKVAGPEVLEPMQLNFFLSNPVEQVSCGDNHVVVLTRNKEVYSWGCGEYGRGSLVSVHFFTGIQPDFKVVCI

SEQ ID NO: 55739 - protein, 1258 aa, Homo sapiens
MEKYVRLQKIGEGSFGKAILVKSTEDGRQYVIKEINISRMSSKEREESRREVAVLANMKHPNIVQYRESFEENGSLYIVMDYCEGGDLFKRINAQKGVLFQEDQILDWFVQICLALKHVHDRKILHRDIKSQNIFLTKDGTVQLGDFGIARVLNSTVELARTCIGTPYYLSPEICENKPYNNKSDIWALGCVLYELCTLKHAFEAGSMKNLVLKIISGSFPPVSLHYSYDLRSLVSQLFKRNPRDRPSVNSILEKGFIAKRIEKFLSPQLIAEEFCLKTFSKFGSQPIPAKRPASGQNSISVMPAQKITKPAAKYGIPLAYKKYGDKKLHEKKPLQKHKQAHQTPEKRVNTGEERRKISEEAARKRRLEFIEKEKKQKDQIISLMKAEQMKRQEKERLERINRAREQGWRNVLSAGGSGEVKAPFLGSGGTIAPSSFSSRGQYEHYHAIFDQMQQQRAEDNEAKWKREIYGRGLPERGILPGVRPGFPYGAAGHHHFPDADDIRKTLKRLKAVSKQANANRQKGQLAVERAKQVEEFLQRKREAMQNKARAEGHMVYLARLRQIRLQNFNERQQIKAKLRGEKKEANHSEGQEGSEEADMRRKKIESLKAHANARAAVLKEQLERKRKEAYEREKKVWEEHLVAKGVKSSDVSPPLGQHETGGSPSKQQMRSVISVTSALKEVGVDSSLTDTRETSEEMQKTNNAISSKREILRRLNENLKAQEDEKGKQNLSDTFEINVHEDAKEHEKEKSVSSDRKKWEAGGQLVIPLDELTLDTSFSTTERHTVGEVIKLGPNGSPRRAWGKSPTDSVLKILGEAELQLQTELLENTTIRSEISPEGEKYKPLITGEKKVQCISHEINPSAIVDSPVETKSPEFSEASPQMSLKLEGNLEEPDDLETEILQEPSGTNKDESLPCTITDVWISEEKETKETQSADRITIQENEVSEDGVSSTVDQLSDIHIEPGTNDSQHSKCDVDKSVQPEPFFHKVVHSEHLNLVPQVQSVQCSPEESFAFRSHSHLPPKNKNKNSLLIGLSTGLFDANNPKMLRTCSLPDLSKLFRTLMDVPTVGDVRQDNLEIDEIEDENIKEGPSDSEDIVFEETDTDLQELQASMEQLLREQPGEEYSEEEESVLKNSDVEPTANGTDVADEDDNPSSESALNEEWHSDNSDGEIASECECDSVFNHLEELRLHLEQEMGFEKFFEVYEKIKAIHEDEDENIEICSKIVQNILGNEHQHLYAKILHLVMADGAYQEDNDE

SEQ ID NO: 55740 - protein, 1286 aa, Homo sapiens
MEKYVRLQKIGEGSFGKAILVKSTEDGRQYVIKEINISRMSSKEREESRREVAVLANMKHPNIVQYRESFEENGSLYIVMDYCEGGDLFKRINAQKGVLFQEDQILDWFVQICLALKHVHDRKILHRDIKSQNIFLTKDGTVQLGDFGIARVLNSTVELARTCIGTPYYLSPEICENKPYNNKSDIWALGCVLYELCTLKHAFEAGSMKNLVLKIISGSFPPVSLHYSYDLRSLVSQLFKRNPRDRPSVNSILEKGFIAKRIEKFLSPQLIAEEFCLKTFSKFGSQPIPAKRPASGQNSISVMPAQKITKPAAKYGIPLAYKKYGDKKLHEKKPLQKHKQAHQTPEKRVNTGEERRKISEEAARKRRLEFIEKEKKQKDQIISLMKAEQMKRQEKERLERINRAREQGWRNVLSAGGSGEVKAPFLGSGGTIAPSSFSSRGQYEHYHAIFDQMQQQRAEDNEAKWKREIYGRGLPERGILPGVRPGFPYGAAGHHHFPDADDIRKTLKRLKAVSKQANANRQKGQLAVERAKQVEEFLQRKREAMQNKARAEGHMGILQNLAAMYGGRPSSSRGGKPRNKEEEVYLARLRQIRLQNFNERQQIKAKLRGEKKEANHSEGQEGSEEADMRRKKIESLKAHANARAAVLKEQLERKRKEAYEREKKVWEEHLVAKGVKSSDVSPPLGQHETGGSPSKQQMRSVISVTSALKEVGVDSSLTDTRETSEEMQKTNNAISSKREILRRLNENLKAQEDEKGKQNLSDTFEINVHEDAKEHEKEKSVSSDRKKWEAGGQLVIPLDELTLDTSFSTTERHTVGEVIKLGPNGSPRRAWGKSPTDSVLKILGEAELQLQTELLENTTIRSEISPEGEKYKPLITGEKKVQCISHEINPSAIVDSPVETKSPEFSEASPQMSLKLEGNLEEPDDLETEILQEPSGTNKDESLPCTITDVWISEEKETKETQSADRITIQENEVSEDGVSSTVDQLSDIHIEPGTNDSQHSKCDVDKSVQPEPFFHKVVHSEHLNLVPQVQSVQCSPEESFAFRSHSHLPPKNKNKNSLLIGLSTGLFDANNPKMLRTCSLPDLSKLFRTLMDVPTVGDVRQDNLEIDEIEDENIKEGPSDSEDIVFEETDTDLQELQASMEQLLREQPGEEYSEEEESVLKNSDVEPTANGTDVADEDDNPSSESALNEEWHSDNSDGEIASECECDSVFNHLEELRLHLEQEMGFEKFFEVYEKIKAIHEDEDENIEICSKIVQNILGNEHQHLYAKILHLVMADGAYQEDNDE

SEQ ID NO: 55741 - protein, 1214 aa, Homo sapiens
MEKYVRLQKIGEGSFGKAILVKSTEDGRQYVIKEINISRMSSKEREESRREVAVLANMKHPNIVQYRESFEENGSLYIVMDYCEGGDLFKRINAQKGVLFQEDQILDWFVQICLALKHVHDRKILHRDIKSQNIFLTKDGTVQLGDFGIARVLNSTVELARTCIGTPYYLSPEICENKPYNNKSDIWALGCVLYELCTLKHAFEAGSMKNLVLKIISGSFPPVSLHYSYDLRSLVSQLFKRNPRDRPSVNSILEKGFIAKRIEKFLSPQLIAEEFCLKTFSKFGSQPIPAKRPASGQNSISVMPAQKITKPAAKYGIPLAYKKYGDKKLHEKKPLQKHKQAHQTPEKRVNTGEERRKISEEAARKRRLEFIEKEKKQKDQIISLMKAEQMKRQEKERLERINRAREQGWRNVLSAGGSGEVKAPFLGSGGTIAPSSFSSRGQYEHYHAIFDQMQQQRAEDNEAKWKREIYGRGLPERQKGQLAVERAKQVEEFLQRKREAMQNKARAEGHMVYLARLRQIRLQNFNERQQIKAKLRGEKKEANHSEGQEGSEEADMRRKKIESLKAHANARAAVLKEQLERKRKEAYEREKKVWEEHLVAKGVKSSDVSPPLGQHETGGSPSKQQMRSVISVTSALKEVGVDSSLTDTRETSEEMQKTNNAISSKREILRRLNENLKAQEDEKGKQNLSDTFEINVHEDAKEHEKEKSVSSDRKKWEAGGQLVIPLDELTLDTSFSTTERHTVGEVIKLGPNGSPRRAWGKSPTDSVLKILGEAELQLQTELLENTTIRSEISPEGEKYKPLITGEKKVQCISHEINPSAIVDSPVETKSPEFSEASPQMSLKLEGNLEEPDDLETEILQEPSGTNKDESLPCTITDVWISEEKETKETQSADRITIQENEVSEDGVSSTVDQLSDIHIEPGTNDSQHSKCDVDKSVQPEPFFHKVVHSEHLNLVPQVQSVQCSPEESFAFRSHSHLPPKNKNKNSLLIGLSTGLFDANNPKMLRTCSLPDLSKLFRTLMDVPTVGDVRQDNLEIDEIEDENIKEGPSDSEDIVFEETDTDLQELQASMEQLLREQPGEEYSEEEESVLKNSDVEPTANGTDVADEDDNPSSESALNEEWHSDNSDGEIASECECDSVFNHLEELRLHLEQEMGFEKFFEVYEKIKAIHEDEDENIEICSKIVQNILGNEHQHLYAKILHLVMADGAYQEDNDE

SEQ ID NO: 55742 - protein, 1189 aa, Homo sapiens
MEKYVRLQKIGEGSFGKAILVKSTEDGRQYVIKEINISRMSSKEREESRREVAVLANMKHPNIVQYRESFEENGSLYIVMDYCEGGDLFKRINAQKGVLFQEDQILDWFVQICLALKHVHDRKILHRDIKSQNIFLTKDGTVQLGDFGIARVLNSTVELARTCIGTPYYLSPEICENKPYNNKSDIWALGCVLYELCTLKHAFEAGSMKNLVLKIISGSFPPVSLHYSYDLRSLVSQLFKRNPRDRPSVNSILEKGFIAKRIEKFLSPQLIAEEFCLKTFSKFGSQPIPAKRPASGQNSISVMPAQKITKPAAKYGIPLAYKKYGDKKLHEKKPLQKHKQAHQTPEKRVNTGEERRKISEEAARKRRLEFIEKEKKQKDQIISLMKAEQMKRQEKERAPFLGSGGTIAPSSFSSRGQYEHYHAIFDQMQQQRAEDNEAKWKREIYGRGLPERQKGQLAVERAKQVEEFLQRKREAMQNKARAEGHMVYLARLRQIRLQNFNERQQIKAKLRGEKKEANHSEGQEGSEEADMRRKKIESLKAHANARAAVLKEQLERKRKEAYEREKKVWEEHLVAKGVKSSDVSPPLGQHETGGSPSKQQMRSVISVTSALKEVGVDSSLTDTRETSEEMQKTNNAISSKREILRRLNENLKAQEDEKGKQNLSDTFEINVHEDAKEHEKEKSVSSDRKKWEAGGQLVIPLDELTLDTSFSTTERHTVGEVIKLGPNGSPRRAWGKSPTDSVLKILGEAELQLQTELLENTTIRSEISPEGEKYKPLITGEKKVQCISHEINPSAIVDSPVETKSPEFSEASPQMSLKLEGNLEEPDDLETEILQEPSGTNKDESLPCTITDVWISEEKETKETQSADRITIQENEVSEDGVSSTVDQLSDIHIEPGTNDSQHSKCDVDKSVQPEPFFHKVVHSEHLNLVPQVQSVQCSPEESFAFRSHSHLPPKNKNKNSLLIGLSTGLFDANNPKMLRTCSLPDLSKLFRTLMDVPTVGDVRQDNLEIDEIEDENIKEGPSDSEDIVFEETDTDLQELQASMEQLLREQPGEEYSEEEESVLKNSDVEPTANGTDVADEDDNPSSESALNEEWHSDNSDGEIASECECDSVFNHLEELRLHLEQEMGFEKFFEVYEKIKAIHEDEDENIEICSKIVQNILGNEHQHLYAKILHLVMADGAYQEDNDE

SEQ ID NO: 55743 - protein, 384 aa, Homo sapiens
MPSRAEDYEVLYTIGTGSYGRCQKIRRKSDGKILVWKELDYGSMTEAEKQMLVSEVNLLRELKHPNIVRYYDRIIDRTNTTLYIVMEYCEGGDLASVITKGTKERQYLDEEFVLRVMTQLTLALKECHRRSDGGHTVLHRDLKPANVFLDGKQNVKLGDFGLARILNHDTSFAKTFVGTPYYMSPEQMNRMSYNEKSDIWSLGCLLYELCALMPPFTAFSQKELAGKIREGKFRRIPYRYSDELNEIITRMLNLKDYHRPSVEEILENPLIADLVADEQRRNLERRGRQLGEPEKSQDSSPVLSELKLKEIQLQERERALKAREERLEQKEQELCVRERLAEDKLARAENLLKNYSLLKERKFLSLASNPGMRINLVNRSWCYK

SEQ ID NO: 55744 - protein, 445 aa, Homo sapiens
MPSRAEDYEVLYTIGTGSYGRCQKIRRKSDGKILVWKELDYGSMTEAEKQMLVSEVNLLRELKHPNIVRYYDRIIDRTNTTLYIVMEYCEGGDLASVITKGTKERQYLDEEFVLRVMTQLTLALKECHRRSDGGHTVLHRDLKPANVFLDGKQNVKLGDFGLARILNHDTSFAKTFVGTPYYMSPEQMNRMSYNEKSDIWSLGCLLYELCALMPPFTAFSQKELAGKIREGKFRRIPYRYSDELNEIITRMLNLKDYHRPSVEEILENPLIADLVADEQRRNLERRGRQLGEPEKSQDSSPVLSELKLKEIQLQERERALKAREERLEQKEQELCVRERLAEDKLARAENLLKNYSLLKERKFLSLASNPELLNLPSSVIKKKVHFSGESKENIMRSENSESQLTSKSKCKDLKKRLHAAQLRAQALSDIEKNYQLKSRQILGMR

SEQ ID NO: 55745 - protein, 402 aa, Homo sapiens
MTEAEKQMLVSEVNLLRELKHPNIVRYYDRIIDRTNTTLYIVMEYCEGGDLASVITKGTKERQYLDEEFVLRVMTQLTLALKECHRRSDGGHTVLHRDLKPANVFLDGKQNVKLGDFGLARILNHDTSFAKTFVGTPYYMSPEQMNRMSYNEKSDIWSLGCLLYELCALMPPFTAFSQKELAGKIREGKFRRIPYRYSDELNEIITRMLNLKDYHRPSVEEILENPLIADLVADEQRRNLERRGRQLGEPEKSQDSSPVLSELKLKEIQLQERERALKAREERLEQKEQELCVRERLAEDKLARAENLLKNYSLLKERKFLSLASNPELLNLPSSVIKKKVHFSGESKENIMRSENSESQLTSKSKCKDLKKRLHAAQLRAQALSDIEKNYQLKSRQILGMR

SEQ ID NO: 55746 - protein, 506 aa, Homo sapiens
MDDYMVLRMIGEGSFGRALLVQHESSNQMFAMKEIRLPKSFSNTQNSRKEAVLLAKMKHPNIVAFKESFEAEGHLYIVMEYCDGGDLMQKIKQQKGKLFPEDMILNWFTQMCLGVNHIHKKRVLHRDIKSKNIFLTQNGKVKLGDFGSARLLSNPMAFACTYVGTPYYVPPEIWENLPYNNKSDIWSLGCILYELCTLKHPFQANSWKNLILKVCQGCISPLPSHYSYELQFLVKQMFKRNPSHRPSATTLLSRGIVARLVQKCLPPEIIMEYGEEVLEEIKNSKHNTPRKKANPSRIRIALGNEASTVQEEEQDRKGSHTDLESINENLVESALRRVNREEKGNKSVHLRKASSPNLHRRQWEKNVPNTALTALENASILTSSLTAEDDRGGSVIKYSKNTTRKQWLKETPDTLLNILKNADLSLAFQTYTIYRPGSEGFLKGPLSEETEASDSVDGGHDSVILDPERLEPGLDEEDTDFEEEDDNPDWVSELKKRAGWQGLCDR

SEQ ID NO: 55747 - protein, 506 aa, Homo sapiens; identical to SEQ ID NO: 55746

SEQ ID NO: 55748 - protein, 489 aa, Homo sapiens
MDDYMVLRMIGEGSFGRALLVQHESSNQMFAMKEIRLPKSFSNTQNSRKEAVLLAKMKHPNIVAFKESFEAEGHLYIVMEYCDGGDLMQKIKQQKGKLFPEDMILNWFTQMCLGVNHIHKKRVLHRDIKSKNIFLTQNGKVKLGDFGSARLLSNPMAFACTYVGTPYYVPPEIWENLPYNNKSDIWSLGCILYELCTLKHPFQANSWKNLILKVCQGCISPLPSHYSYELQFLVKQMFKRNPSHRPSATTLLSRGIVARLVQKCLPPEIIMEYGEEVLEEIKNSKHNTPRKKQEEEQDRKGSHTDLESINENLVESALRRVNREEKGNKSVHLRKASSPNLHRRQWEKNVPNTALTALENASILTSSLTAEDDRGGSVIKYSKNTTRKQWLKETPDTLLNILKNADLSLAFQTYTIYRPGSEGFLKGPLSEETEASDSVDGGHDSVILDPERLEPGLDEEDTDFEEEDDNPDWVSELKKRAGWQGLCDR

SEQ ID NO: 55749 - protein, 510 aa, Homo sapiens
MQFGRAHGDCVSGAQLCGCPSMDDYMVLRMIGEGSFGRALLVQHESSNQMFAMKEIRLPKSFSNTQNSRKEAVLLAKMKHPNIVAFKESFEAEGHLYIVMEYCDGGDLMQKIKQQKGKLFPEDMILNWFTQMCLGVNHIHKKRVLHRDIKSKNIFLTQNGKVKLGDFGSARLLSNPMAFACTYVGTPYYVPPEIWENLPYNNKSDIWSLGCILYELCTLKHPFQANSWKNLILKVCQGCISPLPSHYSYELQFLVKQMFKRNPSHRPSATTLLSRGIVARLVQKCLPPEIIMEYGEEVLEEIKNSKHNTPRKKQEEEQDRKGSHTDLESINENLVESALRRVNREEKGNKSVHLRKASSPNLHRRQWEKNVPNTALTALENASILTSSLTAEDDRGGSVIKYSKNTTRKQWLKETPDTLLNILKNADLSLAFQTYTIYRPGSEGFLKGPLSEETEASDSVDGGHDSVILDPERLEPGLDEEDTDFEEEDDNPDWVSELKKRAGWQGLCDR

SEQ ID NO: 55750 - protein, 58 aa, Homo sapiens
MDDYMVLRMIGEGSFGRALLVQHESSNQMFAMKEIRLPKSFSNTQNSRKEAVLLAKMK

SEQ ID NO: 55751 - protein, 841 aa, Homo sapiens
MPLAAYCYLRVVGKGSYGEVTLVKHRRDGKQYVIKKLNLRNASSRERRAAEQEAQLLSQLKHPNIVTYKESWEGGDGLLYIVMGFCEGGDLYRKLKEQKGQLLPENQVVEWFVQIAMALQYLHEKHILHRDLKTQNVFLTRTNIIKVGDLGIARVLENHCDMASTLIGTPYYMSPELFSNKPYNYKSDVWALGCCVYEMATLKHAFNAKDMNSLVYRIIEGKLPPMPRDYSPELAELIRTMLSKRPEERPSVRSILRQPYIKRQISFFLEATKIKTSKNNIKNGDSQSKPFATVVSGEAESNHEVIHPQPLSSEGSQTYIMGEGKCLSQEKPRASGLLKSPASLKAHTCKQDLSNTTELATISSVNIDILPAKGRDSVSDGFVQENQPRYLDASNELGGICSISQVEEEMLQDNTKSSAQPENLIPMWSSDIVTGEKNEPVKPLQPLIKEQKPKDQSLALSPKLECSGTILAHSNLRLLGSSDSPASASRVAGITGVCHHAQDQVAGECIIEKQGRIHPDLQPHNSGSEPSLSRQRRQKRREQTEHRGEKRQVRRDLFAFQESPPRFLPSHPIVGKVDVTSTQKEAENQRRVVTGSVSSSRSSEMSSSKDRPLSARERRRLKQSQEEMSSSGPSVRKASLSVAGPGKPQEEDQPLPARRLSSDCSVTQERKQIHCLSEDELSSSTSSTDKSDGDYGEGKGQTNEINALVQLMTQTLKLDSKESCEDVPVANPVSEFKLHRKYRDTLILHGKVAEEAEEIHFKELPSAIMPGSEKIRRLVEVLRTDVIRGLGVQLLEQVYDLLEEEDEFDREVRLREHMGEKYTTYSVKARQLKFFEENMNF

SEQ ID NO: 55752 - protein, 752 aa, Homo sapiens
MPLAAYCYLRVVGKGSYGEVTLVKHRRDGKQYLHEKHILHRDLKTQNVFLTRTNIIKVGDLGIARVLENHCDMASTLIGTPYYMSPELFSNKPYNYKSDVWALGCCVYEMATLKHAFNAKDMNSLVYRIIEGKLPPMPRDYSPELAELIRTMLSKRPEERPSVRSILRQPYIKRQISFFLEATKIKTSKNNIKNGDSQSKPFATVVSGEAESNHEVIHPQPLSSEGSQTYIMGEGKCLSQEKPRASGLLKSPASLKAHTCKQDLSNTTELATISSVNIDILPAKGRDSVSDGFVQENQPRYLDASNELGGICSISQVEEEMLQDNTKSSAQPENLIPMWSSDIVTGEKNEPVKPLQPLIKEQKPKDQSLALSPKLECSGTILAHSNLRLLGSSDSPASASRVAGITGVCHHAQDQVAGECIIEKQGRIHPDLQPHNSGSEPSLSRQRRQKRREQTEHRGEKRQVRRDLFAFQESPPRFLPSHPIVGKVDVTSTQKEAENQRRVVTGSVSSSRSSEMSSSKDRPLSARERRRLKQSQEEMSSSGPSVRKASLSVAGPGKPQEEDQPLPARRLSSDCSVTQERKQIHCLSEDELSSSTSSTDKSDGDYGEGKGQTNEINALVQLMTQTLKLDSKESCEDVPVANPVSEFKLHRKYRDTLILHGKVAEEAEEIHFKELPSAIMPGSEKIRRLVEVLRTDVIRGLGVQLLEQVYDLLEEEDEFDREVRLREHMGEKYTTYSVKARQLKFFEENMNF

SEQ ID NO: 55753 - protein, 313 aa, Homo sapiens
MAGQPGHMPHGGSSNNLCHTLGPVHPPDPQRHPNTLSFRCSLADFQIEKKIGRGQFSEVYKATCLLDRKTVALKKVQIFEMMDAKARQDCVKEIGLLKQLNHPNIIKYLDSFIEDNELNIVLELADAGDLSQMIKYFKKQKRLIPERTVWKYFVQLCSAVEHMHSRRVMHRDIKPANVFITATGVVKLGDLGLGRFFSSETTAAHSLVGTPYYMSPERIHENGYNFKSDIWSLGCLLYEMAALQSPFYGDKMNLFSLCQKIEQCDYPPLPGEHYSEKLRELVSMCICPDPHQRPDIGYVHQVAKQMHIWMSST

SEQ ID NO: 55754 - protein, 207 aa, Homo sapiens
MAGQPGHMPHGGSSNNLCHTLGPVHPPDPQRHPNTLSFRCSLADFQIEKKIGRGQFSEVYKATCLLDRKTVALKKVQIFEMMDAKARQDCVKEIGLLKQLNHPNIIKYLDSFIEDNELNIVLELADAGDLSQMIKYFKKQKRLIPERTVWKYFVQLCSAVEHMHSRRVMHRDIKPANVFITATGVVKLGDLGLGRFFSSETTAAHSL

SEQ ID NO: 55755 - protein, 347 aa, Homo sapiens
MPRREVCWEAAHFRQEEQSLPRPRVRALVRLACRMAGQPGHMPHGGSSNNLCHTLGPVHPPDPQRHPNTLSFRCSLADFQIEKKIGRGQFSEVYKATCLLDRKTVALKKVQIFEMMDAKARQDCVKEIGLLKQLNHPNIIKYLDSFIEDNELNIVLELADAGDLSQMIKYFKKQKRLIPERTVWKYFVQLCSAVEHMHSRRVMHRDIKPANVFITATGVVKLGDLGLGRFFSSETTAAHSLVGTPYYMSPERIHENGYNFKSDIWSLGCLLYEMAALQSPFYGDKMNLFSLCQKIEQCDYPPLPGEHYSEKLRELVSMCICPDPHQRPDIGYVHQVAKQMHIWMSST

SEQ ID NO: 55756 - protein, 245 aa, Homo sapiens
MAGQPGHMPHGGSSNNLCHTLGPVHPPDPQQLNHPNIIKYLDSFIEDNELNIVLELADAGDLSQMIKYFKKQKRLIPERTVWKYFVQLCSAVEHMHSRRVMHRDIKPANVFITATGVVKLGDLGLGRFFSSETTAAHSLVGTPYYMSPERIHENGYNFKSDIWSLGCLLYEMAALQSPFYGDKMNLFSLCQKIEQCDYPPLPGEHYSEKLRELVSMCICPDPHQRPDIGYVHQVAKQMHIWMSST

SEQ ID NO: 55757 - protein, 313 aa, Homo sapiens; identical to SEQ ID NO: 55753

SEQ ID NO: 55758 - protein, 347 aa, Homo sapiens; identical to SEQ ID NO: 55755

SEQ ID NO: 55759 - protein, 220 aa, Homo sapiens
MAGQPGHMPHGGSSNNLCHTLGPVHPPDPQRHPNTLSFRCSLADFQIEKKIGRGQFSEVYKATCLLDRKTVALKKVQIFEMMDAKARQDCVKEIGLLKQLNHPNIIKYLDSFIEDNELNIVLELADAGDLSQMIKYFKKQKRLIPERTVWKYFVQLCSAVEHMHSRRVMHRDIKPANVFITATGVVKLGDLGLGRFFSSETTAAHSLVGTPYYMSPERIH

SEQ ID NO: 55760 - protein, 194 aa, Homo sapiens
MPRREVCWEAAHFRQEEQSLPRPRVRALVRLACRMAGQPGHMPHGGSSNNLCHTLGPVHPPDPQRHPNTLSFRCSLADFQIEKKIGRGQFSEVYKATCLLDRKTVALKKVQIFEMMDAKARQDCVKEIGLLKQLNHPNIIKYLDSFIEDNELNIVLELADAGDLSQMIKYFKKQKRLIPERTVWKYFVQLCSAV

SEQ ID NO: 55761 - protein, 222 aa, Homo sapiens
MAGQPGHMPHGGSSNNLCHTLGPVHPPDPQRHPNTLSFRCSLADFQIEKKIGRGQFSEVYKATCLLDRKTVALKKVQIFEMMDAKARQDCVKEIGLLKQLNHPNIIKYLDSFIEDNELNIVLELADAGDLSQMIKYFKKQKRLIPERTVWKYFVQLCSAVEHMHSRRVMHRDIKPANVFITATGVVKLGDLGLGRFFSSETTAAHSLVGTPYYMSPERIHEN

SEQ ID NO: 55762 - protein, 219 aa, Homo sapiens
MAGQPGHMPHGGSSNNLCHTLGPVHPPDPQRHPNTLSFRCSLADFQIEKKIGRGQFSEVYKATCLLDRKTVALKKVQIFEMMDAKARQDCVKEIGLLKQLNHPNIIKYLDSFIEDNELNIVLELADAGDLSQMIKYFKKQKRLIPERTVWKYFVQLCSAVEHMHSRRVMHRDIKPANVFITATGVVKLGDLGLGRFFSSETTAAHSLVGTPYYMSPERI

SEQ ID NO: 55763 - protein, 171 aa, Homo sapiens
MAGQPGHMPHGGSSNNLCHTLGPVHPPDPQRHPNTLSFRCSLADFQIEKKIGRGQFSEVYKATCLLDRKTVALKKVQIFEMMDAKARQDCVKEIGLLKQLNHPNIIKYLDSFIEDNELNIVLELADAGDLSQMIKYFKKQKRLIPERTVWKYFVQLCSAVEHMHSRRVMHR

SEQ ID NO: 55764 - protein, 201 aa, Homo sapiens [sequence omitted]

SEQ ID NO: 55765 - protein, 338 aa, Homo sapiens
MEATGWDSRCSPGTQVRALVRLACRMAGQPGHMPHGGSSNNLCHTLGPVHPPDPQRHPNTLSFRCSLADFQIEKKIGRGQFSEVYKATCLLDRKTVALKKVQIFEMMDAKARQDCVKEIGLLKQLNHPNIIKYLDSFIEDNELNIVLELADAGDLSQMIKYFKKQKRLIPERTVWKYFVQLCSAVEHMHSRRVMHRDIKPANVFITATGVVKLGDLGLGRFFSSETTAAHSLVGTPYYMSPERIHENGYNFKSDIWSLGCLLYEMAALQSPFYGDKMNLFSLCQKIEQCDYPPLPGEHYSEKLRELVSMCICPDPHQRPDIGYVHQVAKQMHIWMSST

SEQ ID NO: 55766 - protein, 331 aa, Homo sapiens
MGRRRPAPFRALVRLACRMAGQPGHMPHGGSSNNLCHTLGPVHPPDPQRHPNTLSFRCSLADFQIEKKIGRGQFSEVYKATCLLDRKTVALKKVQIFEMMDAKARQDCVKEIGLLKQLNHPNIIKYLDSFIEDNELNIVLELADAGDLSQMIKYFKKQKRLIPERTVWKYFVQLCSAVEHMHSRRVMHRDIKPANVFITATGVVKLGDLGLGRFFSSETTAAHSLVGTPYYMSPERIHENGYNFKSDIWSLGCLLYEMAALQSPFYGDKMNLFSLCQKIEQCDYPPLPGEHYSEKLRELVSMCICPDPHQRPDIGYVHQVAKQMHIWMSST

SEQ ID NO: 55767 - protein, 313 aa, Homo sapiens; identical to SEQ ID NO: 55753

SEQ ID NO: 55768 - protein, 313 aa, Homo sapiens; identical to SEQ ID NO: 55753

SEQ ID NO: 55769 - protein, 302 aa, Homo sapiens
MDEQSQGMQGPPVPQFQPQKALRPDMGYNTLANFRIEKKIGRGQFSEVYRAACLLDGVPVALKKVQIFDLMDAKARADCIKEIDLLKQLNHPNVIKYYASFIEDNELNIVLELADAGDLSRMIKHFKKQKRLIPERTVWKYFVQLCSALEHMHSRRVMHRDIKPANVFITATGVVKLGDLGLGRFFSSKTTAAHSLVGTPYYMSPERIHENGYNFKSDIWSLGCLLYEMAALQSPFYGDKMNLYSLCKKIEQCDYPPLPSDHYSEELRQLVNMCINPDPEKRPDVTYVYDVAKRMHACTASS

SEQ ID NO: 55770 - protein, 82 aa, Homo sapiens
MDEQSQGMQGPPVPQFQPQKALRPDMGYNTLANFRIEKKIGRGQFSEVYRAACLLDGVPVALKKVQIFDLMDAKARADCIKE

SEQ ID NO: 55771 - protein, 32 aa, Homo sapiens
MDEQSQGMQGPPVPQFQPQKALRPDMGYNTLA

SEQ ID NO: 55772 - protein, 302 aa, Homo sapiens; identical to SEQ ID NO: 55769

SEQ ID NO: 55773 - protein, 62 aa, Homo sapiens
MDEQSQGMQGPPVPQFQPQKALRPDMGYNTLANFRIEKKIGRGQFSEVYRAACLLDGVPVAL

SEQ ID NO: 55774 - protein, 1242 aa, Homo sapiens
MEKYVRLQKIGEGSFGKAILVKSTEDGRQYVIKEINISRMSSKEREESRREVAVLANMKHPNIVQYRESFEENGSLYIVMDYCEGGDLFKRINAQKGVLFQEDQILDWFVQICLALKHVHDRKILHRDIKSQNIFLTKDGTVQLGDFGIARVLNSTVELARTCIGTPYYLSPEICENKPYNNKSDIWALGCVLYELCTLKHAFEAGSMKNLVLKIISGSFPPVSLHYSYDLRSLVSQLFKRNPRDRPSVNSILEKGFIAKRIEKFLSPQLIAEEFCLKTFSKFGSQPIPAKRPASGQNSISVMPAQKITKPAAKYGIPLAYKKYGDKKLHEKKPLQKHKQAHQTPEKRVNTGEERRKISEEAARKRRLEFIEKEKKQKDQIISLMKAEQMKRQEKERLERINRAREQGWRNVLSAGGSGEVKAPFLGSGGTIAPSSFSSRGQYEHYHAIFDQMQQQRAEDNEAKWKREIYGRGLPERQKGQLAVERAKQVEEFLQRKREAMQNKARAEGHMGILQNLAAMYGGRPSSSRGGKPRNKEEEVYLARLRQIRLQNFNERQQIKAKLRGEKKEANHSEGQEGSEEADMRRKKIESLKAHANARAAVLKEQLERKRKEAYEREKKVWEEHLVAKGVKSSDVSPPLGQHETGGSPSKQQMRSVISVTSALKEVGVDSSLTDTRETSEEMQKTNNAISSKREILRRLNENLKAQEDEKGKQNLSDTFEINVHEDAKEHEKEKSVSSDRKKWEAGGQLVIPLDELTLDTSFSTTERHTVGEVIKLGPNGSPRRAWGKSPTDSVLKILGEAELQLQTELLENTTIRSEISPEGEKYKPLITGEKKVQCISHEINPSAIVDSPVETKSPEFSEASPQMSLKLEGNLEEPDDLETEILQEPSGTNKDESLPCTITDVWISEEKETKETQSADRITIQENEVSEDGVSSTVDQLSDIHIEPGTNDSQHSKCDVDKSVQPEPFFHKVVHSEHLNLVPQVQSVQCSPEESFAFRSHSHLPPKNKNKNSLLIGLSTGLFDANNPKMLRTCSLPDLSKLFRTLMDVPTVGDVRQDNLEIDEIEDENIKEGPSDSEDIVFEETDTDLQELQASMEQLLREQPGEEYSEEEESVLKNSDVEPTANGTDVADEDDNPSSESALNEEWHSDNSDGEIASECECDSVFNHLEELRLHLEQEMGFEKFFEVYEKIKAIHEDEDENIEICSKIVQNILGNEHQHLYAKILHLVMADGAYQEDNDE

SEQ ID NO: 55775 - protein, 599 aa, Homo sapiens
MLKFQEAAKCVSGSTAISTYPKTLIARRYVLQQKLGSGSFGTVYLVSDKKAKRGEELKVLKEISVGELNPNETVQANLEAQLLSKLDHPAIVKFHASFVEQDNFCIITEYCEGRDLDDKIQEYKQAGKIFPENQIIEWFIQLLLGVDYMHERRILHRDLKSKNVFLKNNLLKIGDFGVSRLLMGSCDLATTLTGTPHYMSPEALKHQGYDTKSDIWSLACILYEMCCMNHAFAGSNFLSIVLKIVEGDTPSLPERYPKELNAIMESMLNKNPSLRPSAIEILKIPYLDEQLQNLMCRYSEMTLEDKNLDCQKEAAHIINAMQKRIHLQTLRALSEVQKMTPRERMRLRKLQAADEKARKLKKIVEEKYEENSKRMQELRSRNFQQLSVDVLHEKTHLKGMEEKEEQPEGRLSCSPQDEDEERWQGREEESDEPTLENLPESQPIPSMDLHELESIVEDATSDLGYHEIPEDPLVAEEYYADAFDSYCEESDEEEEEIALERPEKEIRNEGSQPAYRTNQQDSDIEALARCLENVLGCTSLDQPCRSWGQKYLKRSIITSREQGIRMLAKQRSASVWKKWCLKPATVLKWTSSCTLKSSC

SEQ ID NO: 55776 - protein, 152 aa, Homo sapiens
MDSGTEEYELNGGLPPGTPGSPDASPARWGWRHGPINVNHYASKKSAAESMLDIALLMANASQLKAVVEQGPSFAFYVPLVVLISISLVLQIGVGVLLIFLVKYDLNNPAKHAKLDFLNNLATGLVFIIVVVNIFITAFGVQKPLMDMAPQQ

SEQ ID NO: 55777 - protein, 188 aa, Homo sapiens
MAGLSRQLCALSHPKKAAETQTAEPGGAHAVCSRHPVRVKGLEGSEMESARENIDLQPGSSDPRSQPINLNHYATKKSVAESMLDVALFMSNAMRLKAVLEQGPSSHYYTTLVTLISLSLLLQVVIGVLLVVIARLNLNEVEKQWRLNQLNNAATILVFFTVVINVFITAFGAHKTGFLAARASRNPL

SEQ ID NO: 55778 - protein, 90 aa, Homo sapiens
MLDVALFMSNAMRLKAVLEQGPSSHYYTTLVTLISLSLLLQVVIGVLLVVIGEEPSLQSDLLPRHPWLAERPHVSPGPPCIGTGSFATTR

SEQ ID NO: 55779 - protein, 466 aa, Homo sapiens
MPGDSSPGTLPLWDASLSPPLGPDPGGFSRASHAGDKSRPPAPELGSPGAVRPRVGSCAPGPMELRVSNTSCENGSLLHLYCSSQEVLCQIVNDLSPEVPSNATFHSWQERIRQNYGFYIGLGLAFLSSFLIGSSVILKKKGLLRLVATGATRAVDGGFGYLKDAMWWAGFLTMAAGEVANFGAYAFAPATVVTPLGALSVLISAILSSYFLRESLNLLGKLGCVICVAGSTVMVIHAPEEEKVTTIMEMASKMKDTGFIVFAVLLLVSCLILIFVIAPRYGQRNILIYIIICSVIGAFSVAAVKGLGITIKNFFQGLPVVRHPLPYILSLILALSLSTQVNFLNRALDIFNTSLVFPIYYVFFTTVVVTSSIILFKEWYSMSAVDIAGTLSGFVTIILGVFMLHAFKDLDISCASLPHMHKNPPPSPAPEPTVIRLEDKNVLVDNIELASTSSPEEKPKVFIIHS

SEQ ID NO: 55780 - protein, 447 aa, Homo sapiens
MPGDSSPGTLPLWDASLSPPLGPDPGGFSRASHAGDKSRPPAPELGSPGAVRPRVGSCAPGPMELRVSNTSCENGSLLHLYCSSQEVLCQIVNDLSPEVPSNATFHSWQERIRQNYGFYIGLGLAFLSSFLIGSSVILKKKGLLRLVATGATRAVAAGEVANFGAYAFAPATVVTPLGALSVLISAILSSYFLRESLNLLGKLGCVICVAGSTVMVIHAPEEEKVTTIMEMASKMKDTGFIVFAVLLLVSCLILIFVIAPRYGQRNILIYIIICSVIGAFSVAAVKGLGITIKNFFQGLPVVRHPLPYILSLILALSLSTQVNFLNRALDIFNTSLVFPIYYVFFTTVVVTSSIILFKEWYSMSAVDIAGTLSGFVTIILGVFMLHAFKDLDISCASLPHMHKNPPPSPAPEPTVIRLEDKNVLVDNIELASTSSPEEKPKVFIIHS

SEQ ID NO: 55781 - protein, 2804 aa, Homo sapiens
MNGDMPHVPITTLAGIASLTDLLNQLPLPSPLPATTTKSLLFNARIAEEVNCLLACRDDNLVSQLVHSLNQVSTDHIELKDNLGSDDPEGDIPVLLQAVLARSPNVFREKSMQNRYVQSGMMMSQYKLSQNSMHSSPASSNYQQTTISHSPSSRFVPPQTSSGNRFMPQQNSPVPSPYAPQSPAGYMPYSHPSSYTTHPQMQQASVSSPIVAGGLRNIHDNKVSGPLSGNSANHHADNPRHGSSEDYLHMVHRLSSDDGDSSTMRNAASFPLRSPQPVCSPAGSEGTPKGSRPPLILQSQSLPCSSPRDVPPDILLDSPERKQKKQKKMKLGKDEKEQSEKAAMYDIISSPSKDSTKLTLRLSRVRSSDMDQQEDMISGVENSNVSENDIPFNVQYPGQTSKTPITPQDINRPLNAAQCLSQQEQTAFLPANQVPVLQQNTSVAAKQPQTSVVQNQQQISQQGPIYDEVELDALAEIERIERESAIERERFSKEVQDKDKPLKKRKQDSYPQEAGGATGGNRPASQETGSTGNGSRPALMVSIDLHQAGRVDSQASITQDSDSIKKPEEIKQCNDAPVSVLQEDIVGSLKSTPENHPETPKKKSDPELSKSEMKQSESRLAESKPNENRLVETKSSENKLETKVETQTEELKQNESRTTECKQNESTIVEPKQNENRLSDTKPNDNKQNNGRSETTKSRPETPKQKGESRPETPKQKSDGHPETPKQKGDGRPETPKQKGESRPETPKQKNEGRPETPKHRHDNRRDSGKPSTEKKPEVSKHKQDTKSDSPRLKSERAEALKQRPDGRSVSESLRRDHDNKQKSDDRGESERHRGDQSRVRRPETLRSSSRNEHGIKSDSSKTDKLERKHRHESGDSRERPSSGEQKSRPDSPRVKQGDSNKSRSDKLGFKSPTSKDDKRTEGNKSKVDTNKAHPDNKAEFPSYLLGGRSGALKNFVIPKIKRDKDGNVTQETKKMEMKGEPKDKVEKIGLVEDLNKGAKPVVVLQKLSLDDVQKLIKDREDKSRSSLKPIKNKPSKSNKGSIDQSVLKELPPELLAEIESTMPLCERVKMNKRKRSTVNEKPKYAEISSDEDNDSDEAFESSRKRHKKDDDKAWEYEERDRRSSGDHRRSGHSHEGRRSSGGGRYRNRSPSDSDMEDYSPPPSLSEVARKMKKKEKQKKRKAYEPKLTPEEMMDSSTFKRFTASIENILDNLEDMDFTAFGDDDEIPQELLLGKHQLNELGSESAKIKAMGIMDKLSTDKTVKVLNILEKNIQDGSKLSTLLNHNNDTEEEERLWRDLIMERVTKSADACLTTINIMTSPNMPKAVYIEDVIERVIQYTKFHLQNTLYPQYDPVYRLDPHGGGLLSSKAKRAKCSTHKQRVIVMLYNKVCDIVSSLSELLEIQLLTDTTILQVSSMGITPFFVENVSELQLCAIKLVTAVFSRYEKHRQLILEEIFTSLARLPTSKRSLRNFRLNSSDMDGEPMYIQMVTALVLQLIQCVVHLPSSEKDSNAEEDSNKKIDQDVVITNSYETAMRTAQNFLSIFLKKCGSKQGEEDYRPLFENFVQDLLSTVNKPEWPAAELLLSLLGRLLVHQFSNKSTEMALRVASLDYLGTVAARLRKDAVTSKMDQGSIERILKQVSGGEDEIQQLQKALLDYLDENTETDPSLVFSRKFYIAQWFRDTTLETEKAMKSQKDEESSEGTHHAKEIETTGQIMHRAENRKKFLRSIIKTTPSQFSTLKMNSDTVDYDDACLIVRYLASMRPFAQSFDIYLTQILRVLGENAIAVRTKAMKCLSEVVAVDPSILARLDMQRGVHGRLMDNSTSVREAAVELLGRFVLCRPQLAEQYYDMLIERILDTGISVRKRVIKILRDICIEQPTFPKITEMCVKMIRRVNDEEGIKKLVNETFQKLWFTPTPHNDKEAMTRKILNITDVVAACRDTGYDWFEQLLQNLLKSEEDSSYKPVKKACTQLVDNLVEHILKYEESLADSDNKGVNSGRLVACITTLFLFSKIRPQLMVKHAMTMQPYLTTKCSTQNDFMVICNVAKILELVVPLMEHPSETFLATIEEDLMKLIIKYGMTVVQHCVSCLGAVVNKVTQNFKFVWACFNRYYGAISKLKSQHQEDPNNTSLLTNKPALLRSLFTVGALCRHFDFDLEDFKGNSKVNIKDKVLELLMYFTKHSDEEVQTKAIIGLGFAFIQHPSLMFEQEVKNLYNNILSDKNSSVNLKIQVLKNLQTYLQEEDTRMQQADRDWKKVAKQEDLKEMGDVSSGMSSSIMQLYLKQVLEAFFHTQSSVRHFALNVIALTLNQGLIHPVQCVPYLIAMGTDPEPAMRNKADQQLVEIDKKYAGFIHMKAVAGMKMSYQVQQAINTCLKDPVRGFRQDESSSALCSHLYSMIRGNRQHRRAFLISLLNLFDDTAKTDVTMLLYIADNLACFPYQTQEEPLFIMHHIDITLSVSGSNLLQSFKESMVKDKRKERKSSPSKENESSDSEEEVSRPRKSRKRVDSDSDSDSEDDINSVMKCLPENSAPLIEFANVSQGILLLLMLKQHLKNLCGFSDSKIQKYSPSESAKVYDKAINRKTGVHFHPKQTLDFLRSDMANSKITEEVKRSIVKQYLDFKLLMEHLDPDEEEEEGEVSASTNARNKAITSLLGGGSPKNNTAAETEDDESDGEDRGGGTSGSLRRSKRNSDSTELAAQMNESVDVMDVIAICCPKYKDRPQIARVVQKTSSGFSVQWMAGSYSGSWTEAKRRDGRKLVPWVDTIKESDIIYKKIALTSANKLTNKVVQTLRSLYAAKDGTSS

SEQ ID NO: 55782 - protein, 2697 aa, Homo sapiens
MNGDMPHVPITTLAGIASLTDLLNQLPLPSPLPATTTKSLLFNARIAEEVNCLLACRDDNLVSQLVHSLNQVSTDHIELKDNLGSDDPEGDIPVLLQAVLARSPNVFREKSMQNRYVQSGMMMSQYKLSQNSMHSSPASSNYQQTTISHSPSSRFVPPQTSSGNRFMPQQNSPVPSPYAPQSPAGYMPYSHPSSYTTHPQMQQASVSSPIVAGGLRNIHDNKVSGPLSGNSANHHADNPRHGSSEDYLHMVHRLSSDDGDSSTMRNAASFPLRSPQPVCSPAGSEGTPKGSRPPLILQSQSLPCSSPRDVPPDILLDSPERKQKKQKKMKLGKDEKEQSEKAAMYDIISSPSKDSTKLTLRLSRVRSSDMDQQEDMISGVENSNVSENDIPFNVQYPGQTSKTPITPQDINRPLNAAQCLSQQEQTAFLPANQVPVLQQNTSVAAKQPQTSVVQNQQQISQQGPIYDEVELDALAEIERIERESAIERERFSKEVQDKDKPLKKRKQDSYPQEAGGATGGNRPASQETGSTGNGSRPALMVSIDLHQAGRVDSQASITQDSDSIKKPEEIKQCNDAPVSVLQEDIVGSLKSTPENHPETPKKKSDPELSKSEMKQSESRLAESKPNENRLVETKSSENKLETKVETQTEELKQNESRTTECKQNESTIVEPKQNENRLSDTKPNDNKQNNGRSETTKSRPETPKQKGESRPETPKQKSDGHPETPKQKGDGRPETPKQKGESRPETPKQKNEGRPETPKHRHDNRRDSGKPSTEKKPEVSKHKQDTKSDSPRLKSERAEALKQRPDGRSVSESLRRDHDNKQKSDDRGESERHRGDQSRVRRPETLRSSSRNEHGIKSDSSKTDKLERKHRHESGDSRERPSSGEQKSRPDSPRVKQGDSNKSRSDKLGFKSPTSKDDKRTEGNKSKVDTNKAHPDNKAEFPSYLLGGRSGALKNFVIPKIKRDKDGNVTQETKKMEMKGEPKDKVEKIGLVEDLNKGAKPVVVLQKLSLDDVQKLIKDREDKSRSSLKPIKNKPSKSNKGSIDQSVLKELPPELLAEIESTMPLCERVKMNKRKRSTVNEKPKYAEISSDEDNDSDEAFESSRKRHKKDDDKAWEYEERDRRSSGDHRRSGHSHEGRRSSGGGRYRNRSPSDSDMEDYSPPPSLSEVARKMKKKEKQKKRKAYEPKLTPEEMMDSSTFKRFTASIENILDNLEDMDFTAFGDDDEIPQELLLGKHQLNELGSESAKIKAMGIMDKLSTDKTVKVLNILEKNIQDGSKLSTLLNHNNDTEEEERLWRDLIMERVTKSADACLTTINIMTSPNMPKAVYIEDVIERVIQYTKFHLQNTLYPQYDPVYRLDPHGGGLLSSKAKRAKCSTHKQRVIVMLYNKVCDIVSSLSELLEIQLLTDTTILQVSSMGITPFFVENVSELQLCAIKLVTAVFSRYEKHRQLILEEIFTSLARLPTSKRSLRNFRLNSSDMDGEPMYIQMVTALVLQLIQCVVHLPSSEKDSNAEEDSNKKIDQDVVITNSYETAMRTAQNFLSIFLKKCGSKQGEEDYRPLFENFVQDLLSTVNKPEWPAAELLLSLLGRLLVHQFSNKSTEMALRVASLDYLGTVAARLRKDAVTSKMDQGSIERILKQVSGGEDEIQQLQKALLDYLDENTETDPSLVFSRKFYIAQWFRDTTLETEKAMKSQKDEESSEGTHHAKEIETTGQIMHRAENRKKFLRSIIKTTPSQFSTLKMNSDTVDYDDACLIVRYLASMRPFAQSFDIYLTQILRVLGENAIAVRTKAMKCLSEVVAVDPSILARLDMQRGVHGRLMDNSTSVREAAVELLGRFVLCRPQLAEQYYDMLIERILDTGISVRKRVIKILRDICIEQPTFPKITEMCVKMIRRVNDEEGIKKLVNETFQKLWFTPTPHNDKEAMTRKILNITDVVAACRDTGYDWFEQLLQNLLKSEEDSSYKPVKKACTQLVDNLVEHILKYEESLADSDNKGVNSGRLVACITTLFLFSKIRPQLMVKHAMTMQPYLTTKCSTQNDFMVICNVAKILELVVPLMEHPSETFLATIEEDLMKLIIKYGMTVVQHCVSCLGAVVNKVTQNFKFVWACFNRYYGAISKLKSQHQEDPNNTSLLTNKPALLRSLFTVGALCRHFDFDLEDFKGNSKVNIKDKVLELLMYFTKHSDEEVQTKAIIGLGFAFIQHPSLMFEQEVKNLYNNILSDKNSSVNLKIQVLKNLQTYLQEEDTRMQQADRDWKKVAKQEDLKEMGDVSSGMSSSIMQLYLKQVLEAFFHTQSSVRHFALNVIALTLNQGLIHPVQCVPYLIAMGTDPEPAMRNKADQQLVEIDKKYAGFIHMKAVAGMKMSYQVQQAINTCLKDPVRGFRQDESSSALCSHLYSMIRGNRQHRRAFLISLLNLFDDTAKTDVTMLLYIADNLACFPYQTQEEPLFIMHHIDITLSVSGSNLLQSFKESMVKDKRKERKSSPSKENESSDSEEEVSRPRKSRKRVDSDSDSDSEDDINSVMKCLPENSAPLIEFANVSQGILLLLMLKQHLKNLCGFSDSKIQKYSPSESAKVYDKAINRKTGVHFHPKQTLDFLRSDMANSKITEEVKRSIVKQYLDFKLLMEHLDPDEEEEEGEVSASTNARNKAITSLLGGGSPKNNTAAETEDDESDGEDRGGGTSGVRRRRSQRISQRIT

SEQ ID NO: 55783 - protein, 284 aa, Homo sapiens
MAPRLCSISVTARRLLGGPGPRAGDVASAAAARFYSKDNEGSWFRSLFVHKVDPRKDAHSTLLSKKETSNLYKIQFHNVKPEYLDAYNSLTEAVLPKLHLDEDYPCSLVGNWNTWYGEQDQAVHLWRFSGGYPALMDCMNKLKNNKEYLEFRRERSQMLLSRRNQLLLEFSFWNEPQPRMGPNIYELRTYKLKPGTMIEWGNNWARAIKYRQENQEAVGGFFSQIGELYVVHHLWAYKDLQSREETRNAAWRKRGWDENVYYTVPLVRHMESRIMIPLKISPLQ

SEQ ID NO: 55784 - protein, 1434 aa, Homo sapiens
MEDHMFGVQQIQPNVISVRLFKRKVGGLGFLVKERVSKPPVIISDLIRGGAAEQSGLIQAGDIILAVNGRPLVDLSYDSALEVLRGIASETHVVLILRGPEGFTTHLETTFTGDGTPKTIRVTQPLGPPTKAVDLSHQPPAGKEQPLAVDGASGPGNGPQHAYDDGQEAGSLPHANGLAPRPPGQDPAKKATRVSLQGRGENNELLKEIEPVLSLLTSGSRGVKGGAPAKAEMKDMGIQVDRDLDGKSHKPLPLGVENDRVFNDLWGKGNVPVVLNNPYSEKEQPPTSGKQSPTKNGSPSKCPRFLKVKNWETEVVLTDTLHLKSTLETGCTEYICMGSIMHPSQHARRPEDVRTKGQLFPLAKEFIDQYYSSIKRFGSKAHMERLEEVNKEIDTTSTYQLKDTELIYGAKHAWRNASRCVGRIQWSKLQVFDARDCTTAHGMFNYICNHVKYATNKGNLRSAITIFPQRTDGKHDFRVWNSQLIRYAGYKQPDGSTLGDPANVQFTEICIQQGWKPPRGRFDVLPLLLQANGNDPELFQIPPELVLEVPIRHPKFEWFKDLGLKWYGLPAVSNMLLEIGGLEFSACPFSGWYMGTEIGVRDYCDNSRYNILEEVAKKMNLDMRKTSSLWKDQALVEINIAVLYSFQSDKVTIVDHHSATESFIKHMENEYRCRGGCPADWVWIVPPMSGSITPVFHQEMLNYRLTPSFEYQPDPWNTHVWKGTNGTPTKRRAIGFKKLAEAVKFSAKLMGQAMAKRVKATILYATETGKSQAYAKTLCEIFKHAFDAKVMSMEEYDIVHLEHETLVLVVTSTFGNGDPPENGEKFGCALMEMRHPNSVQEERKSYKVRFNSVSSYSDSQKSSGDGPDLRDNFESAGPLANVRFSVFGLGSRAYPHFCAFGHAVDTLLEELGGERILKMREGDELCGQEEAFRTWAKKVFKAACDVFCVGDDVNIEKANNSLISNDRSWKRNKFRLTFVAEAPELTQGLSNVHKKRVSAARLLSRQNLQSPKSSRSTIFVRLHTNGSQELQYQPGDHLGVFPGNHEDLVNALIERLEDAPPVNQMVKVELLEERNTALGVISNWTDELRLPPCTIFQAFKYYLDITTPPTPLQLQQFASLATSEKEKQRLLVLSKGLQEYEEWKWGKNPTIVEVLEEFPSIQMPATLLLTQLSLLQPRYYSISSSPDMYPDEVHLTVAIVSYRTRDGEGPIHHGVCSSWLNRIQADELVPCFVRGAPSFHLPRNPQVPCILVGPGTGIAPFRSFWQQRQFDIQHKGMNPCPMVLVFGCRQSKIDHIYREETLQAKNKGVFRELYTAYSREPDKPKKYVQDILQEQLAESVYRALKEQGGHIYVCGDVTMAADVLKAIQRIMTQQGKLSAEDAGVFISRMRDDNRYHEDIFGVTLRTYEVTNRLRSESIAFIEESKKDTDEVFSS

SEQ ID NO: 55785 - protein, 1468 aa, Homo sapiens
MEDHMFGVQQIQPNVISVRLFKRKVGGLGFLVKERVSKPPVIISDLIRGGAAEQSGLIQAGDIILAVNGRPLVDLSYDSALEVLRGIASETHVVLILRGPEGFTTHLETTFTGDGTPKTIRVTQPLGPPTKAVDLSHQPPAGKEQPLAVDGASGPGNGPQHAYDDGQEAGSLPHANGLAPRPPGQDPAKKATRVSLQGRGENNELLKEIEPVLSLLTSGSRGVKGGAPAKAEMKDMGIQVDRDLDGKSHKPLPLGVENDRVFNDLWGKGNVPVVLNNPYSEKEQPPTSGKQSPTKNGSPSKCPRFLKVKNWETEVVLTDTLHLKSTLETGCTEYICMGSIMHPSQHARRPEDVRTKGQLFPLAKEFIDQYYSSIKRFGSKAHMERLEEVNKEIDTTSTYQLKDTELIYGAKHAWRNASRCVGRIQWSKLQVFDARDCTTAHGMFNYICNHVKYATNKGNLRSAITIFPQRTDGKHDFRVWNSQLIRYAGYKQPDGSTLGDPANVQFTEICIQQGWKPPRGRFDVLPLLLQANGNDPELFQIPPELVLEVPIRHPKFEWFKDLGLKWYGLPAVSNMLLEIGGLEFSACPFSGWYMGTEIGVRDYCDNSRYNILEEVAKKMNLDMRKTSSLWKDQALVEINIAVLYSFQSDKVTIVDHHSATESFIKHMENEYRCRGGCPADWVWIVPPMSGSITPVFHQEMLNYRLTPSFEYQPDPWNTHVWKGTNGTPTKRRAIGFKKLAEAVKFSAKLMGQAMAKRVKATILYATETGKSQAYAKTLCEIFKHAFDAKVMSMEEYDIVHLEHETLVLVVTSTFGNGDPPENGEKFGCALMEMRHPNSVQEERKYPEPLRFFPRKGPPLPNGDTEVHGLAAARDSQHRSYKVRFNSVSSYSDSQKSSGDGPDLRDNFESAGPLANVRFSVFGLGSRAYPHFCAFGHAVDTLLEELGGERILKMREGDELCGQEEAFRTWAKKVFKAACDVFCVGDDVNIEKANNSLISNDRSWKRNKFRLTFVAEAPELTQGLSNVHKKRVSAARLLSRQNLQSPKSSRSTIFVRLHTNGSQELQYQPGDHLGVFPGNHEDLVNALIERLEDAPPVNQMVKVELLEERNTALGVISNWTDELRLPPCTIFQAFKYYLDITTPPTPLQLQQFASLATSEKEKQRLLVLSKGLQEYEEWKWGKNPTIVEVLEEFPSIQMPATLLLTQLSLLQPRYYSISSSPDMYPDEVHLTVAIVSYRTRDGEGPIHHGVCSSWLNRIQADELVPCFVRGAPSFHLPRNPQVPCILVGPGTGIAPFRSFWQQRQFDIQHKGMNPCPMVLVFGCRQSKIDHIYREETLQAKNKGVFRELYTAYSREPDKPKKYVQDILQEQLAESVYRALKEQGGHIYVCGDVTMAADVLKAIQRIMTQQGKLSAEDAGVFISRMRDDNRYHEDIFGVTLRTYEVTNRLRSESIAFIEESKKDTDEVFSS

SEQ ID NO: 55786 - protein, 407 aa, Homo sapiens
MEDHMFGVQQIQPNVISVRLFKRKVGGLGFLVKERVSKPPVIISDLIRGGAAEQSGLIQAGDIILAVNGRPLVDLSYDSALEVLRGIASETHVVLILRGPEGFTTHLETTFTGDGTPKTIRVTQPLGPPTKAVDLSHQPPAGKEQPLAVDGASGPGNGPQHAYDDGQEAGSLPHANGLAPRPPGQDPAKKATRVSLQGRGENNELLKEIEPVLSLLTSGSRGVKGGAPAKAEMKDMGIQVDRDLDGKSHKPLPLGVENDRVFNDLWGKGNVPVVLNNPYSEKEQMRKLRITEGFGAQRGSHNHPPPQENSPPQRMAAPPSVHASSRSRTGRLRWFSLTPSTLRAHWKRDALSTSAWAPSCILLSMQGGLKTSAQKDSSSLSPKSLLINTIHQLKDLAPKPTWKGWKR

SEQ ID NO: 55787 - protein, 1330 aa, Homo sapiens
MEDHMFGVQQIQPNVISVRLFKRKVGGLGFLVKERVSKPPVIISDLIRGGAAEQSGLIQAGDIILAVNGRPLVDLSYDSALEVLRGIASETHVVLILRGPEGFTTHLETTFTGDGTPKTIRVTQPLGPPTKAVDLSHQPPAGKEQPLAVDGASGPGNGPQHAYDDGQEAGSLPHANGLAPRPPGQDPAKKATRVSLQGRGENNELLKEIEPVLSLLTSGSRGVKGGAPAKAEMKDMGIQVDRDLDGKSHKPLPLGVENDRVFNDLWGKGNVPVVLNNPYSEKEQPPTSGKQSPTKNGSPSKCPRFLKVKNWETEVVLTDTLHLKSTLETGCTEYICMGSIMHPSQHARRPEDVRTKGQLFPLAKEFIDQYYSSIKRFGSKAHMERLEEVNKEIDTTSTYQLKDTELIYGAKHAWRNASRCVGRIQWSKLQVFDARDCTTAHGMFNYICNHVKYATNKGNLRSAITIFPQRTDGKHDFRVWNSQLIRYAGYKQPDGSTLGDPANVQFTEEVAKKMNLDMRKTSSLWKDQALVEINIAVLYSFQSDKVTIVDHHSATESFIKHMENEYRCRGGCPADWVWIVPPMSGSITPVFHQEMLNYRLTPSFEYQPDPWNTHVWKGTNGTPTKRRAIGFKKLAEAVKFSAKLMGQAMAKRVKATILYATETGKSQAYAKTLCEIFKHAFDAKVMSMEEYDIVHLEHETLVLVVTSTFGNGDPPENGEKFGCALMEMRHPNSVQEERKSYKVRFNSVSSYSDSQKSSGDGPDLRDNFESAGPLANVRFSVFGLGSRAYPHFCAFGHAVDTLLEELGGERILKMREGDELCGQEEAFRTWAKKVFKAACDVFCVGDDVNIEKANNSLISNDRSWKRNKFRLTFVAEAPELTQGLSNVHKKRVSAARLLSRQNLQSPKSSRSTIFVRLHTNGSQELQYQPGDHLGVFPGNHEDLVNALIERLEDAPPVNQMVKVELLEERNTALGVISNWTDELRLPPCTIFQAFKYYLDITTPPTPLQLQQFASLATSEKEKQRLLVLSKGLQEYEEWKWGKNPTIVEVLEEFPSIQMPATLLLTQLSLLQPRYYSISSSPDMYPDEVHLTVAIVSYRTRDGEGPIHHGVCSSWLNRIQADELVPCFVRGAPSFHLPRNPQVPCILVGPGTGIAPFRSFWQQRQFDIQHKGMNPCPMVLVFGCRQSKIDHIYREETLQAKNKGVFRELYTAYSREPDKPKKYVQDILQEQLAESVYRALKEQGGHIYVCGDVTMAADVLKAIQRIMTQQGKLSAEDAGVFISRMRDDNRYHEDIFGVTLRTYEVTNRLRSESIAFIEESKKDTDDQVFKT

SEQ ID NO: 55788 - protein, 1206 aa, Homo sapiens
MEDHMFGVQQIQPNVISVRLFKRKVGGLGFLVKERVSKPPVIISDLIRGGAAEQSGLIQAGDIILAVNGRPLVDLSYDSALEVLRGIASETHVVLILRGPEGFTTHLETTFTGDGTPKTIRVTQPLGPPTKAVDLSHQPPAGKEQPLAVDGASGPGNGPQHAYDDGQEAGSLPHANGLAPRPPGQDPAKKATRVSLQGRGENNELLKEIEPVLSLLTSGSRGVKGGAPAKAEMKDMGIQVDRDLDGKSHKPLPLGVENDRVFNDLWGKGNVPVVLNNPYSEKEQPPTSGKQSPTKNGSPSKCPRFLKVKNWETEVVLTDTLHLKSTLETGCTEYICMGSIMHPSQHARRPEDVRTKGQLFPLAKEFIDQYYSSIKRFGSKAHMERLEEVNKEIDTTSTYQLKDTELIYGAKHAWRNASRCVGRIQWSKLQVFDARDCTTAHGMFNYICNHVKYATNKGNLRSAITIFPQRTDGKHDFRVWNSQLIRYAGYKQPDGSTLGDPANVQFTEICIQQGWKPPRGRFDVLPLLLQANGNDPELFQIPPELVLEVPIRHPKFEWFKDLGLKWYGLPAVSNMLLEIGGLEFSACPFSGWYMGTEIGVRDYCDNSRYNILEEVAKKMNLDMRKTSSLWKDQALVEINIAVLYSFQSDKVTIVDHHSATESFIKHMENEYRCRGGCPADWVWIVPPMSGSITPVFHQEMLNYRLTPSFEYQPDPWNTHVWKGTNGTPTKRRAIGFKKLAEAVKFSAKLMGQAMAKRVKATILYATETGKSQAYAKTLCEIFKHAFDAKVMSMEEYDIVHLEHETLVLVVTSTFGNGDPPENGEKFGCALMEMRHPNSVQEERKSYKVRFNSVSSYSDSQKSSGDGPDLRDNFESAGPLANVRFSVFGLGSRAYPHFCAFGHAVDTLLEELGGERILKMREGDELCGQEEAFRTWAKKVFKAACDVFCVGDDVNIEKANNSLISNDRSWKRNKFRLTFVAEAPELTQGLSNVHKKRVSAARLLSRQNLQSPKSSRSTIFVRLHTNGSQELQYQPGDHLGVFPGNHEDLVNALIERLEDAPPVNQMVKVELLEERNTALGVISNWTDELRLPPCTIFQAFKYYLDITTPPTPLQLQQFASLATSEKEKQRLLVLSKGLQEYEEWKWGKNPTIVEVLEEFPSIQMPATLLLTQLSLLQPRYYSISSSPHTHTLSETRPSPLPLSSQCC

SEQ ID NO: 55789 - protein, 67 aa, Homo sapiens
HPNSVQEERKYPEPLRFFPRKGPPLPNGDTEVHGLAAARDSQHRSYKVRFNSVSSYSDSQKSSGDGP

SEQ ID NO: 55790 - protein, 506 aa, Homo sapiens
MPSKTKYNLVDDGHDLRIPLHNEDAFQHGICFEAKYVGSLDVPRPNSRVEIVAAMRRIRYEFKAKNIKKKKVSIMVSVDGVKVILKKKKKLLLLQKKEWTWDESKMLVMQDPIYRIFYVSHDSQDLKIFSYIARDGASNIFRCNVFKSKKKSQAMRIVRTVGQAFEVCHKLSLQHTQQNADGQEDGESERNSNSSGDPGRQLTGAERASTATAEETDIDAVEVPLPGNDVLEFSRGVTDLDAVGKEGGSHTGSKVSHPQEPMLTASPRMLLPSSSSKPPGLGTETPLSTHHQMQLLQQLLQQQQQQTQVAVAQVHLLKDQLAAEAAARLEAQARVHQLLLQNKDMLQHISLLVKQVQELELKLSGQNAMGSQDSLLEITFRSGALPVLCDPTTPKPEDLHSPPLGAGLADFAHPAGSPLGRRDCLVKLECFRFLPPEDTPPPAQGEALLGGLELIKFRESGIASEYESNTDESEERDSWSQEELPRLLNVLQRQELGDGLDDEIAV

SEQ ID NO: 55791 - protein, 211 aa, Homo sapiens
MSLSSLCPVFSAAASSLQVHLLKDQLAAEAAARLEAQARVHQLLLQNKDMLQHISLLVKQVQELELKLSGQNAMGSQDSLLEITFRSGALPVLCDPTTPKPEDLHSPPLGAGLADFAHPAGSPLGRRDCLVKLECFRFLPPEDTPPPAQGEALLGGLELIKFRESGIASEYESNTDESEERDSWSQEELPRLLNVLQRQELGDGLDDEIAV

SEQ ID NO: 55792 - protein, 501 aa, Homo sapiens
MPSKTKYNLVDDGHDLRIPLHNEDAFQHGICFEAKYVGSLDVPRPNSRVEIVAAMRRIRYEFKAKNIKKKKVSIMVSVDGVKVILKKKKKKKEWTWDESKMLVMQDPIYRIFYVSHDSQDLKIFSYIARDGASNIFRCNVFKSKKKSQAMRIVRTVGQAFEVCHKLSLQHTQQNADGQEDGESERNSNSSGDPGRQLTGAERASTATAEETDIDAVEVPLPGNDVLEFSRGVTDLDAVGKEGGSHTGSKVSHPQEPMLTASPRMLLPSSSSKPPGLGTETPLSTHHQMQLLQQLLQQQQQQTQVAVAQVHLLKDQLAAEAAARLEAQARVHQLLLQNKDMLQHISLLVKQVQELELKLSGQNAMGSQDSLLEITFRSGALPVLCDPTTPKPEDLHSPPLGAGLADFAHPAGSPLGRRDCLVKLECFRFLPPEDTPPPAQGEALLGGLELIKFRESGIASEYESNTDESEERDSWSQEELPRLLNVLQRQELGDGLDDEIAV

SEQ ID NO: 55793 - protein, 729 aa, Homo sapiens
MACPWKFLFKTKFHQYAMNGEKDINNNVEKAPCATSSPVTQDDLQYHNLSKQQNESPQPLVETGKKSPESLVKLDATPLSSPRHVRIKNWGSGMTFQDTLHHKAKGILTCRSKSCLGSIMTPKSLTRGPRDKPTPPDELLPQAIEFVNQYYGSFKEAKIEEHLARVEAVTKEIETTGTYQLTGDELIFATKQAWRNAPRCIGRIQWSNLQVFDARSCSTAREMFEHICRHVRYSTNNGNIRSAITVFPQRSDGKHDFRVWNAQLIRYAGYQMPDGSIRGDPANVEFTQLCIDLGWKPKYGRFDVVPLVLQANGRDPELFEIPPDLVLEVAMEHPKYEWFRELELKWYALPAVANMLLEVGGLEFPGCPFNGWYMGTEIGVRDFCDVQRYNILEEVGRRMGLETHKLASLWKDQAVVEINIAVLHSFQKQNVTIMDHHSAAESFMKYMQNEYRSRGGCPADWIWLVPPMSGSITPVFHQEMLNYVLSPFYYYQVEAWKTHVWQDEKRRPKRREIPLKVLVKAVLFACMLMRKTMASRVRVTILFATETGKSEALAWDLGALFSCAFNPKKLKKSLFMLKELNNKFRYAVFGLGSSMYPRFCAFAHDIDQKLSHLGASQLTPMGEGDELSGQEDAFRSWAVQTFKAACETFDVRGKQHIQIPKLYTSNVTWDPHHYRLVQDSQPLPAASTSPRIPPILASSSGLAQASRPSAVSGSNGSMTPSTRECGEAA

SEQ ID NO: 55794 - protein, 1153 aa, Homo sapiens
MACPWKFLFKTKFHQYAMNGEKDINNNVEKAPCATSSPVTQDDLQYHNLSKQQNESPQPLVETGKKSPESLVKLDATPLSSPRHVRIKNWGSGMTFQDTLHHKAKGILTCRSKSCLGSIMTPKSLTRGPRDKPTPPDELLPQAIEFVNQYYGSFKEAKIEEHLARVEAVTKEIETTGTYQLTGDELIFATKQAWRNAPRCIGRIQWSNLQVFDARSCSTAREMFEHICRHVRYSTNNGNIRSAITVFPQRSDGKHDFRVWNAQLIRYAGYQMPDGSIRGDPANVEFTQLCIDLGWKPKYGRFDVVPLVLQANGRDPELFEIPPDLVLEVAMEHPKYEWFRELELKWYALPAVANMLLEVGGLEFPGCPFNGWYMGTEIGVRDFCDVQRYNILEEVGRRMGLETHKLASLWKDQAVVEINIAVLHSFQKQNVTIMDHHSAAESFMKYMQNEYRSRGGCPADWIWLVPPMSGSITPVFHQEMLNYVLSPFYYYQVEAWKTHVWQDEKRRPKRREIPLKVLVKAVLFACMLMRKTMASRVRVTILFATETGKSEALAWDLGALFSCAFNPKVVCMDKYRLSCLEEERLLLVVTSTFGNGDCPGNGEKLKKSLFMLKELNNKFRYAVFGLGSSMYPRFCAFAHDIDQKLSHLGASQLTPMGEGDELSGQEDAFRSWAVQTFKAACETFDVRGKQHIQIPKLYTSNVTWDPHHYRLVQDSQPLDLSKALSSMHAKNVFTMRLKSRQNLQSPTSSRATILVELSCEDGQGLNYLPGEHLGVCPGNQPALVQGILERVVDGPTPHQTVRLEALDESGSYWVSDKRLPPCSLSQALTYFLDITTPPTQLLLQKLAQVATEEPERQRLEALCQPSEYSKWKFTNSPTFLEVLEEFPSLRVSAGFLLSQLPILKPRFYSISSSRDHTPTEIHLTVAVVTYHTRDGQGPLHHGVCSTWLNSLKPQDPVPCFVRNASGFHLPEDPSHPCILIGPGTGIAPFRSFWQQRLHDSQHKGVRGGRMTLVFGCRRPDEDHIYQEEMLEMAQKGVLHAVHTAYSRLPGKPKVYVQDILRQQLASEVLRVLHKEPGHLYVCGDVRMARDVAHTLKQLVAAKLKLNEEQVEDYFFQLKSQKRYHEDIFGAVFPYEAKKDRVAVQPSSLEMSAL

SEQ ID NO: 55795 - protein, 1114 aa, Homo sapiens
MACPWKFLFKTKFHQYAMNGEKDINNNVEKAPCATSSPVTQDDLQYHNLSKQQNESPQPLVETGKKSPESLVKLDATPLSSPRHVRIKNWGSGMTFQDTLHHKAKGILTCRSKSCLGSIMTPKSLTRGPRDKPTPPDELLPQAIEFVNQYYGSFKEAKIEEHLARVEAVTKEIETTGTYQLTGDELIFATKQAWRNAPRCIGRIQWSNLQVFDARSCSTAREMFEHICRHVRYSTNNGNIRSAITVFPQRSDGKHDFRVWNAQLCIDLGWKPNGRDPELFEIPPDLVLEVAMEHPKYEWFRELELKWYALPAVANMLLEVGGLEFPGCPFNGWYMGTEIGVRDFCDVQRYNILEEVGRRMGLETHKLASLWKDQAVVEINIAVLHSFQKQNVTIMDHHSAAESFMKYMQNEYRSRGGCPADWIWLVPPMSGSITPVFHQEMLNYVLSPFYYYQVEAWKTHVWQDEKRRPKRREIPLKVLVKAVLFACMLMRKTMASRVRVTILFATETGKSEALAWDLGALFSCAFNPKVVCMDKYRLSCLEEERLLLVVTSTFGNGDCPGNGEKLKKSLFMLKELNNKFRYAVFGLGSSMYPRFCAFAHDIDQKLSHLGASQLTPMGEGDELSGQEDAFRSWAVQTFKAACETFDVRGKQHIQIPKLYTSNVTWDPHHYRLVQDSQPLDLSKALSSMHAKNVFTMRLKSRQNLQSPTSSRATILVELSCEDGQGLNYLPGEHLGVCPGNQPALVQGILERVVDGPTPHQTVRLEALDESGSYWVSDKRLPPCSLSQALTYFLDITTPPTQLLLQKLAQVATEEPERQRLEALCQPSEYSKWKFTNSPTFLEVLEEFPSLRVSAGFLLSQLPILKPRFYSISSSRDHTPTEIHLTVAVVTYHTRDGQGPLHHGVCSTWLNSLKPQDPVPCFVRNASGFHLPEDPSHPCILIGPGTGIAPFRSFWQQRLHDSQHKGVRGGRMTLVFGCRRPDEDHIYQEEMLEMAQKGVLHAVHTAYSRLPGKPKVYVQDILRQQLASEVLRVLHKEPGHLYVCGDVRMARDVAHTLKQLVAAKLKLNEEQVEDYFFQLKSQKRYHEDIFGAVFPYEAKKDRVAVQPSSLEMSAL

SEQ ID NO: 55796 - protein, 1203 aa, Homo sapiens
MGNLKSVAQEPGPPCGLGLGLGLGLCGKQGPATPAPEPSRAPASLLPPAPEHSPPSSPLTQPPEGPKFPRVKNWEVGSITYDTLSAQAQQDGPCTPRRCLGSLVFPRKLQGRPSPGPPAPEQLLSQARDFINQYYSSIKRSGSQAHEQRLQEVEAEVAATGTYQLRESELVFGAKQAWRNAPRCVGRIQWGKLQVFDARDCRSAQEMFTYICNHIKYATNRGNLRSAITVFPQRCPGRGDFRIWNSQLVRYAGYRQQDGSVRGDPANVEITELCIQHGWTPGNGRFDVLPLLLQAPDDPPELFLLPPELVLEVPLEHPTLEWFAALGLRWYALPAVSNMLLEIGGLEFPAAPFSGWYMSTEIGTRNLCDPHRYNILEDVAVCMDLDTRTTSSLWKDKAAVEINVAVLHSYQLAKVTIVDHHAATASFMKHLENEQKARGGCPADWAWIVPPISGSLTPVFHQEMVNYFLSPAFRYQPDPWKGSAAKGTGITRKKTFKEVANAVKISASLMGTVMAKRVKATILYGSETGRAQSYAQQLGRLFRKAFDPRVLCMDEYDVVSLEHETLVLVVTSTFGNGDPPENGESFAAALMEMSGPYNSSPRPEQHKSYKIRFNSISCSDPLVSSWRRKRKESSNTDSAGALGTLRFCVFGLGSRAYPHFCAFARAVDTRLEELGGERLLQLGQGDELCGQEEAFRGWAQAAFQAACETFCVGEDAKAAARDIFSPKRSWKRQRYRLSAQAEGLQLLPGLIHVHRRKMFQATIRSVENLQSSKSTRATILVRLDTGGQEGLQYQPGDHIGVCPPNRPGLVEALLSRVEDPPAPTEPVAVEQLEKGSPGGPPPGWVRDPRLPPCTLRQALTFFLDITSPPSPQLLRLLSTLAEEPREQQELEALSQDPRRYEEWKWFRCPTLLEVLEQFPSVALPAPLLLTQLPLLQPRYYSVSSAPSTHPGEIHLTVAVLAYRTQDGLGPLHYGVCSTWLSQLKPGDPVPCFIRGAPSFRLPPDPSLPCILVGPGTGIAPFRGFWQERLHDIESKGLQPTPMTLVFGCRCSQLDHLYRDEVQNAQQRGVFGRVLTAFSREPDNPKTYVQDILRTELAAEVHRVLCLERGHMFVCGDVTMATNVLQTVQRILATEGDMELDEAGDVIGVLRDQQRYHEDIFGLTLRTQEVTSRIRTQSFSLQERQLRGAVPWAFDPPGSDTNSP

SEQ ID NO: 55797 - protein, 997 aa, Homo sapiens
MFTYICNHIKYATNRGNLRSAITVFPQRCPGRGDFRIWNSQLVRYAGYRQQDGSVRGDPANVEITELCIQHGWTPGNGRFDVLPLLLQAPDDPPELFLLPPELVLEVPLEHPTLEWFAALGLRWYALPAVSNMLLEIGGLEFPAAPFSGWYMSTEIGTRNLCDPHRYNILEDVAVCMDLDTRTTSSLWKDKAAVEINVAVLHSYQLAKVTIVDHHAATASFMKHLENEQKARGGCPADWAWIVPPISGSLTPVFHQEMVNYFLSPAFRYQPDPWKGSAAKGTGITRKKTFKEVANAVKISASLMGTVMAKRVKATILYGSETGRAQSYAQQLGRLFRKAFDPRVLCMDEYDVVSLEHETLVLVVTSTFGNGDPPENGESFAAALMEMSGPYNSSPRPEQHKSYKIRFNSISCSDPLVSSWRRKRKESSNTDSAGALGTLRFCVFGLGSRAYPHFCAFARAVDTRLEELGGERLLQLGQGDELCGQEEAFRGWAQAAFQAACETFCVGEDAKAAARDIFSPKRSWKRQRYRLSAQAEGLQLLPGLIHVHRRKMFQATIRSVENLQSSKSTRATILVRLDTGGQEGLQYQPGDHIGVCPPNRPGLVEALLSRVEDPPAPTEPVAVEQLEKGSPGGPPPGWVRDPRLPPCTLRQALTFFLDITSPPSPQLLRLLSTLAEEPREQQELEALSQDPRRYEEWKWFRCPTLLEVLEQFPSVALPAPLLLTQLPLLQPRYYSVSSAPSTHPGEIHLTVAVLAYRTQDGLGPLHYGVCSTWLSQLKPGDPVPCFIRGAPSFRLPPDPSLPCILVGPGTGIAPFRGFWQERLHDIESKGLQPTPMTLVFGCRCSQLDHLYRDEVQNAQQRGVFGRVLTAFSREPDNPKTYVQDILRTELAAEVHRVLCLERGHMFVCGDVTMATNVLQTVQRILATEGDMELDEAGDVIGVLRDQQRYHEDIFGLTLRTQEVTSRIRTQSFSLQERQLRGAVPWAFDPPGSDTNSP

SEQ ID NO: 55798 - protein, 506 aa, Homo sapiens
MRDPLTDCPYNKVYKNLKEFSQNGENFCKQVTSVLQQRANLEISYAKGLQKLASKLSKALQNTRKSCVSSAWAWASEGMKSTADLHQKLGKAIELEAIKPTYQVLNVQEKKRKSLDNEVEKTANLVISNWNQQIKAKKKLMVSTKKHEALFQLVESSKQSMTEKEKRKLLNKLTKSTEKLEKEDENYYQKNMAGYSTRLKWENTLENCYQSILELEKERIQLLCNNLNQYSQHISLFGQTLTTCHTQIHCAISKIDIEKDIQAVMEETAILSTENKSEFLLTDYFEEDPNSAMDKERRKSLLKPKLLRLQRDIEKASKDKEGLERMLKTYSSTSSFSDAKSQKDTAALMDENNLKLDLLEANSYKLSSMLAELEQRPQPSHPCSNSIFRWREKEHTHSYVKISRPFLMKRLENIVSKASSGGQSNPGSSTPAPGAAQLSSRLCKALYSFQARQDDELNLEKGDIVIIHEKKEGGWWFGSLNGKKGHFPAAYVEELPSNAGNTATKA

SEQ ID NO: 55799 - protein, 428 aa, Homo sapiens
MKSTADLHQKLGKAIELEAIKPTYQVLNVQEKKRKSLDNEVEKTANLVISNWNQQIKAKKKLMVSTKKHEALFQLVESSKQSMTEKEKRKLLNKLTKSTEKLEKEDENYYQKNMAGYSTRLKWENTLENCYQSILELEKERIQLLCNNLNQYSQHISLFGQTLTTCHTQIHCAISKIDIEKDIQAVMEETAILSTENKSEFLLTDYFEEDPNSAMDKERRKSLLKPKLLRLQRDIEKASKDKEGLERMLKTYSSTSSFSDAKSQKDTAALMDENNLKLDLLEANSYKLSSMLAELEQRPQPSHPCSNSIFRWREKEHTHSYVKISRPFLMKRLENIVSKASSGGQSNPGSSTPAPGAAQLSSRLCKALYSFQARQDDELNLEKGDIVIIHEKKEGGWWFGSLNGKKGHFPAAYVEELPSNAGNTATKA

SEQ ID NO: 55800 - protein, 563 aa, Homo sapiens
MRDPLTDCPYNKVYKNLKEFSQNGENFCKQVTSVLQQRANLEISYAKGLQKLASKLSKALQNTRKSCVSSAWAWASEGMKSTADLHQKLGKAIELEAIKPTYQVLNVQEKKRKSLDNEVEKTANLVISNWNQQIKAKKKLMVSTKKHEALFQLVESSKQSMTEKEKRKLLNKLTKSTEKLEKEDENYYQKNMAGYSTRLKWENTLENCYQVTHSICLYAFWVKRAWGKCVSDLRYQDTFLPGNLPPLWFGYDIVKRLIMRLCSVCLQSILELEKERIQLLCNNLNQYSQHISLFGQTLTTCHTQIHCAISKIDIEKDIQAVMEETAILSTENKSEFLLTDYFEEDPNSAMDKERRKSLLKPKLLRLQRDIEKASKDKEGLERMLKTYSSTSSFSDAKSQKDTAALMDENNLKLDLLEANSYKLSSMLAELEQRPQPSHPCSNSIFRWREKEHTHSYVKISRPFLMKRLENIVSKASSGGQSNPGSSTPAPGAAQLSSRLCKALYSFQARQDDELNLEKGDIVIIHEKKEGGWWFGSLNGKKGHFPAAYVEELPSNAGNTATKA

SEQ ID NO: 55801 - protein, 563 aa, Homo sapiens; identical to SEQ ID NO: 55800

SEQ ID NO: 55802 - protein, 312 aa, Homo sapiens
MTFGLRKRLSEERGFSLMPRAMAISSSSCELPLVAVCQVTSTPDKQQNFKTCAELVREAARLGACLAFLPEAFDFIARDPAETLHLSEPLGGKLLEEYTQLARECGLWLSLGGFHERGQDWEQTQKIYNCHVLLNSKGAVVATYRKTHLCDVEIPGQGPMCESNSTMPGPSLESPVSTPAGKIGLAVCYDMRFPELSLALAQAGAEILTYPSAFGSITGPAHWEVLLRARAIETQCYVVAAAQCGRHHEKRASYGHSMVVDPWGTVVARCSEGPGLCLARIDLNYLRQLRRHLPVFQHRRPDLYGNLGHPLS

SEQ ID NO: 55803 - protein, 243 aa, Homo sapiens
MLGFITRPPHRFLSLLCPGLRIPQLSVLCAQPRPRAMAISSSSCELPLVAVCQVTSTPDKQQNFKTCAELVREAARLGACLAFLPEAFDFIARDPAETLHLSEPLGGKLLEEYTQLARECGLWLSLGGFHERGQDWEQTQKIYNCHVLLNSKGAVVATYRKTHLCDVEIPGQGPMCESNSTMPGPSLESPVSTPAGKIGLAVCYDMRFPELSLALAQAGAEILTYPSAFGSITGPAHWEPVSS

SEQ ID NO: 55804 - protein, 327 aa, Homo sapiens
MLGFITRPPHRFLSLLCPGLRIPQLSVLCAQPRPRAMAISSSSCELPLVAVCQVTSTPDKQQNFKTCAELVREAARLGACLAFLPEAFDFIARDPAETLHLSEPLGGKLLEEYTQLARECGLWLSLGGFHERGQDWEQTQKIYNCHVLLNSKGAVVATYRKTHLCDVEIPGQGPMCESNSTMPGPSLESPVSTPAGKIGLAVCYDMRFPELSLALAQAGAEILTYPSAFGSITGPAHWEVLLRARAIETQCYVVAAAQCGRHHEKRASYGHSMVVDPWGTVVARCSEGPGLCLARIDLNYLRQLRRHLPVFQHRRPDLYGNLGHPLS

SEQ ID NO: 55805 - protein, 291 aa, Homo sapiens
MAISSSSCELPLVAVCQVTSTPDKQQNFKTCAELVREAARLGACLAFLPEAFDFIARDPAETLHLSEPLGGKLLEEYTQLARECGLWLSLGGFHERGQDWEQTQKIYNCHVLLNSKGAVVATYRKTHLCDVEIPGQGPMCESNSTMPGPSLESPVSTPAGKIGLAVCYDMRFPELSLALAQAGAEILTYPSAFGSITGPAHWEVLLRARAIETQCYVVAAAQCGRHHEKRASYGHSMVVDPWGTVVARCSEGPGLCLARIDLNYLRQLRRHLPVFQHRRPDLYGNLGHPLS

SEQ ID NO: 55806 - protein, 273 aa, Homo sapiens
MSLTNTKTGFSVKDILDLPDTNDEEGSVAEGPEEENEGPEPAKRAGPLGQGALDAVQSLPLKNPFYDSSDNPYTRWLASTEGLQYSLHGLAAGAPPQDSSSKSPEPSADESPDNDKETPGGGGDAGKKRKRRVLFSKAQTYELERRFRQQRYLSAPEREHLASLIRLTPTQVKIWFQNHRYKMKRARAEKGMEVTPLPSPRRVAVPVLVRDGKPCHALKAQDLAAATFQAGIPFSAYSAQSLQHMQYNAQYSSASTPQYPTAHPLVQAQQWTW

SEQ ID NO: 55807 - protein, 354 aa, Homo sapiens
MSLSPKHTTPFSVSDILSPIEETYKKFSGAMDGAPPGLGAPLGAAAAYRAPPPGPSSQAATVAGMQPSHAMAGHNAAAAAAAAAAAAAAAATYHMPPGVSQFPHGAMGSYCNGGLGNMGELPAYTDGMRGGAATGWYGANPDPRYSSISRFMGPSAGVNVAGMGSLTGIADAAKSLGPLHAAAAAAAPRRKRRVLFSQAQVYELERRFKQQKYLSAPEREHLASMIHLTPTQVKIWFQNHRYKMKRQAKDKAAQQLQQEGGLGPPPPPPPSPRRVAVPVLVKDGKPCQNGASTPTPGQAGPQPPAPTPAPELEELSPSPPALHGPGGGLAALDAAAGEYSGGVLGANLLYGRTW

SEQ ID NO: 55808 - protein, 324 aa, Homo sapiens
MFPSPALTPTPFSVKDILNLEQQQRSLAAAGELSARLEATLAPSSCMLAAFKPEAYAGPEAAAPGLPELRAELGRAPSPAKCASAFPAAPAFYPRAYSDPDPAKDPRAEKKELCALQKAVELEKTEADNAERPRARRRRKPRVLFSQAQVYELERRFKQQRYLSAPERDQLASVLKLTSTQVKIWFQNRRYKCKRQRQDQTLELVGLPPPPPPPARRIAVPVLVRDGKPCLGDSAPYAPAYGVGLNPYGYNAYPAYPGYGGAACSPGYSCTAAYPAGPSPAQPATAAANNNFVNFGVGDLNAVQSPGIPQSNSGVSTLHGIRAW

SEQ ID NO: 55809 - protein, 112 aa, Homo sapiens
MFPSPALTPTPFSVKDILNLEQQQRSLAAAGELSARLEATLAPSSCMLAAFKPEAYAGPEAAAPGLPELRAELGRAPSPAKCASAFPAAPAFYPRAYSDPDPAKDPRAEKKA

SEQ ID NO: 55810 - protein, 151 aa, Homo sapiens
MFPSPALTPTPFSVKDILNLEQQQRSLAAAGELSARLEATLAPSSCMLAAFKPEAYAGPEAAAPGLPELRAELGRAPSPAKCASAFPAAPAFYPRAYSDPDPAKDPRAEKKGCELPRGQRPPVLFSSALSQPDFLQMLSETCRWLPVHLAE

SEQ ID NO: 55811 - protein, 301 aa, Homo sapiens
MLLSPVTSTPFSVKDILRLERERSCPAASPHPRVRKSPENFQYLRMDAEPRGSEVHNAGGGGGDRKLDGSEPPGGPCEAVLEMDAERMGEPQPGLNAASPLGGGTRVPERGVGNSGDSVRGGRSEQPKARQRRKPRVLFSQAQVLALERRFKQQRYLSAPEREHLASALQLTSTQVKIWFQNRRYKCKRQRQDKSLELAGHPLTPRRVAVPVLVRDGKPCLGPGPGAPAFPSPYSAAVSPYSCYGGYSGAPYGAGYGTCYAGAPSGPAPHTPLASAGFGHGGQNATPQGHLAATLQGVRAW

SEQ ID NO: 55812 - protein, 219 aa, Homo sapiens
MDAERMGEPQPGLNAASPLGGGTRVPERGVGNSGDSVRGGRSEQPKARQRRKPRVLFSQAQVLALERRFKQQRYLSAPEREHLASALQLTSTQVKIWFQNRRYKCKRQRQDKSLELAGHPLTPRRVAVPVLVRDGKPCLGPGPGAPAFPSPYSAAVSPYSCYGGYSGAPYGAGYGTCYAGAPSGPAPHTPLASAGFGHGGQNATPQGHLAATLQGVRAW

SEQ ID NO: 55813 - protein, 239 aa, Homo sapiens
MATSGRLSFTVRSLLDLPEQDAQHLPRREPEPRAPQPDPCAAWLDSERGHYPSSDESSLETSPPDSSQRPSARPASPGSDAEKRKKRRVLFSKAQTLELERRFRQQRYLSAPEREQLASLLRLTPTQVKIWFQNHRYKLKRARAPGAAESPDLAASAELHAAPGLLRRVVVPVLVRDGQPCGGGGGGEVGTAAAQEKCGAPPAAACPLPGYPAFGPGSALGLFPAYQHLASPALVSWNW

SEQ ID NO: 55814 - protein, 333 aa, Homo sapiens
MAVRGANTLTSFSIQAILNKKEERGGLAAPEGRPAPGGTAASVAAAPAVCCWRLFGERDAGALGGAEDSLLASPAGTRTAAGRTAESPEGWDSDSALSEENESRRRCADARGASGAGLAGGSLSLGQPVCELAASKDLEEEAAGRSDSEMSASVSGDRSPRTEDDGVGPRGAHVSALCSGAGGGGGSGPAGVAEEEEEPAAPKPRKKRSRAAFSHAQVFELERRFNHQRYLSGPERADLAASLKLTETQVKIWFQNRRYKTKRRQMAADLLASAPAAKKVAVKVLVRDDQRQYLPGEVLRPPSLLPLQPSYYYPYYCLPGWALSTCAAAAGTQ

SEQ ID NO: 55815 - protein, 265 aa, Homo sapiens
MESNLQGTFLLNNTPLAQFPEMKAPVCQYSVQNSFYKLSPPGLGPQLAAGTPHGITDILSRPVAAPNNSLLSGYPHVAGFGGLSSQGVYYSPQVGNFSKAGNEYPTRTRNCWADTGQDWRGGRQCSNTPDPLSDSIHKKKHTRPTFTGHQIFALEKTFEQTKYLAGPERARLAYSLGMTESQVKVWFQNRRTKWRKKSALEPSSSTPRAPGGAGAGAGGDRAPSENEDDEYNKPLDPDSDDEKIRLLLRKHRAAFSVLSLGAHSV

SEQ ID NO: 55816 - protein, 135 aa, Homo sapiens
MQQGQLAPGSRLCSGPWGLPELQPAAPSSSAAQLPWGESWGEEADTPACLSASGVWFQNRRTKWRKKSALEPSSSTPRAPGGAGAGAGGDRAPSENEDDEYNKPLDPDSDDEKIRLLLRKHRAAFSVLSLGAHSV

SEQ ID NO: 55817 - protein, 975 aa, Homo sapiens
MRWGHHLPRASWGSGFRRALQRPDDRIPFLIHWSWPLQGERPFGPPRAFIRHHGSSVDSAPPPGRHGRLFPSASATEAIQRHRRNLAEWFSRLPREERQFGPTFALDTVHVDPVIRESTPDELLRPPAELALEHQPPQAGLPPLALSQLFNPDACGRRVQTVVLYGTVGTGKSTLVRKMVLDWCYGRLPAFELLIPFSCEDLSSLGPAPASLCQLVAQRYTPLKEVLPLMAAAGSHLLFVLHGLEHLNLDFRLAGTGLCSDPEEPQEPAAIIVNLLRKYMLPQASILVTTRPSAIGRIPSKYVGRYGEICGFSDTNLQKLYFQLRLNQPYCGYAVGGSGVSATPAQRDHLVQMLSRNLEGHHQIAAACFLPSYCWLVCATLHFLHAPTPAGQTLTSIYTSFLRLNFSGETLDSTDPSNLSLMAYAARTMGKLAYEGVSSRKTYFSEEDVCGCLEAGIRTEEEFQLLHIFRRDALRFFLAPCVEPGRAGTFVFTVPAMQEYLAALYIVLGLRKTTLQKVGKEVAELVGRVGEDVSLVLGIMAKLLPLRALPLLFNLIKVVPRVFGRMVGKSREAVAQAMVLEMFREEDYYNDDVLDQMGASILGVEGPRRHPDEPPEDEVFELFPMFMGGLLSAHNRAVLAQLGCPIKNLDALENAQAIKKKLGKLGRQVLPPSELLDHLFFHYEFQNQRFSAEVLSSLRQLNLAGVRMTPVKCTVVAAVLGSGRHALDEVNLASCQLDPAGLRTLLPVFLRARKLGLQLNSLGPEACKDLRDLLLHDQCQITTLRLSNNPLTAAGVAVLMEGLAGNTSVTHLSLLHTGLGDEGLELLAAQLDRNRQLQELNVAYNGAGDTAALALARAAREHPSLELLHLYFNELSSEGRQVLRDLGGAAEGGARVVVSLTEGTAVSEYWSVILSEVQRNLNSWDRARVQRHLELLLRDLEDSRGATLNPWRKAQLLRVEGEVRALLEQLGSSGS

SEQ ID NO: 55818 - protein, 114 aa, Homo sapiens
GISKLKMVNQCFGLGDGTCLLSIQLEGPKHVAFGWPECPEAPLPTLPPPPLKEPLTVSPRGSHLMSAMPGVSPSRCVGSFPSCLMLTCGHRGCPHIGAFSSSSCPLCHNGMMAW

SEQ ID NO: 55819 - protein, 975 aa, Homo sapiens; identical to SEQ ID NO: 55817

SEQ ID NO: 55820 - protein, 921 aa, Homo sapiens
MRWGHHLPRASWGSGFRRALQRPDDRIPFLIHWSWPLQGERPFGPPRAFIRHHGSSVDSAPPPGRHGRLFPSASATEAIQRHRRNLAEWFSRLPREERQFGPTFALDTVHVDPVIRESTPDELLRPPAELALEHQPPQAGLPPLALSQLFNPDACGRRVQTVVLYGTVGTGKSTLVRKMVLDWCYGRLPAFELLIPFSCEDLSSLGPAPASLCQLVAQRYTPLKEVLPLMAAAGSHLLFVLHGLEHLNLDFRLAGTGLCSDPEEPQEPAAIIVNLLRKYMLPQASILVTTRPSAIGRIPSKYVGRYGEICGFSDTNLQKLYFQLRLNQPYCGYAVGGSGVSATPAQRDHLVQMLSRNLEGHHQIAAACFLPSYCWLVCATLHFLHAPTPAGQTLTSIYTSFLRLNFSGETLDSTDPSNLSLMAYAARTMGKLAYEGVSSRKTYFSEEDVCGCLEAGIRTEEEFQLLHIFRRDALRFFLAPCVEPGRAGTFVFTVPAMQEYLAALYIVLGLRKTTLQKVGKEVAELVGRVGEDVSLVLGIMAKLLPLRALPLLFNLIKVVPRVFGRMVGKSREAVAQAMVLEMFREEDYYNDDVLDQMGASILGVEGPRRHPDEPPEDEVFELFPMFMGGLLSAHNRAVLAQLGCPIKNLDALENAQAIKKKLGKLGRQVLPPSELLDHLFFHYEFQNQRFSAEVLSSLRQLNLAGVRMTPVKCTVVAAVLGSGRHALDEVNLASCQLDPAGLRTLLPVFLRARKLGLQLNSLGPEACKDLRDLLLHDQCQITTLRLSNNPLTAAGVAVLMEGLAGNTSVTHLSLLHTGLGDEGLELLAAQLDRNRQLQELNVAYNGAGDTAALALARAAREHPSLELLQGVAIQMCWKLPLLPYAHLWTPRMPSHWCFLLILMPPLPQWYDGLVAPRGRCT

SEQ ID NO: 55821 - protein, 975 aa, Homo sapiens; identical to SEQ ID NO: 55817

SEQ ID NO: 55822 - protein, 921 aa, Homo sapiens; identical to SEQ ID NO: 55820

SEQ ID NO: 55823 - protein, 1036 aa, Homo sapiens
MKMASTRCKLARYLEDLEDVDLKKFKMHLEDYPPQKGCIPLPRGQTEKADHVDLATLMIDFNGEEKAWAMAVWIFAAINRRDLYEKAKRDEPKWGSDNARVSNPTVICQEDSIEEEWMGLLEYLSRISICKMKKDYRKKYRKYVRSRFQCIEDRNARLGESVSLNKRYTRLRLIKEHRSQQEREQELLAIGKTKTCESPVSPIKMELLFDPDDEHSEPVHTVVFQGAAGIGKTILARKMMLDWASGTLYQDRFDYLFYIHCREVSLVTQRSLGDLIMSCCPDPNPPIHKIVRKPSRILFLMDGFDELQGAFDEHIGPLCTDWQKAERGDILLSSLIRKKLLPEASLLITTRPVALEKLQHLLDHPRHVEILGFSEAKRKEYFFKYFSDEAQARAAFSLIQENEVLFTMCFIPLVCWIVCTGLKQQMESGKSLAQTSKTTTAVYVFFLSSLLQPRGGSQEHGLCAHLWGLCSLAADGIWNQKILFEESDLRNHGLQKADVSAFLRMNLFQKEVDCEKFYSFIHMTFQEFFAAMYYLLEEEKEGRTNVPGSRLKLPSRDVTVLLENYGKFEKGYLIFVVRFLFGLVNQERTSYLEKKLSCKISQQIRLELLKWIEVKAKAKKLQIQPSQLELFYCLYEMQEEDFVQRAMDYFPKIEINLSTRMDHMVSSFCIENCHRVESLSLGFLHNMPKEEEEEEKEGRHLDMVQCVLPSSSHAACSHGLVNSHLTSSFCRGLFSVLSTSQSLTELDLSDNSLGDPGMRVLCETLQHPGCNIRRLWLGRCGLSHECCFDISLVLSSNQKLVELDLSDNALGDFGIRLLCVGLKHLLCNLKKLWLVSCCLTSACCQDLASVLSTSHSLTRLYVGENALGDSGVAILCEKAKNPQCNLQKLGLVNSGLTSVCCSALSSVLSTNQNLTHLYLRGNTLGDKGIKLLCEGLLHPDCKLQVLELDNCNLTSHCCWDLSTLLTSSQSLRKLSLGNNDLGDLGVMMFCEVLKQQSCLLQNLGLSEMYFNYETKSALETLQEEKPELTVVFEPSW

SEQ ID NO: 55824 - protein, 922 aa, Homo sapiens
MKMASTRCKLARYLEDLEDVDLKKFKMHLEDYPPQKGCIPLPRGQTEKADHVDLATLMIDFNGEEKAWAMAVWIFAAINRRDLYEKAKRDEPKWGSDNARVSNPTVICQEDSIEEEWMGLLEYLSRISICKMKKDYRKKYRKYVRSRFQCIEDRNARLGESVSLNKRYTRLRLIKEHRSQQEREQELLAIGKTKTCESPVSPIKMELLFDPDDEHSEPVHTVVFQGAAGIGKTILARKMMLDWASGTLYQDRFDYLFYIHCREVSLVTQRSLGDLIMSCCPDPNPPIHKIVRKPSRILFLMDGFDELQGAFDEHIGPLCTDWQKAERGDILLSSLIRKKLLPEASLLITTRPVALEKLQHLLDHPRHVEILGFSEAKRKEYFFKYFSDEAQARAAFSLIQENEVLFTMCFIPLVCWIVCTGLKQQMESGKSLAQTSKTTTAVYVFFLSSLLQPRGGSQEHGLCAHLWGLCSLAADGIWNQKILFEESDLRNHGLQKADVSAFLRMNLFQKEVDCEKFYSFIHMTFQEFFAAMYYLLEEEKEGRTNVPGSRLKLPSRDVTVLLENYGKFEKGYLIFVVRFLFGLVNQERTSYLEKKLSCKISQQIRLELLKWIEVKAKAKKLQIQPSQLELFYCLYEMQEEDFVQRAMDYFPKIEINLSTRMDHMVSSFCIENCHRVESLSLGFLHNMPKEEEEEEKEGRHLDMVQCVLPSSSHAACSHGLGRCGLSHECCFDISLVLSSNQKLVELDLSDNALGDFGIRLLCVGLKHLLCNLKKLWLVNSGLTSVCCSALSSVLSTNQNLTHLYLRGNTLGDKGIKLLCEGLLHPDCKLQVLELDNCNLTSHCCWDLSTLLTSSQSLRKLSLGNNDLGDLGVMMFCEVLKQQSCLLQNLGLSEMYFNYETKSALETLQEEKPELTVVFEPSW

SEQ ID NO: 55825 - protein, 979 aa, Homo sapiens
MKMASTRCKLARYLEDLEDVDLKKFKMHLEDYPPQKGCIPLPRGQTEKADHVDLATLMIDFNGEEKAWAMAVWIFAAINRRDLYEKAKRDEPKWGSDNARVSNPTVICQEDSIEEEWMGLLEYLSRISICKMKKDYRKKYRKYVRSRFQCIEDRNARLGESVSLNKRYTRLRLIKEHRSQQEREQELLAIGKTKTCESPVSPIKMELLFDPDDEHSEPVHTVVFQGAAGIGKTILARKMMLDWASGTLYQDRFDYLFYIHCREVSLVTQRSLGDLIMSCCPDPNPPIHKIVRKPSRILFLMDGFDELQGAFDEHIGPLCTDWQKAERGDILLSSLIRKKLLPEASLLITTRPVALEKLQHLLDHPRHVEILGFSEAKRKEYFFKYFSDEAQARAAFSLIQENEVLFTMCFIPLVCWIVCTGLKQQMESGKSLAQTSKTTTAVYVFFLSSLLQPRGGSQEHGLCAHLWGLCSLAADGIWNQKILFEESDLRNHGLQKADVSAFLRMNLFQKEVDCEKFYSFIHMTFQEFFAAMYYLLEEEKEGRTNVPGSRLKLPSRDVTVLLENYGKFEKGYLIFVVRFLFGLVNQERTSYLEKKLSCKISQQIRLELLKWIEVKAKAKKLQIQPSQLELFYCLYEMQEEDFVQRAMDYFPKIEINLSTRMDHMVSSFCIENCHRVESLSLGFLHNMPKEEEEEEKEGRHLDMVQCVLPSSSHAACSHGLVNSHLTSSFCRGLFSVLSTSQSLTELDLSDNSLGDPGMRVLCETLQHPGCNIRRLWLGRCGLSHECCFDISLVLSSNQKLVELDLSDNALGDFGIRLLCVGLKHLLCNLKKLWLVNSGLTSVCCSALSSVLSTNQNLTHLYLRGNTLGDKGIKLLCEGLLHPDCKLQVLELDNCNLTSHCCWDLSTLLTSSQSLRKLSLGNNDLGDLGVMMFCEVLKQQSCLLQNLGLSEMYFNYETKSALETLQEEKPELTVVFEPSW

SEQ ID NO: 55826 - protein, 979 aa, Homo sapiens; identical to SEQ ID NO: 55825

SEQ ID NO: 55827 - protein, 979 aa, Homo sapiens
MKMASTRCKLARYLEDLEDVDLKKFKMHLEDYPPQKGCIPLPRGQTEKADHVDLATLMIDFNGEEKAWAMAVWIFAAINRRDLYEKAKRDEPKWGSDNARVSNPTVICQEDSIEEEWMGLLEYLSRISICKMKKDYRKKYRKYVRSRFQCIEDRNARLGESVSLNKRYTRLRLIKEHRSQQEREQELLAIGKTKTCESPVSPIKMELLFDPDDEHSEPVHTVVFQGAAGIGKTILARKMMLDWASGTLYQDRFDYLFYIHCREVSLVTQRSLGDLIMSCCPDPNPPIHKIVRKPSRILFLMDGFDELQGAFDEHIGPLCTDWQKAERGDILLSSLIRKKLLPEASLLITTRPVALEKLQHLLDHPRHVEILGFSEAKRKEYFFKYFSDEAQARAAFSLIQENEVLFTMCFIPLVCWIVCTGLKQQMESGKSLAQTSKTTTAVYVFFLSSLLQPRGGSQEHGLCAHLWGLCSLAADGIWNQKILFEESDLRNHGLQKADVSAFLRMNLFQKEVDCEKFYSFIHMTFQEFFAAMYYLLEEEKEGRTNVPGSRLKLPSRDVTVLLENYGKFEKGYLIFVVRFLFGLVNQERTSYLEKKLSCKISQQIRLELLKWIEVKAKAKKLQIQPSQLELFYCLYEMQEEDFVQRAMDYFPKIEINLSTRMDHMVSSFCIENCHRVESLSLGFLHNMPKEEEEEEKEGRHLDMVQCVLPSSSHAACSHGLGRCGLSHECCFDISLVLSSNQKLVELDLSDNALGDFGIRLLCVGLKHLLCNLKKLWLVSCCLTSACCQDLASVLSTSHSLTRLYVGENALGDSGVAILCEKAKNPQCNLQKLGLVNSGLTSVCCSALSSVLSTNQNLTHLYLRGNTLGDKGIKLLCEGLLHPDCKLQVLELDNCNLTSHCCWDLSTLLTSSQSLRKLSLGNNDLGDLGVMMFCEVLKQQSCLLQNLGLSEMYFNYETKSALETLQEEKPELTVVFEPSW

SEQ ID NO: 55828 - protein, 1036 aa, Homo sapiens; identical to SEQ ID NO: 55823

SEQ ID NO: 55829 - protein, 503 aa, Homo sapiens
MEYMAESTDRSPGHILCCECGVPISPNPANICVACLRSKVDISQGIPKQVSISFCKQCQRYFQPPGTWIQCALESRELLALCLKKIKAPLSKVRLVDAGFVWTEPHSKRLKVKLTIQKEVMNGAILQQVFVVDYVVQSQMCGDCHRVEAKDFWKAVIQVRQKTLHKKTFYYLEQLILKYGMHQNTLRIKEIHDGLDFYYSSKQHAQKMVEFLQCTVPCRYKASQRLISQDIHSNTYNYKSTFSVEIVPICKDNVVCLSPKLAQSLGNMNQICVCIRVTSAIHLIDPNTLQVADIDGSTFWSHPFNSLCHPKQLEEFIVMECSIVQDIKRAAGAGMISKKHTLGEVWVQKTSEMNTDKQYFCRTHLGHLLNPGDLVLGFDLANCNLNDEHVNKMNSDRVPDVVLIKKSYDRTKRQRRRNWKLKELARERENMDTDDERQYQDFLEDLEEDEAIRKNVNIYRDSAIPVESDTDDEGAPRISLAEMLEDLHISQDATGEEGASMLT

SEQ ID NO: 55830 - protein, 503 aa, Homo sapiens; identical to SEQ ID NO: 55829

SEQ ID NO: 55831 - protein, 156 aa, Homo sapiens
MEYMAESTDRSPGHILCCECGVPISPNPANICVACLRSKVDISQGIPKQVSISFCKQCQRYFQPPGTWIQCALESRELLALCLKKIKAPLSKVRLVDAGFVWTEPHSKRLKVKLTIQKEVMNGAILQQVFVVDYVVQSQMCGDCHRVEAKDFWKAV

SEQ ID NO: 55832 - protein, 218 aa, Homo sapiens
MEYMAESTDRSPGHILCCECGVPISPNPANICVACLRSKVDISQGIPKQVSISFCKQCQRYFQPPGTWIQCALESRELLALCLKKIKAPLSKVRLVDAGFVWTEPHSKRLKVKLTIQKEVMNGAILQQVFVVDYVVQSQMCGDCHRVEAKDFWKAVIQVRQKTLHKKTFYYLEQLILKYGMHQNTLRIKEIHDGLDFYYSSKQHAQKMVEFLQCTVPC

SEQ ID NO: 55833 - protein, 98 aa, Homo sapiens
MEYMAESTDRSPGHILCCECGVPISPNPANICVACLRSKVDISQGIPKQVSISFCKQCQRYFQPPGTWIQCALESRELLALCLKKIKAPLSKVRLVDA

SEQ ID NO: 55834 - protein, 162 aa, Homo sapiens
MEYMAESTDRSPGHILCCECGVPISPNPANICVACLRSKVDISQGIPKQVSISFCKQCQRYFQPPGTWIQCALESRELLALCLKKIKAPLSKVRLVDAGFVWTEPHSKRLKVKLTIQKEVMNGAILQQVFVVDYVVQSQMCGDCHRVEAKDFWKAVIQVRQK

SEQ ID NO: 55835 - protein, 218 aa, Homo sapiens; identical to SEQ ID NO: 55832

SEQ ID NO: 55836 - protein, 383 aa, Homo sapiens [sequence omitted]

SEQ ID NO: 55837 - protein, 982 aa, Homo sapiens
MSSKMVISEPGLNWDISPKNGLKTFFSRENYKDHSMAPSLKELRVLSNRRIGENLNASASSVENEPAVSSATQAKEKVKTTIGMVLLPKPRVPYPRFSRFSQREQRSYVDLLVKYAKIPANSKAVGINKNDYLQYLDMKKHVNEEVTEFLKFLQNSAKKCAQDYNMLSDDARLFTEKILRACIEQVKKYSEFYTLHEVTSLMGFFPFRVEMGLKLEKTLLALGSVKYVKTVFPSMPIKLQLSKDDIATIETSEQTAEAMHYDISKDPNAEKLVSRYHPQIALTSQSLFTLLNNHGPTYKEQWEIPVCIQVIPVAGSKPVKVIYINSPLPQKKMTMRERNQIFHEVPLKFMMSKNTSVPVSAVFMDKPEEFISEMDMSCEVNECRKIESLENLYLDFDDDVTELETFGVTTTKVSKSPSPASTSTVPNMTDAPTAPKAGTTTVAPSAPDISANSRSLSQILMEQLQKEKQLVTGMDGGPEECKNKDDQGFESCEKVSNSDKPLIQDSDLKTSDALQLENSQEIETSNKNDMTIDILHADGERPNVLENLDNSKEKTVGSEAAKTEDTVLCSSDTDEECLIIDTECKNNSDGKTAVVGSNLSSRPASPNSSSGQASVGNQTNTACSPEESCVLKKPIKRVYKKFDPVGEILKMQDELLKPISRKVPELPLMNLENSKQPSVSEQLSGPSDSSSWPKSGWPSAFQKPKGRLPYELQDYVEDTSEYLAPQEGNFVYKLFSLQDLLLLVRCSVQRIETRPRSKKRKKIRRQFPVYVLPKVEYQACYGVEALTESELCRLWTESLLHSNSSFYVGHIDAFTSKLFLLEEITSEELKEKLSALKISNLFNILQHILKKLSSLQEGSYLLSHAAEDSSLLIYKASDGKVTRTAYNLYKTHCGLPGVPSSLSVPWVPLDPSLLLPYHIHHGRIPCTFPPKSLDTTTQQKIGGTRMPTRSHRNPVSMETKSSCLPAQQVETEGVAPHKRKIT

SEQ ID NO: 55838 - protein, 845 aa, Homo sapiens
MKKHVNEEVTEFLKFLQNSAKKCAQDYNMLSDDARLFTEKILRACIEQVKKYSEFYTLHEVTSLMGFFPFRVEMGLKLEKTLLALGSVKYVKTVFPSMPIKLQLSKDDIATIETSEQTAEAMHYDISKDPNAEKLVSRYHPQIALTSQSLFTLLNNHGPTYKEQWEIPVCIQVIPVAGSKPVKVIYINSPLPQKKMTMRERNQIFHEVPLKFMMSKNTSVPVSAVFMDKPEEFISEMDMSCEVNECRKIESLENLYLDFDDDVTELETFGVTTTKVSKSPSPASTSTVPNMTDAPTAPKAGTTTVAPSAPDISANSRSLSQILMEQLQKEKQLVTGMDGGPEECKNKDDQGFESCEKVSNSDKPLIQDSDLKTSDALQLENSQEIETSNKNDMTIDILHADGERPNVLENLDNSKEKTVGSEAAKTEDTVLCSSDTDEECLIIDTECKNNSDGKTAVVGSNLSSRPASPNSSSGQASVGNQTNTACSPEESCVLKKPIKRVYKKFDPVGEILKMQDELLKPISRKVPELPLMNLENSKQPSVSEQLSGPSDSSSWPKSGWPSAFQKPKGRLPYELQDYVEDTSEYLAPQEGNFVYKLFSLQDLLLLVRCSVQRIETRPRSKKRKKIRRQFPVYVLPKVEYQACYGVEALTESELCRLWTESLLHSNSSFYVGHIDAFTSKLFLLEEITSEELKEKLSALKISNLFNILQHILKKLSSLQEGSYLLSHAAEDSSLLIYKASDGKVTRTAYNLYKTHCGLPGVPSSLSVPWVPLDPSLLLPYHIHHGRIPCTFPPKSLDTTTQQKIGGTRMPTRSHRNPVSMETKSSCLPAQQVETEGVAPHKRKIT

SEQ ID NO: 55839 - protein, 338 aa, Homo sapiens
MSSKMVISEPGLNWDISPKNGLKTFFSRENYKDHSMAPSLKELRVLSNRRIGENLNASASSVENEPAVSSATQAKEKVKTTIGMVLLPKPRVPYPRFSRFSQREQRSYVDLLVKYAKIPANSKAVGINKNDYLQYLDMKKHVNEEVTEFLKFLQNSAKKCAQDYNMLSDDARLFTEKILRACIEQVKKYSEFYTLHEVTSLMGFFPFRVEMGLKLEKTLLALGSVKYVKTVFPSMPIKLQLSKDDIATIETSEQTAEAMHYDISKDPNAEKLVSRYHPQIALTSQSLFTLLNNHGPTYKEQWEIPVCIQVIPVAGSKPVKVIYINSPLPQKKMTMRER

SEQ ID NO: 55840 - protein, 145 aa, Homo sapiens
MSSKMVISEPGLNWDISPKNGLKTFFSRENYKDHSMAPSLKELRVLSNRRIGENLNASASSVENEPAVSSATQAKEKVKTTIGMVLLPKPRVPYPRFSRFSQREQRSYVDLLVKYAKIPANSKAVGINKNDYLQYLDMKKHVNEE

SEQ ID NO: 55841 - protein, 99 aa, Homo sapiens
MSSKMVISEPGLNWDISPKNGLKTFFSRENYKDHSMAPSLKELRVLSNRRIGENLNASASSVENEPAVSSATQAKEKVKTTIGMVLLPKPRVPYPRFSR

SEQ ID NO: 55842 - protein, 94 aa, Homo sapiens
MSSKMVISEPGLNWDISPKNGLKTFFSRENYKDHSMAPSLKELRVLSNRRIGENLNASASSVENEPAVSSATQAKEKVKTTIGMVLLPKPRVPY

SEQ ID NO: 55843 - protein, 281 aa, Homo sapiens
MGQKKQRPARAGQPHSSSDAAQAPAEQPHSSSDAAQAPCPRERCLGPPTTPGPYRSIYFSSPKGHLTRLGLEFFDQPAVPLARAFLGQVLVRRLPNGTELRGRIVETEAYLGPEDEAAHSRGGRQTPRNRGMFMKPGTLYVYIIYGMYFCMNISSQGDGACVLLRALEPLEGLETMRQLRSTLRKGTASRVLKDRELCSGPSKLCQALAINKSFDQRDLAQDEAVWLERGPLEPSEPAVVAAARVGVGHAGEWARKPLRFYVRGSPWVSVVDRVAEQDTQA

SEQ ID NO: 55844 - protein, 307 aa, Homo sapiens
MEADKDDTQQILKEHSPDEFIKDEQNKGLIDEITKKNIQLKKEIQKLETELQEATKEFQIKEDIPETKMKFLSVETPENDSQLSNISCSFQVSSKVPYEIQKGQALITFEKEEVAQNVVSMSKHHVQIKDVNLEVTAKPVPLNSGVRFQVYVEVSKMKINVTEIPDTLREDQMRDKLELSFSKSRNGGGEVDRVDYDRQSGSAVITFVEIGVADKILKKKEYPLYINQTCHRVTVSPYTEIHLKKYQIFSGTSKRTVLLTGMEGIQMDEEIVEDLINIHFQRAKNGGGEVDVVKCSLGQPHIAYFEE

SEQ ID NO: 55845 - protein, 29 aa, Homo sapiens
MEADKDDTQQILKEHSPDEFIKDEQNKGL

SEQ ID NO: 55846 - protein, 394 aa, Homo sapiens
MSREMQDVDLAEVKPLVEKGETITGLLQEFDVQEQDIETLHGSVHVTLCGTPKGNRPVILTYHDIGMNHKTCYNPLFNYEDMQEITQHFAVCHVDAPGQQDGAASFPAGYMYPSMDQLAEMLPGVLQQFGLKSIIGMGTGAGAYILTRFALNNPEMVEGLVLINVNPCAEGWMDWAASKISGWTQALPDMVVSHLFGKEEMQSNVEVVHTYRQHIVNDMNPGNLHLFINAYNSRRDLEIERPMPGTHTVTLQCPALLVVGDSSPAVDAVVECNSKLDPTKTTLLKMADCGGLPQISQPAKLAEAFKYFVQGMGYMPSASMTRLMRSRTASGSSVTSLDGTRSRSHTSEGTRSRSHTSEGTRSRSHTSEGAHLDITPNSGAAGNSAGPKSMEVSC

SEQ ID NO: 55847 - protein, 324 aa, Homo sapiens
MSREMQDVDLAEVKPLVEKGETITGLLQEFDVQEQDIETLHGSVHVTLCGTPKGNRPVILTYHDIGMNHKTCAYILTRFALNNPEMVEGLVLINVNPCAEGWMDWAASKISGWTQALPDMVVSHLFGKEEMQSNVEVVHTYRQHIVNDMNPGNLHLFINAYNSRRDLEIERPMPGTHTVTLQCPALLVVGDSSPAVDAVVECNSKLDPTKTTLLKMADCGGLPQISQPAKLAEAFKYFVQGMGYMPSASMTRLMRSRTASGSSVTSLDGTRSRSHTSEGTRSRSHTSEGTRSRSHTSEGAHLDITPNSGAAGNSAGPKSMEVSC

SEQ ID NO: 55848 - protein, 394 aa, Homo sapiens; identical to SEQ ID NO: 55846
